United States Patent Application Publication US 2007/0009899 A1 - sequence listing, part 5

SEQ ID NO: 49554 - DNA, 25 bp, Canis familiaris
aagctaatccactatagtctttaaa

SEQ ID NO: 49555 - DNA, 25 bp, Canis familiaris
aaccaatccaactaatcctgtaatt

SEQ ID NO: 49556 - DNA, 25 bp, Canis familiaris
aaccaatacgaatacaatctagttg

SEQ ID NO: 49557 - DNA, 25 bp, Canis familiaris
aaccaataccaataccatctagttg

SEQ ID NO: 49558 - DNA, 25 bp, Canis familiaris
aaccataacccatagtcacatactt

SEQ ID NO: 49559 - DNA, 25 bp, Canis familiaris
aaccacccgcaaaagaccagagctg

SEQ ID NO: 49560 - DNA, 25 bp, Canis familiaris
aaccacggacagaccaggcacatgg

SEQ ID NO: 49561 - DNA, 25 bp, Canis familiaris
aagccaacgtcgccaaggcagaggc

SEQ ID NO: 49562 - DNA, 25 bp, Canis familiaris
aagcggggctcaggcaaggatggac

SEQ ID NO: 49563 - DNA, 25 bp, Canis familiaris
aaccaggagctggcgcaaggagcgc

SEQ ID NO: 49564 - DNA, 25 bp, Canis familiaris
aaccacatggtggctcacaaccatc

SEQ ID NO: 49565 - DNA, 25 bp, Canis familiaris
aaccagcatgggctacaacacaata

SEQ ID NO: 49566 - DNA, 25 bp, Canis familiaris
aaccactcagagaccaaacgctaga

SEQ ID NO: 49567 - DNA, 25 bp, Canis familiaris
aagccaaaagattcaaagcctatgt

SEQ ID NO: 49568 - DNA, 25 bp, Canis familiaris
aaccaaagccatccagaatacgatt

SEQ ID NO: 49569 - DNA, 25 bp, Canis familiaris
caagctcaaggccaggaaaatcgtg

SEQ ID NO: 49570 - DNA, 25 bp, Canis familiaris
aaccaggggaggtagcacactgctg

SEQ ID NO: 49571 - DNA, 25 bp, Canis familiaris
aagcaaacgcaaagaagcaccctac

SEQ ID NO: 49572 - DNA, 25 bp, Canis familiaris
aagccaacctattgtaagccctgga

SEQ ID NO: 49573 - DNA, 25 bp, Canis familiaris
aaccaacgatttaaacccagatgag

SEQ ID NO: 49574 - DNA, 25 bp, Canis familiaris
aagccaatctttcttcaagccaaaa

SEQ ID NO: 49575 - DNA, 25 bp, Canis familiaris
aagccagtcctcaaattcacatgta

SEQ ID NO: 49576 - DNA, 25 bp, Canis familiaris
aagccagttgccatgtttgctgctg

SEQ ID NO: 49577 - DNA, 25 bp, Canis familiaris
aaccagttgtcatttctgtcttgcc

SEQ ID NO: 49578 - DNA, 25 bp, Canis familiaris
aaccagggtgcaaggcattcgtgcc

SEQ ID NO: 49579 - DNA, 25 bp, Canis familiaris
aagccagggagaaccttcggctatt

SEQ ID NO: 49580 - DNA, 25 bp, Canis familiaris
aagccagagggcaagcccatcagcc

SEQ ID NO: 49581 - DNA, 25 bp, Canis familiaris
aagccaagaggtagccctacactga

SEQ ID NO: 49582 - DNA, 25 bp, Canis familiaris
aagccaaagccaatgctcatttact

SEQ ID NO: 49583 - DNA, 25 bp, Canis familiaris
aagctcataagctcgcctataacat

SEQ ID NO: 49584 - DNA, 25 bp, Canis familiaris
aaccatcactagcctcgaataacat

SEQ ID NO: 49585 - DNA, 25 bp, Canis familiaris
aaccatcctcccagagtatctctgg

SEQ ID NO: 49586 - DNA, 25 bp, Canis familiaris
aaccacctccagagagctggctcta

SEQ ID NO: 49587 - DNA, 25 bp, Canis familiaris
aaccatgccatcatgggcgtcgctt

SEQ ID NO: 49588 - DNA, 25 bp, Canis familiaris
aaccacccggggctgctgctgatgg

SEQ ID NO: 49589 - DNA, 25 bp, Canis familiaris
aaccacccttctgggtgccatgagg

SEQ ID NO: 49590 - DNA, 25 bp, Canis familiaris
aaccacgcctttaggacacagtgtc

SEQ ID NO: 49591 - DNA, 25 bp, Canis familiaris
aagctgcacgaaaactggaacagtt

SEQ ID NO: 49592 - DNA, 25 bp, Canis familiaris
aagctgcacgagaaactggaaccgt

SEQ ID NO: 49593 - DNA, 25 bp, Canis familiaris
aagcccgaggcatcaaaagccggga

SEQ ID NO: 49594 - DNA, 25 bp, Canis familiaris
aaccactatggaacaaagcccaggg

SEQ ID NO: 49595 - DNA, 25 bp, Canis familiaris
aaccacattgacacacacagaccgg

SEQ ID NO: 49596 - DNA, 25 bp, Canis familiaris
aaccaactggccgacataacgccgt

SEQ ID NO: 49597 - DNA, 25 bp, Canis familiaris
aaccacacctgctgaatcaggctca

SEQ ID NO: 49598 - DNA, 25 bp, Canis familiaris
aaccaggcctgtgatgagcacgcca

SEQ ID NO: 49599 - DNA, 25 bp, Canis familiaris
aaccagcagcgctggcagaactcca

SEQ ID NO: 49600 - DNA, 25 bp, Canis familiaris
aagccagtgccaaggataacttcaa

SEQ ID NO: 49601 - DNA, 25 bp, Canis familiaris
aagccactccaaaaaatttctcaat

SEQ ID NO: 49602 - DNA, 25 bp, Canis familiaris
aagtccccagaatacagtactagtt

SEQ ID NO: 49603 - DNA, 25 bp, Canis familiaris
aagtccctaacagactgttccaggt

SEQ ID NO: 49604 - DNA, 25 bp, Canis familiaris
aagctccttgaatctacttgtgggg

SEQ ID NO: 49605 - DNA, 25 bp, Canis familiaris
aagagcctgtgatagttactgtggg

SEQ ID NO: 49606 - DNA, 25 bp, Canis familiaris
aagctgccaggttctttggcgtgtg

SEQ ID NO: 49607 - DNA, 25 bp, Canis familiaris
aagctgacattgatcgttgggtccc

SEQ ID NO: 49608 - DNA, 25 bp, Canis familiaris
aagcgacattgttggtcaagaaacc

SEQ ID NO: 49609 - DNA, 25 bp, Canis familiaris
aagcgtctttagactagtgcctcac

SEQ ID NO: 49610 - DNA, 25 bp, Canis familiaris
aagcgttttaatggactgcagtatc

SEQ ID NO: 49611 - DNA, 25 bp, Canis familiaris
aagctttctggcttctgactagaag

SEQ ID NO: 49612 - DNA, 25 bp, Canis familiaris
aagctttccggtatctagaatgtgt

SEQ ID NO: 49613 - DNA, 25 bp, Canis familiaris
aagaagcccggaaactgaaattgat

SEQ ID NO: 49614 - DNA, 25 bp, Canis familiaris
aagcaagtcctggttaaactctgtt

SEQ ID NO: 49615 - DNA, 25 bp, Canis familiaris
aagccactcctgataactaatcttt

SEQ ID NO: 49616 - DNA, 25 bp, Canis familiaris
aagccattgttcattcctaattttg

SEQ ID NO: 49617 - DNA, 25 bp, Canis familiaris
aagccactgtgatttactatttttt

SEQ ID NO: 49618 - DNA, 25 bp, Canis familiaris
aagcgaactattaccattttctgtt

SEQ ID NO: 49619 - DNA, 25 bp, Canis familiaris
aagaagcagactgcccgttatcctt

SEQ ID NO: 49620 - DNA, 25 bp, Canis familiaris
aagctaggcctgggcatcgatgaag

SEQ ID NO: 49621 - DNA, 25 bp, Canis familiaris
aagccattgccttggcacaagaagg

SEQ ID NO: 49622 - DNA, 25 bp, Canis familiaris
aagccttggcttccaatctgatggg

SEQ ID NO: 49623 - DNA, 25 bp, Canis familiaris
aagcctgtggttcttatgagggtga

SEQ ID NO: 49624 - DNA, 25 bp, Canis familiaris
aatccatgctttgtttagggagtga

SEQ ID NO: 49625 - DNA, 25 bp, Canis familiaris
aagccactgcttgtttagtgtggta

SEQ ID NO: 49626 - DNA, 25 bp, Canis familiaris
aagcctatgttggtggggtctggga

SEQ ID NO: 49627 - DNA, 25 bp, Canis familiaris
aagcctcattctttgtggttctgtg

SEQ ID NO: 49628 - DNA, 25 bp, Canis familiaris
aagcgtctggctgttggttttggct

SEQ ID NO: 49629 - DNA, 25 bp, Canis familiaris
caagctgttggcaggttggttccct

SEQ ID NO: 49630 - DNA, 25 bp, Canis familiaris
aagctgccggcaaaggggatgtccc

SEQ ID NO: 49631 - DNA, 25 bp, Canis familiaris
aagctgccggcaaaggggatgtccc

SEQ ID NO: 49632 - DNA, 25 bp, Canis familiaris
aagctgggtgaaatgtggtctgaac

SEQ ID NO: 49633 - DNA, 25 bp, Canis familiaris
aagtactgtgaagcgtggcgaaccg

SEQ ID NO: 49634 - DNA, 25 bp, Canis familiaris
aagccggttctcagttcagatgttc

SEQ ID NO: 49635 - DNA, 25 bp, Canis familiaris
aagcccagctttaagatttctttct

SEQ ID NO: 49636 - DNA, 25 bp, Canis familiaris
aagccctttgtatagtcattttctc

SEQ ID NO: 49637 - DNA, 25 bp, Canis familiaris
aagcctttgaaatcacagctttttc

SEQ ID NO: 49638 - DNA, 25 bp, Canis familiaris
aagccttttaaccaactgctgcctt

SEQ ID NO: 49639 - DNA, 25 bp, Canis familiaris
aagccttattcattacaatctccct

SEQ ID NO: 49640 - DNA, 25 bp, Canis familiaris
aagctactgttttacaggtgctcct

SEQ ID NO: 49641 - DNA, 25 bp, Canis familiaris
aagctacagctttgaacagaggttt

SEQ ID NO: 49642 - DNA, 25 bp, Canis familiaris
aagctttcgctatacagaggatgtt

SEQ ID NO: 49643 - DNA, 25 bp, Canis familiaris
aagccagctgcacaaccatgggatt

SEQ ID NO: 49644 - DNA, 25 bp, Canis familiaris
aaccagcgccatttcaagggacatt

SEQ ID NO: 49645 - DNA, 25 bp, Canis familiaris
aagccagcccaggccaaggtagttt

SEQ ID NO: 49646 - DNA, 25 bp, Canis familiaris
aagccacctgaggctgggtggagat

SEQ ID NO: 49647 - DNA, 25 bp, Canis familiaris
aagctgccgtcataggcgatgagag

SEQ ID NO: 49648 - DNA, 25 bp, Canis familiaris
aagcttcggcaactgctccagaagt

SEQ ID NO: 49649 - DNA, 25 bp, Canis familiaris
aagcttgcgagataccaagtgatgc

SEQ ID NO: 49650 - DNA, 25 bp, Canis familiaris
aagcttccgcaggagcgaaggtaac

SEQ ID NO: 49651 - DNA, 25 bp, Canis familiaris
aagctctccagaggtgaaaggctat

SEQ ID NO: 49652 - DNA, 25 bp, Canis familiaris
aagcctgcctagagtacatgtcttt

SEQ ID NO: 49653 - DNA, 25 bp, Canis familiaris
aagcagccgatcaaagtccagatct

SEQ ID NO: 49654 - DNA, 25 bp, Canis familiaris
aagccctatagaatgtgcaaatgca

SEQ ID NO: 49655 - DNA, 25 bp, Canis familiaris
aaccagcgctgatcttgcaaagcac

SEQ ID NO: 49656 - DNA, 25 bp, Canis familiaris
aaccacgtgtcctatcattaatcga

SEQ ID NO: 49657 - DNA, 25 bp, Canis familiaris
aagccaatcagtgacatcattcaat

SEQ ID NO: 49658 - DNA, 25 bp, Canis familiaris
aagccaaagcaccaatctggaggga

SEQ ID NO: 49659 - DNA, 25 bp, Canis familiaris
aagccaactctacactgagggcaga

SEQ ID NO: 49660 - DNA, 25 bp, Canis familiaris
aagcaaatgccctctcgtgggagac

SEQ ID NO: 49661 - DNA, 25 bp, Canis familiaris
aagaggaccctgaactgggccagac

SEQ ID NO: 49662 - DNA, 25 bp, Canis familiaris
aagaaacgtcgaactcggtctgcct

SEQ ID NO: 49663 - DNA, 25 bp, Canis familiaris
caaaatcacgtctcttccgttttgt

SEQ ID NO: 49664 - DNA, 25 bp, Canis familiaris
aatacaacggttctcaagctttagt

SEQ ID NO: 49665 - DNA, 25 bp, Canis familiaris
aagccaagggtatccaagttggact

SEQ ID NO: 49666 - DNA, 25 bp, Canis familiaris
aaccacagaaaatccaagtctggcc

SEQ ID NO: 49667 - DNA, 25 bp, Canis familiaris
aaccaagaacattctcaattgtgtg

SEQ ID NO: 49668 - DNA, 25 bp, Canis familiaris
aaccaagcctcatggatgagtggtg

SEQ ID NO: 49669 - DNA, 25 bp, Canis familiaris
aaccagatgcccgagaggcattttg

SEQ ID NO: 49670 - DNA, 25 bp, Canis familiaris
aagccagatgcatcacaggagccat

SEQ ID NO: 49671 - DNA, 25 bp, Canis familiaris
aagccaggcaaaggcgacctactac

SEQ ID NO: 49672 - DNA, 25 bp, Canis familiaris
aagccatagcagttggccacgctga

SEQ ID NO: 49673 - DNA, 25 bp, Canis familiaris
aagccatcagaacttgctacttaag

SEQ ID NO: 49674 - DNA, 25 bp, Canis familiaris
aagccactgaaggatgctcctcatc

SEQ ID NO: 49675 - DNA, 25 bp, Canis familiaris
aagccgctgcaagcagtgtctcaat

SEQ ID NO: 49676 - DNA, 25 bp, Canis familiaris
aagccatgatcaagctcggcttcca

SEQ ID NO: 49677 - DNA, 25 bp, Canis familiaris
aagctcagtaactgtgcttctaccc

SEQ ID NO: 49678 - DNA, 25 bp, Canis familiaris
aagctgcctaattcagttttacgtc

SEQ ID NO: 49679 - DNA, 25 bp, Canis familiaris
aagcacgtcagttaggatttccttc

SEQ ID NO: 49680 - DNA, 25 bp, Canis familiaris
aagcatcagccggtcagtgtgttta

SEQ ID NO: 49681 - DNA, 25 bp, Canis familiaris
aagcagcgcctgtaagctgtgtccc

SEQ ID NO: 49682 - DNA, 25 bp, Canis familiaris
aagcccacgcaggcagatggagccc

SEQ ID NO: 49683 - DNA, 25 bp, Canis familiaris
aagcctcaccggggagatgagcacc

SEQ ID NO: 49684 - DNA, 25 bp, Canis familiaris
aagcgtgctccgcgaaagagccgcg

SEQ ID NO: 49685 - DNA, 25 bp, Canis familiaris
aagcgctctctgtggaagacacgtg

SEQ ID NO: 49686 - DNA, 25 bp, Canis familiaris
aagccttcttgggaaacacattgca

SEQ ID NO: 49687 - DNA, 25 bp, Canis familiaris
aagcctagctttcaaaatcattgtt

SEQ ID NO: 49688 - DNA, 25 bp, Canis familiaris
aagccaagttccatccaatctatgt

SEQ ID NO: 49689 - DNA, 25 bp, Canis familiaris
aagccaggcttccaaagcactgttg

SEQ ID NO: 49690 - DNA, 25 bp, Canis familiaris
aaccaagctatccaacatcttgttc

SEQ ID NO: 49691 - DNA, 25 bp, Canis familiaris
aagccaactctagagcatcctgttc

SEQ ID NO: 49692 - DNA, 25 bp, Canis familiaris
aagcaaacacgagagccttttgctc

SEQ ID NO: 49693 - DNA, 25 bp, Canis familiaris
aaccaagagcgcatagccttgtccc

SEQ ID NO: 49694 - DNA, 25 bp, Canis familiaris
aagccaaaaatcttcacttgctccc

SEQ ID NO: 49695 - DNA, 25 bp, Canis familiaris
aagcttcaatgaatccacacctgct

SEQ ID NO: 49696 - DNA, 25 bp, Canis familiaris
aagctatcttattctgccagtcagt

SEQ ID NO: 49697 - DNA, 25 bp, Canis familiaris
aagcaacgtctagtgcggtactacc

SEQ ID NO: 49698 - DNA, 25 bp, Canis familiaris
aagcatgacatggcgaatgggcata

SEQ ID NO: 49699 - DNA, 25 bp, Canis familiaris
aatcatgcagccccaatgtaaacgt

SEQ ID NO: 49700 - DNA, 25 bp, Canis familiaris
aagctgaccgtctttgaaagcgaca

SEQ ID NO: 49701 - DNA, 25 bp, Canis familiaris
aagctgatccttcttatattcaatc

SEQ ID NO: 49702 - DNA, 25 bp, Canis familiaris
aagccatgtctaaatttcatacgat

SEQ ID NO: 49703 - DNA, 25 bp, Canis familiaris
aagccagtctgggatgttcaaggga

SEQ ID NO: 49704 - DNA, 25 bp, Canis familiaris
aagccagtggcagataccaggggtc

SEQ ID NO: 49705 - DNA, 25 bp, Canis familiaris
aagcacagggggaaccttgggcaca

SEQ ID NO: 49706 - DNA, 25 bp, Canis familiaris
aagccgtggtggaggccatggactt

SEQ ID NO: 49707 - DNA, 25 bp, Canis familiaris
aagccaggggctaagccagctctac

SEQ ID NO: 49708 - DNA, 25 bp, Canis familiaris
aagccaggatttagaaagctcttct

SEQ ID NO: 49709 - DNA, 25 bp, Canis familiaris
aagccaggtgcctgaagaccttcag

SEQ ID NO: 49710 - DNA, 25 bp, Canis familiaris
aagccgtgtccgaaggaccaggcac

SEQ ID NO: 49711 - DNA, 25 bp, Canis familiaris
aaccacttccagttgtgagccaaga

SEQ ID NO: 49712 - DNA, 25 bp, Canis familiaris
aaccaacaccagaggtccagagcga

SEQ ID NO: 49713 - DNA, 25 bp, Canis familiaris
aagccaagcctgcccaggttcaggc

SEQ ID NO: 49714 - DNA, 25 bp, Canis familiaris
aagccaagccgtggcatggaccgtg

SEQ ID NO: 49715 - DNA, 25 bp, Canis familiaris
aagcgcgtgagcgtgcgctggagcg

SEQ ID NO: 49716 - DNA, 25 bp, Canis familiaris
aagcagtggctggtgcagcggtgct

SEQ ID NO: 49717 - DNA, 25 bp, Canis familiaris
aagcagggtgtaagggtgctccctt

SEQ ID NO: 49718 - DNA, 25 bp, Canis familiaris
aagcggggagagactcgagcccttt

SEQ ID NO: 49719 - DNA, 25 bp, Canis familiaris
aaggagtctagtcttggccttagct

SEQ ID NO: 49720 - DNA, 25 bp, Canis familiaris
aagaagcccaggctctgggcctacc

SEQ ID NO: 49721 - DNA, 25 bp, Canis familiaris
aagcaggcccgagccgcctggatac

SEQ ID NO: 49722 - DNA, 25 bp, Canis familiaris
aagaaccggagagtccctagtgcac

SEQ ID NO: 49723 - DNA, 25 bp, Canis familiaris
aagtagcggtgtccatgacctaggc

SEQ ID NO: 49724 - DNA, 25 bp, Canis familiaris
aagaacgatttcgtgccttagcgcc

SEQ ID NO: 49725 - DNA, 25 bp, Canis familiaris
aagtatggctttgtccctagactca

SEQ ID NO: 49726 - DNA, 25 bp, Canis familiaris
aagctaactttggttctccagagaa

SEQ ID NO: 49727 - DNA, 25 bp, Canis familiaris
aagcttccttagaattgctacagaa

SEQ ID NO: 49728 - DNA, 25 bp, Canis familiaris
aagccttatttgaaccatacataat

SEQ ID NO: 49729 - DNA, 25 bp, Canis familiaris
aagcctctatacatactaaccaata

SEQ ID NO: 49730 - DNA, 25 bp, Canis familiaris
aagcgtctgaagatactctaccatg

SEQ ID NO: 49731 - DNA, 25 bp, Canis familiaris
aagccctgtaattttgctgaccgac

SEQ ID NO: 49732 - DNA, 25 bp, Canis familiaris
aagcccagaatactttcatgacatt

SEQ ID NO: 49733 - DNA, 25 bp, Canis familiaris
aagcccgttcatgttcagagttact

SEQ ID NO: 49734 - DNA, 25 bp, Canis familiaris
aagccactttgagggtagactttgt

SEQ ID NO: 49735 - DNA, 25 bp, Canis familiaris
aagcagccttggaggttgccttggt

SEQ ID NO: 49736 - DNA, 25 bp, Canis familiaris
aagcacctcggtgtgtgttcaggga

SEQ ID NO: 49737 - DNA, 25 bp, Canis familiaris
aagccctggactgagtttagagaca

SEQ ID NO: 49738 - DNA, 25 bp, Canis familiaris
aagccacggcctttgaatgtaacca

SEQ ID NO: 49739 - DNA, 25 bp, Canis familiaris
aagccacggaattgctaagtatatt

SEQ ID NO: 49740 - DNA, 25 bp, Canis familiaris
aagccaagccaacctattgtaagcc

SEQ ID NO: 49741 - DNA, 25 bp, Canis familiaris
aaccaaccaatgtgttgtagaccta

SEQ ID NO: 49742 - DNA, 25 bp, Canis familiaris
aagcttgtccaatcgtctggaacct

SEQ ID NO: 49743 - DNA, 25 bp, Canis familiaris
aagccctccaaagagctgaaacctc

SEQ ID NO: 49744 - DNA, 25 bp, Canis familiaris
aagcctggtacataagcgatatttc

SEQ ID NO: 49745 - DNA, 25 bp, Canis familiaris
aagcctggtccatctaagctgagtt

SEQ ID NO: 49746 - DNA, 25 bp, Canis familiaris
aagctccgcccatcactatggagtt

SEQ ID NO: 49747 - DNA, 25 bp, Canis familiaris
aagcccccagagaagctgatgagag

SEQ ID NO: 49748 - DNA, 25 bp, Canis familiaris
aagcccacaagaaacctgaggccac

SEQ ID NO: 49749 - DNA, 25 bp, Canis familiaris
aagcccaaggttctctaggagccta

SEQ ID NO: 49750 - DNA, 25 bp, Canis familiaris
aagcccaagaagtgtgcccggcgtt

SEQ ID NO: 49751 - DNA, 25 bp, Canis familiaris
aagcctaaaatatttgctatctggc

SEQ ID NO: 49752 - DNA, 25 bp, Canis familiaris
aagccttataactctgcttcgtcta

SEQ ID NO: 49753 - DNA, 25 bp, Canis familiaris
aagccttaaatgtactgtaagcctc

SEQ ID NO: 49754 - DNA, 25 bp, Canis familiaris
aagccttccggcgcataaagtcagc

SEQ ID NO: 49755 - DNA, 25 bp, Canis familiaris
aaccaactgcgggccaaggagccca

SEQ ID NO: 49756 - DNA, 25 bp, Canis familiaris
aaccaatgtggaactcagaccccca

SEQ ID NO: 49757 - DNA, 25 bp, Canis familiaris
aagtcagttataagctagcccccta

SEQ ID NO: 49758 - DNA, 25 bp, Canis familiaris
aagacaggattcactagcacccaac

SEQ ID NO: 49759 - DNA, 25 bp, Canis familiaris
aagccaggagtcaacaatgcctcca

SEQ ID NO: 49760 - DNA, 25 bp, Canis familiaris
aagcgaggagtttggacttctgcag

SEQ ID NO: 49761 - DNA, 25 bp, Canis familiaris
aagctctgggtatagacatccgcgc

SEQ ID NO: 49762 - DNA, 25 bp, Canis familiaris
aagcttgtcggaatgaatccctccc

SEQ ID NO: 49763 - DNA, 25 bp, Canis familiaris
aagcctgagagtctgaagtcacccc

SEQ ID NO: 49764 - DNA, 25 bp, Canis familiaris
aagcctggagctttgatagttctaa

SEQ ID NO: 49765 - DNA, 25 bp, Canis familiaris
aagcctcaagctggattcggtcata

SEQ ID NO: 49766 - DNA, 25 bp, Canis familiaris
aagcagccaaggtttcggtctaagt

SEQ ID NO: 49767 - DNA, 25 bp, Canis familiaris
aagatgggggagttcaggtcgggct

SEQ ID NO: 49768 - DNA, 25 bp, Canis familiaris
aagccggacgagttcgagtccggca

SEQ ID NO: 49769 - DNA, 25 bp, Canis familiaris
aagccggacacgtttcagttgccga

SEQ ID NO: 49770 - DNA, 25 bp, Canis familiaris
aagtgcggagacatggccgtggcct

SEQ ID NO: 49771 - DNA, 25 bp, Canis familiaris
aagctggaggacattgccttgcctt

SEQ ID NO: 49772 - DNA, 25 bp, Canis familiaris
aagctgtacagactttgcggtgtta

SEQ ID NO: 49773 - DNA, 25 bp, Canis familiaris
aagctgctaacattttcaagctctt

SEQ ID NO: 49774 - DNA, 25 bp, Canis familiaris
aagctgccaaatatgacgagcagtc

SEQ ID NO: 49775 - DNA, 25 bp, Canis familiaris
aagcccataacactgcaatagcata

SEQ ID NO: 49776 - DNA, 25 bp, Canis familiaris
aagccctacacactcatgagcatgg

SEQ ID NO: 49777 - DNA, 25 bp, Canis familiaris
aagccactccaactatggtattggc

SEQ ID NO: 49778 - DNA, 25 bp, Canis familiaris
aagccaaggcattctaagtatattc

SEQ ID NO: 49779 - DNA, 25 bp, Canis familiaris
aagccacaagcatgcttagccattt

SEQ ID NO: 49780 - DNA, 25 bp, Canis familiaris
aagccaacagatgggtcaccttgac

SEQ ID NO: 49781 - DNA, 25 bp, Canis familiaris
aagcatagatcgaggtcccggtctc

SEQ ID NO: 49782 - DNA, 25 bp, Canis familiaris
aaccaatcatgtctgttcccaggct

SEQ ID NO: 49783 - DNA, 25 bp, Canis familiaris
aagcctgtattcatgtaccgagtgc

SEQ ID NO: 49784 - DNA, 25 bp, Canis familiaris
aagccaggcattggttgacggaagt

SEQ ID NO: 49785 - DNA, 25 bp, Canis familiaris
aagccagaaatgctgcggatgtgaa

SEQ ID NO: 49786 - DNA, 25 bp, Canis familiaris
aagtcaaagcagccctggcgtgaca

SEQ ID NO: 49787 - DNA, 25 bp, Canis familiaris
aaccaattgagcgttccatgtgtca

SEQ ID NO: 49788 - DNA, 25 bp, Canis familiaris
aagcctttgagcttgatccgtgtca

SEQ ID NO: 49789 - DNA, 25 bp, Canis familiaris
aagcacgatgggctgttcgagtcct

SEQ ID NO: 49790 - DNA, 25 bp, Canis familiaris
aagccacagaacgagttccagctcc

SEQ ID NO: 49791 - DNA, 25 bp, Canis familiaris
aagcccagagagtcaaaccactaca

SEQ ID NO: 49792 - DNA, 25 bp, Canis familiaris
aagcccagagcacagtagaactaat

SEQ ID NO: 49793 - DNA, 25 bp, Canis familiaris
aagcaccaggcacagtttgaccaat

SEQ ID NO: 49794 - DNA, 25 bp, Canis familiaris
aagcctcaggctttctattacaaga

SEQ ID NO: 49795 - DNA, 25 bp, Canis familiaris
aagcccagtctgtattctctaagta

SEQ ID NO: 49796 - DNA, 25 bp, Canis familiaris
aagcccgtctggctggtgagaggca

SEQ ID NO: 49797 - DNA, 25 bp, Canis familiaris
aagcaacttcgggtgtggaagagct

SEQ ID NO: 49798 - DNA, 25 bp, Canis familiaris
aagctccttgagcgtgtgggtcagt

SEQ ID NO: 49799 - DNA, 25 bp, Canis familiaris
aagcgcctgcggcagagtggggaag

SEQ ID NO: 49800 - DNA, 25 bp, Canis familiaris
aagcgcaagcggctcaatgtggctg

SEQ ID NO: 49801 - DNA, 25 bp, Canis familiaris
aagccgaggcgtcacaggtgatggc

SEQ ID NO: 49802 - DNA, 25 bp, Canis familiaris
aagccagacggtaaagcctctgcct

SEQ ID NO: 49803 - DNA, 25 bp, Canis familiaris
aagcctgggttcagagcctatgctc

SEQ ID NO: 49804 - DNA, 25 bp, Canis familiaris
aagcctgcctggtggaggctgtgct

SEQ ID NO: 49805 - DNA, 25 bp, Canis familiaris
aagccagcttagtggggcttcctgc

SEQ ID NO: 49806 - DNA, 25 bp, Canis familiaris
aagcctgtgtaagcgtggtgctcct

SEQ ID NO: 49807 - DNA, 25 bp, Canis familiaris
aagcctgctgggaggtggagtccat

SEQ ID NO: 49808 - DNA, 25 bp, Canis familiaris
aagcttgaggtttggtacagataca

SEQ ID NO: 49809 - DNA, 25 bp, Canis familiaris
aagcttaagctattgacccagtcac

SEQ ID NO: 49810 - DNA, 25 bp, Canis familiaris
aagcttgtactgggatcaagccatg

SEQ ID NO: 49811 - DNA, 25 bp, Canis familiaris
aagctttcactgatgtggccactgg

SEQ ID NO: 49812 - DNA, 25 bp, Canis familiaris
aagcttcttcatattgtcacatctc

SEQ ID NO: 49813 - DNA, 25 bp, Canis familiaris
aagcctttcatgattacagtgcagc

SEQ ID NO: 49814 - DNA, 25 bp, Canis familiaris
aagccattcaacattgcatcttctg

SEQ ID NO: 49815 - DNA, 25 bp, Canis familiaris
aagcatctgttactttgcctttcag

SEQ ID NO: 49816 - DNA, 25 bp, Canis familiaris
aagccactttatcctgttttcatgg

SEQ ID NO: 49817 - DNA, 25 bp, Canis familiaris
aagcctgtcttatcttctttgatga

SEQ ID NO: 49818 - DNA, 25 bp, Canis familiaris
aagcctgaattaatctatttttata

SEQ ID NO: 49819 - DNA, 25 bp, Canis familiaris
aagcacgaaaaagaaatattacagt

SEQ ID NO: 49820 - DNA, 25 bp, Canis familiaris
aagtcgtaatagttaaatatggcct

SEQ ID NO: 49821 - DNA, 25 bp, Canis familiaris
aagactgcaacttttaacttgccct

SEQ ID NO: 49822 - DNA, 25 bp, Canis familiaris
caacctgcaacctttctaaaccagc

SEQ ID NO: 49823 - DNA, 25 bp, Canis familiaris
aagccctgagccttttgaacaacag

SEQ ID NO: 49824 - DNA, 25 bp, Canis familiaris
aagccgggctttttgcaacatagtt

SEQ ID NO: 49825 - DNA, 25 bp, Canis familiaris
aagcacggtgctttttaaaaatcag

SEQ ID NO: 49826 - DNA, 25 bp, Canis familiaris
aagccgatatgcagtttaagataat

SEQ ID NO: 49827 - DNA, 25 bp, Canis familiaris
aagcccactgtttttaacatccatg

SEQ ID NO: 49828 - DNA, 25 bp, Canis familiaris
aagccctctcttgattaagcatact

SEQ ID NO: 49829 - DNA, 25 bp, Canis familiaris
aagccacgtcgtgaatcacagccac

SEQ ID NO: 49830 - DNA, 25 bp, Canis familiaris
aagccctggctgtgaactcagcaga

SEQ ID NO: 49831 - DNA, 25 bp, Canis familiaris
aagccctgcctggggtctgatatat

SEQ ID NO: 49832 - DNA, 25 bp, Canis familiaris
aagccctcatcttggattctgatta

SEQ ID NO: 49833 - DNA, 25 bp, Canis familiaris
aagccctcatttagacagaggtcaa

SEQ ID NO: 49834 - DNA, 25 bp, Canis familiaris
aagcccacagtctgatcgttatcga

SEQ ID NO: 49835 - DNA, 25 bp, Canis familiaris
aagcccaagtctgatcggggctccc

SEQ ID NO: 49836 - DNA, 25 bp, Canis familiaris
aagcccctgctcatccaggggctcc

SEQ ID NO: 49837 - DNA, 25 bp, Canis familiaris
aagcctcacctcatcatgcatggct

SEQ ID NO: 49838 - DNA, 25 bp, Canis familiaris
aagctctacctcacagaactctaaa

SEQ ID NO: 49839 - DNA, 25 bp, Canis familiaris
aagcctcttgtcacaaatttggaga

SEQ ID NO: 49840 - DNA, 25 bp, Canis familiaris
aagccatattcttccacatatattt

SEQ ID NO: 49841 - DNA, 25 bp, Canis familiaris
aagccatgtactgccaattttctga

SEQ ID NO: 49842 - DNA, 25 bp, Canis familiaris
aagaatgtgaatcccaactggtcgg

SEQ ID NO: 49843 - DNA, 25 bp, Canis familiaris
aagcctgtgggtttgactggtctgg

SEQ ID NO: 49844 - DNA, 25 bp, Canis familiaris
aagctggtggtttggactggtgtac

SEQ ID NO: 49845 - DNA, 25 bp, Canis familiaris
aagccgtggtgcatggcatcgtgtt

SEQ ID NO: 49846 - DNA, 25 bp, Canis familiaris
aagcccatggtggttactctgtgtt

SEQ ID NO: 49847 - DNA, 25 bp, Canis familiaris
aagcccacagctgttatgctttttt

SEQ ID NO: 49848 - DNA, 25 bp, Canis familiaris
aagccctggctgttaatgactttta

SEQ ID NO: 49849 - DNA, 25 bp, Canis familiaris
aagcccccaaaattcactgtgtata

SEQ ID NO: 49850 - DNA, 25 bp, Canis familiaris
aagccccagcaagcaatcatatctt

SEQ ID NO: 49851 - DNA, 25 bp, Canis familiaris
aagccatgaggcaagaaactacatt

SEQ ID NO: 49852 - DNA, 25 bp, Canis familiaris
aagccatcatcgagaatccattcat

SEQ ID NO: 49853 - DNA, 25 bp, Canis familiaris
aagcacaccagaaatcatccctgca

SEQ ID NO: 49854 - DNA, 25 bp, Canis familiaris
aagcagcagccactgttgctgccac

SEQ ID NO: 49855 - DNA, 25 bp, Canis familiaris
aagctgcaccactatacatgtactg

SEQ ID NO: 49856 - DNA, 25 bp, Canis familiaris
aagcatcaccaccataagcaaatcc

SEQ ID NO: 49857 - DNA, 25 bp, Canis familiaris
aagcttccaccattgacacagcata

SEQ ID NO: 49858 - DNA, 25 bp, Canis familiaris
aagccccacacataccaaataaaga

SEQ ID NO: 49859 - DNA, 25 bp, Canis familiaris
cacgtcccaactcaccaataaaggc

SEQ ID NO: 49860 - DNA, 25 bp, Canis familiaris
cacgttcacggggagcccaacaagt

SEQ ID NO: 49861 - DNA, 25 bp, Canis familiaris
cacgtttgggtgggcctctataaga

SEQ ID NO: 49862 - DNA, 25 bp, Canis familiaris
cagtttgttgggagcgtgaaaggag

SEQ ID NO: 49863 - DNA, 25 bp, Canis familiaris
cagatgtttagtgggacgggacgga

SEQ ID NO: 49864 - DNA, 25 bp, Canis familiaris
aagtttggatcataaggagagcgga

SEQ ID NO: 49865 - DNA, 25 bp, Canis familiaris
aagcgattttcatttgggaggcgga

SEQ ID NO: 49866 - DNA, 25 bp, Canis familiaris
aagccttcatttgagggaacgggtg

SEQ ID NO: 49867 - DNA, 25 bp, Canis familiaris
aagcctttgtgggccaggaacgtgc

SEQ ID NO: 49868 - DNA, 25 bp, Canis familiaris
aagcacctttggaccatgtgggggc

SEQ ID NO: 49869 - DNA, 25 bp, Canis familiaris
aagccattttgggcactggtggtgg

SEQ ID NO: 49870 - DNA, 25 bp, Canis familiaris
aagccatctgttggcgagtctgggt

SEQ ID NO: 49871 - DNA, 25 bp, Canis familiaris
aagcgatctcgatcgatctcgagcg

SEQ ID NO: 49872 - DNA, 25 bp, Canis familiaris
aagcgtcaaaaggatcgcaagcgac

SEQ ID NO: 49873 - DNA, 25 bp, Canis familiaris
aagctccaaaggtatgcgaagcctg

SEQ ID NO: 49874 - DNA, 25 bp, Canis familiaris
aagtccgtaggcttgcgagcatgtc

SEQ ID NO: 49875 - DNA, 25 bp, Canis familiaris
aagctactgccagcattcgaatctc

SEQ ID NO: 49876 - DNA, 25 bp, Canis familiaris
aagccctcacagactatgagaactc

SEQ ID NO: 49877 - DNA, 25 bp, Canis familiaris
aagctcttccagtcatcaagtactt

SEQ ID NO: 49878 - DNA, 25 bp, Canis familiaris
aagctgctattatatctgagtacta

SEQ ID NO: 49879 - DNA, 25 bp, Canis familiaris
aagctgatatcctaattaacacata

SEQ ID NO: 49880 - DNA, 25 bp, Canis familiaris
aagctgtacctactaaatacgtatg

SEQ ID NO: 49881 - DNA, 25 bp, Canis familiaris
aagatattcctttagacattcgtta

SEQ ID NO: 49882 - DNA, 25 bp, Canis familiaris
aagctaggaattaaagcaatcttta

SEQ ID NO: 49883 - DNA, 25 bp, Canis familiaris
aagctaggcctacagagctctcttt

SEQ ID NO: 49884 - DNA, 25 bp, Canis familiaris
aagtcatggcataaaaggcatagct

SEQ ID NO: 49885 - DNA, 25 bp, Canis familiaris
aagaatgccatcaatgtgcatgctt

SEQ ID NO: 49886 - DNA, 25 bp, Canis familiaris
aagcattatctttgccagttggagt

SEQ ID NO: 49887 - DNA, 25 bp, Canis familiaris
aagcttcattcttggctgcatgttg

SEQ ID NO: 49888 - DNA, 25 bp, Canis familiaris
aagctctgtctttgtgaatgtgtac

SEQ ID NO: 49889 - DNA, 25 bp, Canis familiaris
aagccctttctgcaatgatgccact

SEQ ID NO: 49890 - DNA, 25 bp, Canis familiaris
aagccttttctccatattcatagtt

SEQ ID NO: 49891 - DNA, 25 bp, Canis familiaris
aagccttttgtcttttatacaatgg

SEQ ID NO: 49892 - DNA, 25 bp, Canis familiaris
aagcctttcctcaattcaattcaat

SEQ ID NO: 49893 - DNA, 25 bp, Canis familiaris
aagcttttggctactacgttgaact

SEQ ID NO: 49894 - DNA, 25 bp, Canis familiaris
aagtattaggctgctacatcttccc

SEQ ID NO: 49895 - DNA, 25 bp, Canis familiaris
aagttaagggtgtgcctggtgcctg

SEQ ID NO: 49896 - DNA, 25 bp, Canis familiaris
aagcttagacggatcctgctggtcc

SEQ ID NO: 49897 - DNA, 25 bp, Canis familiaris
aagcgtagacgatccagtggttcct

SEQ ID NO: 49898 - DNA, 25 bp, Canis familiaris
aagctggagatggtcccaacgttct

SEQ ID NO: 49899 - DNA, 25 bp, Canis familiaris
aagcctgagactaccacaaaggttc

SEQ ID NO: 49900 - DNA, 25 bp, Canis familiaris
aagcactaacctgcttcaaggcctc

SEQ ID NO: 49901 - DNA, 25 bp, Canis familiaris
gaagccttaaggcttccaggccacg

SEQ ID NO: 49902 - DNA, 25 bp, Canis familiaris
aagccttataggatttggatgccat

SEQ ID NO: 49903 - DNA, 25 bp, Canis familiaris
aagcctctgttgtgttgctgtgacc

SEQ ID NO: 49904 - DNA, 25 bp, Canis familiaris
aagccctttatgatgtctggcaccc

SEQ ID NO: 49905 - DNA, 25 bp, Canis familiaris
aagctgcagcttctgattccagtga

SEQ ID NO: 49906 - DNA, 25 bp, Canis familiaris
aagcgcagagagcatgtagccagga

SEQ ID NO: 49907 - DNA, 25 bp, Canis familiaris
aagcagcagccatcatggaccagga

SEQ ID NO: 49908 - DNA, 25 bp, Canis familiaris
aagcgcacagaagcttctcaggcac

SEQ ID NO: 49909 - DNA, 25 bp, Canis familiaris
aagagcctcaagtccttcaggaccc

SEQ ID NO: 49910 - DNA, 25 bp, Canis familiaris
aagagttcaggattgaaaggacttc

SEQ ID NO: 49911 - DNA, 25 bp, Canis familiaris
aatgcactgtaggaaaacggacctt

SEQ ID NO: 49912 - DNA, 25 bp, Canis familiaris
aagacagctatggacaacagtggac

SEQ ID NO: 49913 - DNA, 25 bp, Canis familiaris
aagaaccattgggaattgtgactga

SEQ ID NO: 49914 - DNA, 25 bp, Canis familiaris
aagacgcgaatagacatttcactaa

SEQ ID NO: 49915 - DNA, 25 bp, Canis familiaris
aagcctctgagaaacactgttccta

SEQ ID NO: 49916 - DNA, 25 bp, Canis familiaris
aagcagatctaagactccttccttc

SEQ ID NO: 49917 - DNA, 25 bp, Canis familiaris
aagctgctaaatgttctctttgccc

SEQ ID NO: 49918 - DNA, 25 bp, Canis familiaris
aagctgtacaatcgtttcatcattc

SEQ ID NO: 49919 - DNA, 25 bp, Canis familiaris
aagcgagacacaagctatttaatct

SEQ ID NO: 49920 - DNA, 25 bp, Canis familiaris
aagctgagtttattgcatttgtatt

SEQ ID NO: 49921 - DNA, 25 bp, Canis familiaris
aagctggatgtgttaccatcttatt

SEQ ID NO: 49922 - DNA, 25 bp, Canis familiaris
aagcgcgagatcttcagcaacttct

SEQ ID NO: 49923 - DNA, 25 bp, Canis familiaris
aagcgcgttcatatgcagactgttc

SEQ ID NO: 49924 - DNA, 25 bp, Canis familiaris
aagcctgtttattcaggtggtccac

SEQ ID NO: 49925 - DNA, 25 bp, Canis familiaris
aagccctttatgacaggggctgcag

SEQ ID NO: 49926 - DNA, 25 bp, Canis familiaris
aagccgttatattatgtgggagtgt

SEQ ID NO: 49927 - DNA, 25 bp, Canis familiaris
aagccccattcatgagcggcgaggt

SEQ ID NO: 49928 - DNA, 25 bp, Canis familiaris
aagcactgttccagagggaagagtg

SEQ ID NO: 49929 - DNA, 25 bp, Canis familiaris
aagactgtttctcatgggaaaccag

SEQ ID NO: 49930 - DNA, 25 bp, Canis familiaris
cacaaattcaccacaaggaaacaag

SEQ ID NO: 49931 - DNA, 25 bp, Canis familiaris
aagacaatctcccgccaggaaaaag

SEQ ID NO: 49932 - DNA, 25 bp, Canis familiaris
aagaaaatgcccacctgaggaaata

SEQ ID NO: 49933 - DNA, 25 bp, Canis familiaris
aagacaaagccatggtaaggaaatg

SEQ ID NO: 49934 - DNA, 25 bp, Canis familiaris
aagaataggcactcagtcacagaag

SEQ ID NO: 49935 - DNA, 25 bp, Canis familiaris
aagaataaagcagtccccagggatt

SEQ ID NO: 49936 - DNA, 25 bp, Canis familiaris
aagagaattacagcagcccaagccc

SEQ ID NO: 49937 - DNA, 25 bp, Canis familiaris
aagagagaaatgcccacacggaacc

SEQ ID NO: 49938 - DNA, 25 bp, Canis familiaris
aagaagacgatggctgaccgcaacc

SEQ ID NO: 49939 - DNA, 25 bp, Canis familiaris
aagaatgagtgcatctggcccaatc

SEQ ID NO: 49940 - DNA, 25 bp, Canis familiaris
aagaaagcttaggcagccctgctca

SEQ ID NO: 49941 - DNA, 25 bp, Canis familiaris
aagcatatgagttggcctcacctgc

SEQ ID NO: 49942 - DNA, 25 bp, Canis familiaris
aagcatatttgtagtgctgccaata

SEQ ID NO: 49943 - DNA, 25 bp, Canis familiaris
aagcgatgtgcttatgtctacaaag

SEQ ID NO: 49944 - DNA, 25 bp, Canis familiaris
aagctatgttcctacttcacaaggg

SEQ ID NO: 49945 - DNA, 25 bp, Canis familiaris
aagcattttcttaccataataaaga

SEQ ID NO: 49946 - DNA, 25 bp, Canis familiaris
aagctcttagctcacacatcaaaaa

SEQ ID NO: 49947 - DNA, 25 bp, Canis familiaris
aagctggtgcagcaactctggaaaa

SEQ ID NO: 49948 - DNA, 25 bp, Canis familiaris
aagatcgtggatcagtctaaaacat

SEQ ID NO: 49949 - DNA, 25 bp, Canis familiaris
aagtgcaataaatgtttgaagacta

SEQ ID NO: 49950 - DNA, 25 bp, Canis familiaris
aagcggtctaaacttcatgaacaaa

SEQ ID NO: 49951 - DNA, 25 bp, Canis familiaris
aagctgtcatcaaacattccagaaa

SEQ ID NO: 49952 - DNA, 25 bp, Canis familiaris
aagcatgttatcacacccagagtct

SEQ ID NO: 49953 - DNA, 25 bp, Canis familiaris
aagctgttctcaaacattccaggaa

SEQ ID NO: 49954 - DNA, 25 bp, Canis familiaris
aagcagccattagcatctactcagg

SEQ ID NO: 49955 - DNA, 25 bp, Canis familiaris
aagcatcgagtagtcacttgtatgg

SEQ ID NO: 49956 - DNA, 25 bp, Canis familiaris
aagctcagtgaaggcccagtggggc

SEQ ID NO: 49957 - DNA, 25 bp, Canis familiaris
aagcacctgaatgtccagtggctcc

SEQ ID NO: 49958 - DNA, 25 bp, Canis familiaris
aagcaagccaggttccaggagctct

SEQ ID NO: 49959 - DNA, 25 bp, Canis familiaris
aagcgctcctactccatggagcact

SEQ ID NO: 49960 - DNA, 25 bp, Canis familiaris
aagcctggctactggattggcgtcc

SEQ ID NO: 49961 - DNA, 25 bp, Canis familiaris
aagctgcgtgcttcaggaatcgggg

SEQ ID NO: 49962 - DNA, 25 bp, Canis familiaris
aagctcttgctgaatagaatctggt

SEQ ID NO: 49963 - DNA, 25 bp, Canis familiaris
aagctgctttagagaatatgcgtga

SEQ ID NO: 49964 - DNA, 25 bp, Canis familiaris
aagctattagccaggatcatggtgt

SEQ ID NO: 49965 - DNA, 25 bp, Canis familiaris
aagcttctggaattgtgtatgggta

SEQ ID NO: 49966 - DNA, 25 bp, Canis familiaris
aagtgcttggcactgtgactctgtg

SEQ ID NO: 49967 - DNA, 25 bp, Canis familiaris
aagcagctggaacggaatttggcgg

SEQ ID NO: 49968 - DNA, 25 bp, Canis familiaris
aagcccgaagaggagtttagcagcg

SEQ ID NO: 49969 - DNA, 25 bp, Canis familiaris
aagcccgcacaggccattttgagag

SEQ ID NO: 49970 - DNA, 25 bp, Canis familiaris
aagcgcccagctaaatttataatga

SEQ ID NO: 49971 - DNA, 25 bp, Canis familiaris
aagccctgaatgaactttctttatt

SEQ ID NO: 49972 - DNA, 25 bp, Canis familiaris
aagcctgtgacaagtctttctctgg

SEQ ID NO: 49973 - DNA, 25 bp, Canis familiaris
aagctcactggcatggccttccgtg

SEQ ID NO: 49974 - DNA, 25 bp, Canis familiaris
aagctcactggcatggccttccgtg

SEQ ID NO: 49975 - DNA, 25 bp, Canis familiaris
aagtcagcatggggccctaactatt

SEQ ID NO: 49976 - DNA, 25 bp, Canis familiaris
aagctagatcagcattctctaactt

SEQ ID NO: 49977 - DNA, 25 bp, Canis familiaris
aagctgtgctatgttgctctagact

SEQ ID NO: 49978 - DNA, 25 bp, Canis familiaris
aagctggtatgtttgccatcagagc

SEQ ID NO: 49979 - DNA, 25 bp, Canis familiaris
aagatggaattagtgacggaccctc

SEQ ID NO: 49980 - DNA, 25 bp, Canis familiaris
aagcaagtatttcatgggcactcct

SEQ ID NO: 49981 - DNA, 25 bp, Canis familiaris
aagcacattgatttttgcagtactg

SEQ ID NO: 49982 - DNA, 25 bp, Canis familiaris
aagcacatcgagtgcttgcacccgg

SEQ ID NO: 49983 - DNA, 25 bp, Canis familiaris
aagcacatgaattcagttccacccg

SEQ ID NO: 49984 - DNA, 25 bp, Canis familiaris
aagcactaaagtttccccatcagtt

SEQ ID NO: 49985 - DNA, 25 bp, Canis familiaris
aagactgaacaattatgccctcaac

SEQ ID NO: 49986 - DNA, 25 bp, Canis familiaris
aagcagagggaatgatcctctagag

SEQ ID NO: 49987 - DNA, 25 bp, Canis familiaris
aagaagtagatttgatcatcaccaa

SEQ ID NO: 49988 - DNA, 25 bp, Canis familiaris
aagcatatgctgtattatcatctaa

SEQ ID NO: 49989 - DNA, 25 bp, Canis familiaris
aagcattgctattatgtcttaaaat

SEQ ID NO: 49990 - DNA, 25 bp, Canis familiaris
aagcttgtcacatttgcctatttat

SEQ ID NO: 49991 - DNA, 25 bp, Canis familiaris
aagctagtgaaaatgctaatgtggt

SEQ ID NO: 49992 - DNA, 25 bp, Canis familiaris
aagctgaggggcagctccagtggct

SEQ ID NO: 49993 - DNA, 25 bp, Canis familiaris
aagaagtggcgcggaccattggcat

SEQ ID NO: 49994 - DNA, 25 bp, Canis familiaris
aagaaaatgcccctcaagtggccca

SEQ ID NO: 49995 - DNA, 25 bp, Canis familiaris
aagaagaagtgactgtccgggccgc

SEQ ID NO: 49996 - DNA, 25 bp, Canis familiaris
aagactgattgttttccgtagccgt

SEQ ID NO: 49997 - DNA, 25 bp, Canis familiaris
aagaattgtttgagcacctccctgt

SEQ ID NO: 49998 - DNA, 25 bp, Canis familiaris
aagaaggtgatttacagccagcccg

SEQ ID NO: 49999 - DNA, 25 bp, Canis familiaris
aagacaggttttcccaactggcatg

SEQ ID NO: 50000 - DNA, 25 bp, Canis familiaris
aagtaggctctatgtccagcctgga

SEQ ID NO: 50001 - DNA, 25 bp, Canis familiaris
aagaatggctccttcgaacaattga

SEQ ID NO: 50002 - DNA, 25 bp, Canis familiaris
aagtattacccacagacatatatga

SEQ ID NO: 50003 - DNA, 25 bp, Canis familiaris
aagaaacaaccacagtgaattcact

SEQ ID NO: 50004 - DNA, 25 bp, Canis familiaris
aagaaagcaccccaagtgtcaactc

SEQ ID NO: 50005 - DNA, 25 bp, Canis familiaris
aatgaccagcacggtaccttaagcc

SEQ ID NO: 50006 - DNA, 25 bp, Canis familiaris
aatgaccacctagagccttggatcc

SEQ ID NO: 50007 - DNA, 25 bp, Canis familiaris
aagaaccttcaaagccattggctcc

SEQ ID NO: 50008 - DNA, 25 bp, Canis familiaris
aagaagacccgacgtgaatgctgcc

SEQ ID NO: 50009 - DNA, 25 bp, Canis familiaris
aatgaagtccctgggaagttcctga

SEQ ID NO: 50010 - DNA, 25 bp, Canis familiaris
aagaagggccttgaatgatacactg

SEQ ID NO: 50011 - DNA, 25 bp, Canis familiaris
aagaagacgccatccaagctaggtg

SEQ ID NO: 50012 - DNA, 25 bp, Canis familiaris
aagaagggctgtacacggtggtgga

SEQ ID NO: 50013 - DNA, 25 bp, Canis familiaris
aagaatgttggtccctggtgctgtg

SEQ ID NO: 50014 - DNA, 25 bp, Canis familiaris
aagaattgtggtctctgcccataga

SEQ ID NO: 50015 - DNA, 25 bp, Canis familiaris
aagctgatgtgtgcttttgtctaag

SEQ ID NO: 50016 - DNA, 25 bp, Canis familiaris
aagctaatgtggggggtctgaggtc

SEQ ID NO: 50017 - DNA, 25 bp, Canis familiaris
aagctgaagtggtgcgcgtgggtgc

SEQ ID NO: 50018 - DNA, 25 bp, Canis familiaris
aagcggagtgcagagcggggcgctc

SEQ ID NO: 50019 - DNA, 25 bp, Canis familiaris
aagcgaactgctgacagggctgggc

SEQ ID NO: 50020 - DNA, 25 bp, Canis familiaris
aagcaaacagctgaggtagcatctg

SEQ ID NO: 50021 - DNA, 25 bp, Canis familiaris
aagcgaatactctggcaatgcctac

SEQ ID NO: 50022 - DNA, 25 bp, Canis familiaris
aagctgagatcccgggaatgcctgc

SEQ ID NO: 50023 - DNA, 25 bp, Canis familiaris
aagctgaacgcgcagtgaggcgccc

SEQ ID NO: 50024 - DNA, 25 bp, Canis familiaris
aagctgcagatccagtgcgtggtgg

SEQ ID NO: 50025 - DNA, 25 bp, Canis familiaris
aagcgagaccaagtgatgggggtgt

SEQ ID NO: 50026 - DNA, 25 bp, Canis familiaris
aagctaaaataaatgtgggagtgta

SEQ ID NO: 50027 - DNA, 25 bp, Canis familiaris
aagctgaaaatatttctctggccta

SEQ ID NO: 50028 - DNA, 25 bp, Canis familiaris
aagcagacaaaatcaacatggtcat

SEQ ID NO: 50029 - DNA, 25 bp, Canis familiaris
aagcgtcaactatcgatgactatct

SEQ ID NO: 50030 - DNA, 25 bp, Canis familiaris
aagctaaactcaccaatgagctcat

SEQ ID NO: 50031 - DNA, 25 bp, Canis familiaris
aagcttgatacgctgcagacaccac

SEQ ID NO: 50032 - DNA, 25 bp, Canis familiaris
aagcttgtcatcaatggaaatccca

SEQ ID NO: 50033 - DNA, 25 bp, Canis familiaris
aagctgtgttctagaattctccgcc

SEQ ID NO: 50034 - DNA, 25 bp, Canis familiaris
aagctttgtgtgtacattgtcccct

SEQ ID NO: 50035 - DNA, 25 bp, Canis familiaris
aagcttctggtgtattttccttcgt

SEQ ID NO: 50036 - DNA, 25 bp, Canis familiaris
aagctcttgtatttttttcatccag

SEQ ID NO: 50037 - DNA, 25 bp, Canis familiaris
aagccctgacatttgttcttcagcc

SEQ ID NO: 50038 - DNA, 25 bp, Canis familiaris
aagcactcagaatagtacctggcac

SEQ ID NO: 50039 - DNA, 25 bp, Canis familiaris
aagcgccatggctacttattctgcc

SEQ ID NO: 50040 - DNA, 25 bp, Canis familiaris
aagctgagtggaacttgtcctcctg

SEQ ID NO: 50041 - DNA, 25 bp, Canis familiaris
aagcgcagctgcaaagggacgccct

SEQ ID NO: 50042 - DNA, 25 bp, Canis familiaris
aagacctggtcagggacgtcctggt

SEQ ID NO: 50043 - DNA, 25 bp, Canis familiaris
aagattctggccacagtattccggc

SEQ ID NO: 50044 - DNA, 25 bp, Canis familiaris
aagtccatgaccagaaaactcccac

SEQ ID NO: 50045 - DNA, 25 bp, Canis familiaris
caagacttgaaccggaaactgaact

SEQ ID NO: 50046 - DNA, 25 bp, Canis familiaris
aagactcaatcacaggaaacaaact

SEQ ID NO: 50047 - DNA, 25 bp, Canis familiaris
aagacggaccagagcgaaagcattt

SEQ ID NO: 50048 - DNA, 25 bp, Canis familiaris
aagacggccaaaaggatcagactcc

SEQ ID NO: 50049 - DNA, 25 bp, Canis familiaris
aagaaacggaaagctcagccccagg

SEQ ID NO: 50050 - DNA, 25 bp, Canis familiaris
aagaacgggaaacctacctcagcat

SEQ ID NO: 50051 - DNA, 25 bp, Canis familiaris
aagagaggggtctcttccctctcac

SEQ ID NO: 50052 - DNA, 25 bp, Canis familiaris
aagatgggggttccttactgcatta

SEQ ID NO: 50053 - DNA, 25 bp, Canis familiaris
aagatgggggttccttactgcatta

SEQ ID NO: 50054 - DNA, 25 bp, Canis familiaris
aagatgggggttccttactgcatta

SEQ ID NO: 50055 - DNA, 25 bp, Canis familiaris
aagatgggggttccttactgcatta

SEQ ID NO: 50056 - DNA, 25 bp, Canis familiaris
aataaggtggttaatccaggcaata

SEQ ID NO: 50057 - DNA, 25 bp, Canis familiaris
aataaggttttgctacagaatcaca

SEQ ID NO: 50058 - DNA, 25 bp, Canis familiaris
aagaccctcactacgtaaatacaca

SEQ ID NO: 50059 - DNA, 25 bp, Canis familiaris
aagaacctatcgatgtgcaaaacag

SEQ ID NO: 50060 - DNA, 25 bp, Canis familiaris
aagaaggctgtaaatgccaagaaag

SEQ ID NO: 50061 - DNA, 25 bp, Canis familiaris
aagcaagcgtaatcttcaggataat

SEQ ID NO: 50062 - DNA, 25 bp, Canis familiaris
aagcaagggatgctctctcggtttg

SEQ ID NO: 50063 - DNA, 25 bp, Canis familiaris
aagaagggggacacagctgccctgg

SEQ ID NO: 50064 - DNA, 25 bp, Canis familiaris
aagaacgggagtgccaggcctggtg

SEQ ID NO: 50065 - DNA, 25 bp, Canis familiaris
aagaaccatgtaccctagttccttg

SEQ ID NO: 50066 - DNA, 25 bp, Canis familiaris
aagcattcgcataaggcccagtcat

SEQ ID NO: 50067 - DNA, 25 bp, Canis familiaris
aagcatccgcagaggaatgagatgt

SEQ ID NO: 50068 - DNA, 25 bp, Canis familiaris
aagtcccagagccgattcgatgttt

SEQ ID NO: 50069 - DNA, 25 bp, Canis familiaris
aagctcccaggacgactcgggatga

SEQ ID NO: 50070 - DNA, 25 bp, Canis familiaris
aagcccatgggagaacgtgtgtcac

SEQ ID NO: 50071 - DNA, 25 bp, Canis familiaris
aagcccatgaccgctgacaggggcc

SEQ ID NO: 50072 - DNA, 25 bp, Canis familiaris
aagcaccagagcccgcaacaagggc

SEQ ID NO: 50073 - DNA, 25 bp, Canis familiaris
aagcacaagcgggtgcaccgagggc

SEQ ID NO: 50074 - DNA, 25 bp, Canis familiaris
aagatcatcagcaatgcctcctgca

SEQ ID NO: 50075 - DNA, 25 bp, Canis familiaris
aagatcatcagcaatgcctcctgca

SEQ ID NO: 50076 - DNA, 25 bp, Canis familiaris
aagacagctgcagtgcacctgcgaa

SEQ ID NO: 50077 - DNA, 25 bp, Canis familiaris
aagcgattcctggcccagaaacaaa

SEQ ID NO: 50078 - DNA, 25 bp, Canis familiaris
aagcaattcaatccggaactaacaa

SEQ ID NO: 50079 - DNA, 25 bp, Canis familiaris
aagaatccagcaacggaacggcaga

SEQ ID NO: 50080 - DNA, 25 bp, Canis familiaris
aagactccagtctacagaacgaaag

SEQ ID NO: 50081 - DNA, 25 bp, Canis familiaris
aagagctcacggtcatcaagaagaa

SEQ ID NO: 50082 - DNA, 25 bp, Canis familiaris
aagcacacatggtaactagtagaat

SEQ ID NO: 50083 - DNA, 25 bp, Canis familiaris
aagaccagaggttctcagtgcagga

SEQ ID NO: 50084 - DNA, 25 bp, Canis familiaris
aagaacaacgttactccagacatgg

SEQ ID NO: 50085 - DNA, 25 bp, Canis familiaris
aagaacctcttgactccaagtcgac

SEQ ID NO: 50086 - DNA, 25 bp, Canis familiaris
aagaatcctttgacatctccagatc

SEQ ID NO: 50087 - DNA, 25 bp, Canis familiaris
aagacattctttatctggcaaggtg

SEQ ID NO: 50088 - DNA, 25 bp, Canis familiaris
aagacgtctctttttggtaatgata

SEQ ID NO: 50089 - DNA, 25 bp, Canis familiaris
aagcaagttcctgtttgccgattca

SEQ ID NO: 50090 - DNA, 25 bp, Canis familiaris
aagcatagttcgtttcttctttgtc

SEQ ID NO: 50091 - DNA, 25 bp, Canis familiaris
caagcagattacccttgacctttac

SEQ ID NO: 50092 - DNA, 25 bp, Canis familiaris
aagctttacaatctgacttttgaca

SEQ ID NO: 50093 - DNA, 25 bp, Canis familiaris
aagcatttgccaagaatgttttcat

SEQ ID NO: 50094 - DNA, 25 bp, Canis familiaris
aagctgttggtctctatttgtcata

SEQ ID NO: 50095 - DNA, 25 bp, Canis familiaris
aagctgccgaactactttttcaagt

SEQ ID NO: 50096 - DNA, 25 bp, Canis familiaris
aagctgcaagcaagttctttttaca

SEQ ID NO: 50097 - DNA, 25 bp, Canis familiaris
aagctgagagtagtattttcgtatt

SEQ ID NO: 50098 - DNA, 25 bp, Canis familiaris
aagcagaggttctagtgttagtttt

SEQ ID NO: 50099 - DNA, 25 bp, Canis familiaris
aagcagggcttcaggtggcagtgtg

SEQ ID NO: 50100 - DNA, 25 bp, Canis familiaris
aatcaacagttggaggggagctatg

SEQ ID NO: 50101 - DNA, 25 bp, Canis familiaris
aagcaacttatggtggcccttgtga

SEQ ID NO: 50102 - DNA, 25 bp, Canis familiaris
aagaactattcctgtcacgttaata

SEQ ID NO: 50103 - DNA, 25 bp, Canis familiaris
aagctcattttctaagtaccttggt

SEQ ID NO: 50104 - DNA, 25 bp, Canis familiaris
aagctcagttcttagagatacacta

SEQ ID NO: 50105 - DNA, 25 bp, Canis familiaris
aagctggatttttgaggagattgat

SEQ ID NO: 50106 - DNA, 25 bp, Canis familiaris
aagcttgtgttttcatggtttgttt

SEQ ID NO: 50107 - DNA, 25 bp, Canis familiaris
aagcatcttctttctaggaattttt

SEQ ID NO: 50108 - DNA, 25 bp, Canis familiaris
aagcatcttttcgtttacacatttt

SEQ ID NO: 50109 - DNA, 25 bp, Canis familiaris
aagctctgtattattttatttccta

SEQ ID NO: 50110 - DNA, 25 bp, Canis familiaris
aagcatcttctcagtgttttttcct

SEQ ID NO: 50111 - DNA, 25 bp, Canis familiaris
aagagtttcggccattgttgaacca

SEQ ID NO: 50112 - DNA, 25 bp, Canis familiaris
aagcagtactcagggttgttccacc

SEQ ID NO: 50113 - DNA, 25 bp, Canis familiaris
aagcgtaccatccagtttgtggact

SEQ ID NO: 50114 - DNA, 25 bp, Canis familiaris
aagctccaccaccttgttggaactt

SEQ ID NO: 50115 - DNA, 25 bp, Canis familiaris
aagcacccactttgggggcaactgt

SEQ ID NO: 50116 - DNA, 25 bp, Canis familiaris
aagacaacgttctgtgggtacttca

SEQ ID NO: 50117 - DNA, 25 bp, Canis familiaris
aagacacccggctgttgaggtcttc

SEQ ID NO: 50118 - DNA, 25 bp, Canis familiaris
aagacagcccggctgttcaacatca

SEQ ID NO: 50119 - DNA, 25 bp, Canis familiaris
aagcaagccactgctgttaaacagc

SEQ ID NO: 50120 - DNA, 25 bp, Canis familiaris
aagcagaaagtgacagttattacct

SEQ ID NO: 50121 - DNA, 25 bp, Canis familiaris
aagacaaatgaaagcttattataga

SEQ ID NO: 50122 - DNA, 25 bp, Canis familiaris
aagagaaatcatgacttattgctga

SEQ ID NO: 50123 - DNA, 25 bp, Canis familiaris
aagaagattcaggcccagctatctg

SEQ ID NO: 50124 - DNA, 25 bp, Canis familiaris
aagaagttctgggcgagtttggagt

SEQ ID NO: 50125 - DNA, 25 bp, Canis familiaris
aagaaggtcctggtcactgttgaag

SEQ ID NO: 50126 - DNA, 25 bp, Canis familiaris
aagagccgtcctgggctaggagagg

SEQ ID NO: 50127 - DNA, 25 bp, Canis familiaris
aagacccgacgctgtaggatggagg

SEQ ID NO: 50128 - DNA, 25 bp, Canis familiaris
aagcacccgagagggaatgaagaag

SEQ ID NO: 50129 - DNA, 25 bp, Canis familiaris
aagaaccaagagaagtaggcagaag

SEQ ID NO: 50130 - DNA, 25 bp, Canis familiaris
aatgccccagagcggtgggcaaagc

SEQ ID NO: 50131 - DNA, 25 bp, Canis familiaris
aagcttgtcatggctggggaggcaa

SEQ ID NO: 50132 - DNA, 25 bp, Canis familiaris
aagctaatgatcacggatatgacaa

SEQ ID NO: 50133 - DNA, 25 bp, Canis familiaris
aagctcatttcctggtatgacaatg

SEQ ID NO: 50134 - DNA, 25 bp, Canis familiaris
aagctcatttcctggtatgacaatg

SEQ ID NO: 50135 - DNA, 25 bp, Canis familiaris
aagctcatttcctggtatgacaatg

SEQ ID NO: 50136 - DNA, 25 bp, Canis familiaris
aagctcatttcctggtatgacaacg

SEQ ID NO: 50137 - DNA, 25 bp, Canis familiaris
aagaattcatactggcattactaca

SEQ ID NO: 50138 - DNA, 25 bp, Canis familiaris
aagcatatagcttcaagcctgtatt

SEQ ID NO: 50139 - DNA, 25 bp, Canis familiaris
aagcagatcagtgcatcttccttgt

SEQ ID NO: 50140 - DNA, 25 bp, Canis familiaris
aagaatcaggttgtcgctgctgctg

SEQ ID NO: 50141 - DNA, 25 bp, Canis familiaris
aagactgtggatggcccctctggaa

SEQ ID NO: 50142 - DNA, 25 bp, Canis familiaris
aagaaggatgatgccgttcggaagg

SEQ ID NO: 50143 - DNA, 25 bp, Canis familiaris
aaggggattcctggattctgggcac

SEQ ID NO: 50144 - DNA, 25 bp, Canis familiaris
aagacagtttttgttcaggccacgc

SEQ ID NO: 50145 - DNA, 25 bp, Canis familiaris
aagaatgttcatttttacagcccac

SEQ ID NO: 50146 - DNA, 25 bp, Canis familiaris
aagacggaattttataagctgccaa

SEQ ID NO: 50147 - DNA, 25 bp, Canis familiaris
aagacaaaaattcgagagagcctca

SEQ ID NO: 50148 - DNA, 25 bp, Canis familiaris
aagctggcaaacttgccaagacctc

SEQ ID NO: 50149 - DNA, 25 bp, Canis familiaris
aagctgtgaaccgggcagcgaggcc

SEQ ID NO: 50150 - DNA, 25 bp, Canis familiaris
aagctgtaagcggtggctgggcgcc

SEQ ID NO: 50151 - DNA, 25 bp, Canis familiaris
aagctcaaccgagttctgggcttca

SEQ ID NO: 50152 - DNA, 25 bp, Canis familiaris
aagctgcaagaggactccaggagca

SEQ ID NO: 50153 - DNA, 25 bp, Canis familiaris
aagcatgagagagtacaagcagggg

SEQ ID NO: 50154 - DNA, 25 bp, Canis familiaris
aagcatgttagtaccagcagccagc

SEQ ID NO: 50155 - DNA, 25 bp, Canis familiaris
caagcagaaagaaccagaccaacta

SEQ ID NO: 50156 - DNA, 25 bp, Canis familiaris
aagcaaaagaacacactcgcctaga

SEQ ID NO: 50157 - DNA, 25 bp, Canis familiaris
aagacaaagaaaacccagccagcag

SEQ ID NO: 50158 - DNA, 25 bp, Canis familiaris
aagaaacgaaagcctctgcatccta

SEQ ID NO: 50159 - DNA, 25 bp, Canis familiaris
aagagaaccagaagcccaggcttga

SEQ ID NO: 50160 - DNA, 25 bp, Canis familiaris
aagagatactcaaacccaacacata

SEQ ID NO: 50161 - DNA, 25 bp, Canis familiaris
aagcatgagttacaagcaaactgct

SEQ ID NO: 50162 - DNA, 25 bp, Canis familiaris
aagcaggtgcttctaggaactctga

SEQ ID NO: 50163 - DNA, 25 bp, Canis familiaris
aagcagtggcaactctagggcccat

SEQ ID NO: 50164 - DNA, 25 bp, Canis familiaris
aagcaatgtgcacttgcggcgatcc

SEQ ID NO: 50165 - DNA, 25 bp, Canis familiaris
aagcacatggcaccatccacatata

SEQ ID NO: 50166 - DNA, 25 bp, Canis familiaris
aagcagctgagccagaatacataca

SEQ ID NO: 50167 - DNA, 25 bp, Canis familiaris
aagcatgatggacgtcgatcaccag

SEQ ID NO: 50168 - DNA, 25 bp, Canis familiaris
aagctgatgagtctgagctgcctcg

SEQ ID NO: 50169 - DNA, 25 bp, Canis familiaris
aagaagatgcagctgcctttgcaga

SEQ ID NO: 50170 - DNA, 25 bp, Canis familiaris
aagcatcagaagatgccctttgacg

SEQ ID NO: 50171 - DNA, 25 bp, Canis familiaris
aagcatcacaaggtgcggctggctg

SEQ ID NO: 50172 - DNA, 25 bp, Canis familiaris
aagcagtgcaaatgccatgtggctg

SEQ ID NO: 50173 - DNA, 25 bp, Canis familiaris
aagctgccagcaaagccagcttcct

SEQ ID NO: 50174 - DNA, 25 bp, Canis familiaris
aagcaggcacagctggagttccatt

SEQ ID NO: 50175 - DNA, 25 bp, Canis familiaris
aagaggccaggccagagtctgaaga

SEQ ID NO: 50176 - DNA, 25 bp, Canis familiaris
aagagtaagctccgtgcctgtaaga

SEQ ID NO: 50177 - DNA, 25 bp, Canis familiaris
aagaaacctcctatctgttgcatat

SEQ ID NO: 50178 - DNA, 25 bp, Canis familiaris
aagcaaacagccagacacttgatta

SEQ ID NO: 50179 - DNA, 25 bp, Canis familiaris
aagcaggaagacggcagcctctgtc

SEQ ID NO: 50180 - DNA, 25 bp, Canis familiaris
aagagagacaacgccgtctgagcct

SEQ ID NO: 50181 - DNA, 25 bp, Canis familiaris
aagagactcaccacgagtatgaggc

SEQ ID NO: 50182 - DNA, 25 bp, Canis familiaris
aagcaagctgcggttgtggaagagc

SEQ ID NO: 50183 - DNA, 25 bp, Canis familiaris
aagcagagctctctgtcaggaaccc

SEQ ID NO: 50184 - DNA, 25 bp, Canis familiaris
aagcaggctccatgcagggaacctg

SEQ ID NO: 50185 - DNA, 25 bp, Canis familiaris
aagctgcagcccagcagggctacag

SEQ ID NO: 50186 - DNA, 25 bp, Canis familiaris
aagctgccccatatggacgacattc

SEQ ID NO: 50187 - DNA, 25 bp, Canis familiaris
aagctgccacagctctgtaggacag

SEQ ID NO: 50188 - DNA, 25 bp, Canis familiaris
aagcagcccgcatattaggcgcaga

SEQ ID NO: 50189 - DNA, 25 bp, Canis familiaris
aagcacccatctgattgagtctggt

SEQ ID NO: 50190 - DNA, 25 bp, Canis familiaris
aagcatccttgtgacatgttctgtt

SEQ ID NO: 50191 - DNA, 25 bp, Canis familiaris
aagctgctctattgtagcatttctt

SEQ ID NO: 50192 - DNA, 25 bp, Canis familiaris
aagcttctgatgttgaatgtttcta

SEQ ID NO: 50193 - DNA, 25 bp, Canis familiaris
aagctgactgtgtttattcgcatta

SEQ ID NO: 50194 - DNA, 25 bp, Canis familiaris
aagcagaggctgtgtgaaggacata

SEQ ID NO: 50195 - DNA, 25 bp, Canis familiaris
aagcaggctatgtccagaaattcta

SEQ ID NO: 50196 - DNA, 25 bp, Canis familiaris
aagcaatccatgcccagaagtcagt

SEQ ID NO: 50197 - DNA, 25 bp, Canis familiaris
aagcttccttgcagaaatccatcag

SEQ ID NO: 50198 - DNA, 25 bp, Canis familiaris
aagctccagctgcttaaagcctggt

SEQ ID NO: 50199 - DNA, 25 bp, Canis familiaris
aagtctagatggctaaagaagtggt

SEQ ID NO: 50200 - DNA, 25 bp, Canis familiaris
aagacaaggtgacaagaagcaggcg

SEQ ID NO: 50201 - DNA, 25 bp, Canis familiaris
aagaagggtgacgaccagagccggc

SEQ ID NO: 50202 - DNA, 25 bp, Canis familiaris
aagcttgggctaggaccatacctgg

SEQ ID NO: 50203 - DNA, 25 bp, Canis familiaris
aagtctggaggagactccgcactga

SEQ ID NO: 50204 - DNA, 25 bp, Canis familiaris
aagacaggaaggacccctcagtgaa

SEQ ID NO: 50205 - DNA, 25 bp, Canis familiaris
aagacacgggagacacacccttgct

SEQ ID NO: 50206 - DNA, 25 bp, Canis familiaris
aagaaaagcgagagcacctcctcac

SEQ ID NO: 50207 - DNA, 25 bp, Canis familiaris
aagaagaccgtgacaagcaccactc

SEQ ID NO: 50208 - DNA, 25 bp, Canis familiaris
aagaaccgcgatgacagagccgcct

SEQ ID NO: 50209 - DNA, 25 bp, Canis familiaris
aagaaccgcgatgacagagccgcct

SEQ ID NO: 50210 - DNA, 25 bp, Canis familiaris
aagaacacagcgtgaaacgtgccca

SEQ ID NO: 50211 - DNA, 25 bp, Canis familiaris
aagaacacacgtgaaactgcccagg

SEQ ID NO: 50212 - DNA, 25 bp, Canis familiaris
aagaggcctctaggtaaagcccaga

SEQ ID NO: 50213 - DNA, 25 bp, Canis familiaris
aagagagccttatgactacctccag

SEQ ID NO: 50214 - DNA, 25 bp, Canis familiaris
aagaggtttgaggtctggcctgcat

SEQ ID NO: 50215 - DNA, 25 bp, Canis familiaris
aagaagttctgggtcctttcatcat

SEQ ID NO: 50216 - DNA, 25 bp, Canis familiaris
aagcagaaactctttcctttctcat

SEQ ID NO: 50217 - DNA, 25 bp, Canis familiaris
aagaaggatgccttccccttgattc

SEQ ID NO: 50218 - DNA, 25 bp, Canis familiaris
aagaagaagaccgcctcttcatcct

SEQ ID NO: 50219 - DNA, 25 bp, Canis familiaris
aagcacaggaaaatcccttgccacc

SEQ ID NO: 50220 - DNA, 25 bp, Canis familiaris
aatccaagtcagatgccagttccac

SEQ ID NO: 50221 - DNA, 25 bp, Canis familiaris
aatccagtgatctggccaaacccca

SEQ ID NO: 50222 - DNA, 25 bp, Canis familiaris
aagcacaagactgggccaaacctcc

SEQ ID NO: 50223 - DNA, 25 bp, Canis familiaris
aagaacaagctggcaacaaacagtg

SEQ ID NO: 50224 - DNA, 25 bp, Canis familiaris
aagaacccctcaagcaacagcaata

SEQ ID NO: 50225 - DNA, 25 bp, Canis familiaris
aagcaatccatcggaactaccataa

SEQ ID NO: 50226 - DNA, 25 bp, Canis familiaris
aagaatcttaagcagcctccacaac

SEQ ID NO: 50227 - DNA, 25 bp, Canis familiaris
aagacacgttgggagttcctgaact

SEQ ID NO: 50228 - DNA, 25 bp, Canis familiaris
aagacagcctttgtggtacattact

SEQ ID NO: 50229 - DNA, 25 bp, Canis familiaris
aagaagtctttggttgtgccattaa

SEQ ID NO: 50230 - DNA, 25 bp, Canis familiaris
aagcagagctgtctggttggtctcc

SEQ ID NO: 50231 - DNA, 25 bp, Canis familiaris
aagcagacgtacagctctggagccc

SEQ ID NO: 50232 - DNA, 25 bp, Canis familiaris
aagacacagtcacaaatgggtcctg

SEQ ID NO: 50233 - DNA, 25 bp, Canis familiaris
aagcacgaggccgaaatgaggacca

SEQ ID NO: 50234 - DNA, 25 bp, Canis familiaris
aagacgacgacccaaagtacacaga

SEQ ID NO: 50235 - DNA, 25 bp, Canis familiaris
gaagacgacgacccaaagtacacag

SEQ ID NO: 50236 - DNA, 25 bp, Canis familiaris
aagacgacgcggccaaggctagagg

SEQ ID NO: 50237 - DNA, 25 bp, Canis familiaris
aagacgtcggagaaaagtgctgcgg

SEQ ID NO: 50238 - DNA, 25 bp, Canis familiaris
aagcacgtgggaaatgcaacatgtg

SEQ ID NO: 50239 - DNA, 25 bp, Canis familiaris
aagacagagaaaaagcagcacatgc

SEQ ID NO: 50240 - DNA, 25 bp, Canis familiaris
aagacagccataaccacagcacata

SEQ ID NO: 50241 - DNA, 25 bp, Canis familiaris
aagactcctgataccaatacaaaca

SEQ ID NO: 50242 - DNA, 25 bp, Canis familiaris
aagcactgttgatgcctacaagacc

SEQ ID NO: 50243 - DNA, 25 bp, Canis familiaris
aagcacgttgcacgtgaacacagtc

SEQ ID NO: 50244 - DNA, 25 bp, Canis familiaris
aagcagcgcctgagggctcaagtgt

SEQ ID NO: 50245 - DNA, 25 bp, Canis familiaris
aagcagcctatggggagctcagggc

SEQ ID NO: 50246 - DNA, 25 bp, Canis familiaris
aagagacattttgggcaatgagatc

SEQ ID NO: 50247 - DNA, 25 bp, Canis familiaris
aagaccatttctaggattaactgag

SEQ ID NO: 50248 - DNA, 25 bp, Canis familiaris
aagacattttaagatctagacttct

SEQ ID NO: 50249 - DNA, 25 bp, Canis familiaris
aagcacttttaacaccagaggagcc

SEQ ID NO: 50250 - DNA, 25 bp, Canis familiaris
aagcatctgttaaaccctccagaag

SEQ ID NO: 50251 - DNA, 25 bp, Canis familiaris
aagacgttttgatcctctaactacg

SEQ ID NO: 50252 - DNA, 25 bp, Canis familiaris
aagagggatttctccttatctttct

SEQ ID NO: 50253 - DNA, 25 bp, Canis familiaris
aagagggactggacccaacctgtat

SEQ ID NO: 50254 - DNA, 25 bp, Canis familiaris
aagagaggtttgaccctactcagtt

SEQ ID NO: 50255 - DNA, 25 bp, Canis familiaris
aagctagagttttcatttacccttg

SEQ ID NO: 50256 - DNA, 25 bp, Canis familiaris
aagctatagcttttcttttccttgg

SEQ ID NO: 50257 - DNA, 25 bp, Canis familiaris
aagagtcagttctctggttccttgg

SEQ ID NO: 50258 - DNA, 25 bp, Canis familiaris
aagcatccacttcttggtttctgtg

SEQ ID NO: 50259 - DNA, 25 bp, Canis familiaris
aagatccgtcaagctggtgtcattg

SEQ ID NO: 50260 - DNA, 25 bp, Canis familiaris
aagaatagccacttcttgtctcttt

SEQ ID NO: 50261 - DNA, 25 bp, Canis familiaris
aagctatgaagacccttgttttatt

SEQ ID NO: 50262 - DNA, 25 bp, Canis familiaris
aagctctgaaatactcatttttttg

SEQ ID NO: 50263 - DNA, 25 bp, Canis familiaris
aagcactgaacaccttgttgtttgt

SEQ ID NO: 50264 - DNA, 25 bp, Canis familiaris
aagcatctgttctactttggtctgt

SEQ ID NO: 50265 - DNA, 25 bp, Canis familiaris
aagacagtctcataggtagttgtat

SEQ ID NO: 50266 - DNA, 25 bp, Canis familiaris
aagacgatcccaaatttattttcat

SEQ ID NO: 50267 - DNA, 25 bp, Canis familiaris
aagatgaaccctgttaatctaatca

SEQ ID NO: 50268 - DNA, 25 bp, Canis familiaris
aagctacagcctcaatattactaat

SEQ ID NO: 50269 - DNA, 25 bp, Canis familiaris
aagctaaggctaattctgtactcaa

SEQ ID NO: 50270 - DNA, 25 bp, Canis familiaris
aagctagacacattttggatcccaa

SEQ ID NO: 50271 - DNA, 25 bp, Canis familiaris
aagctaaatgattctcttgctccaa

SEQ ID NO: 50272 - DNA, 25 bp, Canis familiaris
aagcagatgcagctagcctttgcgg

SEQ ID NO: 50273 - DNA, 25 bp, Canis familiaris
aagcttgcgttgattaagtccctgc

SEQ ID NO: 50274 - DNA, 25 bp, Canis familiaris
aagcttctgttgtttcaagccaccc

SEQ ID NO: 50275 - DNA, 25 bp, Canis familiaris
aagctttgttgatataaccgattca

SEQ ID NO: 50276 - DNA, 25 bp, Canis familiaris
aagctttagtgacaacagccgccca

SEQ ID NO: 50277 - DNA, 25 bp, Canis familiaris
aagctttaggaggcaccattctccc

SEQ ID NO: 50278 - DNA, 25 bp, Canis familiaris
aagctttgagtgaggctcttcctgg

SEQ ID NO: 50279 - DNA, 25 bp, Canis familiaris
aagcatatatattgggccatctttt

SEQ ID NO: 50280 - DNA, 25 bp, Canis familiaris
aagcatatttctggctacattttat

SEQ ID NO: 50281 - DNA, 25 bp, Canis familiaris
aagaatactggcctgaatgttatag

SEQ ID NO: 50282 - DNA, 25 bp, Canis familiaris
aagacatgccccctgacagggagca

SEQ ID NO: 50283 - DNA, 25 bp, Canis familiaris
aagacggcactgctggaggcgaact

SEQ ID NO: 50284 - DNA, 25 bp, Canis familiaris
aagacgagcgtgcctgaggtggagc

SEQ ID NO: 50285 - DNA, 25 bp, Canis familiaris
aagactacgtttgggatgcgatgca

SEQ ID NO: 50286 - DNA, 25 bp, Canis familiaris
aagcttcgctgtgtcggagcttgac

SEQ ID NO: 50287 - DNA, 25 bp, Canis familiaris
aagcttctgatggaatagttctagg

SEQ ID NO: 50288 - DNA, 25 bp, Canis familiaris
aagcttcgtgcagatgactaccgga

SEQ ID NO: 50289 - DNA, 25 bp, Canis familiaris
aagcttccaagcttgagtcacctgt

SEQ ID NO: 50290 - DNA, 25 bp, Canis familiaris
aagcagcccaagtgtgcatcaattg

SEQ ID NO: 50291 - DNA, 25 bp, Canis familiaris
aagagctccatgggggcagtgatat

SEQ ID NO: 50292 - DNA, 25 bp, Canis familiaris
aagcacatactggaatggcagcatg

SEQ ID NO: 50293 - DNA, 25 bp, Canis familiaris
aagcaaatatacaatgggcatcagt

SEQ ID NO: 50294 - DNA, 25 bp, Canis familiaris
aagcaacataacaaagtataatcgt

SEQ ID NO: 50295 - DNA, 25 bp, Canis familiaris
aagcaatatattcaacattaccagt

SEQ ID NO: 50296 - DNA, 25 bp, Canis familiaris
aagcagtatatctatgaagcatgtt

SEQ ID NO: 50297 - DNA, 25 bp, Canis familiaris
aagcatgcttgttagggcgtgttag

SEQ ID NO: 50298 - DNA, 25 bp, Canis familiaris
aagagctctgtcaaacggaggaaga

SEQ ID NO: 50299 - DNA, 25 bp, Canis familiaris
aagactttccacagaatgccataag

SEQ ID NO: 50300 - DNA, 25 bp, Canis familiaris
aagaattcccacagaagtctctctc

SEQ ID NO: 50301 - DNA, 25 bp, Canis familiaris
aagaattctccatggcatcagtgtt

SEQ ID NO: 50302 - DNA, 25 bp, Canis familiaris
aagaattccatatgtccaagtttga

SEQ ID NO: 50303 - DNA, 25 bp, Canis familiaris
aagaactgaaaactgccaaggctgc

SEQ ID NO: 50304 - DNA, 25 bp, Canis familiaris
aagaagggagtatccacggcagccc

SEQ ID NO: 50305 - DNA, 25 bp, Canis familiaris
aagaagggagccttgcacatggccc

SEQ ID NO: 50306 - DNA, 25 bp, Canis familiaris
aagaaagccctctttgatggctctg

SEQ ID NO: 50307 - DNA, 25 bp, Canis familiaris
aagaaaccacccatgacgtgcttgg

SEQ ID NO: 50308 - DNA, 25 bp, Canis familiaris
aagaaaccccagatgtcagatgctt

SEQ ID NO: 50309 - DNA, 25 bp, Canis familiaris
aagaaaacgcctcattctgcagttc

SEQ ID NO: 50310 - DNA, 25 bp, Canis familiaris
aagaaacctggacacttggcttcac

SEQ ID NO: 50311 - DNA, 25 bp, Canis familiaris
aagaactctaggcctggcttttcca

SEQ ID NO: 50312 - DNA, 25 bp, Canis familiaris
aagaatctgcaattcgcacgtttcc

SEQ ID NO: 50313 - DNA, 25 bp, Canis familiaris
aagcatttgcagtaagcagcgttat

SEQ ID NO: 50314 - DNA, 25 bp, Canis familiaris
aagactggcagctgatcgcgtttgt

SEQ ID NO: 50315 - DNA, 25 bp, Canis familiaris
aagagaggcagctcttctttttcgc

SEQ ID NO: 50316 - DNA, 25 bp, Canis familiaris
aagcagcggactatctcttgtcctc

SEQ ID NO: 50317 - DNA, 25 bp, Canis familiaris
aagaggtagctcatttagttcccca

SEQ ID NO: 50318 - DNA, 25 bp, Canis familiaris
caagacctatggattcgagttaccg

SEQ ID NO: 50319 - DNA, 25 bp, Canis familiaris
aagaccctggatttgggttaagctg

SEQ ID NO: 50320 - DNA, 25 bp, Canis familiaris
aataccctccagagggatcccctgg

SEQ ID NO: 50321 - DNA, 25 bp, Canis familiaris
aagacccctcgaaaggatactactg

SEQ ID NO: 50322 - DNA, 25 bp, Canis familiaris
aaggccacccgagaagatcgccttc

SEQ ID NO: 50323 - DNA, 25 bp, Canis familiaris
aagaccccctcagaaacaggactct

SEQ ID NO: 50324 - DNA, 25 bp, Canis familiaris
aagacgcccgtagaaccagaggtgg

SEQ ID NO: 50325 - DNA, 25 bp, Canis familiaris
aagacacaccctgataactcaaggt

SEQ ID NO: 50326 - DNA, 25 bp, Canis familiaris
aagagaagcccctgaagctccaggt

SEQ ID NO: 50327 - DNA, 25 bp, Canis familiaris
aagaaagccccaaatacctgcactt

SEQ ID NO: 50328 - DNA, 25 bp, Canis familiaris
aagaaacagaccaactacctgcgca

SEQ ID NO: 50329 - DNA, 25 bp, Canis familiaris
aagaacagaacctcttgcttcagca

SEQ ID NO: 50330 - DNA, 25 bp, Canis familiaris
aagaaggagactccctctgttggct

SEQ ID NO: 50331 - DNA, 25 bp, Canis familiaris
aagaagagggatccctgcgtggcgc

SEQ ID NO: 50332 - DNA, 25 bp, Canis familiaris
aagaagaggtcaccgcgtgagtccg

SEQ ID NO: 50333 - DNA, 25 bp, Canis familiaris
aagaagatgagatgcgccgggctgc

SEQ ID NO: 50334 - DNA, 25 bp, Canis familiaris
aagaaatcagaactgctgccggctg

SEQ ID NO: 50335 - DNA, 25 bp, Canis familiaris
aagagacctgaactgggcagactgc

SEQ ID NO: 50336 - DNA, 25 bp, Canis familiaris
aagagacctgaactgggcagactgc

SEQ ID NO: 50337 - DNA, 25 bp, Canis familiaris
aagagacctgaactgggcagactgc

SEQ ID NO: 50338 - DNA, 25 bp, Canis familiaris
aagagtcctgatggcagcggagccc

SEQ ID NO: 50339 - DNA, 25 bp, Canis familiaris
aagaacctgatgcgcaaggccacag

SEQ ID NO: 50340 - DNA, 25 bp, Canis familiaris
aagacacattatctgcaggaagcaa

SEQ ID NO: 50341 - DNA, 25 bp, Canis familiaris
aagcacagttatcctgaggcagagg

SEQ ID NO: 50342 - DNA, 25 bp, Canis familiaris
aagcagcaggggcctgtggctgggt

SEQ ID NO: 50343 - DNA, 25 bp, Canis familiaris
aagcagcgcggggagggctggaggc

SEQ ID NO: 50344 - DNA, 25 bp, Canis familiaris
aagcacgtggtgtttggggaggtca

SEQ ID NO: 50345 - DNA, 25 bp, Canis familiaris
aagcacactggtggtggtcgggagt

SEQ ID NO: 50346 - DNA, 25 bp, Canis familiaris
aagcaagctggaagtgggccggatc

SEQ ID NO: 50347 - DNA, 25 bp, Canis familiaris
aagagcactggcacaggggctcgac

SEQ ID NO: 50348 - DNA, 25 bp, Canis familiaris
aagcagttggaccagaaggcatctg

SEQ ID NO: 50349 - DNA, 25 bp, Canis familiaris
aagcagtcttctcgaattgtcactc

SEQ ID NO: 50350 - DNA, 25 bp, Canis familiaris
aagagaattctgatactgtacatag

SEQ ID NO: 50351 - DNA, 25 bp, Canis familiaris
aagagaatctgttccactatttagt

SEQ ID NO: 50352 - DNA, 25 bp, Canis familiaris
aagaaacttgggactgacttattcg

SEQ ID NO: 50353 - DNA, 25 bp, Canis familiaris
aagcttaggggtggctgactctcat

SEQ ID NO: 50354 - DNA, 25 bp, Canis familiaris
aagcaagaggggcggacacacgggg

SEQ ID NO: 50355 - DNA, 25 bp, Canis familiaris
aagcagagaggctgggagaccccct

SEQ ID NO: 50356 - DNA, 25 bp, Canis familiaris
aagcatggggaaccaggacgcccgc

SEQ ID NO: 50357 - DNA, 25 bp, Canis familiaris
aagcagctgatgcagaggaggcccc

SEQ ID NO: 50358 - DNA, 25 bp, Canis familiaris
aagcagtgccgaaggacaggcacct

SEQ ID NO: 50359 - DNA, 25 bp, Canis familiaris
aagcagttctgcagtgacgacacct

SEQ ID NO: 50360 - DNA, 25 bp, Canis familiaris
aagcagtctggaagatgccgcactc

SEQ ID NO: 50361 - DNA, 25 bp, Canis familiaris
aagacttgagcaacgctgatgcagc

SEQ ID NO: 50362 - DNA, 25 bp, Canis familiaris
aagacactgactactgtccagggca

SEQ ID NO: 50363 - DNA, 25 bp, Canis familiaris
aagagaggcagcagttccgggagga

SEQ ID NO: 50364 - DNA, 25 bp, Canis familiaris
aagatggactgagttttgggtggca

SEQ ID NO: 50365 - DNA, 25 bp, Canis familiaris
aagcagtactcattatttgtgggga

SEQ ID NO: 50366 - DNA, 25 bp, Canis familiaris
aagagcttcctgttctttggtagaa

SEQ ID NO: 50367 - DNA, 25 bp, Canis familiaris
aagcactctccttagttttctagta

SEQ ID NO: 50368 - DNA, 25 bp, Canis familiaris
aagcagctctggggaggtttctcgt

SEQ ID NO: 50369 - DNA, 25 bp, Canis familiaris
aagactgttagagcgatttcctgtg

SEQ ID NO: 50370 - DNA, 25 bp, Canis familiaris
aagcactggaacacgatcctctttc

SEQ ID NO: 50371 - DNA, 25 bp, Canis familiaris
aagcactcagagacttgtgtcccct

SEQ ID NO: 50372 - DNA, 25 bp, Canis familiaris
aagactcatagcataattaaccatt

SEQ ID NO: 50373 - DNA, 25 bp, Canis familiaris
aagcagccttgatacattagccctt

SEQ ID NO: 50374 - DNA, 25 bp, Canis familiaris
aagcatgcctttttcaggtgctcct

SEQ ID NO: 50375 - DNA, 25 bp, Canis familiaris
aagacctctgcctcagtggtggtct

SEQ ID NO: 50376 - DNA, 25 bp, Canis familiaris
aagatccgaacacagcggtcgacat

SEQ ID NO: 50377 - DNA, 25 bp, Canis familiaris
aagatcacggaaaggcaggcattaa

SEQ ID NO: 50378 - DNA, 25 bp, Canis familiaris
aagcaaagagatttacaggtgtaat

SEQ ID NO: 50379 - DNA, 25 bp, Canis familiaris
aagacaagagcagatacgatgtttt

SEQ ID NO: 50380 - DNA, 25 bp, Canis familiaris
aagaagaacctatcgatgtgcaaaa

SEQ ID NO: 50381 - DNA, 25 bp, Canis familiaris
aagaaccacaactcagtggcaacaa

SEQ ID NO: 50382 - DNA, 25 bp, Canis familiaris
aagtccgccaacttcactgagaagg

SEQ ID NO: 50383 - DNA, 25 bp, Canis familiaris
aagacccccaactcatggtaggagg

SEQ ID NO: 50384 - DNA, 25 bp, Canis familiaris
aagacccacatcaacattgtggtca

SEQ ID NO: 50385 - DNA, 25 bp, Canis familiaris
aagacgccagcagaatctgccactc

SEQ ID NO: 50386 - DNA, 25 bp, Canis familiaris
aagacactcagggagttctcacctc

SEQ ID NO: 50387 - DNA, 25 bp, Canis familiaris
aagaactgaggcttttcttccactt

SEQ ID NO: 50388 - DNA, 25 bp, Canis familiaris
aagacctatgggacttccctacttg

SEQ ID NO: 50389 - DNA, 25 bp, Canis familiaris
aagaacttcagtgatgtccaccctg

SEQ ID NO: 50390 - DNA, 25 bp, Canis familiaris
aagaccttagatgtgctctctgaga

SEQ ID NO: 50391 - DNA, 25 bp, Canis familiaris
aagactctaaatagcctctctcaga

SEQ ID NO: 50392 - DNA, 25 bp, Canis familiaris
aagaattcagctaacgcttccagac

SEQ ID NO: 50393 - DNA, 25 bp, Canis familiaris
aagaattcagctaacgcttccagac

SEQ ID NO: 50394 - DNA, 25 bp, Canis familiaris
aagaattcctgacccggatcagcac

SEQ ID NO: 50395 - DNA, 25 bp, Canis familiaris
aagaatgtactaccattggccatgt

SEQ ID NO: 50396 - DNA, 25 bp, Canis familiaris
aagaagctcaatgactgttgcgcat

SEQ ID NO: 50397 - DNA, 25 bp, Canis familiaris
aagaagctgcaagtcggaacctcac

SEQ ID NO: 50398 - DNA, 25 bp, Canis familiaris
aagagacctaatgggaacactaaga

SEQ ID NO: 50399 - DNA, 25 bp, Canis familiaris
aaggcgacttatgagaacactggga

SEQ ID NO: 50400 - DNA, 25 bp, Canis familiaris
aagaggacctggtgtcccagggctt

SEQ ID NO: 50401 - DNA, 25 bp, Canis familiaris
aagcatggagcactgcagaaccctc

SEQ ID NO: 50402 - DNA, 25 bp, Canis familiaris
aagcaagtgctgtcagcaatatcct

SEQ ID NO: 50403 - DNA, 25 bp, Canis familiaris
aagcagcagcttcctacatatagta

SEQ ID NO: 50404 - DNA, 25 bp, Canis familiaris
aagacgcaagtcccatgaagctgag

SEQ ID NO: 50405 - DNA, 25 bp, Canis familiaris
aagaggagatgtgccaggagctggg

SEQ ID NO: 50406 - DNA, 25 bp, Canis familiaris
aagcaggtgcaggaacgggatggac

SEQ ID NO: 50407 - DNA, 25 bp, Canis familiaris
aagcactgtcacccacattggtgga

SEQ ID NO: 50408 - DNA, 25 bp, Canis familiaris
aagcatctgggcggctttgggagtt

SEQ ID NO: 50409 - DNA, 25 bp, Canis familiaris
aagaagggcttctgtgggagcttcc

SEQ ID NO: 50410 - DNA, 25 bp, Canis familiaris
aagaacacgcacatcgtggtgagct

SEQ ID NO: 50411 - DNA, 25 bp, Canis familiaris
aagcagcaaacacttctaggtcact

SEQ ID NO: 50412 - DNA, 25 bp, Canis familiaris
aagcagtcaaccattcagacaacca

SEQ ID NO: 50413 - DNA, 25 bp, Canis familiaris
aagcagccaaccatctttcaaaata

SEQ ID NO: 50414 - DNA, 25 bp, Canis familiaris
aagaccaagccgtattccaaagtca

SEQ ID NO: 50415 - DNA, 25 bp, Canis familiaris
aagaactcgccgtgcagtcaaattc

SEQ ID NO: 50416 - DNA, 25 bp, Canis familiaris
aagaacccagcgttatgtacatgat

SEQ ID NO: 50417 - DNA, 25 bp, Canis familiaris
aagaaccacagcggattctcactgg

SEQ ID NO: 50418 - DNA, 25 bp, Canis familiaris
aagaacaccagtggacttcctacta

SEQ ID NO: 50419 - DNA, 25 bp, Canis familiaris
aagaatgccccagggctaccgtgta

SEQ ID NO: 50420 - DNA, 25 bp, Canis familiaris
aagaatgatgcccagggatccctgg

SEQ ID NO: 50421 - DNA, 25 bp, Canis familiaris
aagcagtgtcacttagtacccgctg

SEQ ID NO: 50422 - DNA, 25 bp, Canis familiaris
aagagtgtgcagtggtgaaggggga

SEQ ID NO: 50423 - DNA, 25 bp, Canis familiaris
aagcaatgtaaatgtgaggggatag

SEQ ID NO: 50424 - DNA, 25 bp, Canis familiaris
gaaatagtaagtcagaggggaaaat

SEQ ID NO: 50425 - DNA, 25 bp, Canis familiaris
aagatattaaggcagggggcccctg

SEQ ID NO: 50426 - DNA, 25 bp, Canis familiaris
aagagtcgacagaggcgggatccct

SEQ ID NO: 50427 - DNA, 25 bp, Canis familiaris
aagaggtgagggtgcacgtgtcccc

SEQ ID NO: 50428 - DNA, 25 bp, Canis familiaris
aagaggctgaagtacctccagctcc

SEQ ID NO: 50429 - DNA, 25 bp, Canis familiaris
aagagatgctcaacaacctcctggt

SEQ ID NO: 50430 - DNA, 25 bp, Canis familiaris
aagagtcacagtgaccccttttgct

SEQ ID NO: 50431 - DNA, 25 bp, Canis familiaris
aagcaggcacaagaccttcgttaat

SEQ ID NO: 50432 - DNA, 25 bp, Canis familiaris
aagcagtctccagattctttttgaa

SEQ ID NO: 50433 - DNA, 25 bp, Canis familiaris
aagcatgtattttattcattctaat

SEQ ID NO: 50434 - DNA, 25 bp, Canis familiaris
aagcactttatcactttctgacact

SEQ ID NO: 50435 - DNA, 25 bp, Canis familiaris
aagcacccttatgtttatagcagca

SEQ ID NO: 50436 - DNA, 25 bp, Canis familiaris
aagcacctcttaatgtcctgtgaac

SEQ ID NO: 50437 - DNA, 25 bp, Canis familiaris
aagcagcgcctttttgttgagcaac

SEQ ID NO: 50438 - DNA, 25 bp, Canis familiaris
aagcagccacttttgctttggttcc

SEQ ID NO: 50439 - DNA, 25 bp, Canis familiaris
aagaccaggttttagatgtggctcc

SEQ ID NO: 50440 - DNA, 25 bp, Canis familiaris
aagaccaggccctggatttctgccc

SEQ ID NO: 50441 - DNA, 25 bp, Canis familiaris
aaggcagggggctggaagtctgtcc

SEQ ID NO: 50442 - DNA, 25 bp, Canis familiaris
aagtcatctgggtgggaattgcctc

SEQ ID NO: 50443 - DNA, 25 bp, Canis familiaris
aagtactggttctggacttcctact

SEQ ID NO: 50444 - DNA, 25 bp, Canis familiaris
aagactggtttctgtacttgctcta

SEQ ID NO: 50445 - DNA, 25 bp, Canis familiaris
aagactaagttctgtagcattcctg

SEQ ID NO: 50446 - DNA, 25 bp, Canis familiaris
aagacatagcaggtcacggccagtc

SEQ ID NO: 50447 - DNA, 25 bp, Canis familiaris
aagcagtaagctaacaggccctcac

SEQ ID NO: 50448 - DNA, 25 bp, Canis familiaris
aagcagtagactgtgcagggcctgg

SEQ ID NO: 50449 - DNA, 25 bp, Canis familiaris
aagaatagcctttgggcctctgtgg

SEQ ID NO: 50450 - DNA, 25 bp, Canis familiaris
aagacttgatcctgggactctggga

SEQ ID NO: 50451 - DNA, 25 bp, Canis familiaris
aagaatttcttttagaggctgggca

SEQ ID NO: 50452 - DNA, 25 bp, Canis familiaris
aagacacttcttttacttcagagga

SEQ ID NO: 50453 - DNA, 25 bp, Canis familiaris
aagagcagttttggccacttatagg

SEQ ID NO: 50454 - DNA, 25 bp, Canis familiaris
aagcaggttgttgcactctgtgtat

SEQ ID NO: 50455 - DNA, 25 bp, Canis familiaris
aagcaggatcttgtcactccattct

SEQ ID NO: 50456 - DNA, 25 bp, Canis familiaris
aagcagggcaatccatcatttcttt

SEQ ID NO: 50457 - DNA, 25 bp, Canis familiaris
aagcaggactgaacattttcatcat

SEQ ID NO: 50458 - DNA, 25 bp, Canis familiaris
aagcaagcattcaagccttcattct

SEQ ID NO: 50459 - DNA, 25 bp, Canis familiaris
aagcaaatgtctccgtaatctgtgc

SEQ ID NO: 50460 - DNA, 25 bp, Canis familiaris
aagcacagattcacttcttcttcac

SEQ ID NO: 50461 - DNA, 25 bp, Canis familiaris
aagcagcagcttgagttattcccac

SEQ ID NO: 50462 - DNA, 25 bp, Canis familiaris
aagagagatttaccgctatcccagg

SEQ ID NO: 50463 - DNA, 25 bp, Canis familiaris
aagagcagattgttcctaaaccaga

SEQ ID NO: 50464 - DNA, 25 bp, Canis familiaris
aagagcagattgttcctaaaccaga

SEQ ID NO: 50465 - DNA, 25 bp, Canis familiaris
aagatgtagctgtctcctattacca

SEQ ID NO: 50466 - DNA, 25 bp, Canis familiaris
aagatgtagtcactttactcccatt

SEQ ID NO: 50467 - DNA, 25 bp, Canis familiaris
aagaatagtctttatctcccacatt

SEQ ID NO: 50468 - DNA, 25 bp, Canis familiaris
aagcaaagtcgcttgtccatcacaa

SEQ ID NO: 50469 - DNA, 25 bp, Canis familiaris
aagaatatcctgtttgtcatcacaa

SEQ ID NO: 50470 - DNA, 25 bp, Canis familiaris
aagaatgacttggtttctgcccagg

SEQ ID NO: 50471 - DNA, 25 bp, Canis familiaris
aagaaactttatgctttgctcagat

SEQ ID NO: 50472 - DNA, 25 bp, Canis familiaris
aagaatatttcttcagcctttaatt

SEQ ID NO: 50473 - DNA, 25 bp, Canis familiaris
aagaacaggtcaatcagcccttgga

SEQ ID NO: 50474 - DNA, 25 bp, Canis familiaris
aagaacgcgattcacacctttatgc

SEQ ID NO: 50475 - DNA, 25 bp, Canis familiaris
aagacccagttcaagagcatttttc

SEQ ID NO: 50476 - DNA, 25 bp, Canis familiaris
aagacccatccttacagctttaagg

SEQ ID NO: 50477 - DNA, 25 bp, Canis familiaris
aagcacccttctttcgtaggagaga

SEQ ID NO: 50478 - DNA, 25 bp, Canis familiaris
aagcaccgcctcatcaaggtggaga

SEQ ID NO: 50479 - DNA, 25 bp, Canis familiaris
aagaactggccaccaagctgggcta

SEQ ID NO: 50480 - DNA, 25 bp, Canis familiaris
aagaactggccaccaagctgggcta

SEQ ID NO: 50481 - DNA, 25 bp, Canis familiaris
aagaactggccaccaagctgggcta

SEQ ID NO: 50482 - DNA, 25 bp, Canis familiaris
aagaagctgagacccaactgcaagt

SEQ ID NO: 50483 - DNA, 25 bp, Canis familiaris
aagagagcggcatcgatgatctgat

SEQ ID NO: 50484 - DNA, 25 bp, Canis familiaris
aagagacaggagcgacagcttctgt

SEQ ID NO: 50485 - DNA, 25 bp, Canis familiaris
aagaccaaccagaagcagcttgctt

SEQ ID NO: 50486 - DNA, 25 bp, Canis familiaris
aagacccagcagataagcattgtta

SEQ ID NO: 50487 - DNA, 25 bp, Canis familiaris
aagaccccaatattatcatagccaa

SEQ ID NO: 50488 - DNA, 25 bp, Canis familiaris
aagacccctaataaatcactcctca

SEQ ID NO: 50489 - DNA, 25 bp, Canis familiaris
aagaccagcctataattcttgtgct

SEQ ID NO: 50490 - DNA, 25 bp, Canis familiaris
aagcactcgctgaaaattatctttt

SEQ ID NO: 50491 - DNA, 25 bp, Canis familiaris
aagcacatcttttatattctctatt

SEQ ID NO: 50492 - DNA, 25 bp, Canis familiaris
aagcaatccatttctgattagcctt

SEQ ID NO: 50493 - DNA, 25 bp, Canis familiaris
aagcaatcctaagatcctgcctgtc

SEQ ID NO: 50494 - DNA, 25 bp, Canis familiaris
aagaacctcaagaacctgcatacct

SEQ ID NO: 50495 - DNA, 25 bp, Canis familiaris
aagaatctgctgtaatccctaactc

SEQ ID NO: 50496 - DNA, 25 bp, Canis familiaris
aagacattgcattttccacttaaca

SEQ ID NO: 50497 - DNA, 25 bp, Canis familiaris
aagaatctgtcatgtccatataaaa

SEQ ID NO: 50498 - DNA, 25 bp, Canis familiaris
aagacatctgtattgctactcagta

SEQ ID NO: 50499 - DNA, 25 bp, Canis familiaris
aagacctgtcttctccagtagaggt

SEQ ID NO: 50500 - DNA, 25 bp, Canis familiaris
aatcttcgtgttcacgttaaggaca

SEQ ID NO: 50501 - DNA, 25 bp, Canis familiaris
aattcttttaaatgtgtaaggcgca

SEQ ID NO: 50502 - DNA, 25 bp, Canis familiaris
aatctgttttacttcgggacggcag

SEQ ID NO: 50503 - DNA, 25 bp, Canis familiaris
aatcgttttcctaggagaggcccag

SEQ ID NO: 50504 - DNA, 25 bp, Canis familiaris
aatctttagtcctgggagtccggct

SEQ ID NO: 50505 - DNA, 25 bp, Canis familiaris
aatgcttttaaatgtgaggtcctgg

SEQ ID NO: 50506 - DNA, 25 bp, Canis familiaris
aagttgaacaggtgctggagtcggc

SEQ ID NO: 50507 - DNA, 25 bp, Canis familiaris
aagatttacaggtgcagtcaccgaa

SEQ ID NO: 50508 - DNA, 25 bp, Canis familiaris
aagattcagactcggattgctaacg

SEQ ID NO: 50509 - DNA, 25 bp, Canis familiaris
aagatgatgatactgctaacctaga

SEQ ID NO: 50510 - DNA, 25 bp, Canis familiaris
aagaatgctcagtacaacctaagaa

SEQ ID NO: 50511 - DNA, 25 bp, Canis familiaris
aagattgcaaagttaccataggaag

SEQ ID NO: 50512 - DNA, 25 bp, Canis familiaris
aagaccagtaactcgatagaatagt

SEQ ID NO: 50513 - DNA, 25 bp, Canis familiaris
aagtccgttaatctactatatggtt

SEQ ID NO: 50514 - DNA, 25 bp, Canis familiaris
aagacggtcgaacttgactatctag

SEQ ID NO: 50515 - DNA, 25 bp, Canis familiaris
aagacgtgtcagaacccatcatatt

SEQ ID NO: 50516 - DNA, 25 bp, Canis familiaris
aagaacattcaatccttcgagtaaa

SEQ ID NO: 50517 - DNA, 25 bp, Canis familiaris
aagaaatccaaattcaaccagtatt

SEQ ID NO: 50518 - DNA, 25 bp, Canis familiaris
aagaaatcgcaagaacataataatt

SEQ ID NO: 50519 - DNA, 25 bp, Canis familiaris
aagaacatcactcagaacaatcata

SEQ ID NO: 50520 - DNA, 25 bp, Canis familiaris
aagaaaatctaatatcgcagcataa

SEQ ID NO: 50521 - DNA, 25 bp, Canis familiaris
aagaagacctagagaccatgcaagc

SEQ ID NO: 50522 - DNA, 25 bp, Canis familiaris
aagaaggcacgaaaggctatgtcca

SEQ ID NO: 50523 - DNA, 25 bp, Canis familiaris
aagaaggactgagtagcctctgccc

SEQ ID NO: 50524 - DNA, 25 bp, Canis familiaris
aagaaagatgctggccgtttgcccc

SEQ ID NO: 50525 - DNA, 25 bp, Canis familiaris
aagaatgttgctagtgggggcccct

SEQ ID NO: 50526 - DNA, 25 bp, Canis familiaris
aagaatggtctttggatgttccctc

SEQ ID NO: 50527 - DNA, 25 bp, Canis familiaris
aagagaatgttaagatggttgccct

SEQ ID NO: 50528 - DNA, 25 bp, Canis familiaris
aagcaactgttctagtgctgttgtg

SEQ ID NO: 50529 - DNA, 25 bp, Canis familiaris
aagacactgttggaatgatggtatg

SEQ ID NO: 50530 - DNA, 25 bp, Canis familiaris
aagactcatttccacattgacttga

SEQ ID NO: 50531 - DNA, 25 bp, Canis familiaris
aagactgattctgtcattccgtagc

SEQ ID NO: 50532 - DNA, 25 bp, Canis familiaris
aagaatatacctacaatcacctcat

SEQ ID NO: 50533 - DNA, 25 bp, Canis familiaris
aagaagatatccgcaacgccatcat

SEQ ID NO: 50534 - DNA, 25 bp, Canis familiaris
aatgtctgtacagccaacggtgtcc

SEQ ID NO: 50535 - DNA, 25 bp, Canis familiaris
aagttgtaatgctcgttgggtctct

SEQ ID NO: 50536 - DNA, 25 bp, Canis familiaris
aagttggagtgcttcctttgcttac

SEQ ID NO: 50537 - DNA, 25 bp, Canis familiaris
aagattgggctgtctcgtttgtaag

SEQ ID NO: 50538 - DNA, 25 bp, Canis familiaris
aagagtgggattccttcctgtgggt

SEQ ID NO: 50539 - DNA, 25 bp, Canis familiaris
aagagctggaatctctggtcggggc

SEQ ID NO: 50540 - DNA, 25 bp, Canis familiaris
aatactgcgaacatttgtgggtcga

SEQ ID NO: 50541 - DNA, 25 bp, Canis familiaris
aagagcttgcccatgttgtggactc

SEQ ID NO: 50542 - DNA, 25 bp, Canis familiaris
aagacactagccatttgtgcagagt

SEQ ID NO: 50543 - DNA, 25 bp, Canis familiaris
aagatcctcaaactttatgcatggg

SEQ ID NO: 50544 - DNA, 25 bp, Canis familiaris
aagatggccaagatgtgtcaagggt

SEQ ID NO: 50545 - DNA, 25 bp, Canis familiaris
aagaggctcaagttacaaagaagta

SEQ ID NO: 50546 - DNA, 25 bp, Canis familiaris
aagaggctgcaatcccaaacaataa

SEQ ID NO: 50547 - DNA, 25 bp, Canis familiaris
aagtggcataattcctcttcgaaat

SEQ ID NO: 50548 - DNA, 25 bp, Canis familiaris
aagaggtaaccaatttgctgataaa

SEQ ID NO: 50549 - DNA, 25 bp, Canis familiaris
aagaagctagaattttttataatat

SEQ ID NO: 50550 - DNA, 25 bp, Canis familiaris
aagaactaacactgtttgccaatca

SEQ ID NO: 50551 - DNA, 25 bp, Canis familiaris
aagcaactacacctggatttttcca

SEQ ID NO: 50552 - DNA, 25 bp, Canis familiaris
aagaaggacaccagtttctctgctc

SEQ ID NO: 50553 - DNA, 25 bp, Canis familiaris
aagaagagacatgccggttccagac

SEQ ID NO: 50554 - DNA, 25 bp, Canis familiaris
aagaagatataccacaggctgccca

SEQ ID NO: 50555 - DNA, 25 bp, Canis familiaris
aagcaagactacctcagagctctcc

SEQ ID NO: 50556 - DNA, 25 bp, Canis familiaris
aagaaggcaagcctcagaccagcca

SEQ ID NO: 50557 - DNA, 25 bp, Canis familiaris
aagagtgagcacagccagactagca

SEQ ID NO: 50558 - DNA, 25 bp, Canis familiaris
aagagatgacctggccaacctagat

SEQ ID NO: 50559 - DNA, 25 bp, Canis familiaris
aagaagatgccctgtatgcctgagt

SEQ ID NO: 50560 - DNA, 25 bp, Canis familiaris
aagaggagcacgtgtcgacgagctg

SEQ ID NO: 50561 - DNA, 25 bp, Canis familiaris
aagaggagaagttgccccacggaat

SEQ ID NO: 50562 - DNA, 25 bp, Canis familiaris
aagagctggaagacaaccccaacca

SEQ ID NO: 50563 - DNA, 25 bp, Canis familiaris
aagaggaagagagaggccctcagct

SEQ ID NO: 50564 - DNA, 25 bp, Canis familiaris
aagagggctgagctaagcctcggct

SEQ ID NO: 50565 - DNA, 25 bp, Canis familiaris
cactggggtccaaaaggctagccta

SEQ ID NO: 50566 - DNA, 25 bp, Canis familiaris
aagagggtctctgaaggcttcctac

SEQ ID NO: 50567 - DNA, 25 bp, Canis familiaris
aagaggcagtcttacaggggcttct

SEQ ID NO: 50568 - DNA, 25 bp, Canis familiaris
aagaacttcaatgcaggaggtcaca

SEQ ID NO: 50569 - DNA, 25 bp, Canis familiaris
aagaacctgctcttcaaagactcca

SEQ ID NO: 50570 - DNA, 25 bp, Canis familiaris
aagaacctgctttcatgatgtcact

SEQ ID NO: 50571 - DNA, 25 bp, Canis familiaris
aagaagacgctcgcagatacactct

SEQ ID NO: 50572 - DNA, 25 bp, Canis familiaris
aagaagaagctctgcaatgtcacca

SEQ ID NO: 50573 - DNA, 25 bp, Canis familiaris
aagaagagaatctgttccactattt

SEQ ID NO: 50574 - DNA, 25 bp, Canis familiaris
aagacaagtggactgggccctattc

SEQ ID NO: 50575 - DNA, 25 bp, Canis familiaris
aagagctacttgtctagagtgccta

SEQ ID NO: 50576 - DNA, 25 bp, Canis familiaris
aagatgcaacatttgtcgagcccta

SEQ ID NO: 50577 - DNA, 25 bp, Canis familiaris
aagaggacatcatttgggcccattt

SEQ ID NO: 50578 - DNA, 25 bp, Canis familiaris
aagacgcccaatggaggccacttga

SEQ ID NO: 50579 - DNA, 25 bp, Canis familiaris
aagatcgcaaaagaagccgctgtga

SEQ ID NO: 50580 - DNA, 25 bp, Canis familiaris
aagcaagtagaatccagccctggtc

SEQ ID NO: 50581 - DNA, 25 bp, Canis familiaris
aagcaagtaagatctgagcctcaac

SEQ ID NO: 50582 - DNA, 25 bp, Canis familiaris
aagaagtacagcttttcccgagctc

SEQ ID NO: 50583 - DNA, 25 bp, Canis familiaris
aagaatgtccagattacacctgccc

SEQ ID NO: 50584 - DNA, 25 bp, Canis familiaris
aagacttccagtatgaggccatgca

SEQ ID NO: 50585 - DNA, 25 bp, Canis familiaris
aagagctgttggaattgcagagcca

SEQ ID NO: 50586 - DNA, 25 bp, Canis familiaris
aagacagtgtggtattgacataagg

SEQ ID NO: 50587 - DNA, 25 bp, Canis familiaris
aagacagattgaacacttatgaagt

SEQ ID NO: 50588 - DNA, 25 bp, Canis familiaris
aagttgttataaagttgaattgtga

SEQ ID NO: 50589 - DNA, 25 bp, Canis familiaris
aagtttttattgttcagtaatctga

SEQ ID NO: 50590 - DNA, 25 bp, Canis familiaris
aagagttattgtcgtctcagtgaac

SEQ ID NO: 50591 - DNA, 25 bp, Canis familiaris
ctagaggttttacttacggactcat

SEQ ID NO: 50592 - DNA, 25 bp, Canis familiaris
aagaggtctccatgttatcgggtca

SEQ ID NO: 50593 - DNA, 25 bp, Canis familiaris
aagagggtcctactttggagcaact

SEQ ID NO: 50594 - DNA, 25 bp, Canis familiaris
aagactaggcctgacgtgtggaacc

SEQ ID NO: 50595 - DNA, 25 bp, Canis familiaris
aagacagggcagcgccagtgggaac

SEQ ID NO: 50596 - DNA, 25 bp, Canis familiaris
aagacaagaggcagcacggggcgag

SEQ ID NO: 50597 - DNA, 25 bp, Canis familiaris
aagactcaacccgcattgggcgagc

SEQ ID NO: 50598 - DNA, 25 bp, Canis familiaris
aagactcaacccgcattgggcgagc

SEQ ID NO: 50599 - DNA, 25 bp, Canis familiaris
aagactcaacccgcattgggcgagc

SEQ ID NO: 50600 - DNA, 25 bp, Canis familiaris
aagactaattgtggcacttggggcg

SEQ ID NO: 50601 - DNA, 25 bp, Canis familiaris
aagactacattgctgacttcactgc

SEQ ID NO: 50602 - DNA, 25 bp, Canis familiaris
aagagctaacatttactatcgctta

SEQ ID NO: 50603 - DNA, 25 bp, Canis familiaris
aagttagacaaatcttgcctgtaat

SEQ ID NO: 50604 - DNA, 25 bp, Canis familiaris
aagtttagagagcactgttttaagt

SEQ ID NO: 50605 - DNA, 25 bp, Canis familiaris
aagatttccagtcattgtcgttccg

SEQ ID NO: 50606 - DNA, 25 bp, Canis familiaris
aagaattcgcatcttgattctgggc

SEQ ID NO: 50607 - DNA, 25 bp, Canis familiaris
aagcaatccatgctttgtttaggga

SEQ ID NO: 50608 - DNA, 25 bp, Canis familiaris
aagaatctcagttccttttattgga

SEQ ID NO: 50609 - DNA, 25 bp, Canis familiaris
aagaactcgttgacacatttttggt

SEQ ID NO: 50610 - DNA, 25 bp, Canis familiaris
aagagaaagatctcctttgtctggt

SEQ ID NO: 50611 - DNA, 25 bp, Canis familiaris
aagagaggaacatgcccttcctggg

SEQ ID NO: 50612 - DNA, 25 bp, Canis familiaris
aagaactgtaatgcccttttgtgga

SEQ ID NO: 50613 - DNA, 25 bp, Canis familiaris
aagaagcatgtcctggcaacttttt

SEQ ID NO: 50614 - DNA, 25 bp, Canis familiaris
aagaagctcatgactgtgcgcactt

SEQ ID NO: 50615 - DNA, 25 bp, Canis familiaris
aagacattctgcatgtgccatttcc

SEQ ID NO: 50616 - DNA, 25 bp, Canis familiaris
aagaatgtcactaatgccatgccat

SEQ ID NO: 50617 - DNA, 25 bp, Canis familiaris
aagaatgtacatgcatgcacgccct

SEQ ID NO: 50618 - DNA, 25 bp, Canis familiaris
aagcaatgtttttcaccatccttac

SEQ ID NO: 50619 - DNA, 25 bp, Canis familiaris
aagaatttgcttaaactgcagcatt

SEQ ID NO: 50620 - DNA, 25 bp, Canis familiaris
aagtcattcctcacacattgcaaag

SEQ ID NO: 50621 - DNA, 25 bp, Canis familiaris
aagacaacaccagagctccaaagag

SEQ ID NO: 50622 - DNA, 25 bp, Canis familiaris
aagactcacaactattctccagaag

SEQ ID NO: 50623 - DNA, 25 bp, Canis familiaris
aagaatctacagttctggccagaga

SEQ ID NO: 50624 - DNA, 25 bp, Canis familiaris
aagagacaagagactggcagccaaa

SEQ ID NO: 50625 - DNA, 25 bp, Canis familiaris
aagagtaagttgcagctgccaagag

SEQ ID NO: 50626 - DNA, 25 bp, Canis familiaris
aagagctacattgggacggagcaga

SEQ ID NO: 50627 - DNA, 25 bp, Canis familiaris
aagatctccatcaaggtcaggtcaa

SEQ ID NO: 50628 - DNA, 25 bp, Canis familiaris
aagattgtccagatgtgcaggttaa

SEQ ID NO: 50629 - DNA, 25 bp, Canis familiaris
aagaatgctcctgttcattgtctcg

SEQ ID NO: 50630 - DNA, 25 bp, Canis familiaris
aagaatgctggtctccaaatgttgt

SEQ ID NO: 50631 - DNA, 25 bp, Canis familiaris
aagaagctggctgtctccagtgctt

SEQ ID NO: 50632 - DNA, 25 bp, Canis familiaris
aagaatctattattctccgttcttc

SEQ ID NO: 50633 - DNA, 25 bp, Canis familiaris
aagaatgttggctctcactgggcct

SEQ ID NO: 50634 - DNA, 25 bp, Canis familiaris
aagactgatgtttactctctgggcg

SEQ ID NO: 50635 - DNA, 25 bp, Canis familiaris
aagaatcatgtttcattttcacgtt

SEQ ID NO: 50636 - DNA, 25 bp, Canis familiaris
aagagactgtggataccatcacgaa

SEQ ID NO: 50637 - DNA, 25 bp, Canis familiaris
aagaagtgtatgatgagccacaagt

SEQ ID NO: 50638 - DNA, 25 bp, Canis familiaris
aagaactctatgaaaccaccagcca

SEQ ID NO: 50639 - DNA, 25 bp, Canis familiaris
aagaaatgttcaaaggagccctgca

SEQ ID NO: 50640 - DNA, 25 bp, Canis familiaris
aagaactggttatgagatcctctga

SEQ ID NO: 50641 - DNA, 25 bp, Canis familiaris
aagaaatggtgttggctctcctgtc

SEQ ID NO: 50642 - DNA, 25 bp, Canis familiaris
aagaagggtgcatgccagtccctct

SEQ ID NO: 50643 - DNA, 25 bp, Canis familiaris
aagaagagttggtccagtccacctc

SEQ ID NO: 50644 - DNA, 25 bp, Canis familiaris
aagaccacgtggtcacgtcaactcc

SEQ ID NO: 50645 - DNA, 25 bp, Canis familiaris
aagactccaggggactcattactcc

SEQ ID NO: 50646 - DNA, 25 bp, Canis familiaris
aagagctcaccgtgtctatatactc

SEQ ID NO: 50647 - DNA, 25 bp, Canis familiaris
aagagcgaccgtctgctcaaagtcc

SEQ ID NO: 50648 - DNA, 25 bp, Canis familiaris
aagagagaccctgctctcaggagaa

SEQ ID NO: 50649 - DNA, 25 bp, Canis familiaris
aagaagaacatcatcctcgaggagg

SEQ ID NO: 50650 - DNA, 25 bp, Canis familiaris
aagagagagaccctcactgctgggg

SEQ ID NO: 50651 - DNA, 25 bp, Canis familiaris
aagagaggcatcatccattgcccgg

SEQ ID NO: 50652 - DNA, 25 bp, Canis familiaris
aagaactgctaattcatgctcccat

SEQ ID NO: 50653 - DNA, 25 bp, Canis familiaris
aagagagactcacatcatgctccca

SEQ ID NO: 50654 - DNA, 25 bp, Canis familiaris
aagagatggccacggctgcttccag

SEQ ID NO: 50655 - DNA, 25 bp, Canis familiaris
aagagtggcttgtgcctgttctggt

SEQ ID NO: 50656 - DNA, 25 bp, Canis familiaris
aagagtgatcttccaacgttcaatt

SEQ ID NO: 50657 - DNA, 25 bp, Canis familiaris
aagagatgctttccaccagatgctg

SEQ ID NO: 50658 - DNA, 25 bp, Canis familiaris
aagaatctctgtcagtcagctctct

SEQ ID NO: 50659 - DNA, 25 bp, Canis familiaris
aagaatcctgagcgtgactcctgtg

SEQ ID NO: 50660 - DNA, 25 bp, Canis familiaris
aagatatccagtccgtgacgattgg

SEQ ID NO: 50661 - DNA, 25 bp, Canis familiaris
aagatatctcacgtactgacggtgg

SEQ ID NO: 50662 - DNA, 25 bp, Canis familiaris
aagaatccactgttgctactgaaag

SEQ ID NO: 50663 - DNA, 25 bp, Canis familiaris
aagaagaactgattcggctgcaaaa

SEQ ID NO: 50664 - DNA, 25 bp, Canis familiaris
aagagagaatctttcgggagaagga

SEQ ID NO: 50665 - DNA, 25 bp, Canis familiaris
aagagaatagtaatgccgtcgggtg

SEQ ID NO: 50666 - DNA, 25 bp, Canis familiaris
aagagcacaggatgtccaggcgggg

SEQ ID NO: 50667 - DNA, 25 bp, Canis familiaris
aagagaattgtagtccaggctgctg

SEQ ID NO: 50668 - DNA, 25 bp, Canis familiaris
aagatgacaggccagagcaatagct

SEQ ID NO: 50669 - DNA, 25 bp, Canis familiaris
aagaaatggccaataagcacatgaa

SEQ ID NO: 50670 - DNA, 25 bp, Canis familiaris
aagacattgaccatcacagaccaaa

SEQ ID NO: 50671 - DNA, 25 bp, Canis familiaris
aagacaaatatcatacgatctcact

SEQ ID NO: 50672 - DNA, 25 bp, Canis familiaris
aagaaaaccttagtatgcatcatat

SEQ ID NO: 50673 - DNA, 25 bp, Canis familiaris
aagaactagccctgttgcatcatgt

SEQ ID NO: 50674 - DNA, 25 bp, Canis familiaris
aagactctgagacgtggtttaatag

SEQ ID NO: 50675 - DNA, 25 bp, Canis familiaris
aagagcatctgaaattttgtttgta

SEQ ID NO: 50676 - DNA, 25 bp, Canis familiaris
aagacatcagagaagaaaggttgct

SEQ ID NO: 50677 - DNA, 25 bp, Canis familiaris
aagacacagagtatagatggccatc

SEQ ID NO: 50678 - DNA, 25 bp, Canis familiaris
aagaagctggtgagagtgccctcct

SEQ ID NO: 50679 - DNA, 25 bp, Canis familiaris
aagaagctgttgccggatgatccct

SEQ ID NO: 50680 - DNA, 25 bp, Canis familiaris
aagaagctgttgccggatgatccct

SEQ ID NO: 50681 - DNA, 25 bp, Canis familiaris
aagaccagttcatgcagtataccta

SEQ ID NO: 50682 - DNA, 25 bp, Canis familiaris
aagaccacttcatgtacaaccaaaa

SEQ ID NO: 50683 - DNA, 25 bp, Canis familiaris
aagactcaaacatacaacaacaaaa

SEQ ID NO: 50684 - DNA, 25 bp, Canis familiaris
aagactcaaaccatcaacaccaaga

SEQ ID NO: 50685 - DNA, 25 bp, Canis familiaris
aagaccagggacagcacaaccaagc

SEQ ID NO: 50686 - DNA, 25 bp, Canis familiaris
aagaccagggtgaggaacatcggct

SEQ ID NO: 50687 - DNA, 25 bp, Canis familiaris
aagagaaggcggagtgaggactctg

SEQ ID NO: 50688 - DNA, 25 bp, Canis familiaris
aagaacgccgtttgaggagcactgg

SEQ ID NO: 50689 - DNA, 25 bp, Canis familiaris
aagaaccatggcttcgaggtcctgt

SEQ ID NO: 50690 - DNA, 25 bp, Canis familiaris
aagacactagagttccattgtgcct

SEQ ID NO: 50691 - DNA, 25 bp, Canis familiaris
aagaagtaggaccgcttgtcttcca

SEQ ID NO: 50692 - DNA, 25 bp, Canis familiaris
aagaactttgccccatatttgtctc

SEQ ID NO: 50693 - DNA, 25 bp, Canis familiaris
aagaacttggccccaatatgtttct

SEQ ID NO: 50694 - DNA, 25 bp, Canis familiaris
aagaactttgctgtaccatgtattt

SEQ ID NO: 50695 - DNA, 25 bp, Canis familiaris
aagaaggtggccggaccatggcatc

SEQ ID NO: 50696 - DNA, 25 bp, Canis familiaris
aagacatggttgccgtaccttctat

SEQ ID NO: 50697 - DNA, 25 bp, Canis familiaris
aagacaggtgtgaattacactgtaa

SEQ ID NO: 50698 - DNA, 25 bp, Canis familiaris
aagacaggtctggatatctacgaag

SEQ ID NO: 50699 - DNA, 25 bp, Canis familiaris
aagagagcgcctatctcattcagaa

SEQ ID NO: 50700 - DNA, 25 bp, Canis familiaris
aagaagcgagtgctgactctgcgca

SEQ ID NO: 50701 - DNA, 25 bp, Canis familiaris
aagaggcagagacatcagcgcggca

SEQ ID NO: 50702 - DNA, 25 bp, Canis familiaris
aagaacagctgggtcctgaggcagg

SEQ ID NO: 50703 - DNA, 25 bp, Canis familiaris
aagaaattggtgtcctaggcctgct

SEQ ID NO: 50704 - DNA, 25 bp, Canis familiaris
aagaaattgtattcccagcctcata

SEQ ID NO: 50705 - DNA, 25 bp, Canis familiaris
aagaacttctacaactcagctctct

SEQ ID NO: 50706 - DNA, 25 bp, Canis familiaris
aagacatcattggaaactcccttcc

SEQ ID NO: 50707 - DNA, 25 bp, Canis familiaris
aagagatcctggggactgcccagtc

SEQ ID NO: 50708 - DNA, 25 bp, Canis familiaris
aagaacagctgggggcagcctgggt

SEQ ID NO: 50709 - DNA, 25 bp, Canis familiaris
aagatccgctgaggtgggcgcgggc

SEQ ID NO: 50710 - DNA, 25 bp, Canis familiaris
aagacgatggaaatggatgcgggag

SEQ ID NO: 50711 - DNA, 25 bp, Canis familiaris
aagacagagcagcagaggcggcggg

SEQ ID NO: 50712 - DNA, 25 bp, Canis familiaris
aagaactgagatcgaggggccgggc

SEQ ID NO: 50713 - DNA, 25 bp, Canis familiaris
aagaactggaggcgaagcgggcggc

SEQ ID NO: 50714 - DNA, 25 bp, Canis familiaris
aagaacagaggccacgaaagggagt

SEQ ID NO: 50715 - DNA, 25 bp, Canis familiaris
aattgatcaggaccacggaaaggaa

SEQ ID NO: 50716 - DNA, 25 bp, Canis familiaris
aagtttgggccagtgtgaagatgga

SEQ ID NO: 50717 - DNA, 25 bp, Canis familiaris
aagtactcgggcaaggaaggcgaca

SEQ ID NO: 50718 - DNA, 25 bp, Canis familiaris
aagaacacgaggccacgaaagagta

SEQ ID NO: 50719 - DNA, 25 bp, Canis familiaris
aagaaacagaggcccagtagacgtt

SEQ ID NO: 50720 - DNA, 25 bp, Canis familiaris
aagacacaaaggctgaggatgacgt

SEQ ID NO: 50721 - DNA, 25 bp, Canis familiaris
aagaagcagggttgtgaggggcgtg

SEQ ID NO: 50722 - DNA, 25 bp, Canis familiaris
aagagacagggtttgggcctcagga

SEQ ID NO: 50723 - DNA, 25 bp, Canis familiaris
aagatttggcgttaccgcctgaggg

SEQ ID NO: 50724 - DNA, 25 bp, Canis familiaris
aagactttctgataatcctgcctgg

SEQ ID NO: 50725 - DNA, 25 bp, Canis familiaris
aagacaagtagttacacctccaggc

SEQ ID NO: 50726 - DNA, 25 bp, Canis familiaris
aagaccaatcgtcctaactacgtga

SEQ ID NO: 50727 - DNA, 25 bp, Canis familiaris
aagaccaagagtctggtccctccaa

SEQ ID NO: 50728 - DNA, 25 bp, Canis familiaris
aagaccaagaggttgttctttgtag

SEQ ID NO: 50729 - DNA, 25 bp, Canis familiaris
aagactagaaagatgcatctcttct

SEQ ID NO: 50730 - DNA, 25 bp, Canis familiaris
aagacttcaaagttttctgctgtaa

SEQ ID NO: 50731 - DNA, 25 bp, Canis familiaris
aagacctcacctcatttatctgtca

SEQ ID NO: 50732 - DNA, 25 bp, Canis familiaris
aagtactgacctcctaatatttaag

SEQ ID NO: 50733 - DNA, 25 bp, Canis familiaris
aagtcctcccagtataatatttaat

SEQ ID NO: 50734 - DNA, 25 bp, Canis familiaris
aagtcccttattgaatattaaacag

SEQ ID NO: 50735 - DNA, 25 bp, Canis familiaris
aagtcccttggatgtgaattgaaaa

SEQ ID NO: 50736 - DNA, 25 bp, Canis familiaris
aagttccatttgtgttggtaaggat

SEQ ID NO: 50737 - DNA, 25 bp, Canis familiaris
cgggtcctttgatctggtaatggcg

SEQ ID NO: 50738 - DNA, 25 bp, Canis familiaris
aaggaccttaagtgggcaatgggcg

SEQ ID NO: 50739 - DNA, 25 bp, Canis familiaris
aattagcatttcagtgggggtgggg

SEQ ID NO: 50740 - DNA, 25 bp, Canis familiaris
caaggactttctcgggaccgtgtag

SEQ ID NO: 50741 - DNA, 25 bp, Canis familiaris
aaggcctcttttatgacggtcctgt

SEQ ID NO: 50742 - DNA, 25 bp, Canis familiaris
aagacgtttttaaagctgcttcctg

SEQ ID NO: 50743 - DNA, 25 bp, Canis familiaris
aagactgttttcagacgtttgtctg

SEQ ID NO: 50744 - DNA, 25 bp, Canis familiaris
aagatgctggtatcaggactttggt

SEQ ID NO: 50745 - DNA, 25 bp, Canis familiaris
aagatgctggtatcaggactttggt

SEQ ID NO: 50746 - DNA, 25 bp, Canis familiaris
aagagaggtcaacacactacatttt

SEQ ID NO: 50747 - DNA, 25 bp, Canis familiaris
aagactgttcaacgaggtcagattt

SEQ ID NO: 50748 - DNA, 25 bp, Canis familiaris
aagactctgccggtgatgttcatat

SEQ ID NO: 50749 - DNA, 25 bp, Canis familiaris
aagacattccgattgcagatttgag

SEQ ID NO: 50750 - DNA, 25 bp, Canis familiaris
aagatgacccagatcatgtttgaga

SEQ ID NO: 50751 - DNA, 25 bp, Canis familiaris
aagaggccagcagcaagcctttgca

SEQ ID NO: 50752 - DNA, 25 bp, Canis familiaris
aagacccacaagggctctgtgtgca

SEQ ID NO: 50753 - DNA, 25 bp, Canis familiaris
aagagccccaggggactgtgctggc

SEQ ID NO: 50754 - DNA, 25 bp, Canis familiaris
aagacacagcagtgggacttccgca

SEQ ID NO: 50755 - DNA, 25 bp, Canis familiaris
aagacacactgctggtaatttgaca

SEQ ID NO: 50756 - DNA, 25 bp, Canis familiaris
aagagatcatctgtgatctttatta

SEQ ID NO: 50757 - DNA, 25 bp, Canis familiaris
aagacatcacttggatttcataatc

SEQ ID NO: 50758 - DNA, 25 bp, Canis familiaris
aagacaacttccatggcttagccat

SEQ ID NO: 50759 - DNA, 25 bp, Canis familiaris
aagacagacctcactggtctcatcc

SEQ ID NO: 50760 - DNA, 25 bp, Canis familiaris
aagaaatctgaccctgttgtctcct

SEQ ID NO: 50761 - DNA, 25 bp, Canis familiaris
aagaactgctgagtgctttcttcac

SEQ ID NO: 50762 - DNA, 25 bp, Canis familiaris
aagaacttggtggctgatctgtgac

SEQ ID NO: 50763 - DNA, 25 bp, Canis familiaris
aagacagcagtgttgactgactgta

SEQ ID NO: 50764 - DNA, 25 bp, Canis familiaris
aagatcacaattacactgcctgcaa

SEQ ID NO: 50765 - DNA, 25 bp, Canis familiaris
aagacatccatgaccaatttgcaga

SEQ ID NO: 50766 - DNA, 25 bp, Canis familiaris
aagagcggcatgatcctttgcagaa

SEQ ID NO: 50767 - DNA, 25 bp, Canis familiaris
aagacagtatgattccagtgtcaaa

SEQ ID NO: 50768 - DNA, 25 bp, Canis familiaris
aagacaccaggtgatggatgaccac

SEQ ID NO: 50769 - DNA, 25 bp, Canis familiaris
aagacctcacgtgtggatggaaatt

SEQ ID NO: 50770 - DNA, 25 bp, Canis familiaris
aagagcccacgggtgctttcaattt

SEQ ID NO: 50771 - DNA, 25 bp, Canis familiaris
aagacttacggcgacgattcttcct

SEQ ID NO: 50772 - DNA, 25 bp, Canis familiaris
aagatcaattcgtgactgttcgtac

SEQ ID NO: 50773 - DNA, 25 bp, Canis familiaris
aagatatcattcatagttattccta

SEQ ID NO: 50774 - DNA, 25 bp, Canis familiaris
aagatatattgacagttttagaagt

SEQ ID NO: 50775 - DNA, 25 bp, Canis familiaris
aagaaatcatgtctgctgctttaga

SEQ ID NO: 50776 - DNA, 25 bp, Canis familiaris
aagaaagctgctcatttgttttgtt

SEQ ID NO: 50777 - DNA, 25 bp, Canis familiaris
aagaaagctgtgctctctggcatct

SEQ ID NO: 50778 - DNA, 25 bp, Canis familiaris
aagacatagctgatttgctgccctc

SEQ ID NO: 50779 - DNA, 25 bp, Canis familiaris
aatgacagcctggtgttggctctgc

SEQ ID NO: 50780 - DNA, 25 bp, Canis familiaris
aagatcatggttgggtggcctggca

SEQ ID NO: 50781 - DNA, 25 bp, Canis familiaris
aagacgaattaactgacttggatca

SEQ ID NO: 50782 - DNA, 25 bp, Canis familiaris
aagacgaatctgtatggcacctggc

SEQ ID NO: 50783 - DNA, 25 bp, Canis familiaris
aagagaggtcagtgtcatcctcccc

SEQ ID NO: 50784 - DNA, 25 bp, Canis familiaris
aagacggagaagcttctcccgcagc

SEQ ID NO: 50785 - DNA, 25 bp, Canis familiaris
aagaaagaaagccttccacacctgt

SEQ ID NO: 50786 - DNA, 25 bp, Canis familiaris
aagacaataaaactctcgcacaccc

SEQ ID NO: 50787 - DNA, 25 bp, Canis familiaris
aagaaatcaagacccgggatccctg

SEQ ID NO: 50788 - DNA, 25 bp, Canis familiaris
aagactgagaaccccatgggtccct

SEQ ID NO: 50789 - DNA, 25 bp, Canis familiaris
aagacgggcacctgtggtgtgccac

SEQ ID NO: 50790 - DNA, 25 bp, Canis familiaris
aagagggcccagtgtggaagcacat

SEQ ID NO: 50791 - DNA, 25 bp, Canis familiaris
aatggggacagaaagtgaagaacag

SEQ ID NO: 50792 - DNA, 25 bp, Canis familiaris
aagtgcggaattgaggactctgaag

SEQ ID NO: 50793 - DNA, 25 bp, Canis familiaris
aagggatatgttgatgatcctcgaa

SEQ ID NO: 50794 - DNA, 25 bp, Canis familiaris
aagaaatttctttgcatcctctaaa

SEQ ID NO: 50795 - DNA, 25 bp, Canis familiaris
aagacacataccatatgatcctcta

SEQ ID NO: 50796 - DNA, 25 bp, Canis familiaris
aagattataccaccagatctcccaa

SEQ ID NO: 50797 - DNA, 25 bp, Canis familiaris
aagactaagctagccaccagacaga

SEQ ID NO: 50798 - DNA, 25 bp, Canis familiaris
aagactgaagcatttccagaaaaca

SEQ ID NO: 50799 - DNA, 25 bp, Canis familiaris
aagagcttgaacttgccaagaagta

SEQ ID NO: 50800 - DNA, 25 bp, Canis familiaris
aaggaatcaagctatcttaaactga

SEQ ID NO: 50801 - DNA, 25 bp, Canis familiaris
aagagatacaagttcgtggcacact

SEQ ID NO: 50802 - DNA, 25 bp, Canis familiaris
aagactcacagatttctgggccttc

SEQ ID NO: 50803 - DNA, 25 bp, Canis familiaris
aagactaatgctttctgtggacacc

SEQ ID NO: 50804 - DNA, 25 bp, Canis familiaris
aagagctaccatggttgcaagaacc

SEQ ID NO: 50805 - DNA, 25 bp, Canis familiaris
aagtcaacgatggtggcccagtcac

SEQ ID NO: 50806 - DNA, 25 bp, Canis familiaris
aagtcagagtgacaggccacgtgag

SEQ ID NO: 50807 - DNA, 25 bp, Canis familiaris
aagatgcaggagggaggcccgctac

SEQ ID NO: 50808 - DNA, 25 bp, Canis familiaris
aagtgcagcaactagtgcagcccag

SEQ ID NO: 50809 - DNA, 25 bp, Canis familiaris
aagatgacagacttggacaacatgt

SEQ ID NO: 50810 - DNA, 25 bp, Canis familiaris
aagagcatcaacgggcatcaggcca

SEQ ID NO: 50811 - DNA, 25 bp, Canis familiaris
aagactacttcactgctgcagagcc

SEQ ID NO: 50812 - DNA, 25 bp, Canis familiaris
aagagaaggtgtcctcagagcctcc

SEQ ID NO: 50813 - DNA, 25 bp, Canis familiaris
aagaggggagcagctggagcctcac

SEQ ID NO: 50814 - DNA, 25 bp, Canis familiaris
aagaggaggtgctgctggttctcaa

SEQ ID NO: 50815 - DNA, 25 bp, Canis familiaris
aagaggatggtcgtttctttctcac

SEQ ID NO: 50816 - DNA, 25 bp, Canis familiaris
cagagggacccaagtacttttccag

SEQ ID NO: 50817 - DNA, 25 bp, Canis familiaris
aagggatcccattgaacctttatgg

SEQ ID NO: 50818 - DNA, 25 bp, Canis familiaris
caaggaagcccaaaacctgcacttg

SEQ ID NO: 50819 - DNA, 25 bp, Canis familiaris
aagatgggctcctcgacattgagat

SEQ ID NO: 50820 - DNA, 25 bp, Canis familiaris
aagagaaggcctgcagcacatcggt

SEQ ID NO: 50821 - DNA, 25 bp, Canis familiaris
aagagaacttttggcagatctggtt

SEQ ID NO: 50822 - DNA, 25 bp, Canis familiaris
aagaggcccgtcggaacaggctgat

SEQ ID NO: 50823 - DNA, 25 bp, Canis familiaris
aagactgacacgaggggaagctgac

SEQ ID NO: 50824 - DNA, 25 bp, Canis familiaris
aagattgcctcgaggacgaacatgt

SEQ ID NO: 50825 - DNA, 25 bp, Canis familiaris
aagatgacctacagagagccaagag

SEQ ID NO: 50826 - DNA, 25 bp, Canis familiaris
aagagtctctaaagaggtcgcagag

SEQ ID NO: 50827 - DNA, 25 bp, Canis familiaris
gaaggtttccggagtcggcagtttg

SEQ ID NO: 50828 - DNA, 25 bp, Canis familiaris
gggaacttccggagggattgttctg

SEQ ID NO: 50829 - DNA, 25 bp, Canis familiaris
aagacacttcactggagggtttttg

SEQ ID NO: 50830 - DNA, 25 bp, Canis familiaris
aaggacttaccgatggttattgcct

SEQ ID NO: 50831 - DNA, 25 bp, Canis familiaris
aagagacttaactttctgtctttga

SEQ ID NO: 50832 - DNA, 25 bp, Canis familiaris
aagacactgctacggaattactgtt

SEQ ID NO: 50833 - DNA, 25 bp, Canis familiaris
aagacctgtacgccaacacagtgct

SEQ ID NO: 50834 - DNA, 25 bp, Canis familiaris
aagaccgctacctatgagtagtctg

SEQ ID NO: 50835 - DNA, 25 bp, Canis familiaris
aagacttctttctatacatcgccta

SEQ ID NO: 50836 - DNA, 25 bp, Canis familiaris
aagagcctttactatgaacagcagc

SEQ ID NO: 50837 - DNA, 25 bp, Canis familiaris
aagagcatatataagcttcacaaag

SEQ ID NO: 50838 - DNA, 25 bp, Canis familiaris
aagagcatagcccactgatagaaag

SEQ ID NO: 50839 - DNA, 25 bp, Canis familiaris
aagagctcagaccactaggcagacc

SEQ ID NO: 50840 - DNA, 25 bp, Canis familiaris
aagtcatcaatgccactgaggaact

SEQ ID NO: 50841 - DNA, 25 bp, Canis familiaris
aagatcatgcgttgcactgggaccc

SEQ ID NO: 50842 - DNA, 25 bp, Canis familiaris
aagacatggtgagctctctgtgcca

SEQ ID NO: 50843 - DNA, 25 bp, Canis familiaris
aagacagatggggttctcagctcca

SEQ ID NO: 50844 - DNA, 25 bp, Canis familiaris
aagacagtgatgccaacttttctat

SEQ ID NO: 50845 - DNA, 25 bp, Canis familiaris
aagatcaatcagcctcctagtttat

SEQ ID NO: 50846 - DNA, 25 bp, Canis familiaris
aagagaacaggcagctcgcttttgt

SEQ ID NO: 50847 - DNA, 25 bp, Canis familiaris
aagagacacgagtctgagtggcttt

SEQ ID NO: 50848 - DNA, 25 bp, Canis familiaris
aagtaattggtggagatgacctctc

SEQ ID NO: 50849 - DNA, 25 bp, Canis familiaris
aagttagctgaacagttccctcggc

SEQ ID NO: 50850 - DNA, 25 bp, Canis familiaris
aagaggaggcaacgagtcccctcaa

SEQ ID NO: 50851 - DNA, 25 bp, Canis familiaris
aagagtaatatatagccccctcagt

SEQ ID NO: 50852 - DNA, 25 bp, Canis familiaris
aagacgattatatcgccaacctcct

SEQ ID NO: 50853 - DNA, 25 bp, Canis familiaris
aagacaatttatgcccaccatttct

SEQ ID NO: 50854 - DNA, 25 bp, Canis familiaris
aagaaataatctgtcccgatttata

SEQ ID NO: 50855 - DNA, 25 bp, Canis familiaris
aagacatcttacaaatcccgtgttt

SEQ ID NO: 50856 - DNA, 25 bp, Canis familiaris
aagagtggaactccaccctttgctt

SEQ ID NO: 50857 - DNA, 25 bp, Canis familiaris
aagatggaggctggaacacccactc

SEQ ID NO: 50858 - DNA, 25 bp, Canis familiaris
aagagagaagctgctgccaacacca

SEQ ID NO: 50859 - DNA, 25 bp, Canis familiaris
aagagagaagctgctgccaacacca

SEQ ID NO: 50860 - DNA, 25 bp, Canis familiaris
aagagagaagctgctgccaacacca

SEQ ID NO: 50861 - DNA, 25 bp, Canis familiaris
aagagagaagctgctgccaacacca

SEQ ID NO: 50862 - DNA, 25 bp, Canis familiaris
aagacaaagccttgcaaactcattg

SEQ ID NO: 50863 - DNA, 25 bp, Canis familiaris
aagaaagacctgtagaatgctctaa

SEQ ID NO: 50864 - DNA, 25 bp, Canis familiaris
aagacatcaagcatgtaactgccga

SEQ ID NO: 50865 - DNA, 25 bp, Canis familiaris
aagacataacatggcaacctgctct

SEQ ID NO: 50866 - DNA, 25 bp, Canis familiaris
aagaccagcctggccaacatggtga

SEQ ID NO: 50867 - DNA, 25 bp, Canis familiaris
aagacgagctcttccaaatgcttag

SEQ ID NO: 50868 - DNA, 25 bp, Canis familiaris
aagagtgactcttccaagatgccct

SEQ ID NO: 50869 - DNA, 25 bp, Canis familiaris
aagagagagcacatgacttgagccc

SEQ ID NO: 50870 - DNA, 25 bp, Canis familiaris
aagacgcactcaagacataaccccg

SEQ ID NO: 50871 - DNA, 25 bp, Canis familiaris
aagatcccgaggtatttcttccatg

SEQ ID NO: 50872 - DNA, 25 bp, Canis familiaris
aagactgccgatggaaggttcccag

SEQ ID NO: 50873 - DNA, 25 bp, Canis familiaris
aagagcctgccaggagtggtgaccc

SEQ ID NO: 50874 - DNA, 25 bp, Canis familiaris
aagagtcaccagcagcaagtgtccc

SEQ ID NO: 50875 - DNA, 25 bp, Canis familiaris
aagagctccaaggccaactgtttaa

SEQ ID NO: 50876 - DNA, 25 bp, Canis familiaris
aagactcccgtgtaactgtgtgaaa

SEQ ID NO: 50877 - DNA, 25 bp, Canis familiaris
caagttcccttagaggttgaattct

SEQ ID NO: 50878 - DNA, 25 bp, Canis familiaris
aagtgatcccaaagtagagttttat

SEQ ID NO: 50879 - DNA, 25 bp, Canis familiaris
aagacatcccattccaaagattttt

SEQ ID NO: 50880 - DNA, 25 bp, Canis familiaris
aagacacccaggccatgaaggagat

SEQ ID NO: 50881 - DNA, 25 bp, Canis familiaris
aagaccccaggtagagcaaacatcc

SEQ ID NO: 50882 - DNA, 25 bp, Canis familiaris
aagacccagtcgaggaaggctccag

SEQ ID NO: 50883 - DNA, 25 bp, Canis familiaris
aagacctatctcagggaaggccctt

SEQ ID NO: 50884 - DNA, 25 bp, Canis familiaris
aagacctactcatgggacaacgctc

SEQ ID NO: 50885 - DNA, 25 bp, Canis familiaris
aagagcttattctgggtaacacttg

SEQ ID NO: 50886 - DNA, 25 bp, Canis familiaris
aagactttatcgtgttaatcctcat

SEQ ID NO: 50887 - DNA, 25 bp, Canis familiaris
aagacttttcaatcattcatttcca

SEQ ID NO: 50888 - DNA, 25 bp, Canis familiaris
aagacttatgtaacactataaactg

SEQ ID NO: 50889 - DNA, 25 bp, Canis familiaris
aagacatttttgaactgtacatttg

SEQ ID NO: 50890 - DNA, 25 bp, Canis familiaris
aagagattctttcccatttattctg

SEQ ID NO: 50891 - DNA, 25 bp, Canis familiaris
aagagaatccatttccttgtctact

SEQ ID NO: 50892 - DNA, 25 bp, Canis familiaris
aagagagtctcctttccgacatatc

SEQ ID NO: 50893 - DNA, 25 bp, Canis familiaris
aagagagtctgcttgtaccgaacct

SEQ ID NO: 50894 - DNA, 25 bp, Canis familiaris
aagagcagtctggtggagccaaccc

SEQ ID NO: 50895 - DNA, 25 bp, Canis familiaris
aagaggtatgtcatcaccaatcccc

SEQ ID NO: 50896 - DNA, 25 bp, Canis familiaris
aagaggctttagtgccagttctgct

SEQ ID NO: 50897 - DNA, 25 bp, Canis familiaris
aagatcagcttaagctctgccgttc

SEQ ID NO: 50898 - DNA, 25 bp, Canis familiaris
aagtgcagcccaagcatttcagtgc

SEQ ID NO: 50899 - DNA, 25 bp, Canis familiaris
aagatcgcgccggattattgctgca

SEQ ID NO: 50900 - DNA, 25 bp, Canis familiaris
aagactgccaggcctttatctgcaa

SEQ ID NO: 50901 - DNA, 25 bp, Canis familiaris
aagactgccagaagcagtttgcttt

SEQ ID NO: 50902 - DNA, 25 bp, Canis familiaris
aagactggacacactttctgcatgt

SEQ ID NO: 50903 - DNA, 25 bp, Canis familiaris
aagagctgtaagaggaactatgggc

SEQ ID NO: 50904 - DNA, 25 bp, Canis familiaris
aagagagtagccagagaacatttta

SEQ ID NO: 50905 - DNA, 25 bp, Canis familiaris
aagaggtccacgcaggagcttagta

SEQ ID NO: 50906 - DNA, 25 bp, Canis familiaris
aagacgatcccgtagagagatatca

SEQ ID NO: 50907 - DNA, 25 bp, Canis familiaris
aagtcagatccgcttatggataagt

SEQ ID NO: 50908 - DNA, 25 bp, Canis familiaris
aagtcatgtccattgactgatgaat

SEQ ID NO: 50909 - DNA, 25 bp, Canis familiaris
aagtcatgaatctatgcatctaaca

SEQ ID NO: 50910 - DNA, 25 bp, Canis familiaris
aagattcctgtccctgggaggctaa

SEQ ID NO: 50911 - DNA, 25 bp, Canis familiaris
aagagttcctgggtcgagtggtcac

SEQ ID NO: 50912 - DNA, 25 bp, Canis familiaris
aagagctttcggttatgtgggtgac

SEQ ID NO: 50913 - DNA, 25 bp, Canis familiaris
aagatgtttgggtctagatctagag

SEQ ID NO: 50914 - DNA, 25 bp, Canis familiaris
aagagttagtggcccgaccagagcc

SEQ ID NO: 50915 - DNA, 25 bp, Canis familiaris
aagacttttggccccattcaagact

SEQ ID NO: 50916 - DNA, 25 bp, Canis familiaris
aagtcgtttgtcagtcattcggttg

SEQ ID NO: 50917 - DNA, 25 bp, Canis familiaris
aatgggtttgcgacgtcctaatacg

SEQ ID NO: 50918 - DNA, 25 bp, Canis familiaris
aagttggattgcctgaacctcaaat

SEQ ID NO: 50919 - DNA, 25 bp, Canis familiaris
aagttgcttggcctgggactcaaca

SEQ ID NO: 50920 - DNA, 25 bp, Canis familiaris
aagttcctggccaaagtttgcacaa

SEQ ID NO: 50921 - DNA, 25 bp, Canis familiaris
aagtctgctctgctggtagtttaat

SEQ ID NO: 50922 - DNA, 25 bp, Canis familiaris
aagtttccagtgcaagccagtaatt

SEQ ID NO: 50923 - DNA, 25 bp, Canis familiaris
aagtttgcccttatgcacggaactc

SEQ ID NO: 50924 - DNA, 25 bp, Canis familiaris
aagattacaccacttgtgagcttga

SEQ ID NO: 50925 - DNA, 25 bp, Canis familiaris
aagttgaccatagttattcctgaat

SEQ ID NO: 50926 - DNA, 25 bp, Canis familiaris
aagtaaaaacttcatcctggctggg

SEQ ID NO: 50927 - DNA, 25 bp, Canis familiaris
aagttcaaaggccagcatatccggg

SEQ ID NO: 50928 - DNA, 25 bp, Canis familiaris
aagtcgatcaaacggcatcccggac

SEQ ID NO: 50929 - DNA, 25 bp, Canis familiaris
aagacatgagctgagggatccctgg

SEQ ID NO: 50930 - DNA, 25 bp, Canis familiaris
aagagtggctgcaagtggacttccg

SEQ ID NO: 50931 - DNA, 25 bp, Canis familiaris
aagagtgtcgattggggtgtcctgg

SEQ ID NO: 50932 - DNA, 25 bp, Canis familiaris
aagagtctctgtgagggatccctgg

SEQ ID NO: 50933 - DNA, 25 bp, Canis familiaris
aagacatctgtttagcaagaacctg

SEQ ID NO: 50934 - DNA, 25 bp, Canis familiaris
aagatcctgtcttgtacatgtacca

SEQ ID NO: 50935 - DNA, 25 bp, Canis familiaris
aagatactatgcagtgacgtattgc

SEQ ID NO: 50936 - DNA, 25 bp, Canis familiaris
aagacatctctggttgcaggtttgt

SEQ ID NO: 50937 - DNA, 25 bp, Canis familiaris
aagagcatcgtggttgggtcgctgt

SEQ ID NO: 50938 - DNA, 25 bp, Canis familiaris
aagagctggtggactggagttttcc

SEQ ID NO: 50939 - DNA, 25 bp, Canis familiaris
aagagctgctgcagaaaagctattt

SEQ ID NO: 50940 - DNA, 25 bp, Canis familiaris
aagagcttgcatcaggacctattta

SEQ ID NO: 50941 - DNA, 25 bp, Canis familiaris
aagagttatctaggaccaagtctat

SEQ ID NO: 50942 - DNA, 25 bp, Canis familiaris
aagagggctcagtgcccaaggcagt

SEQ ID NO: 50943 - DNA, 25 bp, Canis familiaris
aagagtgggtgtccctagatggcgc

SEQ ID NO: 50944 - DNA, 25 bp, Canis familiaris
aagaggcagggcgcctatgaacgca

SEQ ID NO: 50945 - DNA, 25 bp, Canis familiaris
aagatacggcggtcctggacacaca

SEQ ID NO: 50946 - DNA, 25 bp, Canis familiaris
aagtcagggcggaccgtggactgtg

SEQ ID NO: 50947 - DNA, 25 bp, Canis familiaris
aagtcaacggctgtagtgggctgct

SEQ ID NO: 50948 - DNA, 25 bp, Canis familiaris
aagtcacaccttcaagttagctgta

SEQ ID NO: 50949 - DNA, 25 bp, Canis familiaris
aagatatcactttggagactttctg

SEQ ID NO: 50950 - DNA, 25 bp, Canis familiaris
aagttgcatttgagaccatttccct

SEQ ID NO: 50951 - DNA, 25 bp, Canis familiaris
aagattaattgttcaccattgctat

SEQ ID NO: 50952 - DNA, 25 bp, Canis familiaris
aagactatattttcatctctgtatt

SEQ ID NO: 50953 - DNA, 25 bp, Canis familiaris
aagactgaattttatctgttttgaa

SEQ ID NO: 50954 - DNA, 25 bp, Canis familiaris
aagactgaatgtttttatttatcca

SEQ ID NO: 50955 - DNA, 25 bp, Canis familiaris
aagactttgtttatatgttaagcta

SEQ ID NO: 50956 - DNA, 25 bp, Canis familiaris
aagacttggtttcttgtgttgctct

SEQ ID NO: 50957 - DNA, 25 bp, Canis familiaris
aagaccgttctttcggtgttctcat

SEQ ID NO: 50958 - DNA, 25 bp, Canis familiaris
aagaccacttatttcgtgacctgtt

SEQ ID NO: 50959 - DNA, 25 bp, Canis familiaris
aagacttttattacagaagccttat

SEQ ID NO: 50960 - DNA, 25 bp, Canis familiaris
aaggtactgccaatgctcgaatgcc

SEQ ID NO: 50961 - DNA, 25 bp, Canis familiaris
aaggtactgccaatgctcgaatgcc

SEQ ID NO: 50962 - DNA, 25 bp, Canis familiaris
aagagctaggccacggaagtcggac

SEQ ID NO: 50963 - DNA, 25 bp, Canis familiaris
aagagaagcccaacagcagcaactc

SEQ ID NO: 50964 - DNA, 25 bp, Canis familiaris
aagagaagaggctatggaaactcct

SEQ ID NO: 50965 - DNA, 25 bp, Canis familiaris
aagactgtgaggaacgacaactcct

SEQ ID NO: 50966 - DNA, 25 bp, Canis familiaris
aagatcctggagagctcgcagactc

SEQ ID NO: 50967 - DNA, 25 bp, Canis familiaris
aagactctgggatgtctctcatctc

SEQ ID NO: 50968 - DNA, 25 bp, Canis familiaris
aagagtaggtgttggctctctggga

SEQ ID NO: 50969 - DNA, 25 bp, Canis familiaris
aagatgtctgggagtggccgggagc

SEQ ID NO: 50970 - DNA, 25 bp, Canis familiaris
aagttcctggatggggtcagagggg

SEQ ID NO: 50971 - DNA, 25 bp, Canis familiaris
aagttcagctactcggtgcaggaag

SEQ ID NO: 50972 - DNA, 25 bp, Canis familiaris
aagttcacaatgtggccgaggactt

SEQ ID NO: 50973 - DNA, 25 bp, Canis familiaris
cactgttaccacacccggtaagtgg

SEQ ID NO: 50974 - DNA, 25 bp, Canis familiaris
aagattcatcccacctgggaaaatg

SEQ ID NO: 50975 - DNA, 25 bp, Canis familiaris
aagatacatccataaccgggaggag

SEQ ID NO: 50976 - DNA, 25 bp, Canis familiaris
aagagacatctataaccgggaggag

SEQ ID NO: 50977 - DNA, 25 bp, Canis familiaris
aagagacatctataaccgggaggag

SEQ ID NO: 50978 - DNA, 25 bp, Canis familiaris
aagactctcattcaacagcagggac

SEQ ID NO: 50979 - DNA, 25 bp, Canis familiaris
aagacctctatgccaacacagtgtt

SEQ ID NO: 50980 - DNA, 25 bp, Canis familiaris
aagaggacgatgtcacagcacaggt

SEQ ID NO: 50981 - DNA, 25 bp, Canis familiaris
aagatggccgtgtacgccatttggg

SEQ ID NO: 50982 - DNA, 25 bp, Canis familiaris
aagaggatgggagctgccttggggg

SEQ ID NO: 50983 - DNA, 25 bp, Canis familiaris
aagaggcagggaggggcagtgggag

SEQ ID NO: 50984 - DNA, 25 bp, Canis familiaris
aagaggatgtgggcagggggttggg

SEQ ID NO: 50985 - DNA, 25 bp, Canis familiaris
aagatgagtgggggttgtccctggg

SEQ ID NO: 50986 - DNA, 25 bp, Canis familiaris
aagatttgggggagtgcctgggtgg

SEQ ID NO: 50987 - DNA, 25 bp, Canis familiaris
aagtgttttgagctttccttgtttg

SEQ ID NO: 50988 - DNA, 25 bp, Canis familiaris
aagagtatcctatgtattttttatt

SEQ ID NO: 50989 - DNA, 25 bp, Canis familiaris
aagagaactatgcagtgtttattta

SEQ ID NO: 50990 - DNA, 25 bp, Canis familiaris
aagagactcgtgtgtgtgcttgtgt

SEQ ID NO: 50991 - DNA, 25 bp, Canis familiaris
aagatcctgtgggttgtgcatttat

SEQ ID NO: 50992 - DNA, 25 bp, Canis familiaris
aagaccatgtggacctgtcactgtc

SEQ ID NO: 50993 - DNA, 25 bp, Canis familiaris
aagagctatgagctgcctgacggcc

SEQ ID NO: 50994 - DNA, 25 bp, Canis familiaris
aagatcttgggtcctgacctgacct

SEQ ID NO: 50995 - DNA, 25 bp, Canis familiaris
aagatcgtgagaaactggacgggct

SEQ ID NO: 50996 - DNA, 25 bp, Canis familiaris
aatgcattgtaaaacctggtgggga

SEQ ID NO: 50997 - DNA, 25 bp, Canis familiaris
aatgcattgtcatcatcccgaacgg

SEQ ID NO: 50998 - DNA, 25 bp, Canis familiaris
aagattgtcagcaatgcatcctgca

SEQ ID NO: 50999 - DNA, 25 bp, Canis familiaris
aagattgtcagcaatgcatcctgca

SEQ ID NO: 51000 - DNA, 25 bp, Canis familiaris
aagactggatcattgctcctagggg

SEQ ID NO: 51001 - DNA, 25 bp, Canis familiaris
aagttggagcataccacggaggagg

SEQ ID NO: 51002 - DNA, 25 bp, Canis familiaris
aagtatgtagcatcttctagaagga

SEQ ID NO: 51003 - DNA, 25 bp, Canis familiaris
aagttaatgcaaattcttaagagtt

SEQ ID NO: 51004 - DNA, 25 bp, Canis familiaris
aagagtaggcagtttcttcacttct

SEQ ID NO: 51005 - DNA, 25 bp, Canis familiaris
aagagacgtgatcttttccttctcc

SEQ ID NO: 51006 - DNA, 25 bp, Canis familiaris
aagagtctgtttgagtctcctttcc

SEQ ID NO: 51007 - DNA, 25 bp, Canis familiaris
aagagctttttgtacctgctttgtg

SEQ ID NO: 51008 - DNA, 25 bp, Canis familiaris
aagactgtttaatgccctttctgtc

SEQ ID NO: 51009 - DNA, 25 bp, Canis familiaris
aagactgtttattctctctcttatt

SEQ ID NO: 51010 - DNA, 25 bp, Canis familiaris
aagactgttatgtttctattgcttt

SEQ ID NO: 51011 - DNA, 25 bp, Canis familiaris
aagagcttcctgatcttgagtcctt

SEQ ID NO: 51012 - DNA, 25 bp, Canis familiaris
aagagctttcatactcacggtgcac

SEQ ID NO: 51013 - DNA, 25 bp, Canis familiaris
aagacctttctcagctgctgtgact

SEQ ID NO: 51014 - DNA, 25 bp, Canis familiaris
aagagccatctcaggagtcggacct

SEQ ID NO: 51015 - DNA, 25 bp, Canis familiaris
aagatgccaccaatgtgggcgatga

SEQ ID NO: 51016 - DNA, 25 bp, Canis familiaris
aagacgaccatataagcagagaact

SEQ ID NO: 51017 - DNA, 25 bp, Canis familiaris
aagatcgaccaatacaagtgttcat

SEQ ID NO: 51018 - DNA, 25 bp, Canis familiaris
aagaggccaaaaccagagctgacca

SEQ ID NO: 51019 - DNA, 25 bp, Canis familiaris
aagaggacctaacagctgagcccat

SEQ ID NO: 51020 - DNA, 25 bp, Canis familiaris
aagatggcaccatcagtggctaccc

SEQ ID NO: 51021 - DNA, 25 bp, Canis familiaris
aagattcccactggggtagccagcc

SEQ ID NO: 51022 - DNA, 25 bp, Canis familiaris
aagttcagaacttgtggttacacct

SEQ ID NO: 51023 - DNA, 25 bp, Canis familiaris
aagtacaaagctcacttcttcaccc

SEQ ID NO: 51024 - DNA, 25 bp, Canis familiaris
aagataaaatgtcatgttccttttt

SEQ ID NO: 51025 - DNA, 25 bp, Canis familiaris
aagaccaaatgttttacctcactgt

SEQ ID NO: 51026 - DNA, 25 bp, Canis familiaris
aagaccatagtatttctccctttgc

SEQ ID NO: 51027 - DNA, 25 bp, Canis familiaris
aagacctagagcttttctacctctc

SEQ ID NO: 51028 - DNA, 25 bp, Canis familiaris
aagatctacctgtcttactatcgct

SEQ ID NO: 51029 - DNA, 25 bp, Canis familiaris
aagatctcctgtactgatccttcta

SEQ ID NO: 51030 - DNA, 25 bp, Canis familiaris
aagattctcatttatagggtgcata

SEQ ID NO: 51031 - DNA, 25 bp, Canis familiaris
aagatttagttatcagggccaatat

SEQ ID NO: 51032 - DNA, 25 bp, Canis familiaris
aagtttcagcatggagagcaggagc

SEQ ID NO: 51033 - DNA, 25 bp, Canis familiaris
aagatattcaatggaagcgcgggta

SEQ ID NO: 51034 - DNA, 25 bp, Canis familiaris
aagtaatccactacaggcccaggaa

SEQ ID NO: 51035 - DNA, 25 bp, Canis familiaris
aagtacagacctgaggaccaagcag

SEQ ID NO: 51036 - DNA, 25 bp, Canis familiaris
aagtcaactcctgaaacactactga

SEQ ID NO: 51037 - DNA, 25 bp, Canis familiaris
aagtccagcttctagaactcctaaa

SEQ ID NO: 51038 - DNA, 25 bp, Canis familiaris
aagggccttaaatcccatgaagctt

SEQ ID NO: 51039 - DNA, 25 bp, Canis familiaris
aagtggcgttcagccacccgagatt

SEQ ID NO: 51040 - DNA, 25 bp, Canis familiaris
aagggtgtacaaaccacttggcaag

SEQ ID NO: 51041 - DNA, 25 bp, Canis familiaris
aagaggcttcctaagccactctggt

SEQ ID NO: 51042 - DNA, 25 bp, Canis familiaris
aagacgctgttcacagaactctgtt

SEQ ID NO: 51043 - DNA, 25 bp, Canis familiaris
aagagagctgtgtcaggcagccccg

SEQ ID NO: 51044 - DNA, 25 bp, Canis familiaris
aagagcagctggcttgctgtgtctc

SEQ ID NO: 51045 - DNA, 25 bp, Canis familiaris
aagaggctagcgcagcagtggctgt

SEQ ID NO: 51046 - DNA, 25 bp, Canis familiaris
aagatcctgaccgagcgtggctaca

SEQ ID NO: 51047 - DNA, 25 bp, Canis familiaris
aagatggcagagggagagtgggact

SEQ ID NO: 51048 - DNA, 25 bp, Canis familiaris
aagatgagcagcgtagccttggtca

SEQ ID NO: 51049 - DNA, 25 bp, Canis familiaris
aagatgagcagggcccttgcggagt

SEQ ID NO: 51050 - DNA, 25 bp, Canis familiaris
aagatgagcagagccctggccgagt

SEQ ID NO: 51051 - DNA, 25 bp, Canis familiaris
aagagtgcagatgcacctcctgcaa

SEQ ID NO: 51052 - DNA, 25 bp, Canis familiaris
aagagtcattctgaccccaatagcc

SEQ ID NO: 51053 - DNA, 25 bp, Canis familiaris
aagttcactgttaccagccaattcc

SEQ ID NO: 51054 - DNA, 25 bp, Canis familiaris
aagtataatctttgccagctggact

SEQ ID NO: 51055 - DNA, 25 bp, Canis familiaris
aagttaatcctttccatgtgaagtt

SEQ ID NO: 51056 - DNA, 25 bp, Canis familiaris
aagttgcaaggtctctttgaatgta

SEQ ID NO: 51057 - DNA, 25 bp, Canis familiaris
aagttcgtggcacacttggacatgg

SEQ ID NO: 51058 - DNA, 25 bp, Canis familiaris
aagttctgatcgagactgaccgcgt

SEQ ID NO: 51059 - DNA, 25 bp, Canis familiaris
aatgttctccagatggcaaccctgt

SEQ ID NO: 51060 - DNA, 25 bp, Canis familiaris
aagtatctgcgcgtgtgtcagaccc

SEQ ID NO: 51061 - DNA, 25 bp, Canis familiaris
aagtcgctggaggagctcaacctgt

SEQ ID NO: 51062 - DNA, 25 bp, Canis familiaris
aagtcatgggaggcagtgaagcagt

SEQ ID NO: 51063 - DNA, 25 bp, Canis familiaris
aagtcatgggaggccggtgggacct

SEQ ID NO: 51064 - DNA, 25 bp, Canis familiaris
aagatcatcggagccgggaagccct

SEQ ID NO: 51065 - DNA, 25 bp, Canis familiaris
aagagcacgcgtgcaggaggggtcc

SEQ ID NO: 51066 - DNA, 25 bp, Canis familiaris
aagatggccagtgaccagggagccc

SEQ ID NO: 51067 - DNA, 25 bp, Canis familiaris
aagaggcacgggacctgtgccaggc

SEQ ID NO: 51068 - DNA, 25 bp, Canis familiaris
aagaggacggcgactacagcctggt

SEQ ID NO: 51069 - DNA, 25 bp, Canis familiaris
aagatggaggagctgttacgtgttc

SEQ ID NO: 51070 - DNA, 25 bp, Canis familiaris
aagaggggaccttctgactgattct

SEQ ID NO: 51071 - DNA, 25 bp, Canis familiaris
aagagggcttcgtatcacagttttg

SEQ ID NO: 51072 - DNA, 25 bp, Canis familiaris
aagagtgttttgtctaaatctattt

SEQ ID NO: 51073 - DNA, 25 bp, Canis familiaris
aagaggatcgttttctaatctgtat

SEQ ID NO: 51074 - DNA, 25 bp, Canis familiaris
aagagctgtggtttgaatttgttat

SEQ ID NO: 51075 - DNA, 25 bp, Canis familiaris
aaggtctgaatctcaattgacttat

SEQ ID NO: 51076 - DNA, 25 bp, Canis familiaris
caactgtccgtctcaattactttcg

SEQ ID NO: 51077 - DNA, 25 bp, Canis familiaris
aagattgccttcccaagtatttttg

SEQ ID NO: 51078 - DNA, 25 bp, Canis familiaris
aatgtctcctatctcgtgttaagtt

SEQ ID NO: 51079 - DNA, 25 bp, Canis familiaris
aagaccctgtcgatggtaacagttc

SEQ ID NO: 51080 - DNA, 25 bp, Canis familiaris
aagatcccgctccttggaaaagtgc

SEQ ID NO: 51081 - DNA, 25 bp, Canis familiaris
aatgttcaaccaccaggaaacaggt

SEQ ID NO: 51082 - DNA, 25 bp, Canis familiaris
aagtctcacaccaacgtgaaccgtc

SEQ ID NO: 51083 - DNA, 25 bp, Canis familiaris
aagtctttcttcactgaatccagtc

SEQ ID NO: 51084 - DNA, 25 bp, Canis familiaris
aagttcattctttcagtgccattgg

SEQ ID NO: 51085 - DNA, 25 bp, Canis familiaris
aagttcattctttcagtgccattgg

SEQ ID NO: 51086 - DNA, 25 bp, Canis familiaris
aagttcattctttcagtgccattgg

SEQ ID NO: 51087 - DNA, 25 bp, Canis familiaris
aagttcattctttcagtgccattgg

SEQ ID NO: 51088 - DNA, 25 bp, Canis familiaris
aagttcattctttcagtgccattgg

SEQ ID NO: 51089 - DNA, 25 bp, Canis familiaris
aagttcattctttcagtgccattgg

SEQ ID NO: 51090 - DNA, 25 bp, Canis familiaris
aagaccttatgcttgcattccacag

SEQ ID NO: 51091 - DNA, 25 bp, Canis familiaris
aagagcgtattcatgagcccagagc

SEQ ID NO: 51092 - DNA, 25 bp, Canis familiaris
aagtcgtttcacaaccacatggtcg

SEQ ID NO: 51093 - DNA, 25 bp, Canis familiaris
aagtcgtcatatgaacccaggtcct

SEQ ID NO: 51094 - DNA, 25 bp, Canis familiaris
aagttgtcatatgaacccagttcct

SEQ ID NO: 51095 - DNA, 25 bp, Canis familiaris
aagtaccttacatttccagttccat

SEQ ID NO: 51096 - DNA, 25 bp, Canis familiaris
aagtacagttggcttcagaattagc

SEQ ID NO: 51097 - DNA, 25 bp, Canis familiaris
aagtaagctgctgagattagaagat

SEQ ID NO: 51098 - DNA, 25 bp, Canis familiaris
aagatattgtcttccttatgaattt

SEQ ID NO: 51099 - DNA, 25 bp, Canis familiaris
aagatactgttagctgtgtgcccct

SEQ ID NO: 51100 - DNA, 25 bp, Canis familiaris
aagtacagctgaaaccagtcctcct

SEQ ID NO: 51101 - DNA, 25 bp, Canis familiaris
aagtccaggagactcgaagcccaca

SEQ ID NO: 51102 - DNA, 25 bp, Canis familiaris
aagattcagggccttgaactccagc

SEQ ID NO: 51103 - DNA, 25 bp, Canis familiaris
aagttcgagtgccatttcaccaacg

SEQ ID NO: 51104 - DNA, 25 bp, Canis familiaris
aagttcgagtgccatttcaccaacg

SEQ ID NO: 51105 - DNA, 25 bp, Canis familiaris
aagttcgagtgccatttcaccaacg

SEQ ID NO: 51106 - DNA, 25 bp, Canis familiaris
aagttcgagtgccatttcaccaacg

SEQ ID NO: 51107 - DNA, 25 bp, Canis familiaris
aagttcgagtgccatttcaccaacg

SEQ ID NO: 51108 - DNA, 25 bp, Canis familiaris
aagttcgagtgccatttcaccaacg

SEQ ID NO: 51109 - DNA, 25 bp, Canis familiaris
aagattgattttctgcttccaaaca

SEQ ID NO: 51110 - DNA, 25 bp, Canis familiaris
aagatatattttatgcccaatccag

SEQ ID NO: 51111 - DNA, 25 bp, Canis familiaris
aatgatataaatagattcccaacga

SEQ ID NO: 51112 - DNA, 25 bp, Canis familiaris
aagtgaccacaaatggccctactga

SEQ ID NO: 51113 - DNA, 25 bp, Canis familiaris
aagtccgcagctgtgaacaaattga

SEQ ID NO: 51114 - DNA, 25 bp, Canis familiaris
aagagccgttttaacaatgttgagt

SEQ ID NO: 51115 - DNA, 25 bp, Canis familiaris
aatgcagcctatttttaaagtagaa

SEQ ID NO: 51116 - DNA, 25 bp, Canis familiaris
aagagctcacatctttaacagaaga

SEQ ID NO: 51117 - DNA, 25 bp, Canis familiaris
aagagctcatctctggtgattgcaa

SEQ ID NO: 51118 - DNA, 25 bp, Canis familiaris
aagatcattgctcctcctgagcgca

SEQ ID NO: 51119 - DNA, 25 bp, Canis familiaris
aagatcattgctcctcctgagcgca

SEQ ID NO: 51120 - DNA, 25 bp, Canis familiaris
aagtgcagctgctgtgcctgatgtg

SEQ ID NO: 51121 - DNA, 25 bp, Canis familiaris
aagagagcttgctagccgatgctga

SEQ ID NO: 51122 - DNA, 25 bp, Canis familiaris
aagatgactgtcaacggagctcctg

SEQ ID NO: 51123 - DNA, 25 bp, Canis familiaris
aagagctatgctcaagcggctcctt

SEQ ID NO: 51124 - DNA, 25 bp, Canis familiaris
aagagcttctttttggcctgtattc

SEQ ID NO: 51125 - DNA, 25 bp, Canis familiaris
aagagttcacttttacaatgtatgt

SEQ ID NO: 51126 - DNA, 25 bp, Canis familiaris
aagattccacctttgacaattatgt

SEQ ID NO: 51127 - DNA, 25 bp, Canis familiaris
aagtaaccgcctagcaaattattct

SEQ ID NO: 51128 - DNA, 25 bp, Canis familiaris
aagtccaaaccgccgtaatattctg

SEQ ID NO: 51129 - DNA, 25 bp, Canis familiaris
aagtccatctacggggatgaagttt

SEQ ID NO: 51130 - DNA, 25 bp, Canis familiaris
aaggccttatactgggtcgtaatct

SEQ ID NO: 51131 - DNA, 25 bp, Canis familiaris
aagagttctaagtacgtctcgtata

SEQ ID NO: 51132 - DNA, 25 bp, Canis familiaris
aagattcctaagttcctatcattga

SEQ ID NO: 51133 - DNA, 25 bp, Canis familiaris
aagagtccagacttccctgaatgta

SEQ ID NO: 51134 - DNA, 25 bp, Canis familiaris
aagaggccatatttcacgtgagtaa

SEQ ID NO: 51135 - DNA, 25 bp, Canis familiaris
aagtacctcttgacaccatggaata

SEQ ID NO: 51136 - DNA, 25 bp, Canis familiaris
aagtcacagcataatccagccagga

SEQ ID NO: 51137 - DNA, 25 bp, Canis familiaris
aagatcttctttggagccagaaaaa

SEQ ID NO: 51138 - DNA, 25 bp, Canis familiaris
aagagattgcttacccaggaaaaat

SEQ ID NO: 51139 - DNA, 25 bp, Canis familiaris
aagggtctttccaacgacaagcata

SEQ ID NO: 51140 - DNA, 25 bp, Canis familiaris
aagtgagttcttttagtagtaatag

SEQ ID NO: 51141 - DNA, 25 bp, Canis familiaris
aagtatgttccaagtgagttaagac

SEQ ID NO: 51142 - DNA, 25 bp, Canis familiaris
aagtcagtttcaattagtttcacaa

SEQ ID NO: 51143 - DNA, 25 bp, Canis familiaris
aagtcattttattcaaagtctccga

SEQ ID NO: 51144 - DNA, 25 bp, Canis familiaris
aagtctggagttaaaggatctggaa

SEQ ID NO: 51145 - DNA, 25 bp, Canis familiaris
aagtcgtaggtcagactctgttgaa

SEQ ID NO: 51146 - DNA, 25 bp, Canis familiaris
cacgtttgacggattcgcggtgaaa

SEQ ID NO: 51147 - DNA, 25 bp, Canis familiaris
aagtaagacagtgttccagaagaaa

SEQ ID NO: 51148 - DNA, 25 bp, Canis familiaris
aagtcatggtagagttgctaggaag

SEQ ID NO: 51149 - DNA, 25 bp, Canis familiaris
aagttgcttagtatttatgagaaaa

SEQ ID NO: 51150 - DNA, 25 bp, Canis familiaris
aagttgcattaccaacaaataaata

SEQ ID NO: 51151 - DNA, 25 bp, Canis familiaris
aagatagctctttcacaaactaaaa

SEQ ID NO: 51152 - DNA, 25 bp, Canis familiaris
aagatccctgagaatcccactaata

SEQ ID NO: 51153 - DNA, 25 bp, Canis familiaris
aagtgcggtatgaatgccacattac

SEQ ID NO: 51154 - DNA, 25 bp, Canis familiaris
aagatcactttgaacatcatgtttc

SEQ ID NO: 51155 - DNA, 25 bp, Canis familiaris
aagtagtcctgatgatagatcttca

SEQ ID NO: 51156 - DNA, 25 bp, Canis familiaris
aagtaattcatctgaccatgttcaa

SEQ ID NO: 51157 - DNA, 25 bp, Canis familiaris
aagtacattgcaagaaccatgaaaa

SEQ ID NO: 51158 - DNA, 25 bp, Canis familiaris
aagatggcggccaagaccaacaaga

SEQ ID NO: 51159 - DNA, 25 bp, Canis familiaris
aagatggaaccagtgtgacaaaatg

SEQ ID NO: 51160 - DNA, 25 bp, Canis familiaris
aagaggaaccctcggcagatcaact

SEQ ID NO: 51161 - DNA, 25 bp, Canis familiaris
aagagtgaacactttcgtctccacc

SEQ ID NO: 51162 - DNA, 25 bp, Canis familiaris
aagaggaaccagagcttctgcccaa

SEQ ID NO: 51163 - DNA, 25 bp, Canis familiaris
aagaggaagccatgcgctggttcca

SEQ ID NO: 51164 - DNA, 25 bp, Canis familiaris
aagaggaagccatgcgctggttcca

SEQ ID NO: 51165 - DNA, 25 bp, Canis familiaris
aagaggaagccatgcgctggttcca

SEQ ID NO: 51166 - DNA, 25 bp, Canis familiaris
aagaggaagccatgcgctggttcca

SEQ ID NO: 51167 - DNA, 25 bp, Canis familiaris
caatgggcaggtctttggttcccgt

SEQ ID NO: 51168 - DNA, 25 bp, Canis familiaris
aagaggctttctcgttgtttgaccg

SEQ ID NO: 51169 - DNA, 25 bp, Canis familiaris
aagagatttctctgttcatttagac

SEQ ID NO: 51170 - DNA, 25 bp, Canis familiaris
aagagattatcccagctatatttat

SEQ ID NO: 51171 - DNA, 25 bp, Canis familiaris
aagagttatccaccatatactatgt

SEQ ID NO: 51172 - DNA, 25 bp, Canis familiaris
aagagttgtcaaccagcataatgaa

SEQ ID NO: 51173 - DNA, 25 bp, Canis familiaris
aagagttccatgttctatatatgaa

SEQ ID NO: 51174 - DNA, 25 bp, Canis familiaris
aagagattcaagtcacataatgtat

SEQ ID NO: 51175 - DNA, 25 bp, Canis familiaris
aagagatatgcaccctcatgtttat

SEQ ID NO: 51176 - DNA, 25 bp, Canis familiaris
aagagacatgagttcctcttgttgg

SEQ ID NO: 51177 - DNA, 25 bp, Canis familiaris
aagaggctatggatctatctatggg

SEQ ID NO: 51178 - DNA, 25 bp, Canis familiaris
aagaggtttgtttctcctgagggca

SEQ ID NO: 51179 - DNA, 25 bp, Canis familiaris
aagaggtcatgtgtttttaggccta

SEQ ID NO: 51180 - DNA, 25 bp, Canis familiaris
aagagggcagattttgttctgaggt

SEQ ID NO: 51181 - DNA, 25 bp, Canis familiaris
aagagggcttcagggtgttggcttg

SEQ ID NO: 51182 - DNA, 25 bp, Canis familiaris
aagagggcaatccagtggcttcgtt

SEQ ID NO: 51183 - DNA, 25 bp, Canis familiaris
aagaggtgacaatgttgcagtcatt

SEQ ID NO: 51184 - DNA, 25 bp, Canis familiaris
aagagtggattttgtatttcatatt

SEQ ID NO: 51185 - DNA, 25 bp, Canis familiaris
aagaggaatgactgtttatgccatt

SEQ ID NO: 51186 - DNA, 25 bp, Canis familiaris
aagagagagagattgtcttttcaat

SEQ ID NO: 51187 - DNA, 25 bp, Canis familiaris
aagatagttgcttctcttttcacag

SEQ ID NO: 51188 - DNA, 25 bp, Canis familiaris
aagtcagttcagttttcttccaaga

SEQ ID NO: 51189 - DNA, 25 bp, Canis familiaris
aagtagttcagggttttcagttcag

SEQ ID NO: 51190 - DNA, 25 bp, Canis familiaris
aagtaggccttgtttttcagcttca

SEQ ID NO: 51191 - DNA, 25 bp, Canis familiaris
aagagggcctgtatgtgttttgatt

SEQ ID NO: 51192 - DNA, 25 bp, Canis familiaris
aagaggggtgccagatggccctttc

SEQ ID NO: 51193 - DNA, 25 bp, Canis familiaris
aagaggggtggctgcatgtttcctt

SEQ ID NO: 51194 - DNA, 25 bp, Canis familiaris
aagagtctggtggggagttgtccta

SEQ ID NO: 51195 - DNA, 25 bp, Canis familiaris
aagagtctggtcaacgagctggcct

SEQ ID NO: 51196 - DNA, 25 bp, Canis familiaris
aagagatgggtaacaggctggaatg

SEQ ID NO: 51197 - DNA, 25 bp, Canis familiaris
aagaggtggtggcacagcgggagca

SEQ ID NO: 51198 - DNA, 25 bp, Canis familiaris
aagaggcgcgcgggagagagaggag

SEQ ID NO: 51199 - DNA, 25 bp, Canis familiaris
aatgaggaccagtggaaaaggccaa

SEQ ID NO: 51200 - DNA, 25 bp, Canis familiaris
aagggaccagatcaatccaacctaa

SEQ ID NO: 51201 - DNA, 25 bp, Canis familiaris
aaggcaaccaaatcacccaggttga

SEQ ID NO: 51202 - DNA, 25 bp, Canis familiaris
caagaggtccaagaaagccggccgc

SEQ ID NO: 51203 - DNA, 25 bp, Canis familiaris
taggtggtacacaaaaggactaccg

SEQ ID NO: 51204 - DNA, 25 bp, Canis familiaris
aagatggttcaaacacagtccttcc

SEQ ID NO: 51205 - DNA, 25 bp, Canis familiaris
aagatgggcatcagccaaggtcttc

SEQ ID NO: 51206 - DNA, 25 bp, Canis familiaris
aagatgtgtctcagcagccagggtt

SEQ ID NO: 51207 - DNA, 25 bp, Canis familiaris
aagatgtgaatgaagccataaggct

SEQ ID NO: 51208 - DNA, 25 bp, Canis familiaris
aagatgtattgcccgatgcaatgag

SEQ ID NO: 51209 - DNA, 25 bp, Canis familiaris
aagatgtaggcgcctgtggcagcag

SEQ ID NO: 51210 - DNA, 25 bp, Canis familiaris
aagatgggagtgcagctgtcagagc

SEQ ID NO: 51211 - DNA, 25 bp, Canis familiaris
aagaggaggtgccatgttccagcaa

SEQ ID NO: 51212 - DNA, 25 bp, Canis familiaris
aagaggatgtgtggtgttgccccat

SEQ ID NO: 51213 - DNA, 25 bp, Canis familiaris
aagaggcagagtaacagtccccatg

SEQ ID NO: 51214 - DNA, 25 bp, Canis familiaris
aagaggctggagcaggaccactatg

SEQ ID NO: 51215 - DNA, 25 bp, Canis familiaris
aagagagttgagttgtcccctcagt

SEQ ID NO: 51216 - DNA, 25 bp, Canis familiaris
aagagtgtatagttttgccctgggg

SEQ ID NO: 51217 - DNA, 25 bp, Canis familiaris
aagatgctgccaataactatgcccg

SEQ ID NO: 51218 - DNA, 25 bp, Canis familiaris
aagatgctgccaataactatgcccg

SEQ ID NO: 51219 - DNA, 25 bp, Canis familiaris
aagatgctgccaataactatgcccg

SEQ ID NO: 51220 - DNA, 25 bp, Canis familiaris
aagatgctgccaataactatgcccg

SEQ ID NO: 51221 - DNA, 25 bp, Canis familiaris
aagatccacttgtactatcaactac

SEQ ID NO: 51222 - DNA, 25 bp, Canis familiaris
aagatcccgtgatattctgcacata

SEQ ID NO: 51223 - DNA, 25 bp, Canis familiaris
aagtcactctggtctaatgtgtcat

SEQ ID NO: 51224 - DNA, 25 bp, Canis familiaris
aagaggtctgtgttgcaattatctg

SEQ ID NO: 51225 - DNA, 25 bp, Canis familiaris
aagatggtatgattctacatatata

SEQ ID NO: 51226 - DNA, 25 bp, Canis familiaris
aagatggtattttcagttgctaaga

SEQ ID NO: 51227 - DNA, 25 bp, Canis familiaris
aagttatttctttgtcttacagaat

SEQ ID NO: 51228 - DNA, 25 bp, Canis familiaris
aagttttgtctgataattgaaagtt

SEQ ID NO: 51229 - DNA, 25 bp, Canis familiaris
aagggacttcgatcacatcgaacgt

SEQ ID NO: 51230 - DNA, 25 bp, Canis familiaris
aagggactcaaataatgaaactagt

SEQ ID NO: 51231 - DNA, 25 bp, Canis familiaris
aaggggccttattattgaatggaat

SEQ ID NO: 51232 - DNA, 25 bp, Canis familiaris
aagggagtccttgtgaaagggcact

SEQ ID NO: 51233 - DNA, 25 bp, Canis familiaris
aagtcgggccttgaaaagagcatag

SEQ ID NO: 51234 - DNA, 25 bp, Canis familiaris
aagtcagagatccttcccagaaaaa

SEQ ID NO: 51235 - DNA, 25 bp, Canis familiaris
aagtcaataccatttccgaaggcca

SEQ ID NO: 51236 - DNA, 25 bp, Canis familiaris
aagtacccaggtgcacagaaggaca

SEQ ID NO: 51237 - DNA, 25 bp, Canis familiaris
aagttccctgagcctcaagaggtgg

SEQ ID NO: 51238 - DNA, 25 bp, Canis familiaris
aagatctacctatcctagggtggaa

SEQ ID NO: 51239 - DNA, 25 bp, Canis familiaris
aagattgacactcaccttatctggc

SEQ ID NO: 51240 - DNA, 25 bp, Canis familiaris
aagataattcatcacacctcatttg

SEQ ID NO: 51241 - DNA, 25 bp, Canis familiaris
aagatgcctgtatagcctttttttg

SEQ ID NO: 51242 - DNA, 25 bp, Canis familiaris
aagatttgtacagatttttttcatg

SEQ ID NO: 51243 - DNA, 25 bp, Canis familiaris
aagttctcaactgatcttgctttct

SEQ ID NO: 51244 - DNA, 25 bp, Canis familiaris
aagtatatcaaagatgacgtcctct

SEQ ID NO: 51245 - DNA, 25 bp, Canis familiaris
aagtcaccacgagagaactcctttc

SEQ ID NO: 51246 - DNA, 25 bp, Canis familiaris
aagttccagggctgtcagcctttat

SEQ ID NO: 51247 - DNA, 25 bp, Canis familiaris
aagttccaagtctttacatttgact

SEQ ID NO: 51248 - DNA, 25 bp, Canis familiaris
aagttcctatttttacattgcagtt

SEQ ID NO: 51249 - DNA, 25 bp, Canis familiaris
aagttacttcatatatactcactgt

SEQ ID NO: 51250 - DNA, 25 bp, Canis familiaris
aagattccccatacaaatgaactgt

SEQ ID NO: 51251 - DNA, 25 bp, Canis familiaris
aagatcttcctctacaacgtgactt

SEQ ID NO: 51252 - DNA, 25 bp, Canis familiaris
aagtcgtcagcatatcaacggcctg

SEQ ID NO: 51253 - DNA, 25 bp, Canis familiaris
aagatctttatttccagcggctggt

SEQ ID NO: 51254 - DNA, 25 bp, Canis familiaris
aagaggttcatttcatcacagactg

SEQ ID NO: 51255 - DNA, 25 bp, Canis familiaris
aagagtgttgatttccacagctgct

SEQ ID NO: 51256 - DNA, 25 bp, Canis familiaris
aagagtgtggtctcagcagcacgtt

SEQ ID NO: 51257 - DNA, 25 bp, Canis familiaris
aagagtgtgttctcagcagcaggtt

SEQ ID NO: 51258 - DNA, 25 bp, Canis familiaris
aagagttcttcatcacatgggtggt

SEQ ID NO: 51259 - DNA, 25 bp, Canis familiaris
aagagttcactccacacgtggggaa

SEQ ID NO: 51260 - DNA, 25 bp, Canis familiaris
aatgagtaacccacctgtgaggcgg

SEQ ID NO: 51261 - DNA, 25 bp, Canis familiaris
aagagtttccacaccaggggcaatt

SEQ ID NO: 51262 - DNA, 25 bp, Canis familiaris
aaggaaacaacggcgacgggcagct

SEQ ID NO: 51263 - DNA, 25 bp, Canis familiaris
aagttaaaaatgtcacaaaggtgct

SEQ ID NO: 51264 - DNA, 25 bp, Canis familiaris
aagtataaatacccccagatgtcgt

SEQ ID NO: 51265 - DNA, 25 bp, Canis familiaris
aagttccaaagagtcctcagtgccc

SEQ ID NO: 51266 - DNA, 25 bp, Canis familiaris
aagttcctcagcctgtcaaattcct

SEQ ID NO: 51267 - DNA, 25 bp, Canis familiaris
aagatttctcaccattatcatgatt

SEQ ID NO: 51268 - DNA, 25 bp, Canis familiaris
aagattgcgctctgtgcttcagttt

SEQ ID NO: 51269 - DNA, 25 bp, Canis familiaris
aagttgcgcagattgtttcactctt

SEQ ID NO: 51270 - DNA, 25 bp, Canis familiaris
aagttctcagatatttcttttactc

SEQ ID NO: 51271 - DNA, 25 bp, Canis familiaris
aagtttgagcatgccttcttggctc

SEQ ID NO: 51272 - DNA, 25 bp, Canis familiaris
aagttggattacattctgggcctga

SEQ ID NO: 51273 - DNA, 25 bp, Canis familiaris
aagtacgttaattttgtctggatga

SEQ ID NO: 51274 - DNA, 25 bp, Canis familiaris
aagtaagggccgttggctctgtggt

SEQ ID NO: 51275 - DNA, 25 bp, Canis familiaris
aagtaattggccctgctaaatgtgg

SEQ ID NO: 51276 - DNA, 25 bp, Canis familiaris
aagttttagcatctccaacagtgtg

SEQ ID NO: 51277 - DNA, 25 bp, Canis familiaris
aagtattgctacatttagacattgt

SEQ ID NO: 51278 - DNA, 25 bp, Canis familiaris
aagtgacgctgtattaacctgtaag

SEQ ID NO: 51279 - DNA, 25 bp, Canis familiaris
aagttctgtttgagaacctgtgcca

SEQ ID NO: 51280 - DNA, 25 bp, Canis familiaris
aagattttgaggaagaccctcagta

SEQ ID NO: 51281 - DNA, 25 bp, Canis familiaris
aagtgggacaggacagtctgcctcg

SEQ ID NO: 51282 - DNA, 25 bp, Canis familiaris
aagtaggagaggtcgattcccccat

SEQ ID NO: 51283 - DNA, 25 bp, Canis familiaris
aatgttgggaagtcttaaccagaat

SEQ ID NO: 51284 - DNA, 25 bp, Canis familiaris
aagtctgggaaagcttcaccgcagt

SEQ ID NO: 51285 - DNA, 25 bp, Canis familiaris
aagatgctgggagacctatcattgg

SEQ ID NO: 51286 - DNA, 25 bp, Canis familiaris
aagatgtggggctatcactcacgag

SEQ ID NO: 51287 - DNA, 25 bp, Canis familiaris
aagatgctggttcctatctaggtgt

SEQ ID NO: 51288 - DNA, 25 bp, Canis familiaris
aagatgggtttattgcttgaggagc

SEQ ID NO: 51289 - DNA, 25 bp, Canis familiaris
aagagggtcttcatggtgtcggata

SEQ ID NO: 51290 - DNA, 25 bp, Canis familiaris
aagaggcctattgtgtttgcccacc

SEQ ID NO: 51291 - DNA, 25 bp, Canis familiaris
aaggatgactttgtttgtacccagg

SEQ ID NO: 51292 - DNA, 25 bp, Canis familiaris
aagatgatgactatctggcgttatc

SEQ ID NO: 51293 - DNA, 25 bp, Canis familiaris
aagatgatactggcgtccgtgttgg

SEQ ID NO: 51294 - DNA, 25 bp, Canis familiaris
aagagtgactgctaggcgctgtggt

SEQ ID NO: 51295 - DNA, 25 bp, Canis familiaris
aagaggacttggcggctgagtaggc

SEQ ID NO: 51296 - DNA, 25 bp, Canis familiaris
aagagtgacgtgtcgggtggggtcg

SEQ ID NO: 51297 - DNA, 25 bp, Canis familiaris
aatgtgctactttggggttggggag

SEQ ID NO: 51298 - DNA, 25 bp, Canis familiaris
aagttagttctggggtgggcaaatg

SEQ ID NO: 51299 - DNA, 25 bp, Canis familiaris
aagttaccctgctgatctggcagaa

SEQ ID NO: 51300 - DNA, 25 bp, Canis familiaris
aagttccgtcgatgattggatgaga

SEQ ID NO: 51301 - DNA, 25 bp, Canis familiaris
aagtcaaccatcctggatgggagaa

SEQ ID NO: 51302 - DNA, 25 bp, Canis familiaris
aagatagatctcgttctgggaagaa

SEQ ID NO: 51303 - DNA, 25 bp, Canis familiaris
aagaggtcactgttctgaggtagca

SEQ ID NO: 51304 - DNA, 25 bp, Canis familiaris
aagatgattgccctttcagtggaca

SEQ ID NO: 51305 - DNA, 25 bp, Canis familiaris
aagattatggctctgccagggctcc

SEQ ID NO: 51306 - DNA, 25 bp, Canis familiaris
aagtgctgggctgtgcacatggcct

SEQ ID NO: 51307 - DNA, 25 bp, Canis familiaris
aagtcagaggccacatatccatatg

SEQ ID NO: 51308 - DNA, 25 bp, Canis familiaris
aagtcgatcaccttatatcgcttca

SEQ ID NO: 51309 - DNA, 25 bp, Canis familiaris
aagatcaagcccttcattcagttcc

SEQ ID NO: 51310 - DNA, 25 bp, Canis familiaris
aagataagggctcaatcactctcct

SEQ ID NO: 51311 - DNA, 25 bp, Canis familiaris
aagataacctcctgatcagctgcat

SEQ ID NO: 51312 - DNA, 25 bp, Canis familiaris
aagataatggcttctggctcttcac

SEQ ID NO: 51313 - DNA, 25 bp, Canis familiaris
aagtacagatcttctcttttcagtc

SEQ ID NO: 51314 - DNA, 25 bp, Canis familiaris
aagtaacagtgtaaactgctcagtc

SEQ ID NO: 51315 - DNA, 25 bp, Canis familiaris
aagttaattattcatgctgcccatc

SEQ ID NO: 51316 - DNA, 25 bp, Canis familiaris
aagattgagatgttaggtagccccc

SEQ ID NO: 51317 - DNA, 25 bp, Canis familiaris
aagtcagagaggcaggaaccccacc

SEQ ID NO: 51318 - DNA, 25 bp, Canis familiaris
aagtcggagctggagggctccaccc

SEQ ID NO: 51319 - DNA, 25 bp, Canis familiaris
aagtcaaagtgcgggtctccgacgc

SEQ ID NO: 51320 - DNA, 25 bp, Canis familiaris
aagatcaaggctcctggttttgccc

SEQ ID NO: 51321 - DNA, 25 bp, Canis familiaris
aagattcagcgtcttgttactccac

SEQ ID NO: 51322 - DNA, 25 bp, Canis familiaris
aagattcagcgtcttgttactccac

SEQ ID NO: 51323 - DNA, 25 bp, Canis familiaris
aagattcagcgtcttgttactccac

SEQ ID NO: 51324 - DNA, 25 bp, Canis familiaris
aagttgcgtgtgttcgaacaccctc

SEQ ID NO: 51325 - DNA, 25 bp, Canis familiaris
taggtaggtgtgaggggacccattt

SEQ ID NO: 51326 - DNA, 25 bp, Canis familiaris
aagatacagttgaggggatcccctg

SEQ ID NO: 51327 - DNA, 25 bp, Canis familiaris
aagatacagtgtgaggaggttgcct

SEQ ID NO: 51328 - DNA, 25 bp, Canis familiaris
aatctcaagggaagtatgggatcct

SEQ ID NO: 51329 - DNA, 25 bp, Canis familiaris
aatgccgcagggagtgggttttttg

SEQ ID NO: 51330 - DNA, 25 bp, Canis familiaris
aatccttaggtagcaagttcttggt

SEQ ID NO: 51331 - DNA, 25 bp, Canis familiaris
caacgttgggtatagagcttacttt

SEQ ID NO: 51332 - DNA, 25 bp, Canis familiaris
aagttttgggaaagcctgtcatctt

SEQ ID NO: 51333 - DNA, 25 bp, Canis familiaris
aagttggtggctcagggatgctcat

SEQ ID NO: 51334 - DNA, 25 bp, Canis familiaris
aagttgccttgtaaagagcatgttg

SEQ ID NO: 51335 - DNA, 25 bp, Canis familiaris
aagatatggttaaaaatgtgcgctg

SEQ ID NO: 51336 - DNA, 25 bp, Canis familiaris
aagatgtgtgtcataaaaagcactt

SEQ ID NO: 51337 - DNA, 25 bp, Canis familiaris
aagatgggctttcctgaagctgcca

SEQ ID NO: 51338 - DNA, 25 bp, Canis familiaris
aagaggcagatttggcagcccaggc

SEQ ID NO: 51339 - DNA, 25 bp, Canis familiaris
aagaggatgatttgcacacacacac

SEQ ID NO: 51340 - DNA, 25 bp, Canis familiaris
aagatagtttcatcatcccacgtgt

SEQ ID NO: 51341 - DNA, 25 bp, Canis familiaris
aatgtcgttgctaacctaccagttt

SEQ ID NO: 51342 - DNA, 25 bp, Canis familiaris
aagttgttgtgaaagccgccatgtt

SEQ ID NO: 51343 - DNA, 25 bp, Canis familiaris
aagttcctagactacctgcaagtat

SEQ ID NO: 51344 - DNA, 25 bp, Canis familiaris
aagttcctgaatttgtccaagttgg

SEQ ID NO: 51345 - DNA, 25 bp, Canis familiaris
aagtcatttgacagtgcatcacaag

SEQ ID NO: 51346 - DNA, 25 bp, Canis familiaris
aagttgcattaaagatcatcaggta

SEQ ID NO: 51347 - DNA, 25 bp, Canis familiaris
aagttgtctaaatgatagctgaagt

SEQ ID NO: 51348 - DNA, 25 bp, Canis familiaris
aagatttttatgtaggagagagagt

SEQ ID NO: 51349 - DNA, 25 bp, Canis familiaris
aagatttttggatgtaggtggtata

SEQ ID NO: 51350 - DNA, 25 bp, Canis familiaris
aagatctttgaggaggatgaggttg

SEQ ID NO: 51351 - DNA, 25 bp, Canis familiaris
aagttcgtgcagtaggtatagttcc

SEQ ID NO: 51352 - DNA, 25 bp, Canis familiaris
aagttcgatgcagccgatatcttta

SEQ ID NO: 51353 - DNA, 25 bp, Canis familiaris
aagtttcatgattccgattcctgag

SEQ ID NO: 51354 - DNA, 25 bp, Canis familiaris
aagtctccaggaccgatactgcggt

SEQ ID NO: 51355 - DNA, 25 bp, Canis familiaris
aagtgcttgaggtgggacggtttga

SEQ ID NO: 51356 - DNA, 25 bp, Canis familiaris
aagtattaatgaaggcgacgtgctt

SEQ ID NO: 51357 - DNA, 25 bp, Canis familiaris
aagtattaagcatggcaggccgttg

SEQ ID NO: 51358 - DNA, 25 bp, Canis familiaris
aagtttaaatgactgtgctgcccct

SEQ ID NO: 51359 - DNA, 25 bp, Canis familiaris
aagtttaagggccagcagccaccat

SEQ ID NO: 51360 - DNA, 25 bp, Canis familiaris
aagtttcgtgggggaccgcagaatg

SEQ ID NO: 51361 - DNA, 25 bp, Canis familiaris
aagtttgtgctgtgttggccgagag

SEQ ID NO: 51362 - DNA, 25 bp, Canis familiaris
aatgtctttcgtgtctaccggagat

SEQ ID NO: 51363 - DNA, 25 bp, Canis familiaris
aagtttgtcagtgaccatcccgagc

SEQ ID NO: 51364 - DNA, 25 bp, Canis familiaris
aagtctcttcttgaacacatactgg

SEQ ID NO: 51365 - DNA, 25 bp, Canis familiaris
aagtcttggttggtatcccactggt

SEQ ID NO: 51366 - DNA, 25 bp, Canis familiaris
aagtcttggatggttgtagcccctg

SEQ ID NO: 51367 - DNA, 25 bp, Canis familiaris
aagtctgggagcctgtatttccctg

SEQ ID NO: 51368 - DNA, 25 bp, Canis familiaris
aagtgctgtctgagttctttacctg

SEQ ID NO: 51369 - DNA, 25 bp, Canis familiaris
aagatctgtcgtccaattttgcacc

SEQ ID NO: 51370 - DNA, 25 bp, Canis familiaris
aagatgctgctcatagccatccttg

SEQ ID NO: 51371 - DNA, 25 bp, Canis familiaris
aagatgctgtcattgagtttctatt

SEQ ID NO: 51372 - DNA, 25 bp, Canis familiaris
aagtcatgaattggtatctctttcc

SEQ ID NO: 51373 - DNA, 25 bp, Canis familiaris
aagttgcctttgacattgcctgatc

SEQ ID NO: 51374 - DNA, 25 bp, Canis familiaris
aagttgccatctaccttgggatcaa

SEQ ID NO: 51375 - DNA, 25 bp, Canis familiaris
aagttaagcttgtactgggatcaag

SEQ ID NO: 51376 - DNA, 25 bp, Canis familiaris
aagtataagctccaaaggtctacgg

SEQ ID NO: 51377 - DNA, 25 bp, Canis familiaris
aagttgaactccatagagtttgctg

SEQ ID NO: 51378 - DNA, 25 bp, Canis familiaris
aagttgtgacctcggggttgtgaga

SEQ ID NO: 51379 - DNA, 25 bp, Canis familiaris
aagtactggcttttggtgatttgaa

SEQ ID NO: 51380 - DNA, 25 bp, Canis familiaris
aagtacagtaagttcagtgatttcc

SEQ ID NO: 51381 - DNA, 25 bp, Canis familiaris
aagttctacaactcatgtgatttct

SEQ ID NO: 51382 - DNA, 25 bp, Canis familiaris
aagtgcctaacatcgcatttcattt

SEQ ID NO: 51383 - DNA, 25 bp, Canis familiaris
aagtctttcaaagtgccttctgttg

SEQ ID NO: 51384 - DNA, 25 bp, Canis familiaris
aagtattgaaaagccttctcttggt

SEQ ID NO: 51385 - DNA, 25 bp, Canis familiaris
aagtttataaacactgtgctcttta

SEQ ID NO: 51386 - DNA, 25 bp, Canis familiaris
aatgtttgaaatctttactactgta

SEQ ID NO: 51387 - DNA, 25 bp, Canis familiaris
aagtattaaatgtctctttctacaa

SEQ ID NO: 51388 - DNA, 25 bp, Canis familiaris
aagttctcaagttcatcttttagag

SEQ ID NO: 51389 - DNA, 25 bp, Canis familiaris
aagtatgtcacctacttctttggac

SEQ ID NO: 51390 - DNA, 25 bp, Canis familiaris
aagtcaaacacgacgtttatgtaca

SEQ ID NO: 51391 - DNA, 25 bp, Canis familiaris
aagatgccaacagcctttgtttgaa

SEQ ID NO: 51392 - DNA, 25 bp, Canis familiaris
aagatctcacaagtttaatccttaa

SEQ ID NO: 51393 - DNA, 25 bp, Canis familiaris
aagtcccacaaaataatctcaaaga

SEQ ID NO: 51394 - DNA, 25 bp, Canis familiaris
aagatgccctcagcaataacctcag

SEQ ID NO: 51395 - DNA, 25 bp, Canis familiaris
aagtcatcctaagaaagcctcacct

SEQ ID NO: 51396 - DNA, 25 bp, Canis familiaris
aagatatccttcgaaagacccctgt

SEQ ID NO: 51397 - DNA, 25 bp, Canis familiaris
aagattcacttctgtaggcctttgt

SEQ ID NO: 51398 - DNA, 25 bp, Canis familiaris
aagtatcattacttctgggcctttt

SEQ ID NO: 51399 - DNA, 25 bp, Canis familiaris
aagtgatattacctgcggtccgact

SEQ ID NO: 51400 - DNA, 25 bp, Canis familiaris
aagatacatgtatttcgttctcata

SEQ ID NO: 51401 - DNA, 25 bp, Canis familiaris
aagatgacttcaatgccgtcctact

SEQ ID NO: 51402 - DNA, 25 bp, Canis familiaris
aagatgactatgctggcgtcatctt

SEQ ID NO: 51403 - DNA, 25 bp, Canis familiaris
aagatgtcaagttggctgagtcaca

SEQ ID NO: 51404 - DNA, 25 bp, Canis familiaris
aagatacttatactgatactcacaa

SEQ ID NO: 51405 - DNA, 25 bp, Canis familiaris
aagtcagttttctatatatcacata

SEQ ID NO: 51406 - DNA, 25 bp, Canis familiaris
aagatcatgtctttttgcaataaaa

SEQ ID NO: 51407 - DNA, 25 bp, Canis familiaris
aagtcagtcctttagaaacataatt

SEQ ID NO: 51408 - DNA, 25 bp, Canis familiaris
aagggtgtcccataaacaagatttg

SEQ ID NO: 51409 - DNA, 25 bp, Canis familiaris
aagtttgtccaacaaggaacacttg

SEQ ID NO: 51410 - DNA, 25 bp, Canis familiaris
aagtattttagttgacggcaacact

SEQ ID NO: 51411 - DNA, 25 bp, Canis familiaris
aagtttatttactacctgcatacaa

SEQ ID NO: 51412 - DNA, 25 bp, Canis familiaris
aagattctttgtagcagatactgca

SEQ ID NO: 51413 - DNA, 25 bp, Canis familiaris
aagtaatgcttgatgcaggatctga

SEQ ID NO: 51414 - DNA, 25 bp, Canis familiaris
aagtacgtctgtagcgggatggtat

SEQ ID NO: 51415 - DNA, 25 bp, Canis familiaris
aagatacctctgttggggtctcata

SEQ ID NO: 51416 - DNA, 25 bp, Canis familiaris
aagttcatcttgttggtgggctcaa

SEQ ID NO: 51417 - DNA, 25 bp, Canis familiaris
aagattgatcagcttgtgtatggtt

SEQ ID NO: 51418 - DNA, 25 bp, Canis familiaris
aagatgtgtttgtgtgtgtgtgtgt

SEQ ID NO: 51419 - DNA, 25 bp, Canis familiaris
aagattttctaatactgcttgtacc

SEQ ID NO: 51420 - DNA, 25 bp, Canis familiaris
aagattttctgattcccacttggaa

SEQ ID NO: 51421 - DNA, 25 bp, Canis familiaris
aagattgtgctcaaactctcatccg

SEQ ID NO: 51422 - DNA, 25 bp, Canis familiaris
aagataggccatagactcattcccc

SEQ ID NO: 51423 - DNA, 25 bp, Canis familiaris
aagatgcaggcttaactcttacccg

SEQ ID NO: 51424 - DNA, 25 bp, Canis familiaris
aatgatcatggataaccttgactta

SEQ ID NO: 51425 - DNA, 25 bp, Canis familiaris
aagtcaggcaccacctgtaattcaa

SEQ ID NO: 51426 - DNA, 25 bp, Canis familiaris
aatgtagtcaccaggctgtaaccct

SEQ ID NO: 51427 - DNA, 25 bp, Canis familiaris
aatgttggcgccaaggattccgccc

SEQ ID NO: 51428 - DNA, 25 bp, Canis familiaris
aagttgctcgccagttaacagctct

SEQ ID NO: 51429 - DNA, 25 bp, Canis familiaris
aagttgcccaaacttactgagcctc

SEQ ID NO: 51430 - DNA, 25 bp, Canis familiaris
aagttgccacagtaattcttacact

SEQ ID NO: 51431 - DNA, 25 bp, Canis familiaris
aagttgccagtgtttgtttattcat

SEQ ID NO: 51432 - DNA, 25 bp, Canis familiaris
aagattctcattcatattccttcct

SEQ ID NO: 51433 - DNA, 25 bp, Canis familiaris
aagatcattatccttttctctacct

SEQ ID NO: 51434 - DNA, 25 bp, Canis familiaris
aagatcttatccaatatttcaccaa

SEQ ID NO: 51435 - DNA, 25 bp, Canis familiaris
aagatttcattcacttatcacatag

SEQ ID NO: 51436 - DNA, 25 bp, Canis familiaris
aagtctgaatacacaggaccacatg

SEQ ID NO: 51437 - DNA, 25 bp, Canis familiaris
aagtctaatcacatccgagcttatt

SEQ ID NO: 51438 - DNA, 25 bp, Canis familiaris
aagtcagttggcatccgtctatttc

SEQ ID NO: 51439 - DNA, 25 bp, Canis familiaris
aagtcagtagccttcttggtgcttt

SEQ ID NO: 51440 - DNA, 25 bp, Canis familiaris
aagattggtgcctttctgggctacg

SEQ ID NO: 51441 - DNA, 25 bp, Canis familiaris
aagatgagattgacttcctgggccc

SEQ ID NO: 51442 - DNA, 25 bp, Canis familiaris
aagatgtgacccattctgtagcctt

SEQ ID NO: 51443 - DNA, 25 bp, Canis familiaris
aagatgatgaaccgcttcatgccac

SEQ ID NO: 51444 - DNA, 25 bp, Canis familiaris
aagatgatactccaggtctgccagt

SEQ ID NO: 51445 - DNA, 25 bp, Canis familiaris
aagatgttgtcctgtgctggagctg

SEQ ID NO: 51446 - DNA, 25 bp, Canis familiaris
aagatgcggtaccagtgcacaactg

SEQ ID NO: 51447 - DNA, 25 bp, Canis familiaris
aagtgaagaagcaagccacagattg

SEQ ID NO: 51448 - DNA, 25 bp, Canis familiaris
aagatgataaccaagagaagttgtt

SEQ ID NO: 51449 - DNA, 25 bp, Canis familiaris
aagtctctctccaggcaagggatat

SEQ ID NO: 51450 - DNA, 25 bp, Canis familiaris
aagtttggcctcccaggagcgatac

SEQ ID NO: 51451 - DNA, 25 bp, Canis familiaris
aagtttggcgcgtgaggaagttcga

SEQ ID NO: 51452 - DNA, 25 bp, Canis familiaris
aaggggggcagggagtgacgattcg

SEQ ID NO: 51453 - DNA, 25 bp, Canis familiaris
aagtgggaggcctggacattgtcct

SEQ ID NO: 51454 - DNA, 25 bp, Canis familiaris
aaggggaggacttcccagtgtcaga

SEQ ID NO: 51455 - DNA, 25 bp, Canis familiaris
aaggggtgtacatcagttgttacaa

SEQ ID NO: 51456 - DNA, 25 bp, Canis familiaris
aagtgcgggtcataagcttgcgttg

SEQ ID NO: 51457 - DNA, 25 bp, Canis familiaris
aagtgcgggtcataagcttgcgttg

SEQ ID NO: 51458 - DNA, 25 bp, Canis familiaris
aagtgcgggtcataagcttgcgttg

SEQ ID NO: 51459 - DNA, 25 bp, Canis familiaris
aagtagaagtctgccacgtggttgc

SEQ ID NO: 51460 - DNA, 25 bp, Canis familiaris
aagttacacctacacagtggcttgt

SEQ ID NO: 51461 - DNA, 25 bp, Canis familiaris
aagtctagattttccaagaggttgg

SEQ ID NO: 51462 - DNA, 25 bp, Canis familiaris
aatgttagcctatttaaaggtctga

SEQ ID NO: 51463 - DNA, 25 bp, Canis familiaris
aagtttactgtgttgcaaaagacta

SEQ ID NO: 51464 - DNA, 25 bp, Canis familiaris
aagattttatctttgagaatagagc

SEQ ID NO: 51465 - DNA, 25 bp, Canis familiaris
aagatattttctttaacccagcata

SEQ ID NO: 51466 - DNA, 25 bp, Canis familiaris
aagttcattccttttagagctcctt

SEQ ID NO: 51467 - DNA, 25 bp, Canis familiaris
aagtacttgccctgtggcagctact

SEQ ID NO: 51468 - DNA, 25 bp, Canis familiaris
aagtgactttccagtcccaagtcac

SEQ ID NO: 51469 - DNA, 25 bp, Canis familiaris
aagtgatttaacagtctcccagtgc

SEQ ID NO: 51470 - DNA, 25 bp, Canis familiaris
aagtatggtaaggtgtcatcccccg

SEQ ID NO: 51471 - DNA, 25 bp, Canis familiaris
aagttggaactgggtcccatcctgc

SEQ ID NO: 51472 - DNA, 25 bp, Canis familiaris
aagttgacaactctggggcatctgg

SEQ ID NO: 51473 - DNA, 25 bp, Canis familiaris
aagtagtgctttctagggactgctc

SEQ ID NO: 51474 - DNA, 25 bp, Canis familiaris
aagtcactttctttcaaggcacttc

SEQ ID NO: 51475 - DNA, 25 bp, Canis familiaris
aagtattttcttgcaggcttcttct

SEQ ID NO: 51476 - DNA, 25 bp, Canis familiaris
aagtttttgtctgagcagcattctc

SEQ ID NO: 51477 - DNA, 25 bp, Canis familiaris
aagatcttgggcttgtagagacctc

SEQ ID NO: 51478 - DNA, 25 bp, Canis familiaris
aagtcttggagctccaaacccagac

SEQ ID NO: 51479 - DNA, 25 bp, Canis familiaris
aagtctctgaagacaccaaacccct

SEQ ID NO: 51480 - DNA, 25 bp, Canis familiaris
aagatttgagaggcctcctgacacc

SEQ ID NO: 51481 - DNA, 25 bp, Canis familiaris
aagattgggccggctcagcaggccc

SEQ ID NO: 51482 - DNA, 25 bp, Canis familiaris
aagtatgaggccatctgcagccagc

SEQ ID NO: 51483 - DNA, 25 bp, Canis familiaris
aagtagagaggccttggcccgggca

SEQ ID NO: 51484 - DNA, 25 bp, Canis familiaris
aagtacataggctctggctttggta

SEQ ID NO: 51485 - DNA, 25 bp, Canis familiaris
aagggacggccctgtgattgtgaag

SEQ ID NO: 51486 - DNA, 25 bp, Canis familiaris
aaggaacttgctccgttatttgaag

SEQ ID NO: 51487 - DNA, 25 bp, Canis familiaris
aagatccctgactggtttttgaaca

SEQ ID NO: 51488 - DNA, 25 bp, Canis familiaris
aagtccttgacatgtttcatttaca

SEQ ID NO: 51489 - DNA, 25 bp, Canis familiaris
aagtccttgaaaactctcagtgtta

SEQ ID NO: 51490 - DNA, 25 bp, Canis familiaris
aagtctaataaggcactctccgtta

SEQ ID NO: 51491 - DNA, 25 bp, Canis familiaris
aagttcatatattttgtcccagtaa

SEQ ID NO: 51492 - DNA, 25 bp, Canis familiaris
aagtatgcaaattgtagcccccttt

SEQ ID NO: 51493 - DNA, 25 bp, Canis familiaris
aatgtattaaataagcccctgtgtt

SEQ ID NO: 51494 - DNA, 25 bp, Canis familiaris
aagtgcttaacataccctttgcttc

SEQ ID NO: 51495 - DNA, 25 bp, Canis familiaris
aagtatgtagtctgaccactcctgt

SEQ ID NO: 51496 - DNA, 25 bp, Canis familiaris
aagttgcatgatgcttgaccacctc

SEQ ID NO: 51497 - DNA, 25 bp, Canis familiaris
aagtggcatcaggcatggcacctgc

SEQ ID NO: 51498 - DNA, 25 bp, Canis familiaris
aagatcagatgctcaggctcagtct

SEQ ID NO: 51499 - DNA, 25 bp, Canis familiaris
aagatcagatcatcagtgccaaccc

SEQ ID NO: 51500 - DNA, 25 bp, Canis familiaris
aagatcaagcagatgcccaaccgct

SEQ ID NO: 51501 - DNA, 25 bp, Canis familiaris
aagatcacaaattgcccaacaccaa

SEQ ID NO: 51502 - DNA, 25 bp, Canis familiaris
aagtgcagaaatttcctcagccacc

SEQ ID NO: 51503 - DNA, 25 bp, Canis familiaris
aagatcaaagcttgcatgtccccat

SEQ ID NO: 51504 - DNA, 25 bp, Canis familiaris
aagtcaatgacaaaatcctccacaa

SEQ ID NO: 51505 - DNA, 25 bp, Canis familiaris
aagtctggccattaacttgccagaa

SEQ ID NO: 51506 - DNA, 25 bp, Canis familiaris
aagtcttgcctaatgataatgccac

SEQ ID NO: 51507 - DNA, 25 bp, Canis familiaris
aagattggccgctaagaagccacct

SEQ ID NO: 51508 - DNA, 25 bp, Canis familiaris
aagattggccctaagaagcccctgc

SEQ ID NO: 51509 - DNA, 25 bp, Canis familiaris
aagattggccctaagaagcccctgc

SEQ ID NO: 51510 - DNA, 25 bp, Canis familiaris
aagattggccctaagaagcccctgc

SEQ ID NO: 51511 - DNA, 25 bp, Canis familiaris
aagtttgccttgaagaatggccacc

SEQ ID NO: 51512 - DNA, 25 bp, Canis familiaris
aagatttccatccagcagaattccc

SEQ ID NO: 51513 - DNA, 25 bp, Canis familiaris
aagttctccacttgcagaatttgta

SEQ ID NO: 51514 - DNA, 25 bp, Canis familiaris
aagttctcacaggcagcaaactgga

SEQ ID NO: 51515 - DNA, 25 bp, Canis familiaris
aagtttccctcaggatagctggcgc

SEQ ID NO: 51516 - DNA, 25 bp, Canis familiaris
aagttgctcctaaatgatacgcctg

SEQ ID NO: 51517 - DNA, 25 bp, Canis familiaris
aagtgttcctgagatatagtttgat

SEQ ID NO: 51518 - DNA, 25 bp, Canis familiaris
aagtacccgagcacatagagctttt

SEQ ID NO: 51519 - DNA, 25 bp, Canis familiaris
aaggtccaaggctcaagaatttcca

SEQ ID NO: 51520 - DNA, 25 bp, Canis familiaris
aaggttcaattgtggaacaccctca

SEQ ID NO: 51521 - DNA, 25 bp, Canis familiaris
aaggcttatttgtggttttcgcttg

SEQ ID NO: 51522 - DNA, 25 bp, Canis familiaris
aaggtaactttcatactttcttatg

SEQ ID NO: 51523 - DNA, 25 bp, Canis familiaris
aagttaactcttgtgcatatattga

SEQ ID NO: 51524 - DNA, 25 bp, Canis familiaris
aagtttttgcttctgcttttgttct

SEQ ID NO: 51525 - DNA, 25 bp, Canis familiaris
aagattgtttgcatacttttgtaat

SEQ ID NO: 51526 - DNA, 25 bp, Canis familiaris
aagatttctctacagctttttctct

SEQ ID NO: 51527 - DNA, 25 bp, Canis familiaris
aagttattcactctattgttttctg

SEQ ID NO: 51528 - DNA, 25 bp, Canis familiaris
aagttgtataatttattttcttgca

SEQ ID NO: 51529 - DNA, 25 bp, Canis familiaris
aagtttatttttattcagctctcaa

SEQ ID NO: 51530 - DNA, 25 bp, Canis familiaris
aagtttactttgtatctgaactcaa

SEQ ID NO: 51531 - DNA, 25 bp, Canis familiaris
caaccttacttacattagaccacca

SEQ ID NO: 51532 - DNA, 25 bp, Canis familiaris
catacctgttttgaataaaccaact

SEQ ID NO: 51533 - DNA, 25 bp, Canis familiaris
aaggctgtttcagacaaacccacca

SEQ ID NO: 51534 - DNA, 25 bp, Canis familiaris
aagtagtctgtaggtccaatccgcc

SEQ ID NO: 51535 - DNA, 25 bp, Canis familiaris
aagttgtctatttgtctgtatcccc

SEQ ID NO: 51536 - DNA, 25 bp, Canis familiaris
aagttacatataattctgcctctgc

SEQ ID NO: 51537 - DNA, 25 bp, Canis familiaris
aagttgatacattcttctgctcatt

SEQ ID NO: 51538 - DNA, 25 bp, Canis familiaris
aagtctggaacctcatgtcatcatg

SEQ ID NO: 51539 - DNA, 25 bp, Canis familiaris
caagatgctggagtccggttcattg

SEQ ID NO: 51540 - DNA, 25 bp, Canis familiaris
aagtctggagcacaggttctcagct

SEQ ID NO: 51541 - DNA, 25 bp, Canis familiaris
aagtcggagcagtctggagccaagt

SEQ ID NO: 51542 - DNA, 25 bp, Canis familiaris
aagattccagagtcagtgtcacaaa

SEQ ID NO: 51543 - DNA, 25 bp, Canis familiaris
aagattccagcatctggggctcttc

SEQ ID NO: 51544 - DNA, 25 bp, Canis familiaris
aagattcacataactcggtatccct

SEQ ID NO: 51545 - DNA, 25 bp, Canis familiaris
aagtcatatgtcactggttattcgt

SEQ ID NO: 51546 - DNA, 25 bp, Canis familiaris
aagtatagctcaaatggtcagtgtg

SEQ ID NO: 51547 - DNA, 25 bp, Canis familiaris
aagtcaagatcatgcgttgcactgg

SEQ ID NO: 51548 - DNA, 25 bp, Canis familiaris
aagttatgttagttggtagagtgtt

SEQ ID NO: 51549 - DNA, 25 bp, Canis familiaris
aagttagttaattctgatgggtcat

SEQ ID NO: 51550 - DNA, 25 bp, Canis familiaris
aagttggccatgtctttgtggtgtt

SEQ ID NO: 51551 - DNA, 25 bp, Canis familiaris
aagttcaggctgctcttagagatgt

SEQ ID NO: 51552 - DNA, 25 bp, Canis familiaris
aagtacaggctgctgctctaaaagg

SEQ ID NO: 51553 - DNA, 25 bp, Canis familiaris
aagtactattgccagcctaaggaac

SEQ ID NO: 51554 - DNA, 25 bp, Canis familiaris
aagtccttttatcgtatcaggaagt

SEQ ID NO: 51555 - DNA, 25 bp, Canis familiaris
aattgggtttgatgtcctggaagat

SEQ ID NO: 51556 - DNA, 25 bp, Canis familiaris
aagtagttcgtgttgtcctggatca

SEQ ID NO: 51557 - DNA, 25 bp, Canis familiaris
aagttgttccagtaattcaggcata

SEQ ID NO: 51558 - DNA, 25 bp, Canis familiaris
aagtttataactacaatcacctcat

SEQ ID NO: 51559 - DNA, 25 bp, Canis familiaris
aagtcattaaaactgcaaaacaatc

SEQ ID NO: 51560 - DNA, 25 bp, Canis familiaris
aagatttcagaaccactactataat

SEQ ID NO: 51561 - DNA, 25 bp, Canis familiaris
aagtattgcccaccttacacaaatt

SEQ ID NO: 51562 - DNA, 25 bp, Canis familiaris
aagtcatcccgtcttcagatagttt

SEQ ID NO: 51563 - DNA, 25 bp, Canis familiaris
aaggtcccagttgtttagtattgtg

SEQ ID NO: 51564 - DNA, 25 bp, Canis familiaris
aaggtcaccttttggttcagtcagc

SEQ ID NO: 51565 - DNA, 25 bp, Canis familiaris
aagggcacctgggtggatcctgtac

SEQ ID NO: 51566 - DNA, 25 bp, Canis familiaris
aagggcttcctgtgagaactgccac

SEQ ID NO: 51567 - DNA, 25 bp, Canis familiaris
aagtggggcctgagggactggccac

SEQ ID NO: 51568 - DNA, 25 bp, Canis familiaris
aagtaggacctgaggctcacgtgct

SEQ ID NO: 51569 - DNA, 25 bp, Canis familiaris
aagattggcactgaggggcacctgg

SEQ ID NO: 51570 - DNA, 25 bp, Canis familiaris
aagttatccttaggggtgcctgcgt

SEQ ID NO: 51571 - DNA, 25 bp, Canis familiaris
aagtctactgtaaagggatgtccgt

SEQ ID NO: 51572 - DNA, 25 bp, Canis familiaris
aagtcacgcttctgcagaggtgtcc

SEQ ID NO: 51573 - DNA, 25 bp, Canis familiaris
aagtacgcatggctgtggggtcgcc

SEQ ID NO: 51574 - DNA, 25 bp, Canis familiaris
aagtaactgccttgtgggtcaggtc

SEQ ID NO: 51575 - DNA, 25 bp, Canis familiaris
aagttactgacttggtcttatctgc

SEQ ID NO: 51576 - DNA, 25 bp, Canis familiaris
aagttactgagcatgtgggttctgt

SEQ ID NO: 51577 - DNA, 25 bp, Canis familiaris
aagtacccagcaaatgggcatttgt

SEQ ID NO: 51578 - DNA, 25 bp, Canis familiaris
aagtaatcctatcatggccatttta

SEQ ID NO: 51579 - DNA, 25 bp, Canis familiaris
aaggattgacttcactccagtttct

SEQ ID NO: 51580 - DNA, 25 bp, Canis familiaris
aagtcactgcctaaacccagtgctt

SEQ ID NO: 51581 - DNA, 25 bp, Canis familiaris
aagtcccaaaaaccaagcactgctc

SEQ ID NO: 51582 - DNA, 25 bp, Canis familiaris
aagattgctcaatcacagcacaaca

SEQ ID NO: 51583 - DNA, 25 bp, Canis familiaris
aagtatctgccttcagcgcaggtca

SEQ ID NO: 51584 - DNA, 25 bp, Canis familiaris
aagtcatgtgacaatcagacgggca

SEQ ID NO: 51585 - DNA, 25 bp, Canis familiaris
aagtcagcacatgtcagccaggagc

SEQ ID NO: 51586 - DNA, 25 bp, Canis familiaris
aagtcagcattcttcatccagtaag

SEQ ID NO: 51587 - DNA, 25 bp, Canis familiaris
aagtgcatgcaatttgatctgagta

SEQ ID NO: 51588 - DNA, 25 bp, Canis familiaris
aagtgctgcatatggaccggaaccc

SEQ ID NO: 51589 - DNA, 25 bp, Canis familiaris
aagtcgcactagcacgtcgacatcg

SEQ ID NO: 51590 - DNA, 25 bp, Canis familiaris
aagtcatactcagagcttctccaca

SEQ ID NO: 51591 - DNA, 25 bp, Canis familiaris
aagtactctcgttcttttgcaatgt

SEQ ID NO: 51592 - DNA, 25 bp, Canis familiaris
aagtacctgaattcttttgtcctga

SEQ ID NO: 51593 - DNA, 25 bp, Canis familiaris
aagtaccttatatttgctcatttta

SEQ ID NO: 51594 - DNA, 25 bp, Canis familiaris
aagttctttttcatgcatttattat

SEQ ID NO: 51595 - DNA, 25 bp, Canis familiaris
aagttctttttcagagtcttctctt

SEQ ID NO: 51596 - DNA, 25 bp, Canis familiaris
aagtctctgctgtttctggaagttt

SEQ ID NO: 51597 - DNA, 25 bp, Canis familiaris
aagtttctgtttttgaaatgtctgt

SEQ ID NO: 51598 - DNA, 25 bp, Canis familiaris
aagttacatgttggttatattattt

SEQ ID NO: 51599 - DNA, 25 bp, Canis familiaris
aagttacactctttttatgctttgt

SEQ ID NO: 51600 - DNA, 25 bp, Canis familiaris
aagtcacaactctagtttaattgga

SEQ ID NO: 51601 - DNA, 25 bp, Canis familiaris
aagtaaactcaactgtgattcctta

SEQ ID NO: 51602 - DNA, 25 bp, Canis familiaris
aagtaatgactctcgtgatcacctt

SEQ ID NO: 51603 - DNA, 25 bp, Canis familiaris
aaggttgccttccaggcagaccgtt

SEQ ID NO: 51604 - DNA, 25 bp, Canis familiaris
aagtttccaattttgcattccgttg

SEQ ID NO: 51605 - DNA, 25 bp, Canis familiaris
aagtttgccagtattcttctctgat

SEQ ID NO: 51606 - DNA, 25 bp, Canis familiaris
aagttaggattgtcatttgtttgct

SEQ ID NO: 51607 - DNA, 25 bp, Canis familiaris
aagttatggatatctcattgctttc

SEQ ID NO: 51608 - DNA, 25 bp, Canis familiaris
aagtctatcgaatgcgaggagtgtg

SEQ ID NO: 51609 - DNA, 25 bp, Canis familiaris
aagtgctgaccaaggccagtgaatg

SEQ ID NO: 51610 - DNA, 25 bp, Canis familiaris
aagattgcaaatactgcccgcaaag

SEQ ID NO: 51611 - DNA, 25 bp, Canis familiaris
aagttgccagagatgcttcgaaagg

SEQ ID NO: 51612 - DNA, 25 bp, Canis familiaris
aagtttcagccagtcaaacaaaagt

SEQ ID NO: 51613 - DNA, 25 bp, Canis familiaris
aagtttctgagagcatgccaaaaaa

SEQ ID NO: 51614 - DNA, 25 bp, Canis familiaris
aagtatcactacacagccaacaaaa

SEQ ID NO: 51615 - DNA, 25 bp, Canis familiaris
aagtatattagttaccaagaggata

SEQ ID NO: 51616 - DNA, 25 bp, Canis familiaris
aatgtatttacctatgccaaagatt

SEQ ID NO: 51617 - DNA, 25 bp, Canis familiaris
aatggagctgtacgctatacaactt

SEQ ID NO: 51618 - DNA, 25 bp, Canis familiaris
aagggcaaaacttcaaatttgcttg

SEQ ID NO: 51619 - DNA, 25 bp, Canis familiaris
aagggctagaacatcctttccttct

SEQ ID NO: 51620 - DNA, 25 bp, Canis familiaris
aagggtacctttgtgattcctctgc

SEQ ID NO: 51621 - DNA, 25 bp, Canis familiaris
aagggggactgattggcgttccttg

SEQ ID NO: 51622 - DNA, 25 bp, Canis familiaris
aaggggatacgtggtgcgaaatcat

SEQ ID NO: 51623 - DNA, 25 bp, Canis familiaris
aagggggcggtgctctagaagcagg

SEQ ID NO: 51624 - DNA, 25 bp, Canis familiaris
caagggggggggagcagaaagtgtg

SEQ ID NO: 51625 - DNA, 25 bp, Canis familiaris
aaggggaaggggcgtgctagtgttg

SEQ ID NO: 51626 - DNA, 25 bp, Canis familiaris
aagggaatttggtgaatgttctggt

SEQ ID NO: 51627 - DNA, 25 bp, Canis familiaris
aaggagaaaggagaaatgttttgtg

SEQ ID NO: 51628 - DNA, 25 bp, Canis familiaris
aagtggtgttggtgaattggttttg

SEQ ID NO: 51629 - DNA, 25 bp, Canis familiaris
aagtagcatgttggggatgggagtt

SEQ ID NO: 51630 - DNA, 25 bp, Canis familiaris
aagtacattctagggatgcctgggt

SEQ ID NO: 51631 - DNA, 25 bp, Canis familiaris
aagttatgtactgggcagccctggt

SEQ ID NO: 51632 - DNA, 25 bp, Canis familiaris
aagtttgtcgctgatggcatcttca

SEQ ID NO: 51633 - DNA, 25 bp, Canis familiaris
aagtccgttgcaacagtgtctggca

SEQ ID NO: 51634 - DNA, 25 bp, Canis familiaris
aatggttcaggcacggtctggaaac

SEQ ID NO: 51635 - DNA, 25 bp, Canis familiaris
aagtgttcagtcaaagccttggagt

SEQ ID NO: 51636 - DNA, 25 bp, Canis familiaris
aagggtagcttgggtctatgaggta

SEQ ID NO: 51637 - DNA, 25 bp, Canis familiaris
aagggtagctcaaagtttcaagtag

SEQ ID NO: 51638 - DNA, 25 bp, Canis familiaris
aagggaacactcgatctttcaaggg

SEQ ID NO: 51639 - DNA, 25 bp, Canis familiaris
aagtggacacacagtcctcaaaggt

SEQ ID NO: 51640 - DNA, 25 bp, Canis familiaris
aagtatgacaactccctcaagattg

SEQ ID NO: 51641 - DNA, 25 bp, Canis familiaris
aagtctcacatacgtccttaagatt

SEQ ID NO: 51642 - DNA, 25 bp, Canis familiaris
aagtctcacaggcttcagttctgga

SEQ ID NO: 51643 - DNA, 25 bp, Canis familiaris
aagtacacgggttgtcttcgatgaa

SEQ ID NO: 51644 - DNA, 25 bp, Canis familiaris
aagtcacattggccagtgtcttctt

SEQ ID NO: 51645 - DNA, 25 bp, Canis familiaris
aagtatctcatctcagtgtccttat

SEQ ID NO: 51646 - DNA, 25 bp, Canis familiaris
aagtctcatatatgttgccctattc

SEQ ID NO: 51647 - DNA, 25 bp, Canis familiaris
aagttcttgaggatcccatcatctg

SEQ ID NO: 51648 - DNA, 25 bp, Canis familiaris
aagtctcttattatccagtcatgtg

SEQ ID NO: 51649 - DNA, 25 bp, Canis familiaris
aagtttacttcattacatgtctgat

SEQ ID NO: 51650 - DNA, 25 bp, Canis familiaris
aagtttgacttctaccattggataa

SEQ ID NO: 51651 - DNA, 25 bp, Canis familiaris
aagttattttgctctcactgtttaa

SEQ ID NO: 51652 - DNA, 25 bp, Canis familiaris
aaggtgactccgtgtcacgtttcac

SEQ ID NO: 51653 - DNA, 25 bp, Canis familiaris
aagtgccacccactaggcaagcttt

SEQ ID NO: 51654 - DNA, 25 bp, Canis familiaris
aagtccccaacttgaaggatgtccg

SEQ ID NO: 51655 - DNA, 25 bp, Canis familiaris
aagtcccaaaattcaaggctccctg

SEQ ID NO: 51656 - DNA, 25 bp, Canis familiaris
aagtaccaaggtctaggtcgcctca

SEQ ID NO: 51657 - DNA, 25 bp, Canis familiaris
aagtaccagtttctgagacctctcc

SEQ ID NO: 51658 - DNA, 25 bp, Canis familiaris
aagtaattttccttgcaggccttct

SEQ ID NO: 51659 - DNA, 25 bp, Canis familiaris
aagtacctttccatgtggcagcact

SEQ ID NO: 51660 - DNA, 25 bp, Canis familiaris
aagtcatccttttcttgtgtactct

SEQ ID NO: 51661 - DNA, 25 bp, Canis familiaris
aagttgcacttttgattttccatcc

SEQ ID NO: 51662 - DNA, 25 bp, Canis familiaris
aagtcacaacttcaaattccactct

SEQ ID NO: 51663 - DNA, 25 bp, Canis familiaris
aagtcagaacttcattgtaccccgg

SEQ ID NO: 51664 - DNA, 25 bp, Canis familiaris
aagtagaagtctctctagtgcctcc

SEQ ID NO: 51665 - DNA, 25 bp, Canis familiaris
aagtagcagaggcttctctgacccc

SEQ ID NO: 51666 - DNA, 25 bp, Canis familiaris
aagtttggaatgtttctgacctgca

SEQ ID NO: 51667 - DNA, 25 bp, Canis familiaris
aagttttgtatcttcttgcaccaag

SEQ ID NO: 51668 - DNA, 25 bp, Canis familiaris
aagtggaatttcttgttcaaaagat

SEQ ID NO: 51669 - DNA, 25 bp, Canis familiaris
aagtgaaatttttatccacccatag

SEQ ID NO: 51670 - DNA, 25 bp, Canis familiaris
aagtggtcgtatttatggcggccaa

SEQ ID NO: 51671 - DNA, 25 bp, Canis familiaris
aagtaacattgtttatgctggtgta

SEQ ID NO: 51672 - DNA, 25 bp, Canis familiaris
aagtatacaatcattagcaggttaa

SEQ ID NO: 51673 - DNA, 25 bp, Canis familiaris
aagttcaaagctaatgatcacggat

SEQ ID NO: 51674 - DNA, 25 bp, Canis familiaris
aagtcacgacctcataccggattaa

SEQ ID NO: 51675 - DNA, 25 bp, Canis familiaris
aagtactactcaatcagacctggtt

SEQ ID NO: 51676 - DNA, 25 bp, Canis familiaris
aagtgactgttcacagacctcagtg

SEQ ID NO: 51677 - DNA, 25 bp, Canis familiaris
aagtgttattcacctacatccagct

SEQ ID NO: 51678 - DNA, 25 bp, Canis familiaris
aagtttattcagtctttcctctact

SEQ ID NO: 51679 - DNA, 25 bp, Canis familiaris
aagtttatgctcttaattcctctca

SEQ ID NO: 51680 - DNA, 25 bp, Canis familiaris
aagtccgtgtggacagattccctgc

SEQ ID NO: 51681 - DNA, 25 bp, Canis familiaris
aagttcttgataatcagctcccacc

SEQ ID NO: 51682 - DNA, 25 bp, Canis familiaris
aagtcatctgataattgctcccaag

SEQ ID NO: 51683 - DNA, 25 bp, Canis familiaris
aagtgatctattgagccgcagaaat

SEQ ID NO: 51684 - DNA, 25 bp, Canis familiaris
aagtatcttaccaacgtgatacata

SEQ ID NO: 51685 - DNA, 25 bp, Canis familiaris
aagtcaattgcccagagcgttggct

SEQ ID NO: 51686 - DNA, 25 bp, Canis familiaris
aagtcaatgccccagagcggtgggc

SEQ ID NO: 51687 - DNA, 25 bp, Canis familiaris
aagtctgcaacccaggcggggagga

SEQ ID NO: 51688 - DNA, 25 bp, Canis familiaris
aagtggaaccctggggccgatgaga

SEQ ID NO: 51689 - DNA, 25 bp, Canis familiaris
aatgggagaccttgttggccaaaag

SEQ ID NO: 51690 - DNA, 25 bp, Canis familiaris
aagtggctacctttcatgtccaaaa

SEQ ID NO: 51691 - DNA, 25 bp, Canis familiaris
aagttctcccatgtgctgacacatt

SEQ ID NO: 51692 - DNA, 25 bp, Canis familiaris
aagttctctccaaaagagctcatct

SEQ ID NO: 51693 - DNA, 25 bp, Canis familiaris
aagttcctggataaagatgatactc

SEQ ID NO: 51694 - DNA, 25 bp, Canis familiaris
aagttcctgtgatttaacaataaat

SEQ ID NO: 51695 - DNA, 25 bp, Canis familiaris
aagttcctgctagatttcgtattct

SEQ ID NO: 51696 - DNA, 25 bp, Canis familiaris
caagttcccagtgacttcagtattt

SEQ ID NO: 51697 - DNA, 25 bp, Canis familiaris
aagtactcacagcctatttagatct

SEQ ID NO: 51698 - DNA, 25 bp, Canis familiaris
aagtatctgtgcctgttcttacatc

SEQ ID NO: 51699 - DNA, 25 bp, Canis familiaris
aagtacatgagactcatctcttaca

SEQ ID NO: 51700 - DNA, 25 bp, Canis familiaris
aagtcaatgggactgctgcctacac

SEQ ID NO: 51701 - DNA, 25 bp, Canis familiaris
aagtacagtggcccagtggacacct

SEQ ID NO: 51702 - DNA, 25 bp, Canis familiaris
aagtacagctactcggagcagcagc

SEQ ID NO: 51703 - DNA, 25 bp, Canis familiaris
aagtcacctggcttccgagagaggt

SEQ ID NO: 51704 - DNA, 25 bp, Canis familiaris
aagtccctgatggcctcagaggagg

SEQ ID NO: 51705 - DNA, 25 bp, Canis familiaris
aagtcagcacgttccacagagtaga

SEQ ID NO: 51706 - DNA, 25 bp, Canis familiaris
aagtgcgacgtggacatccgtaagg

SEQ ID NO: 51707 - DNA, 25 bp, Canis familiaris
aagtgcgaggaagcgcctactacct

SEQ ID NO: 51708 - DNA, 25 bp, Canis familiaris
aagggggacatggatctgtaataac

SEQ ID NO: 51709 - DNA, 25 bp, Canis familiaris
aagtggtgacttgacatggatacga

SEQ ID NO: 51710 - DNA, 25 bp, Canis familiaris
aaggagtgtctggtcaccgaagcgt

SEQ ID NO: 51711 - DNA, 25 bp, Canis familiaris
aatgggacctctgacttgaatggat

SEQ ID NO: 51712 - DNA, 25 bp, Canis familiaris
aatggaccaatttaatgtatgtaat

SEQ ID NO: 51713 - DNA, 25 bp, Canis familiaris
aaggccctgaggtatatttgttcat

SEQ ID NO: 51714 - DNA, 25 bp, Canis familiaris
aaggtccatcaacatattttccatc

SEQ ID NO: 51715 - DNA, 25 bp, Canis familiaris
aagtttctcaagcatattatattca

SEQ ID NO: 51716 - DNA, 25 bp, Canis familiaris
aagtattccaaagtgatctatgaga

SEQ ID NO: 51717 - DNA, 25 bp, Canis familiaris
aagtattcgcaaattgatctaagag

SEQ ID NO: 51718 - DNA, 25 bp, Canis familiaris
aagtttgctgcagtttaaaaagctc

SEQ ID NO: 51719 - DNA, 25 bp, Canis familiaris
aagtctatctgcgtgtttaaaacct

SEQ ID NO: 51720 - DNA, 25 bp, Canis familiaris
aagtccctacttttgatgaacagcc

SEQ ID NO: 51721 - DNA, 25 bp, Canis familiaris
aagtcttttctgggtgtgacacacc

SEQ ID NO: 51722 - DNA, 25 bp, Canis familiaris
aaggctgtttctaagtgggacggct

SEQ ID NO: 51723 - DNA, 25 bp, Canis familiaris
aagggagaatccaattgggagctgg

SEQ ID NO: 51724 - DNA, 25 bp, Canis familiaris
aaggggacccctggagtgagagaga

SEQ ID NO: 51725 - DNA, 25 bp, Canis familiaris
aagtgtgaggccgccaaggaagccc

SEQ ID NO: 51726 - DNA, 25 bp, Canis familiaris
aagtttgtgctttccttgagaatgc

SEQ ID NO: 51727 - DNA, 25 bp, Canis familiaris
aagtaatgtgcttatcctcgggagc

SEQ ID NO: 51728 - DNA, 25 bp, Canis familiaris
aagtaatctggctgttcgcaggaat

SEQ ID NO: 51729 - DNA, 25 bp, Canis familiaris
aagtcagtaatgttgtatgcagcag

SEQ ID NO: 51730 - DNA, 25 bp, Canis familiaris
aagtcactcaagttgttactctccc

SEQ ID NO: 51731 - DNA, 25 bp, Canis familiaris
aagtcactcttgattgcatttgccc

SEQ ID NO: 51732 - DNA, 25 bp, Canis familiaris
aagtacatttctgtattccttgccc

SEQ ID NO: 51733 - DNA, 25 bp, Canis familiaris
aagtctcttattatattcccttctc

SEQ ID NO: 51734 - DNA, 25 bp, Canis familiaris
aagtattctttcatatatctttata

SEQ ID NO: 51735 - DNA, 25 bp, Canis familiaris
aagtcattttctattacagtgtttt

SEQ ID NO: 51736 - DNA, 25 bp, Canis familiaris
aagtactttctatttacagtgtgtt

SEQ ID NO: 51737 - DNA, 25 bp, Canis familiaris
aagtactgttgtgatctagagctgt

SEQ ID NO: 51738 - DNA, 25 bp, Canis familiaris
aagtatcatgtttctatcttgcctg

SEQ ID NO: 51739 - DNA, 25 bp, Canis familiaris
aagttcagcttgtccagagtcctgt

SEQ ID NO: 51740 - DNA, 25 bp, Canis familiaris
aagtctaggtttggcactcctgttc

SEQ ID NO: 51741 - DNA, 25 bp, Canis familiaris
aagtctgaatgtttctcccgaagtc

SEQ ID NO: 51742 - DNA, 25 bp, Canis familiaris
aagtgctgcaagatttgcccagagg

SEQ ID NO: 51743 - DNA, 25 bp, Canis familiaris
aagtccatacattttggccactgta

SEQ ID NO: 51744 - DNA, 25 bp, Canis familiaris
aagtatcatacgtgttccactgcca

SEQ ID NO: 51745 - DNA, 25 bp, Canis familiaris
aagtacgagtgctgtaacacatgaa

SEQ ID NO: 51746 - DNA, 25 bp, Canis familiaris
aagtccgagtgctatttcaccaacg

SEQ ID NO: 51747 - DNA, 25 bp, Canis familiaris
aaggtggagatggactacccaacaa

SEQ ID NO: 51748 - DNA, 25 bp, Canis familiaris
cacggggactgttccccacaatgtt

SEQ ID NO: 51749 - DNA, 25 bp, Canis familiaris
ccgggatgacttttaaccagaactg

SEQ ID NO: 51750 - DNA, 25 bp, Canis familiaris
aaggagacacttttaaccactgagt

SEQ ID NO: 51751 - DNA, 25 bp, Canis familiaris
aaggacacacttcaaaatggccagt

SEQ ID NO: 51752 - DNA, 25 bp, Canis familiaris
aagtctccagttgaaaagtccattg

SEQ ID NO: 51753 - DNA, 25 bp, Canis familiaris
aagtctatcagttttctaaatccat

SEQ ID NO: 51754 - DNA, 25 bp, Canis familiaris
aagtcttcagtttctgttgagctca

SEQ ID NO: 51755 - DNA, 25 bp, Canis familiaris
aagtgcattatttaggttgagctcc

SEQ ID NO: 51756 - DNA, 25 bp, Canis familiaris
aagtgattatttcttatagccccct

SEQ ID NO: 51757 - DNA, 25 bp, Canis familiaris
aagttatctgttcttattgcctacc

SEQ ID NO: 51758 - DNA, 25 bp, Canis familiaris
aagttattttgctttgtagtcatac

SEQ ID NO: 51759 - DNA, 25 bp, Canis familiaris
aagtattctcattgcaagagtagtc

SEQ ID NO: 51760 - DNA, 25 bp, Canis familiaris
aagtatctgctatgggactattgct

SEQ ID NO: 51761 - DNA, 25 bp, Canis familiaris
aagtcttcataaccgagtcattcat

SEQ ID NO: 51762 - DNA, 25 bp, Canis familiaris
aagtcttctgatttctagtcaactg

SEQ ID NO: 51763 - DNA, 25 bp, Canis familiaris
aagtctctgtgttccaagtctagta

SEQ ID NO: 51764 - DNA, 25 bp, Canis familiaris
aagtcttttactcagctcatatttg

SEQ ID NO: 51765 - DNA, 25 bp, Canis familiaris
aagtctactgctattacctgttgtg

SEQ ID NO: 51766 - DNA, 25 bp, Canis familiaris
aagtcagtctgtatctaagcatttt

SEQ ID NO: 51767 - DNA, 25 bp, Canis familiaris
aagtaacttctctgcaagatttcat

SEQ ID NO: 51768 - DNA, 25 bp, Canis familiaris
aagtaactcaacagaagtgtatcaa

SEQ ID NO: 51769 - DNA, 25 bp, Canis familiaris
aaggagactaacgaagaacttcaag

SEQ ID NO: 51770 - DNA, 25 bp, Canis familiaris
aagtgaactcaacacctacttcttg

SEQ ID NO: 51771 - DNA, 25 bp, Canis familiaris
aaggacccaacatctaaactcactg

SEQ ID NO: 51772 - DNA, 25 bp, Canis familiaris
aagtgaccaacctcggatataagga

SEQ ID NO: 51773 - DNA, 25 bp, Canis familiaris
aagtgaccaacctcgaatatacaga

SEQ ID NO: 51774 - DNA, 25 bp, Canis familiaris
aagtgacagtaccccgagataagcc

SEQ ID NO: 51775 - DNA, 25 bp, Canis familiaris
aagtgcttctagtcccggaagaggc

SEQ ID NO: 51776 - DNA, 25 bp, Canis familiaris
aagtgtctcccctgtggaaaggcat

SEQ ID NO: 51777 - DNA, 25 bp, Canis familiaris
aagtggtcctcctaaggaacatggt

SEQ ID NO: 51778 - DNA, 25 bp, Canis familiaris
aagtgtttctcttaattgagtagga

SEQ ID NO: 51779 - DNA, 25 bp, Canis familiaris
aagtgttctacttgcacaatgtgtt

SEQ ID NO: 51780 - DNA, 25 bp, Canis familiaris
aagtgggaatatactcaagctgtct

SEQ ID NO: 51781 - DNA, 25 bp, Canis familiaris
aagtagtctataattcatatgtgct

SEQ ID NO: 51782 - DNA, 25 bp, Canis familiaris
aagtaggcattaaatattgtttacg

SEQ ID NO: 51783 - DNA, 25 bp, Canis familiaris
aagtagggatgaatatagtgtgtta

SEQ ID NO: 51784 - DNA, 25 bp, Canis familiaris
aagggggagtaatcaggtgtaggat

SEQ ID NO: 51785 - DNA, 25 bp, Canis familiaris
aagggggaatcatccggcaaaaatg

SEQ ID NO: 51786 - DNA, 25 bp, Canis familiaris
aatgttgggaattgtgggtcaacaa

SEQ ID NO: 51787 - DNA, 25 bp, Canis familiaris
aaggttggaattgaagctgctgaaa

SEQ ID NO: 51788 - DNA, 25 bp, Canis familiaris
aaggtgtttcttgtagtggagtcat

SEQ ID NO: 51789 - DNA, 25 bp, Canis familiaris
aagtggttcttccagaagctgcggt

SEQ ID NO: 51790 - DNA, 25 bp, Canis familiaris
aataggcactcagtcacagaagggg

SEQ ID NO: 51791 - DNA, 25 bp, Canis familiaris
aagtggagctggtacaaatggtggt

SEQ ID NO: 51792 - DNA, 25 bp, Canis familiaris
aaggagatgtgttaccgataccggg

SEQ ID NO: 51793 - DNA, 25 bp, Canis familiaris
aagggtagctcacatggaacccggc

SEQ ID NO: 51794 - DNA, 25 bp, Canis familiaris
aaggactacatccgggaacgcttcg

SEQ ID NO: 51795 - DNA, 25 bp, Canis familiaris
aagggtatcatcaggcgtgacagta

SEQ ID NO: 51796 - DNA, 25 bp, Canis familiaris
aagggccccagggcttgagcagaga

SEQ ID NO: 51797 - DNA, 25 bp, Canis familiaris
aagtggcactcgatgaattcaaaga

SEQ ID NO: 51798 - DNA, 25 bp, Canis familiaris
aagtggattccaatggtcaccagag

SEQ ID NO: 51799 - DNA, 25 bp, Canis familiaris
aatctgaacccaaggatgccgaacc

SEQ ID NO: 51800 - DNA, 25 bp, Canis familiaris
aagtgaacacgcaggatataggatc

SEQ ID NO: 51801 - DNA, 25 bp, Canis familiaris
aagtgatacccagagtcatataact

SEQ ID NO: 51802 - DNA, 25 bp, Canis familiaris
aaggttcccaggagcataacgcctc

SEQ ID NO: 51803 - DNA, 25 bp, Canis familiaris
aaggtaccaaccagctgaagcagct

SEQ ID NO: 51804 - DNA, 25 bp, Canis familiaris
aaggtgacaagaagcaggcgtaccg

SEQ ID NO: 51805 - DNA, 25 bp, Canis familiaris
aagggagcaggaccttcagaacccg

SEQ ID NO: 51806 - DNA, 25 bp, Canis familiaris
aagggcgcttttaagagacacccag

SEQ ID NO: 51807 - DNA, 25 bp, Canis familiaris
aaggaactctgtaaagaaaccatca

SEQ ID NO: 51808 - DNA, 25 bp, Canis familiaris
aaggctccctgttgaaaagtcgata

SEQ ID NO: 51809 - DNA, 25 bp, Canis familiaris
aagtgctccgctttcaatacattaa

SEQ ID NO: 51810 - DNA, 25 bp, Canis familiaris
aagtttgctggcttaatccatctaa

SEQ ID NO: 51811 - DNA, 25 bp, Canis familiaris
aagtttgctgtggctgaaccaagaa

SEQ ID NO: 51812 - DNA, 25 bp, Canis familiaris
aagtgctcttgggcaactagctaga

SEQ ID NO: 51813 - DNA, 25 bp, Canis familiaris
aagtgtgcatgtccaccatgctgca

SEQ ID NO: 51814 - DNA, 25 bp, Canis familiaris
aagtatcagtcatccatcatgggtc

SEQ ID NO: 51815 - DNA, 25 bp, Canis familiaris
aagtttgtcagattcttgtgtgatg

SEQ ID NO: 51816 - DNA, 25 bp, Canis familiaris
aagggcttctgatttcggtataggt

SEQ ID NO: 51817 - DNA, 25 bp, Canis familiaris
aaggtcctaaatgacgtaagcttca

SEQ ID NO: 51818 - DNA, 25 bp, Canis familiaris
aaggtccagaattggccttaacctg

SEQ ID NO: 51819 - DNA, 25 bp, Canis familiaris
aaggtaagactctcagttcgacgcg

SEQ ID NO: 51820 - DNA, 25 bp, Canis familiaris
aaggggagactacagttgccaccca

SEQ ID NO: 51821 - DNA, 25 bp, Canis familiaris
aaggggagaaggatattcctggact

SEQ ID NO: 51822 - DNA, 25 bp, Canis familiaris
aaggtggaaaggaataagcaggtct

SEQ ID NO: 51823 - DNA, 25 bp, Canis familiaris
aagggacaacagcttcttgagttct

SEQ ID NO: 51824 - DNA, 25 bp, Canis familiaris
aaggctaaagttatcttccgtctca

SEQ ID NO: 51825 - DNA, 25 bp, Canis familiaris
aagtccatcctgaatttttccgtgc

SEQ ID NO: 51826 - DNA, 25 bp, Canis familiaris
aagtctatcactgattttaaactgc

SEQ ID NO: 51827 - DNA, 25 bp, Canis familiaris
caagttgtactatatttaaatcatc

SEQ ID NO: 51828 - DNA, 25 bp, Canis familiaris
aagtcattctcttaattcttaattc

SEQ ID NO: 51829 - DNA, 25 bp, Canis familiaris
aagtcttcagcaattttcattagat

SEQ ID NO: 51830 - DNA, 25 bp, Canis familiaris
aagtattcagtccttcattgtagtg

SEQ ID NO: 51831 - DNA, 25 bp, Canis familiaris
aagtactcagtagccatatgtgtct

SEQ ID NO: 51832 - DNA, 25 bp, Canis familiaris
aagtgtccatttgtcatttgtctca

SEQ ID NO: 51833 - DNA, 25 bp, Canis familiaris
aagtgttttcactgatttttcatgt

SEQ ID NO: 51834 - DNA, 25 bp, Canis familiaris
aagtgctgtttctgggtatgattac

SEQ ID NO: 51835 - DNA, 25 bp, Canis familiaris
aagtctttagtgagggtgacagcac

SEQ ID NO: 51836 - DNA, 25 bp, Canis familiaris
aagtccttactgataggggcacctg

SEQ ID NO: 51837 - DNA, 25 bp, Canis familiaris
gaagtacactacttttaaggccgtg

SEQ ID NO: 51838 - DNA, 25 bp, Canis familiaris
aagtagctcaacttttccagacctt

SEQ ID NO: 51839 - DNA, 25 bp, Canis familiaris
aagtgacacaacctagtccaacctt

SEQ ID NO: 51840 - DNA, 25 bp, Canis familiaris
aagtgaccaacctaaaccacagctc

SEQ ID NO: 51841 - DNA, 25 bp, Canis familiaris
aagtgtgtcaacgtcattaggcaac

SEQ ID NO: 51842 - DNA, 25 bp, Canis familiaris
aagtgcttctacgaattaacattaa

SEQ ID NO: 51843 - DNA, 25 bp, Canis familiaris
aagtgtttcccaatacaggctttag

SEQ ID NO: 51844 - DNA, 25 bp, Canis familiaris
aagtggttcccacttcatagctttg

SEQ ID NO: 51845 - DNA, 25 bp, Canis familiaris
aagtgtgttctgggcattttgattt

SEQ ID NO: 51846 - DNA, 25 bp, Canis familiaris
aagtggtgacagggcttgttggcct

SEQ ID NO: 51847 - DNA, 25 bp, Canis familiaris
aagtgggtccaggattccatggcac

SEQ ID NO: 51848 - DNA, 25 bp, Canis familiaris
aagtagagtctaggtttcagcaaag

SEQ ID NO: 51849 - DNA, 25 bp, Canis familiaris
aagtcaacatctgctgctttcaaaa

SEQ ID NO: 51850 - DNA, 25 bp, Canis familiaris
aagtcaccatgtctattctcaagat

SEQ ID NO: 51851 - DNA, 25 bp, Canis familiaris
aagtgacaatgtctactcccatatc

SEQ ID NO: 51852 - DNA, 25 bp, Canis familiaris
aagtccagagggagcacccatcaca

SEQ ID NO: 51853 - DNA, 25 bp, Canis familiaris
aagtcacagaagagtgtgcccccac

SEQ ID NO: 51854 - DNA, 25 bp, Canis familiaris
aagtcagtgaagtgtctgcctttgg

SEQ ID NO: 51855 - DNA, 25 bp, Canis familiaris
aagtcctgaagatggcggctgctgt

SEQ ID NO: 51856 - DNA, 25 bp, Canis familiaris
aagtcattgacacctggcaggcttc

SEQ ID NO: 51857 - DNA, 25 bp, Canis familiaris
aagtgcatttcggcttgcagcgttc

SEQ ID NO: 51858 - DNA, 25 bp, Canis familiaris
aagtagtactgccaggcatgcctcc

SEQ ID NO: 51859 - DNA, 25 bp, Canis familiaris
aagtcagccagctgtacatgaatcc

SEQ ID NO: 51860 - DNA, 25 bp, Canis familiaris
aagtacctgaagaagctgcacacac

SEQ ID NO: 51861 - DNA, 25 bp, Canis familiaris
aagtcagcagtgaacttgtcagcca

SEQ ID NO: 51862 - DNA, 25 bp, Canis familiaris
aagtctgtgtgttcatcagtctgca

SEQ ID NO: 51863 - DNA, 25 bp, Canis familiaris
aagtgtgtgcataaccagtcatgag

SEQ ID NO: 51864 - DNA, 25 bp, Canis familiaris
aagggatattaccaactgagattga

SEQ ID NO: 51865 - DNA, 25 bp, Canis familiaris
aagtggctgttgtcagagactgaga

SEQ ID NO: 51866 - DNA, 25 bp, Canis familiaris
aagtcctatgtggggactgtacaca

SEQ ID NO: 51867 - DNA, 25 bp, Canis familiaris
aagtccctgtgtcgaaaggccaact

SEQ ID NO: 51868 - DNA, 25 bp, Canis familiaris
aagtgccacttacaagaaacacatt

SEQ ID NO: 51869 - DNA, 25 bp, Canis familiaris
aagtggtgttaaatagtaagcctgt

SEQ ID NO: 51870 - DNA, 25 bp, Canis familiaris
aagtggttacttcagctatagccct

SEQ ID NO: 51871 - DNA, 25 bp, Canis familiaris
aaggtacaacttccagcaaccaaat

SEQ ID NO: 51872 - DNA, 25 bp, Canis familiaris
aaggcaaacatggtacacacacaca

SEQ ID NO: 51873 - DNA, 25 bp, Canis familiaris
aagtgaaaacagaagcaagctaacc

SEQ ID NO: 51874 - DNA, 25 bp, Canis familiaris
aatggtcataacgcagaagtaagaa

SEQ ID NO: 51875 - DNA, 25 bp, Canis familiaris
aagtgtaaatcaccaaaggaatgag

SEQ ID NO: 51876 - DNA, 25 bp, Canis familiaris
aaggagaactacaaccaggagtggt

SEQ ID NO: 51877 - DNA, 25 bp, Canis familiaris
aagtcagtcactcaaccgactgggt

SEQ ID NO: 51878 - DNA, 25 bp, Canis familiaris
aagtcctcattgctaccagagtgtg

SEQ ID NO: 51879 - DNA, 25 bp, Canis familiaris
aagtccttgctactaaaatgcttgt

SEQ ID NO: 51880 - DNA, 25 bp, Canis familiaris
aaggacttgaactccagttgtgtca

SEQ ID NO: 51881 - DNA, 25 bp, Canis familiaris
aaggcctggaacacaatggtactca

SEQ ID NO: 51882 - DNA, 25 bp, Canis familiaris
aagtgtcatggacccaaaggccttc

SEQ ID NO: 51883 - DNA, 25 bp, Canis familiaris
aagtgactaccctaagagctgcctt

SEQ ID NO: 51884 - DNA, 25 bp, Canis familiaris
aaggaccaaaataatagtgctgtgt

SEQ ID NO: 51885 - DNA, 25 bp, Canis familiaris
aagggccataaacctacttgtggcg

SEQ ID NO: 51886 - DNA, 25 bp, Canis familiaris
aatgggtatgactcttactttttgg

SEQ ID NO: 51887 - DNA, 25 bp, Canis familiaris
aagggatgaaatttccacatttatt

SEQ ID NO: 51888 - DNA, 25 bp, Canis familiaris
aaggggtatttgtcacacacctgtg

SEQ ID NO: 51889 - DNA, 25 bp, Canis familiaris
aagggtgtatagagagaaactgaat

SEQ ID NO: 51890 - DNA, 25 bp, Canis familiaris
aagtcctaaacacagaccactggat

SEQ ID NO: 51891 - DNA, 25 bp, Canis familiaris
aagtcaaattaagcagacccggcat

SEQ ID NO: 51892 - DNA, 25 bp, Canis familiaris
aagtagagtctgtacacaacccgga

SEQ ID NO: 51893 - DNA, 25 bp, Canis familiaris
aagtgaagtctctacagcagcagct

SEQ ID NO: 51894 - DNA, 25 bp, Canis familiaris
aagtggtgtcaattccaggcatctt

SEQ ID NO: 51895 - DNA, 25 bp, Canis familiaris
aagtgtgagctcaaactgcaggact

SEQ ID NO: 51896 - DNA, 25 bp, Canis familiaris
aagtgaaggatgacccagggctgga

SEQ ID NO: 51897 - DNA, 25 bp, Canis familiaris
aaggaatgccaagccaggagagggg

SEQ ID NO: 51898 - DNA, 25 bp, Canis familiaris
aaggaaccatcagccttggaggtgg

SEQ ID NO: 51899 - DNA, 25 bp, Canis familiaris
aaggaaatcacgccctcgaggggct

SEQ ID NO: 51900 - DNA, 25 bp, Canis familiaris
aaggaaatcaggcagccctggtggc

SEQ ID NO: 51901 - DNA, 25 bp, Canis familiaris
aagggaaaagtgacagccggctgtg

SEQ ID NO: 51902 - DNA, 25 bp, Canis familiaris
aagtgctaaaagccacacctgggtg

SEQ ID NO: 51903 - DNA, 25 bp, Canis familiaris
aagtgtacaataaacctgcagcggg

SEQ ID NO: 51904 - DNA, 25 bp, Canis familiaris
aagtcatcactattggcaacgagcg

SEQ ID NO: 51905 - DNA, 25 bp, Canis familiaris
aagtctgcactctttcaactggcag

SEQ ID NO: 51906 - DNA, 25 bp, Canis familiaris
aaggtcatccatgacaactttggta

SEQ ID NO: 51907 - DNA, 25 bp, Canis familiaris
tacagtgattactttaactttggta

SEQ ID NO: 51908 - DNA, 25 bp, Canis familiaris
aagtgatacacatttatgttctttg

SEQ ID NO: 51909 - DNA, 25 bp, Canis familiaris
aagtaatgccatgtgtgtctgcttt

SEQ ID NO: 51910 - DNA, 25 bp, Canis familiaris
aagtctgcatgttccttttgtgtgt

SEQ ID NO: 51911 - DNA, 25 bp, Canis familiaris
aagtgccagtaccttttgtctgaga

SEQ ID NO: 51912 - DNA, 25 bp, Canis familiaris
aagtgcgagtttcgaatgtgtcggg

SEQ ID NO: 51913 - DNA, 25 bp, Canis familiaris
caaggtactttgcatttgttggagt

SEQ ID NO: 51914 - DNA, 25 bp, Canis familiaris
aagtcttccttgttcattgggtgag

SEQ ID NO: 51915 - DNA, 25 bp, Canis familiaris
aagtgatctctttttgcattggttg

SEQ ID NO: 51916 - DNA, 25 bp, Canis familiaris
aagtcatgcattttgtggcaagggt

SEQ ID NO: 51917 - DNA, 25 bp, Canis familiaris
aagtctgctttgttggagatggctt

SEQ ID NO: 51918 - DNA, 25 bp, Canis familiaris
aagtctgttgagtcgtggtgtctgg

SEQ ID NO: 51919 - DNA, 25 bp, Canis familiaris
aagtctgttctggcggcattgtggg

SEQ ID NO: 51920 - DNA, 25 bp, Canis familiaris
aagtctggctcggaggttctttgga

SEQ ID NO: 51921 - DNA, 25 bp, Canis familiaris
aagtctggctcggaggttctttgga

SEQ ID NO: 51922 - DNA, 25 bp, Canis familiaris
aagtgctggattgagcctctcttta

SEQ ID NO: 51923 - DNA, 25 bp, Canis familiaris
aagtgcagcagtgtagctcttctct

SEQ ID NO: 51924 - DNA, 25 bp, Canis familiaris
aagtcagcagaggaactgttgtgga

SEQ ID NO: 51925 - DNA, 25 bp, Canis familiaris
aagtccaggagtttgttagatgata

SEQ ID NO: 51926 - DNA, 25 bp, Canis familiaris
aagtcatgggttttgctagatgcga

SEQ ID NO: 51927 - DNA, 25 bp, Canis familiaris
aatgtcgggtccttaggtgccagat

SEQ ID NO: 51928 - DNA, 25 bp, Canis familiaris
aatgtgttttcctgagagtccgtgt

SEQ ID NO: 51929 - DNA, 25 bp, Canis familiaris
aagtgtttttctcaattctccatac

SEQ ID NO: 51930 - DNA, 25 bp, Canis familiaris
aagtaattttcttctcattcttcta

SEQ ID NO: 51931 - DNA, 25 bp, Canis familiaris
aagtgagagcttccttttgctttct

SEQ ID NO: 51932 - DNA, 25 bp, Canis familiaris
aagtgcgactgtatctggtttggcc

SEQ ID NO: 51933 - DNA, 25 bp, Canis familiaris
aagggcaatgtgttccctgtgtggc

SEQ ID NO: 51934 - DNA, 25 bp, Canis familiaris
aagggacggttggcactggaatgtg

SEQ ID NO: 51935 - DNA, 25 bp, Canis familiaris
aatggttcgtacagcagcggaagtg

SEQ ID NO: 51936 - DNA, 25 bp, Canis familiaris
aagtgcttggtccagtggggtagtg

SEQ ID NO: 51937 - DNA, 25 bp, Canis familiaris
aagtgcggcccagggagggatactt

SEQ ID NO: 51938 - DNA, 25 bp, Canis familiaris
aagtgcccggcaggatgagggtaaa

SEQ ID NO: 51939 - DNA, 25 bp, Canis familiaris
aaggcctggaagtgcatggggaaga

SEQ ID NO: 51940 - DNA, 25 bp, Canis familiaris
aaggtgttggagtgggagtgggtag

SEQ ID NO: 51941 - DNA, 25 bp, Canis familiaris
aagtggtttcagtggagcgatggga

SEQ ID NO: 51942 - DNA, 25 bp, Canis familiaris
aagtgtttttttcacaatcatgtac

SEQ ID NO: 51943 - DNA, 25 bp, Canis familiaris
aagtcttgcttgatttttctctgta

SEQ ID NO: 51944 - DNA, 25 bp, Canis familiaris
aagtctgatgtgattttctgcctct

SEQ ID NO: 51945 - DNA, 25 bp, Canis familiaris
aagtctgagggtatgctctcttcct

SEQ ID NO: 51946 - DNA, 25 bp, Canis familiaris
aagtcgagcacagttttctttcctt

SEQ ID NO: 51947 - DNA, 25 bp, Canis familiaris
aagtcaaccgtgtttcgtgttcttg

SEQ ID NO: 51948 - DNA, 25 bp, Canis familiaris
aagtaaccggagttcctgtctctgt

SEQ ID NO: 51949 - DNA, 25 bp, Canis familiaris
aagtacagccggagacgtccttata

SEQ ID NO: 51950 - DNA, 25 bp, Canis familiaris
aagtgaagcctgctaggtgtccctt

SEQ ID NO: 51951 - DNA, 25 bp, Canis familiaris
aagtccagagctgtgtttgtccatc

SEQ ID NO: 51952 - DNA, 25 bp, Canis familiaris
aagtctctcagtgatgtttctctgc

SEQ ID NO: 51953 - DNA, 25 bp, Canis familiaris
aagtctacagtggctgtattccgct

SEQ ID NO: 51954 - DNA, 25 bp, Canis familiaris
aagtgctgacagaaattattgcctc

SEQ ID NO: 51955 - DNA, 25 bp, Canis familiaris
aagtctgtgagccagattcttcccc

SEQ ID NO: 51956 - DNA, 25 bp, Canis familiaris
aatgtagggccgtgtgcagcccagc

SEQ ID NO: 51957 - DNA, 25 bp, Canis familiaris
caattgaggaaccacttgaccgggg

SEQ ID NO: 51958 - DNA, 25 bp, Canis familiaris
aaggagaacgactttgaccggctgg

SEQ ID NO: 51959 - DNA, 25 bp, Canis familiaris
aaggtaagctactgcttccaagcat

SEQ ID NO: 51960 - DNA, 25 bp, Canis familiaris
aaggtaagtttggtgtataatatgg

SEQ ID NO: 51961 - DNA, 25 bp, Canis familiaris
aagtgtaacttattttatatctatg

SEQ ID NO: 51962 - DNA, 25 bp, Canis familiaris
aagtgtacttgtttgaattaattgt

SEQ ID NO: 51963 - DNA, 25 bp, Canis familiaris
aaggttctgttgtttagtcagtctt

SEQ ID NO: 51964 - DNA, 25 bp, Canis familiaris
aaggcccagttgtggcagtttttgg

SEQ ID NO: 51965 - DNA, 25 bp, Canis familiaris
aagtgaccgttgtcagtgcatgttc

SEQ ID NO: 51966 - DNA, 25 bp, Canis familiaris
aagtgcagccgaggagagtgaggat

SEQ ID NO: 51967 - DNA, 25 bp, Canis familiaris
aagggctcagactggagtggatgtt

SEQ ID NO: 51968 - DNA, 25 bp, Canis familiaris
aagggctgagggcaaaggaggttag

SEQ ID NO: 51969 - DNA, 25 bp, Canis familiaris
aagggggtcgaatatgggactatgg

SEQ ID NO: 51970 - DNA, 25 bp, Canis familiaris
aagggtgggtttgagatgttctggg

SEQ ID NO: 51971 - DNA, 25 bp, Canis familiaris
aagggctggtctctgctgaaggttg

SEQ ID NO: 51972 - DNA, 25 bp, Canis familiaris
aagggaggtctcctagaagctctga

SEQ ID NO: 51973 - DNA, 25 bp, Canis familiaris
aaggtggttttgctgaagcctacca

SEQ ID NO: 51974 - DNA, 25 bp, Canis familiaris
aagtgggtttgacagaatgccttct

SEQ ID NO: 51975 - DNA, 25 bp, Canis familiaris
aaggggctttgacaaggcctatgtg

SEQ ID NO: 51976 - DNA, 25 bp, Canis familiaris
aagggttgtgtcccaacgtcattgg

SEQ ID NO: 51977 - DNA, 25 bp, Canis familiaris
aaggtgatcttggcccaataccagt

SEQ ID NO: 51978 - DNA, 25 bp, Canis familiaris
aagtggtgtctagccaaaccgcttg

SEQ ID NO: 51979 - DNA, 25 bp, Canis familiaris
aagtgttatctagccaaatccttcc

SEQ ID NO: 51980 - DNA, 25 bp, Canis familiaris
aagggatatttccccagatcttctc

SEQ ID NO: 51981 - DNA, 25 bp, Canis familiaris
aaggtgcattatcaagccagttatc

SEQ ID NO: 51982 - DNA, 25 bp, Canis familiaris
aagtgatgcttgatgacagcctgta

SEQ ID NO: 51983 - DNA, 25 bp, Canis familiaris
aagtgagctgctgatggtccggagc

SEQ ID NO: 51984 - DNA, 25 bp, Canis familiaris
aagtgtgactgactcgtatcggtcg

SEQ ID NO: 51985 - DNA, 25 bp, Canis familiaris
aaggtgacgacctcatcctggagat

SEQ ID NO: 51986 - DNA, 25 bp, Canis familiaris
aaggctattaaggtcatgttgggtt

SEQ ID NO: 51987 - DNA, 25 bp, Canis familiaris
aaggtcattagggcattttctcgtg

SEQ ID NO: 51988 - DNA, 25 bp, Canis familiaris
aaggtcattatcccagggttctggg

SEQ ID NO: 51989 - DNA, 25 bp, Canis familiaris
aaggtcttacttgtgccagtgtggg

SEQ ID NO: 51990 - DNA, 25 bp, Canis familiaris
aagtgttctccactgggtaatgtgg

SEQ ID NO: 51991 - DNA, 25 bp, Canis familiaris
aagtgtcctggcaagggtgcctggt

SEQ ID NO: 51992 - DNA, 25 bp, Canis familiaris
aaggccctgccaaaaatgccaggtt

SEQ ID NO: 51993 - DNA, 25 bp, Canis familiaris
aaggccacctcatgacaaagcgttt

SEQ ID NO: 51994 - DNA, 25 bp, Canis familiaris
aagtgaaccgcatgcacgagagcct

SEQ ID NO: 51995 - DNA, 25 bp, Canis familiaris
aaggatcgcaagcgacaggagcgct

SEQ ID NO: 51996 - DNA, 25 bp, Canis familiaris
aagtgttgcagaaggaaggaccagc

SEQ ID NO: 51997 - DNA, 25 bp, Canis familiaris
aagtgttgaaggcaccagcaccaga

SEQ ID NO: 51998 - DNA, 25 bp, Canis familiaris
aaggtttagttgtgagcttcagatt

SEQ ID NO: 51999 - DNA, 25 bp, Canis familiaris
aaggtttggtttcagcatctactcg

SEQ ID NO: 52000 - DNA, 25 bp, Canis familiaris
aagtgtttggtcctggcacaattct

SEQ ID NO: 52001 - DNA, 25 bp, Canis familiaris
aagtgtggggacctggcccagattg

SEQ ID NO: 52002 - DNA, 25 bp, Canis familiaris
aagtgatccggaggtgtcgtagtgg

SEQ ID NO: 52003 - DNA, 25 bp, Canis familiaris
aaggacgcgtcatgttcgaacgagt

SEQ ID NO: 52004 - DNA, 25 bp, Canis familiaris
aaggtcgagcctcattaaacgagtt

SEQ ID NO: 52005 - DNA, 25 bp, Canis familiaris
aaggtggtagctcatgtattacatt

SEQ ID NO: 52006 - DNA, 25 bp, Canis familiaris
aaggctagcctaaagtattacgatt

SEQ ID NO: 52007 - DNA, 25 bp, Canis familiaris
aagtgttgcggaaatgttgctgaaa

SEQ ID NO: 52008 - DNA, 25 bp, Canis familiaris
aagtgactggatactttgctgtata

SEQ ID NO: 52009 - DNA, 25 bp, Canis familiaris
aagtgacggggcttgtcatgcccaa

SEQ ID NO: 52010 - DNA, 25 bp, Canis familiaris
aagtgaatgggcccttattctcaac

SEQ ID NO: 52011 - DNA, 25 bp, Canis familiaris
aagtgaacgtcacaagtttgcaagt

SEQ ID NO: 52012 - DNA, 25 bp, Canis familiaris
aagtgagatctgtctccaaattaaa

SEQ ID NO: 52013 - DNA, 25 bp, Canis familiaris
aagtgaatctttgccagtataacag

SEQ ID NO: 52014 - DNA, 25 bp, Canis familiaris
aatgtattccctgtagttaggagtc

SEQ ID NO: 52015 - DNA, 25 bp, Canis familiaris
aatgtgaaccgtgtgagtgcgtggg

SEQ ID NO: 52016 - DNA, 25 bp, Canis familiaris
aaggaagcccttgaggcgctggttc

SEQ ID NO: 52017 - DNA, 25 bp, Canis familiaris
aagggaactttggatgggtggacat

SEQ ID NO: 52018 - DNA, 25 bp, Canis familiaris
aagggatcctgggtcaaggtgccca

SEQ ID NO: 52019 - DNA, 25 bp, Canis familiaris
aagtgggccggatcatcgagtgcac

SEQ ID NO: 52020 - DNA, 25 bp, Canis familiaris
aagggcgccgcaaagcagaggctga

SEQ ID NO: 52021 - DNA, 25 bp, Canis familiaris
aaggtcctgcatgacagccaggctc

SEQ ID NO: 52022 - DNA, 25 bp, Canis familiaris
aaggtcatgtgtgagacgcctctgc

SEQ ID NO: 52023 - DNA, 25 bp, Canis familiaris
aagtgtatgatgagccacaagttca

SEQ ID NO: 52024 - DNA, 25 bp, Canis familiaris
aagtgtgtgtgcaatgttccgttca

SEQ ID NO: 52025 - DNA, 25 bp, Canis familiaris
aagtgcatgtgatgtttccagtgaa

SEQ ID NO: 52026 - DNA, 25 bp, Canis familiaris
aagtctgtgcattttacttcttcag

SEQ ID NO: 52027 - DNA, 25 bp, Canis familiaris
aagtcagtccatattcttctgttgg

SEQ ID NO: 52028 - DNA, 25 bp, Canis familiaris
aagtgagctcgccaattttttatga

SEQ ID NO: 52029 - DNA, 25 bp, Canis familiaris
aagtgtcattgccattttgtttgta

SEQ ID NO: 52030 - DNA, 25 bp, Canis familiaris
aattgtcaccaatgttattttcagt

SEQ ID NO: 52031 - DNA, 25 bp, Canis familiaris
aaggtcacccaacaagtatctgcag

SEQ ID NO: 52032 - DNA, 25 bp, Canis familiaris
aaggctcactccgactgaagttaag

SEQ ID NO: 52033 - DNA, 25 bp, Canis familiaris
aaggtctggcaaggtgacaattaca

SEQ ID NO: 52034 - DNA, 25 bp, Canis familiaris
aatgcggtggattcaattaattaag

SEQ ID NO: 52035 - DNA, 25 bp, Canis familiaris
aatgttgtgttaagttaattagagt

SEQ ID NO: 52036 - DNA, 25 bp, Canis familiaris
cacgtgttcttaccttacttcaagg

SEQ ID NO: 52037 - DNA, 25 bp, Canis familiaris
aagggatgtaaggcctacctcacag

SEQ ID NO: 52038 - DNA, 25 bp, Canis familiaris
aagggagtatgacctctacctaata

SEQ ID NO: 52039 - DNA, 25 bp, Canis familiaris
aagggagcattgtgttactgaattt

SEQ ID NO: 52040 - DNA, 25 bp, Canis familiaris
aagtgcaggagtcgggatactaact

SEQ ID NO: 52041 - DNA, 25 bp, Canis familiaris
aagtgccagcagggggagacacacc

SEQ ID NO: 52042 - DNA, 25 bp, Canis familiaris
aagtggcagctatgcggcagatcct

SEQ ID NO: 52043 - DNA, 25 bp, Canis familiaris
aagtcatgcttatgctgctggtgcc

SEQ ID NO: 52044 - DNA, 25 bp, Canis familiaris
aaggcatgcttatctggggaaccaa

SEQ ID NO: 52045 - DNA, 25 bp, Canis familiaris
aaggcactgcctttggaggatggaa

SEQ ID NO: 52046 - DNA, 25 bp, Canis familiaris
aaggacatgactctggaaggcgacg

SEQ ID NO: 52047 - DNA, 25 bp, Canis familiaris
aagtggtaccctgaagtgcgacacc

SEQ ID NO: 52048 - DNA, 25 bp, Canis familiaris
aagtggttgggggagagtgagaagc

SEQ ID NO: 52049 - DNA, 25 bp, Canis familiaris
aaggctttgcatctgtacggaggac

SEQ ID NO: 52050 - DNA, 25 bp, Canis familiaris
aagtctcttgcagctgaatggggta

SEQ ID NO: 52051 - DNA, 25 bp, Canis familiaris
aagtgcctcatcgctgagggctggt

SEQ ID NO: 52052 - DNA, 25 bp, Canis familiaris
aagtgccaatgggctgggggcgttc

SEQ ID NO: 52053 - DNA, 25 bp, Canis familiaris
aagtgccaggctcttggggagccca

SEQ ID NO: 52054 - DNA, 25 bp, Canis familiaris
aagtccaaatcctggatgagaccac

SEQ ID NO: 52055 - DNA, 25 bp, Canis familiaris
aagtccttgtttgaatggagccacc

SEQ ID NO: 52056 - DNA, 25 bp, Canis familiaris
aaggtttggattggagagggctcac

SEQ ID NO: 52057 - DNA, 25 bp, Canis familiaris
aaggatttgtgatcaaggggacttg

SEQ ID NO: 52058 - DNA, 25 bp, Canis familiaris
aagtgatttttatacctgggcattg

SEQ ID NO: 52059 - DNA, 25 bp, Canis familiaris
aaggtttttagatctctgaccatag

SEQ ID NO: 52060 - DNA, 25 bp, Canis familiaris
aaggttcctatttaacgcctcaatg

SEQ ID NO: 52061 - DNA, 25 bp, Canis familiaris
aaggtgtcgttcatgaggacctccg

SEQ ID NO: 52062 - DNA, 25 bp, Canis familiaris
aagtgtgcgcaaatttacccactcc

SEQ ID NO: 52063 - DNA, 25 bp, Canis familiaris
aagggccagtatatcctcacactgt

SEQ ID NO: 52064 - DNA, 25 bp, Canis familiaris
aatgatgctccaagctttcttacct

SEQ ID NO: 52065 - DNA, 25 bp, Canis familiaris
aatgatgtgcggctcttcttgaatc

SEQ ID NO: 52066 - DNA, 25 bp, Canis familiaris
aagtggggccatgactatgattcgt

SEQ ID NO: 52067 - DNA, 25 bp, Canis familiaris
aagtggggctagatctatgattcga

SEQ ID NO: 52068 - DNA, 25 bp, Canis familiaris
aagggggctgggatgacttcacatt

SEQ ID NO: 52069 - DNA, 25 bp, Canis familiaris
aagggggtgggagtgtgtcttctca

SEQ ID NO: 52070 - DNA, 25 bp, Canis familiaris
aagtgagggcttcatcttttttctg

SEQ ID NO: 52071 - DNA, 25 bp, Canis familiaris
aagtcgtgcagttgagtttttattc

SEQ ID NO: 52072 - DNA, 25 bp, Canis familiaris
aagtccagattcaatttgtactatt

SEQ ID NO: 52073 - DNA, 25 bp, Canis familiaris
aagtctagcttttatctgtcacaac

SEQ ID NO: 52074 - DNA, 25 bp, Canis familiaris
aagtctatttatttttcatcacaac

SEQ ID NO: 52075 - DNA, 25 bp, Canis familiaris
aagtctgttctttttgccaaaatca

SEQ ID NO: 52076 - DNA, 25 bp, Canis familiaris
aagtgcatgcttgtattatccaatg

SEQ ID NO: 52077 - DNA, 25 bp, Canis familiaris
aaggagcggccaatgtatccaaatt

SEQ ID NO: 52078 - DNA, 25 bp, Canis familiaris
aaggggtgtttgcctcaatagagga

SEQ ID NO: 52079 - DNA, 25 bp, Canis familiaris
aagggtggatttctgcagcaaactg

SEQ ID NO: 52080 - DNA, 25 bp, Canis familiaris
aagggtctatttgatgagaaatgga

SEQ ID NO: 52081 - DNA, 25 bp, Canis familiaris
aagggtctttcagcgagcaaggcat

SEQ ID NO: 52082 - DNA, 25 bp, Canis familiaris
aaggtccttacagctatcactggca

SEQ ID NO: 52083 - DNA, 25 bp, Canis familiaris
aaggattcttcaaactcagacgcca

SEQ ID NO: 52084 - DNA, 25 bp, Canis familiaris
aatggtccctcaaaccagacaatcc

SEQ ID NO: 52085 - DNA, 25 bp, Canis familiaris
aagtgtacctgccataacatgaaat

SEQ ID NO: 52086 - DNA, 25 bp, Canis familiaris
aagtgacccatctagaaagcattgt

SEQ ID NO: 52087 - DNA, 25 bp, Canis familiaris
aagtgacccactagaacatcagcta

SEQ ID NO: 52088 - DNA, 25 bp, Canis familiaris
aagtcggacacccaactgactaagc

SEQ ID NO: 52089 - DNA, 25 bp, Canis familiaris
aaggggagcaccgtactgcaataca

SEQ ID NO: 52090 - DNA, 25 bp, Canis familiaris
aatggggccacggaactaatgaatt

SEQ ID NO: 52091 - DNA, 25 bp, Canis familiaris
aaggggtcccagactctgtatgatt

SEQ ID NO: 52092 - DNA, 25 bp, Canis familiaris
aagggtacccaattttgcaatctgt

SEQ ID NO: 52093 - DNA, 25 bp, Canis familiaris
aagggaactctaagtattctttcat

SEQ ID NO: 52094 - DNA, 25 bp, Canis familiaris
aaggggggcatagctagtctttctt

SEQ ID NO: 52095 - DNA, 25 bp, Canis familiaris
aagggcagtggtggcctattttatt

SEQ ID NO: 52096 - DNA, 25 bp, Canis familiaris
aaggcgactcgaaatctggtttatt

SEQ ID NO: 52097 - DNA, 25 bp, Canis familiaris
aaggaagaggattattggttggaat

SEQ ID NO: 52098 - DNA, 25 bp, Canis familiaris
aaggaagacagctgtccggggatat

SEQ ID NO: 52099 - DNA, 25 bp, Canis familiaris
aaggaaatcctgttccgacctgtat

SEQ ID NO: 52100 - DNA, 25 bp, Canis familiaris
gagggtaatccctctaaccaggagg

SEQ ID NO: 52101 - DNA, 25 bp, Canis familiaris
aagggaatcccatcaaagcaagaag

SEQ ID NO: 52102 - DNA, 25 bp, Canis familiaris
aaggtttctgagttaaacaagcagg

SEQ ID NO: 52103 - DNA, 25 bp, Canis familiaris
aatgtatttttctcaaccaagccca

SEQ ID NO: 52104 - DNA, 25 bp, Canis familiaris
aaggtcattttatctggcactaccc

SEQ ID NO: 52105 - DNA, 25 bp, Canis familiaris
aagtctcttttaagcttattatctt

SEQ ID NO: 52106 - DNA, 25 bp, Canis familiaris
aagtgcttatttctttattacacaa

SEQ ID NO: 52107 - DNA, 25 bp, Canis familiaris
aaggatcttggtctttatctaaaga

SEQ ID NO: 52108 - DNA, 25 bp, Canis familiaris
aaggattgggctgagtaattccgga

SEQ ID NO: 52109 - DNA, 25 bp, Canis familiaris
aaggatgggatctggccatttcctg

SEQ ID NO: 52110 - DNA, 25 bp, Canis familiaris
aaggtgagtatctggcggtctctat

SEQ ID NO: 52111 - DNA, 25 bp, Canis familiaris
aaggagttacaaacaacacactttg

SEQ ID NO: 52112 - DNA, 25 bp, Canis familiaris
aagtgatgattatatagcagaagaa

SEQ ID NO: 52113 - DNA, 25 bp, Canis familiaris
gactgttgcgcattgtccaagcaat

SEQ ID NO: 52114 - DNA, 25 bp, Canis familiaris
aagtgctttttgaatggctgtgaca

SEQ ID NO: 52115 - DNA, 25 bp, Canis familiaris
aagtgcatttgtaatcagagccccc

SEQ ID NO: 52116 - DNA, 25 bp, Canis familiaris
aagtgccaatgaagacactgccccc

SEQ ID NO: 52117 - DNA, 25 bp, Canis familiaris
aagtgccagcaaaatcctgtcaccc

SEQ ID NO: 52118 - DNA, 25 bp, Canis familiaris
aagtgcgggaaccttgtacaccgat

SEQ ID NO: 52119 - DNA, 25 bp, Canis familiaris
aagtggggacagctctgagacccga

SEQ ID NO: 52120 - DNA, 25 bp, Canis familiaris
aagtggggaatgctgccacctggtg

SEQ ID NO: 52121 - DNA, 25 bp, Canis familiaris
aagtgtgtgtttgtaccctaggtga

SEQ ID NO: 52122 - DNA, 25 bp, Canis familiaris
aagtgattttgtgctgagcccatag

SEQ ID NO: 52123 - DNA, 25 bp, Canis familiaris
aaggatatttaggggctcattcagt

SEQ ID NO: 52124 - DNA, 25 bp, Canis familiaris
aaggattctgtctagtttattagta

SEQ ID NO: 52125 - DNA, 25 bp, Canis familiaris
aaggtgactgactacatttctgaga

SEQ ID NO: 52126 - DNA, 25 bp, Canis familiaris
aagtgtgaataggagtttgcagatg

SEQ ID NO: 52127 - DNA, 25 bp, Canis familiaris
aagtgctcaatcacaggcctggatc

SEQ ID NO: 52128 - DNA, 25 bp, Canis familiaris
aaggctcaataaggacactgtgcaa

SEQ ID NO: 52129 - DNA, 25 bp, Canis familiaris
aaggctcctgaatgtagtagcagtg

SEQ ID NO: 52130 - DNA, 25 bp, Canis familiaris
aaggatcctgcttctgtaggacctg

SEQ ID NO: 52131 - DNA, 25 bp, Canis familiaris
aaggatctagcgtgtccgatctctt

SEQ ID NO: 52132 - DNA, 25 bp, Canis familiaris
aaggtatcaggaggcccactttaga

SEQ ID NO: 52133 - DNA, 25 bp, Canis familiaris
aagtgctaagtatggacaccttcca

SEQ ID NO: 52134 - DNA, 25 bp, Canis familiaris
aagtgctgaaggcagcaaccctcct

SEQ ID NO: 52135 - DNA, 25 bp, Canis familiaris
aagtgggagccacgaagccacacct

SEQ ID NO: 52136 - DNA, 25 bp, Canis familiaris
aagtggaacctggaacccagcatcg

SEQ ID NO: 52137 - DNA, 25 bp, Canis familiaris
aagtggcaaagcctgaagcctccac

SEQ ID NO: 52138 - DNA, 25 bp, Canis familiaris
aagtgcgacaactcaaacaccacgt

SEQ ID NO: 52139 - DNA, 25 bp, Canis familiaris
aagtggaaacacgtatgaaccattc

SEQ ID NO: 52140 - DNA, 25 bp, Canis familiaris
aaggaaaaaggatgaccaatctcac

SEQ ID NO: 52141 - DNA, 25 bp, Canis familiaris
aaggaaaaacgtgcccagtcctcag

SEQ ID NO: 52142 - DNA, 25 bp, Canis familiaris
aaggaataaagcatccccaggtatc

SEQ ID NO: 52143 - DNA, 25 bp, Canis familiaris
aaggatggctagacttccctaggga

SEQ ID NO: 52144 - DNA, 25 bp, Canis familiaris
aagggagcatgactctgtcacctga

SEQ ID NO: 52145 - DNA, 25 bp, Canis familiaris
aagggtgctgtggagatcatcttca

SEQ ID NO: 52146 - DNA, 25 bp, Canis familiaris
aagtgttgctctgacattcactcct

SEQ ID NO: 52147 - DNA, 25 bp, Canis familiaris
aagtgcctttattatctaactcttt

SEQ ID NO: 52148 - DNA, 25 bp, Canis familiaris
aagtgcagtctttattgtacccttc

SEQ ID NO: 52149 - DNA, 25 bp, Canis familiaris
aagtgcacattctttattttcctcc

SEQ ID NO: 52150 - DNA, 25 bp, Canis familiaris
aagtgagctttgtctaatatccccc

SEQ ID NO: 52151 - DNA, 25 bp, Canis familiaris
aagtgacttcagataaatccacatg

SEQ ID NO: 52152 - DNA, 25 bp, Canis familiaris
aaggacttcagaaactggcagtcaa

SEQ ID NO: 52153 - DNA, 25 bp, Canis familiaris
aagggagctcactcagtgggtctga

SEQ ID NO: 52154 - DNA, 25 bp, Canis familiaris
aagggagctcactcagtgggtctga

SEQ ID NO: 52155 - DNA, 25 bp, Canis familiaris
aagggagctcaatcaatgggtctga

SEQ ID NO: 52156 - DNA, 25 bp, Canis familiaris
aagtgggctacactcacgaggtgtc

SEQ ID NO: 52157 - DNA, 25 bp, Canis familiaris
caagcgggtcaacacgaagcgtagc

SEQ ID NO: 52158 - DNA, 25 bp, Canis familiaris
caaggttccaacagccaaggctacc

SEQ ID NO: 52159 - DNA, 25 bp, Canis familiaris
aaggcttcccagattatgttgcccc

SEQ ID NO: 52160 - DNA, 25 bp, Canis familiaris
aaggctacctttgtatttctctcct

SEQ ID NO: 52161 - DNA, 25 bp, Canis familiaris
aaggcttcccttttattgcatatgc

SEQ ID NO: 52162 - DNA, 25 bp, Canis familiaris
aagtgcttcctcttggaatctcagt

SEQ ID NO: 52163 - DNA, 25 bp, Canis familiaris
aaggtcttgctctgtggttgcagtt

SEQ ID NO: 52164 - DNA, 25 bp, Canis familiaris
aagtgtgtcttaggggcttcagtct

SEQ ID NO: 52165 - DNA, 25 bp, Canis familiaris
aagtgttctgaatggtgctgttgtt

SEQ ID NO: 52166 - DNA, 25 bp, Canis familiaris
aagtgtctttattggagtgatagct

SEQ ID NO: 52167 - DNA, 25 bp, Canis familiaris
aagtgtgattttatgatatgtagta

SEQ ID NO: 52168 - DNA, 25 bp, Canis familiaris
aagtgcattttgctaatcagtcagt

SEQ ID NO: 52169 - DNA, 25 bp, Canis familiaris
aaggcattttagaaattgatttcca

SEQ ID NO: 52170 - DNA, 25 bp, Canis familiaris
aaggattttatatatttactcacga

SEQ ID NO: 52171 - DNA, 25 bp, Canis familiaris
aaggcttcttcacagtctatactac

SEQ ID NO: 52172 - DNA, 25 bp, Canis familiaris
aagtgatttcccaaggcatttccct

SEQ ID NO: 52173 - DNA, 25 bp, Canis familiaris
aagtgtgtacttaagcgctttccct

SEQ ID NO: 52174 - DNA, 25 bp, Canis familiaris
aagggtacttatgggttgctctggc

SEQ ID NO: 52175 - DNA, 25 bp, Canis familiaris
aagtgttactttgtgtccatcatgt

SEQ ID NO: 52176 - DNA, 25 bp, Canis familiaris
aagtgtgagacgaggctgatggaat

SEQ ID NO: 52177 - DNA, 25 bp, Canis familiaris
aagtgctcagagcttggctgaagat

SEQ ID NO: 52178 - DNA, 25 bp, Canis familiaris
aagtcctgcatgatctgagttcaga

SEQ ID NO: 52179 - DNA, 25 bp, Canis familiaris
aagtgccaatgaactggctgtgcag

SEQ ID NO: 52180 - DNA, 25 bp, Canis familiaris
aagtccacatgaacattctccagaa

SEQ ID NO: 52181 - DNA, 25 bp, Canis familiaris
aagggctcatgaccacagtccatgc

SEQ ID NO: 52182 - DNA, 25 bp, Canis familiaris
aagggctatagcctctgttatccca

SEQ ID NO: 52183 - DNA, 25 bp, Canis familiaris
aaggagattggcctgctgggcaacc

SEQ ID NO: 52184 - DNA, 25 bp, Canis familiaris
aagtgaatgcttcctgtgggacagg

SEQ ID NO: 52185 - DNA, 25 bp, Canis familiaris
aaggcaagctcttcgttggagggct

SEQ ID NO: 52186 - DNA, 25 bp, Canis familiaris
aaggaaggtatcaggctcacggttt

SEQ ID NO: 52187 - DNA, 25 bp, Canis familiaris
aagtggaattacaggctgtgctgtg

SEQ ID NO: 52188 - DNA, 25 bp, Canis familiaris
aagggaagccgtggcctgtgtgttt

SEQ ID NO: 52189 - DNA, 25 bp, Canis familiaris
aagggtagtcgagccgtgcaatggt

SEQ ID NO: 52190 - DNA, 25 bp, Canis familiaris
aagggtggtatgtcccattggatgg

SEQ ID NO: 52191 - DNA, 25 bp, Canis familiaris
aagtggtggctgtgcgccaagagct

SEQ ID NO: 52192 - DNA, 25 bp, Canis familiaris
aagtgcgcgatgccgggatcaaagt

SEQ ID NO: 52193 - DNA, 25 bp, Canis familiaris
aaggggatccagggatgcactgagt

SEQ ID NO: 52194 - DNA, 25 bp, Canis familiaris
aagggtaccatgtgtgcaagcagac

SEQ ID NO: 52195 - DNA, 25 bp, Canis familiaris
aagggtctcaagtgatgtcagcaag

SEQ ID NO: 52196 - DNA, 25 bp, Canis familiaris
aagtggttcaagtatatatagatat

SEQ ID NO: 52197 - DNA, 25 bp, Canis familiaris
aaggcttccaagttgaacaatgcta

SEQ ID NO: 52198 - DNA, 25 bp, Canis familiaris
aaggtcaccaagctgctactgacga

SEQ ID NO: 52199 - DNA, 25 bp, Canis familiaris
caaggttgccaagagtattgccaga

SEQ ID NO: 52200 - DNA, 25 bp, Canis familiaris
aaggttccagagcgatgcgatccag

SEQ ID NO: 52201 - DNA, 25 bp, Canis familiaris
aaggttcaaggccttcttggctgat

SEQ ID NO: 52202 - DNA, 25 bp, Canis familiaris
aagtgacccagtgttttgctgcttc

SEQ ID NO: 52203 - DNA, 25 bp, Canis familiaris
aagtgaccctgaaatgtcggtgtta

SEQ ID NO: 52204 - DNA, 25 bp, Canis familiaris
aagtgacctctaaatcttagtgaat

SEQ ID NO: 52205 - DNA, 25 bp, Canis familiaris
aagtgagcacttaaagctttcggaa

SEQ ID NO: 52206 - DNA, 25 bp, Canis familiaris
aagtggtcatttttgctgcttctgt

SEQ ID NO: 52207 - DNA, 25 bp, Canis familiaris
aagtgagatcttacagctggctcct

SEQ ID NO: 52208 - DNA, 25 bp, Canis familiaris
aagggcatctgtagcgggatgccac

SEQ ID NO: 52209 - DNA, 25 bp, Canis familiaris
aagggccagatcggggcgcccatgc

SEQ ID NO: 52210 - DNA, 25 bp, Canis familiaris
aagtggctggccgagggccaggcgc

SEQ ID NO: 52211 - DNA, 25 bp, Canis familiaris
aaggatgagacaggacaggtaggcc

SEQ ID NO: 52212 - DNA, 25 bp, Canis familiaris
aaggaagacggcgggggcgccatga

SEQ ID NO: 52213 - DNA, 25 bp, Canis familiaris
aaggtattcctgcaggatggcccag

SEQ ID NO: 52214 - DNA, 25 bp, Canis familiaris
aaggtattggcgccaggcaagcctg

SEQ ID NO: 52215 - DNA, 25 bp, Canis familiaris
aagggagcggcagcagtgaaggatt

SEQ ID NO: 52216 - DNA, 25 bp, Canis familiaris
aaggtacatggagagcgcacaattt

SEQ ID NO: 52217 - DNA, 25 bp, Canis familiaris
aaggtacacgttcagatcaattttg

SEQ ID NO: 52218 - DNA, 25 bp, Canis familiaris
aagtggcgccttatagatcaatttt

SEQ ID NO: 52219 - DNA, 25 bp, Canis familiaris
aagtgctgccatgttaggtaactct

SEQ ID NO: 52220 - DNA, 25 bp, Canis familiaris
aagtggccacctccagtgagaaact

SEQ ID NO: 52221 - DNA, 25 bp, Canis familiaris
aagggaccctcgctgagaactataa

SEQ ID NO: 52222 - DNA, 25 bp, Canis familiaris
aaggctacgctggcggggaactgat

SEQ ID NO: 52223 - DNA, 25 bp, Canis familiaris
aaggtgactgtggtccggaacttgg

SEQ ID NO: 52224 - DNA, 25 bp, Canis familiaris
aatgggcctgggaccttaatactgg

SEQ ID NO: 52225 - DNA, 25 bp, Canis familiaris
aaggtctctaggatctgctagcaga

SEQ ID NO: 52226 - DNA, 25 bp, Canis familiaris
aagggcctttgaactgtagcaccaa

SEQ ID NO: 52227 - DNA, 25 bp, Canis familiaris
aagggcacttctgccatgataacca

SEQ ID NO: 52228 - DNA, 25 bp, Canis familiaris
aagggacttcaggtcattcaacaca

SEQ ID NO: 52229 - DNA, 25 bp, Canis familiaris
aaggaggtctcatatgctctcgaaa

SEQ ID NO: 52230 - DNA, 25 bp, Canis familiaris
aaggacgatcgatgtgtttgacgga

SEQ ID NO: 52231 - DNA, 25 bp, Canis familiaris
aaggaaccaactattcagacgtgca

SEQ ID NO: 52232 - DNA, 25 bp, Canis familiaris
aaggaaacacagtttgtgatgatgc

SEQ ID NO: 52233 - DNA, 25 bp, Canis familiaris
caagggttacctctgagtggccgtt

SEQ ID NO: 52234 - DNA, 25 bp, Canis familiaris
caaggtgttacctggggtgctttgt

SEQ ID NO: 52235 - DNA, 25 bp, Canis familiaris
aagggaatatcgatggaaatgtttt

SEQ ID NO: 52236 - DNA, 25 bp, Canis familiaris
aaggataaatctatgctgcaggctt

SEQ ID NO: 52237 - DNA, 25 bp, Canis familiaris
aagtgcataccatactcaccagctt

SEQ ID NO: 52238 - DNA, 25 bp, Canis familiaris
aagtgctacctattgtactcagttg

SEQ ID NO: 52239 - DNA, 25 bp, Canis familiaris
aagtgacaagccagtagctcatgtt

SEQ ID NO: 52240 - DNA, 25 bp, Canis familiaris
aaggacaaccacctggaacttcttg

SEQ ID NO: 52241 - DNA, 25 bp, Canis familiaris
aatggtaagccccgaagcatttctc

SEQ ID NO: 52242 - DNA, 25 bp, Canis familiaris
aaggctacacctctaaagtcctcaa

SEQ ID NO: 52243 - DNA, 25 bp, Canis familiaris
aaggcttctgcagtttaaatgggtt

SEQ ID NO: 52244 - DNA, 25 bp, Canis familiaris
aagtgtggctacatctagagtgcgg

SEQ ID NO: 52245 - DNA, 25 bp, Canis familiaris
aaggattgtcacagctattgttgga

SEQ ID NO: 52246 - DNA, 25 bp, Canis familiaris
aaggtttcactagcttgagctgcga

SEQ ID NO: 52247 - DNA, 25 bp, Canis familiaris
aaggtcattgcagagcctgtggatg

SEQ ID NO: 52248 - DNA, 25 bp, Canis familiaris
aagggcattgaggaccgcaggtgag

SEQ ID NO: 52249 - DNA, 25 bp, Canis familiaris
aagggcaagagttgtcagcggctcg

SEQ ID NO: 52250 - DNA, 25 bp, Canis familiaris
aagggagcagcggtcatcaggagca

SEQ ID NO: 52251 - DNA, 25 bp, Canis familiaris
aagtgggcaatgggcgaagagcaag

SEQ ID NO: 52252 - DNA, 25 bp, Canis familiaris
aagtgtggctagtttgaataaagaa

SEQ ID NO: 52253 - DNA, 25 bp, Canis familiaris
aagtgtgtgtggtagaaaaatataa

SEQ ID NO: 52254 - DNA, 25 bp, Canis familiaris
aagggattaaggcccagaatatata

SEQ ID NO: 52255 - DNA, 25 bp, Canis familiaris
aagggcttccaggagccagacatcc

SEQ ID NO: 52256 - DNA, 25 bp, Canis familiaris
aagtggttcacagacacgtccatca

SEQ ID NO: 52257 - DNA, 25 bp, Canis familiaris
aaggagtccaagaaccattccacca

SEQ ID NO: 52258 - DNA, 25 bp, Canis familiaris
aagggttcaaattgctcactcccac

SEQ ID NO: 52259 - DNA, 25 bp, Canis familiaris
aagggtttgataggtcgtccctgct

SEQ ID NO: 52260 - DNA, 25 bp, Canis familiaris
aagtggtgtgtgatggtcaaccctc

SEQ ID NO: 52261 - DNA, 25 bp, Canis familiaris
aagtggtcactgcaagaacatcccc

SEQ ID NO: 52262 - DNA, 25 bp, Canis familiaris
aagggtcactgggagagccacactt

SEQ ID NO: 52263 - DNA, 25 bp, Canis familiaris
aagggctgactggggcaggaactgg

SEQ ID NO: 52264 - DNA, 25 bp, Canis familiaris
aatgcggctgcactggtggaagaag

SEQ ID NO: 52265 - DNA, 25 bp, Canis familiaris
aagggtcactggttcatcagagccg

SEQ ID NO: 52266 - DNA, 25 bp, Canis familiaris
aagggtctgggaggccatgatgccc

SEQ ID NO: 52267 - DNA, 25 bp, Canis familiaris
aagggcctgggtgagatcagcacgg

SEQ ID NO: 52268 - DNA, 25 bp, Canis familiaris
aagggctctggggaaccattggaga

SEQ ID NO: 52269 - DNA, 25 bp, Canis familiaris
aagggtgtaggggagccactggcat

SEQ ID NO: 52270 - DNA, 25 bp, Canis familiaris
aaggtgtgtatgtccaatgcctctg

SEQ ID NO: 52271 - DNA, 25 bp, Canis familiaris
aaggctgatgtagtggaatcctgga

SEQ ID NO: 52272 - DNA, 25 bp, Canis familiaris
aaggggttgatgagcctgctggacc

SEQ ID NO: 52273 - DNA, 25 bp, Canis familiaris
aagtgggcgtgtgagcctgtgtgtg

SEQ ID NO: 52274 - DNA, 25 bp, Canis familiaris
aaggggctgttgcagactagctatg

SEQ ID NO: 52275 - DNA, 25 bp, Canis familiaris
aaggtggctgattgaagactactga

SEQ ID NO: 52276 - DNA, 25 bp, Canis familiaris
aagggatcataatagactacttcta

SEQ ID NO: 52277 - DNA, 25 bp, Canis familiaris
aaggagactggctgagagctactta

SEQ ID NO: 52278 - DNA, 25 bp, Canis familiaris
caagggactggggacctactgtagt

SEQ ID NO: 52279 - DNA, 25 bp, Canis familiaris
aagtggcatcaagctacattacgta

SEQ ID NO: 52280 - DNA, 25 bp, Canis familiaris
aagtggataacactgccattcgcct

SEQ ID NO: 52281 - DNA, 25 bp, Canis familiaris
aagtggcagcagtgtcgttgccctc

SEQ ID NO: 52282 - DNA, 25 bp, Canis familiaris
ctctgggacagtccttagtccttcc

SEQ ID NO: 52283 - DNA, 25 bp, Canis familiaris
aagtgaccatgttcaaactgcttga

SEQ ID NO: 52284 - DNA, 25 bp, Canis familiaris
aagtgactctgttcctattagcata

SEQ ID NO: 52285 - DNA, 25 bp, Canis familiaris
aagtgtcttctagctttatgatgaa

SEQ ID NO: 52286 - DNA, 25 bp, Canis familiaris
aaggtcttctggtgcttcatgaata

SEQ ID NO: 52287 - DNA, 25 bp, Canis familiaris
aatggtttctaaccttctgctacgg

SEQ ID NO: 52288 - DNA, 25 bp, Canis familiaris
aaggaatcctcaaccttcctgaaga

SEQ ID NO: 52289 - DNA, 25 bp, Canis familiaris
aaggatatcctaagtcatacctaaa

SEQ ID NO: 52290 - DNA, 25 bp, Canis familiaris
aaggtacctcagtgtagcctgcaaa

SEQ ID NO: 52291 - DNA, 25 bp, Canis familiaris
aaggtcatcccagagctgaacggga

SEQ ID NO: 52292 - DNA, 25 bp, Canis familiaris
aaggtcatccctgagctgaacggga

SEQ ID NO: 52293 - DNA, 25 bp, Canis familiaris
aaggtgccacgtgactaacctggtg

SEQ ID NO: 52294 - DNA, 25 bp, Canis familiaris
aatggctcccggatcaaaggctggt

SEQ ID NO: 52295 - DNA, 25 bp, Canis familiaris
aatgagcccgggtgtgcgaggcttc

SEQ ID NO: 52296 - DNA, 25 bp, Canis familiaris
aaggcttagatgagggcgggttcac

SEQ ID NO: 52297 - DNA, 25 bp, Canis familiaris
aaggttactgttcagctgtggtgct

SEQ ID NO: 52298 - DNA, 25 bp, Canis familiaris
aaggtttctgttcattgcacaagct

SEQ ID NO: 52299 - DNA, 25 bp, Canis familiaris
aagtgtctactgtatttcttcaaca

SEQ ID NO: 52300 - DNA, 25 bp, Canis familiaris
aagggacactattttcttgccctcg

SEQ ID NO: 52301 - DNA, 25 bp, Canis familiaris
aagggatgtttcttttcccagctgc

SEQ ID NO: 52302 - DNA, 25 bp, Canis familiaris
aagtgtgagttttgcctttcacctc

SEQ ID NO: 52303 - DNA, 25 bp, Canis familiaris
aagtgagcagcattttgttttcccc

SEQ ID NO: 52304 - DNA, 25 bp, Canis familiaris
aaggtactgaatcttttcctgccaa

SEQ ID NO: 52305 - DNA, 25 bp, Canis familiaris
aagtgtttagaccatttgtccacca

SEQ ID NO: 52306 - DNA, 25 bp, Canis familiaris
aaggttaaacattttctgaagccat

SEQ ID NO: 52307 - DNA, 25 bp, Canis familiaris
aaggacagaaaatctcccccaattg

SEQ ID NO: 52308 - DNA, 25 bp, Canis familiaris
aagtggggaggatcagcccccaaga

SEQ ID NO: 52309 - DNA, 25 bp, Canis familiaris
taacggtagggtcaggcttccaaga

SEQ ID NO: 52310 - DNA, 25 bp, Canis familiaris
caactaataggcctacggcgtaaag

SEQ ID NO: 52311 - DNA, 25 bp, Canis familiaris
aatagcaaaggccaaagcaggtaaa

SEQ ID NO: 52312 - DNA, 25 bp, Canis familiaris
aaggcaaaggcaccaaacttaggca

SEQ ID NO: 52313 - DNA, 25 bp, Canis familiaris
aaggtcaagagtcaaggtgtagaca

SEQ ID NO: 52314 - DNA, 25 bp, Canis familiaris
aaggtgcctggtccaatgtgttgag

SEQ ID NO: 52315 - DNA, 25 bp, Canis familiaris
aagggcttggcttcaagctcctgaa

SEQ ID NO: 52316 - DNA, 25 bp, Canis familiaris
aaggcagggcctgccagacttgtac

SEQ ID NO: 52317 - DNA, 25 bp, Canis familiaris
aaggggcagctcatcaaagcctgta

SEQ ID NO: 52318 - DNA, 25 bp, Canis familiaris
aagggccgtgcttcacggccagctg

SEQ ID NO: 52319 - DNA, 25 bp, Canis familiaris
aagtggcaggtggtcacgtccacat

SEQ ID NO: 52320 - DNA, 25 bp, Canis familiaris
aagtgtggagtgatcagccccagat

SEQ ID NO: 52321 - DNA, 25 bp, Canis familiaris
aagtgtgcgaggaacgcggaagagc

SEQ ID NO: 52322 - DNA, 25 bp, Canis familiaris
aagtgatggaggccaaagtcagaag

SEQ ID NO: 52323 - DNA, 25 bp, Canis familiaris
aagtggagattgccatctctgacaa

SEQ ID NO: 52324 - DNA, 25 bp, Canis familiaris
aagtgtggttgcatttagatgttaa

SEQ ID NO: 52325 - DNA, 25 bp, Canis familiaris
aaggtgcagcttgtaggagatgtgt

SEQ ID NO: 52326 - DNA, 25 bp, Canis familiaris
aaggatcgagtgctaaaaggttgac

SEQ ID NO: 52327 - DNA, 25 bp, Canis familiaris
aatggtccgtctctagaaggaagac

SEQ ID NO: 52328 - DNA, 25 bp, Canis familiaris
aaggtgccagctattcaacagaaaa

SEQ ID NO: 52329 - DNA, 25 bp, Canis familiaris
aaggtgtcaccatgcacaacgaatt

SEQ ID NO: 52330 - DNA, 25 bp, Canis familiaris
aaggtgctgacctataaactgcaga

SEQ ID NO: 52331 - DNA, 25 bp, Canis familiaris
aagtgtctctaggataaagtgatac

SEQ ID NO: 52332 - DNA, 25 bp, Canis familiaris
aaggtgctctagaatcagcaactaa

SEQ ID NO: 52333 - DNA, 25 bp, Canis familiaris
aaggacacgatgacatacatatgta

SEQ ID NO: 52334 - DNA, 25 bp, Canis familiaris
aaggtcaccatgacctgcagtgcca

SEQ ID NO: 52335 - DNA, 25 bp, Canis familiaris
aaggtcatccagagcatttgcacag

SEQ ID NO: 52336 - DNA, 25 bp, Canis familiaris
aagtggctagagggcttccacaggg

SEQ ID NO: 52337 - DNA, 25 bp, Canis familiaris
aaggcagaggttgtttcacagggac

SEQ ID NO: 52338 - DNA, 25 bp, Canis familiaris
aaggcaatgggaaagctcttcgagg

SEQ ID NO: 52339 - DNA, 25 bp, Canis familiaris
aaggagggtctgaagtcctcgtgcg

SEQ ID NO: 52340 - DNA, 25 bp, Canis familiaris
aaggtggttcagagtgagctccctg

SEQ ID NO: 52341 - DNA, 25 bp, Canis familiaris
aaggtggatgtacttgatggctgac

SEQ ID NO: 52342 - DNA, 25 bp, Canis familiaris
aagtggtggataactagccagacaa

SEQ ID NO: 52343 - DNA, 25 bp, Canis familiaris
aagtgggctgacgacatcagcaaaa

SEQ ID NO: 52344 - DNA, 25 bp, Canis familiaris
aagtgtgacgtggacatccgcaaag

SEQ ID NO: 52345 - DNA, 25 bp, Canis familiaris
aagtggacggaggtctcgcacaact

SEQ ID NO: 52346 - DNA, 25 bp, Canis familiaris
aagggaggaagacccacatcaacat

SEQ ID NO: 52347 - DNA, 25 bp, Canis familiaris
aagggtgacacaacgccatatatac

SEQ ID NO: 52348 - DNA, 25 bp, Canis familiaris
aaggtgttctcaacgcacacaacgc

SEQ ID NO: 52349 - DNA, 25 bp, Canis familiaris
aatggtggctcccacaggacaatcg

SEQ ID NO: 52350 - DNA, 25 bp, Canis familiaris
aatggattcccagaggccaactatc

SEQ ID NO: 52351 - DNA, 25 bp, Canis familiaris
aaggatccccaggaacagagatttc

SEQ ID NO: 52352 - DNA, 25 bp, Canis familiaris
aatggaccccagaagtcaagcactt

SEQ ID NO: 52353 - DNA, 25 bp, Canis familiaris
aaggcccaaagtatccacatctgga

SEQ ID NO: 52354 - DNA, 25 bp, Canis familiaris
aaggcctaactatgctgccaacgtg

SEQ ID NO: 52355 - DNA, 25 bp, Canis familiaris
aaggcctaattatggctgcagagaa

SEQ ID NO: 52356 - DNA, 25 bp, Canis familiaris
aaggccatgaaactacaccgaaatt

SEQ ID NO: 52357 - DNA, 25 bp, Canis familiaris
aaggttgcattgggtccccaaatct

SEQ ID NO: 52358 - DNA, 25 bp, Canis familiaris
aaggtctgaatcgtccttcacaact

SEQ ID NO: 52359 - DNA, 25 bp, Canis familiaris
aaggattgagacgcacaggagcccc

SEQ ID NO: 52360 - DNA, 25 bp, Canis familiaris
aaggaattgacggaagggcaccact

SEQ ID NO: 52361 - DNA, 25 bp, Canis familiaris
aagggactgaagctgcgggagccac

SEQ ID NO: 52362 - DNA, 25 bp, Canis familiaris
aagggactgaagctgcgggagccac

SEQ ID NO: 52363 - DNA, 25 bp, Canis familiaris
aagggactgaagctgcgggagccac

SEQ ID NO: 52364 - DNA, 25 bp, Canis familiaris
aagggactgaagctgcgggagccac

SEQ ID NO: 52365 - DNA, 25 bp, Canis familiaris
aagggagctgaagctgtcgggaggc

SEQ ID NO: 52366 - DNA, 25 bp, Canis familiaris
aagggatgtggggttcagagctgaa

SEQ ID NO: 52367 - DNA, 25 bp, Canis familiaris
aaggttgtgtgtgttcgcagagtgc

SEQ ID NO: 52368 - DNA, 25 bp, Canis familiaris
aaggtgctaatgtttggccagtggc

SEQ ID NO: 52369 - DNA, 25 bp, Canis familiaris
aagtgtgccaatgattgtcctggct

SEQ ID NO: 52370 - DNA, 25 bp, Canis familiaris
aatggactgcaaggtcttcctggtc

SEQ ID NO: 52371 - DNA, 25 bp, Canis familiaris
aatgctgaggtaggtttcccgttct

SEQ ID NO: 52372 - DNA, 25 bp, Canis familiaris
aaggaggatgctgtgttcggctgtt

SEQ ID NO: 52373 - DNA, 25 bp, Canis familiaris
aaggaggatctcattaacctgccgc

SEQ ID NO: 52374 - DNA, 25 bp, Canis familiaris
aaggtgaattctttgaacgctgttc

SEQ ID NO: 52375 - DNA, 25 bp, Canis familiaris
aaggtgtttggatacagctgctttg

SEQ ID NO: 52376 - DNA, 25 bp, Canis familiaris
aaggttgttggtgaagctctttgat

SEQ ID NO: 52377 - DNA, 25 bp, Canis familiaris
aaggggaatggtcagaccttgagca

SEQ ID NO: 52378 - DNA, 25 bp, Canis familiaris
aagggaggacttgagctgccttgta

SEQ ID NO: 52379 - DNA, 25 bp, Canis familiaris
aaggaacgatcatccctgtctttat

SEQ ID NO: 52380 - DNA, 25 bp, Canis familiaris
aaggagaagcactctcctggcagtc

SEQ ID NO: 52381 - DNA, 25 bp, Canis familiaris
aaggataagccatcatctcgctctg

SEQ ID NO: 52382 - DNA, 25 bp, Canis familiaris
aaggagcagatggactctatcccca

SEQ ID NO: 52383 - DNA, 25 bp, Canis familiaris
aaggatcgaggtatttcccatcccg

SEQ ID NO: 52384 - DNA, 25 bp, Canis familiaris
aaggacgggactgtacaagcaccac

SEQ ID NO: 52385 - DNA, 25 bp, Canis familiaris
aaggggaggagtgtgatccacccat

SEQ ID NO: 52386 - DNA, 25 bp, Canis familiaris
aagggtaggagaacctgcacatccc

SEQ ID NO: 52387 - DNA, 25 bp, Canis familiaris
aaggctgtatggaaataccctcctc

SEQ ID NO: 52388 - DNA, 25 bp, Canis familiaris
aaggctgaagcctattgaaccacct

SEQ ID NO: 52389 - DNA, 25 bp, Canis familiaris
aaggctgacaaagattaccacttta

SEQ ID NO: 52390 - DNA, 25 bp, Canis familiaris
aagggaagcaagcagactcctcttt

SEQ ID NO: 52391 - DNA, 25 bp, Canis familiaris
aagggacagaagctgccctttcttg

SEQ ID NO: 52392 - DNA, 25 bp, Canis familiaris
aagggagcaggacactgatcttctc

SEQ ID NO: 52393 - DNA, 25 bp, Canis familiaris
aaggggagtgatcactcagcctcgc

SEQ ID NO: 52394 - DNA, 25 bp, Canis familiaris
aaggagctgtttcagctctgccctg

SEQ ID NO: 52395 - DNA, 25 bp, Canis familiaris
aagtggctgttcacgcatcatgtgt

SEQ ID NO: 52396 - DNA, 25 bp, Canis familiaris
aagtggctgtttactgcttttcatt

SEQ ID NO: 52397 - DNA, 25 bp, Canis familiaris
aaggtgtttgtcagcattatttgta

SEQ ID NO: 52398 - DNA, 25 bp, Canis familiaris
aaggttgtggtgtagttggtctgta

SEQ ID NO: 52399 - DNA, 25 bp, Canis familiaris
aagtgggatgggcatgtgggctctg

SEQ ID NO: 52400 - DNA, 25 bp, Canis familiaris
aagggagtggagtctttggcttggt

SEQ ID NO: 52401 - DNA, 25 bp, Canis familiaris
aaggtatgttattattttgctgtag

SEQ ID NO: 52402 - DNA, 25 bp, Canis familiaris
aaggtgttcttttcaggtgcatgta

SEQ ID NO: 52403 - DNA, 25 bp, Canis familiaris
aaggtgatgtctttacaggatatta

SEQ ID NO: 52404 - DNA, 25 bp, Canis familiaris
aaggtggcttatgaatggacattta

SEQ ID NO: 52405 - DNA, 25 bp, Canis familiaris
aaggacgttacctgcgaatctgctt

SEQ ID NO: 52406 - DNA, 25 bp, Canis familiaris
aaggcagcttccactagggatttgt

SEQ ID NO: 52407 - DNA, 25 bp, Canis familiaris
aatggcagattcaggtcgggtccgt

SEQ ID NO: 52408 - DNA, 25 bp, Canis familiaris
aagtggattcatagtctctcggtgc

SEQ ID NO: 52409 - DNA, 25 bp, Canis familiaris
aagggcaccaagtctgctcaaagtg

SEQ ID NO: 52410 - DNA, 25 bp, Canis familiaris
aaggctacacaatctgctgaatcag

SEQ ID NO: 52411 - DNA, 25 bp, Canis familiaris
aaggcaacagcatatctgcaggaaa

SEQ ID NO: 52412 - DNA, 25 bp, Canis familiaris
aaggaagaacaggctgctgctgaaa

SEQ ID NO: 52413 - DNA, 25 bp, Canis familiaris
aaggaaggcagcaggcgcgcaaatt

SEQ ID NO: 52414 - DNA, 25 bp, Canis familiaris
aaggaggacagcaacgggctaatag

SEQ ID NO: 52415 - DNA, 25 bp, Canis familiaris
aaggcacgatcacaaaggctaaggt

SEQ ID NO: 52416 - DNA, 25 bp, Canis familiaris
aaggaccatatcaaaatgacttctg

SEQ ID NO: 52417 - DNA, 25 bp, Canis familiaris
aagggacatcctggaattctgcttg

SEQ ID NO: 52418 - DNA, 25 bp, Canis familiaris
aagtggaatccagcgtgtccttgtc

SEQ ID NO: 52419 - DNA, 25 bp, Canis familiaris
aagtggtagccatttttacattgtt

SEQ ID NO: 52420 - DNA, 25 bp, Canis familiaris
aagggatgaccaatgctttcaatta

SEQ ID NO: 52421 - DNA, 25 bp, Canis familiaris
aagggagccagcaatgtatatttaa

SEQ ID NO: 52422 - DNA, 25 bp, Canis familiaris
aagggacaacaaagctcagtgtaga

SEQ ID NO: 52423 - DNA, 25 bp, Canis familiaris
aaggtgtctacaaagccatgagtga

SEQ ID NO: 52424 - DNA, 25 bp, Canis familiaris
aaggtgttgctacgtgcagctgttg

SEQ ID NO: 52425 - DNA, 25 bp, Canis familiaris
aatggttactactcagatgggaaaa

SEQ ID NO: 52426 - DNA, 25 bp, Canis familiaris
aaggtcttccattccacgtgaaaga

SEQ ID NO: 52427 - DNA, 25 bp, Canis familiaris
aagggtacaacctagcagctaatag

SEQ ID NO: 52428 - DNA, 25 bp, Canis familiaris
aagggtcagacactaacaggcaaga

SEQ ID NO: 52429 - DNA, 25 bp, Canis familiaris
aagggtcagagcaacaggggcctgt

SEQ ID NO: 52430 - DNA, 25 bp, Canis familiaris
aagggagcagtggacggaggcctgt

SEQ ID NO: 52431 - DNA, 25 bp, Canis familiaris
aagggagagggaacaaggccatcgg

SEQ ID NO: 52432 - DNA, 25 bp, Canis familiaris
aaggcagggaggatcgtgtgcccgg

SEQ ID NO: 52433 - DNA, 25 bp, Canis familiaris
aatgaagctcgaggttcaggccaca

SEQ ID NO: 52434 - DNA, 25 bp, Canis familiaris
aagtggctcagaagcacctggacca

SEQ ID NO: 52435 - DNA, 25 bp, Canis familiaris
aagggccaggaagctgcagaacagg

SEQ ID NO: 52436 - DNA, 25 bp, Canis familiaris
aagggcagaggctttggcaagacag

SEQ ID NO: 52437 - DNA, 25 bp, Canis familiaris
aagtggaccatgtctgtggcagtga

SEQ ID NO: 52438 - DNA, 25 bp, Canis familiaris
aagggactgcagcctgcgagttggc

SEQ ID NO: 52439 - DNA, 25 bp, Canis familiaris
aagggacatctgaccaggttggatc

SEQ ID NO: 52440 - DNA, 25 bp, Canis familiaris
aaggaagccagaggctggttgggcc

SEQ ID NO: 52441 - DNA, 25 bp, Canis familiaris
aagtggagaagaccggcgtgtgccc

SEQ ID NO: 52442 - DNA, 25 bp, Canis familiaris
aaggtgagcaacttggtgcgggcct

SEQ ID NO: 52443 - DNA, 25 bp, Canis familiaris
aagggagcaggtgggtgaggcccca

SEQ ID NO: 52444 - DNA, 25 bp, Canis familiaris
aaggcagagcggaggggaccgcgtc

SEQ ID NO: 52445 - DNA, 25 bp, Canis familiaris
cataagaccggtgtcaggacccgct

SEQ ID NO: 52446 - DNA, 25 bp, Canis familiaris
aaggaccaaggcacgaacacgctgt

SEQ ID NO: 52447 - DNA, 25 bp, Canis familiaris
aaggagccaagccaccagaagggcc

SEQ ID NO: 52448 - DNA, 25 bp, Canis familiaris
aaggagcccgtggctctgaaggtcc

SEQ ID NO: 52449 - DNA, 25 bp, Canis familiaris
aaggacctctgggatcaccaggacc

SEQ ID NO: 52450 - DNA, 25 bp, Canis familiaris
aaggtgccttggaatcagacatggt

SEQ ID NO: 52451 - DNA, 25 bp, Canis familiaris
aagggcatgtatcccatcaattgga

SEQ ID NO: 52452 - DNA, 25 bp, Canis familiaris
aaggcacattgccccatgaaggcct

SEQ ID NO: 52453 - DNA, 25 bp, Canis familiaris
aaggacttggagacggtggcatcta

SEQ ID NO: 52454 - DNA, 25 bp, Canis familiaris
aaggtctttatcagctggctcttac

SEQ ID NO: 52455 - DNA, 25 bp, Canis familiaris
aaggtgcctgttactgtggctcact

SEQ ID NO: 52456 - DNA, 25 bp, Canis familiaris
aagtggctctgaatttctggtctcc

SEQ ID NO: 52457 - DNA, 25 bp, Canis familiaris
aagggcgcaagaatgttttctccca

SEQ ID NO: 52458 - DNA, 25 bp, Canis familiaris
aaggggagatgatgcccttcccctt

SEQ ID NO: 52459 - DNA, 25 bp, Canis familiaris
aaggtggagaagccatcacagtccc

SEQ ID NO: 52460 - DNA, 25 bp, Canis familiaris
aaggtgaagagggctcctatctccc

SEQ ID NO: 52461 - DNA, 25 bp, Canis familiaris
aaggtaagagggctgcttcctgctc

SEQ ID NO: 52462 - DNA, 25 bp, Canis familiaris
aaggaaagatcgatttgcccctgtc

SEQ ID NO: 52463 - DNA, 25 bp, Canis familiaris
aaggaaatgtgccttggagcccggg

SEQ ID NO: 52464 - DNA, 25 bp, Canis familiaris
aagggatcattgggtggagcctctc

SEQ ID NO: 52465 - DNA, 25 bp, Canis familiaris
aagggatgtgctggagtgtggccct

SEQ ID NO: 52466 - DNA, 25 bp, Canis familiaris
aagggatatgctggccctgttctgt

SEQ ID NO: 52467 - DNA, 25 bp, Canis familiaris
aaggctaagctgcccttatactgaa

SEQ ID NO: 52468 - DNA, 25 bp, Canis familiaris
aaggtcaaggccttcttggctgatc

SEQ ID NO: 52469 - DNA, 25 bp, Canis familiaris
aaggtcaaggccttcttggctgatc

SEQ ID NO: 52470 - DNA, 25 bp, Canis familiaris
aagggccaggccaagttgtgttaag

SEQ ID NO: 52471 - DNA, 25 bp, Canis familiaris
aaggactagacccagatcttcttga

SEQ ID NO: 52472 - DNA, 25 bp, Canis familiaris
aaggtgggccacaagagttcttatg

SEQ ID NO: 52473 - DNA, 25 bp, Canis familiaris
aaggtgcaaacagaggttcttcaga

SEQ ID NO: 52474 - DNA, 25 bp, Canis familiaris
aaggtcatagactttgcagcttctt

SEQ ID NO: 52475 - DNA, 25 bp, Canis familiaris
aaggacacgaccagcagcaaatcca

SEQ ID NO: 52476 - DNA, 25 bp, Canis familiaris
aaggacaggacttctccaatagccc

SEQ ID NO: 52477 - DNA, 25 bp, Canis familiaris
aaggctcaggacacggagctggccg

SEQ ID NO: 52478 - DNA, 25 bp, Canis familiaris
aaggatccagccaaaggatgccccg

SEQ ID NO: 52479 - DNA, 25 bp, Canis familiaris
aaggctgccagcccaaagagggacc

SEQ ID NO: 52480 - DNA, 25 bp, Canis familiaris
aaggcagacagcacacaactaggaa

SEQ ID NO: 52481 - DNA, 25 bp, Canis familiaris
aaggagccagctcgcaagtttggcg

SEQ ID NO: 52482 - DNA, 25 bp, Canis familiaris
aagggcacatgccctagtttctcct

SEQ ID NO: 52483 - DNA, 25 bp, Canis familiaris
aagggattccctaatatgtatacta

SEQ ID NO: 52484 - DNA, 25 bp, Canis familiaris
aaggatgttccctttgatggtccga

SEQ ID NO: 52485 - DNA, 25 bp, Canis familiaris
aaggaggtccactttcaattcctgt

SEQ ID NO: 52486 - DNA, 25 bp, Canis familiaris
aaggaagcctcaccttaatgtctct

SEQ ID NO: 52487 - DNA, 25 bp, Canis familiaris
aaggacagcctgcaggtccagatcc

SEQ ID NO: 52488 - DNA, 25 bp, Canis familiaris
aaggacacctggatgccgagttgga

SEQ ID NO: 52489 - DNA, 25 bp, Canis familiaris
aaggagaccggtagcatcttttcta

SEQ ID NO: 52490 - DNA, 25 bp, Canis familiaris
aaggaattcaggtgcagctctctcc

SEQ ID NO: 52491 - DNA, 25 bp, Canis familiaris
aaggaagtgaggccaggccctgcca

SEQ ID NO: 52492 - DNA, 25 bp, Canis familiaris
aaggaggtacatggcatggcccagc

SEQ ID NO: 52493 - DNA, 25 bp, Canis familiaris
aagggactatcagtggcgccactgc

SEQ ID NO: 52494 - DNA, 25 bp, Canis familiaris
aagggacatattggagctcaagctt

SEQ ID NO: 52495 - DNA, 25 bp, Canis familiaris
aaggagaccgctgagctgcgatgct

SEQ ID NO: 52496 - DNA, 25 bp, Canis familiaris
aagggagagcgcgtgtgcatgcgtg

SEQ ID NO: 52497 - DNA, 25 bp, Canis familiaris
aaggacaatgaggtgctgctgcaga

SEQ ID NO: 52498 - DNA, 25 bp, Canis familiaris
aagggcacatggggctgctgaagcc

SEQ ID NO: 52499 - DNA, 25 bp, Canis familiaris
aaggccagaggcactctgatcgcac

SEQ ID NO: 52500 - DNA, 25 bp, Canis familiaris
aaggacgatgggttcctcaacggct

SEQ ID NO: 52501 - DNA, 25 bp, Canis familiaris
aatgtgggagggctcctgagaccac

SEQ ID NO: 52502 - DNA, 25 bp, Canis familiaris
aagggttgaggcccctgagactagc

SEQ ID NO: 52503 - DNA, 25 bp, Canis familiaris
aaggtctgtaggggcactggacggc

SEQ ID NO: 52504 - DNA, 25 bp, Canis familiaris
aaggcatctcgggggactggaagac

SEQ ID NO: 52505 - DNA, 25 bp, Canis familiaris
aaggctccagtgtggtggcctatga

SEQ ID NO: 52506 - DNA, 25 bp, Canis familiaris
aaggctacttttgatgcgatctcta

SEQ ID NO: 52507 - DNA, 25 bp, Canis familiaris
aaggaactattcgtatccacaccag

SEQ ID NO: 52508 - DNA, 25 bp, Canis familiaris
aagggattttgtgacacacacacac

SEQ ID NO: 52509 - DNA, 25 bp, Canis familiaris
aagggatttctgtgcacaaccacca

SEQ ID NO: 52510 - DNA, 25 bp, Canis familiaris
aaggagaaatcctcagacaccacca

SEQ ID NO: 52511 - DNA, 25 bp, Canis familiaris
aaggggaagtttggacacacacaca

SEQ ID NO: 52512 - DNA, 25 bp, Canis familiaris
aatggccgaagttctgaataaagtg

SEQ ID NO: 52513 - DNA, 25 bp, Canis familiaris
aaggctgtaaatgccaagaaagatg

SEQ ID NO: 52514 - DNA, 25 bp, Canis familiaris
gaagtggtagccgccaagggttgtt

SEQ ID NO: 52515 - DNA, 25 bp, Canis familiaris
aaggtgtgccgcgggcacagtctgt

SEQ ID NO: 52516 - DNA, 25 bp, Canis familiaris
aaggctctgaccgggcaaggatgtg

SEQ ID NO: 52517 - DNA, 25 bp, Canis familiaris
aatgtctctggggtaaaggttgaat

SEQ ID NO: 52518 - DNA, 25 bp, Canis familiaris
aaggtgtgggccaagcaagagcttg

SEQ ID NO: 52519 - DNA, 25 bp, Canis familiaris
aaggtgctgagcgctgaggagatgg

SEQ ID NO: 52520 - DNA, 25 bp, Canis familiaris
aatggtcatgctgccgcaggatgat

SEQ ID NO: 52521 - DNA, 25 bp, Canis familiaris
aaggtcatgcacccacatgtggatt

SEQ ID NO: 52522 - DNA, 25 bp, Canis familiaris
aaggattcaagacatgtggtttcat

SEQ ID NO: 52523 - DNA, 25 bp, Canis familiaris
aagggtgaacagcagtggccttccg

SEQ ID NO: 52524 - DNA, 25 bp, Canis familiaris
aatggggccacgccgtggccctttg

SEQ ID NO: 52525 - DNA, 25 bp, Canis familiaris
aatggggtaaacggactgctcttgt

SEQ ID NO: 52526 - DNA, 25 bp, Canis familiaris
aaggggtgcaggtggacttctggtg

SEQ ID NO: 52527 - DNA, 25 bp, Canis familiaris
aaggggtggtggaagaggatgtggg

SEQ ID NO: 52528 - DNA, 25 bp, Canis familiaris
aaggctggggtcaggagcgggaggc

SEQ ID NO: 52529 - DNA, 25 bp, Canis familiaris
aaggcggtggagctgagccaggggc

SEQ ID NO: 52530 - DNA, 25 bp, Canis familiaris
aagggaggctatctgaggagggcga

SEQ ID NO: 52531 - DNA, 25 bp, Canis familiaris
aagggagtcctaaagcgacagacca

SEQ ID NO: 52532 - DNA, 25 bp, Canis familiaris
aattggttccaaatacaacacccag

SEQ ID NO: 52533 - DNA, 25 bp, Canis familiaris
aaggtggccgcaattgacaagcccc

SEQ ID NO: 52534 - DNA, 25 bp, Canis familiaris
aaggggagctgagggaccagcctgc

SEQ ID NO: 52535 - DNA, 25 bp, Canis familiaris
aaggggcatggagagtcctgcttcc

SEQ ID NO: 52536 - DNA, 25 bp, Canis familiaris
aaggaggcaggagcagatcgtgtgg

SEQ ID NO: 52537 - DNA, 25 bp, Canis familiaris
aaggggatggcagagccagtccgtg

SEQ ID NO: 52538 - DNA, 25 bp, Canis familiaris
aagggagggcagagctggtgcggct

SEQ ID NO: 52539 - DNA, 25 bp, Canis familiaris
aagggagcggagactgctggttcct

SEQ ID NO: 52540 - DNA, 25 bp, Canis familiaris
aatgtggagcggatcttggcccgag

SEQ ID NO: 52541 - DNA, 25 bp, Canis familiaris
aatgtgtatcgggaatctccccgtt

SEQ ID NO: 52542 - DNA, 25 bp, Canis familiaris
aatgttaatccgtatccaaccagat

SEQ ID NO: 52543 - DNA, 25 bp, Canis familiaris
aatgtctatgtcaagtttcggcgag

SEQ ID NO: 52544 - DNA, 25 bp, Canis familiaris
aaggctaacatcaaaatcggcgagt

SEQ ID NO: 52545 - DNA, 25 bp, Canis familiaris
aaggcttaactgaaactggtactga

SEQ ID NO: 52546 - DNA, 25 bp, Canis familiaris
aaggagtccattctgcactggtact

SEQ ID NO: 52547 - DNA, 25 bp, Canis familiaris
aaggagtccctgaatctctggtatg

SEQ ID NO: 52548 - DNA, 25 bp, Canis familiaris
aaggattcccacacgtggtgatgtt

SEQ ID NO: 52549 - DNA, 25 bp, Canis familiaris
aaggattgctgagcttctgtgctgg

SEQ ID NO: 52550 - DNA, 25 bp, Canis familiaris
aaggtagtgagcctgttctgtgggg

SEQ ID NO: 52551 - DNA, 25 bp, Canis familiaris
aatgggtgggggttctgatcagggt

SEQ ID NO: 52552 - DNA, 25 bp, Canis familiaris
aaggcttgctggtgggttagtggtc

SEQ ID NO: 52553 - DNA, 25 bp, Canis familiaris
aaggtcctgtcatggtttctgtggt

SEQ ID NO: 52554 - DNA, 25 bp, Canis familiaris
aaggctccattctggtaggcagggt

SEQ ID NO: 52555 - DNA, 25 bp, Canis familiaris
aaggctgcctcagaggtagtctggg

SEQ ID NO: 52556 - DNA, 25 bp, Canis familiaris
aaggatgccgcagaccattatctgg

SEQ ID NO: 52557 - DNA, 25 bp, Canis familiaris
aagggtcaggccacattgtctgggc

SEQ ID NO: 52558 - DNA, 25 bp, Canis familiaris
aagggtagagcatattcgttatagc

SEQ ID NO: 52559 - DNA, 25 bp, Canis familiaris
aagggttggcaaatttgtctctaga

SEQ ID NO: 52560 - DNA, 25 bp, Canis familiaris
aaggctttgccatactcattttaat

SEQ ID NO: 52561 - DNA, 25 bp, Canis familiaris
aaggccttgccatcctgtaataaat

SEQ ID NO: 52562 - DNA, 25 bp, Canis familiaris
aaggcctgaggcactcgggataaga

SEQ ID NO: 52563 - DNA, 25 bp, Canis familiaris
aatggcctgggctgtaaatgaaaag

SEQ ID NO: 52564 - DNA, 25 bp, Canis familiaris
aaggcagctaggtcagatggaaaca

SEQ ID NO: 52565 - DNA, 25 bp, Canis familiaris
aaggcacctgggctggaatccagat

SEQ ID NO: 52566 - DNA, 25 bp, Canis familiaris
aaggcaccttccatgtgaacacagt

SEQ ID NO: 52567 - DNA, 25 bp, Canis familiaris
aaggcctttttggctgataccatct

SEQ ID NO: 52568 - DNA, 25 bp, Canis familiaris
aagggtgtttgtgcttcagctttgt

SEQ ID NO: 52569 - DNA, 25 bp, Canis familiaris
aaggagagtactccttccgtgtgtg

SEQ ID NO: 52570 - DNA, 25 bp, Canis familiaris
aaggcaggtttctttcactgatggg

SEQ ID NO: 52571 - DNA, 25 bp, Canis familiaris
aaggtgtgtttctgcttggtggacc

SEQ ID NO: 52572 - DNA, 25 bp, Canis familiaris
aaggtggtatggtgtatggggaggt

SEQ ID NO: 52573 - DNA, 25 bp, Canis familiaris
aaggggcatatataggtgcagggga

SEQ ID NO: 52574 - DNA, 25 bp, Canis familiaris
aaggagaagtctcgtgggcaggggt

SEQ ID NO: 52575 - DNA, 25 bp, Canis familiaris
aaggcacaactcccgtagagttagt

SEQ ID NO: 52576 - DNA, 25 bp, Canis familiaris
aaggccaaccaggcaacaagttagg

SEQ ID NO: 52577 - DNA, 25 bp, Canis familiaris
aaggcccaccaaggcagactgttag

SEQ ID NO: 52578 - DNA, 25 bp, Canis familiaris
aaggagatcctaaggcaactgtttg

SEQ ID NO: 52579 - DNA, 25 bp, Canis familiaris
aaggtgttatcaacgcaacgattat

SEQ ID NO: 52580 - DNA, 25 bp, Canis familiaris
aaggttgttcaaagaatcatgtatg

SEQ ID NO: 52581 - DNA, 25 bp, Canis familiaris
aaggttgactggtagatatactagt

SEQ ID NO: 52582 - DNA, 25 bp, Canis familiaris
aaggtctgagcttagagctaccgca

SEQ ID NO: 52583 - DNA, 25 bp, Canis familiaris
aaggtggagcatactggctgaccct

SEQ ID NO: 52584 - DNA, 25 bp, Canis familiaris
aatggggatcagaggcgggccccac

SEQ ID NO: 52585 - DNA, 25 bp, Canis familiaris
aaggggaatgcccttgggcagccct

SEQ ID NO: 52586 - DNA, 25 bp, Canis familiaris
aatgggggaaagtctgggagcctgt

SEQ ID NO: 52587 - DNA, 25 bp, Canis familiaris
caaggagacgaggaccggggctctt

SEQ ID NO: 52588 - DNA, 25 bp, Canis familiaris
aaggagacgcatgagggactcgcct

SEQ ID NO: 52589 - DNA, 25 bp, Canis familiaris
aaggaacatggctgtggtctccagt

SEQ ID NO: 52590 - DNA, 25 bp, Canis familiaris
aaggagaagacggggtccacaggca

SEQ ID NO: 52591 - DNA, 25 bp, Canis familiaris
aaggcagaaatccaaacccagggca

SEQ ID NO: 52592 - DNA, 25 bp, Canis familiaris
aaggcagactctcaagaccaaggca

SEQ ID NO: 52593 - DNA, 25 bp, Canis familiaris
aaggctgatctggagacacagcgcc

SEQ ID NO: 52594 - DNA, 25 bp, Canis familiaris
aaggatgagctctgacagtgcccag

SEQ ID NO: 52595 - DNA, 25 bp, Canis familiaris
aatgggcagccatggcattgccagc

SEQ ID NO: 52596 - DNA, 25 bp, Canis familiaris
aatggtagcccagctatgacccata

SEQ ID NO: 52597 - DNA, 25 bp, Canis familiaris
aatggaagtcaacctatggccctca

SEQ ID NO: 52598 - DNA, 25 bp, Canis familiaris
aaggagattactgctctggctccta

SEQ ID NO: 52599 - DNA, 25 bp, Canis familiaris
aaggatattatctcttggctacaat

SEQ ID NO: 52600 - DNA, 25 bp, Canis familiaris
aaggctttacatatacagtctcatt

SEQ ID NO: 52601 - DNA, 25 bp, Canis familiaris
aaggcttaccactatcaagtattct

SEQ ID NO: 52602 - DNA, 25 bp, Canis familiaris
aaggttgatccactaaaactcctag

SEQ ID NO: 52603 - DNA, 25 bp, Canis familiaris
aaggagcttgcccaaacaactcgta

SEQ ID NO: 52604 - DNA, 25 bp, Canis familiaris
aaggatgctcagggaaagacacttt

SEQ ID NO: 52605 - DNA, 25 bp, Canis familiaris
aagggtccccagaagatgcagtttg

SEQ ID NO: 52606 - DNA, 25 bp, Canis familiaris
aaggagtcctcaggttggggctatt

SEQ ID NO: 52607 - DNA, 25 bp, Canis familiaris
aaggaggtctcgaatagagggattt

SEQ ID NO: 52608 - DNA, 25 bp, Canis familiaris
aaggaggtggctgcagaggggtctg

SEQ ID NO: 52609 - DNA, 25 bp, Canis familiaris
aaggtgagtgccgcagggatggcct

SEQ ID NO: 52610 - DNA, 25 bp, Canis familiaris
aaggtcggtcaggattcgtgtctct

SEQ ID NO: 52611 - DNA, 25 bp, Canis familiaris
aaggtcgcagaaacctcgattctcc

SEQ ID NO: 52612 - DNA, 25 bp, Canis familiaris
aaggccgaggagaccaggattgctc

SEQ ID NO: 52613 - DNA, 25 bp, Canis familiaris
aaggcccccagaagcaagtgagcac

SEQ ID NO: 52614 - DNA, 25 bp, Canis familiaris
aatgcgcgtcccgtgaaaggtgcaa

SEQ ID NO: 52615 - DNA, 25 bp, Canis familiaris
aatgggacccaacaatggcccacat

SEQ ID NO: 52616 - DNA, 25 bp, Canis familiaris
aatggagaccccatgaaatcgccca

SEQ ID NO: 52617 - DNA, 25 bp, Canis familiaris
aatggatcccccacaatgtcaagac

SEQ ID NO: 52618 - DNA, 25 bp, Canis familiaris
aaggacatcatacccctattgtaca

SEQ ID NO: 52619 - DNA, 25 bp, Canis familiaris
aaggacatcatacccctattgtaca

SEQ ID NO: 52620 - DNA, 25 bp, Canis familiaris
aaggatcttgaccatcttttgctcc

SEQ ID NO: 52621 - DNA, 25 bp, Canis familiaris
aaggacgtgcacagccttatgatcc

SEQ ID NO: 52622 - DNA, 25 bp, Canis familiaris
aaggatgcagtgtcccacttgtact

SEQ ID NO: 52623 - DNA, 25 bp, Canis familiaris
aaggtggtacacatgcatttaagaa

SEQ ID NO: 52624 - DNA, 25 bp, Canis familiaris
aaggtgttgaacatgactgtcacaa

SEQ ID NO: 52625 - DNA, 25 bp, Canis familiaris
aaggttgattttcgactgtcacagg

SEQ ID NO: 52626 - DNA, 25 bp, Canis familiaris
aaggttcttgttcattctcttgggt

SEQ ID NO: 52627 - DNA, 25 bp, Canis familiaris
aaggtcccatttctaacttggcagc

SEQ ID NO: 52628 - DNA, 25 bp, Canis familiaris
aaggtaacttttaaatctgattgag

SEQ ID NO: 52629 - DNA, 25 bp, Canis familiaris
aaggtaatattctttgctaatttga

SEQ ID NO: 52630 - DNA, 25 bp, Canis familiaris
aatggtcctatttttgtgaagaggg

SEQ ID NO: 52631 - DNA, 25 bp, Canis familiaris
aaggaccattttgttcagagtagca

SEQ ID NO: 52632 - DNA, 25 bp, Canis familiaris
aaggacacttgttgatcttcgacgc

SEQ ID NO: 52633 - DNA, 25 bp, Canis familiaris
aaggaaactgtcatctgtgggtgcc

SEQ ID NO: 52634 - DNA, 25 bp, Canis familiaris
aaggttcactgtatctgtagcggcc

SEQ ID NO: 52635 - DNA, 25 bp, Canis familiaris
aatggtggacgtgatctttgccgac

SEQ ID NO: 52636 - DNA, 25 bp, Canis familiaris
aaggctggaacctatttgcctcagt

SEQ ID NO: 52637 - DNA, 25 bp, Canis familiaris
aaggcttgtaaatttacccaatgca

SEQ ID NO: 52638 - DNA, 25 bp, Canis familiaris
aaggttgtggcattttcccaaagca

SEQ ID NO: 52639 - DNA, 25 bp, Canis familiaris
aaggttgcggtcaatgatgcccatt

SEQ ID NO: 52640 - DNA, 25 bp, Canis familiaris
aaggttgcggtcaatgatgcccatt

SEQ ID NO: 52641 - DNA, 25 bp, Canis familiaris
aaggtctgcagcctctggaggtact

SEQ ID NO: 52642 - DNA, 25 bp, Canis familiaris
aaggacatgacactggaaggtgacg

SEQ ID NO: 52643 - DNA, 25 bp, Canis familiaris
aaggcgtgacacgggcagttgacct

SEQ ID NO: 52644 - DNA, 25 bp, Canis familiaris
aaggctagtgcctggaattacctag

SEQ ID NO: 52645 - DNA, 25 bp, Canis familiaris
caacgttggtcttggaaggaccaag

SEQ ID NO: 52646 - DNA, 25 bp, Canis familiaris
aaggttgggtctggccaggatacca

SEQ ID NO: 52647 - DNA, 25 bp, Canis familiaris
aaggtctcttgtgaccagcgacacc

SEQ ID NO: 52648 - DNA, 25 bp, Canis familiaris
aaggcttctggtggttactgatccc

SEQ ID NO: 52649 - DNA, 25 bp, Canis familiaris
aaggatttgttgctcttttcctgct

SEQ ID NO: 52650 - DNA, 25 bp, Canis familiaris
aaggatcttttgcacttttatgatt

SEQ ID NO: 52651 - DNA, 25 bp, Canis familiaris
aaggattttctcttggttgtagatt

SEQ ID NO: 52652 - DNA, 25 bp, Canis familiaris
aaggaggattctgtggtttcgctgt

SEQ ID NO: 52653 - DNA, 25 bp, Canis familiaris
aaggtggagtcagttgtttggcggg

SEQ ID NO: 52654 - DNA, 25 bp, Canis familiaris
aaggtcagagtgggtggggggcctg

SEQ ID NO: 52655 - DNA, 25 bp, Canis familiaris
aaggaagagggtcagggctggcctg

SEQ ID NO: 52656 - DNA, 25 bp, Canis familiaris
aaggaagggacacggggatcgcctg

SEQ ID NO: 52657 - DNA, 25 bp, Canis familiaris
aaggaggggcaacgtgtggctcatc

SEQ ID NO: 52658 - DNA, 25 bp, Canis familiaris
aatgtggagcaggccgggtggctca

SEQ ID NO: 52659 - DNA, 25 bp, Canis familiaris
aaggtaaggcagcaggctgcgcata

SEQ ID NO: 52660 - DNA, 25 bp, Canis familiaris
aaggtaagtacaggctgctgctcta

SEQ ID NO: 52661 - DNA, 25 bp, Canis familiaris
aaggaaatcttctgcagagctgcta

SEQ ID NO: 52662 - DNA, 25 bp, Canis familiaris
aaggaatgatgcatgctacaaatta

SEQ ID NO: 52663 - DNA, 25 bp, Canis familiaris
aaggttgacagttacacagattgac

SEQ ID NO: 52664 - DNA, 25 bp, Canis familiaris
aaggtgtgagcacttacacctcgcc

SEQ ID NO: 52665 - DNA, 25 bp, Canis familiaris
aaggtaagagtttctcagggccaga

SEQ ID NO: 52666 - DNA, 25 bp, Canis familiaris
aaggattaagtttgtcagctgtcca

SEQ ID NO: 52667 - DNA, 25 bp, Canis familiaris
aaggatctgtagttgggctgcatgt

SEQ ID NO: 52668 - DNA, 25 bp, Canis familiaris
aaggtagtcatgcatggcgctgctt

SEQ ID NO: 52669 - DNA, 25 bp, Canis familiaris
aaggttctctgctagtatctcttca

SEQ ID NO: 52670 - DNA, 25 bp, Canis familiaris
aaggtttcttcactacttctatggt

SEQ ID NO: 52671 - DNA, 25 bp, Canis familiaris
aaggtttctaagtcagtttctgctg

SEQ ID NO: 52672 - DNA, 25 bp, Canis familiaris
aaggatttgtattctcactttctga

SEQ ID NO: 52673 - DNA, 25 bp, Canis familiaris
aaggttggctaactctttcctgaga

SEQ ID NO: 52674 - DNA, 25 bp, Canis familiaris
aaggtgtcttagatcttccctagtg

SEQ ID NO: 52675 - DNA, 25 bp, Canis familiaris
aatgggactctgtttcttacccact

SEQ ID NO: 52676 - DNA, 25 bp, Canis familiaris
aatgggttgggtgctacaccacctt

SEQ ID NO: 52677 - DNA, 25 bp, Canis familiaris
aaggtgatttttgctcaacaactat

SEQ ID NO: 52678 - DNA, 25 bp, Canis familiaris
aatgtgggttcgccctcaacaagtt

SEQ ID NO: 52679 - DNA, 25 bp, Canis familiaris
aaggccatggttctcaaaaagttga

SEQ ID NO: 52680 - DNA, 25 bp, Canis familiaris
aaggccaccgagcaaacaaaatctg

SEQ ID NO: 52681 - DNA, 25 bp, Canis familiaris
aaggcgatgccgagaagaccgaata

SEQ ID NO: 52682 - DNA, 25 bp, Canis familiaris
aaggagtccctctggaaccatataa

SEQ ID NO: 52683 - DNA, 25 bp, Canis familiaris
aaggctggactgtcagggaaccatt

SEQ ID NO: 52684 - DNA, 25 bp, Canis familiaris
aaggctggtgctcctggagagaccc

SEQ ID NO: 52685 - DNA, 25 bp, Canis familiaris
aaggtgtgagctgcttaataaaatt

SEQ ID NO: 52686 - DNA, 25 bp, Canis familiaris
aaggagctgggattcaaatgtaaat

SEQ ID NO: 52687 - DNA, 25 bp, Canis familiaris
aaggatgtggctgacacaagtgaaa

SEQ ID NO: 52688 - DNA, 25 bp, Canis familiaris
aaggcatggccagaaagcaagaaga

SEQ ID NO: 52689 - DNA, 25 bp, Canis familiaris
aaggcatggagagtcaaagcagtga

SEQ ID NO: 52690 - DNA, 25 bp, Canis familiaris
aaggagcgagaccaagagcggggcc

SEQ ID NO: 52691 - DNA, 25 bp, Canis familiaris
aaggcagctgaggcggggggaggcc

SEQ ID NO: 52692 - DNA, 25 bp, Canis familiaris
aaggcaatcgagccaggctggggcc

SEQ ID NO: 52693 - DNA, 25 bp, Canis familiaris
aaggccattgaggtactgcggcgcc

SEQ ID NO: 52694 - DNA, 25 bp, Canis familiaris
aaggaatggctggcggtgctgtgcc

SEQ ID NO: 52695 - DNA, 25 bp, Canis familiaris
aaggaaggtggggagcgtcagccac

SEQ ID NO: 52696 - DNA, 25 bp, Canis familiaris
aaggagcggtagtaacgccacctct

SEQ ID NO: 52697 - DNA, 25 bp, Canis familiaris
aaggatcttgtcagaaccaaccact

SEQ ID NO: 52698 - DNA, 25 bp, Canis familiaris
aaggatgtcttcagagaccctgctc

SEQ ID NO: 52699 - DNA, 25 bp, Canis familiaris
aaggagtggtgtttgatgtcacctc

SEQ ID NO: 52700 - DNA, 25 bp, Canis familiaris
aaggtatgtatttatgtgcccccaa

SEQ ID NO: 52701 - DNA, 25 bp, Canis familiaris
aaggtatgagatatctgcccaccac

SEQ ID NO: 52702 - DNA, 25 bp, Canis familiaris
aaggcatctgaggaactccgacaag

SEQ ID NO: 52703 - DNA, 25 bp, Canis familiaris
aaggctcaagaatttccaaaatgtt

SEQ ID NO: 52704 - DNA, 25 bp, Canis familiaris
aaggcacagaggttcttcaaagact

SEQ ID NO: 52705 - DNA, 25 bp, Canis familiaris
aaggtcagggattcctgtgaacact

SEQ ID NO: 52706 - DNA, 25 bp, Canis familiaris
aaggacggctgtgactggatccgct

SEQ ID NO: 52707 - DNA, 25 bp, Canis familiaris
aaggaggcgtgtgacacgtccttcc

SEQ ID NO: 52708 - DNA, 25 bp, Canis familiaris
aaggaggtgggcttacctggctatc

SEQ ID NO: 52709 - DNA, 25 bp, Canis familiaris
aaggaggaggcgagcactcttttgc

SEQ ID NO: 52710 - DNA, 25 bp, Canis familiaris
aaggagtagtctacgccttggcttc

SEQ ID NO: 52711 - DNA, 25 bp, Canis familiaris
aaggatcgagatcccggtcgaggtc

SEQ ID NO: 52712 - DNA, 25 bp, Canis familiaris
aaggtagacaccaaactcgatgcag

SEQ ID NO: 52713 - DNA, 25 bp, Canis familiaris
aatgttgaccactaaaccagaagag

SEQ ID NO: 52714 - DNA, 25 bp, Canis familiaris
aatgttcacagaatatggaccatga

SEQ ID NO: 52715 - DNA, 25 bp, Canis familiaris
aaggaaccatcatgtaccataacta

SEQ ID NO: 52716 - DNA, 25 bp, Canis familiaris
aaggccttactagcagtataactac

SEQ ID NO: 52717 - DNA, 25 bp, Canis familiaris
aaggcagtaaaagcagtatatattt

SEQ ID NO: 52718 - DNA, 25 bp, Canis familiaris
aaggcagtaaaagatgtttcatgta

SEQ ID NO: 52719 - DNA, 25 bp, Canis familiaris
aaggcagttaaatgtaaatgcgtag

SEQ ID NO: 52720 - DNA, 25 bp, Canis familiaris
aatgaattttgcacgtaactggtat

SEQ ID NO: 52721 - DNA, 25 bp, Canis familiaris
aatgttctcattactcgtcaacgtt

SEQ ID NO: 52722 - DNA, 25 bp, Canis familiaris
aatgtgtccgtcgtggatctgacgt

SEQ ID NO: 52723 - DNA, 25 bp, Canis familiaris
aaggtacagctcgtgagcatcatga

SEQ ID NO: 52724 - DNA, 25 bp, Canis familiaris
aaggatacctctgacatcatagccc

SEQ ID NO: 52725 - DNA, 25 bp, Canis familiaris
aaggagactccggcaacatatacac

SEQ ID NO: 52726 - DNA, 25 bp, Canis familiaris
aaggcagcaggcgcgcaaattaccc

SEQ ID NO: 52727 - DNA, 25 bp, Canis familiaris
aaggaaggccggcagatcaagccct

SEQ ID NO: 52728 - DNA, 25 bp, Canis familiaris
caaggaagcccaacaagaagggcct

SEQ ID NO: 52729 - DNA, 25 bp, Canis familiaris
aaggaaggccgattcaagttgacct

SEQ ID NO: 52730 - DNA, 25 bp, Canis familiaris
aattacagggccacacagacgtcgt

SEQ ID NO: 52731 - DNA, 25 bp, Canis familiaris
aatgtacaaacaaccaagccgtcca

SEQ ID NO: 52732 - DNA, 25 bp, Canis familiaris
aaggcacaaatcaccaggttgatgc

SEQ ID NO: 52733 - DNA, 25 bp, Canis familiaris
aaggagcaaagcttctcatacttga

SEQ ID NO: 52734 - DNA, 25 bp, Canis familiaris
aaggagatattgttgtgcctgccat

SEQ ID NO: 52735 - DNA, 25 bp, Canis familiaris
aaggaaaggagcagccgccatgtcc

SEQ ID NO: 52736 - DNA, 25 bp, Canis familiaris
aaggagcagggagtcctgtccttct

SEQ ID NO: 52737 - DNA, 25 bp, Canis familiaris
aaggaaggtgttgcgcaacttcttc

SEQ ID NO: 52738 - DNA, 25 bp, Canis familiaris
aaggataatgttccccaactgcatg

SEQ ID NO: 52739 - DNA, 25 bp, Canis familiaris
aaggcaaatgtccccaaagatcagc

SEQ ID NO: 52740 - DNA, 25 bp, Canis familiaris
aaggtagagctaaccaacaagcagc

SEQ ID NO: 52741 - DNA, 25 bp, Canis familiaris
aaggccaggttgagaaccctgccct

SEQ ID NO: 52742 - DNA, 25 bp, Canis familiaris
aatggcacggttagagggcgcttcc

SEQ ID NO: 52743 - DNA, 25 bp, Canis familiaris
aaggcacgttttagcgtctcttgtc

SEQ ID NO: 52744 - DNA, 25 bp, Canis familiaris
aaggcacgttggagctttcttgccc

SEQ ID NO: 52745 - DNA, 25 bp, Canis familiaris
aaggcatcggtgccacgcatcttca

SEQ ID NO: 52746 - DNA, 25 bp, Canis familiaris
aaggatctggtgcgccagtctactt

SEQ ID NO: 52747 - DNA, 25 bp, Canis familiaris
aaggctctggtctggagatgctttt

SEQ ID NO: 52748 - DNA, 25 bp, Canis familiaris
aaggctgagtactgggctgtctctt

SEQ ID NO: 52749 - DNA, 25 bp, Canis familiaris
aaggcaggtgactgccctgttctgt

SEQ ID NO: 52750 - DNA, 25 bp, Canis familiaris
aaggagatctacacgcacttcacgt

SEQ ID NO: 52751 - DNA, 25 bp, Canis familiaris
aaggagatctatattcatttgcact

SEQ ID NO: 52752 - DNA, 25 bp, Canis familiaris
aaggcgtgctttttattgatgtata

SEQ ID NO: 52753 - DNA, 25 bp, Canis familiaris
aaggctggacctatgattaactact

SEQ ID NO: 52754 - DNA, 25 bp, Canis familiaris
aaggccagtcctattcaacttagct

SEQ ID NO: 52755 - DNA, 25 bp, Canis familiaris
aaggccatcatccatatgcttgaag

SEQ ID NO: 52756 - DNA, 25 bp, Canis familiaris
aaggagctgacaatcatgtacaagg

SEQ ID NO: 52757 - DNA, 25 bp, Canis familiaris
aaggcagctgacgagagtgagagag

SEQ ID NO: 52758 - DNA, 25 bp, Canis familiaris
aaggctgtgcagaggctggaggagc

SEQ ID NO: 52759 - DNA, 25 bp, Canis familiaris
aaggctgtcagtagtgggaagcgga

SEQ ID NO: 52760 - DNA, 25 bp, Canis familiaris
aaggcatgtctttggggagtcggat

SEQ ID NO: 52761 - DNA, 25 bp, Canis familiaris
aaggattcttacccagaatatatga

SEQ ID NO: 52762 - DNA, 25 bp, Canis familiaris
aaggttcttgacttctgtcactgtg

SEQ ID NO: 52763 - DNA, 25 bp, Canis familiaris
aaggtagtagatttgttcatcgttc

SEQ ID NO: 52764 - DNA, 25 bp, Canis familiaris
aaggtcaatctgtcaaattcatagt

SEQ ID NO: 52765 - DNA, 25 bp, Canis familiaris
aaggtagcatcttctactctggagt

SEQ ID NO: 52766 - DNA, 25 bp, Canis familiaris
aaggtcagaacctagcctgagagtg

SEQ ID NO: 52767 - DNA, 25 bp, Canis familiaris
aatggaaggaccttgctcgcaggtg

SEQ ID NO: 52768 - DNA, 25 bp, Canis familiaris
aatggacgttgctttacgggtgtcg

SEQ ID NO: 52769 - DNA, 25 bp, Canis familiaris
aatggacgggctatacggctttctt

SEQ ID NO: 52770 - DNA, 25 bp, Canis familiaris
aaggacaaggctggtaccttttcat

SEQ ID NO: 52771 - DNA, 25 bp, Canis familiaris
aaggcagcaaggtcgtagctgtgtt

SEQ ID NO: 52772 - DNA, 25 bp, Canis familiaris
aaggagcaagggcatcgttgtcgtt

SEQ ID NO: 52773 - DNA, 25 bp, Canis familiaris
aatggactagtggtcagcagtgtgg

SEQ ID NO: 52774 - DNA, 25 bp, Canis familiaris
aatggcaacttggtaagccggtagc

SEQ ID NO: 52775 - DNA, 25 bp, Canis familiaris
aatggaacttcagtgatacttggta

SEQ ID NO: 52776 - DNA, 25 bp, Canis familiaris
aatgggcaattcatgaacataactg

SEQ ID NO: 52777 - DNA, 25 bp, Canis familiaris
aatggcagacttaagccctaacatt

SEQ ID NO: 52778 - DNA, 25 bp, Canis familiaris
aaggcagacacttagccagccaact

SEQ ID NO: 52779 - DNA, 25 bp, Canis familiaris
aaggagacaccttctatgctcaagc

SEQ ID NO: 52780 - DNA, 25 bp, Canis familiaris
aaggaacatctgccaatgactccag

SEQ ID NO: 52781 - DNA, 25 bp, Canis familiaris
aaggaagcttgcctgcatgagctcc

SEQ ID NO: 52782 - DNA, 25 bp, Canis familiaris
aaggaagcaggacgctgatcctctc

SEQ ID NO: 52783 - DNA, 25 bp, Canis familiaris
aaggcaagcgtgtcatctatcttcc

SEQ ID NO: 52784 - DNA, 25 bp, Canis familiaris
aaggagtgcactgcatcatgtccct

SEQ ID NO: 52785 - DNA, 25 bp, Canis familiaris
aaggactcatcatgatctcaccact

SEQ ID NO: 52786 - DNA, 25 bp, Canis familiaris
aaggacagtatgccattccacagcc

SEQ ID NO: 52787 - DNA, 25 bp, Canis familiaris
aaggagctggagctgtgcttgctcc

SEQ ID NO: 52788 - DNA, 25 bp, Canis familiaris
aaggcagtagagtggatggatcccg

SEQ ID NO: 52789 - DNA, 25 bp, Canis familiaris
aaggcagctaagtgagagcttcaag

SEQ ID NO: 52790 - DNA, 25 bp, Canis familiaris
aaggcacttcagcagagttccagag

SEQ ID NO: 52791 - DNA, 25 bp, Canis familiaris
aaggttccggagctgtccagaatgc

SEQ ID NO: 52792 - DNA, 25 bp, Canis familiaris
aatggtatccaatgtgttccaacac

SEQ ID NO: 52793 - DNA, 25 bp, Canis familiaris
aatgtggaccaagacatcccattcc

SEQ ID NO: 52794 - DNA, 25 bp, Canis familiaris
aatggaggaaacacatcgttgtcaa

SEQ ID NO: 52795 - DNA, 25 bp, Canis familiaris
aatggagggactttgctacttgtaa

SEQ ID NO: 52796 - DNA, 25 bp, Canis familiaris
aaggctggaacacttgctactggat

SEQ ID NO: 52797 - DNA, 25 bp, Canis familiaris
aaggctggatatccataccatatgg

SEQ ID NO: 52798 - DNA, 25 bp, Canis familiaris
aaggcagagcttgatcgccagtgga

SEQ ID NO: 52799 - DNA, 25 bp, Canis familiaris
aaggcagatgccacacagtttgaga

SEQ ID NO: 52800 - DNA, 25 bp, Canis familiaris
aaggcagacgctaaacctctgagcc

SEQ ID NO: 52801 - DNA, 25 bp, Canis familiaris
aaggagactgcagaagctccgtccc

SEQ ID NO: 52802 - DNA, 25 bp, Canis familiaris
aaggcatattgtggaacccgtcctg

SEQ ID NO: 52803 - DNA, 25 bp, Canis familiaris
aaggtattgggtaccctttgatgct

SEQ ID NO: 52804 - DNA, 25 bp, Canis familiaris
aaggttctgtagagggctttgagcc

SEQ ID NO: 52805 - DNA, 25 bp, Canis familiaris
aaggatgtgctgagtgtggccttct

SEQ ID NO: 52806 - DNA, 25 bp, Canis familiaris
aaggcttgctgtagtacctcaattt

SEQ ID NO: 52807 - DNA, 25 bp, Canis familiaris
aaggcctcttggttctacatagttt

SEQ ID NO: 52808 - DNA, 25 bp, Canis familiaris
aaggcacattttaattactagtatt

SEQ ID NO: 52809 - DNA, 25 bp, Canis familiaris
aaggcaatcttaaagtcaattttct

SEQ ID NO: 52810 - DNA, 25 bp, Canis familiaris
aaggttgctgtaaagttaccatgtt

SEQ ID NO: 52811 - DNA, 25 bp, Canis familiaris
aaggtttgcttgatgttacatgcaa

SEQ ID NO: 52812 - DNA, 25 bp, Canis familiaris
aaggtttgcttgatggttacaatgc

SEQ ID NO: 52813 - DNA, 25 bp, Canis familiaris
aaggtttcttgatttgtctcaacat

SEQ ID NO: 52814 - DNA, 25 bp, Canis familiaris
aaggatatttcctggactcagacgg

SEQ ID NO: 52815 - DNA, 25 bp, Canis familiaris
aaggctttggctttgtgaccatgac

SEQ ID NO: 52816 - DNA, 25 bp, Canis familiaris
aaggcctagatcgtttgagctcaga

SEQ ID NO: 52817 - DNA, 25 bp, Canis familiaris
aaggccaagatccattatcggaaga

SEQ ID NO: 52818 - DNA, 25 bp, Canis familiaris
aaggatcaacagacatttcgacaag

SEQ ID NO: 52819 - DNA, 25 bp, Canis familiaris
aaggacacatagacaagttgacaaa

SEQ ID NO: 52820 - DNA, 25 bp, Canis familiaris
aaggactcatgaccacagtccatgc

SEQ ID NO: 52821 - DNA, 25 bp, Canis familiaris
aatcgagcgagacctcaggctgagc

SEQ ID NO: 52822 - DNA, 25 bp, Canis familiaris
aaggacagcagcttctcggaatgca

SEQ ID NO: 52823 - DNA, 25 bp, Canis familiaris
aaggcagcaggctaccggacggcag

SEQ ID NO: 52824 - DNA, 25 bp, Canis familiaris
aaggaatgtttcttggcatccgctt

SEQ ID NO: 52825 - DNA, 25 bp, Canis familiaris
aaggatatttagaagcgccagcgct

SEQ ID NO: 52826 - DNA, 25 bp, Canis familiaris
aatggttatccaaggctccaggctt

SEQ ID NO: 52827 - DNA, 25 bp, Canis familiaris
aaggttccaagagtcttcgtgcatt

SEQ ID NO: 52828 - DNA, 25 bp, Canis familiaris
aaggttgctgagcagctcaacgggc

SEQ ID NO: 52829 - DNA, 25 bp, Canis familiaris
aaggatgtgctaaagacgagtgtgg

SEQ ID NO: 52830 - DNA, 25 bp, Canis familiaris
aatggatcgtaaagacaaattgttt

SEQ ID NO: 52831 - DNA, 25 bp, Canis familiaris
aatgtactggtagacaaaatgttta

SEQ ID NO: 52832 - DNA, 25 bp, Canis familiaris
aattctggccttgaaaaagatttgg

SEQ ID NO: 52833 - DNA, 25 bp, Canis familiaris
aattcggcctgtgcaaagtcaacgg

SEQ ID NO: 52834 - DNA, 25 bp, Canis familiaris
aaggcaggcaaagacaaccaacggc

SEQ ID NO: 52835 - DNA, 25 bp, Canis familiaris
aaggagtgctcaaggccatacctac

SEQ ID NO: 52836 - DNA, 25 bp, Canis familiaris
aaggatggctgcactgttaccacac

SEQ ID NO: 52837 - DNA, 25 bp, Canis familiaris
aaggatggctgcttcggatactaca

SEQ ID NO: 52838 - DNA, 25 bp, Canis familiaris
aaggttgctcactatggacagctaa

SEQ ID NO: 52839 - DNA, 25 bp, Canis familiaris
aaggttgcgcagtatgttcacatct

SEQ ID NO: 52840 - DNA, 25 bp, Canis familiaris
aaggttccaattttcacagcatcac

SEQ ID NO: 52841 - DNA, 25 bp, Canis familiaris
aaggcttccagaatttcctcaggca

SEQ ID NO: 52842 - DNA, 25 bp, Canis familiaris
aaggcctcactaagattctccagga

SEQ ID NO: 52843 - DNA, 25 bp, Canis familiaris
aaggagccactttatttctctagaa

SEQ ID NO: 52844 - DNA, 25 bp, Canis familiaris
aaggatccactgttcaggttctttg

SEQ ID NO: 52845 - DNA, 25 bp, Canis familiaris
aaggagccattttcagggtgctatt

SEQ ID NO: 52846 - DNA, 25 bp, Canis familiaris
aaggactcttatcaggatgagcttc

SEQ ID NO: 52847 - DNA, 25 bp, Canis familiaris
aaggagctgctgatgcgggagctgc

SEQ ID NO: 52848 - DNA, 25 bp, Canis familiaris
aatgtactgcgattgcggtacggta

SEQ ID NO: 52849 - DNA, 25 bp, Canis familiaris
aaggcagctggactggcagccaagg

SEQ ID NO: 52850 - DNA, 25 bp, Canis familiaris
aaggcacccagcagaggcgagggga

SEQ ID NO: 52851 - DNA, 25 bp, Canis familiaris
aaggcccagctggaagagccgggaa

SEQ ID NO: 52852 - DNA, 25 bp, Canis familiaris
aaggccaatgtggcaaaggctggct

SEQ ID NO: 52853 - DNA, 25 bp, Canis familiaris
aatggacattgtacaaaggtggatg

SEQ ID NO: 52854 - DNA, 25 bp, Canis familiaris
aaggcagctggtacgagcaagttta

SEQ ID NO: 52855 - DNA, 25 bp, Canis familiaris
aaggctctcagtaaagaaatctata

SEQ ID NO: 52856 - DNA, 25 bp, Canis familiaris
aatgtgccgagcttgaagaagaatt

SEQ ID NO: 52857 - DNA, 25 bp, Canis familiaris
aatggccaactgtaatggggaatat

SEQ ID NO: 52858 - DNA, 25 bp, Canis familiaris
aatgtaaatgcgtagatggaaggaa

SEQ ID NO: 52859 - DNA, 25 bp, Canis familiaris
aatgtgaacccgtcaggtatggagt

SEQ ID NO: 52860 - DNA, 25 bp, Canis familiaris
aaggcaactcatggtcaggaagggt

SEQ ID NO: 52861 - DNA, 25 bp, Canis familiaris
aaggccacacagctcattaaaggta

SEQ ID NO: 52862 - DNA, 25 bp, Canis familiaris
aatgggcactgcgggtctaaaggta

SEQ ID NO: 52863 - DNA, 25 bp, Canis familiaris
aatgggctgtgtgcaatgtaaggat

SEQ ID NO: 52864 - DNA, 25 bp, Canis familiaris
aaggcagcgtgtggccagtgtgagc

SEQ ID NO: 52865 - DNA, 25 bp, Canis familiaris
aaggcagcaggctagctcatgatgc

SEQ ID NO: 52866 - DNA, 25 bp, Canis familiaris
aaggcagtcatgttctctgtgctaa

SEQ ID NO: 52867 - DNA, 25 bp, Canis familiaris
aaggagctgctggttgactgttaca

SEQ ID NO: 52868 - DNA, 25 bp, Canis familiaris
aatggtgctgtggaggttctggaaa

SEQ ID NO: 52869 - DNA, 25 bp, Canis familiaris
aatgggaagcaacttttggcaaagc

SEQ ID NO: 52870 - DNA, 25 bp, Canis familiaris
aaggaaaatgagatttggtccacat

SEQ ID NO: 52871 - DNA, 25 bp, Canis familiaris
aaggaagtggtgtgtgatggtcaac

SEQ ID NO: 52872 - DNA, 25 bp, Canis familiaris
aatggttggcgtctgtgatggtcta

SEQ ID NO: 52873 - DNA, 25 bp, Canis familiaris
aatggtgtaccgctgtgaagatcta

SEQ ID NO: 52874 - DNA, 25 bp, Canis familiaris
aatggttaacatttctgaagccata

SEQ ID NO: 52875 - DNA, 25 bp, Canis familiaris
aatgtttaatggtctcccagccttt

SEQ ID NO: 52876 - DNA, 25 bp, Canis familiaris
aatgcttggagcctactaacagtgt

SEQ ID NO: 52877 - DNA, 25 bp, Canis familiaris
aatgttcagcacccgtatgtaatgt

SEQ ID NO: 52878 - DNA, 25 bp, Canis familiaris
gaattctcaacctgtgaatttggtt

SEQ ID NO: 52879 - DNA, 25 bp, Canis familiaris
aattctaaccagagcaagctttttt

SEQ ID NO: 52880 - DNA, 25 bp, Canis familiaris
caatttaacccataagttctcttag

SEQ ID NO: 52881 - DNA, 25 bp, Canis familiaris
aattcgatacttgattagtacgatt

SEQ ID NO: 52882 - DNA, 25 bp, Canis familiaris
aatgtaacctttttcagtcctgata

SEQ ID NO: 52883 - DNA, 25 bp, Canis familiaris
aaggctagccctagagtcagtccta

SEQ ID NO: 52884 - DNA, 25 bp, Canis familiaris
aaggcattcgccagagacagcacag

SEQ ID NO: 52885 - DNA, 25 bp, Canis familiaris
aaggctctggccttatatgcacact

SEQ ID NO: 52886 - DNA, 25 bp, Canis familiaris
aaggcatcatggtttcaacacactg

SEQ ID NO: 52887 - DNA, 25 bp, Canis familiaris
aaggcacaggttttagctggtggta

SEQ ID NO: 52888 - DNA, 25 bp, Canis familiaris
aatctcaacgtcactcacggtggga

SEQ ID NO: 52889 - DNA, 25 bp, Canis familiaris
aattgggagtatctacaggggtcat

SEQ ID NO: 52890 - DNA, 25 bp, Canis familiaris
aatttcagaatgtagtaagggatgt

SEQ ID NO: 52891 - DNA, 25 bp, Canis familiaris
aattgtttggaactaaaccatgtca

SEQ ID NO: 52892 - DNA, 25 bp, Canis familiaris
aatgtgcttaagtgtaaagttctac

SEQ ID NO: 52893 - DNA, 25 bp, Canis familiaris
aatggcggagagagtgcccctacta

SEQ ID NO: 52894 - DNA, 25 bp, Canis familiaris
aaggccgcagaaaggccttctccac

SEQ ID NO: 52895 - DNA, 25 bp, Canis familiaris
aaggccaggaaaatcgtgtcctgcc

SEQ ID NO: 52896 - DNA, 25 bp, Canis familiaris
aaggcaatgctaaaccgctggccac

SEQ ID NO: 52897 - DNA, 25 bp, Canis familiaris
aaggaagttgcatctggtggaacag

SEQ ID NO: 52898 - DNA, 25 bp, Canis familiaris
aaggaagttgctggctcttgaaacc

SEQ ID NO: 52899 - DNA, 25 bp, Canis familiaris
aaggaaacgtggcctatgcaacctc

SEQ ID NO: 52900 - DNA, 25 bp, Canis familiaris
aaggaaccagggcctgactacctat

SEQ ID NO: 52901 - DNA, 25 bp, Canis familiaris
aaggccagccagcaggtaaacctgt

SEQ ID NO: 52902 - DNA, 25 bp, Canis familiaris
aatggctccggcctggtgaaagccg

SEQ ID NO: 52903 - DNA, 25 bp, Canis familiaris
aaggcctggggacagacatcacggt

SEQ ID NO: 52904 - DNA, 25 bp, Canis familiaris
aaggacttgggagctagatgccgcg

SEQ ID NO: 52905 - DNA, 25 bp, Canis familiaris
aaggaagatggggttcagctgccgc

SEQ ID NO: 52906 - DNA, 25 bp, Canis familiaris
aatgtgaagcatccggttactgggc

SEQ ID NO: 52907 - DNA, 25 bp, Canis familiaris
aaggcagagtctgggatgtctcggg

SEQ ID NO: 52908 - DNA, 25 bp, Canis familiaris
aaggctggtaccggtgccgagaatt

SEQ ID NO: 52909 - DNA, 25 bp, Canis familiaris
aaggctgagtgacccagccctgaat

SEQ ID NO: 52910 - DNA, 25 bp, Canis familiaris
aaggcaggggtggagccacagccat

SEQ ID NO: 52911 - DNA, 25 bp, Canis familiaris
aaggcggcaggaagagctcaaccat

SEQ ID NO: 52912 - DNA, 25 bp, Canis familiaris
aaggcaggtgccaactgctgaacca

SEQ ID NO: 52913 - DNA, 25 bp, Canis familiaris
aaggaggctgccaaagccatgaccc

SEQ ID NO: 52914 - DNA, 25 bp, Canis familiaris
aatgtggccactgaacctggcctct

SEQ ID NO: 52915 - DNA, 25 bp, Canis familiaris
aatgatggctgatgaggccctggcc

SEQ ID NO: 52916 - DNA, 25 bp, Canis familiaris
aatgtgaacaaggccccatgccatc

SEQ ID NO: 52917 - DNA, 25 bp, Canis familiaris
aaggagacatatgacctcacctgct

SEQ ID NO: 52918 - DNA, 25 bp, Canis familiaris
aaggacatagacatcctaccgctgg

SEQ ID NO: 52919 - DNA, 25 bp, Canis familiaris
aaggactatgacatcctatccgctg

SEQ ID NO: 52920 - DNA, 25 bp, Canis familiaris
aaggagtcagcaactgtctcatccc

SEQ ID NO: 52921 - DNA, 25 bp, Canis familiaris
aaggagccagctaagactcagccca

SEQ ID NO: 52922 - DNA, 25 bp, Canis familiaris
aaggaccgtgaaggcatagcccctc

SEQ ID NO: 52923 - DNA, 25 bp, Canis familiaris
aatggatccgtgaaatctgagggca

SEQ ID NO: 52924 - DNA, 25 bp, Canis familiaris
aatgtgcatctgctgtatacccagg

SEQ ID NO: 52925 - DNA, 25 bp, Canis familiaris
aaggctgttttgaacccagaagagg

SEQ ID NO: 52926 - DNA, 25 bp, Canis familiaris
aatggtatttatgtgcctagtgggg

SEQ ID NO: 52927 - DNA, 25 bp, Canis familiaris
aatgtgtatttctgtctcaaggtca

SEQ ID NO: 52928 - DNA, 25 bp, Canis familiaris
aatggtacttcgtcccaatcgataa

SEQ ID NO: 52929 - DNA, 25 bp, Canis familiaris
aatttagccctgtctcaggcaaata

SEQ ID NO: 52930 - DNA, 25 bp, Canis familiaris
aatggttgccttgctcaacaaaaca

SEQ ID NO: 52931 - DNA, 25 bp, Canis familiaris
aatggaccacaactatcaacaaaac

SEQ ID NO: 52932 - DNA, 25 bp, Canis familiaris
aatgggctacattttctacccaaga

SEQ ID NO: 52933 - DNA, 25 bp, Canis familiaris
aatggccgagcttgttctgagcggt

SEQ ID NO: 52934 - DNA, 25 bp, Canis familiaris
aatggtcaattgttgcctggggttt

SEQ ID NO: 52935 - DNA, 25 bp, Canis familiaris
aaggccattctgttggcggagtctg

SEQ ID NO: 52936 - DNA, 25 bp, Canis familiaris
aaggccttctgattggttggctgcc

SEQ ID NO: 52937 - DNA, 25 bp, Canis familiaris
aaggctttctgttattgttgcacaa

SEQ ID NO: 52938 - DNA, 25 bp, Canis familiaris
aaggcccatctatgttgtaacatat

SEQ ID NO: 52939 - DNA, 25 bp, Canis familiaris
aaggcctaaacaattcttagcatat

SEQ ID NO: 52940 - DNA, 25 bp, Canis familiaris
caaggcttgaactgttctctagaga

SEQ ID NO: 52941 - DNA, 25 bp, Canis familiaris
aaggagataagcaagtctttcagac

SEQ ID NO: 52942 - DNA, 25 bp, Canis familiaris
aaggaataagcaggtctttcagacc

SEQ ID NO: 52943 - DNA, 25 bp, Canis familiaris
cctggcgtgaaaccggggagcaacg

SEQ ID NO: 52944 - DNA, 25 bp, Canis familiaris
aatgtactaagcattttcttaccat

SEQ ID NO: 52945 - DNA, 25 bp, Canis familiaris
aatgtccaaagtaccttctgtccac

SEQ ID NO: 52946 - DNA, 25 bp, Canis familiaris
aaggcaaaatctatcgtcttccacc

SEQ ID NO: 52947 - DNA, 25 bp, Canis familiaris
aaggcactgattgattattctccca

SEQ ID NO: 52948 - DNA, 25 bp, Canis familiaris
aaggagcatgttgattggaggccct

SEQ ID NO: 52949 - DNA, 25 bp, Canis familiaris
aaggacactgagcaagagaggccct

SEQ ID NO: 52950 - DNA, 25 bp, Canis familiaris
aaggcaccaggcctgagaagtctcc

SEQ ID NO: 52951 - DNA, 25 bp, Canis familiaris
aatgcctccagtgtaaggtttcatc

SEQ ID NO: 52952 - DNA, 25 bp, Canis familiaris
aaggctccgtggacaatgtcttctc

SEQ ID NO: 52953 - DNA, 25 bp, Canis familiaris
aaggctcttgagcaaagtcatctgt

SEQ ID NO: 52954 - DNA, 25 bp, Canis familiaris
aaggctcttcgtaaagacatctata

SEQ ID NO: 52955 - DNA, 25 bp, Canis familiaris
aatgtgtcactcaatttggacctat

SEQ ID NO: 52956 - DNA, 25 bp, Canis familiaris
aatggtactgacctgtccatccaat

SEQ ID NO: 52957 - DNA, 25 bp, Canis familiaris
aaggaagctgtcctgctagatggaa

SEQ ID NO: 52958 - DNA, 25 bp, Canis familiaris
aaggcatagcagtcattttgttaag

SEQ ID NO: 52959 - DNA, 25 bp, Canis familiaris
aaggctgcgcaggatcttcagttga

SEQ ID NO: 52960 - DNA, 25 bp, Canis familiaris
aaggctggatggacattatgtacgc

SEQ ID NO: 52961 - DNA, 25 bp, Canis familiaris
aaggcatcagatttgatctctgttt

SEQ ID NO: 52962 - DNA, 25 bp, Canis familiaris
aaggccagcttggattcatgctcta

SEQ ID NO: 52963 - DNA, 25 bp, Canis familiaris
aaggacgcttattagatcatctgag

SEQ ID NO: 52964 - DNA, 25 bp, Canis familiaris
aaggacgcttattagatcactgaga

SEQ ID NO: 52965 - DNA, 25 bp, Canis familiaris
aaggacgcttattagatcactgaga

SEQ ID NO: 52966 - DNA, 25 bp, Canis familiaris
aaggacgcttattagatcactgaga

SEQ ID NO: 52967 - DNA, 25 bp, Canis familiaris
aaggacgcttattagatcactgaga

SEQ ID NO: 52968 - DNA, 25 bp, Canis familiaris
aaggacgcttattagatcactgaga

SEQ ID NO: 52969 - DNA, 25 bp, Canis familiaris
aaggacgcttattagatcactgaga

SEQ ID NO: 52970 - DNA, 25 bp, Canis familiaris
aaggcccatgtaacacatcctgaat

SEQ ID NO: 52971 - DNA, 25 bp, Canis familiaris
aaggactagcattaccacattgatt

SEQ ID NO: 52972 - DNA, 25 bp, Canis familiaris
aaggactggcattcactgatgtgga

SEQ ID NO: 52973 - DNA, 25 bp, Canis familiaris
aatggacggatggactgttcacaca

SEQ ID NO: 52974 - DNA, 25 bp, Canis familiaris
aatgtggccgaggactttgattgca

SEQ ID NO: 52975 - DNA, 25 bp, Canis familiaris
aatggctgaggggagctcttcacca

SEQ ID NO: 52976 - DNA, 25 bp, Canis familiaris
aaggctgtgggcaaggtcatcccag

SEQ ID NO: 52977 - DNA, 25 bp, Canis familiaris
aaggctgtgggcaaggtcatccctg

SEQ ID NO: 52978 - DNA, 25 bp, Canis familiaris
aaggctggtgaggatggtcaccctg

SEQ ID NO: 52979 - DNA, 25 bp, Canis familiaris
aaggctgagcttcctgagtactgcc

SEQ ID NO: 52980 - DNA, 25 bp, Canis familiaris
aaggctgtgccaattgtgacctgcc

SEQ ID NO: 52981 - DNA, 25 bp, Canis familiaris
aaggctggccattcagctacaagcc

SEQ ID NO: 52982 - DNA, 25 bp, Canis familiaris
aatggcatcaccatcatgaaatgag

SEQ ID NO: 52983 - DNA, 25 bp, Canis familiaris
aaggcagcagcagcacagacacaac

SEQ ID NO: 52984 - DNA, 25 bp, Canis familiaris
aaggaagctgcagtgacacacacac

SEQ ID NO: 52985 - DNA, 25 bp, Canis familiaris
aatgtagagccattgcaatgcatca

SEQ ID NO: 52986 - DNA, 25 bp, Canis familiaris
aatggcagaccatgattgaagctca

SEQ ID NO: 52987 - DNA, 25 bp, Canis familiaris
aatggcaggccctagcagaacagca

SEQ ID NO: 52988 - DNA, 25 bp, Canis familiaris
aaggcagtgctccaagaaggacacc

SEQ ID NO: 52989 - DNA, 25 bp, Canis familiaris
aaggcgctggtgcagaacgacacgc

SEQ ID NO: 52990 - DNA, 25 bp, Canis familiaris
aaggcgctcgcgatgagtagacacc

SEQ ID NO: 52991 - DNA, 25 bp, Canis familiaris
aaggcctcgaggacagctatgaagg

SEQ ID NO: 52992 - DNA, 25 bp, Canis familiaris
aaggcttaaggcggcctacagagaa

SEQ ID NO: 52993 - DNA, 25 bp, Canis familiaris
gaaggcttaaggcggcctacagaga

SEQ ID NO: 52994 - DNA, 25 bp, Canis familiaris
aaggctttaagctggctctataaat

SEQ ID NO: 52995 - DNA, 25 bp, Canis familiaris
aatctttttgcatagccttaaaatc

SEQ ID NO: 52996 - DNA, 25 bp, Canis familiaris
aatgtttttcttcatttcaaaatat

SEQ ID NO: 52997 - DNA, 25 bp, Canis familiaris
aatgttttgtacacatttgactact

SEQ ID NO: 52998 - DNA, 25 bp, Canis familiaris
aatgtatagattccgtttgtcacca

SEQ ID NO: 52999 - DNA, 25 bp, Canis familiaris
aatgtaagtctgagtctttgtaatt

SEQ ID NO: 53000 - DNA, 25 bp, Canis familiaris
aatgatacgcctgaagtattgtggt

SEQ ID NO: 53001 - DNA, 25 bp, Canis familiaris
aatgattacctctggtgttgacagg

SEQ ID NO: 53002 - DNA, 25 bp, Canis familiaris
aatgattatttctggctggtgagct

SEQ ID NO: 53003 - DNA, 25 bp, Canis familiaris
aatgtggggatccctgcatggagtc

SEQ ID NO: 53004 - DNA, 25 bp, Canis familiaris
aatgtgaaggacactctgaatctct

SEQ ID NO: 53005 - DNA, 25 bp, Canis familiaris
aatgcatcaagagtgtccctaacct

SEQ ID NO: 53006 - DNA, 25 bp, Canis familiaris
aatggcaataataacctaaccctga

SEQ ID NO: 53007 - DNA, 25 bp, Canis familiaris
aatgctcaaaatcaagggacctctg

SEQ ID NO: 53008 - DNA, 25 bp, Canis familiaris
aaggcacaaattacagtggctcgtt

SEQ ID NO: 53009 - DNA, 25 bp, Canis familiaris
aaggcacgtatttatgtccctgact

SEQ ID NO: 53010 - DNA, 25 bp, Canis familiaris
aaggcagcacttattgatccctgtt

SEQ ID NO: 53011 - DNA, 25 bp, Canis familiaris
aaggcagactatatgtcaagccata

SEQ ID NO: 53012 - DNA, 25 bp, Canis familiaris
aaggctaatgtaatgtcaagctttg

SEQ ID NO: 53013 - DNA, 25 bp, Canis familiaris
aaggaaagtagtcagcgatattgta

SEQ ID NO: 53014 - DNA, 25 bp, Canis familiaris
aaggaaagtggtccagtggctccca

SEQ ID NO: 53015 - DNA, 25 bp, Canis familiaris
aaggccaagtggtggttgtccagca

SEQ ID NO: 53016 - DNA, 25 bp, Canis familiaris
aaggccaaagactaagttctgtagc

SEQ ID NO: 53017 - DNA, 25 bp, Canis familiaris
aaggcaaagatagatcgtccttctg

SEQ ID NO: 53018 - DNA, 25 bp, Canis familiaris
aaggcaagtgaatcttctgtcttcg

SEQ ID NO: 53019 - DNA, 25 bp, Canis familiaris
aaggaactgcaacctgctatctctt

SEQ ID NO: 53020 - DNA, 25 bp, Canis familiaris
aaggaaccagagctctgacccattg

SEQ ID NO: 53021 - DNA, 25 bp, Canis familiaris
aaggaacagagtctggaccccttgg

SEQ ID NO: 53022 - DNA, 25 bp, Canis familiaris
aatgggaaggatctgggcccagcct

SEQ ID NO: 53023 - DNA, 25 bp, Canis familiaris
aatgggaaggatgttcccgccagca

SEQ ID NO: 53024 - DNA, 25 bp, Canis familiaris
aatggagcagagcttttctgtcccc

SEQ ID NO: 53025 - DNA, 25 bp, Canis familiaris
aaggctcaaggttttcatttcccag

SEQ ID NO: 53026 - DNA, 25 bp, Canis familiaris
aatggccaaggctatcatggatttc

SEQ ID NO: 53027 - DNA, 25 bp, Canis familiaris
aatggcacactggcacacatttcta

SEQ ID NO: 53028 - DNA, 25 bp, Canis familiaris
aatgggaagctccactgtttttggc

SEQ ID NO: 53029 - DNA, 25 bp, Canis familiaris
aatgggatgactggagcccctggtg

SEQ ID NO: 53030 - DNA, 25 bp, Canis familiaris
aatgtggaacttgatcccaggaccc

SEQ ID NO: 53031 - DNA, 25 bp, Canis familiaris
aataggcattttgaactcgccccct

SEQ ID NO: 53032 - DNA, 25 bp, Canis familiaris
aatgggagttctgagagggcgcccg

SEQ ID NO: 53033 - DNA, 25 bp, Canis familiaris
aatggggaggtggcgaaggccgcgc

SEQ ID NO: 53034 - DNA, 25 bp, Canis familiaris
aatgtcctgggtccgaagtcagtgg

SEQ ID NO: 53035 - DNA, 25 bp, Canis familiaris
aatgttgttggtccatgaactcata

SEQ ID NO: 53036 - DNA, 25 bp, Canis familiaris
aatgatttggttgcatggaccccgc

SEQ ID NO: 53037 - DNA, 25 bp, Canis familiaris
aatgtcgggtgatcggcattgcttc

SEQ ID NO: 53038 - DNA, 25 bp, Canis familiaris
aatgtagggtcaagtaatctgctct

SEQ ID NO: 53039 - DNA, 25 bp, Canis familiaris
aaggcagcgtttctgaatcttctcg

SEQ ID NO: 53040 - DNA, 25 bp, Canis familiaris
aaggctggatttagctgtacttgac

SEQ ID NO: 53041 - DNA, 25 bp, Canis familiaris
aatggggatgttacctgctttccaa

SEQ ID NO: 53042 - DNA, 25 bp, Canis familiaris
aatgtgggttttgtattcaccaagg

SEQ ID NO: 53043 - DNA, 25 bp, Canis familiaris
aatggaagtttcctgtttgacccag

SEQ ID NO: 53044 - DNA, 25 bp, Canis familiaris
aaggaactattccattgttttctct

SEQ ID NO: 53045 - DNA, 25 bp, Canis familiaris
aaggacacttgtcattggatttcag

SEQ ID NO: 53046 - DNA, 25 bp, Canis familiaris
aaggcactttcattcattcgttgta

SEQ ID NO: 53047 - DNA, 25 bp, Canis familiaris
aaggcttctttattccaggtgtgac

SEQ ID NO: 53048 - DNA, 25 bp, Canis familiaris
aaggcttcttattcacgagtgtgag

SEQ ID NO: 53049 - DNA, 25 bp, Canis familiaris
aaggctctggaattctcaaggctgg

SEQ ID NO: 53050 - DNA, 25 bp, Canis familiaris
aaggctcggcagaacatgcgggcat

SEQ ID NO: 53051 - DNA, 25 bp, Canis familiaris
aaggctagtctgaacagtgtgctca

SEQ ID NO: 53052 - DNA, 25 bp, Canis familiaris
aaggctagagctttgagtgtccaag

SEQ ID NO: 53053 - DNA, 25 bp, Canis familiaris
aaggctcagatgcccagagatgctc

SEQ ID NO: 53054 - DNA, 25 bp, Canis familiaris
aaggcaaatgtctaggcattccttc

SEQ ID NO: 53055 - DNA, 25 bp, Canis familiaris
aaggcaaacctggagaatcctatcc

SEQ ID NO: 53056 - DNA, 25 bp, Canis familiaris
aatgtcaaatcctggtatccttccc

SEQ ID NO: 53057 - DNA, 25 bp, Canis familiaris
taagtcaaaccctttacctttgctg

SEQ ID NO: 53058 - DNA, 25 bp, Canis familiaris
aatgctaaatgcactttaactttta

SEQ ID NO: 53059 - DNA, 25 bp, Canis familiaris
aatgctgaaggcagtttcattttgc

SEQ ID NO: 53060 - DNA, 25 bp, Canis familiaris
aatgctgacaccagtagcttatgat

SEQ ID NO: 53061 - DNA, 25 bp, Canis familiaris
aatgggcccagaaatgtctgcatgt

SEQ ID NO: 53062 - DNA, 25 bp, Canis familiaris
aatggcaccatctagggctctggta

SEQ ID NO: 53063 - DNA, 25 bp, Canis familiaris
aatccctcctacactcaggtaaaag

SEQ ID NO: 53064 - DNA, 25 bp, Canis familiaris
catttttgtaacactcaggaaaata

SEQ ID NO: 53065 - DNA, 25 bp, Canis familiaris
aatccaaataaccttcagccaaaat

SEQ ID NO: 53066 - DNA, 25 bp, Canis familiaris
caaaaacaaaacacaccagaatcat

SEQ ID NO: 53067 - DNA, 25 bp, Canis familiaris
aaggaacaaaacagagcacggaaat

SEQ ID NO: 53068 - DNA, 25 bp, Canis familiaris
aaggaagcaaaaaaggctaagcaag

SEQ ID NO: 53069 - DNA, 25 bp, Canis familiaris
caaggaagcaaaaaaggctaagcaa

SEQ ID NO: 53070 - DNA, 25 bp, Canis familiaris
aaggcaagacacggacggctggtgc

SEQ ID NO: 53071 - DNA, 25 bp, Canis familiaris
aatacagagcacagagtcggcggga

SEQ ID NO: 53072 - DNA, 25 bp, Canis familiaris
aatgacagagccccatgtcttgagc

SEQ ID NO: 53073 - DNA, 25 bp, Canis familiaris
aatgacaaactggagccctgcagac

SEQ ID NO: 53074 - DNA, 25 bp, Canis familiaris
aatacaggaccctcagcagaatctg

SEQ ID NO: 53075 - DNA, 25 bp, Canis familiaris
aatgtcacagccactacggagactg

SEQ ID NO: 53076 - DNA, 25 bp, Canis familiaris
aatgtagccctagccagagatgaag

SEQ ID NO: 53077 - DNA, 25 bp, Canis familiaris
aatgtagtttgcttccgttgattaa

SEQ ID NO: 53078 - DNA, 25 bp, Canis familiaris
aatgtatttcagcccgtgtctaaaa

SEQ ID NO: 53079 - DNA, 25 bp, Canis familiaris
aatgtcgttcagcaccgattgggga

SEQ ID NO: 53080 - DNA, 25 bp, Canis familiaris
aatgtcagggcactggggtctggac

SEQ ID NO: 53081 - DNA, 25 bp, Canis familiaris
aatgaaggggctgggcacctaacct

SEQ ID NO: 53082 - DNA, 25 bp, Canis familiaris
aaggaaggagctgggccttacacca

SEQ ID NO: 53083 - DNA, 25 bp, Canis familiaris
caaggacgtagctagtccttccccg

SEQ ID NO: 53084 - DNA, 25 bp, Canis familiaris
aatgtgtcttactatacctatcccc

SEQ ID NO: 53085 - DNA, 25 bp, Canis familiaris
aatgttcctgaatagctgttttgcc

SEQ ID NO: 53086 - DNA, 25 bp, Canis familiaris
aatgtgacctaatgttcctgttgtg

SEQ ID NO: 53087 - DNA, 25 bp, Canis familiaris
aatggacccagagtatctcctgagg

SEQ ID NO: 53088 - DNA, 25 bp, Canis familiaris
aatggtagcctggctcatcttctga

SEQ ID NO: 53089 - DNA, 25 bp, Canis familiaris
aatggtagagtgcctcctttagagg

SEQ ID NO: 53090 - DNA, 25 bp, Canis familiaris
caatggcaaaggcctccttggactg

SEQ ID NO: 53091 - DNA, 25 bp, Canis familiaris
aatggccagggactcacctgtactg

SEQ ID NO: 53092 - DNA, 25 bp, Canis familiaris
aatggtctggaactccggagatcat

SEQ ID NO: 53093 - DNA, 25 bp, Canis familiaris
aaggctcggagaatccgggaatttg

SEQ ID NO: 53094 - DNA, 25 bp, Canis familiaris
aaggcttgtgagttcctggtttctt

SEQ ID NO: 53095 - DNA, 25 bp, Canis familiaris
aaggctctgtatatgatctggtttc

SEQ ID NO: 53096 - DNA, 25 bp, Canis familiaris
aaggctgtgtatagtccatttccca

SEQ ID NO: 53097 - DNA, 25 bp, Canis familiaris
aaggctgattgaatgtctattatgc

SEQ ID NO: 53098 - DNA, 25 bp, Canis familiaris
aatgtctattcatgtcttttgccca

SEQ ID NO: 53099 - DNA, 25 bp, Canis familiaris
aaggctgcaaaaccgtgttcaccaa

SEQ ID NO: 53100 - DNA, 25 bp, Canis familiaris
aaggcagcgaaagcgtttggcttgg

SEQ ID NO: 53101 - DNA, 25 bp, Canis familiaris
aatgaaaaaagctgtttggggtgca

SEQ ID NO: 53102 - DNA, 25 bp, Canis familiaris
aatgtcagaaatgtagggggcaggg

SEQ ID NO: 53103 - DNA, 25 bp, Canis familiaris
aatgtcaaaattatgggctgcctgg

SEQ ID NO: 53104 - DNA, 25 bp, Canis familiaris
aatgttctagttctgtggccagctg

SEQ ID NO: 53105 - DNA, 25 bp, Canis familiaris
aaggctctagtatctgtgggcagca

SEQ ID NO: 53106 - DNA, 25 bp, Canis familiaris
aaggctctgagttgttcgtggcagc

SEQ ID NO: 53107 - DNA, 25 bp, Canis familiaris
aaggccgagaggagcttgagcagct

SEQ ID NO: 53108 - DNA, 25 bp, Canis familiaris
aaggcccaggtggagttgtcagctg

SEQ ID NO: 53109 - DNA, 25 bp, Canis familiaris
aaggccttgttggcaatactcctgt

SEQ ID NO: 53110 - DNA, 25 bp, Canis familiaris
aatgggttctctggcacaacctatg

SEQ ID NO: 53111 - DNA, 25 bp, Canis familiaris
aaggctgtactagtgcaggtcctca

SEQ ID NO: 53112 - DNA, 25 bp, Canis familiaris
aaggcactaccagtatgctgtctcc

SEQ ID NO: 53113 - DNA, 25 bp, Canis familiaris
aaggcagatatggcacttgcacccc

SEQ ID NO: 53114 - DNA, 25 bp, Canis familiaris
aatggcataatttcactcagccccg

SEQ ID NO: 53115 - DNA, 25 bp, Canis familiaris
aaggctaaagaactggccaccaagc

SEQ ID NO: 53116 - DNA, 25 bp, Canis familiaris
aaggctccaggtaaggccaaaagca

SEQ ID NO: 53117 - DNA, 25 bp, Canis familiaris
aaggcaccaggtagtagcaatagaa

SEQ ID NO: 53118 - DNA, 25 bp, Canis familiaris
aaggcaccagacccaacatatacaa

SEQ ID NO: 53119 - DNA, 25 bp, Canis familiaris
aaggccaagtgccgcaacgttcaac

SEQ ID NO: 53120 - DNA, 25 bp, Canis familiaris
aaggcaaagttcgagacaagctcaa

SEQ ID NO: 53121 - DNA, 25 bp, Canis familiaris
aaggcaattgcattcctatctacca

SEQ ID NO: 53122 - DNA, 25 bp, Canis familiaris
aatgtatcattgttggattctgacc

SEQ ID NO: 53123 - DNA, 25 bp, Canis familiaris
aatggcacattcttcacaatttccg

SEQ ID NO: 53124 - DNA, 25 bp, Canis familiaris
aatggcaatggtatcagaattcctc

SEQ ID NO: 53125 - DNA, 25 bp, Canis familiaris
aatgaactggtccgcaccaagaccc

SEQ ID NO: 53126 - DNA, 25 bp, Canis familiaris
aatgaactggtccgcaccaagaccc

SEQ ID NO: 53127 - DNA, 25 bp, Canis familiaris
aatgaggcagtgcagggctcgaacc

SEQ ID NO: 53128 - DNA, 25 bp, Canis familiaris
aatgaggcaatccggtgctgagtcc

SEQ ID NO: 53129 - DNA, 25 bp, Canis familiaris
aatggcgtgatacggttgactcacg

SEQ ID NO: 53130 - DNA, 25 bp, Canis familiaris
aatgccatgctgatcggggaccaga

SEQ ID NO: 53131 - DNA, 25 bp, Canis familiaris
aaggctgctgttctggaggccatga

SEQ ID NO: 53132 - DNA, 25 bp, Canis familiaris
aaggctgcgctcttgatgagggcca

SEQ ID NO: 53133 - DNA, 25 bp, Canis familiaris
aaggccccagtgtagaggcttctgc

SEQ ID NO: 53134 - DNA, 25 bp, Canis familiaris
aaggcccagaggtggcctgtggctt

SEQ ID NO: 53135 - DNA, 25 bp, Canis familiaris
aaggccctgaggtaggaccatactt

SEQ ID NO: 53136 - DNA, 25 bp, Canis familiaris
aaggccgcataagtaggacctggga

SEQ ID NO: 53137 - DNA, 25 bp, Canis familiaris
aaggccgtgacattcaggagccagg

SEQ ID NO: 53138 - DNA, 25 bp, Canis familiaris
aaggccctgagtagaggaccaggtg

SEQ ID NO: 53139 - DNA, 25 bp, Canis familiaris
aaggctctctggtggaagggcagct

SEQ ID NO: 53140 - DNA, 25 bp, Canis familiaris
aaggctccgggggaagatgcacaga

SEQ ID NO: 53141 - DNA, 25 bp, Canis familiaris
aatcgcatccgggccaattggaaat

SEQ ID NO: 53142 - DNA, 25 bp, Canis familiaris
aatggactcggtgctcaatggggtt

SEQ ID NO: 53143 - DNA, 25 bp, Canis familiaris
aatggccctggaacagccttggagt

SEQ ID NO: 53144 - DNA, 25 bp, Canis familiaris
aaggcacactggtgctctgctttag

SEQ ID NO: 53145 - DNA, 25 bp, Canis familiaris
aaggcatactggttgctcttgggga

SEQ ID NO: 53146 - DNA, 25 bp, Canis familiaris
aaggctctgtagtgcctcagaggga

SEQ ID NO: 53147 - DNA, 25 bp, Canis familiaris
aaggctgtgaagtcctccacaggcc

SEQ ID NO: 53148 - DNA, 25 bp, Canis familiaris
aaggctgtgaagtcctccacaggcc

SEQ ID NO: 53149 - DNA, 25 bp, Canis familiaris
aaggctgtgaagtcctccacaggcc

SEQ ID NO: 53150 - DNA, 25 bp, Canis familiaris
aaggctgtgaagtcctccacaggcc

SEQ ID NO: 53151 - DNA, 25 bp, Canis familiaris
aaggctgtgaagtcctccacaggcc

SEQ ID NO: 53152 - DNA, 25 bp, Canis familiaris
aatgtgtgtgaagcccacaaggttt

SEQ ID NO: 53153 - DNA, 25 bp, Canis familiaris
aatgagtcataatcagcatcacgga

SEQ ID NO: 53154 - DNA, 25 bp, Canis familiaris
aatgttctaagccattgcataggaa

SEQ ID NO: 53155 - DNA, 25 bp, Canis familiaris
aatgtctccaagcacatgattagaa

SEQ ID NO: 53156 - DNA, 25 bp, Canis familiaris
aatgtttaaggactgcttagcatta

SEQ ID NO: 53157 - DNA, 25 bp, Canis familiaris
aatgtggtaatgtattttgcagcta

SEQ ID NO: 53158 - DNA, 25 bp, Canis familiaris
aatggaagactctgctttgcagcta

SEQ ID NO: 53159 - DNA, 25 bp, Canis familiaris
aaggcacgaacacgctgtgtgctgt

SEQ ID NO: 53160 - DNA, 25 bp, Canis familiaris
aaggctcgcaagaagcttctggctg

SEQ ID NO: 53161 - DNA, 25 bp, Canis familiaris
aatgtccccaaagatcagccttaaa

SEQ ID NO: 53162 - DNA, 25 bp, Canis familiaris
aatgtcccccaagatcagacttaaa

SEQ ID NO: 53163 - DNA, 25 bp, Canis familiaris
aatgggaaccaatgtaccgtgataa

SEQ ID NO: 53164 - DNA, 25 bp, Canis familiaris
aatgagggacacataggaccagggt

SEQ ID NO: 53165 - DNA, 25 bp, Canis familiaris
aatggggacattgtgggcctgaggg

SEQ ID NO: 53166 - DNA, 25 bp, Canis familiaris
aatggggacagtgagtgtgcggggt

SEQ ID NO: 53167 - DNA, 25 bp, Canis familiaris
aatggtgtgtttgtgggtgttggtt

SEQ ID NO: 53168 - DNA, 25 bp, Canis familiaris
aatggctgttgatggtgggtgtggg

SEQ ID NO: 53169 - DNA, 25 bp, Canis familiaris
aaggctgttgagtcttggtgtctgg

SEQ ID NO: 53170 - DNA, 25 bp, Canis familiaris
aattggcttcaggcttggatgggcg

SEQ ID NO: 53171 - DNA, 25 bp, Canis familiaris
aatgttctccactctgactgtgagc

SEQ ID NO: 53172 - DNA, 25 bp, Canis familiaris
aatggtctccaagcagacctgggca

SEQ ID NO: 53173 - DNA, 25 bp, Canis familiaris
aaggcttccaatgaagatctgcatg

SEQ ID NO: 53174 - DNA, 25 bp, Canis familiaris
aaggcatgtgccattagcactgttg

SEQ ID NO: 53175 - DNA, 25 bp, Canis familiaris
aatgagcatgtgtgaggagccagaa

SEQ ID NO: 53176 - DNA, 25 bp, Canis familiaris
aatgatgatggcagcagtgacccta

SEQ ID NO: 53177 - DNA, 25 bp, Canis familiaris
aatgtatggcatcggtgcttcgctt

SEQ ID NO: 53178 - DNA, 25 bp, Canis familiaris
aatttggggtgtgctccttagagaa

SEQ ID NO: 53179 - DNA, 25 bp, Canis familiaris
aattgtgggggagagccttattcct

SEQ ID NO: 53180 - DNA, 25 bp, Canis familiaris
cttttagtggggaggctcacttcct

SEQ ID NO: 53181 - DNA, 25 bp, Canis familiaris
gcgttgtacgggtgggaggttctat

SEQ ID NO: 53182 - DNA, 25 bp, Canis familiaris
ggtttaccaaaagagaaggccatga

SEQ ID NO: 53183 - DNA, 25 bp, Canis familiaris
ggttcccaaagatccgaatctccta

SEQ ID NO: 53184 - DNA, 25 bp, Canis familiaris
aatgtcccacggttgtcgtatcatc

SEQ ID NO: 53185 - DNA, 25 bp, Canis familiaris
aaggccacaagcctgttggtgtctc

SEQ ID NO: 53186 - DNA, 25 bp, Canis familiaris
aaggcagacctattttgtgtgtctt

SEQ ID NO: 53187 - DNA, 25 bp, Canis familiaris
aaggctgacctgactattgttgtgt

SEQ ID NO: 53188 - DNA, 25 bp, Canis familiaris
aaggctcggctgatatttgtcgctg

SEQ ID NO: 53189 - DNA, 25 bp, Canis familiaris
aaggcgggggtaaggtgctgctgtt

SEQ ID NO: 53190 - DNA, 25 bp, Canis familiaris
aatggtgggggttagctgatgggaa

SEQ ID NO: 53191 - DNA, 25 bp, Canis familiaris
aatgggaggagccttccgagtggag

SEQ ID NO: 53192 - DNA, 25 bp, Canis familiaris
aatgacgtggacggcgttcaggggc

SEQ ID NO: 53193 - DNA, 25 bp, Canis familiaris
aatgacgtcgctctatgttgggggc

SEQ ID NO: 53194 - DNA, 25 bp, Canis familiaris
aatgggccctgctttttgtggcagg

SEQ ID NO: 53195 - DNA, 25 bp, Canis familiaris
aaggccacaggcattgcttgaggag

SEQ ID NO: 53196 - DNA, 25 bp, Canis familiaris
aaggcttcaagctttgctgctatgt

SEQ ID NO: 53197 - DNA, 25 bp, Canis familiaris
aaggctctggagctgtggatgcagt

SEQ ID NO: 53198 - DNA, 25 bp, Canis familiaris
aaggctctcagacctggagatcctg

SEQ ID NO: 53199 - DNA, 25 bp, Canis familiaris
aaggcttctgcatctgatactttga

SEQ ID NO: 53200 - DNA, 25 bp, Canis familiaris
aaggctatggcttttcagtttaaga

SEQ ID NO: 53201 - DNA, 25 bp, Canis familiaris
aaggctctggattagctcttttaaa

SEQ ID NO: 53202 - DNA, 25 bp, Canis familiaris
aaggcgctacaatgttatttcagga

SEQ ID NO: 53203 - DNA, 25 bp, Canis familiaris
aaggctccagcattgttctatttct

SEQ ID NO: 53204 - DNA, 25 bp, Canis familiaris
aaggccatcaatagcttctttcttg

SEQ ID NO: 53205 - DNA, 25 bp, Canis familiaris
aatggctctcatgtgttttgacttg

SEQ ID NO: 53206 - DNA, 25 bp, Canis familiaris
aatggctgattttgtctttggtttt

SEQ ID NO: 53207 - DNA, 25 bp, Canis familiaris
aatgggattcattggcttttttgtg

SEQ ID NO: 53208 - DNA, 25 bp, Canis familiaris
aatgaggtggcatcagttccttgct

SEQ ID NO: 53209 - DNA, 25 bp, Canis familiaris
aatgtactgtgctcactttcttttc

SEQ ID NO: 53210 - DNA, 25 bp, Canis familiaris
aatgttggctaggcaagttcagtta

SEQ ID NO: 53211 - DNA, 25 bp, Canis familiaris
aatgtctgcagttacaatggtagca

SEQ ID NO: 53212 - DNA, 25 bp, Canis familiaris
aaggctgagaattactgagtgaggg

SEQ ID NO: 53213 - DNA, 25 bp, Canis familiaris
aaggctacaattgctggtggtggtg

SEQ ID NO: 53214 - DNA, 25 bp, Canis familiaris
aaggccacagttgttgtgtgtgtgt

SEQ ID NO: 53215 - DNA, 25 bp, Canis familiaris
aaggcccatcttgtattattgtgct

SEQ ID NO: 53216 - DNA, 25 bp, Canis familiaris
aaggctgtctttagtattcagttgt

SEQ ID NO: 53217 - DNA, 25 bp, Canis familiaris
aatgactttaaactatttgatatgt

SEQ ID NO: 53218 - DNA, 25 bp, Canis familiaris
aatggatttatctatttgttgctat

SEQ ID NO: 53219 - DNA, 25 bp, Canis familiaris
aatggcttctctgatatttattata

SEQ ID NO: 53220 - DNA, 25 bp, Canis familiaris
aatggactcctgggatttcactgta

SEQ ID NO: 53221 - DNA, 25 bp, Canis familiaris
aatggaccaatgcctgatttgccct

SEQ ID NO: 53222 - DNA, 25 bp, Canis familiaris
aatgagagccaagcgcgagtccgct

SEQ ID NO: 53223 - DNA, 25 bp, Canis familiaris
aatggaggccagtggaggccatgct

SEQ ID NO: 53224 - DNA, 25 bp, Canis familiaris
aatggagggcagtgacattgcctgt

SEQ ID NO: 53225 - DNA, 25 bp, Canis familiaris
aatgagggcaagtaacattcctgtt

SEQ ID NO: 53226 - DNA, 25 bp, Canis familiaris
aatgggacacagccaacaacccact

SEQ ID NO: 53227 - DNA, 25 bp, Canis familiaris
aatggggcatcggcatgagcccccc

SEQ ID NO: 53228 - DNA, 25 bp, Canis familiaris
aatgggtcactggctcaggacccca

SEQ ID NO: 53229 - DNA, 25 bp, Canis familiaris
aatgggtactctgaatctctcacca

SEQ ID NO: 53230 - DNA, 25 bp, Canis familiaris
aatgaagcacccgaaattccagaca

SEQ ID NO: 53231 - DNA, 25 bp, Canis familiaris
aatgaagtcgtataatgagccacca

SEQ ID NO: 53232 - DNA, 25 bp, Canis familiaris
aatggagtggcttatgcaatgcagt

SEQ ID NO: 53233 - DNA, 25 bp, Canis familiaris
aatgtgagcttctgatgcatctgtg

SEQ ID NO: 53234 - DNA, 25 bp, Canis familiaris
aatgtgcagctgtcagccatccaga

SEQ ID NO: 53235 - DNA, 25 bp, Canis familiaris
aatgtgaatgaacctgccatgacaa

SEQ ID NO: 53236 - DNA, 25 bp, Canis familiaris
aatatgttgaacccctggaaatttg

SEQ ID NO: 53237 - DNA, 25 bp, Canis familiaris
cagtacttctaccccggaagaactg

SEQ ID NO: 53238 - DNA, 25 bp, Canis familiaris
aatatttccactttcggacgacctg

SEQ ID NO: 53239 - DNA, 25 bp, Canis familiaris
aatgttttcccaaaggacatacagt

SEQ ID NO: 53240 - DNA, 25 bp, Canis familiaris
aatgtactctccataaaattccagt

SEQ ID NO: 53241 - DNA, 25 bp, Canis familiaris
aatgttttcaattaaaactcaatgc

SEQ ID NO: 53242 - DNA, 25 bp, Canis familiaris
aatgttctccattcagaaaacttta

SEQ ID NO: 53243 - DNA, 25 bp, Canis familiaris
aatgcactttgctcagtaatacttg

SEQ ID NO: 53244 - DNA, 25 bp, Canis familiaris
aatgcatctgatcgagcctgtttac

SEQ ID NO: 53245 - DNA, 25 bp, Canis familiaris
aatgcactggtgtcttcatctggat

SEQ ID NO: 53246 - DNA, 25 bp, Canis familiaris
aatgcatcggaggcttaaggagggc

SEQ ID NO: 53247 - DNA, 25 bp, Canis familiaris
aatggcggagccgcagggggaacga

SEQ ID NO: 53248 - DNA, 25 bp, Canis familiaris
aatgggagtctcgtgcgggaggtca

SEQ ID NO: 53249 - DNA, 25 bp, Canis familiaris
aatgtgggttgccatcctgagtggt

SEQ ID NO: 53250 - DNA, 25 bp, Canis familiaris
aatgttgcgtgggtggcatgagttg

SEQ ID NO: 53251 - DNA, 25 bp, Canis familiaris
aatgtttggccagtggctgtttggc

SEQ ID NO: 53252 - DNA, 25 bp, Canis familiaris
aatgctttgcatgactgggtttcaa

SEQ ID NO: 53253 - DNA, 25 bp, Canis familiaris
aatgcattgtcctgtggtttgtgta

SEQ ID NO: 53254 - DNA, 25 bp, Canis familiaris
aatcatggtatctgttaatttgtat

SEQ ID NO: 53255 - DNA, 25 bp, Canis familiaris
aatgctgatttccacttaaatagtt

SEQ ID NO: 53256 - DNA, 25 bp, Canis familiaris
aatgctcaattcccaacacctgggt

SEQ ID NO: 53257 - DNA, 25 bp, Canis familiaris
aatgcaactgatgacaaccactttt

SEQ ID NO: 53258 - DNA, 25 bp, Canis familiaris
aatgtccgatccgacactatgtgtt

SEQ ID NO: 53259 - DNA, 25 bp, Canis familiaris
aatgatgccctggaacctgaagatt

SEQ ID NO: 53260 - DNA, 25 bp, Canis familiaris
aatgaccattgcgcccatgggacat

SEQ ID NO: 53261 - DNA, 25 bp, Canis familiaris
aatcaggcattgtcctccagtggat

SEQ ID NO: 53262 - DNA, 25 bp, Canis familiaris
aatgagatgcttacctccaggttgg

SEQ ID NO: 53263 - DNA, 25 bp, Canis familiaris
aatgagagctaaccttagctgcttc

SEQ ID NO: 53264 - DNA, 25 bp, Canis familiaris
aatgagatgctctaccttcagttgt

SEQ ID NO: 53265 - DNA, 25 bp, Canis familiaris
aatggtgctctattctgttgttttc

SEQ ID NO: 53266 - DNA, 25 bp, Canis familiaris
aatgttgcccatgctttgatttgat

SEQ ID NO: 53267 - DNA, 25 bp, Canis familiaris
aatgttgcttttcttgctcagtgat

SEQ ID NO: 53268 - DNA, 25 bp, Canis familiaris
aatggtgtttgatattgtctgagac

SEQ ID NO: 53269 - DNA, 25 bp, Canis familiaris
aatcgtatattgtttattcggaagc

SEQ ID NO: 53270 - DNA, 25 bp, Canis familiaris
aatggacaattgttttctcacaaac

SEQ ID NO: 53271 - DNA, 25 bp, Canis familiaris
aatggctctatttttttatcacgaa

SEQ ID NO: 53272 - DNA, 25 bp, Canis familiaris
aatggttgcatttttctttcaccct

SEQ ID NO: 53273 - DNA, 25 bp, Canis familiaris
aatgttggaaattctgttgtcccac

SEQ ID NO: 53274 - DNA, 25 bp, Canis familiaris
aatgttgtagcctcattttcaccta

SEQ ID NO: 53275 - DNA, 25 bp, Canis familiaris
aatgttgggcacttttctaactata

SEQ ID NO: 53276 - DNA, 25 bp, Canis familiaris
aatgtcatggctaactttcgaaaac

SEQ ID NO: 53277 - DNA, 25 bp, Canis familiaris
aatgtcttggatcctggtcgaaacc

SEQ ID NO: 53278 - DNA, 25 bp, Canis familiaris
aatttaggagtctgaccctcacatc

SEQ ID NO: 53279 - DNA, 25 bp, Canis familiaris
aatgttaaggtccgtgtcttcactg

SEQ ID NO: 53280 - DNA, 25 bp, Canis familiaris
aatggttcaagtgggtgttccagtg

SEQ ID NO: 53281 - DNA, 25 bp, Canis familiaris
aatggagtccacttgggtatccctg

SEQ ID NO: 53282 - DNA, 25 bp, Canis familiaris
aatgaaggccctaggggatccctgg

SEQ ID NO: 53283 - DNA, 25 bp, Canis familiaris
aatccagggttcagatggacccagt

SEQ ID NO: 53284 - DNA, 25 bp, Canis familiaris
aatgtcattgtggtcccactgaccc

SEQ ID NO: 53285 - DNA, 25 bp, Canis familiaris
aatggttttctcctagatggcttcc

SEQ ID NO: 53286 - DNA, 25 bp, Canis familiaris
aatggttctgtttctacgtgtactc

SEQ ID NO: 53287 - DNA, 25 bp, Canis familiaris
aatggttcgtatactacactgtaca

SEQ ID NO: 53288 - DNA, 25 bp, Canis familiaris
aatggcagacaggttttcacttaat

SEQ ID NO: 53289 - DNA, 25 bp, Canis familiaris
aatggcagacagtttttcacttaat

SEQ ID NO: 53290 - DNA, 25 bp, Canis familiaris
aatggcaagctttttcttttatgta

SEQ ID NO: 53291 - DNA, 25 bp, Canis familiaris
aatgtgattctttcttgttttggga

SEQ ID NO: 53292 - DNA, 25 bp, Canis familiaris
aatgtgaggcattgtcctggttggg

SEQ ID NO: 53293 - DNA, 25 bp, Canis familiaris
aatggtgctgaggatccgtgggtgg

SEQ ID NO: 53294 - DNA, 25 bp, Canis familiaris
aatggtgggtgaatggattggtggt

SEQ ID NO: 53295 - DNA, 25 bp, Canis familiaris
aatcgtgggtgaaatgacgttgccg

SEQ ID NO: 53296 - DNA, 25 bp, Canis familiaris
aatcctgccaggtaatgggtgtact

SEQ ID NO: 53297 - DNA, 25 bp, Canis familiaris
aatcggtcaggcgtatcaggcgttt

SEQ ID NO: 53298 - DNA, 25 bp, Canis familiaris
aatgagtgatcaggcaattcggtca

SEQ ID NO: 53299 - DNA, 25 bp, Canis familiaris
aatggattatgccaattctgaaaat

SEQ ID NO: 53300 - DNA, 25 bp, Canis familiaris
aatggatgtcatcagaccacattaa

SEQ ID NO: 53301 - DNA, 25 bp, Canis familiaris
aatcggttaatctccattcagcaat

SEQ ID NO: 53302 - DNA, 25 bp, Canis familiaris
aatcggttaatctccattcagcaat

SEQ ID NO: 53303 - DNA, 25 bp, Canis familiaris
aatggtgttaattacctctgcagat

SEQ ID NO: 53304 - DNA, 25 bp, Canis familiaris
aaggctgtgtcattggaccatcttt

SEQ ID NO: 53305 - DNA, 25 bp, Canis familiaris
aatgggttcaatcgaacactttagc

SEQ ID NO: 53306 - DNA, 25 bp, Canis familiaris
aatgtggagctcatgcaggaccttc

SEQ ID NO: 53307 - DNA, 25 bp, Canis familiaris
aatcgagatcatttgcacaacactt

SEQ ID NO: 53308 - DNA, 25 bp, Canis familiaris
aatggagctcatttggaacctttgt

SEQ ID NO: 53309 - DNA, 25 bp, Canis familiaris
aatgaactgttcagaccctcagtgt

SEQ ID NO: 53310 - DNA, 25 bp, Canis familiaris
aatgaagggcaactgcaccccaatg

SEQ ID NO: 53311 - DNA, 25 bp, Canis familiaris
aatgtcaggacatcgtccgcatcct

SEQ ID NO: 53312 - DNA, 25 bp, Canis familiaris
aatgtaattggtgtccctcctaact

SEQ ID NO: 53313 - DNA, 25 bp, Canis familiaris
aatgaaactggtgagcctccggaca

SEQ ID NO: 53314 - DNA, 25 bp, Canis familiaris
aatggaacatggaggcagcccgggt

SEQ ID NO: 53315 - DNA, 25 bp, Canis familiaris
aatgttggattttgccagaaggggt

SEQ ID NO: 53316 - DNA, 25 bp, Canis familiaris
caccgaggtcttgcctatgaggggt

SEQ ID NO: 53317 - DNA, 25 bp, Canis familiaris
cacccggccttctgctggagaaggg

SEQ ID NO: 53318 - DNA, 25 bp, Canis familiaris
caaccgagccttgccgggaaatggg

SEQ ID NO: 53319 - DNA, 25 bp, Canis familiaris
caactcgagctggttccgggagaag

SEQ ID NO: 53320 - DNA, 25 bp, Canis familiaris
caagccgagccctttggggtataga

SEQ ID NO: 53321 - DNA, 25 bp, Canis familiaris
aatgtgggccaacatgggtgttcag

SEQ ID NO: 53322 - DNA, 25 bp, Canis familiaris
aatgggggtgactgggtgaccggca

SEQ ID NO: 53323 - DNA, 25 bp, Canis familiaris
aatggggtgtcctcagaaagccggt

SEQ ID NO: 53324 - DNA, 25 bp, Canis familiaris
aatggctggaggcccaagatatagc

SEQ ID NO: 53325 - DNA, 25 bp, Canis familiaris
aatggctggaggctggcacaagcgg

SEQ ID NO: 53326 - DNA, 25 bp, Canis familiaris
aaggcgaagatggcggccaagacca

SEQ ID NO: 53327 - DNA, 25 bp, Canis familiaris
aatggccgagcagtcggaccagacc

SEQ ID NO: 53328 - DNA, 25 bp, Canis familiaris
aatcgacggcatggggggcgtcaca

SEQ ID NO: 53329 - DNA, 25 bp, Canis familiaris
aatgccactgcgggaggaggggcca

SEQ ID NO: 53330 - DNA, 25 bp, Canis familiaris
aatccctggggatgtgcagggccta

SEQ ID NO: 53331 - DNA, 25 bp, Canis familiaris
aatgtgccgggttttcagtgaccta

SEQ ID NO: 53332 - DNA, 25 bp, Canis familiaris
aatggacaggcagttcctcatggaa

SEQ ID NO: 53333 - DNA, 25 bp, Canis familiaris
aatggacgaggatgccacactccag

SEQ ID NO: 53334 - DNA, 25 bp, Canis familiaris
aatgtaccatggcagtcacagcccc

SEQ ID NO: 53335 - DNA, 25 bp, Canis familiaris
aatggatgcctacaggaccatcgcc

SEQ ID NO: 53336 - DNA, 25 bp, Canis familiaris
aatggactcatacagaacacaggct

SEQ ID NO: 53337 - DNA, 25 bp, Canis familiaris
aaggccattatgcagtgactcaggg

SEQ ID NO: 53338 - DNA, 25 bp, Canis familiaris
aatgatgccgttgatgcgagtcgcg

SEQ ID NO: 53339 - DNA, 25 bp, Canis familiaris
aatggcctgttattctgaccagctt

SEQ ID NO: 53340 - DNA, 25 bp, Canis familiaris
aatggcatttcaactctgactacgc

SEQ ID NO: 53341 - DNA, 25 bp, Canis familiaris
aatggcctggcaacatagactatcc

SEQ ID NO: 53342 - DNA, 25 bp, Canis familiaris
aatgtcatcatggcccatcaggctt

SEQ ID NO: 53343 - DNA, 25 bp, Canis familiaris
aatggctcagcagggtgcagcgctg

SEQ ID NO: 53344 - DNA, 25 bp, Canis familiaris
aatgcagatacactgcagacaccag

SEQ ID NO: 53345 - DNA, 25 bp, Canis familiaris
aatgctgatcaagcaccacacagtc

SEQ ID NO: 53346 - DNA, 25 bp, Canis familiaris
aatggcagcaagggccacagcgcag

SEQ ID NO: 53347 - DNA, 25 bp, Canis familiaris
aatggcagcgagcaggccactgtga

SEQ ID NO: 53348 - DNA, 25 bp, Canis familiaris
aatggagggctctccactcatgaga

SEQ ID NO: 53349 - DNA, 25 bp, Canis familiaris
aatggatgggatgtctcagcctggg

SEQ ID NO: 53350 - DNA, 25 bp, Canis familiaris
aatgctgtcaagtgttagctgtgtg

SEQ ID NO: 53351 - DNA, 25 bp, Canis familiaris
aatgctaatgattgccaaagctggg

SEQ ID NO: 53352 - DNA, 25 bp, Canis familiaris
aatgctacagcatacatgagacaga

SEQ ID NO: 53353 - DNA, 25 bp, Canis familiaris
aatgatgacagcaaagtgaagacat

SEQ ID NO: 53354 - DNA, 25 bp, Canis familiaris
aatgatcacggatatgacaacttcc

SEQ ID NO: 53355 - DNA, 25 bp, Canis familiaris
aatgaaggggattgcagcggttact

SEQ ID NO: 53356 - DNA, 25 bp, Canis familiaris
aatgaacttgaatgcagttttgatt

SEQ ID NO: 53357 - DNA, 25 bp, Canis familiaris
aatgaatgttgatacagtccaatct

SEQ ID NO: 53358 - DNA, 25 bp, Canis familiaris
aatgacttctgatccagctagccat

SEQ ID NO: 53359 - DNA, 25 bp, Canis familiaris
aatgttggccaacagctcatcactt

SEQ ID NO: 53360 - DNA, 25 bp, Canis familiaris
aatgtgctgtacagccctgaactcc

SEQ ID NO: 53361 - DNA, 25 bp, Canis familiaris
aatgcttgacactccaatcaactca

SEQ ID NO: 53362 - DNA, 25 bp, Canis familiaris
aatcctgagcactcatcctgcaaat

SEQ ID NO: 53363 - DNA, 25 bp, Canis familiaris
aatggtgatgccttacgtgcaggat

SEQ ID NO: 53364 - DNA, 25 bp, Canis familiaris
aaggccatccagaaagccagagatc

SEQ ID NO: 53365 - DNA, 25 bp, Canis familiaris
aaggccaccagctggctgaggagct

SEQ ID NO: 53366 - DNA, 25 bp, Canis familiaris
aatgtcaaccacttgcttggggacc

SEQ ID NO: 53367 - DNA, 25 bp, Canis familiaris
aatgattaccacactgaggttactt

SEQ ID NO: 53368 - DNA, 25 bp, Canis familiaris
aatgataaccactgtcactgttagc

SEQ ID NO: 53369 - DNA, 25 bp, Canis familiaris
aatgtaaccctagcatccttacttg

SEQ ID NO: 53370 - DNA, 25 bp, Canis familiaris
aatggaaacccagcggtgtcacagc

SEQ ID NO: 53371 - DNA, 25 bp, Canis familiaris
aatggacaaggcacactccgtgaca

SEQ ID NO: 53372 - DNA, 25 bp, Canis familiaris
aatgtaaattgcacacactccaact

SEQ ID NO: 53373 - DNA, 25 bp, Canis familiaris
aatgaaacagacacacctgcacagt

SEQ ID NO: 53374 - DNA, 25 bp, Canis familiaris
aatgaataagaccctcttggttttg

SEQ ID NO: 53375 - DNA, 25 bp, Canis familiaris
aatgaagcggcaacaccgggtgttt

SEQ ID NO: 53376 - DNA, 25 bp, Canis familiaris
aataagggccaggccaagttgtgtt

SEQ ID NO: 53377 - DNA, 25 bp, Canis familiaris
aatgaaggagccacccacgaggctt

SEQ ID NO: 53378 - DNA, 25 bp, Canis familiaris
aatgcaaagacctcctacaggacct

SEQ ID NO: 53379 - DNA, 25 bp, Canis familiaris
aatgcccagaactgttccaggagct

SEQ ID NO: 53380 - DNA, 25 bp, Canis familiaris
aatgccagtaaaggggccagccgct

SEQ ID NO: 53381 - DNA, 25 bp, Canis familiaris
aaggcctaggaggggccgcatcttg

SEQ ID NO: 53382 - DNA, 25 bp, Canis familiaris
aaggcctaggagttcatcctgctgt

SEQ ID NO: 53383 - DNA, 25 bp, Canis familiaris
aatgaccatgtgggggcattcctgt

SEQ ID NO: 53384 - DNA, 25 bp, Canis familiaris
aatgtcctgtgttggtggtcgttgt

SEQ ID NO: 53385 - DNA, 25 bp, Canis familiaris
aatggactcatttggctggaggttt

SEQ ID NO: 53386 - DNA, 25 bp, Canis familiaris
aatggatctttcaaggacaggattt

SEQ ID NO: 53387 - DNA, 25 bp, Canis familiaris
aatgtgtgtttcaagagcatcgtga

SEQ ID NO: 53388 - DNA, 25 bp, Canis familiaris
aatgtgttttcaagagcatctgaaa

SEQ ID NO: 53389 - DNA, 25 bp, Canis familiaris
aatggtggtgatattcacagagaat

SEQ ID NO: 53390 - DNA, 25 bp, Canis familiaris
aatggtggctgttattaaggatgaa

SEQ ID NO: 53391 - DNA, 25 bp, Canis familiaris
aatgctgggcgcttttaaaatatca

SEQ ID NO: 53392 - DNA, 25 bp, Canis familiaris
aatggccgttcttttgacaattcaa

SEQ ID NO: 53393 - DNA, 25 bp, Canis familiaris
aatggccctttctttgtacagcctt

SEQ ID NO: 53394 - DNA, 25 bp, Canis familiaris
aatggtcttttctttggtcagcttt

SEQ ID NO: 53395 - DNA, 25 bp, Canis familiaris
aatgtgtctgtttaaatgtggcctt

SEQ ID NO: 53396 - DNA, 25 bp, Canis familiaris
aatgtgtctctctaaaggggttact

SEQ ID NO: 53397 - DNA, 25 bp, Canis familiaris
aatggcttcctaacataggggaact

SEQ ID NO: 53398 - DNA, 25 bp, Canis familiaris
aatggctgtgcctttgatagaatag

SEQ ID NO: 53399 - DNA, 25 bp, Canis familiaris
aatgtcatgctgttgtttaggtaat

SEQ ID NO: 53400 - DNA, 25 bp, Canis familiaris
aatggatctcttggttcgcaatgaa

SEQ ID NO: 53401 - DNA, 25 bp, Canis familiaris
aatggtcagctgggattgccttaat

SEQ ID NO: 53402 - DNA, 25 bp, Canis familiaris
aatggtcacggtagagtttgcagat

SEQ ID NO: 53403 - DNA, 25 bp, Canis familiaris
aaggccacgttccgtatatctgatt

SEQ ID NO: 53404 - DNA, 25 bp, Canis familiaris
aatggccaggcatcgctgtacaagt

SEQ ID NO: 53405 - DNA, 25 bp, Canis familiaris
aatggccacgagagctgctctgcaa

SEQ ID NO: 53406 - DNA, 25 bp, Canis familiaris
aatggcaaatgtatctattgagaat

SEQ ID NO: 53407 - DNA, 25 bp, Canis familiaris
aatggcccagtcacaatgctcaaat

SEQ ID NO: 53408 - DNA, 25 bp, Canis familiaris
aatggccaattcagtacttttctat

SEQ ID NO: 53409 - DNA, 25 bp, Canis familiaris
aatgggcaattgtgtgtttacttat

SEQ ID NO: 53410 - DNA, 25 bp, Canis familiaris
aatgcacgaatagggatgagttact

SEQ ID NO: 53411 - DNA, 25 bp, Canis familiaris
aatgccaggggccgagcagttagcg

SEQ ID NO: 53412 - DNA, 25 bp, Canis familiaris
aatggagggtcactacgttcatgct

SEQ ID NO: 53413 - DNA, 25 bp, Canis familiaris
aatgcagggcccctaagatgccagt

SEQ ID NO: 53414 - DNA, 25 bp, Canis familiaris
aatgagggaccagtacatgaggact

SEQ ID NO: 53415 - DNA, 25 bp, Canis familiaris
aatgacgtgaccttactgcgagtcc

SEQ ID NO: 53416 - DNA, 25 bp, Canis familiaris
aatgaagcgcacgttccgcaagttc

SEQ ID NO: 53417 - DNA, 25 bp, Canis familiaris
aatgatatggcagcttctacatacg

SEQ ID NO: 53418 - DNA, 25 bp, Canis familiaris
aatgcataagacctgctacaaccag

SEQ ID NO: 53419 - DNA, 25 bp, Canis familiaris
aataaacacctggcactgagccctg

SEQ ID NO: 53420 - DNA, 25 bp, Canis familiaris
aataaaggccagtcacttgcccttc

SEQ ID NO: 53421 - DNA, 25 bp, Canis familiaris
aatgtaatagtacctcgttccttgc

SEQ ID NO: 53422 - DNA, 25 bp, Canis familiaris
aatgtaatggtgctcgtggtgccct

SEQ ID NO: 53423 - DNA, 25 bp, Canis familiaris
aattattgaggaatgccccgctcct

SEQ ID NO: 53424 - DNA, 25 bp, Canis familiaris
aatggactgagattcacccacagcc

SEQ ID NO: 53425 - DNA, 25 bp, Canis familiaris
aatggactagattccagccatcctg

SEQ ID NO: 53426 - DNA, 25 bp, Canis familiaris
aatggtgtagatgcggtgcatcctg

SEQ ID NO: 53427 - DNA, 25 bp, Canis familiaris
aatggcgtaggctgcgtgatgtcac

SEQ ID NO: 53428 - DNA, 25 bp, Canis familiaris
aatgggcatcaccaaggtcttcagc

SEQ ID NO: 53429 - DNA, 25 bp, Canis familiaris
aatgggcatcaccaaggtcttcagc

SEQ ID NO: 53430 - DNA, 25 bp, Canis familiaris
aatgggcatcaccaaggtcttcagc

SEQ ID NO: 53431 - DNA, 25 bp, Canis familiaris
aatctggcaccacaccttctacaat

SEQ ID NO: 53432 - DNA, 25 bp, Canis familiaris
aatgtggcccagggccttttctgct

SEQ ID NO: 53433 - DNA, 25 bp, Canis familiaris
aatgtggaccatttgctttttctcc

SEQ ID NO: 53434 - DNA, 25 bp, Canis familiaris
aatgctggaactatctttcctgacc

SEQ ID NO: 53435 - DNA, 25 bp, Canis familiaris
aatgagtgaaatgtccttcctcgcc

SEQ ID NO: 53436 - DNA, 25 bp, Canis familiaris
aatggagaattcatgcctttcaagc

SEQ ID NO: 53437 - DNA, 25 bp, Canis familiaris
aatgagaatgatttctcacttgtga

SEQ ID NO: 53438 - DNA, 25 bp, Canis familiaris
aatgagaattctccatcactcttgc

SEQ ID NO: 53439 - DNA, 25 bp, Canis familiaris
aatggcaatttccacattcaactgg

SEQ ID NO: 53440 - DNA, 25 bp, Canis familiaris
aatgtgcaatttcttaccactaggt

SEQ ID NO: 53441 - DNA, 25 bp, Canis familiaris
aatggagtctgtctttgccatcttg

SEQ ID NO: 53442 - DNA, 25 bp, Canis familiaris
aatggagactgtatgctgggctctt

SEQ ID NO: 53443 - DNA, 25 bp, Canis familiaris
aatggaagtgctatgatgcccttcg

SEQ ID NO: 53444 - DNA, 25 bp, Canis familiaris
aatggagaggatctgcgcctttttg

SEQ ID NO: 53445 - DNA, 25 bp, Canis familiaris
aatggttgttgaggcctccttttat

SEQ ID NO: 53446 - DNA, 25 bp, Canis familiaris
aatggcaagatttcgttcctttcta

SEQ ID NO: 53447 - DNA, 25 bp, Canis familiaris
aatggcaattttgtctcttctactg

SEQ ID NO: 53448 - DNA, 25 bp, Canis familiaris
aatggaattcgatagtttccctgta

SEQ ID NO: 53449 - DNA, 25 bp, Canis familiaris
aatggattccagaaagtttactatt

SEQ ID NO: 53450 - DNA, 25 bp, Canis familiaris
aatgggtacagttgatggtttctat

SEQ ID NO: 53451 - DNA, 25 bp, Canis familiaris
aatggtgttcatagtgtggttattt

SEQ ID NO: 53452 - DNA, 25 bp, Canis familiaris
aatgggatgattctgtggtcctcct

SEQ ID NO: 53453 - DNA, 25 bp, Canis familiaris
aatgggacagggctgtgtcctccac

SEQ ID NO: 53454 - DNA, 25 bp, Canis familiaris
aatggtgaatgggccttgctgtctt

SEQ ID NO: 53455 - DNA, 25 bp, Canis familiaris
aatggtacaatggcccttgtgtata

SEQ ID NO: 53456 - DNA, 25 bp, Canis familiaris
aatgggccattggtgctttgttcaa

SEQ ID NO: 53457 - DNA, 25 bp, Canis familiaris
aatgggtccatcagctgttgaagaa

SEQ ID NO: 53458 - DNA, 25 bp, Canis familiaris
aatggtgtctacagcagggcagagt

SEQ ID NO: 53459 - DNA, 25 bp, Canis familiaris
aatgggcttgcggctcagggcaagt

SEQ ID NO: 53460 - DNA, 25 bp, Canis familiaris
aatggagctgctgactggggaaata

SEQ ID NO: 53461 - DNA, 25 bp, Canis familiaris
aatggcatctgcatacttgttaaaa

SEQ ID NO: 53462 - DNA, 25 bp, Canis familiaris
aatgagacttcttcagtctcccgca

SEQ ID NO: 53463 - DNA, 25 bp, Canis familiaris
aatgaaatacttatccaccccattg

SEQ ID NO: 53464 - DNA, 25 bp, Canis familiaris
aatgaaaatgactgttaccccttgg

SEQ ID NO: 53465 - DNA, 25 bp, Canis familiaris
aatgattttcagggtcttcacgcct

SEQ ID NO: 53466 - DNA, 25 bp, Canis familiaris
aatgattgttaggttccaggcccct

SEQ ID NO: 53467 - DNA, 25 bp, Canis familiaris
aatgtgatgttgcttgggagggccc

SEQ ID NO: 53468 - DNA, 25 bp, Canis familiaris
aatgaatttggttggggagctgagc

SEQ ID NO: 53469 - DNA, 25 bp, Canis familiaris
aatgatatgtgacttgggccggtag

SEQ ID NO: 53470 - DNA, 25 bp, Canis familiaris
aatgatatgcgatttgacagaagcg

SEQ ID NO: 53471 - DNA, 25 bp, Canis familiaris
aatgtctgctacttgcacaactgcc

SEQ ID NO: 53472 - DNA, 25 bp, Canis familiaris
aatgtgcgctggaagccaacatgcc

SEQ ID NO: 53473 - DNA, 25 bp, Canis familiaris
aatgatggtgcgtgccatgcagtcc

SEQ ID NO: 53474 - DNA, 25 bp, Canis familiaris
aatggtgttgccgcgccatctgcca

SEQ ID NO: 53475 - DNA, 25 bp, Canis familiaris
aatggtgcttcactaagccacttcc

SEQ ID NO: 53476 - DNA, 25 bp, Canis familiaris
aatggatcttttacaccacatcacc

SEQ ID NO: 53477 - DNA, 25 bp, Canis familiaris
aatggtctgattctcatatcacata

SEQ ID NO: 53478 - DNA, 25 bp, Canis familiaris
aatgtgtctttagatagccctgtcc

SEQ ID NO: 53479 - DNA, 25 bp, Canis familiaris
aatggtgtttgtgtttcctgtctgt

SEQ ID NO: 53480 - DNA, 25 bp, Canis familiaris
aatgcgttatttgtttccttggtag

SEQ ID NO: 53481 - DNA, 25 bp, Canis familiaris
aatggttacctgaatctcattcttg

SEQ ID NO: 53482 - DNA, 25 bp, Canis familiaris
aatgtgttactgacgagtgcttctt

SEQ ID NO: 53483 - DNA, 25 bp, Canis familiaris
aatgttcccagtagactgtgtctct

SEQ ID NO: 53484 - DNA, 25 bp, Canis familiaris
aatgtcccgaatgcaggaggcactg

SEQ ID NO: 53485 - DNA, 25 bp, Canis familiaris
aatgcccgtgaatctgagcaacctg

SEQ ID NO: 53486 - DNA, 25 bp, Canis familiaris
aattccaggaatcttcttcggacca

SEQ ID NO: 53487 - DNA, 25 bp, Canis familiaris
aatgtccaggaatcctctgggcaac

SEQ ID NO: 53488 - DNA, 25 bp, Canis familiaris
aatgtccagggctgaccagggagaa

SEQ ID NO: 53489 - DNA, 25 bp, Canis familiaris
aatgctccagggtcaggcactgggg

SEQ ID NO: 53490 - DNA, 25 bp, Canis familiaris
aatgagccattgcccaggcttgtgg

SEQ ID NO: 53491 - DNA, 25 bp, Canis familiaris
aatgatgccttgtctcaatgtttgg

SEQ ID NO: 53492 - DNA, 25 bp, Canis familiaris
aatgtcctgttctaacttttggctt

SEQ ID NO: 53493 - DNA, 25 bp, Canis familiaris
aatgtcccatattaagctattagag

SEQ ID NO: 53494 - DNA, 25 bp, Canis familiaris
aatgttgcagcattagcctgtatta

SEQ ID NO: 53495 - DNA, 25 bp, Canis familiaris
aatgttgcattttgtcctgacgaca

SEQ ID NO: 53496 - DNA, 25 bp, Canis familiaris
aatgtatactaggtactgactgaga

SEQ ID NO: 53497 - DNA, 25 bp, Canis familiaris
aatgtacaattgattctgaatgctg

SEQ ID NO: 53498 - DNA, 25 bp, Canis familiaris
catttatccttacatggaatgcatg

SEQ ID NO: 53499 - DNA, 25 bp, Canis familiaris
aatgttccttaatttgatacatgtt

SEQ ID NO: 53500 - DNA, 25 bp, Canis familiaris
aatcttccccaggtgtgacagaggt

SEQ ID NO: 53501 - DNA, 25 bp, Canis familiaris
aatcccagtcctgtatacaaggcta

SEQ ID NO: 53502 - DNA, 25 bp, Canis familiaris
aatcgccatttagggattaaactca

SEQ ID NO: 53503 - DNA, 25 bp, Canis familiaris
aatgcccattgattcctgattcaga

SEQ ID NO: 53504 - DNA, 25 bp, Canis familiaris
aatgtcctgtgatttctggtcaatt

SEQ ID NO: 53505 - DNA, 25 bp, Canis familiaris
aatgtgtcttgagttatggatctat

SEQ ID NO: 53506 - DNA, 25 bp, Canis familiaris
aatgtccttggattgatgaatgtat

SEQ ID NO: 53507 - DNA, 25 bp, Canis familiaris
aatgatttcaggagctaatgtaaaa

SEQ ID NO: 53508 - DNA, 25 bp, Canis familiaris
aatgttctcaatattaatttacaga

SEQ ID NO: 53509 - DNA, 25 bp, Canis familiaris
aatgttacattagtttcaggttcaa

SEQ ID NO: 53510 - DNA, 25 bp, Canis familiaris
aatgtcttcattaatttgcactgtt

SEQ ID NO: 53511 - DNA, 25 bp, Canis familiaris
aatgtcttacaaaatgtcactgagt

SEQ ID NO: 53512 - DNA, 25 bp, Canis familiaris
aatgtttacagagcctagtcagatc

SEQ ID NO: 53513 - DNA, 25 bp, Canis familiaris
aatgtgttcacatgaccttgccact

SEQ ID NO: 53514 - DNA, 25 bp, Canis familiaris
aatgtttacagaacagcctgccctg

SEQ ID NO: 53515 - DNA, 25 bp, Canis familiaris
aatgtttacagggagcctcctgccc

SEQ ID NO: 53516 - DNA, 25 bp, Canis familiaris
aatctatacaatgtgaaccccgccc

SEQ ID NO: 53517 - DNA, 25 bp, Canis familiaris
caactagtatatataacccccctat

SEQ ID NO: 53518 - DNA, 25 bp, Canis familiaris
gaactagaaactcaacgtcctccaa

SEQ ID NO: 53519 - DNA, 25 bp, Canis familiaris
aattcggaacgtatctctcccgaag

SEQ ID NO: 53520 - DNA, 25 bp, Canis familiaris
aatgtcaggaaggtactcgccctaa

SEQ ID NO: 53521 - DNA, 25 bp, Canis familiaris
aatgtccagacggaagctgcgtgcc

SEQ ID NO: 53522 - DNA, 25 bp, Canis familiaris
aatggtcagaccttgagcagggccc

SEQ ID NO: 53523 - DNA, 25 bp, Canis familiaris
aatggatcaggctctgacactctgc

SEQ ID NO: 53524 - DNA, 25 bp, Canis familiaris
aatggtcaggtcctcacaagcatgc

SEQ ID NO: 53525 - DNA, 25 bp, Canis familiaris
aatggagaggtcttcagcaccagct

SEQ ID NO: 53526 - DNA, 25 bp, Canis familiaris
aatgaatacggctacagcaacaggg

SEQ ID NO: 53527 - DNA, 25 bp, Canis familiaris
aatcgaacagtcgctgaacggcgtg

SEQ ID NO: 53528 - DNA, 25 bp, Canis familiaris
aatcgacatgttgcctcaacagggt

SEQ ID NO: 53529 - DNA, 25 bp, Canis familiaris
aatgtgaatttacccaaacctgtgg

SEQ ID NO: 53530 - DNA, 25 bp, Canis familiaris
aatgcttaattaaccaagactttag

SEQ ID NO: 53531 - DNA, 25 bp, Canis familiaris
aatgttcagttgtaaaccctcgaag

SEQ ID NO: 53532 - DNA, 25 bp, Canis familiaris
aatggtcgattatatcccttcagag

SEQ ID NO: 53533 - DNA, 25 bp, Canis familiaris
aatggtcagactttttttctgcaga

SEQ ID NO: 53534 - DNA, 25 bp, Canis familiaris
aatgttatgttttctggtatcagca

SEQ ID NO: 53535 - DNA, 25 bp, Canis familiaris
aatgttcagtctttctgtccaagcc

SEQ ID NO: 53536 - DNA, 25 bp, Canis familiaris
aatgttcctgtctttgtggtggtca

SEQ ID NO: 53537 - DNA, 25 bp, Canis familiaris
aatgattttcactttgtggattttg

SEQ ID NO: 53538 - DNA, 25 bp, Canis familiaris
aatgcttttacttctgtgaatcccc

SEQ ID NO: 53539 - DNA, 25 bp, Canis familiaris
aatgcgctcttagttcgttacacca

SEQ ID NO: 53540 - DNA, 25 bp, Canis familiaris
aatgagcctttgttgctgtcaaacc

SEQ ID NO: 53541 - DNA, 25 bp, Canis familiaris
aatgtctctgtttatttcagatgat

SEQ ID NO: 53542 - DNA, 25 bp, Canis familiaris
aatgttcattttatacaggagagcc

SEQ ID NO: 53543 - DNA, 25 bp, Canis familiaris
aatgttactattttatcagccaggt

SEQ ID NO: 53544 - DNA, 25 bp, Canis familiaris
aatgtcataatctttgttaccactg

SEQ ID NO: 53545 - DNA, 25 bp, Canis familiaris
aatgatagactctctgtgttccttg

SEQ ID NO: 53546 - DNA, 25 bp, Canis familiaris
aatgaagcaataccgtgttcctctt

SEQ ID NO: 53547 - DNA, 25 bp, Canis familiaris
aatggtcagatacccatgcttccta

SEQ ID NO: 53548 - DNA, 25 bp, Canis familiaris
aatggtgatggaccacatcctcctt

SEQ ID NO: 53549 - DNA, 25 bp, Canis familiaris
aatgcggtggacaattcatccccta

SEQ ID NO: 53550 - DNA, 25 bp, Canis familiaris
aatgctggggacctccaggtcccac

SEQ ID NO: 53551 - DNA, 25 bp, Canis familiaris
aatgtgggcaacaatccagagtccg

SEQ ID NO: 53552 - DNA, 25 bp, Canis familiaris
aatgttctcaacaaccagcagttcc

SEQ ID NO: 53553 - DNA, 25 bp, Canis familiaris
aatgttctccatgtctcgcatggtc

SEQ ID NO: 53554 - DNA, 25 bp, Canis familiaris
aatgtttcactttcctatagctgtc

SEQ ID NO: 53555 - DNA, 25 bp, Canis familiaris
aatgatattattaccctgatagtct

SEQ ID NO: 53556 - DNA, 25 bp, Canis familiaris
aatgttcatattctcaccataccat

SEQ ID NO: 53557 - DNA, 25 bp, Canis familiaris
aatgtcttaatcatagtctaccatc

SEQ ID NO: 53558 - DNA, 25 bp, Canis familiaris
aatgtcatctaaaatatcctatgta

SEQ ID NO: 53559 - DNA, 25 bp, Canis familiaris
aatgtaccagttaccctagcatacc

SEQ ID NO: 53560 - DNA, 25 bp, Canis familiaris
aatggtgacgtgatccatcggaccc

SEQ ID NO: 53561 - DNA, 25 bp, Canis familiaris
aatgtgtgccggaatatcagcaggc

SEQ ID NO: 53562 - DNA, 25 bp, Canis familiaris
aatgggcatcagttatacaagggac

SEQ ID NO: 53563 - DNA, 25 bp, Canis familiaris
aatgaggtgctgctgtccaaggtga

SEQ ID NO: 53564 - DNA, 25 bp, Canis familiaris
aatgggccatgatgtctgcaattta

SEQ ID NO: 53565 - DNA, 25 bp, Canis familiaris
aatgggctctgattgggcagctact

SEQ ID NO: 53566 - DNA, 25 bp, Canis familiaris
aatgagcattcttggagtcagcaat

SEQ ID NO: 53567 - DNA, 25 bp, Canis familiaris
aatgatgcattgtacagttatatga

SEQ ID NO: 53568 - DNA, 25 bp, Canis familiaris
aatgaatctgtgtgtgtgcatatga

SEQ ID NO: 53569 - DNA, 25 bp, Canis familiaris
aatgtgactgtctggatcaaaccca

SEQ ID NO: 53570 - DNA, 25 bp, Canis familiaris
aatgcttgctactggtcaaaaaaaa

SEQ ID NO: 53571 - DNA, 25 bp, Canis familiaris
aatgtgctccactgggtccaaaaat

SEQ ID NO: 53572 - DNA, 25 bp, Canis familiaris
aatgtcatccagggctgcagtcatc

SEQ ID NO: 53573 - DNA, 25 bp, Canis familiaris
aatgactcgattggccgtcatctgc

SEQ ID NO: 53574 - DNA, 25 bp, Canis familiaris
aatgattctatccagtgtgtctcct

SEQ ID NO: 53575 - DNA, 25 bp, Canis familiaris
aatgattcttggtatgtgttcttaa

SEQ ID NO: 53576 - DNA, 25 bp, Canis familiaris
aatgtggatctgttctttttgtaat

SEQ ID NO: 53577 - DNA, 25 bp, Canis familiaris
aatgtggctcttacttttctggaaa

SEQ ID NO: 53578 - DNA, 25 bp, Canis familiaris
aatgtgttttgaggtcttctgtaat

SEQ ID NO: 53579 - DNA, 25 bp, Canis familiaris
aatgggaatctgggttcactgctgc

SEQ ID NO: 53580 - DNA, 25 bp, Canis familiaris
aatggtgacacttctagatcctctg

SEQ ID NO: 53581 - DNA, 25 bp, Canis familiaris
aatgggcacctcagagtactcttct

SEQ ID NO: 53582 - DNA, 25 bp, Canis familiaris
aatcgagcaactctagtactcctcc

SEQ ID NO: 53583 - DNA, 25 bp, Canis familiaris
aatcgccaacatatacttcaagcct

SEQ ID NO: 53584 - DNA, 25 bp, Canis familiaris
aatcgccaacatatacttcaagcct

SEQ ID NO: 53585 - DNA, 25 bp, Canis familiaris
aatcgccaacatatacttcaagcct

SEQ ID NO: 53586 - DNA, 25 bp, Canis familiaris
aatctgacaatgattaagaccctct

SEQ ID NO: 53587 - DNA, 25 bp, Canis familiaris
aattcataattacaaaccacctgtg

SEQ ID NO: 53588 - DNA, 25 bp, Canis familiaris
aatccacctataataaaaccctctg

SEQ ID NO: 53589 - DNA, 25 bp, Canis familiaris
aatgcacaccttcgctaaaatcctc

SEQ ID NO: 53590 - DNA, 25 bp, Canis familiaris
aatgcatttctgtggataagctccc

SEQ ID NO: 53591 - DNA, 25 bp, Canis familiaris
aatgccatttgatgacataaaacca

SEQ ID NO: 53592 - DNA, 25 bp, Canis familiaris
aatgccttttgacacagaaatccgt

SEQ ID NO: 53593 - DNA, 25 bp, Canis familiaris
aatgtttcttggctagattattcat

SEQ ID NO: 53594 - DNA, 25 bp, Canis familiaris
aatgtttctgattggtttgtatttc

SEQ ID NO: 53595 - DNA, 25 bp, Canis familiaris
caatggtactgagaggtatggatat

SEQ ID NO: 53596 - DNA, 25 bp, Canis familiaris
aatggtgaggacttgctgtgatggt

SEQ ID NO: 53597 - DNA, 25 bp, Canis familiaris
aatggtgagctggcatactctctgg

SEQ ID NO: 53598 - DNA, 25 bp, Canis familiaris
aatggtggatggtgctcctgagtct

SEQ ID NO: 53599 - DNA, 25 bp, Canis familiaris
aatgaggagtggggctccggttgct

SEQ ID NO: 53600 - DNA, 25 bp, Canis familiaris
aatgtggagtggcttgcctggttct

SEQ ID NO: 53601 - DNA, 25 bp, Canis familiaris
aatgctgggagacgtggccgtagct

SEQ ID NO: 53602 - DNA, 25 bp, Canis familiaris
aatgatggaccacgtgaccgtcaca

SEQ ID NO: 53603 - DNA, 25 bp, Canis familiaris
aatgataaccacaatgcattcgtaa

SEQ ID NO: 53604 - DNA, 25 bp, Canis familiaris
aatgcaaacactcatgcttcagcaa

SEQ ID NO: 53605 - DNA, 25 bp, Canis familiaris
aatgtcactcctccagtgtcattaa

SEQ ID NO: 53606 - DNA, 25 bp, Canis familiaris
aatgtggctcccatggtcaaaaaat

SEQ ID NO: 53607 - DNA, 25 bp, Canis familiaris
aatgtgagctctgcagggacctgaa

SEQ ID NO: 53608 - DNA, 25 bp, Canis familiaris
aatgtcagtttagggcactctgcaa

SEQ ID NO: 53609 - DNA, 25 bp, Canis familiaris
aatgctgcagtacagggctcttcaa

SEQ ID NO: 53610 - DNA, 25 bp, Canis familiaris
aatgctgagttgaatgccctggcta

SEQ ID NO: 53611 - DNA, 25 bp, Canis familiaris
aatctatatctgacctgctgaggaa

SEQ ID NO: 53612 - DNA, 25 bp, Canis familiaris
aatgctgctatcaccatggggatgg

SEQ ID NO: 53613 - DNA, 25 bp, Canis familiaris
aatgtgctatgttcagccgggacgt

SEQ ID NO: 53614 - DNA, 25 bp, Canis familiaris
aatgtgccagcaaagccgtgtactc

SEQ ID NO: 53615 - DNA, 25 bp, Canis familiaris
aatgtggagatcaccatgctgtccc

SEQ ID NO: 53616 - DNA, 25 bp, Canis familiaris
aatgtctgcagagccctctgcacct

SEQ ID NO: 53617 - DNA, 25 bp, Canis familiaris
aatgttgaggtgcctttgcctctgt

SEQ ID NO: 53618 - DNA, 25 bp, Canis familiaris
aatgttggacatcattccctttctc

SEQ ID NO: 53619 - DNA, 25 bp, Canis familiaris
aatgcttggccaagattcaccttga

SEQ ID NO: 53620 - DNA, 25 bp, Canis familiaris
aatgttcagctcattgtcctcaata

SEQ ID NO: 53621 - DNA, 25 bp, Canis familiaris
aatgttcagaacagtgcctgcatgg

SEQ ID NO: 53622 - DNA, 25 bp, Canis familiaris
aatgtctactcatagagccactgtg

SEQ ID NO: 53623 - DNA, 25 bp, Canis familiaris
aatgctctcagggtagcaccactgt

SEQ ID NO: 53624 - DNA, 25 bp, Canis familiaris
aatgtccattcttagccaagctgct

SEQ ID NO: 53625 - DNA, 25 bp, Canis familiaris
aatgtacattttcctcacagagctt

SEQ ID NO: 53626 - DNA, 25 bp, Canis familiaris
aatgaaagttattccaaagcacgaa

SEQ ID NO: 53627 - DNA, 25 bp, Canis familiaris
aatgtggtcctgtacaccaaacgaa

SEQ ID NO: 53628 - DNA, 25 bp, Canis familiaris
aatgtagctctttagcgctaaccta

SEQ ID NO: 53629 - DNA, 25 bp, Canis familiaris
aatgtttgcttttggtagatacttt

SEQ ID NO: 53630 - DNA, 25 bp, Canis familiaris
aatgtgtttatttgccttttctttg

SEQ ID NO: 53631 - DNA, 25 bp, Canis familiaris
aatgatgctttatctgggtctgttt

SEQ ID NO: 53632 - DNA, 25 bp, Canis familiaris
aatgttttacagtggcttatctttt

SEQ ID NO: 53633 - DNA, 25 bp, Canis familiaris
aatgtctttaaatcacttttctgta

SEQ ID NO: 53634 - DNA, 25 bp, Canis familiaris
aatgttttcaaatgttccttataat

SEQ ID NO: 53635 - DNA, 25 bp, Canis familiaris
aatgtcttttaatgtcctatctcaa

SEQ ID NO: 53636 - DNA, 25 bp, Canis familiaris
aatgatcctatttttgttctcctac

SEQ ID NO: 53637 - DNA, 25 bp, Canis familiaris
aatgtatttgtatttgctttcttca

SEQ ID NO: 53638 - DNA, 25 bp, Canis familiaris
aatgatattttctacagttcctact

SEQ ID NO: 53639 - DNA, 25 bp, Canis familiaris
aatgaattcttcgaaggcttccctg

SEQ ID NO: 53640 - DNA, 25 bp, Canis familiaris
aatgtattcttcataggtctattct

SEQ ID NO: 53641 - DNA, 25 bp, Canis familiaris
aatgtagcgtgtaaatagcttttta

SEQ ID NO: 53642 - DNA, 25 bp, Canis familiaris
aatgtcggagtttttcgatctctgt

SEQ ID NO: 53643 - DNA, 25 bp, Canis familiaris
aatgtcactgatatacttaagcctt

SEQ ID NO: 53644 - DNA, 25 bp, Canis familiaris
aatcccaaaatagttaagccagctg

SEQ ID NO: 53645 - DNA, 25 bp, Canis familiaris
aatctgtcacagaattttgagaccc

SEQ ID NO: 53646 - DNA, 25 bp, Canis familiaris
aatctgtcacagaattttgagaccc

SEQ ID NO: 53647 - DNA, 25 bp, Canis familiaris
aatcaaatcatgtcctttaacccac

SEQ ID NO: 53648 - DNA, 25 bp, Canis familiaris
aatccagatagttttgtgatacttc

SEQ ID NO: 53649 - DNA, 25 bp, Canis familiaris
aatccaaagtcttgaattcgttcat

SEQ ID NO: 53650 - DNA, 25 bp, Canis familiaris
aatccaattgtctggcactatttgt

SEQ ID NO: 53651 - DNA, 25 bp, Canis familiaris
aatctcaacaccaccctaatttgaa

SEQ ID NO: 53652 - DNA, 25 bp, Canis familiaris
aatgtgccacacattatcgtgtttt

SEQ ID NO: 53653 - DNA, 25 bp, Canis familiaris
aatgctgccaacacaacagtttccc

SEQ ID NO: 53654 - DNA, 25 bp, Canis familiaris
aatcccgatctccagtagttttcgt

SEQ ID NO: 53655 - DNA, 25 bp, Canis familiaris
aatccaagtctacgaacccttgcgt

SEQ ID NO: 53656 - DNA, 25 bp, Canis familiaris
aatagctggtaacaaccctgtcgtc

SEQ ID NO: 53657 - DNA, 25 bp, Canis familiaris
gaatacggtaagaaccacctcaagg

SEQ ID NO: 53658 - DNA, 25 bp, Canis familiaris
aatacctgcataagggtcccacaag

SEQ ID NO: 53659 - DNA, 25 bp, Canis familiaris
aatgacagcatcaacagcacgtccc

SEQ ID NO: 53660 - DNA, 25 bp, Canis familiaris
aatgcagatgcactgatacaccccc

SEQ ID NO: 53661 - DNA, 25 bp, Canis familiaris
aatgtggcacagcataccactcctg

SEQ ID NO: 53662 - DNA, 25 bp, Canis familiaris
aatgtggatacagttccccatcctc

SEQ ID NO: 53663 - DNA, 25 bp, Canis familiaris
aatgagaaaaatctccctctctccc

SEQ ID NO: 53664 - DNA, 25 bp, Canis familiaris
aataaaaggtcctccagtctctagc

SEQ ID NO: 53665 - DNA, 25 bp, Canis familiaris
caaacaacggtcattccgacaccac

SEQ ID NO: 53666 - DNA, 25 bp, Canis familiaris
aatcggacggtcatttccagtccct

SEQ ID NO: 53667 - DNA, 25 bp, Canis familiaris
aatcggacctcgatttctggttctc

SEQ ID NO: 53668 - DNA, 25 bp, Canis familiaris
aatcggactgccaaattctccggtt

SEQ ID NO: 53669 - DNA, 25 bp, Canis familiaris
aatccacctctgacaattgtccgga

SEQ ID NO: 53670 - DNA, 25 bp, Canis familiaris
aatctcagctctcaaagtgggcgca

SEQ ID NO: 53671 - DNA, 25 bp, Canis familiaris
aatgctggttttaatggcggcgcaa

SEQ ID NO: 53672 - DNA, 25 bp, Canis familiaris
aatgattgttttactacttcctaga

SEQ ID NO: 53673 - DNA, 25 bp, Canis familiaris
aatgtagttttatactgcttccata

SEQ ID NO: 53674 - DNA, 25 bp, Canis familiaris
aatgttttgttatagctcttcactc

SEQ ID NO: 53675 - DNA, 25 bp, Canis familiaris
aatgttcattgtctaggctgttgcc

SEQ ID NO: 53676 - DNA, 25 bp, Canis familiaris
aatgatctgggtctatggcttctcc

SEQ ID NO: 53677 - DNA, 25 bp, Canis familiaris
aatgtctggtttgtgttcatctctc

SEQ ID NO: 53678 - DNA, 25 bp, Canis familiaris
aatgcctgttttgtgctttaccata

SEQ ID NO: 53679 - DNA, 25 bp, Canis familiaris
aatccattctgaagggtttaccaag

SEQ ID NO: 53680 - DNA, 25 bp, Canis familiaris
aatgagcaaccaatgtcgtctatac

SEQ ID NO: 53681 - DNA, 25 bp, Canis familiaris
aatgatataccatgcatcgtaaaac

SEQ ID NO: 53682 - DNA, 25 bp, Canis familiaris
aatgatacccatgcatcgtgaaacc

SEQ ID NO: 53683 - DNA, 25 bp, Canis familiaris
aatctaccttgcccaggagataatc

SEQ ID NO: 53684 - DNA, 25 bp, Canis familiaris
aatgatcatcttccccagggtgttc

SEQ ID NO: 53685 - DNA, 25 bp, Canis familiaris
aatgtcttaggcacagggcctggca

SEQ ID NO: 53686 - DNA, 25 bp, Canis familiaris
aatgtttgtgagcagcagtgggctg

SEQ ID NO: 53687 - DNA, 25 bp, Canis familiaris
aatgattgggagccagcgcgcaact

SEQ ID NO: 53688 - DNA, 25 bp, Canis familiaris
aatgattagtgaaacgccgtacaga

SEQ ID NO: 53689 - DNA, 25 bp, Canis familiaris
aatgcattcgtaaaacctctcacga

SEQ ID NO: 53690 - DNA, 25 bp, Canis familiaris
aatgcgtgggcaaaccttcaaatgg

SEQ ID NO: 53691 - DNA, 25 bp, Canis familiaris
aatgcactcgtaaaccttcagaagg

SEQ ID NO: 53692 - DNA, 25 bp, Canis familiaris
aatgctgcctgaaaataatgtccaa

SEQ ID NO: 53693 - DNA, 25 bp, Canis familiaris
aatgaacgatcgtaattgtccccct

SEQ ID NO: 53694 - DNA, 25 bp, Canis familiaris
aatgatacccgatcatattcccgtg

SEQ ID NO: 53695 - DNA, 25 bp, Canis familiaris
aatgattatcccttatttcctttct

SEQ ID NO: 53696 - DNA, 25 bp, Canis familiaris
aatgttggcactgttttcttttcct

SEQ ID NO: 53697 - DNA, 25 bp, Canis familiaris
aatgttgacattctcttttcttctc

SEQ ID NO: 53698 - DNA, 25 bp, Canis familiaris
aatgtgtgacttttactctttctcc

SEQ ID NO: 53699 - DNA, 25 bp, Canis familiaris
aatgtgtagttatatgatcttttta

SEQ ID NO: 53700 - DNA, 25 bp, Canis familiaris
aatgttcgcttatattctgattatg

SEQ ID NO: 53701 - DNA, 25 bp, Canis familiaris
aatgtacctcttttactggaataat

SEQ ID NO: 53702 - DNA, 25 bp, Canis familiaris
aatttgtctatttagagggaaacat

SEQ ID NO: 53703 - DNA, 25 bp, Canis familiaris
aatgcccttcattatagcaggagaa

SEQ ID NO: 53704 - DNA, 25 bp, Canis familiaris
aatgaccccaagaaagtgccacaga

SEQ ID NO: 53705 - DNA, 25 bp, Canis familiaris
aatgaaccaaccaataacccagaag

SEQ ID NO: 53706 - DNA, 25 bp, Canis familiaris
aattaccccatctgtagccaagaag

SEQ ID NO: 53707 - DNA, 25 bp, Canis familiaris
caagaagacccaaaggacggagaag

SEQ ID NO: 53708 - DNA, 25 bp, Canis familiaris
caagagaaatcggaaggagggtggg

SEQ ID NO: 53709 - DNA, 25 bp, Canis familiaris
aatcggaacggatggctggttggtg

SEQ ID NO: 53710 - DNA, 25 bp, Canis familiaris
aatcggaggggttgcttggtggcgt

SEQ ID NO: 53711 - DNA, 25 bp, Canis familiaris
aatcaagagggcaccattgtggggt

SEQ ID NO: 53712 - DNA, 25 bp, Canis familiaris
aatgctaggagagcccatcggggtt

SEQ ID NO: 53713 - DNA, 25 bp, Canis familiaris
aatgacactagttcccagaggggtt

SEQ ID NO: 53714 - DNA, 25 bp, Canis familiaris
aatgatgacccttccaagatggtta

SEQ ID NO: 53715 - DNA, 25 bp, Canis familiaris
aatgatgtacttgcccagctgactt

SEQ ID NO: 53716 - DNA, 25 bp, Canis familiaris
aatgtgtttcatggcgcagagctgt

SEQ ID NO: 53717 - DNA, 25 bp, Canis familiaris
aatgcttgttcaggcacgccagaag

SEQ ID NO: 53718 - DNA, 25 bp, Canis familiaris
aatgatatggatgcagcccacgcga

SEQ ID NO: 53719 - DNA, 25 bp, Canis familiaris
aatgtagaatgcagcctccggcaaa

SEQ ID NO: 53720 - DNA, 25 bp, Canis familiaris
aatgctaaagcacaatccccaaata

SEQ ID NO: 53721 - DNA, 25 bp, Canis familiaris
aatgtgaactgtcaaccctcactct

SEQ ID NO: 53722 - DNA, 25 bp, Canis familiaris
aatgttactttctaccttctgatta

SEQ ID NO: 53723 - DNA, 25 bp, Canis familiaris
aatgtatttttctatcttgttttat

SEQ ID NO: 53724 - DNA, 25 bp, Canis familiaris
aatgtgatttgttattttcatattg

SEQ ID NO: 53725 - DNA, 25 bp, Canis familiaris
aatgtgtttgagtcttctccatagg

SEQ ID NO: 53726 - DNA, 25 bp, Canis familiaris
aatcaggtctggtttctggaagtca

SEQ ID NO: 53727 - DNA, 25 bp, Canis familiaris
aatgagaagtacttactgtatagta

SEQ ID NO: 53728 - DNA, 25 bp, Canis familiaris
aatgaacattatttacttctggctg

SEQ ID NO: 53729 - DNA, 25 bp, Canis familiaris
aatgtccttgtgatgtccttagctg

SEQ ID NO: 53730 - DNA, 25 bp, Canis familiaris
aatgccgtgcggaatgtcctagacg

SEQ ID NO: 53731 - DNA, 25 bp, Canis familiaris
aatgtcagtcagttattcagttgaa

SEQ ID NO: 53732 - DNA, 25 bp, Canis familiaris
aatgtctgtatgtctttggtgtgtg

SEQ ID NO: 53733 - DNA, 25 bp, Canis familiaris
aatgctctttgtatggcagtatgta

SEQ ID NO: 53734 - DNA, 25 bp, Canis familiaris
aatgccttatctatggtttgtagtt

SEQ ID NO: 53735 - DNA, 25 bp, Canis familiaris
aatgcctctaggatttttgtttgtc

SEQ ID NO: 53736 - DNA, 25 bp, Canis familiaris
aatgcctaacaggtttttaatacag

SEQ ID NO: 53737 - DNA, 25 bp, Canis familiaris
caatccgtaactgcttttccaaaca

SEQ ID NO: 53738 - DNA, 25 bp, Canis familiaris
aatccgagaactagttttctggagt

SEQ ID NO: 53739 - DNA, 25 bp, Canis familiaris
aatcctatggaaaatgtttggggtg

SEQ ID NO: 53740 - DNA, 25 bp, Canis familiaris
aatccaagacaatagcttggggtct

SEQ ID NO: 53741 - DNA, 25 bp, Canis familiaris
aatgtctaaaatgatgctgtgcttg

SEQ ID NO: 53742 - DNA, 25 bp, Canis familiaris
aatgtccaacttgtgatttctgccc

SEQ ID NO: 53743 - DNA, 25 bp, Canis familiaris
aatgtctaagttactgtttcttcaa

SEQ ID NO: 53744 - DNA, 25 bp, Canis familiaris
aatgtcccagttactcgttcatgga

SEQ ID NO: 53745 - DNA, 25 bp, Canis familiaris
aatgtaccagtccttttaatgatga

SEQ ID NO: 53746 - DNA, 25 bp, Canis familiaris
aatgaaccaggcccttctggatctg

SEQ ID NO: 53747 - DNA, 25 bp, Canis familiaris
aataactctcggccaataaatttgg

SEQ ID NO: 53748 - DNA, 25 bp, Canis familiaris
aatgaccttgggcccacaaacatgg

SEQ ID NO: 53749 - DNA, 25 bp, Canis familiaris
aatgagcttcatcaatccagccaag

SEQ ID NO: 53750 - DNA, 25 bp, Canis familiaris
aatgagcttctccttgggacatgtg

SEQ ID NO: 53751 - DNA, 25 bp, Canis familiaris
aatgtgccatatgctttgccactat

SEQ ID NO: 53752 - DNA, 25 bp, Canis familiaris
aatgtacaatacttgctcacctttc

SEQ ID NO: 53753 - DNA, 25 bp, Canis familiaris
aatgtaaaaactcctcctagaagct

SEQ ID NO: 53754 - DNA, 25 bp, Canis familiaris
aattgccaaagtgtccaaggaagct

SEQ ID NO: 53755 - DNA, 25 bp, Canis familiaris
aattcccaagttccaaggtgaagct

SEQ ID NO: 53756 - DNA, 25 bp, Canis familiaris
aatctccccgttcaagtgacaagtg

SEQ ID NO: 53757 - DNA, 25 bp, Canis familiaris
aatccccgggatcacgaacaaagct

SEQ ID NO: 53758 - DNA, 25 bp, Canis familiaris
aatctccacgggcaacaagtgcaaa

SEQ ID NO: 53759 - DNA, 25 bp, Canis familiaris
aatgtacctgaggcaaattcactgc

SEQ ID NO: 53760 - DNA, 25 bp, Canis familiaris
aatgataccaaggatacttaccact

SEQ ID NO: 53761 - DNA, 25 bp, Canis familiaris
aatgtcccatagaaaatatactcct

SEQ ID NO: 53762 - DNA, 25 bp, Canis familiaris
aatgaccataagttaatattctcta

SEQ ID NO: 53763 - DNA, 25 bp, Canis familiaris
aatgaatatttggcctatattcaca

SEQ ID NO: 53764 - DNA, 25 bp, Canis familiaris
aataattttctgccaccaatctcat

SEQ ID NO: 53765 - DNA, 25 bp, Canis familiaris
aatgagtttttggcagctccagcgt

SEQ ID NO: 53766 - DNA, 25 bp, Canis familiaris
aatgtttattgtagcctctctgggt

SEQ ID NO: 53767 - DNA, 25 bp, Canis familiaris
aatgttcatttgaaccccttcgctg

SEQ ID NO: 53768 - DNA, 25 bp, Canis familiaris
aatgatatgcagttgatcctccctt

SEQ ID NO: 53769 - DNA, 25 bp, Canis familiaris
aatgagtgagtggctggcttcccat

SEQ ID NO: 53770 - DNA, 25 bp, Canis familiaris
aatgagtggccaggagcatctgccg

SEQ ID NO: 53771 - DNA, 25 bp, Canis familiaris
aatgaggccatctatgacatctgtc

SEQ ID NO: 53772 - DNA, 25 bp, Canis familiaris
aatgagatgccggagagcccttagc

SEQ ID NO: 53773 - DNA, 25 bp, Canis familiaris
aatgcacacgtggaggactgcttat

SEQ ID NO: 53774 - DNA, 25 bp, Canis familiaris
aatgccagcgctcgagacaatacca

SEQ ID NO: 53775 - DNA, 25 bp, Canis familiaris
aatgcgcaccatgggacataaggag

SEQ ID NO: 53776 - DNA, 25 bp, Canis familiaris
aatgcccctgaggaagaagccctgg

SEQ ID NO: 53777 - DNA, 25 bp, Canis familiaris
aatgccgttgatgaccgaggcctct

SEQ ID NO: 53778 - DNA, 25 bp, Canis familiaris
aatgctgccttaaactagagtgcct

SEQ ID NO: 53779 - DNA, 25 bp, Canis familiaris
aatgcacatgcctacaactatggag

SEQ ID NO: 53780 - DNA, 25 bp, Canis familiaris
aatgaatcctggtacatagatgaca

SEQ ID NO: 53781 - DNA, 25 bp, Canis familiaris
aatccagcctggtaacatctgaagt

SEQ ID NO: 53782 - DNA, 25 bp, Canis familiaris
aatcgcagtcgaaagaattgggtga

SEQ ID NO: 53783 - DNA, 25 bp, Canis familiaris
aatcctatctaaagaattgggtgac

SEQ ID NO: 53784 - DNA, 25 bp, Canis familiaris
aatctttcagatattcaaggggatc

SEQ ID NO: 53785 - DNA, 25 bp, Canis familiaris
aattggtcactttctacgtgagcgt

SEQ ID NO: 53786 - DNA, 25 bp, Canis familiaris
aatgtttccagtttccaggagcgga

SEQ ID NO: 53787 - DNA, 25 bp, Canis familiaris
aatgtttctagatatccacagatgt

SEQ ID NO: 53788 - DNA, 25 bp, Canis familiaris
aatgagtttaattatcccatgttat

SEQ ID NO: 53789 - DNA, 25 bp, Canis familiaris
aatgagagtgtatgcctcctatctt

SEQ ID NO: 53790 - DNA, 25 bp, Canis familiaris
aatgagaatgcttacctccaaggtt

SEQ ID NO: 53791 - DNA, 25 bp, Canis familiaris
aatgagatgatccgtcacccatatg

SEQ ID NO: 53792 - DNA, 25 bp, Canis familiaris
aatgatgcattccagttgctgccta

SEQ ID NO: 53793 - DNA, 25 bp, Canis familiaris
aatgtcagtcattttgagccgaaat

SEQ ID NO: 53794 - DNA, 25 bp, Canis familiaris
aatgtcacatagtaactgccaaatt

SEQ ID NO: 53795 - DNA, 25 bp, Canis familiaris
aatccacatatgcaagttcaatctg

SEQ ID NO: 53796 - DNA, 25 bp, Canis familiaris
aatccaagcatgtaaattcctggtg

SEQ ID NO: 53797 - DNA, 25 bp, Canis familiaris
aatctcacgcagtcacagattgccc

SEQ ID NO: 53798 - DNA, 25 bp, Canis familiaris
aatgcacctagagcagtgtctgccg

SEQ ID NO: 53799 - DNA, 25 bp, Canis familiaris
aatgccttatgcagctcgatctgac

SEQ ID NO: 53800 - DNA, 25 bp, Canis familiaris
aatgccctagctagcctgggactta

SEQ ID NO: 53801 - DNA, 25 bp, Canis familiaris
aatgccgaacctctgaaatctcttt

SEQ ID NO: 53802 - DNA, 25 bp, Canis familiaris
aatcccaacacctgtgaactgtctt

SEQ ID NO: 53803 - DNA, 25 bp, Canis familiaris
aatcgccggccctagggatatgggg

SEQ ID NO: 53804 - DNA, 25 bp, Canis familiaris
aatccaaggcctcaggtgctggtga

SEQ ID NO: 53805 - DNA, 25 bp, Canis familiaris
aatcccagctactcgggaggctgag

SEQ ID NO: 53806 - DNA, 25 bp, Canis familiaris
aatcctcggagtcctagggtcgagc

SEQ ID NO: 53807 - DNA, 25 bp, Canis familiaris
aatccagtgtggcttagtgtttgac

SEQ ID NO: 53808 - DNA, 25 bp, Canis familiaris
aatcacgtctcccttaggagcctga

SEQ ID NO: 53809 - DNA, 25 bp, Canis familiaris
caagacttcacttttaggagctctg

SEQ ID NO: 53810 - DNA, 25 bp, Canis familiaris
aatactctcctagagagggccgggc

SEQ ID NO: 53811 - DNA, 25 bp, Canis familiaris
aatgacatttttcaagtggcttggg

SEQ ID NO: 53812 - DNA, 25 bp, Canis familiaris
aatgacattgttctagcagttcttc

SEQ ID NO: 53813 - DNA, 25 bp, Canis familiaris
aatgcacaatgtttttacttttcaa

SEQ ID NO: 53814 - DNA, 25 bp, Canis familiaris
aatgcactatgtatttcaaattact

SEQ ID NO: 53815 - DNA, 25 bp, Canis familiaris
aatgcctatcattcttatcatactg

SEQ ID NO: 53816 - DNA, 25 bp, Canis familiaris
aatgatcttcaacttatctttgtga

SEQ ID NO: 53817 - DNA, 25 bp, Canis familiaris
aatgttataaaattttttgcatgtt

SEQ ID NO: 53818 - DNA, 25 bp, Canis familiaris
aatttatttccctgtttcatgtctc

SEQ ID NO: 53819 - DNA, 25 bp, Canis familiaris
aattataccccctgggtcattctat

SEQ ID NO: 53820 - DNA, 25 bp, Canis familiaris
caatttacctcaataccggtcccat

SEQ ID NO: 53821 - DNA, 25 bp, Canis familiaris
aatcttaacagaaaccagggctcct

SEQ ID NO: 53822 - DNA, 25 bp, Canis familiaris
aatccggaagaatgtgcgtggtcac

SEQ ID NO: 53823 - DNA, 25 bp, Canis familiaris
aatccggaagcctgtgactgtccat

SEQ ID NO: 53824 - DNA, 25 bp, Canis familiaris
aatcaggtgccacctgtggacgctc

SEQ ID NO: 53825 - DNA, 25 bp, Canis familiaris
aatgcgagagcctttctcggcatct

SEQ ID NO: 53826 - DNA, 25 bp, Canis familiaris
aatgatgaagatttctgctcccctg

SEQ ID NO: 53827 - DNA, 25 bp, Canis familiaris
aatgatctgaatttcttcctccttt

SEQ ID NO: 53828 - DNA, 25 bp, Canis familiaris
aatgactgccagttttccatatgcc

SEQ ID NO: 53829 - DNA, 25 bp, Canis familiaris
aatgccatgcagcagcagttccagg

SEQ ID NO: 53830 - DNA, 25 bp, Canis familiaris
aatgccttcggctttccgaggaagt

SEQ ID NO: 53831 - DNA, 25 bp, Canis familiaris
aatgccccctggttgggtcgaatgt

SEQ ID NO: 53832 - DNA, 25 bp, Canis familiaris
aatcaagctccttttggggaaatgg

SEQ ID NO: 53833 - DNA, 25 bp, Canis familiaris
cactcaggtccccatttgtgggatt

SEQ ID NO: 53834 - DNA, 25 bp, Canis familiaris
aatgcatcgtaagatcttgaaggtt

SEQ ID NO: 53835 - DNA, 25 bp, Canis familiaris
aatgctcttaacaatctgatgtcag

SEQ ID NO: 53836 - DNA, 25 bp, Canis familiaris
aatccttcattctgcatgtgatcac

SEQ ID NO: 53837 - DNA, 25 bp, Canis familiaris
aatctcattcagcatggaggtcctg

SEQ ID NO: 53838 - DNA, 25 bp, Canis familiaris
aatccaccgccaggggtttgatggg

SEQ ID NO: 53839 - DNA, 25 bp, Canis familiaris
aatccccgtaccgtgtgtgtgaagt

SEQ ID NO: 53840 - DNA, 25 bp, Canis familiaris
aatccagttgaaccttatttgaaga

SEQ ID NO: 53841 - DNA, 25 bp, Canis familiaris
aatcgattggttcttattggcagga

SEQ ID NO: 53842 - DNA, 25 bp, Canis familiaris
aatgagcttggttcctcttttgctc

SEQ ID NO: 53843 - DNA, 25 bp, Canis familiaris
aatagcatgtgagcagctgtttgtt

SEQ ID NO: 53844 - DNA, 25 bp, Canis familiaris
aatgatgcaatgtccctttttatgt

SEQ ID NO: 53845 - DNA, 25 bp, Canis familiaris
aatgagcagtcttacttttgtagtt

SEQ ID NO: 53846 - DNA, 25 bp, Canis familiaris
aatgaactgcttaatttttggattt

SEQ ID NO: 53847 - DNA, 25 bp, Canis familiaris
aatgatacttcaacttatcttttgt

SEQ ID NO: 53848 - DNA, 25 bp, Canis familiaris
aatgttctgtctttctgtttttgat

SEQ ID NO: 53849 - DNA, 25 bp, Canis familiaris
aatgttctgttagtatgttctgtat

SEQ ID NO: 53850 - DNA, 25 bp, Canis familiaris
aatgttctgattacttgtttctcag

SEQ ID NO: 53851 - DNA, 25 bp, Canis familiaris
aatgaaccattcatcgttttcccag

SEQ ID NO: 53852 - DNA, 25 bp, Canis familiaris
aatgtacctcttcagtgttttctca

SEQ ID NO: 53853 - DNA, 25 bp, Canis familiaris
aatgtaccatttctgtgttttcgga

SEQ ID NO: 53854 - DNA, 25 bp, Canis familiaris
aatgaaccatttctctgttttccgg

SEQ ID NO: 53855 - DNA, 25 bp, Canis familiaris
aatgatcaaatcttcctttctttcc

SEQ ID NO: 53856 - DNA, 25 bp, Canis familiaris
aatgctaaaattctattcctttcat

SEQ ID NO: 53857 - DNA, 25 bp, Canis familiaris
aatctgcaaccacgttttgcctttc

SEQ ID NO: 53858 - DNA, 25 bp, Canis familiaris
aatgctgacagagggtccttccgtt

SEQ ID NO: 53859 - DNA, 25 bp, Canis familiaris
aatgcataagggtttcactatagtt

SEQ ID NO: 53860 - DNA, 25 bp, Canis familiaris
aatgcagggggttttgttgtgtttg

SEQ ID NO: 53861 - DNA, 25 bp, Canis familiaris
aatgaggggtttctgtgtgtgctga

SEQ ID NO: 53862 - DNA, 25 bp, Canis familiaris
aatcggaagctttggggcattgcaa

SEQ ID NO: 53863 - DNA, 25 bp, Canis familiaris
aatgctgcggatgtgaagaagattc

SEQ ID NO: 53864 - DNA, 25 bp, Canis familiaris
aatgccaggtctagcaaacaatgct

SEQ ID NO: 53865 - DNA, 25 bp, Canis familiaris
aatgcccatgtcatgcagataactg

SEQ ID NO: 53866 - DNA, 25 bp, Canis familiaris
aatgccctaatttctaatcgtgttt

SEQ ID NO: 53867 - DNA, 25 bp, Canis familiaris
aatcccttcattgtacaggagggta

SEQ ID NO: 53868 - DNA, 25 bp, Canis familiaris
aatcagccacgtttttctggaggag

SEQ ID NO: 53869 - DNA, 25 bp, Canis familiaris
aatcagaacttatttccggaattgc

SEQ ID NO: 53870 - DNA, 25 bp, Canis familiaris
aatcgatggcttcatttcctacatt

SEQ ID NO: 53871 - DNA, 25 bp, Canis familiaris
aatcagaggacgtatttcccacctg

SEQ ID NO: 53872 - DNA, 25 bp, Canis familiaris
aatccaagcgcttatttaccacctt

SEQ ID NO: 53873 - DNA, 25 bp, Canis familiaris
aatgccaaggatgttgcagtctcat

SEQ ID NO: 53874 - DNA, 25 bp, Canis familiaris
aatgcacgggggttgcagttaagtc

SEQ ID NO: 53875 - DNA, 25 bp, Canis familiaris
aatccttggggaatcgctttgagtt

SEQ ID NO: 53876 - DNA, 25 bp, Canis familiaris
aatcctctgccagatgtgcaggtca

SEQ ID NO: 53877 - DNA, 25 bp, Canis familiaris
aatcctctcactctacagggcaagt

SEQ ID NO: 53878 - DNA, 25 bp, Canis familiaris
aatcctccactcaatacatgtactc

SEQ ID NO: 53879 - DNA, 25 bp, Canis familiaris
aatctgtcctccaacaaaagtcctc

SEQ ID NO: 53880 - DNA, 25 bp, Canis familiaris
aatcctcccaggttgagcaagttct

SEQ ID NO: 53881 - DNA, 25 bp, Canis familiaris
aatccattgggaggggcaagttctt

SEQ ID NO: 53882 - DNA, 25 bp, Canis familiaris
aatcctatgggggacacactggcct

SEQ ID NO: 53883 - DNA, 25 bp, Canis familiaris
aatcctaggaaattgcccgtgcctc

SEQ ID NO: 53884 - DNA, 25 bp, Canis familiaris
aatccggggatttgccacaggagcc

SEQ ID NO: 53885 - DNA, 25 bp, Canis familiaris
caatccaggggaagtccgcgacaac

SEQ ID NO: 53886 - DNA, 25 bp, Canis familiaris
tgaaccgtgttctgaacgggaacca

SEQ ID NO: 53887 - DNA, 25 bp, Canis familiaris
taaccgtttcaagctttggatacct

SEQ ID NO: 53888 - DNA, 25 bp, Canis familiaris
aatccctttcagagctctttgaacc

SEQ ID NO: 53889 - DNA, 25 bp, Canis familiaris
aatccttgacccactatttggacac

SEQ ID NO: 53890 - DNA, 25 bp, Canis familiaris
aatcatttgaccaccaactattaca

SEQ ID NO: 53891 - DNA, 25 bp, Canis familiaris
aatgctgtaaccaacttatctaata

SEQ ID NO: 53892 - DNA, 25 bp, Canis familiaris
aatgctgctctagaggctaactcaa

SEQ ID NO: 53893 - DNA, 25 bp, Canis familiaris
aatcctatttagcctaattcacatc

SEQ ID NO: 53894 - DNA, 25 bp, Canis familiaris
aatcatcattcatagtctccttcac

SEQ ID NO: 53895 - DNA, 25 bp, Canis familiaris
aatgatcattatccttcccagttac

SEQ ID NO: 53896 - DNA, 25 bp, Canis familiaris
aatcatatctgtccttgcaatcaat

SEQ ID NO: 53897 - DNA, 25 bp, Canis familiaris
aatgcttcctcctgaagcactggta

SEQ ID NO: 53898 - DNA, 25 bp, Canis familiaris
aatgcttcctcctgagagcaactgg

SEQ ID NO: 53899 - DNA, 25 bp, Canis familiaris
aatgcagcaccctggagagcaagct

SEQ ID NO: 53900 - DNA, 25 bp, Canis familiaris
aatctgatgccctggtctggagtgt

SEQ ID NO: 53901 - DNA, 25 bp, Canis familiaris
aatcttgcagctcgggagtgataat

SEQ ID NO: 53902 - DNA, 25 bp, Canis familiaris
aatgcaagctctccagaggtgaaag

SEQ ID NO: 53903 - DNA, 25 bp, Canis familiaris
aatgaagtgtcctatgaaacaagca

SEQ ID NO: 53904 - DNA, 25 bp, Canis familiaris
aatgaagcatctcctctaaaaccac

SEQ ID NO: 53905 - DNA, 25 bp, Canis familiaris
aatgaggtctgcttcttacagcctc

SEQ ID NO: 53906 - DNA, 25 bp, Canis familiaris
aatgatggcattgtctgaactctag

SEQ ID NO: 53907 - DNA, 25 bp, Canis familiaris
aatgctcctggtgtgacccatgagc

SEQ ID NO: 53908 - DNA, 25 bp, Canis familiaris
aatctccctgtgcaacccagaatat

SEQ ID NO: 53909 - DNA, 25 bp, Canis familiaris
aatgcatcgctctatggaaaacaga

SEQ ID NO: 53910 - DNA, 25 bp, Canis familiaris
aatgagtctgcattcgcattaacag

SEQ ID NO: 53911 - DNA, 25 bp, Canis familiaris
aatgttggcatttcatcttcacaaa

SEQ ID NO: 53912 - DNA, 25 bp, Canis familiaris
aatgttggtgccttctgtgtcacaa

SEQ ID NO: 53913 - DNA, 25 bp, Canis familiaris
aatgttggcggcttggtgtaccagc

SEQ ID NO: 53914 - DNA, 25 bp, Canis familiaris
aatttgaggggtccgtgagcatcca

SEQ ID NO: 53915 - DNA, 25 bp, Canis familiaris
aatgttggtggttcctcagagcact

SEQ ID NO: 53916 - DNA, 25 bp, Canis familiaris
aatgttgggtgtcaaccagcctttc

SEQ ID NO: 53917 - DNA, 25 bp, Canis familiaris
aatctctgagggccttactgcccat

SEQ ID NO: 53918 - DNA, 25 bp, Canis familiaris
aatgccttggaggcttgtgctctcc

SEQ ID NO: 53919 - DNA, 25 bp, Canis familiaris
aatgacatatggggctgttctatac

SEQ ID NO: 53920 - DNA, 25 bp, Canis familiaris
aatgacattgccaacaggtgttagc

SEQ ID NO: 53921 - DNA, 25 bp, Canis familiaris
aatccattgccaatccagaggaccc

SEQ ID NO: 53922 - DNA, 25 bp, Canis familiaris
aatccattgccaatccagaggaccc

SEQ ID NO: 53923 - DNA, 25 bp, Canis familiaris
aatccattgccaatccagaggaccc

SEQ ID NO: 53924 - DNA, 25 bp, Canis familiaris
aatgccattggctattagggaccaa

SEQ ID NO: 53925 - DNA, 25 bp, Canis familiaris
aatgccttgagggtagcgtgggaca

SEQ ID NO: 53926 - DNA, 25 bp, Canis familiaris
cactgcaccggtctaccgggtcaat

SEQ ID NO: 53927 - DNA, 25 bp, Canis familiaris
aatcagcctggtcccaccagggaat

SEQ ID NO: 53928 - DNA, 25 bp, Canis familiaris
aatcatgcggtatccacgagaccac

SEQ ID NO: 53929 - DNA, 25 bp, Canis familiaris
aatctgaggctatctcttaaccctt

SEQ ID NO: 53930 - DNA, 25 bp, Canis familiaris
aatctgaggcaatactactttccat

SEQ ID NO: 53931 - DNA, 25 bp, Canis familiaris
aatctggagagataccctgggtacc

SEQ ID NO: 53932 - DNA, 25 bp, Canis familiaris
aatcgggagtattacctggtgcttg

SEQ ID NO: 53933 - DNA, 25 bp, Canis familiaris
aatcaggcgggatagcacctggctg

SEQ ID NO: 53934 - DNA, 25 bp, Canis familiaris
aatcgggcggcatagtcgctgttga

SEQ ID NO: 53935 - DNA, 25 bp, Canis familiaris
aatcgcgataggccaaggtgcatat

SEQ ID NO: 53936 - DNA, 25 bp, Canis familiaris
aatgctctgatacatgaagggtata

SEQ ID NO: 53937 - DNA, 25 bp, Canis familiaris
aatgcctatgcagttaagttggata

SEQ ID NO: 53938 - DNA, 25 bp, Canis familiaris
aatgctttcatgttggagccagaat

SEQ ID NO: 53939 - DNA, 25 bp, Canis familiaris
aatgcttctagatcgactgcgagca

SEQ ID NO: 53940 - DNA, 25 bp, Canis familiaris
aatgctggctgaggtacctggagcc

SEQ ID NO: 53941 - DNA, 25 bp, Canis familiaris
aatgctggtataatgacttgaatgc

SEQ ID NO: 53942 - DNA, 25 bp, Canis familiaris
aatgctgtttttactgtgcaacttt

SEQ ID NO: 53943 - DNA, 25 bp, Canis familiaris
aatgcggttctgttcacacagattt

SEQ ID NO: 53944 - DNA, 25 bp, Canis familiaris
aatgcgcgtcctctgcaaaatactc

SEQ ID NO: 53945 - DNA, 25 bp, Canis familiaris
aatgaggtctcttgggcagaatccc

SEQ ID NO: 53946 - DNA, 25 bp, Canis familiaris
aatgaggctctctgggcccataaat

SEQ ID NO: 53947 - DNA, 25 bp, Canis familiaris
aatgcaggcaggctgggcctcaaga

SEQ ID NO: 53948 - DNA, 25 bp, Canis familiaris
aatgaagggctctgtctgccaaaaa

SEQ ID NO: 53949 - DNA, 25 bp, Canis familiaris
aatgcacagtgtcctagtgcccatc

SEQ ID NO: 53950 - DNA, 25 bp, Canis familiaris
aatgcagatgttccaaatgcccctc

SEQ ID NO: 53951 - DNA, 25 bp, Canis familiaris
aatgcagagagacctacagacaccc

SEQ ID NO: 53952 - DNA, 25 bp, Canis familiaris
aatgcagaaccttagcagcacctcc

SEQ ID NO: 53953 - DNA, 25 bp, Canis familiaris
aatgcagattattgggccatgcccc

SEQ ID NO: 53954 - DNA, 25 bp, Canis familiaris
caatcagtacatcgtgtgcctggcc

SEQ ID NO: 53955 - DNA, 25 bp, Canis familiaris
aatctgctgcaactggtgtgctgcg

SEQ ID NO: 53956 - DNA, 25 bp, Canis familiaris
aatcaggccactttggctgctgtgc

SEQ ID NO: 53957 - DNA, 25 bp, Canis familiaris
aatcaggccactttggctgctgtgc

SEQ ID NO: 53958 - DNA, 25 bp, Canis familiaris
aatcccagcactttgggaggccgag

SEQ ID NO: 53959 - DNA, 25 bp, Canis familiaris
aatcacggcacttagaggaggttat

SEQ ID NO: 53960 - DNA, 25 bp, Canis familiaris
aatacggcatttcagggaaatagta

SEQ ID NO: 53961 - DNA, 25 bp, Canis familiaris
aataagcgctttgaaaagaaatttg

SEQ ID NO: 53962 - DNA, 25 bp, Canis familiaris
aatatcatggctctaaaattaaatg

SEQ ID NO: 53963 - DNA, 25 bp, Canis familiaris
aatagctccagtaaagacatgttag

SEQ ID NO: 53964 - DNA, 25 bp, Canis familiaris
aatgagctagcagtggcgatgacag

SEQ ID NO: 53965 - DNA, 25 bp, Canis familiaris
aatgagctactgaccaagagcatag

SEQ ID NO: 53966 - DNA, 25 bp, Canis familiaris
aatgcacattttccaatggctagaa

SEQ ID NO: 53967 - DNA, 25 bp, Canis familiaris
aatgacttacccaaggccaaacata

SEQ ID NO: 53968 - DNA, 25 bp, Canis familiaris
aatgacttcaggccaagtactaact

SEQ ID NO: 53969 - DNA, 25 bp, Canis familiaris
aatgaccccttcattgatctcaact

SEQ ID NO: 53970 - DNA, 25 bp, Canis familiaris
aatcaaacttcctctatgtgagact

SEQ ID NO: 53971 - DNA, 25 bp, Canis familiaris
aatcaactcttcaatggccatgggg

SEQ ID NO: 53972 - DNA, 25 bp, Canis familiaris
aatgaacttgtctgtgcactgtggc

SEQ ID NO: 53973 - DNA, 25 bp, Canis familiaris
aatgaaattcctcgtactggctgct

SEQ ID NO: 53974 - DNA, 25 bp, Canis familiaris
aatgcttttcaaaatactggtcttt

SEQ ID NO: 53975 - DNA, 25 bp, Canis familiaris
aatgctgtttcactggttatgcggc

SEQ ID NO: 53976 - DNA, 25 bp, Canis familiaris
aatgatgctgttttggtctttgggg

SEQ ID NO: 53977 - DNA, 25 bp, Canis familiaris
aatgagctgtctttgatgtgtctta

SEQ ID NO: 53978 - DNA, 25 bp, Canis familiaris
aatgacttccatcttgacttacaca

SEQ ID NO: 53979 - DNA, 25 bp, Canis familiaris
aatgcctgttcttttacttacttct

SEQ ID NO: 53980 - DNA, 25 bp, Canis familiaris
aatgcgtagccttacttgcttactt

SEQ ID NO: 53981 - DNA, 25 bp, Canis familiaris
aatgcggaccatttagtgtttcttt

SEQ ID NO: 53982 - DNA, 25 bp, Canis familiaris
aatcgaacactttagcagaaactga

SEQ ID NO: 53983 - DNA, 25 bp, Canis familiaris
aatgctacacacttatcaatggttt

SEQ ID NO: 53984 - DNA, 25 bp, Canis familiaris
aatctgaacagcctctgaaggtaat

SEQ ID NO: 53985 - DNA, 25 bp, Canis familiaris
aatgccagtagcatctacacgtaga

SEQ ID NO: 53986 - DNA, 25 bp, Canis familiaris
aatccagtgacaacttcagcactta

SEQ ID NO: 53987 - DNA, 25 bp, Canis familiaris
aatccagtgatttactctgactgta

SEQ ID NO: 53988 - DNA, 25 bp, Canis familiaris
aatcctgagattatgcttgagttgc

SEQ ID NO: 53989 - DNA, 25 bp, Canis familiaris
aatccgaattttctgtgttgtagtc

SEQ ID NO: 53990 - DNA, 25 bp, Canis familiaris
aatcctaatatcacttagtttattt

SEQ ID NO: 53991 - DNA, 25 bp, Canis familiaris
aatgatgaccattttcttagtttga

SEQ ID NO: 53992 - DNA, 25 bp, Canis familiaris
aatgatctccaatttcaaatgttca

SEQ ID NO: 53993 - DNA, 25 bp, Canis familiaris
aatgaccatcagtattcaaggttat

SEQ ID NO: 53994 - DNA, 25 bp, Canis familiaris
aatgcccataaaatccatcgaaatg

SEQ ID NO: 53995 - DNA, 25 bp, Canis familiaris
aatgcacttattcttattacaagca

SEQ ID NO: 53996 - DNA, 25 bp, Canis familiaris
aatgatctttgtattctcaactagc

SEQ ID NO: 53997 - DNA, 25 bp, Canis familiaris
aatcttggcttcgattctcaactac

SEQ ID NO: 53998 - DNA, 25 bp, Canis familiaris
caattggccttggacttcgaagcac

SEQ ID NO: 53999 - DNA, 25 bp, Canis familiaris
aattcgcaagggacttccaaccatg

SEQ ID NO: 54000 - DNA, 25 bp, Canis familiaris
aatgcatggaaggcgtttgtaaaat

SEQ ID NO: 54001 - DNA, 25 bp, Canis familiaris
aatcgtgtggctgtgcttgaaaacc

SEQ ID NO: 54002 - DNA, 25 bp, Canis familiaris
aatcagtaccagagcgtgaggacag

SEQ ID NO: 54003 - DNA, 25 bp, Canis familiaris
aatccttccagactttagcgacatt

SEQ ID NO: 54004 - DNA, 25 bp, Canis familiaris
atgtttcctttgttggtgcgttatt

SEQ ID NO: 54005 - DNA, 25 bp, Canis familiaris
caacgtccccgcattggtaggatat

SEQ ID NO: 54006 - DNA, 25 bp, Canis familiaris
aatgccacccctcttggtggagaat

SEQ ID NO: 54007 - DNA, 25 bp, Canis familiaris
aatgaaattcctacttgcctttgtt

SEQ ID NO: 54008 - DNA, 25 bp, Canis familiaris
aatgaaaacttcacgtgccttcttc

SEQ ID NO: 54009 - DNA, 25 bp, Canis familiaris
aatgcaaaaataacctgtcctacaa

SEQ ID NO: 54010 - DNA, 25 bp, Canis familiaris
aatcaaacaccaagacgtccaacac

SEQ ID NO: 54011 - DNA, 25 bp, Canis familiaris
aataagatcctcagagcgtggggag

SEQ ID NO: 54012 - DNA, 25 bp, Canis familiaris
aataaacatctcacctgggataagt

SEQ ID NO: 54013 - DNA, 25 bp, Canis familiaris
aatccagtactctccgggaggagga

SEQ ID NO: 54014 - DNA, 25 bp, Canis familiaris
aattcagaactctcgttgggggtgc

SEQ ID NO: 54015 - DNA, 25 bp, Canis familiaris
aatacaggacttctgttcgagggcc

SEQ ID NO: 54016 - DNA, 25 bp, Canis familiaris
aatgcaaaactcccgtctagcagga

SEQ ID NO: 54017 - DNA, 25 bp, Canis familiaris
aatgcaaggattgctcttctctggg

SEQ ID NO: 54018 - DNA, 25 bp, Canis familiaris
aatgcctggaggctttcctggtggt

SEQ ID NO: 54019 - DNA, 25 bp, Canis familiaris
aatcgtgtgggacctgtagcagcag

SEQ ID NO: 54020 - DNA, 25 bp, Canis familiaris
aatgcagccgaggagctctgtacac

SEQ ID NO: 54021 - DNA, 25 bp, Canis familiaris
aatgcatcgatgggacctgtacttg

SEQ ID NO: 54022 - DNA, 25 bp, Canis familiaris
aatgcatggctggtacactggactt

SEQ ID NO: 54023 - DNA, 25 bp, Canis familiaris
aatgaggctttgtacgacatctgct

SEQ ID NO: 54024 - DNA, 25 bp, Canis familiaris
aatgaactcctgtatagtctctaat

SEQ ID NO: 54025 - DNA, 25 bp, Canis familiaris
aatgccctgcctgaagtgtgtttta

SEQ ID NO: 54026 - DNA, 25 bp, Canis familiaris
aatgccctcaccaaagatgctgatt

SEQ ID NO: 54027 - DNA, 25 bp, Canis familiaris
aatgcactctctacacaaatctaat

SEQ ID NO: 54028 - DNA, 25 bp, Canis familiaris
aatgcttccatttaaatccataact

SEQ ID NO: 54029 - DNA, 25 bp, Canis familiaris
aatcttgacgattaaaactgatacg

SEQ ID NO: 54030 - DNA, 25 bp, Canis familiaris
aatctataggtgtcaagcatacatt

SEQ ID NO: 54031 - DNA, 25 bp, Canis familiaris
aatgcctcaggcccagagcatgaac

SEQ ID NO: 54032 - DNA, 25 bp, Canis familiaris
aatccctgccgttagcgactgcgac

SEQ ID NO: 54033 - DNA, 25 bp, Canis familiaris
aatccttgggactatctgaccgaat

SEQ ID NO: 54034 - DNA, 25 bp, Canis familiaris
aatcctttatataatggacgaaatt

SEQ ID NO: 54035 - DNA, 25 bp, Canis familiaris
aatcctttatattatggaccgaaat

SEQ ID NO: 54036 - DNA, 25 bp, Canis familiaris
aatctctgtccaattattagccgaa

SEQ ID NO: 54037 - DNA, 25 bp, Canis familiaris
aatgcttgctactattttggctgga

SEQ ID NO: 54038 - DNA, 25 bp, Canis familiaris
aatgcactctgttttctgggtggag

SEQ ID NO: 54039 - DNA, 25 bp, Canis familiaris
aatgcctatttttcttgtatcgatg

SEQ ID NO: 54040 - DNA, 25 bp, Canis familiaris
aatgcctgacacattccttacagaa

SEQ ID NO: 54041 - DNA, 25 bp, Canis familiaris
aatgcccacatgatattttactgaa

SEQ ID NO: 54042 - DNA, 25 bp, Canis familiaris
aatgcccacagaacattctccagaa

SEQ ID NO: 54043 - DNA, 25 bp, Canis familiaris
aatgaccacagagttcttccagaac

SEQ ID NO: 54044 - DNA, 25 bp, Canis familiaris
aatgcagccaagggctcttccaatt

SEQ ID NO: 54045 - DNA, 25 bp, Canis familiaris
aatgcagcccagggctcttccaatt

SEQ ID NO: 54046 - DNA, 25 bp, Canis familiaris
aatgagcctattccttttctgatgt

SEQ ID NO: 54047 - DNA, 25 bp, Canis familiaris
aatgctgcacaatgccactttctgt

SEQ ID NO: 54048 - DNA, 25 bp, Canis familiaris
aatgcacagaaaccctatttgctac

SEQ ID NO: 54049 - DNA, 25 bp, Canis familiaris
aatgacatgaaaaatcatcgttgta

SEQ ID NO: 54050 - DNA, 25 bp, Canis familiaris
aatgacatatcctgtttgtgtatag

SEQ ID NO: 54051 - DNA, 25 bp, Canis familiaris
aatgccatcacctgtacggcttgta

SEQ ID NO: 54052 - DNA, 25 bp, Canis familiaris
aatgcaacagactctataccttgat

SEQ ID NO: 54053 - DNA, 25 bp, Canis familiaris
aatgaaacacaattattcgcattga

SEQ ID NO: 54054 - DNA, 25 bp, Canis familiaris
aataaatgacatttcatggcaagga

SEQ ID NO: 54055 - DNA, 25 bp, Canis familiaris
aataaatcacattcttgcacataag

SEQ ID NO: 54056 - DNA, 25 bp, Canis familiaris
aatgcaagacttgttgccaatatga

SEQ ID NO: 54057 - DNA, 25 bp, Canis familiaris
aatgaaactatcttgcctccttgat

SEQ ID NO: 54058 - DNA, 25 bp, Canis familiaris
aataagaaagcctctctctctaatc

SEQ ID NO: 54059 - DNA, 25 bp, Canis familiaris
aatgaagacagggctccttccttct

SEQ ID NO: 54060 - DNA, 25 bp, Canis familiaris
aatgaaaggggtgtctctgccctcg

SEQ ID NO: 54061 - DNA, 25 bp, Canis familiaris
aataaagccgttttgcggacctgcg

SEQ ID NO: 54062 - DNA, 25 bp, Canis familiaris
caataaaccagcaagggcggcccag

SEQ ID NO: 54063 - DNA, 25 bp, Canis familiaris
caattagagtcagccgtggacccga

SEQ ID NO: 54064 - DNA, 25 bp, Canis familiaris
aataatgtgagacctctgggggccg

SEQ ID NO: 54065 - DNA, 25 bp, Canis familiaris
aatagagggccacctgggtgactca

SEQ ID NO: 54066 - DNA, 25 bp, Canis familiaris
caagggggactcgtcagtcgactag

SEQ ID NO: 54067 - DNA, 25 bp, Canis familiaris
aattggggacccaagacagattggc

SEQ ID NO: 54068 - DNA, 25 bp, Canis familiaris
aataggccgaggggatgccagcacg

SEQ ID NO: 54069 - DNA, 25 bp, Canis familiaris
aatcagaggcgccggaagcctcacg

SEQ ID NO: 54070 - DNA, 25 bp, Canis familiaris
aatgctgatgacccggaacttgctc

SEQ ID NO: 54071 - DNA, 25 bp, Canis familiaris
aatctgctgaccaacacaactgtgc

SEQ ID NO: 54072 - DNA, 25 bp, Canis familiaris
aatccatgcacattaatccactctg

SEQ ID NO: 54073 - DNA, 25 bp, Canis familiaris
aatcgtagcaattgtgccctcttct

SEQ ID NO: 54074 - DNA, 25 bp, Canis familiaris
aatgcaaactatttcccttgcctct

SEQ ID NO: 54075 - DNA, 25 bp, Canis familiaris
aatgcaaatattttcaccctcctgc

SEQ ID NO: 54076 - DNA, 25 bp, Canis familiaris
aatgacgagcttttcacatcacctt

SEQ ID NO: 54077 - DNA, 25 bp, Canis familiaris
aatgacaactttgtcaagctcattt

SEQ ID NO: 54078 - DNA, 25 bp, Canis familiaris
aatgaaactttcccaaattgcttag

SEQ ID NO: 54079 - DNA, 25 bp, Canis familiaris
aatgaccctttctctgaattgttcc

SEQ ID NO: 54080 - DNA, 25 bp, Canis familiaris
aatgaccttctttgtcttttgtgac

SEQ ID NO: 54081 - DNA, 25 bp, Canis familiaris
aatgaccatgtgaatttgcctttgt

SEQ ID NO: 54082 - DNA, 25 bp, Canis familiaris
aatgctaatgtgattcgcttatgtt

SEQ ID NO: 54083 - DNA, 25 bp, Canis familiaris
aatgcatttaagatccatccatgtt

SEQ ID NO: 54084 - DNA, 25 bp, Canis familiaris
aatccttaaccttagcgatggtttg

SEQ ID NO: 54085 - DNA, 25 bp, Canis familiaris
aatccttggtttcagctgttgttgt

SEQ ID NO: 54086 - DNA, 25 bp, Canis familiaris
aatccttggtttcagctgttgttgt

SEQ ID NO: 54087 - DNA, 25 bp, Canis familiaris
aatccttggttaactgttgtataat

SEQ ID NO: 54088 - DNA, 25 bp, Canis familiaris
aatccttcacttcagcaattttata

SEQ ID NO: 54089 - DNA, 25 bp, Canis familiaris
aatgccttatttttgaattctttag

SEQ ID NO: 54090 - DNA, 25 bp, Canis familiaris
aatgcactcgatcttgtcatttttt

SEQ ID NO: 54091 - DNA, 25 bp, Canis familiaris
aatagccagcagcttggttcttgaa

SEQ ID NO: 54092 - DNA, 25 bp, Canis familiaris
aatgacaacgcactcgtggtgtcga

SEQ ID NO: 54093 - DNA, 25 bp, Canis familiaris
aatgacgatcgcgctggcgttgttt

SEQ ID NO: 54094 - DNA, 25 bp, Canis familiaris
aatacgcacacggcagcatgcggtt

SEQ ID NO: 54095 - DNA, 25 bp, Canis familiaris
aatcagcgacaggatgcctgccgct

SEQ ID NO: 54096 - DNA, 25 bp, Canis familiaris
aatctcaggcgcagcgcctcgcgaa

SEQ ID NO: 54097 - DNA, 25 bp, Canis familiaris
aatcgagatggcaacgagtcctggt

SEQ ID NO: 54098 - DNA, 25 bp, Canis familiaris
aataacatgctcacgctgtttagtc

SEQ ID NO: 54099 - DNA, 25 bp, Canis familiaris
aatgaatcatgtcaccgtaacagat

SEQ ID NO: 54100 - DNA, 25 bp, Canis familiaris
aatgaacagtgccagccgtgttgct

SEQ ID NO: 54101 - DNA, 25 bp, Canis familiaris
aataacaagctgaccttggcacccc

SEQ ID NO: 54102 - DNA, 25 bp, Canis familiaris
aatgaaaatgagagtgaggccgccc

SEQ ID NO: 54103 - DNA, 25 bp, Canis familiaris
aataaagctggcaagttcccttcct

SEQ ID NO: 54104 - DNA, 25 bp, Canis familiaris
aataaagctggcaagttcccttcct

SEQ ID NO: 54105 - DNA, 25 bp, Canis familiaris
aatgaaatcaacagttcctccacct

SEQ ID NO: 54106 - DNA, 25 bp, Canis familiaris
aatgaatttacttttcttctcgcct

SEQ ID NO: 54107 - DNA, 25 bp, Canis familiaris
aatgcagttgtatttggtcttccac

SEQ ID NO: 54108 - DNA, 25 bp, Canis familiaris
aatcagttgcaatagtctttcccct

SEQ ID NO: 54109 - DNA, 25 bp, Canis familiaris
aatcatcatatgctagaatcttgtc

SEQ ID NO: 54110 - DNA, 25 bp, Canis familiaris
aatgctgatgagcttgtgagcttgc

SEQ ID NO: 54111 - DNA, 25 bp, Canis familiaris
aatgcagatgggtgctatcagagcc

SEQ ID NO: 54112 - DNA, 25 bp, Canis familiaris
aatctgtgtgtgtgcatatgaatgc

SEQ ID NO: 54113 - DNA, 25 bp, Canis familiaris
aatctggctgttcgcaggaatgtta

SEQ ID NO: 54114 - DNA, 25 bp, Canis familiaris
aatgctgtatgtcaacaatacttca

SEQ ID NO: 54115 - DNA, 25 bp, Canis familiaris
aatgcacttatacacgatacataca

SEQ ID NO: 54116 - DNA, 25 bp, Canis familiaris
aatgcagtttaatcagagtgccatt

SEQ ID NO: 54117 - DNA, 25 bp, Canis familiaris
aatgcaggtatgtttctgagccaca

SEQ ID NO: 54118 - DNA, 25 bp, Canis familiaris
aatgcagttgagttggttctaatta

SEQ ID NO: 54119 - DNA, 25 bp, Canis familiaris
aatgcagttgagtattcttttttaa

SEQ ID NO: 54120 - DNA, 25 bp, Canis familiaris
aatgctctatggttgctgtttttaa

SEQ ID NO: 54121 - DNA, 25 bp, Canis familiaris
aatgctgtggaattctgttttctaa

SEQ ID NO: 54122 - DNA, 25 bp, Canis familiaris
aatgcatctggtatcgtgtgttaat

SEQ ID NO: 54123 - DNA, 25 bp, Canis familiaris
aatgctctggtagccaagctttgtg

SEQ ID NO: 54124 - DNA, 25 bp, Canis familiaris
aatctcggagaccacctgagttggg

SEQ ID NO: 54125 - DNA, 25 bp, Canis familiaris
aatctggtagattcaggtggagtgg

SEQ ID NO: 54126 - DNA, 25 bp, Canis familiaris
aatcatgggagcttcagtgtttggg

SEQ ID NO: 54127 - DNA, 25 bp, Canis familiaris
aatgcagccgagttgaatcttgtgg

SEQ ID NO: 54128 - DNA, 25 bp, Canis familiaris
aatcacgcgatgttgactgcacagg

SEQ ID NO: 54129 - DNA, 25 bp, Canis familiaris
aatccactgatgttggtatctgggg

SEQ ID NO: 54130 - DNA, 25 bp, Canis familiaris
aatccactatgatcaaattgggggg

SEQ ID NO: 54131 - DNA, 25 bp, Canis familiaris
aatccctctggtgaatattggctgg

SEQ ID NO: 54132 - DNA, 25 bp, Canis familiaris
aatcgtcatcagggccaagttcgtg

SEQ ID NO: 54133 - DNA, 25 bp, Canis familiaris
aatctactcggaaccagtctgcaat

SEQ ID NO: 54134 - DNA, 25 bp, Canis familiaris
aatctttctgaacccgactcagttc

SEQ ID NO: 54135 - DNA, 25 bp, Canis familiaris
aatctgttaaactgctgaatctgtc

SEQ ID NO: 54136 - DNA, 25 bp, Canis familiaris
aatctaattgaacagctatgagctg

SEQ ID NO: 54137 - DNA, 25 bp, Canis familiaris
aattaaccattatgtatgagctttt

SEQ ID NO: 54138 - DNA, 25 bp, Canis familiaris
aataatgacccattcggggcttgtg

SEQ ID NO: 54139 - DNA, 25 bp, Canis familiaris
aatcctccccacagtgaagtctaga

SEQ ID NO: 54140 - DNA, 25 bp, Canis familiaris
aatccttccattgcttaattcacga

SEQ ID NO: 54141 - DNA, 25 bp, Canis familiaris
aatgcctttattctgtagtcttaga

SEQ ID NO: 54142 - DNA, 25 bp, Canis familiaris
aatccacattacttttaacttcaga

SEQ ID NO: 54143 - DNA, 25 bp, Canis familiaris
aatcgcaagaacataataattaaaa

SEQ ID NO: 54144 - DNA, 25 bp, Canis familiaris
aatccaacatccatttagataaaca

SEQ ID NO: 54145 - DNA, 25 bp, Canis familiaris
aatgcaatataggtcactttaaaac

SEQ ID NO: 54146 - DNA, 25 bp, Canis familiaris
aatgcatcttatttcctctttaaaa

SEQ ID NO: 54147 - DNA, 25 bp, Canis familiaris
aatgcacttaatactcttctgttgt

SEQ ID NO: 54148 - DNA, 25 bp, Canis familiaris
aatgcattatatagtccaattgttt

SEQ ID NO: 54149 - DNA, 25 bp, Canis familiaris
aatgctttcttcttgatacttgtta

SEQ ID NO: 54150 - DNA, 25 bp, Canis familiaris
aatgcttttccttgtacatgatact

SEQ ID NO: 54151 - DNA, 25 bp, Canis familiaris
aatgcttcttccaattagtctctat

SEQ ID NO: 54152 - DNA, 25 bp, Canis familiaris
aatgaatgttctataagccctttgt

SEQ ID NO: 54153 - DNA, 25 bp, Canis familiaris
aatgaatgtgcctggagacccttct

SEQ ID NO: 54154 - DNA, 25 bp, Canis familiaris
caatgacgtcgaacggaccttggcc

SEQ ID NO: 54155 - DNA, 25 bp, Canis familiaris
aatacggtgacgtgaccggagccgc

SEQ ID NO: 54156 - DNA, 25 bp, Canis familiaris
aatcatcgtagaaaagaccccccag

SEQ ID NO: 54157 - DNA, 25 bp, Canis familiaris
aatccatgataggtttgacccccct

SEQ ID NO: 54158 - DNA, 25 bp, Canis familiaris
aatccagaatggcaaagcccccaga

SEQ ID NO: 54159 - DNA, 25 bp, Canis familiaris
aatccagatcaaagacagggcccca

SEQ ID NO: 54160 - DNA, 25 bp, Canis familiaris
aattaacatcaagagggcagcccag

SEQ ID NO: 54161 - DNA, 25 bp, Canis familiaris
aatccggccaactgggagccaaggg

SEQ ID NO: 54162 - DNA, 25 bp, Canis familiaris
aatcctggagcatattggaggctaa

SEQ ID NO: 54163 - DNA, 25 bp, Canis familiaris
aatagtggaatatctgggtcataca

SEQ ID NO: 54164 - DNA, 25 bp, Canis familiaris
aataagggaagagggctgccagaat

SEQ ID NO: 54165 - DNA, 25 bp, Canis familiaris
cacattgaaggaaggggttaactcg

SEQ ID NO: 54166 - DNA, 25 bp, Canis familiaris
aatcgaaggatccggaatgatccct

SEQ ID NO: 54167 - DNA, 25 bp, Canis familiaris
aatccaagcttcaaggaattccttc

SEQ ID NO: 54168 - DNA, 25 bp, Canis familiaris
aatcaagatttcgggaagaccttct

SEQ ID NO: 54169 - DNA, 25 bp, Canis familiaris
aatccaggcttctgaagaccttctc

SEQ ID NO: 54170 - DNA, 25 bp, Canis familiaris
aatcctgagcttctaatgactttgt

SEQ ID NO: 54171 - DNA, 25 bp, Canis familiaris
aatcctcagtctactaatccttaat

SEQ ID NO: 54172 - DNA, 25 bp, Canis familiaris
aatctccagtctgtttccttgactt

SEQ ID NO: 54173 - DNA, 25 bp, Canis familiaris
aatctagcattgttttggccaagac

SEQ ID NO: 54174 - DNA, 25 bp, Canis familiaris
aatgctcgcacagtttatggcacga

SEQ ID NO: 54175 - DNA, 25 bp, Canis familiaris
aatctgtgacacactatgacaaatt

SEQ ID NO: 54176 - DNA, 25 bp, Canis familiaris
aatctgtgacctggacttcaccatc

SEQ ID NO: 54177 - DNA, 25 bp, Canis familiaris
aatcgtgttttagatacgcatccga

SEQ ID NO: 54178 - DNA, 25 bp, Canis familiaris
aatctggctttgaacgtagcaccca

SEQ ID NO: 54179 - DNA, 25 bp, Canis familiaris
aatgctattttattcttggacccaa

SEQ ID NO: 54180 - DNA, 25 bp, Canis familiaris
aatgctttgttttcattgttgcaaa

SEQ ID NO: 54181 - DNA, 25 bp, Canis familiaris
aatgctatttttaattttcacactt

SEQ ID NO: 54182 - DNA, 25 bp, Canis familiaris
aatctattttccaagtagccatttt

SEQ ID NO: 54183 - DNA, 25 bp, Canis familiaris
aattttgtgaccatagaggatttaa

SEQ ID NO: 54184 - DNA, 25 bp, Canis familiaris
aatttgtataagctagaagtcacta

SEQ ID NO: 54185 - DNA, 25 bp, Canis familiaris
aatgctgctataaacctggaggtac

SEQ ID NO: 54186 - DNA, 25 bp, Canis familiaris
aatgcgcatttggacctgggggtgc

SEQ ID NO: 54187 - DNA, 25 bp, Canis familiaris
aatgccatttgctacttcacagggt

SEQ ID NO: 54188 - DNA, 25 bp, Canis familiaris
aatgcttttgcaacttccagttttg

SEQ ID NO: 54189 - DNA, 25 bp, Canis familiaris
aatgctgcatgctttagttccgtct

SEQ ID NO: 54190 - DNA, 25 bp, Canis familiaris
aatgcatgccagggacttcacagtt

SEQ ID NO: 54191 - DNA, 25 bp, Canis familiaris
aatcagcatcacggacagtccgtgt

SEQ ID NO: 54192 - DNA, 25 bp, Canis familiaris
aatccatgaaggtagtctctggtct

SEQ ID NO: 54193 - DNA, 25 bp, Canis familiaris
aatgccattacgtgtcttgtgacct

SEQ ID NO: 54194 - DNA, 25 bp, Canis familiaris
aatgcttctaggtagactgttactt

SEQ ID NO: 54195 - DNA, 25 bp, Canis familiaris
aatgcttctagatggactgttactt

SEQ ID NO: 54196 - DNA, 25 bp, Canis familiaris
aatgctttagaaggatctgttaatc

SEQ ID NO: 54197 - DNA, 25 bp, Canis familiaris
aatctgaacagatcgatcgctacta

SEQ ID NO: 54198 - DNA, 25 bp, Canis familiaris
aatctgagaagagcccattgagcta

SEQ ID NO: 54199 - DNA, 25 bp, Canis familiaris
aatctcaagagactcaccacgagta

SEQ ID NO: 54200 - DNA, 25 bp, Canis familiaris
aatgccaacaggaaccagcagactt

SEQ ID NO: 54201 - DNA, 25 bp, Canis familiaris
aatgctagactggatagccaagatt

SEQ ID NO: 54202 - DNA, 25 bp, Canis familiaris
aatgctagactggatgcccagattg

SEQ ID NO: 54203 - DNA, 25 bp, Canis familiaris
aatgcagccctgtagcaacagtttt

SEQ ID NO: 54204 - DNA, 25 bp, Canis familiaris
aatctgccccattgatatcagccta

SEQ ID NO: 54205 - DNA, 25 bp, Canis familiaris
aatgctgccatggacttaagcctta

SEQ ID NO: 54206 - DNA, 25 bp, Canis familiaris
aatgcagccctgccttgggctgcct

SEQ ID NO: 54207 - DNA, 25 bp, Canis familiaris
aatgcagacctgcttgatcagttcc

SEQ ID NO: 54208 - DNA, 25 bp, Canis familiaris
aatgcaggagtgctttcgtaccatg

SEQ ID NO: 54209 - DNA, 25 bp, Canis familiaris
aatgcagtcctgctggtttaacagc

SEQ ID NO: 54210 - DNA, 25 bp, Canis familiaris
aatgcagattctcaggtctccaaac

SEQ ID NO: 54211 - DNA, 25 bp, Canis familiaris
aatgcatgttgttcagggtccgcag

SEQ ID NO: 54212 - DNA, 25 bp, Canis familiaris
aatgcattgtatacaggtgactggg

SEQ ID NO: 54213 - DNA, 25 bp, Canis familiaris
aatgcatgttttacagtactccaga

SEQ ID NO: 54214 - DNA, 25 bp, Canis familiaris
aatgcagtgatacttttactccaaa

SEQ ID NO: 54215 - DNA, 25 bp, Canis familiaris
aatgcaggtatttgtttcatcagaa

SEQ ID NO: 54216 - DNA, 25 bp, Canis familiaris
aatctgttttagtttccatgaatta

SEQ ID NO: 54217 - DNA, 25 bp, Canis familiaris
aatcgttttgcatcattcactcgtt

SEQ ID NO: 54218 - DNA, 25 bp, Canis familiaris
aatccttcatagaacatgctccttg

SEQ ID NO: 54219 - DNA, 25 bp, Canis familiaris
aatccttgtctgaagcagcgtttac

SEQ ID NO: 54220 - DNA, 25 bp, Canis familiaris
aatccctgagcttgtggtggttcta

SEQ ID NO: 54221 - DNA, 25 bp, Canis familiaris
aatcccagagcttgtcgatgttgtc

SEQ ID NO: 54222 - DNA, 25 bp, Canis familiaris
aatcctgcagaccatgggagtcctc

SEQ ID NO: 54223 - DNA, 25 bp, Canis familiaris
aatctgctcaaattgcgggtcaaca

SEQ ID NO: 54224 - DNA, 25 bp, Canis familiaris
aatcttcaaaactgagtcattcgga

SEQ ID NO: 54225 - DNA, 25 bp, Canis familiaris
aatcccaaatacccagtttcttgag

SEQ ID NO: 54226 - DNA, 25 bp, Canis familiaris
aatcctacttaatagtgtccttggt

SEQ ID NO: 54227 - DNA, 25 bp, Canis familiaris
aatccatactttacaagggctccgt

SEQ ID NO: 54228 - DNA, 25 bp, Canis familiaris
aatcagtagcttttgggggatccct

SEQ ID NO: 54229 - DNA, 25 bp, Canis familiaris
aatcagaacttcttggagaggatct

SEQ ID NO: 54230 - DNA, 25 bp, Canis familiaris
aatcgcaagcttggttcaacgtctc

SEQ ID NO: 54231 - DNA, 25 bp, Canis familiaris
aatgccagccattggttcttcgata

SEQ ID NO: 54232 - DNA, 25 bp, Canis familiaris
aatccagacagactgcttttctatt

SEQ ID NO: 54233 - DNA, 25 bp, Canis familiaris
aatgccacagctgaactttcttcta

SEQ ID NO: 54234 - DNA, 25 bp, Canis familiaris
aatctgccatgtggaaggttttccg

SEQ ID NO: 54235 - DNA, 25 bp, Canis familiaris
aatcctattctgtatggttttctca

SEQ ID NO: 54236 - DNA, 25 bp, Canis familiaris
aatcgataattctgtgttagtcctt

SEQ ID NO: 54237 - DNA, 25 bp, Canis familiaris
aatcctcgcattttgtttcgttgtt

SEQ ID NO: 54238 - DNA, 25 bp, Canis familiaris
aatccttatctctggcttggtttcc

SEQ ID NO: 54239 - DNA, 25 bp, Canis familiaris
aatctatttactgagcgtggcttcc

SEQ ID NO: 54240 - DNA, 25 bp, Canis familiaris
aatccgttagtgtatgtgtgtctat

SEQ ID NO: 54241 - DNA, 25 bp, Canis familiaris
aatccagaggagttcattgctatta

SEQ ID NO: 54242 - DNA, 25 bp, Canis familiaris
aatgccgaggagtatcttgatgatg

SEQ ID NO: 54243 - DNA, 25 bp, Canis familiaris
aatccacttctgtatcttatcatga

SEQ ID NO: 54244 - DNA, 25 bp, Canis familiaris
aatcctcctcagttgcttatagtaa

SEQ ID NO: 54245 - DNA, 25 bp, Canis familiaris
aatcccctcatttgtctctgaaaaa

SEQ ID NO: 54246 - DNA, 25 bp, Canis familiaris
aatccacagtcattatttcttcaaa

SEQ ID NO: 54247 - DNA, 25 bp, Canis familiaris
aatctgacagtctataactcccaaa

SEQ ID NO: 54248 - DNA, 25 bp, Canis familiaris
aatgcgaatgtggtgaaagctctaa

SEQ ID NO: 54249 - DNA, 25 bp, Canis familiaris
aatcaacatgctggtgaaggtgaaa

SEQ ID NO: 54250 - DNA, 25 bp, Canis familiaris
aatccagctctccaagaggtgataa

SEQ ID NO: 54251 - DNA, 25 bp, Canis familiaris
aatccctcttaacgaggataccact

SEQ ID NO: 54252 - DNA, 25 bp, Canis familiaris
aatcctctggtactggaggagtcca

SEQ ID NO: 54253 - DNA, 25 bp, Canis familiaris
aatgctttgttactggggcacctgg

SEQ ID NO: 54254 - DNA, 25 bp, Canis familiaris
aatgcattatttagctccttgccct

SEQ ID NO: 54255 - DNA, 25 bp, Canis familiaris
aatgcttatctcagaccatcttctt

SEQ ID NO: 54256 - DNA, 25 bp, Canis familiaris
aatgctgtattcggatctcacgctg

SEQ ID NO: 54257 - DNA, 25 bp, Canis familiaris
aatgcttgatgcaggatctgaactt

SEQ ID NO: 54258 - DNA, 25 bp, Canis familiaris
aatgcattgagctctttgcgcttct

SEQ ID NO: 54259 - DNA, 25 bp, Canis familiaris
aatgcttgatgaagcttgtgagctt

SEQ ID NO: 54260 - DNA, 25 bp, Canis familiaris
aatctgtggatgtatcgaggctctc

SEQ ID NO: 54261 - DNA, 25 bp, Canis familiaris
aatgctctggtgtacagcaccttcc

SEQ ID NO: 54262 - DNA, 25 bp, Canis familiaris
aatccggtgtaggcacagctctcct

SEQ ID NO: 54263 - DNA, 25 bp, Canis familiaris
aatctcaagtgttctccactgggta

SEQ ID NO: 54264 - DNA, 25 bp, Canis familiaris
aatcacaaggacaatccctaggaat

SEQ ID NO: 54265 - DNA, 25 bp, Canis familiaris
aatcctgtggtcatcctctaaagtc

SEQ ID NO: 54266 - DNA, 25 bp, Canis familiaris
aatccatgtgtggaagccctaaccc

SEQ ID NO: 54267 - DNA, 25 bp, Canis familiaris
aatccaggtctggttccagaaccgc

SEQ ID NO: 54268 - DNA, 25 bp, Canis familiaris
aataaagtctttgccaaatccttca

SEQ ID NO: 54269 - DNA, 25 bp, Canis familiaris
aataaatttgtctcaacagttttga

SEQ ID NO: 54270 - DNA, 25 bp, Canis familiaris
aataaccatacctgacttttctggt

SEQ ID NO: 54271 - DNA, 25 bp, Canis familiaris
aataaaagatccagcactttttcca

SEQ ID NO: 54272 - DNA, 25 bp, Canis familiaris
aatcaaggcatcagtacctttttaa

SEQ ID NO: 54273 - DNA, 25 bp, Canis familiaris
aatgccatgtgcttataactttttt

SEQ ID NO: 54274 - DNA, 25 bp, Canis familiaris
aatgctatctgttaagttaccctta

SEQ ID NO: 54275 - DNA, 25 bp, Canis familiaris
aatgctatatgttaactgtgatctc

SEQ ID NO: 54276 - DNA, 25 bp, Canis familiaris
aatgccaatttgaactttctccctc

SEQ ID NO: 54277 - DNA, 25 bp, Canis familiaris
aatgcgatttgtgcgtgatccttcc

SEQ ID NO: 54278 - DNA, 25 bp, Canis familiaris
aatccatttgctgtaatccataggc

SEQ ID NO: 54279 - DNA, 25 bp, Canis familiaris
aatgccagcttgtttcatatcttag

SEQ ID NO: 54280 - DNA, 25 bp, Canis familiaris
aatgccgttgtttaatctttgagaa

SEQ ID NO: 54281 - DNA, 25 bp, Canis familiaris
aatccacttttatactatctctgtc

SEQ ID NO: 54282 - DNA, 25 bp, Canis familiaris
caatccctgtccaatgttaatccgt

SEQ ID NO: 54283 - DNA, 25 bp, Canis familiaris
aatgcccagtgtctattaataccat

SEQ ID NO: 54284 - DNA, 25 bp, Canis familiaris
aatccgagtttcgatctcacaaccc

SEQ ID NO: 54285 - DNA, 25 bp, Canis familiaris
aatcctgcagatatcacttttcctc

SEQ ID NO: 54286 - DNA, 25 bp, Canis familiaris
aatccggagcgtgatattactgctt

SEQ ID NO: 54287 - DNA, 25 bp, Canis familiaris
aatcctgggtgatagtctccctctt

SEQ ID NO: 54288 - DNA, 25 bp, Canis familiaris
aatctcggggaaggttctcttgctt

SEQ ID NO: 54289 - DNA, 25 bp, Canis familiaris
aatccagaataatcgtcctatttta

SEQ ID NO: 54290 - DNA, 25 bp, Canis familiaris
aatccaatatataaattactacttt

SEQ ID NO: 54291 - DNA, 25 bp, Canis familiaris
aatgctcttattggataaactgtcc

SEQ ID NO: 54292 - DNA, 25 bp, Canis familiaris
aatgcctggcaacataaactatccc

SEQ ID NO: 54293 - DNA, 25 bp, Canis familiaris
aatcctcgatagcaaactgttccct

SEQ ID NO: 54294 - DNA, 25 bp, Canis familiaris
aatcccgaaacaacatccttcgcac

SEQ ID NO: 54295 - DNA, 25 bp, Canis familiaris
aatcccagataagaatcctctccaa

SEQ ID NO: 54296 - DNA, 25 bp, Canis familiaris
aatccttgtagaaatctccacccaa

SEQ ID NO: 54297 - DNA, 25 bp, Canis familiaris
aatcgaattaatcgtcccatccgac

SEQ ID NO: 54298 - DNA, 25 bp, Canis familiaris
aatctaaggaagcctcgccttccag

SEQ ID NO: 54299 - DNA, 25 bp, Canis familiaris
aatgctgaaggggaccactctttcg

SEQ ID NO: 54300 - DNA, 25 bp, Canis familiaris
aatgctgaaggggaccactctttcg

SEQ ID NO: 54301 - DNA, 25 bp, Canis familiaris
aatgctgaaggggaccactctttcg

SEQ ID NO: 54302 - DNA, 25 bp, Canis familiaris
aatagcaagggtcccccatattgct

SEQ ID NO: 54303 - DNA, 25 bp, Canis familiaris
caacgacgggttttagcatttcaag

SEQ ID NO: 54304 - DNA, 25 bp, Canis familiaris
taacgtcggtttgttctgtgtcccg

SEQ ID NO: 54305 - DNA, 25 bp, Canis familiaris
aatcgacggttcttgtctttgtcac

SEQ ID NO: 54306 - DNA, 25 bp, Canis familiaris
aatctactggttgtcctatttggtt

SEQ ID NO: 54307 - DNA, 25 bp, Canis familiaris
caattcaatcgtttaccctttggtg

SEQ ID NO: 54308 - DNA, 25 bp, Canis familiaris
aatattacttcacacccattagggt

SEQ ID NO: 54309 - DNA, 25 bp, Canis familiaris
aatcatttttgctgcaccgaggggg

SEQ ID NO: 54310 - DNA, 25 bp, Canis familiaris
cttcaatggcttctactcggagcgg

SEQ ID NO: 54311 - DNA, 25 bp, Canis familiaris
aatcaatgcctttcaactcctggct

SEQ ID NO: 54312 - DNA, 25 bp, Canis familiaris
aatctatgtttttcactgccgtatc

SEQ ID NO: 54313 - DNA, 25 bp, Canis familiaris
aatctggttcaagtgcagctgccct

SEQ ID NO: 54314 - DNA, 25 bp, Canis familiaris
aatcatgtatgtgtccattggcctt

SEQ ID NO: 54315 - DNA, 25 bp, Canis familiaris
aatctaggtggcttattgtgctcat

SEQ ID NO: 54316 - DNA, 25 bp, Canis familiaris
aatctcaggtcctgagttccagccc

SEQ ID NO: 54317 - DNA, 25 bp, Canis familiaris
aattctggtgctctggggtacccag

SEQ ID NO: 54318 - DNA, 25 bp, Canis familiaris
aatagcgacgcgctggcgttacagc

SEQ ID NO: 54319 - DNA, 25 bp, Canis familiaris
aatagcgatcgctgccaggatatac

SEQ ID NO: 54320 - DNA, 25 bp, Canis familiaris
aataaatcgatgccaccgttaacca

SEQ ID NO: 54321 - DNA, 25 bp, Canis familiaris
caaaccctgacaacgtgaataacca

SEQ ID NO: 54322 - DNA, 25 bp, Canis familiaris
aatactcctatcacggttgatttca

SEQ ID NO: 54323 - DNA, 25 bp, Canis familiaris
aatacgccagactcgggctgtgttc

SEQ ID NO: 54324 - DNA, 25 bp, Canis familiaris
aatcactccacagaggtactcgtcc

SEQ ID NO: 54325 - DNA, 25 bp, Canis familiaris
aatactggcacagctgggcattcgt

SEQ ID NO: 54326 - DNA, 25 bp, Canis familiaris
aatacagatgaattctagaagtcct

SEQ ID NO: 54327 - DNA, 25 bp, Canis familiaris
aatctatagtaaaagcacagtcctg

SEQ ID NO: 54328 - DNA, 25 bp, Canis familiaris
aatcctcagtaaagcacacacagac

SEQ ID NO: 54329 - DNA, 25 bp, Canis familiaris
aatcctcagacaccaccaaagagtc

SEQ ID NO: 54330 - DNA, 25 bp, Canis familiaris
aatcccagagactaaaaagcagcat

SEQ ID NO: 54331 - DNA, 25 bp, Canis familiaris
aatcccaaggaatatgtacactgga

SEQ ID NO: 54332 - DNA, 25 bp, Canis familiaris
aatcctaataaacatctcacctggg

SEQ ID NO: 54333 - DNA, 25 bp, Canis familiaris
aatcctatggaatgtaatcccggtc

SEQ ID NO: 54334 - DNA, 25 bp, Canis familiaris
caatcctagaactggaacttcgggc

SEQ ID NO: 54335 - DNA, 25 bp, Canis familiaris
aatgcccaaacatttagatctccgc

SEQ ID NO: 54336 - DNA, 25 bp, Canis familiaris
aatgccaaaacagtgaaatctccgc

SEQ ID NO: 54337 - DNA, 25 bp, Canis familiaris
aatcttaagccagaaatctcctaaa

SEQ ID NO: 54338 - DNA, 25 bp, Canis familiaris
aatttcagcgaagctaattccagaa

SEQ ID NO: 54339 - DNA, 25 bp, Canis familiaris
aatgccccagaatttaacccagata

SEQ ID NO: 54340 - DNA, 25 bp, Canis familiaris
aatgcctccatttaaaagtacgaag

SEQ ID NO: 54341 - DNA, 25 bp, Canis familiaris
aatccccttcagtaacaggagaaat

SEQ ID NO: 54342 - DNA, 25 bp, Canis familiaris
aatcctcctaagtaagcacggaaca

SEQ ID NO: 54343 - DNA, 25 bp, Canis familiaris
aatccttgcagagaaaacagaaaca

SEQ ID NO: 54344 - DNA, 25 bp, Canis familiaris
aatccatgtgcgccacaaaaaaaaa

SEQ ID NO: 54345 - DNA, 25 bp, Canis familiaris
aatcctgtcggaaagaaggacgaat

SEQ ID NO: 54346 - DNA, 25 bp, Canis familiaris
aatttttggataagggtgtgtgaag

SEQ ID NO: 54347 - DNA, 25 bp, Canis familiaris
aatacttgggacagaggttgctgaa

SEQ ID NO: 54348 - DNA, 25 bp, Canis familiaris
aatactgggtacatttgttggcaaa

SEQ ID NO: 54349 - DNA, 25 bp, Canis familiaris
gaaactggtttctgttggggcacca

SEQ ID NO: 54350 - DNA, 25 bp, Canis familiaris
aatatatggtcctcagttggggaaa

SEQ ID NO: 54351 - DNA, 25 bp, Canis familiaris
aatcaattttcacccattggggcaa

SEQ ID NO: 54352 - DNA, 25 bp, Canis familiaris
aatatacgttccaaaaggggcatga

SEQ ID NO: 54353 - DNA, 25 bp, Canis familiaris
aataaggtgtccacaagaggtctat

SEQ ID NO: 54354 - DNA, 25 bp, Canis familiaris
aatactttgtccgcaggatgtacct

SEQ ID NO: 54355 - DNA, 25 bp, Canis familiaris
aatcatttctcgtcaccggaatact

SEQ ID NO: 54356 - DNA, 25 bp, Canis familiaris
aatatggtgtcctctcggaatgact

SEQ ID NO: 54357 - DNA, 25 bp, Canis familiaris
aataaattgcgagctcggctgtgcc

SEQ ID NO: 54358 - DNA, 25 bp, Canis familiaris
aataaggtgcatgctatcccactgc

SEQ ID NO: 54359 - DNA, 25 bp, Canis familiaris
aatccagagatgttctgatccccct

SEQ ID NO: 54360 - DNA, 25 bp, Canis familiaris
aatccaagtgttgtccccagtattt

SEQ ID NO: 54361 - DNA, 25 bp, Canis familiaris
aatcctgttttgctccgaagtattc

SEQ ID NO: 54362 - DNA, 25 bp, Canis familiaris
aatgcctttgatatttcatgcaagt

SEQ ID NO: 54363 - DNA, 25 bp, Canis familiaris
aatgcctttgatatttcatgccagt

SEQ ID NO: 54364 - DNA, 25 bp, Canis familiaris
aatcttgcttatatttagcgcaggc

SEQ ID NO: 54365 - DNA, 25 bp, Canis familiaris
aatcgtttcatcattcggcgtgcga

SEQ ID NO: 54366 - DNA, 25 bp, Canis familiaris
aatcgtttcatcattcggcgtgcga

SEQ ID NO: 54367 - DNA, 25 bp, Canis familiaris
caatcgtttcatcattcggcgtgcg

SEQ ID NO: 54368 - DNA, 25 bp, Canis familiaris
aatcgtgttcctagtagccgactgc

SEQ ID NO: 54369 - DNA, 25 bp, Canis familiaris
aatctgcgtatcactctacctacga

SEQ ID NO: 54370 - DNA, 25 bp, Canis familiaris
aatccttaatctttgactcgcacga

SEQ ID NO: 54371 - DNA, 25 bp, Canis familiaris
aatgccttaatcactgagtctacaa

SEQ ID NO: 54372 - DNA, 25 bp, Canis familiaris
aatccttatccctatgaatcttcaa

SEQ ID NO: 54373 - DNA, 25 bp, Canis familiaris
aatccttcatgctgcattttgcatt

SEQ ID NO: 54374 - DNA, 25 bp, Canis familiaris
aatccttacagaggtattctatatt

SEQ ID NO: 54375 - DNA, 25 bp, Canis familiaris
aatcctgttaatcaattctcttcat

SEQ ID NO: 54376 - DNA, 25 bp, Canis familiaris
aatccatattaggtgactttgcttt

SEQ ID NO: 54377 - DNA, 25 bp, Canis familiaris
aatccactgaaggtatgctttgtct

SEQ ID NO: 54378 - DNA, 25 bp, Canis familiaris
aatccactgaaggtagcttgggctg

SEQ ID NO: 54379 - DNA, 25 bp, Canis familiaris
aatcacactgaagtgccagcgggtg

SEQ ID NO: 54380 - DNA, 25 bp, Canis familiaris
aatcaacagcaatctagcggcggcc

SEQ ID NO: 54381 - DNA, 25 bp, Canis familiaris
aatcagcatcagatgaccagccctc

SEQ ID NO: 54382 - DNA, 25 bp, Canis familiaris
aatcagaccattgtgcacagcctgc

SEQ ID NO: 54383 - DNA, 25 bp, Canis familiaris
aatcatactcagtttccgccatctc

SEQ ID NO: 54384 - DNA, 25 bp, Canis familiaris
aatcataacagagacccgaatcggt

SEQ ID NO: 54385 - DNA, 25 bp, Canis familiaris
aataaaaagagggccagacatgggt

SEQ ID NO: 54386 - DNA, 25 bp, Canis familiaris
aatacctgaggacccacaaagaagt

SEQ ID NO: 54387 - DNA, 25 bp, Canis familiaris
aataagccagagaaccaataaacag

SEQ ID NO: 54388 - DNA, 25 bp, Canis familiaris
aatagggcaggttggcatgaagaaa

SEQ ID NO: 54389 - DNA, 25 bp, Canis familiaris
aatcgcggatgaatgtggctttgaa

SEQ ID NO: 54390 - DNA, 25 bp, Canis familiaris
aatatggcaatgaagtgtcctatga

SEQ ID NO: 54391 - DNA, 25 bp, Canis familiaris
aatatgcaaataacctctgtcagat

SEQ ID NO: 54392 - DNA, 25 bp, Canis familiaris
aatctaaaatacttcatgttgaccc

SEQ ID NO: 54393 - DNA, 25 bp, Canis familiaris
caattaccatcgtcaccgttgacca

SEQ ID NO: 54394 - DNA, 25 bp, Canis familiaris
aataaccagttggcccacgactatc

SEQ ID NO: 54395 - DNA, 25 bp, Canis familiaris
aatccacggttggacccaatcaaca

SEQ ID NO: 54396 - DNA, 25 bp, Canis familiaris
aatcatcctgggagaccaagaacaa

SEQ ID NO: 54397 - DNA, 25 bp, Canis familiaris
aatcccaggccaggcaaaggcataa

SEQ ID NO: 54398 - DNA, 25 bp, Canis familiaris
aatcccaacagcctcacaatggtac

SEQ ID NO: 54399 - DNA, 25 bp, Canis familiaris
aatgccaacaaggtctaagttatgt

SEQ ID NO: 54400 - DNA, 25 bp, Canis familiaris
aatctctaaagactcaaattattga

SEQ ID NO: 54401 - DNA, 25 bp, Canis familiaris
aatcaccataagcccaatactgcaa

SEQ ID NO: 54402 - DNA, 25 bp, Canis familiaris
aatacattaagctgaatatgccagt

SEQ ID NO: 54403 - DNA, 25 bp, Canis familiaris
aatacatccatgtggcaatgtcaag

SEQ ID NO: 54404 - DNA, 25 bp, Canis familiaris
aataactttcgagctgtcagtgtgt

SEQ ID NO: 54405 - DNA, 25 bp, Canis familiaris
aatcataatattgaccgctttggtc

SEQ ID NO: 54406 - DNA, 25 bp, Canis familiaris
aatcatcatattaacctccctagtg

SEQ ID NO: 54407 - DNA, 25 bp, Canis familiaris
aatctgcatgatttcacacttcaaa

SEQ ID NO: 54408 - DNA, 25 bp, Canis familiaris
aatctgcaataaaagccatcagtgc

SEQ ID NO: 54409 - DNA, 25 bp, Canis familiaris
aatcatacaacagtgagtcatatct

SEQ ID NO: 54410 - DNA, 25 bp, Canis familiaris
aatccacacacattggtcttctagc

SEQ ID NO: 54411 - DNA, 25 bp, Canis familiaris
aatccaacagcatctgctccttgat

SEQ ID NO: 54412 - DNA, 25 bp, Canis familiaris
aatcaaggcagctcatgcttactga

SEQ ID NO: 54413 - DNA, 25 bp, Canis familiaris
aatcaccacatcacatttaggaaac

SEQ ID NO: 54414 - DNA, 25 bp, Canis familiaris
aatcagctcccaccaatgtaagaat

SEQ ID NO: 54415 - DNA, 25 bp, Canis familiaris
aatctctcctcatcagcatgtatgt

SEQ ID NO: 54416 - DNA, 25 bp, Canis familiaris
aatctctccttatcatagagcgctt

SEQ ID NO: 54417 - DNA, 25 bp, Canis familiaris
aatccatcagtattactagtgcctt

SEQ ID NO: 54418 - DNA, 25 bp, Canis familiaris
aatacacagtacactggtgaccatt

SEQ ID NO: 54419 - DNA, 25 bp, Canis familiaris
aatcaacctacatcagagtagcctt

SEQ ID NO: 54420 - DNA, 25 bp, Canis familiaris
aatcatctctcatatctcaagtgag

SEQ ID NO: 54421 - DNA, 25 bp, Canis familiaris
caatcactgtgcttgtcggactgat

SEQ ID NO: 54422 - DNA, 25 bp, Canis familiaris
aatctctgtcagaattgccacaatt

SEQ ID NO: 54423 - DNA, 25 bp, Canis familiaris
aatccctcaatgtgcaaacttcgtg

SEQ ID NO: 54424 - DNA, 25 bp, Canis familiaris
aatccctcgagatgacagacaagcg

SEQ ID NO: 54425 - DNA, 25 bp, Canis familiaris
aatccttctgcctatacaacaagct

SEQ ID NO: 54426 - DNA, 25 bp, Canis familiaris
aatcctttactaatcccaatcttgg

SEQ ID NO: 54427 - DNA, 25 bp, Canis familiaris
aatccatgttgagacttccactttc

SEQ ID NO: 54428 - DNA, 25 bp, Canis familiaris
aatcggtctaagactcccaagtcca

SEQ ID NO: 54429 - DNA, 25 bp, Canis familiaris
aatagtgttaatacccgacagtgta

SEQ ID NO: 54430 - DNA, 25 bp, Canis familiaris
aatctggtctcatttgtcctgaatt

SEQ ID NO: 54431 - DNA, 25 bp, Canis familiaris
aatccagatctcaattgtgctctaa

SEQ ID NO: 54432 - DNA, 25 bp, Canis familiaris
aatccacttcacatctgacacaaaa

SEQ ID NO: 54433 - DNA, 25 bp, Canis familiaris
aatccactagccgctactcatgatt

SEQ ID NO: 54434 - DNA, 25 bp, Canis familiaris
aatcacttacctgaatctaaatcta

SEQ ID NO: 54435 - DNA, 25 bp, Canis familiaris
aatccaatacccaaatctataatcc

SEQ ID NO: 54436 - DNA, 25 bp, Canis familiaris
aatccactatgcacaatgactttac

SEQ ID NO: 54437 - DNA, 25 bp, Canis familiaris
aatcagccttgcactagagcttcgc

SEQ ID NO: 54438 - DNA, 25 bp, Canis familiaris
aatcaccactgcagttgaggtctaa

SEQ ID NO: 54439 - DNA, 25 bp, Canis familiaris
aatcactcaccacaagggactactt

SEQ ID NO: 54440 - DNA, 25 bp, Canis familiaris
aatcgccacacttcaagtcgacttt

SEQ ID NO: 54441 - DNA, 25 bp, Canis familiaris
aatccccctgactagtgatgacatt

SEQ ID NO: 54442 - DNA, 25 bp, Canis familiaris
aatcccaactggtcggtgaatgtca

SEQ ID NO: 54443 - DNA, 25 bp, Canis familiaris
aatcctcacctaggctttcagtgta

SEQ ID NO: 54444 - DNA, 25 bp, Canis familiaris
aatcctttctatgccaaagtgccag

SEQ ID NO: 54445 - DNA, 25 bp, Canis familiaris
aatcctgcttatttccaaatttgca

SEQ ID NO: 54446 - DNA, 25 bp, Canis familiaris
aatcctgtaattaaatagagttcta

SEQ ID NO: 54447 - DNA, 25 bp, Canis familiaris
aatccttacaataaaggctgtctct

SEQ ID NO: 54448 - DNA, 25 bp, Canis familiaris
aatactagtcaataagctggtccaa

SEQ ID NO: 54449 - DNA, 25 bp, Canis familiaris
aatactactcaacaattagaaattt

SEQ ID NO: 54450 - DNA, 25 bp, Canis familiaris
aatccttcctgacaattcacgaact

SEQ ID NO: 54451 - DNA, 25 bp, Canis familiaris
aatccattcggtcagttccaatatt

SEQ ID NO: 54452 - DNA, 25 bp, Canis familiaris
aatcctctcttggtcactttaaatt

SEQ ID NO: 54453 - DNA, 25 bp, Canis familiaris
aatcctttcagacccttggagaaat

SEQ ID NO: 54454 - DNA, 25 bp, Canis familiaris
aatcctgtatcgctgcctagagtga

SEQ ID NO: 54455 - DNA, 25 bp, Canis familiaris
aatcactgctcagcaacctggagga

SEQ ID NO: 54456 - DNA, 25 bp, Canis familiaris
aatcctccacaaacctttagctgtt

SEQ ID NO: 54457 - DNA, 25 bp, Canis familiaris
aatcaacgtccaaagctggttcttt

SEQ ID NO: 54458 - DNA, 25 bp, Canis familiaris
aatcaaatgttcagcacttttccct

SEQ ID NO: 54459 - DNA, 25 bp, Canis familiaris
aattaactctgatacctttgtcctc

SEQ ID NO: 54460 - DNA, 25 bp, Canis familiaris
aataactactgttacctcttcatcc

SEQ ID NO: 54461 - DNA, 25 bp, Canis familiaris
aatacagtgaagaggccccataccc

SEQ ID NO: 54462 - DNA, 25 bp, Canis familiaris
aatagcaggaagatggcgcccacca

SEQ ID NO: 54463 - DNA, 25 bp, Canis familiaris
aatcgcaggaagctcgacatcagcc

SEQ ID NO: 54464 - DNA, 25 bp, Canis familiaris
aatcgcaggcaaagacaccaaccgg

SEQ ID NO: 54465 - DNA, 25 bp, Canis familiaris
aatcacgtaaaaaccacacgaggat

SEQ ID NO: 54466 - DNA, 25 bp, Canis familiaris
aatacggacagttcccagatgctag

SEQ ID NO: 54467 - DNA, 25 bp, Canis familiaris
aatacggaagctttctcgagggcct

SEQ ID NO: 54468 - DNA, 25 bp, Canis familiaris
caatacaggactctttcgaggccct

SEQ ID NO: 54469 - DNA, 25 bp, Canis familiaris
aataagccacgtttgtggggccctg

SEQ ID NO: 54470 - DNA, 25 bp, Canis familiaris
aatctaccacgttgtctgatggaca

SEQ ID NO: 54471 - DNA, 25 bp, Canis familiaris
aatctgagtacctgtgtgctgggca

SEQ ID NO: 54472 - DNA, 25 bp, Canis familiaris
aatcggaacacattcagctgctggg

SEQ ID NO: 54473 - DNA, 25 bp, Canis familiaris
aatcgctataaccatcagttactgg

SEQ ID NO: 54474 - DNA, 25 bp, Canis familiaris
aatccttcaaacaatgtctgcacgt

SEQ ID NO: 54475 - DNA, 25 bp, Canis familiaris
aatctccttagactgatgtcccatt

SEQ ID NO: 54476 - DNA, 25 bp, Canis familiaris
aatcctttgccactgatgtgttgaa

SEQ ID NO: 54477 - DNA, 25 bp, Canis familiaris
aatcactgttcagcaggctgttgga

SEQ ID NO: 54478 - DNA, 25 bp, Canis familiaris
aatcctgatttgtactgtgttcgca

SEQ ID NO: 54479 - DNA, 25 bp, Canis familiaris
aatccaggagtctcttgtctcagaa

SEQ ID NO: 54480 - DNA, 25 bp, Canis familiaris
aatccagtagtttcagcttttgtat

SEQ ID NO: 54481 - DNA, 25 bp, Canis familiaris
aatacagtaccttgaggccttggat

SEQ ID NO: 54482 - DNA, 25 bp, Canis familiaris
aataagagcacctaggtggctcagt

SEQ ID NO: 54483 - DNA, 25 bp, Canis familiaris
taaaggaatccatgaagttagcttg

SEQ ID NO: 54484 - DNA, 25 bp, Canis familiaris
aataccaatttacagcttagttctt

SEQ ID NO: 54485 - DNA, 25 bp, Canis familiaris
aataaaattttctgcttgattcatc

SEQ ID NO: 54486 - DNA, 25 bp, Canis familiaris
aataaaactttatctgtaaatcaga

SEQ ID NO: 54487 - DNA, 25 bp, Canis familiaris
aataatagtgctgtgtggtggaaaa

SEQ ID NO: 54488 - DNA, 25 bp, Canis familiaris
aataccagttttcgggctacaggat

SEQ ID NO: 54489 - DNA, 25 bp, Canis familiaris
aatcaaccaactcctgggatacggt

SEQ ID NO: 54490 - DNA, 25 bp, Canis familiaris
aataaccgatgtcctccagtcggga

SEQ ID NO: 54491 - DNA, 25 bp, Canis familiaris
aatagaaacattcctcctatgggga

SEQ ID NO: 54492 - DNA, 25 bp, Canis familiaris
aataaaacctgccacctgatggccc

SEQ ID NO: 54493 - DNA, 25 bp, Canis familiaris
aattaaaccatgccaaccggagctc

SEQ ID NO: 54494 - DNA, 25 bp, Canis familiaris
aatctataaccagagatcctgcttc

SEQ ID NO: 54495 - DNA, 25 bp, Canis familiaris
aatcataacaccactacatcacttc

SEQ ID NO: 54496 - DNA, 25 bp, Canis familiaris
aatcatgaaccggttccatcactag

SEQ ID NO: 54497 - DNA, 25 bp, Canis familiaris
aatagaagccacgttctctgtaaga

SEQ ID NO: 54498 - DNA, 25 bp, Canis familiaris
aataaaccattgtttcttcaattgg

SEQ ID NO: 54499 - DNA, 25 bp, Canis familiaris
aataggactttctgtgttccctgga

SEQ ID NO: 54500 - DNA, 25 bp, Canis familiaris
aataggtgcgtttggtgttcctggg

SEQ ID NO: 54501 - DNA, 25 bp, Canis familiaris
aatacgtactcttgagatttcctca

SEQ ID NO: 54502 - DNA, 25 bp, Canis familiaris
caatcaggcttcttggaattatcaa

SEQ ID NO: 54503 - DNA, 25 bp, Canis familiaris
aatcgcgcttcttgaagacctatgt

SEQ ID NO: 54504 - DNA, 25 bp, Canis familiaris
aatccgtctctttcaacataacttt

SEQ ID NO: 54505 - DNA, 25 bp, Canis familiaris
aatcccctattgccattaaactgtt

SEQ ID NO: 54506 - DNA, 25 bp, Canis familiaris
caatccacctttccttaaactgaga

SEQ ID NO: 54507 - DNA, 25 bp, Canis familiaris
aatccggcttgttttcagaattgaa

SEQ ID NO: 54508 - DNA, 25 bp, Canis familiaris
aatcgcgtggttatgtcaagcaaga

SEQ ID NO: 54509 - DNA, 25 bp, Canis familiaris
aatccataggtattttccacacaat

SEQ ID NO: 54510 - DNA, 25 bp, Canis familiaris
aatcacatagaaaaaatcaccacat

SEQ ID NO: 54511 - DNA, 25 bp, Canis familiaris
aatccttgcacaaagtatccctctt

SEQ ID NO: 54512 - DNA, 25 bp, Canis familiaris
aatccctgtcaatgtgagccccagt

SEQ ID NO: 54513 - DNA, 25 bp, Canis familiaris
aatccctgggtgttggcttccagtt

SEQ ID NO: 54514 - DNA, 25 bp, Canis familiaris
aatccttggcgtgtcagcttgccaa

SEQ ID NO: 54515 - DNA, 25 bp, Canis familiaris
aatcccttagatatcacttgctcat

SEQ ID NO: 54516 - DNA, 25 bp, Canis familiaris
aatcctctaacaatccaattctggt

SEQ ID NO: 54517 - DNA, 25 bp, Canis familiaris
aatccttctccattcataatatcat

SEQ ID NO: 54518 - DNA, 25 bp, Canis familiaris
aatcctactaattctcgcaaatggg

SEQ ID NO: 54519 - DNA, 25 bp, Canis familiaris
aatcctaaagattctgccaacattg

SEQ ID NO: 54520 - DNA, 25 bp, Canis familiaris
aatcctgtaatatttgccacctgtg

SEQ ID NO: 54521 - DNA, 25 bp, Canis familiaris
aatcttgagtgatgttccacctgat

SEQ ID NO: 54522 - DNA, 25 bp, Canis familiaris
aattctgggattatggccgtattgc

SEQ ID NO: 54523 - DNA, 25 bp, Canis familiaris
aatatcggggtcattgccaatgata

SEQ ID NO: 54524 - DNA, 25 bp, Canis familiaris
aattcggcagccagttaagctgtaa

SEQ ID NO: 54525 - DNA, 25 bp, Canis familiaris
aatctgcacccctcttaagtggata

SEQ ID NO: 54526 - DNA, 25 bp, Canis familiaris
aatctacacaacacatcttttggca

SEQ ID NO: 54527 - DNA, 25 bp, Canis familiaris
aatcgcctaaagacatttttgaact

SEQ ID NO: 54528 - DNA, 25 bp, Canis familiaris
aataatctagactcattacttaacc

SEQ ID NO: 54529 - DNA, 25 bp, Canis familiaris
aatcccatagcccgttacttataat

SEQ ID NO: 54530 - DNA, 25 bp, Canis familiaris
aatcccatagcccgtacctataatt

SEQ ID NO: 54531 - DNA, 25 bp, Canis familiaris
aatcactaatctcttcctctgaaat

SEQ ID NO: 54532 - DNA, 25 bp, Canis familiaris
aatcaataaaagtatccactgaaac

SEQ ID NO: 54533 - DNA, 25 bp, Canis familiaris
aatcataattcactgtttaccaaac

SEQ ID NO: 54534 - DNA, 25 bp, Canis familiaris
aatctaatatcgcagcataacccca

SEQ ID NO: 54535 - DNA, 25 bp, Canis familiaris
aatatcatgttcagcaaaagaccaa

SEQ ID NO: 54536 - DNA, 25 bp, Canis familiaris
aataaccccagctagcagtgaacaa

SEQ ID NO: 54537 - DNA, 25 bp, Canis familiaris
caatagccctacccagcgtggtagg

SEQ ID NO: 54538 - DNA, 25 bp, Canis familiaris
aatagccctactggggtgaggattc

SEQ ID NO: 54539 - DNA, 25 bp, Canis familiaris
aatagtcatctactggctggctgag

SEQ ID NO: 54540 - DNA, 25 bp, Canis familiaris
aatacattcataaggctacagcagc

SEQ ID NO: 54541 - DNA, 25 bp, Canis familiaris
aatactgtgcaaattctagcaagtg

SEQ ID NO: 54542 - DNA, 25 bp, Canis familiaris
aatcaatgatcgtattatgaaagtg

SEQ ID NO: 54543 - DNA, 25 bp, Canis familiaris
aatagtgactattttgaattgtgct

SEQ ID NO: 54544 - DNA, 25 bp, Canis familiaris
aatagtgtctattctgacaattagg

SEQ ID NO: 54545 - DNA, 25 bp, Canis familiaris
aataggtcgctcttgaccttgacat

SEQ ID NO: 54546 - DNA, 25 bp, Canis familiaris
aatacctcgtcgatactctgactac

SEQ ID NO: 54547 - DNA, 25 bp, Canis familiaris
aatacctcgtcgatactctgactac

SEQ ID NO: 54548 - DNA, 25 bp, Canis familiaris
aatacctcgtcgatagctctgacgt

SEQ ID NO: 54549 - DNA, 25 bp, Canis familiaris
aatccgccagttcgatgagcgctac

SEQ ID NO: 54550 - DNA, 25 bp, Canis familiaris
aatcctggagtcctgtgatccatcc

SEQ ID NO: 54551 - DNA, 25 bp, Canis familiaris
aatctcgggctttagagtcagccag

SEQ ID NO: 54552 - DNA, 25 bp, Canis familiaris
aatcctgggctaatgaaggacctgt

SEQ ID NO: 54553 - DNA, 25 bp, Canis familiaris
aatccggttgaaaaatgagcacgtg

SEQ ID NO: 54554 - DNA, 25 bp, Canis familiaris
aattgggactggaaaaatcacattt

SEQ ID NO: 54555 - DNA, 25 bp, Canis familiaris
aattcggcacgaggtaaaacaggat

SEQ ID NO: 54556 - DNA, 25 bp, Canis familiaris
aatacggatatggtttcatcaacag

SEQ ID NO: 54557 - DNA, 25 bp, Canis familiaris
aatacacaatgctgtagtctatgac

SEQ ID NO: 54558 - DNA, 25 bp, Canis familiaris
aataatcaacgcctgagttctgatc

SEQ ID NO: 54559 - DNA, 25 bp, Canis familiaris
aatcttcatccggctgagggtgatc

SEQ ID NO: 54560 - DNA, 25 bp, Canis familiaris
aatcttctcagggaaggagcagctc

SEQ ID NO: 54561 - DNA, 25 bp, Canis familiaris
aatcctccaggcaatatgtcctgat

SEQ ID NO: 54562 - DNA, 25 bp, Canis familiaris
aatcgtcgacacaatatactttcta

SEQ ID NO: 54563 - DNA, 25 bp, Canis familiaris
aatctttgcccttaactattatatt

SEQ ID NO: 54564 - DNA, 25 bp, Canis familiaris
aatacacggttataccattatatat

SEQ ID NO: 54565 - DNA, 25 bp, Canis familiaris
aatctcttagatttcaaccttaata

SEQ ID NO: 54566 - DNA, 25 bp, Canis familiaris
aatctctacatattctcgtcatgct

SEQ ID NO: 54567 - DNA, 25 bp, Canis familiaris
aatctgtcctaagtcttcattcctt

SEQ ID NO: 54568 - DNA, 25 bp, Canis familiaris
aatctggcggatagttttctctctc

SEQ ID NO: 54569 - DNA, 25 bp, Canis familiaris
aatctagcatgtaatttagttccta

SEQ ID NO: 54570 - DNA, 25 bp, Canis familiaris
aataggcattgccattccagtccct

SEQ ID NO: 54571 - DNA, 25 bp, Canis familiaris
aatcaggggctgttcgagctcctgt

SEQ ID NO: 54572 - DNA, 25 bp, Canis familiaris
aataggggtgcagctggctctgagt

SEQ ID NO: 54573 - DNA, 25 bp, Canis familiaris
aatcttgagggcgctgttctattaa

SEQ ID NO: 54574 - DNA, 25 bp, Canis familiaris
aatcttaggtgctgtctctgttgga

SEQ ID NO: 54575 - DNA, 25 bp, Canis familiaris
aatcttattctctgtgtatgtgtac

SEQ ID NO: 54576 - DNA, 25 bp, Canis familiaris
aatctatgccttcaatgcttgtgta

SEQ ID NO: 54577 - DNA, 25 bp, Canis familiaris
aatctcatctccacacacctggaga

SEQ ID NO: 54578 - DNA, 25 bp, Canis familiaris
aatctttccttcatcttgcaggagc

SEQ ID NO: 54579 - DNA, 25 bp, Canis familiaris
aatcttacaataatctctgtcagga

SEQ ID NO: 54580 - DNA, 25 bp, Canis familiaris
aatctttccatgacagtagcatact

SEQ ID NO: 54581 - DNA, 25 bp, Canis familiaris
aatcatcccctgactatagcacagt

SEQ ID NO: 54582 - DNA, 25 bp, Canis familiaris
aatccctctctgaagcaacagctct

SEQ ID NO: 54583 - DNA, 25 bp, Canis familiaris
aatctccctctcagaatgcagcatt

SEQ ID NO: 54584 - DNA, 25 bp, Canis familiaris
aataagctccttggaagcagctaat

SEQ ID NO: 54585 - DNA, 25 bp, Canis familiaris
aatcaggctcggtgaagcagatgtt

SEQ ID NO: 54586 - DNA, 25 bp, Canis familiaris
aataggggcgcacacgcgtttaata

SEQ ID NO: 54587 - DNA, 25 bp, Canis familiaris
gaaatggttccacaccggttggaca

SEQ ID NO: 54588 - DNA, 25 bp, Canis familiaris
cagaatggtaaagacacggttaggc

SEQ ID NO: 54589 - DNA, 25 bp, Canis familiaris
caagagggaccttgacccgttagca

SEQ ID NO: 54590 - DNA, 25 bp, Canis familiaris
aatcaggagtcggagaccctcttac

SEQ ID NO: 54591 - DNA, 25 bp, Canis familiaris
aatctgttgctatggaccctttacc

SEQ ID NO: 54592 - DNA, 25 bp, Canis familiaris
aatcatgtactaggaagcccatttc

SEQ ID NO: 54593 - DNA, 25 bp, Canis familiaris
aatatgtgtcgtggaggccgcatgt

SEQ ID NO: 54594 - DNA, 25 bp, Canis familiaris
aatacatgtcctcaggcaactgctt

SEQ ID NO: 54595 - DNA, 25 bp, Canis familiaris
aatacatacactcctcgtgaggctg

SEQ ID NO: 54596 - DNA, 25 bp, Canis familiaris
aatacaccaccgagctgtatgctgc

SEQ ID NO: 54597 - DNA, 25 bp, Canis familiaris
aatacagctcattcttactgtggct

SEQ ID NO: 54598 - DNA, 25 bp, Canis familiaris
aatagcgtattgtgcacagtgctta

SEQ ID NO: 54599 - DNA, 25 bp, Canis familiaris
aatcaactgttatcaattgtctcaa

SEQ ID NO: 54600 - DNA, 25 bp, Canis familiaris
aatcaacctacatacattgttaaga

SEQ ID NO: 54601 - DNA, 25 bp, Canis familiaris
aatataggccatcaacactgttaac

SEQ ID NO: 54602 - DNA, 25 bp, Canis familiaris
aatagtaccatgacactcacagtaa

SEQ ID NO: 54603 - DNA, 25 bp, Canis familiaris
aatcagtcaatcaatcaatcaatca

SEQ ID NO: 54604 - DNA, 25 bp, Canis familiaris
aatcatgtacattatccaccaaaaa

SEQ ID NO: 54605 - DNA, 25 bp, Canis familiaris
aatcatcgacactgcgagtcaacaa

SEQ ID NO: 54606 - DNA, 25 bp, Canis familiaris
aatccccacgtggatggacacacac

SEQ ID NO: 54607 - DNA, 25 bp, Canis familiaris
aatcccacattgtgtatgcacccac

SEQ ID NO: 54608 - DNA, 25 bp, Canis familiaris
aatcccatttacaattgcacccaaa

SEQ ID NO: 54609 - DNA, 25 bp, Canis familiaris
aatcacttcttaaaagcacctcatt

SEQ ID NO: 54610 - DNA, 25 bp, Canis familiaris
aattttcttatgaggccccactgat

SEQ ID NO: 54611 - DNA, 25 bp, Canis familiaris
aatctttctcctggtgactccaaat

SEQ ID NO: 54612 - DNA, 25 bp, Canis familiaris
aatctttaccatttaatgccatcta

SEQ ID NO: 54613 - DNA, 25 bp, Canis familiaris
aatctttgccttcgtaagctgtcta

SEQ ID NO: 54614 - DNA, 25 bp, Canis familiaris
aatcttgctgcttatatgtacctgt

SEQ ID NO: 54615 - DNA, 25 bp, Canis familiaris
aatcccattatgaatgtgcctctat

SEQ ID NO: 54616 - DNA, 25 bp, Canis familiaris
aatccctcaattttatatcttaact

SEQ ID NO: 54617 - DNA, 25 bp, Canis familiaris
aatcttctatttcctatatttttct

SEQ ID NO: 54618 - DNA, 25 bp, Canis familiaris
aatcggtgtctgacctatcttcttt

SEQ ID NO: 54619 - DNA, 25 bp, Canis familiaris
aatcgttcacatacttctttcttat

SEQ ID NO: 54620 - DNA, 25 bp, Canis familiaris
aatctgttcctctttctgaaactat

SEQ ID NO: 54621 - DNA, 25 bp, Canis familiaris
aatctgcttcccctacagaagcatt

SEQ ID NO: 54622 - DNA, 25 bp, Canis familiaris
aatcaactgccccatccagaaagat

SEQ ID NO: 54623 - DNA, 25 bp, Canis familiaris
aatcatcctggagaccaagagcaag

SEQ ID NO: 54624 - DNA, 25 bp, Canis familiaris
aatcccatgagatgatccagaagtc

SEQ ID NO: 54625 - DNA, 25 bp, Canis familiaris
aatccctgatgctacaccaaagttt

SEQ ID NO: 54626 - DNA, 25 bp, Canis familiaris
aatccctgtgcaacatcgggtgttt

SEQ ID NO: 54627 - DNA, 25 bp, Canis familiaris
aatcccttatccagtatgtgttttg

SEQ ID NO: 54628 - DNA, 25 bp, Canis familiaris
aatctcccttccattaattcttatt

SEQ ID NO: 54629 - DNA, 25 bp, Canis familiaris
aatctcccttaccttacaatgtggt

SEQ ID NO: 54630 - DNA, 25 bp, Canis familiaris
aatctcccttattcttacaatgtcg

SEQ ID NO: 54631 - DNA, 25 bp, Canis familiaris
aatctcctaagattctttcattgta

SEQ ID NO: 54632 - DNA, 25 bp, Canis familiaris
aatcccataatatcatgctccaaat

SEQ ID NO: 54633 - DNA, 25 bp, Canis familiaris
aatcccaagatcattcgccaagaag

SEQ ID NO: 54634 - DNA, 25 bp, Canis familiaris
aataccaagctcagcctccaagagc

SEQ ID NO: 54635 - DNA, 25 bp, Canis familiaris
aatatacagactcaggctccagggt

SEQ ID NO: 54636 - DNA, 25 bp, Canis familiaris
aatatatacagttacctcacacgga

SEQ ID NO: 54637 - DNA, 25 bp, Canis familiaris
aatcaggaagttttctgccaccgct

SEQ ID NO: 54638 - DNA, 25 bp, Canis familiaris
aatcaaaagtcatcttgctaccagt

SEQ ID NO: 54639 - DNA, 25 bp, Canis familiaris
aatcaagcggtcgacattgcagaaa

SEQ ID NO: 54640 - DNA, 25 bp, Canis familiaris
aatcacagcccacacaagcagaagg

SEQ ID NO: 54641 - DNA, 25 bp, Canis familiaris
aatcagcacccaactactgcaaagc

SEQ ID NO: 54642 - DNA, 25 bp, Canis familiaris
aatacccaaatttaagaagcattat

SEQ ID NO: 54643 - DNA, 25 bp, Canis familiaris
aatacccccttggaaataatctatg

SEQ ID NO: 54644 - DNA, 25 bp, Canis familiaris
aatagccccctgggatgcattaaaa

SEQ ID NO: 54645 - DNA, 25 bp, Canis familiaris
aatacacaccaccggtgcctatagt

SEQ ID NO: 54646 - DNA, 25 bp, Canis familiaris
aatattacaacgcggcagcattatg

SEQ ID NO: 54647 - DNA, 25 bp, Canis familiaris
aataatatacattctgggccacata

SEQ ID NO: 54648 - DNA, 25 bp, Canis familiaris
aatacataacttcagtgccaaaaca

SEQ ID NO: 54649 - DNA, 25 bp, Canis familiaris
aataattgcctaccgatgtaaagaa

SEQ ID NO: 54650 - DNA, 25 bp, Canis familiaris
aataaatcctgcttcctgtcaaaaa

SEQ ID NO: 54651 - DNA, 25 bp, Canis familiaris
aataaactgcatctcccattggtaa

SEQ ID NO: 54652 - DNA, 25 bp, Canis familiaris
aataaacgctttctgtgatggtcaa

SEQ ID NO: 54653 - DNA, 25 bp, Canis familiaris
aataaagcgcttgtttgcagataaa

SEQ ID NO: 54654 - DNA, 25 bp, Canis familiaris
aatcaaaagctatatctgtcaggta

SEQ ID NO: 54655 - DNA, 25 bp, Canis familiaris
aatcacgcaaatttctttcaggatg

SEQ ID NO: 54656 - DNA, 25 bp, Canis familiaris
aatcactggatggaatttactgttg

SEQ ID NO: 54657 - DNA, 25 bp, Canis familiaris
aatacgggccattttaccatcattt

SEQ ID NO: 54658 - DNA, 25 bp, Canis familiaris
aatagtccgattttcatacccattc

SEQ ID NO: 54659 - DNA, 25 bp, Canis familiaris
aatagtgcctgtttccaacagccag

SEQ ID NO: 54660 - DNA, 25 bp, Canis familiaris
aataatgcgctttgcctaaccttca

SEQ ID NO: 54661 - DNA, 25 bp, Canis familiaris
aataagtttgatacccagctcttcc

SEQ ID NO: 54662 - DNA, 25 bp, Canis familiaris
aataccttaaatgctcactttcttt

SEQ ID NO: 54663 - DNA, 25 bp, Canis familiaris
aatacgtcgaaaaccctactcatgt

SEQ ID NO: 54664 - DNA, 25 bp, Canis familiaris
aatcacgttttaacctatatccagg

SEQ ID NO: 54665 - DNA, 25 bp, Canis familiaris
aatctcatttttaacatatcttcca

SEQ ID NO: 54666 - DNA, 25 bp, Canis familiaris
aatctattttcttcaaacctctgca

SEQ ID NO: 54667 - DNA, 25 bp, Canis familiaris
aatctataccatctgaaatccctca

SEQ ID NO: 54668 - DNA, 25 bp, Canis familiaris
aatctgttggctgtgagagaccctc

SEQ ID NO: 54669 - DNA, 25 bp, Canis familiaris
aatcgtcgtgcagcaagctgaccca

SEQ ID NO: 54670 - DNA, 25 bp, Canis familiaris
aatcgtctgtgcgataagctcccac

SEQ ID NO: 54671 - DNA, 25 bp, Canis familiaris
aatcacctggaaaatcatcctagac

SEQ ID NO: 54672 - DNA, 25 bp, Canis familiaris
aatctcactttgactatctcctaag

SEQ ID NO: 54673 - DNA, 25 bp, Canis familiaris
aatcttatcattttcattcctacag

SEQ ID NO: 54674 - DNA, 25 bp, Canis familiaris
aatctgtagcatttcctttcttaga

SEQ ID NO: 54675 - DNA, 25 bp, Canis familiaris
aatcgtcctgattctattttgtaaa

SEQ ID NO: 54676 - DNA, 25 bp, Canis familiaris
aatctgtcactagtctacttttaca

SEQ ID NO: 54677 - DNA, 25 bp, Canis familiaris
aatcatgtacttggcatttttttaa

SEQ ID NO: 54678 - DNA, 25 bp, Canis familiaris
aatcttgtatttctcctttacaaat

SEQ ID NO: 54679 - DNA, 25 bp, Canis familiaris
aataatgtaattcttgataataaat

SEQ ID NO: 54680 - DNA, 25 bp, Canis familiaris
aatcactatcatttttttaataaga

SEQ ID NO: 54681 - DNA, 25 bp, Canis familiaris
aatacccaagtcatttggaaatgtg

SEQ ID NO: 54682 - DNA, 25 bp, Canis familiaris
aataaacaagtccatgtctctgaaa

SEQ ID NO: 54683 - DNA, 25 bp, Canis familiaris
aatcaaccaactggtgtccaccatc

SEQ ID NO: 54684 - DNA, 25 bp, Canis familiaris
aataactcaagagcttcccgtcatg

SEQ ID NO: 54685 - DNA, 25 bp, Canis familiaris
aataatcgcagtgtttcctgcctcg

SEQ ID NO: 54686 - DNA, 25 bp, Canis familiaris
aataacagttccaactcactgccac

SEQ ID NO: 54687 - DNA, 25 bp, Canis familiaris
aatcacatagttactactctctgta

SEQ ID NO: 54688 - DNA, 25 bp, Canis familiaris
aatactctgtattgctaccatttgg

SEQ ID NO: 54689 - DNA, 25 bp, Canis familiaris
aatcactcctaggtcatcctgtgtt

SEQ ID NO: 54690 - DNA, 25 bp, Canis familiaris
aatagcctctagggatgcactctgg

SEQ ID NO: 54691 - DNA, 25 bp, Canis familiaris
aatacctgtgtcagtcacgcatgtg

SEQ ID NO: 54692 - DNA, 25 bp, Canis familiaris
aatacaggtgctggggaccgctttt

SEQ ID NO: 54693 - DNA, 25 bp, Canis familiaris
aataaagcgctgagtgacacccact

SEQ ID NO: 54694 - DNA, 25 bp, Canis familiaris
aataaaggatcatttgacaaccaaa

SEQ ID NO: 54695 - DNA, 25 bp, Canis familiaris
aataaagctgatagaggtcaaaaaa

SEQ ID NO: 54696 - DNA, 25 bp, Canis familiaris
aataaactattgagactacaccaaa

SEQ ID NO: 54697 - DNA, 25 bp, Canis familiaris
aataaacatttaaactctcagtcag

SEQ ID NO: 54698 - DNA, 25 bp, Canis familiaris
aattaaattgttaaatctgcaacca

SEQ ID NO: 54699 - DNA, 25 bp, Canis familiaris
aatataaaccttgcttctgacccat

SEQ ID NO: 54700 - DNA, 25 bp, Canis familiaris
aatatataatcctaggttaccacca

SEQ ID NO: 54701 - DNA, 25 bp, Canis familiaris
aataaagtcctcggatcttccgcca

SEQ ID NO: 54702 - DNA, 25 bp, Canis familiaris
aataaagccacccaatcttggccca

SEQ ID NO: 54703 - DNA, 25 bp, Canis familiaris
aataaggacacccagccttgatgcc

SEQ ID NO: 54704 - DNA, 25 bp, Canis familiaris
aataaaagcaccccagttgctgctc

SEQ ID NO: 54705 - DNA, 25 bp, Canis familiaris
aattagggcattagtagtttgtcct

SEQ ID NO: 54706 - DNA, 25 bp, Canis familiaris
aatttcaacatcagtggtcggtcct

SEQ ID NO: 54707 - DNA, 25 bp, Canis familiaris
aatactaaacggagcttcactgcgc

SEQ ID NO: 54708 - DNA, 25 bp, Canis familiaris
aatcttctagatcggtacccactgg

SEQ ID NO: 54709 - DNA, 25 bp, Canis familiaris
aatcttggaggcactaccagctctg

SEQ ID NO: 54710 - DNA, 25 bp, Canis familiaris
aatctagtgattctcaaccatgctc

SEQ ID NO: 54711 - DNA, 25 bp, Canis familiaris
aatcatggctgattcaggacccatc

SEQ ID NO: 54712 - DNA, 25 bp, Canis familiaris
aatcatgcccataagagacactctc

SEQ ID NO: 54713 - DNA, 25 bp, Canis familiaris
aatcatcaccaaagaagaccgcctg

SEQ ID NO: 54714 - DNA, 25 bp, Canis familiaris
caacatcacctacaactacccggtg

SEQ ID NO: 54715 - DNA, 25 bp, Canis familiaris
ctcaaaccttgttaccggtcgtgtg

SEQ ID NO: 54716 - DNA, 25 bp, Canis familiaris
cactcaagccgagaaccggggctgt

SEQ ID NO: 54717 - DNA, 25 bp, Canis familiaris
caataccactactaaacgggcctct

SEQ ID NO: 54718 - DNA, 25 bp, Canis familiaris
aataccaatgtccaaagtcttcctc

SEQ ID NO: 54719 - DNA, 25 bp, Canis familiaris
aatacaagattccttcgacgtccac

SEQ ID NO: 54720 - DNA, 25 bp, Canis familiaris
caataaagcttgtgactgacgtcca

SEQ ID NO: 54721 - DNA, 25 bp, Canis familiaris
aatcaaatatagtgacatccatgtc

SEQ ID NO: 54722 - DNA, 25 bp, Canis familiaris
aatcttattaaccacatgcagctgt

SEQ ID NO: 54723 - DNA, 25 bp, Canis familiaris
aatctgtcttgtactgactcctttt

SEQ ID NO: 54724 - DNA, 25 bp, Canis familiaris
aatctgttcttgttggttgtttgta

SEQ ID NO: 54725 - DNA, 25 bp, Canis familiaris
aatctctagttggtgttggtgttta

SEQ ID NO: 54726 - DNA, 25 bp, Canis familiaris
aatctccacatatttgtgttttctt

SEQ ID NO: 54727 - DNA, 25 bp, Canis familiaris
aatcttaattttcttcatctttcag

SEQ ID NO: 54728 - DNA, 25 bp, Canis familiaris
aatcactaagtgagcctttgttcca

SEQ ID NO: 54729 - DNA, 25 bp, Canis familiaris
aatcactaaggatggctatctttga

SEQ ID NO: 54730 - DNA, 25 bp, Canis familiaris
aataccaaaatcagccttaatgaca

SEQ ID NO: 54731 - DNA, 25 bp, Canis familiaris
aatagatataaactggccttttcca

SEQ ID NO: 54732 - DNA, 25 bp, Canis familiaris
aataatgcacagaaaccctatttgc

SEQ ID NO: 54733 - DNA, 25 bp, Canis familiaris
aatacagcaagacctctccagattt

SEQ ID NO: 54734 - DNA, 25 bp, Canis familiaris
aatcacagaagcaggcctcggatcc

SEQ ID NO: 54735 - DNA, 25 bp, Canis familiaris
aatcaaattgatggccaccggcatt

SEQ ID NO: 54736 - DNA, 25 bp, Canis familiaris
aatcaatagtgtactctgccagaga

SEQ ID NO: 54737 - DNA, 25 bp, Canis familiaris
aatctatcaggttcactggtacata

SEQ ID NO: 54738 - DNA, 25 bp, Canis familiaris
aatctgatcagggttctcttggcaa

SEQ ID NO: 54739 - DNA, 25 bp, Canis familiaris
aatcatattctggctgctctttggc

SEQ ID NO: 54740 - DNA, 25 bp, Canis familiaris
aatcatatttactctaggtgcccat

SEQ ID NO: 54741 - DNA, 25 bp, Canis familiaris
aatactcttctctcaaagtcaccaa

SEQ ID NO: 54742 - DNA, 25 bp, Canis familiaris
aatactactttccaacagttaacat

SEQ ID NO: 54743 - DNA, 25 bp, Canis familiaris
aatatgaactttcgttccctcaaca

SEQ ID NO: 54744 - DNA, 25 bp, Canis familiaris
aataatctttatctttcactcacca

SEQ ID NO: 54745 - DNA, 25 bp, Canis familiaris
aatcttttcaatatttctcaccctc

SEQ ID NO: 54746 - DNA, 25 bp, Canis familiaris
aatcttttcaatatttctcaccctc

SEQ ID NO: 54747 - DNA, 25 bp, Canis familiaris
aatcttgtggagcagttgtccgccc

SEQ ID NO: 54748 - DNA, 25 bp, Canis familiaris
aatctatgctgcaggcttttttggc

SEQ ID NO: 54749 - DNA, 25 bp, Canis familiaris
aatctgagatctcgacttttcttgg

SEQ ID NO: 54750 - DNA, 25 bp, Canis familiaris
aatatgaattagttagatgtttgtg

SEQ ID NO: 54751 - DNA, 25 bp, Canis familiaris
aatcagagctttgcgaggttcgtgc

SEQ ID NO: 54752 - DNA, 25 bp, Canis familiaris
aatctgcaattcgcacgtttcctga

SEQ ID NO: 54753 - DNA, 25 bp, Canis familiaris
aatcatgcttattgctacagtttac

SEQ ID NO: 54754 - DNA, 25 bp, Canis familiaris
aatcaggttcatgacagatggccac

SEQ ID NO: 54755 - DNA, 25 bp, Canis familiaris
aatcagagtcacttaccatgcagcc

SEQ ID NO: 54756 - DNA, 25 bp, Canis familiaris
aatcaggttcatacccatcagctct

SEQ ID NO: 54757 - DNA, 25 bp, Canis familiaris
aatctgcggatctaaccacagcttt

SEQ ID NO: 54758 - DNA, 25 bp, Canis familiaris
aatctgcagttgctatacacacctt

SEQ ID NO: 54759 - DNA, 25 bp, Canis familiaris
aatctgcttctggtaatcatttcta

SEQ ID NO: 54760 - DNA, 25 bp, Canis familiaris
aatcatttgccactaatcattttta

SEQ ID NO: 54761 - DNA, 25 bp, Canis familiaris
aatcttcgccttaatacttgttctt

SEQ ID NO: 54762 - DNA, 25 bp, Canis familiaris
aatcttcgctttgaaatgtgatggt

SEQ ID NO: 54763 - DNA, 25 bp, Canis familiaris
aatctaattttcaccttgaggacat

SEQ ID NO: 54764 - DNA, 25 bp, Canis familiaris
aataaatctgttatccctgctggat

SEQ ID NO: 54765 - DNA, 25 bp, Canis familiaris
cgtaccacgtgtgtccatagctatg

SEQ ID NO: 54766 - DNA, 25 bp, Canis familiaris
aatatccacggtgtccagcaggtgt

SEQ ID NO: 54767 - DNA, 25 bp, Canis familiaris
gaattccaaaggctcctggggctat

SEQ ID NO: 54768 - DNA, 25 bp, Canis familiaris
aatctccagataaaatccttgtcgg

SEQ ID NO: 54769 - DNA, 25 bp, Canis familiaris
aatcatccataaaaaaatgtgtctt

SEQ ID NO: 54770 - DNA, 25 bp, Canis familiaris
aatcacctgaccacaattctttgtt

SEQ ID NO: 54771 - DNA, 25 bp, Canis familiaris
gaacgactatccaaaattcaagtat

SEQ ID NO: 54772 - DNA, 25 bp, Canis familiaris
aatctaatcataaaacagtcaagtt

SEQ ID NO: 54773 - DNA, 25 bp, Canis familiaris
aattgtttgaaatggaaatgtcttt

SEQ ID NO: 54774 - DNA, 25 bp, Canis familiaris
aatcttcttgggtcgcaatacatgt

SEQ ID NO: 54775 - DNA, 25 bp, Canis familiaris
aatctactttagaagcctactttgt

SEQ ID NO: 54776 - DNA, 25 bp, Canis familiaris
aataacttccagagttggcttatgt

SEQ ID NO: 54777 - DNA, 25 bp, Canis familiaris
aatacttcccagagactggtgttga

SEQ ID NO: 54778 - DNA, 25 bp, Canis familiaris
aatacttccagtgcttcgggttgac

SEQ ID NO: 54779 - DNA, 25 bp, Canis familiaris
aattctttttccatttggttgagat

SEQ ID NO: 54780 - DNA, 25 bp, Canis familiaris
aattcattttttgttcatggaaggc

SEQ ID NO: 54781 - DNA, 25 bp, Canis familiaris
caatttttgtttcttaaactagcat

SEQ ID NO: 54782 - DNA, 25 bp, Canis familiaris
caattaattttttctcagaaaccag

SEQ ID NO: 54783 - DNA, 25 bp, Canis familiaris
aatctaattacattttctgaaaaca

SEQ ID NO: 54784 - DNA, 25 bp, Canis familiaris
aatctccatttcccatttaatacca

SEQ ID NO: 54785 - DNA, 25 bp, Canis familiaris
aatctcactttccatattatgtttc

SEQ ID NO: 54786 - DNA, 25 bp, Canis familiaris
aatcacatctattccaatttgtctt

SEQ ID NO: 54787 - DNA, 25 bp, Canis familiaris
aatacatttctgggtttgtttgagg

SEQ ID NO: 54788 - DNA, 25 bp, Canis familiaris
aatactacatggggttcaaattgag

SEQ ID NO: 54789 - DNA, 25 bp, Canis familiaris
aataacactggccgtaggatatcta

SEQ ID NO: 54790 - DNA, 25 bp, Canis familiaris
aatatatcagctagccggaccgact

SEQ ID NO: 54791 - DNA, 25 bp, Canis familiaris
aataagcagctcagcgtagccgtct

SEQ ID NO: 54792 - DNA, 25 bp, Canis familiaris
caataagcaggctggtaccgtccgg

SEQ ID NO: 54793 - DNA, 25 bp, Canis familiaris
aataagcatggctggtaccggtccg

SEQ ID NO: 54794 - DNA, 25 bp, Canis familiaris
aataaagaaagcctgacccgtctcg

SEQ ID NO: 54795 - DNA, 25 bp, Canis familiaris
aatagaatggaacctgtcccctgtt

SEQ ID NO: 54796 - DNA, 25 bp, Canis familiaris
aatcagtatagaggtctcccctggt

SEQ ID NO: 54797 - DNA, 25 bp, Canis familiaris
aatcaagtaatcgttcctcgtgcct

SEQ ID NO: 54798 - DNA, 25 bp, Canis familiaris
aataatgtaaccattcatcccctgc

SEQ ID NO: 54799 - DNA, 25 bp, Canis familiaris
aatagagtaaccacgcacacaccgt

SEQ ID NO: 54800 - DNA, 25 bp, Canis familiaris
aatagggaagcacaggcacccaccc

SEQ ID NO: 54801 - DNA, 25 bp, Canis familiaris
aatagtgcagggtgtggacctccca

SEQ ID NO: 54802 - DNA, 25 bp, Canis familiaris
aataccaggaggaggacccacttgc

SEQ ID NO: 54803 - DNA, 25 bp, Canis familiaris
aattccaggagatggtatcggccct

SEQ ID NO: 54804 - DNA, 25 bp, Canis familiaris
aataccgggctccaggggagctcca

SEQ ID NO: 54805 - DNA, 25 bp, Canis familiaris
aatcatcctaacacagggggcctca

SEQ ID NO: 54806 - DNA, 25 bp, Canis familiaris
aatacgtagactccgaggggcacct

SEQ ID NO: 54807 - DNA, 25 bp, Canis familiaris
aattcgcatcgagtgtaaggcttac

SEQ ID NO: 54808 - DNA, 25 bp, Canis familiaris
aattcaagctgggtctggacttccc

SEQ ID NO: 54809 - DNA, 25 bp, Canis familiaris
aattctagtggttcattatctcacc

SEQ ID NO: 54810 - DNA, 25 bp, Canis familiaris
aatcttgaggtgtccttgtttcact

SEQ ID NO: 54811 - DNA, 25 bp, Canis familiaris
aatcttgtggcttctcttagtaacc

SEQ ID NO: 54812 - DNA, 25 bp, Canis familiaris
aatctctgccctattgtttgaatcc

SEQ ID NO: 54813 - DNA, 25 bp, Canis familiaris
aatatcgactcttgtattacgattc

SEQ ID NO: 54814 - DNA, 25 bp, Canis familiaris
aataggaattgaccttaccatcacc

SEQ ID NO: 54815 - DNA, 25 bp, Canis familiaris
aatatggtatttgctgtatcgcccc

SEQ ID NO: 54816 - DNA, 25 bp, Canis familiaris
aattggtacttgagcttgccagcca

SEQ ID NO: 54817 - DNA, 25 bp, Canis familiaris
aatctattatttttccagccagcct

SEQ ID NO: 54818 - DNA, 25 bp, Canis familiaris
aatcttctttatttagtccatctct

SEQ ID NO: 54819 - DNA, 25 bp, Canis familiaris
aatcttgtgttaagttgcctccatc

SEQ ID NO: 54820 - DNA, 25 bp, Canis familiaris
aataatctttaattgtgcctcctct

SEQ ID NO: 54821 - DNA, 25 bp, Canis familiaris
aatagactcatcaacatgttgccct

SEQ ID NO: 54822 - DNA, 25 bp, Canis familiaris
aataactgtgactgttgcccatcga

SEQ ID NO: 54823 - DNA, 25 bp, Canis familiaris
aatcattttgaaagtctgtccttga

SEQ ID NO: 54824 - DNA, 25 bp, Canis familiaris
aatactgttgaaaggtggcattcat

SEQ ID NO: 54825 - DNA, 25 bp, Canis familiaris
aatattttgtcactgctgtaaagca

SEQ ID NO: 54826 - DNA, 25 bp, Canis familiaris
aatattttggacatgccaataaatg

SEQ ID NO: 54827 - DNA, 25 bp, Canis familiaris
aatctttcctgggtgccttgatagg

SEQ ID NO: 54828 - DNA, 25 bp, Canis familiaris
aatctttccaggtttgcctcatgag

SEQ ID NO: 54829 - DNA, 25 bp, Canis familiaris
aatctttctagatcttagtctcagt

SEQ ID NO: 54830 - DNA, 25 bp, Canis familiaris
aatctctttagatctagctatgcca

SEQ ID NO: 54831 - DNA, 25 bp, Canis familiaris
aatctatttagagcttcatcaccat

SEQ ID NO: 54832 - DNA, 25 bp, Canis familiaris
aatcttattcatctttctcactgtt

SEQ ID NO: 54833 - DNA, 25 bp, Canis familiaris
aatcttcacaagcctatttcatttt

SEQ ID NO: 54834 - DNA, 25 bp, Canis familiaris
aatcattatcactactgttattact

SEQ ID NO: 54835 - DNA, 25 bp, Canis familiaris
aatcttctcactattttgctacata

SEQ ID NO: 54836 - DNA, 25 bp, Canis familiaris
aatcttccctttttatgaaatgcca

SEQ ID NO: 54837 - DNA, 25 bp, Canis familiaris
aatctatcccttttaacatgacacc

SEQ ID NO: 54838 - DNA, 25 bp, Canis familiaris
aataactcctgtgctcaccaggacc

SEQ ID NO: 54839 - DNA, 25 bp, Canis familiaris
aataacaccgtcaataccatgcgcc

SEQ ID NO: 54840 - DNA, 25 bp, Canis familiaris
aataacctccatctcaacattggga

SEQ ID NO: 54841 - DNA, 25 bp, Canis familiaris
aataaccttatgcatgaacttttcc

SEQ ID NO: 54842 - DNA, 25 bp, Canis familiaris
aatagtccctgatatgaacttttca

SEQ ID NO: 54843 - DNA, 25 bp, Canis familiaris
aattgtctccaataaagctgttaat

SEQ ID NO: 54844 - DNA, 25 bp, Canis familiaris
aataacccatcttaactcgtctaat

SEQ ID NO: 54845 - DNA, 25 bp, Canis familiaris
aataccaccactgaagtgcccagac

SEQ ID NO: 54846 - DNA, 25 bp, Canis familiaris
aataccaatcctaacgtcacaagtg

SEQ ID NO: 54847 - DNA, 25 bp, Canis familiaris
aataacttgcctaaagctacagagt

SEQ ID NO: 54848 - DNA, 25 bp, Canis familiaris
aataaaatgcccgttgctgacagcc

SEQ ID NO: 54849 - DNA, 25 bp, Canis familiaris
aataaaaacccgtcatgcaagccca

SEQ ID NO: 54850 - DNA, 25 bp, Canis familiaris
aataacaaaacctagtgaagcagta

SEQ ID NO: 54851 - DNA, 25 bp, Canis familiaris
aataaagattcaccaagctccacag

SEQ ID NO: 54852 - DNA, 25 bp, Canis familiaris
aataaacataaccacaaccacacaa

SEQ ID NO: 54853 - DNA, 25 bp, Canis familiaris
aataagctattgggactacacaaaa

SEQ ID NO: 54854 - DNA, 25 bp, Canis familiaris
aataatgttgatgtcttacacaaaa

SEQ ID NO: 54855 - DNA, 25 bp, Canis familiaris
aatagtattaaatgtctccaagcac

SEQ ID NO: 54856 - DNA, 25 bp, Canis familiaris
aatagatttataacggcctcagact

SEQ ID NO: 54857 - DNA, 25 bp, Canis familiaris
aatcatgcattgttgaacccttaac

SEQ ID NO: 54858 - DNA, 25 bp, Canis familiaris
aatcattgtgtccaaccttcagacc

SEQ ID NO: 54859 - DNA, 25 bp, Canis familiaris
aattgtggtctctgcccatagactt

SEQ ID NO: 54860 - DNA, 25 bp, Canis familiaris
aatttggtcaatggcccaactctcc

SEQ ID NO: 54861 - DNA, 25 bp, Canis familiaris
aattgacattcgtgccacaacctgg

SEQ ID NO: 54862 - DNA, 25 bp, Canis familiaris
aatagtcagtcctgactcctctgtg

SEQ ID NO: 54863 - DNA, 25 bp, Canis familiaris
aatagtaacatatgaccgcacttat

SEQ ID NO: 54864 - DNA, 25 bp, Canis familiaris
aatcagcaaataaaacatggcctta

SEQ ID NO: 54865 - DNA, 25 bp, Canis familiaris
aatacaactataaagcaagtgctta

SEQ ID NO: 54866 - DNA, 25 bp, Canis familiaris
aatagacctgtataagagacttaac

SEQ ID NO: 54867 - DNA, 25 bp, Canis familiaris
aatatacctgtgcaaacaatctcaa

SEQ ID NO: 54868 - DNA, 25 bp, Canis familiaris
aataccactgggtgcagattccgag

SEQ ID NO: 54869 - DNA, 25 bp, Canis familiaris
aataaaatcaggtacaactccaaga

SEQ ID NO: 54870 - DNA, 25 bp, Canis familiaris
aataaaacaggcttcatttattaat

SEQ ID NO: 54871 - DNA, 25 bp, Canis familiaris
aataaaacgtgcttttctctcttga

SEQ ID NO: 54872 - DNA, 25 bp, Canis familiaris
aataacaagctttttctcttcagag

SEQ ID NO: 54873 - DNA, 25 bp, Canis familiaris
aataaaatcgtggccattattcaag

SEQ ID NO: 54874 - DNA, 25 bp, Canis familiaris
aataatacatttgtcattactgaaa

SEQ ID NO: 54875 - DNA, 25 bp, Canis familiaris
aatactagcacttgttattcttgtg

SEQ ID NO: 54876 - DNA, 25 bp, Canis familiaris
aatactattcattgttaatttgttc

SEQ ID NO: 54877 - DNA, 25 bp, Canis familiaris
aatactagtacctatggttctgtct

SEQ ID NO: 54878 - DNA, 25 bp, Canis familiaris
aatagtgctaaccaatgccttttta

SEQ ID NO: 54879 - DNA, 25 bp, Canis familiaris
aatcagttgaactaacctgtatgtt

SEQ ID NO: 54880 - DNA, 25 bp, Canis familiaris
taaagcttggaaaaatatgtactgt

SEQ ID NO: 54881 - DNA, 25 bp, Canis familiaris
aatagctgtggccaagactttactg

SEQ ID NO: 54882 - DNA, 25 bp, Canis familiaris
aatagcctgtaaacgtgtgtgcacg

SEQ ID NO: 54883 - DNA, 25 bp, Canis familiaris
aatactcttccaaggagctggagag

SEQ ID NO: 54884 - DNA, 25 bp, Canis familiaris
aatactctcctcaggtgctgtatga

SEQ ID NO: 54885 - DNA, 25 bp, Canis familiaris
aatacaactccatagctcatcatat

SEQ ID NO: 54886 - DNA, 25 bp, Canis familiaris
aatacatcttcgtcacagccaataa

SEQ ID NO: 54887 - DNA, 25 bp, Canis familiaris
aatatcgatgggtacagacctatga

SEQ ID NO: 54888 - DNA, 25 bp, Canis familiaris
aatcatcagatataaagacgaaacc

SEQ ID NO: 54889 - DNA, 25 bp, Canis familiaris
aatcaactatgagaggacaatatac

SEQ ID NO: 54890 - DNA, 25 bp, Canis familiaris
aatcttctacagcaatagcaaatca

SEQ ID NO: 54891 - DNA, 25 bp, Canis familiaris
aatcttatctactttgagctcaaca

SEQ ID NO: 54892 - DNA, 25 bp, Canis familiaris
aatcattatgtcattcgtccaactt

SEQ ID NO: 54893 - DNA, 25 bp, Canis familiaris
aatcatgttttattcagacccactt

SEQ ID NO: 54894 - DNA, 25 bp, Canis familiaris
aatctttatcacatacacacttctt

SEQ ID NO: 54895 - DNA, 25 bp, Canis familiaris
aatcttgcttctctgcagcaacttc

SEQ ID NO: 54896 - DNA, 25 bp, Canis familiaris
aatcattttctgttgaggctttcta

SEQ ID NO: 54897 - DNA, 25 bp, Canis familiaris
aatattgaatcgttaagtgtttagc

SEQ ID NO: 54898 - DNA, 25 bp, Canis familiaris
aatattgattcactgttaggttaca

SEQ ID NO: 54899 - DNA, 25 bp, Canis familiaris
aatacagatatactcttactttcct

SEQ ID NO: 54900 - DNA, 25 bp, Canis familiaris
aatagagtcttggccagcacttttc

SEQ ID NO: 54901 - DNA, 25 bp, Canis familiaris
aattgagtctgtgcccgattacttc

SEQ ID NO: 54902 - DNA, 25 bp, Canis familiaris
aataactcttacagctttgccttgc

SEQ ID NO: 54903 - DNA, 25 bp, Canis familiaris
aataacttctcaatcgatcttcgtg

SEQ ID NO: 54904 - DNA, 25 bp, Canis familiaris
aatacttgcttcagaacattcgtgg

SEQ ID NO: 54905 - DNA, 25 bp, Canis familiaris
aatacggctacagcaacagggtggt

SEQ ID NO: 54906 - DNA, 25 bp, Canis familiaris
aatacggtattccactcagggtctg

SEQ ID NO: 54907 - DNA, 25 bp, Canis familiaris
aataaagtgttccatccatagtttg

SEQ ID NO: 54908 - DNA, 25 bp, Canis familiaris
aataccggatcctacactgactttg

SEQ ID NO: 54909 - DNA, 25 bp, Canis familiaris
aataccggtactttgcttgtttgat

SEQ ID NO: 54910 - DNA, 25 bp, Canis familiaris
aatacgactatagccctttttgata

SEQ ID NO: 54911 - DNA, 25 bp, Canis familiaris
aatacaacatattcaacgttttgtt

SEQ ID NO: 54912 - DNA, 25 bp, Canis familiaris
aataatcattattcccttctttagt

SEQ ID NO: 54913 - DNA, 25 bp, Canis familiaris
aataattgtattccacgtcgtgaca

SEQ ID NO: 54914 - DNA, 25 bp, Canis familiaris
aatcaattgctgttactttgcttca

SEQ ID NO: 54915 - DNA, 25 bp, Canis familiaris
aatcaatcttgctggtattttcatt

SEQ ID NO: 54916 - DNA, 25 bp, Canis familiaris
aatcatatcttgtttttctctttcc

SEQ ID NO: 54917 - DNA, 25 bp, Canis familiaris
aatactgcttttgttttctgactcc

SEQ ID NO: 54918 - DNA, 25 bp, Canis familiaris
aataggttgttcatttttggcatgt

SEQ ID NO: 54919 - DNA, 25 bp, Canis familiaris
aataggcgtttcagtgatatcttca

SEQ ID NO: 54920 - DNA, 25 bp, Canis familiaris
aatacgcgtggccgtctgatattta

SEQ ID NO: 54921 - DNA, 25 bp, Canis familiaris
aattaagatgtgtgattattattac

SEQ ID NO: 54922 - DNA, 25 bp, Canis familiaris
aataaagagtcactatgtcaaatct

SEQ ID NO: 54923 - DNA, 25 bp, Canis familiaris
aataatcagtgctctcatattaatt

SEQ ID NO: 54924 - DNA, 25 bp, Canis familiaris
aatcatgctcgtctccattttatta

SEQ ID NO: 54925 - DNA, 25 bp, Canis familiaris
aatcatcctatcaaccatttacctg

SEQ ID NO: 54926 - DNA, 25 bp, Canis familiaris
aatatgggattagcatgtaacctgt

SEQ ID NO: 54927 - DNA, 25 bp, Canis familiaris
aatagcaggttatcgttcatacttg

SEQ ID NO: 54928 - DNA, 25 bp, Canis familiaris
aataccaatattctttctacttgta

SEQ ID NO: 54929 - DNA, 25 bp, Canis familiaris
aatcacttaaatttttgctgtcttt

SEQ ID NO: 54930 - DNA, 25 bp, Canis familiaris
aatttattacactcatggcttttta

SEQ ID NO: 54931 - DNA, 25 bp, Canis familiaris
aatttcgtgaatgaatgatttttta

SEQ ID NO: 54932 - DNA, 25 bp, Canis familiaris
aatttggagactgggttcctctgtt

SEQ ID NO: 54933 - DNA, 25 bp, Canis familiaris
aataggtaagggctccatctctgtc

SEQ ID NO: 54934 - DNA, 25 bp, Canis familiaris
aatatgtgtacggtgttccctgctt

SEQ ID NO: 54935 - DNA, 25 bp, Canis familiaris
aatattaaatggatctccagcctat

SEQ ID NO: 54936 - DNA, 25 bp, Canis familiaris
aatttatcaaggtaccctcttcata

SEQ ID NO: 54937 - DNA, 25 bp, Canis familiaris
aattttgccaggaacagcaccctca

SEQ ID NO: 54938 - DNA, 25 bp, Canis familiaris
aattttgaatggaccaggcagggag

SEQ ID NO: 54939 - DNA, 25 bp, Canis familiaris
aattcctgcggtacctgtggaggga

SEQ ID NO: 54940 - DNA, 25 bp, Canis familiaris
aatcaccaggggctgctgttgatgg

SEQ ID NO: 54941 - DNA, 25 bp, Canis familiaris
aatacacggtggttctcaggattcc

SEQ ID NO: 54942 - DNA, 25 bp, Canis familiaris
aatttgggtctactctcatgtttcc

SEQ ID NO: 54943 - DNA, 25 bp, Canis familiaris
cactcttgggtctaatctttcccct

SEQ ID NO: 54944 - DNA, 25 bp, Canis familiaris
caaccagggcatcaacttgaccggc

SEQ ID NO: 54945 - DNA, 25 bp, Canis familiaris
caatctgcatggcaaagacccacct

SEQ ID NO: 54946 - DNA, 25 bp, Canis familiaris
aatcagctggctgaagtccacacct

SEQ ID NO: 54947 - DNA, 25 bp, Canis familiaris
aatcatctggctggacctcaaggcc

SEQ ID NO: 54948 - DNA, 25 bp, Canis familiaris
aatcatatgtgttactgatcaggga

SEQ ID NO: 54949 - DNA, 25 bp, Canis familiaris
aatcatgatctatacgcaaccggaa

SEQ ID NO: 54950 - DNA, 25 bp, Canis familiaris
aatcatattatggaccctcctggaa

SEQ ID NO: 54951 - DNA, 25 bp, Canis familiaris
aatattgtcatgaactatatccgta

SEQ ID NO: 54952 - DNA, 25 bp, Canis familiaris
aatcatgtgttgcagctttacagtt

SEQ ID NO: 54953 - DNA, 25 bp, Canis familiaris
aatcatgtcttatgttcttcacaag

SEQ ID NO: 54954 - DNA, 25 bp, Canis familiaris
aatcatctgcttcatgtgttttcaa

SEQ ID NO: 54955 - DNA, 25 bp, Canis familiaris
aatcatctggtctttctggatacag

SEQ ID NO: 54956 - DNA, 25 bp, Canis familiaris
aatacttgacatctcattgcttata

SEQ ID NO: 54957 - DNA, 25 bp, Canis familiaris
aataggtgactgtccattccagaag

SEQ ID NO: 54958 - DNA, 25 bp, Canis familiaris
aatagtgctttaccattcttaatga

SEQ ID NO: 54959 - DNA, 25 bp, Canis familiaris
aatagtgcgtagaggtctttatacc

SEQ ID NO: 54960 - DNA, 25 bp, Canis familiaris
aataagtggcagattgtctttttct

SEQ ID NO: 54961 - DNA, 25 bp, Canis familiaris
aataagctccagattgtctttgatt

SEQ ID NO: 54962 - DNA, 25 bp, Canis familiaris
aataagtgcttcaagttcttctctt

SEQ ID NO: 54963 - DNA, 25 bp, Canis familiaris
aatagggctttgtttgcattgtttg

SEQ ID NO: 54964 - DNA, 25 bp, Canis familiaris
aatagaggtttctgtaggtctgtct

SEQ ID NO: 54965 - DNA, 25 bp, Canis familiaris
aataaagtcttctgccaaccatggc

SEQ ID NO: 54966 - DNA, 25 bp, Canis familiaris
aataacatattttccacacacagag

SEQ ID NO: 54967 - DNA, 25 bp, Canis familiaris
aataaacattctcctcaagcataaa

SEQ ID NO: 54968 - DNA, 25 bp, Canis familiaris
aatataaatccaaagcaagcagaat

SEQ ID NO: 54969 - DNA, 25 bp, Canis familiaris
aataaagaccaagcaatcccatgtg

SEQ ID NO: 54970 - DNA, 25 bp, Canis familiaris
aataaaaatcacgtctagcccgcga

SEQ ID NO: 54971 - DNA, 25 bp, Canis familiaris
taaactaaacctgcaatcctgggat

SEQ ID NO: 54972 - DNA, 25 bp, Canis familiaris
aataccaatagcgggatccctgggt

SEQ ID NO: 54973 - DNA, 25 bp, Canis familiaris
aataaaatgtgcaaggagccctagg

SEQ ID NO: 54974 - DNA, 25 bp, Canis familiaris
aataaatatgtgctgaacccttaaa

SEQ ID NO: 54975 - DNA, 25 bp, Canis familiaris
aataaactgctgtgaatccccaaaa

SEQ ID NO: 54976 - DNA, 25 bp, Canis familiaris
aataaagcaggttcaatcaccaaaa

SEQ ID NO: 54977 - DNA, 25 bp, Canis familiaris
aataaacaccattgaagcacccaaa

SEQ ID NO: 54978 - DNA, 25 bp, Canis familiaris
caataagccctggaaagaccccgag

SEQ ID NO: 54979 - DNA, 25 bp, Canis familiaris
aatcaagccctgcttcaggggcctg

SEQ ID NO: 54980 - DNA, 25 bp, Canis familiaris
aatactgccctgcatgtgggggtgc

SEQ ID NO: 54981 - DNA, 25 bp, Canis familiaris
aatactggggccttgggcagatgga

SEQ ID NO: 54982 - DNA, 25 bp, Canis familiaris
aatcactgtgggtcctgaagccatt

SEQ ID NO: 54983 - DNA, 25 bp, Canis familiaris
aatcactgttggtgcctaatcactt

SEQ ID NO: 54984 - DNA, 25 bp, Canis familiaris
aatactccgcagtgcacaagatgca

SEQ ID NO: 54985 - DNA, 25 bp, Canis familiaris
aataccggagatcatgcaagctggt

SEQ ID NO: 54986 - DNA, 25 bp, Canis familiaris
aataatctggggcacctgcatggct

SEQ ID NO: 54987 - DNA, 25 bp, Canis familiaris
aatagcttgtgggcagactctggtc

SEQ ID NO: 54988 - DNA, 25 bp, Canis familiaris
aatatgtgttgacatcccggtcaca

SEQ ID NO: 54989 - DNA, 25 bp, Canis familiaris
aatattattgttgctgccggtgaaa

SEQ ID NO: 54990 - DNA, 25 bp, Canis familiaris
aatcagtttttttctatggctaata

SEQ ID NO: 54991 - DNA, 25 bp, Canis familiaris
aatttggattttgctagtgctattt

SEQ ID NO: 54992 - DNA, 25 bp, Canis familiaris
aatatttttcttgccaagtctccta

SEQ ID NO: 54993 - DNA, 25 bp, Canis familiaris
aattaatttctcccatgggtctcct

SEQ ID NO: 54994 - DNA, 25 bp, Canis familiaris
aattagttgtctgcacgagttgtcc

SEQ ID NO: 54995 - DNA, 25 bp, Canis familiaris
aataagtttatcctggtgtgtggcc

SEQ ID NO: 54996 - DNA, 25 bp, Canis familiaris
aataaggatatttttggctctgcaa

SEQ ID NO: 54997 - DNA, 25 bp, Canis familiaris
aataacgatatttttgtgcctgtat

SEQ ID NO: 54998 - DNA, 25 bp, Canis familiaris
aataattgtattttgctggcagtgg

SEQ ID NO: 54999 - DNA, 25 bp, Canis familiaris
aataatgtgttgtgtggggatgtaa

SEQ ID NO: 55000 - DNA, 25 bp, Canis familiaris
aatcagttgttgtggttgcagtgga

SEQ ID NO: 55001 - DNA, 25 bp, Canis familiaris
aatagatattcctggttcctggcct

SEQ ID NO: 55002 - DNA, 25 bp, Canis familiaris
aataattgctcctgatgtatccctc

SEQ ID NO: 55003 - DNA, 25 bp, Canis familiaris
aataatatcccatcttttgctcagc

SEQ ID NO: 55004 - DNA, 25 bp, Canis familiaris
aataatatgccccatttgtatgtaa

SEQ ID NO: 55005 - DNA, 25 bp, Canis familiaris
aataatatcatctcagtctgctgtt

SEQ ID NO: 55006 - DNA, 25 bp, Canis familiaris
aatagaatttattgtggctctgatt

SEQ ID NO: 55007 - DNA, 25 bp, Canis familiaris
aatagccacttatttagctcaacat

SEQ ID NO: 55008 - DNA, 25 bp, Canis familiaris
aataccatttgatttacttattggg

SEQ ID NO: 55009 - DNA, 25 bp, Canis familiaris
aatacctttattcaatattcagttg

SEQ ID NO: 55010 - DNA, 25 bp, Canis familiaris
aatactgcattgtcttggaatctta

SEQ ID NO: 55011 - DNA, 25 bp, Canis familiaris
aatatcttctgagttgtgacatctt

SEQ ID NO: 55012 - DNA, 25 bp, Canis familiaris
aatagctttagccttcactttcaag

SEQ ID NO: 55013 - DNA, 25 bp, Canis familiaris
aatactttaatttccatgtttcatg

SEQ ID NO: 55014 - DNA, 25 bp, Canis familiaris
aataccgcagacttaccatttataa

SEQ ID NO: 55015 - DNA, 25 bp, Canis familiaris
aatcacctgatgtcagtacacacct

SEQ ID NO: 55016 - DNA, 25 bp, Canis familiaris
aatcaatcagcataatacaccacat

SEQ ID NO: 55017 - DNA, 25 bp, Canis familiaris
aatcaacatcacaataagacaccat

SEQ ID NO: 55018 - DNA, 25 bp, Canis familiaris
aatcacacacagaacaaggcacccc

SEQ ID NO: 55019 - DNA, 25 bp, Canis familiaris
caatagaacaaccaagactccccag

SEQ ID NO: 55020 - DNA, 25 bp, Canis familiaris
aatagaaacacctagtctccattta

SEQ ID NO: 55021 - DNA, 25 bp, Canis familiaris
aatagaaacagcctatgtccatagt

SEQ ID NO: 55022 - DNA, 25 bp, Canis familiaris
aataaaacagcaacaccctacttct

SEQ ID NO: 55023 - DNA, 25 bp, Canis familiaris
aataaaacatataccagccaacctt

SEQ ID NO: 55024 - DNA, 25 bp, Canis familiaris
aatacaattacaaccctaagctctt

SEQ ID NO: 55025 - DNA, 25 bp, Canis familiaris
aatacatttgtcattactgaaaatt

SEQ ID NO: 55026 - DNA, 25 bp, Canis familiaris
aatactgtattaaaccatgagagaa

SEQ ID NO: 55027 - DNA, 25 bp, Canis familiaris
aatactgcttgtaccagccagggaa

SEQ ID NO: 55028 - DNA, 25 bp, Canis familiaris
aatatctgcatgctttgagctcagc

SEQ ID NO: 55029 - DNA, 25 bp, Canis familiaris
aatacgatgaatactgacccaccac

SEQ ID NO: 55030 - DNA, 25 bp, Canis familiaris
aatacctcaatttgtctgtagtcac

SEQ ID NO: 55031 - DNA, 25 bp, Canis familiaris
aatacaccaataaatagtgtcacca

SEQ ID NO: 55032 - DNA, 25 bp, Canis familiaris
aataatccactaaacacttgaccaa

SEQ ID NO: 55033 - DNA, 25 bp, Canis familiaris
aataatggcctttatcctctgaaga

SEQ ID NO: 55034 - DNA, 25 bp, Canis familiaris
aatatgtggacgaggcctccaagaa

SEQ ID NO: 55035 - DNA, 25 bp, Canis familiaris
aatactgcgaagagaaggccaaaga

SEQ ID NO: 55036 - DNA, 25 bp, Canis familiaris
caattcccaaggaaaggccaaccag

SEQ ID NO: 55037 - DNA, 25 bp, Canis familiaris
aattgcccagagcgttggctaacca

SEQ ID NO: 55038 - DNA, 25 bp, Canis familiaris
aattctacgaggcttgtgtccttcg

SEQ ID NO: 55039 - DNA, 25 bp, Canis familiaris
aatttgccaaggtttagctgctcat

SEQ ID NO: 55040 - DNA, 25 bp, Canis familiaris
aatactcctaaaattagctgcttcc

SEQ ID NO: 55041 - DNA, 25 bp, Canis familiaris
aatatctccaattgcaattactttt

SEQ ID NO: 55042 - DNA, 25 bp, Canis familiaris
aatacccagtgtaacttgatattgt

SEQ ID NO: 55043 - DNA, 25 bp, Canis familiaris
aatacagcacatttatcctttcggt

SEQ ID NO: 55044 - DNA, 25 bp, Canis familiaris
aatacactcatttcccatttctatt

SEQ ID NO: 55045 - DNA, 25 bp, Canis familiaris
aataattttcattctatatcttttg

SEQ ID NO: 55046 - DNA, 25 bp, Canis familiaris
aataagtgcttctagctctactgtt

SEQ ID NO: 55047 - DNA, 25 bp, Canis familiaris
aatcaaggtcactctctatctattt

SEQ ID NO: 55048 - DNA, 25 bp, Canis familiaris
aataacttcatctgtgcatatctac

SEQ ID NO: 55049 - DNA, 25 bp, Canis familiaris
aatagagattccagccactctacag

SEQ ID NO: 55050 - DNA, 25 bp, Canis familiaris
aataggagagacagccatcccacgc

SEQ ID NO: 55051 - DNA, 25 bp, Canis familiaris
aataggcagataccccaaggacagt

SEQ ID NO: 55052 - DNA, 25 bp, Canis familiaris
aatagacctaccttcagagagatct

SEQ ID NO: 55053 - DNA, 25 bp, Canis familiaris
aatagaccacacatatctcagagta

SEQ ID NO: 55054 - DNA, 25 bp, Canis familiaris
aataaccagtctttctacagcaata

SEQ ID NO: 55055 - DNA, 25 bp, Canis familiaris
aataactctattcttgtcaccatga

SEQ ID NO: 55056 - DNA, 25 bp, Canis familiaris
aatagcaccaatagacttgctcaac

SEQ ID NO: 55057 - DNA, 25 bp, Canis familiaris
aataaatcatctaagcttgctccct

SEQ ID NO: 55058 - DNA, 25 bp, Canis familiaris
aatacattcatcatcacctgtcatc

SEQ ID NO: 55059 - DNA, 25 bp, Canis familiaris
aatactgtcatggatcagcgtcaat

SEQ ID NO: 55060 - DNA, 25 bp, Canis familiaris
aatacttcatgttgacccaatatta

SEQ ID NO: 55061 - DNA, 25 bp, Canis familiaris
aatactttgcttgtacaatgcttaa

SEQ ID NO: 55062 - DNA, 25 bp, Canis familiaris
aatatattagccagtaaatttagta

SEQ ID NO: 55063 - DNA, 25 bp, Canis familiaris
aattttagccatggtaatcatttaa

SEQ ID NO: 55064 - DNA, 25 bp, Canis familiaris
aatttgtaccatggcttcacgtctt

SEQ ID NO: 55065 - DNA, 25 bp, Canis familiaris
aataggtcatactcttcacccattg

SEQ ID NO: 55066 - DNA, 25 bp, Canis familiaris
aataggagtcactatcaacctcctt

SEQ ID NO: 55067 - DNA, 25 bp, Canis familiaris
aataggttaatttcacctgctttga

SEQ ID NO: 55068 - DNA, 25 bp, Canis familiaris
aataggattatttaccaggttgaat

SEQ ID NO: 55069 - DNA, 25 bp, Canis familiaris
aataggactttgtgcacggtatttt

SEQ ID NO: 55070 - DNA, 25 bp, Canis familiaris
aataccatttttgcacagtgttagg

SEQ ID NO: 55071 - DNA, 25 bp, Canis familiaris
aatacacatatgcttggccatggtt

SEQ ID NO: 55072 - DNA, 25 bp, Canis familiaris
aatacacaccagttgacctatgcta

SEQ ID NO: 55073 - DNA, 25 bp, Canis familiaris
aatacatcacttttcaacttcaacc

SEQ ID NO: 55074 - DNA, 25 bp, Canis familiaris
aatacatcaactttcacttccaact

SEQ ID NO: 55075 - DNA, 25 bp, Canis familiaris
aataatatagctatccacccacaaa

SEQ ID NO: 55076 - DNA, 25 bp, Canis familiaris
aatactaccattgctacccaaatca

SEQ ID NO: 55077 - DNA, 25 bp, Canis familiaris
aatactagccattcataaccgcaag

SEQ ID NO: 55078 - DNA, 25 bp, Canis familiaris
aatatatgaccacgctcacccgcat

SEQ ID NO: 55079 - DNA, 25 bp, Canis familiaris
aatagagagccggcagccactggag

SEQ ID NO: 55080 - DNA, 25 bp, Canis familiaris
aatagaatactggatcctctagagt

SEQ ID NO: 55081 - DNA, 25 bp, Canis familiaris
aatagcttcacaatgagccttcggt

SEQ ID NO: 55082 - DNA, 25 bp, Canis familiaris
aataccccaatgtctgcattcgagg

SEQ ID NO: 55083 - DNA, 25 bp, Canis familiaris
aataccccacatttaacgaagcact

SEQ ID NO: 55084 - DNA, 25 bp, Canis familiaris
aataccttcttataaataatcacta

SEQ ID NO: 55085 - DNA, 25 bp, Canis familiaris
aataaatctctttcaaacatttcag

SEQ ID NO: 55086 - DNA, 25 bp, Canis familiaris
aataacatcctcacaaccattctgt

SEQ ID NO: 55087 - DNA, 25 bp, Canis familiaris
aatacacattccatacacacaacac

SEQ ID NO: 55088 - DNA, 25 bp, Canis familiaris
aataagtcgcgcatatacacacacc

SEQ ID NO: 55089 - DNA, 25 bp, Canis familiaris
aatagttcctgtgacattccacctt

SEQ ID NO: 55090 - DNA, 25 bp, Canis familiaris
aattttgcacgtaactggtattctt

SEQ ID NO: 55091 - DNA, 25 bp, Canis familiaris
aatttgtacagggagatggtgaact

SEQ ID NO: 55092 - DNA, 25 bp, Canis familiaris
aatatttacagagcctggagtcctt

SEQ ID NO: 55093 - DNA, 25 bp, Canis familiaris
aatttctacaacactggactaccag

SEQ ID NO: 55094 - DNA, 25 bp, Canis familiaris
aatttccacaacagctttccttaag

SEQ ID NO: 55095 - DNA, 25 bp, Canis familiaris
aatatacccaatatggctttcccaa

SEQ ID NO: 55096 - DNA, 25 bp, Canis familiaris
aatagcattccatagggtttcccta

SEQ ID NO: 55097 - DNA, 25 bp, Canis familiaris
aattcatgtccacactgggtttccc

SEQ ID NO: 55098 - DNA, 25 bp, Canis familiaris
aattcattcaactagaggttttact

SEQ ID NO: 55099 - DNA, 25 bp, Canis familiaris
aattcaccagattcggtgttcgtac

SEQ ID NO: 55100 - DNA, 25 bp, Canis familiaris
aattccccttgagggatccctgagt

SEQ ID NO: 55101 - DNA, 25 bp, Canis familiaris
aattccttggtgtcagaggcacggg

SEQ ID NO: 55102 - DNA, 25 bp, Canis familiaris
aatttccaaatgacaacgcactcgt

SEQ ID NO: 55103 - DNA, 25 bp, Canis familiaris
aatagtcacaaaatcatccagccca

SEQ ID NO: 55104 - DNA, 25 bp, Canis familiaris
cacaagtcctaaacacagaccactg

SEQ ID NO: 55105 - DNA, 25 bp, Canis familiaris
caaagtcctggaactaaggtctgga

SEQ ID NO: 55106 - DNA, 25 bp, Canis familiaris
aatacccattaactaagcagtcctg

SEQ ID NO: 55107 - DNA, 25 bp, Canis familiaris
aataccccatcattttacgttctgg

SEQ ID NO: 55108 - DNA, 25 bp, Canis familiaris
aattcacccacagtttgaggttata

SEQ ID NO: 55109 - DNA, 25 bp, Canis familiaris
aattaccacaaaattgggcagctac

SEQ ID NO: 55110 - DNA, 25 bp, Canis familiaris
caacgaccagagtacctcggactac

SEQ ID NO: 55111 - DNA, 25 bp, Canis familiaris
cacacgatctagttaactcaaccga

SEQ ID NO: 55112 - DNA, 25 bp, Canis familiaris
caatcctcataatgaagtaacgcta

SEQ ID NO: 55113 - DNA, 25 bp, Canis familiaris
caatccttttgggaatccaatgcta

SEQ ID NO: 55114 - DNA, 25 bp, Canis familiaris
aatactttgtttacttcaagctgaa

SEQ ID NO: 55115 - DNA, 25 bp, Canis familiaris
aatagattctgattcccttcaaaaa

SEQ ID NO: 55116 - DNA, 25 bp, Canis familiaris
aataatatctgttactattctcaac

SEQ ID NO: 55117 - DNA, 25 bp, Canis familiaris
aataatctctgtcgactttcatcca

SEQ ID NO: 55118 - DNA, 25 bp, Canis familiaris
aatttcatggtcaacatttcctata

SEQ ID NO: 55119 - DNA, 25 bp, Canis familiaris
aatagtctgtgtccaacggcttaat

SEQ ID NO: 55120 - DNA, 25 bp, Canis familiaris
aatagtctttgccaactcactgcat

SEQ ID NO: 55121 - DNA, 25 bp, Canis familiaris
aatagtcattccaaatatgagatgc

SEQ ID NO: 55122 - DNA, 25 bp, Canis familiaris
aatagctgcttcattagatgcaatg

SEQ ID NO: 55123 - DNA, 25 bp, Canis familiaris
aatacatcttcgtagaatcattgtt

SEQ ID NO: 55124 - DNA, 25 bp, Canis familiaris
aatacttttgtgtaactgtgttttg

SEQ ID NO: 55125 - DNA, 25 bp, Canis familiaris
aatactttgtttgactggcatatat

SEQ ID NO: 55126 - DNA, 25 bp, Canis familiaris
aatactttgtttttctctgagattc

SEQ ID NO: 55127 - DNA, 25 bp, Canis familiaris
aatacacttattaatttggacagtt

SEQ ID NO: 55128 - DNA, 25 bp, Canis familiaris
aataactttctttcatcaggccgat

SEQ ID NO: 55129 - DNA, 25 bp, Canis familiaris
aatattttttcttatgcaaacgtca

SEQ ID NO: 55130 - DNA, 25 bp, Canis familiaris
aattatttttggaaacagtctgtga

SEQ ID NO: 55131 - DNA, 25 bp, Canis familiaris
aattatcctcctggtttggtctgtg

SEQ ID NO: 55132 - DNA, 25 bp, Canis familiaris
aatttcccagttcatctggtctcac

SEQ ID NO: 55133 - DNA, 25 bp, Canis familiaris
aatttacagcattggcaaatggtat

SEQ ID NO: 55134 - DNA, 25 bp, Canis familiaris
aattggccctggcaaatggctagcc

SEQ ID NO: 55135 - DNA, 25 bp, Canis familiaris
aatttcccgggatggcgagagcaga

SEQ ID NO: 55136 - DNA, 25 bp, Canis familiaris
aatttcgaggcgctgactggcaagg

SEQ ID NO: 55137 - DNA, 25 bp, Canis familiaris
aattgagtggtctgtccttcaagag

SEQ ID NO: 55138 - DNA, 25 bp, Canis familiaris
aatagaaggtatatcgcatgacata

SEQ ID NO: 55139 - DNA, 25 bp, Canis familiaris
aatacaaggctaagacctgtcagtc

SEQ ID NO: 55140 - DNA, 25 bp, Canis familiaris
aataacaggcttggaatcttcagat

SEQ ID NO: 55141 - DNA, 25 bp, Canis familiaris
aatatcacttgctcaaatcttagtc

SEQ ID NO: 55142 - DNA, 25 bp, Canis familiaris
caatagacttgctcaacacgggctt

SEQ ID NO: 55143 - DNA, 25 bp, Canis familiaris
aatagacttgctcaacacgggcttt

SEQ ID NO: 55144 - DNA, 25 bp, Canis familiaris
aataactgtgctctacttttctctt

SEQ ID NO: 55145 - DNA, 25 bp, Canis familiaris
aataacttgttcatcgtgcttctct

SEQ ID NO: 55146 - DNA, 25 bp, Canis familiaris
aatagcagttttctgcctgaccctg

SEQ ID NO: 55147 - DNA, 25 bp, Canis familiaris
aatacagccttatcagctctaccaa

SEQ ID NO: 55148 - DNA, 25 bp, Canis familiaris
aatatagcctagccacgtttgccaa

SEQ ID NO: 55149 - DNA, 25 bp, Canis familiaris
aataaaccagtacatttgctcagaa

SEQ ID NO: 55150 - DNA, 25 bp, Canis familiaris
aataaacccatgctattgagcctaa

SEQ ID NO: 55151 - DNA, 25 bp, Canis familiaris
aataagccccatctcagagagccac

SEQ ID NO: 55152 - DNA, 25 bp, Canis familiaris
aatacatttccattgccgaagccag

SEQ ID NO: 55153 - DNA, 25 bp, Canis familiaris
aataaattatcattctcagttcaga

SEQ ID NO: 55154 - DNA, 25 bp, Canis familiaris
aataaattacattgccttttgtcca

SEQ ID NO: 55155 - DNA, 25 bp, Canis familiaris
aatacagttcaaatgctttttgttc

SEQ ID NO: 55156 - DNA, 25 bp, Canis familiaris
aataccttacaggcttctgtcattt

SEQ ID NO: 55157 - DNA, 25 bp, Canis familiaris
aatatcctaactttactgcatttga

SEQ ID NO: 55158 - DNA, 25 bp, Canis familiaris
aatagcctgaatagttcccttagtc

SEQ ID NO: 55159 - DNA, 25 bp, Canis familiaris
aatactcatgaatgctttcccattt

SEQ ID NO: 55160 - DNA, 25 bp, Canis familiaris
aatacttagatgtcaacccacagtt

SEQ ID NO: 55161 - DNA, 25 bp, Canis familiaris
aatacttgagactagatggccaggg

SEQ ID NO: 55162 - DNA, 25 bp, Canis familiaris
aatatttggcaatgcagtccactga

SEQ ID NO: 55163 - DNA, 25 bp, Canis familiaris
caatcttaggcaaacttgaaggaca

SEQ ID NO: 55164 - DNA, 25 bp, Canis familiaris
aatttagtgattccttacttacata

SEQ ID NO: 55165 - DNA, 25 bp, Canis familiaris
aatttaagtatgccgtcctcttctt

SEQ ID NO: 55166 - DNA, 25 bp, Canis familiaris
aattattagttgtcttcctgtagtt

SEQ ID NO: 55167 - DNA, 25 bp, Canis familiaris
aattgtccgtggtcttctgaagggt

SEQ ID NO: 55168 - DNA, 25 bp, Canis familiaris
aatttaagcggcgctcggagcggtg

SEQ ID NO: 55169 - DNA, 25 bp, Canis familiaris
aatttgagggacgcccaggtggctc

SEQ ID NO: 55170 - DNA, 25 bp, Canis familiaris
aattttagggacaccaggctggctc

SEQ ID NO: 55171 - DNA, 25 bp, Canis familiaris
aattttcaggtctgtcagccagggc

SEQ ID NO: 55172 - DNA, 25 bp, Canis familiaris
aattatatcaccccgaaccgaagct

SEQ ID NO: 55173 - DNA, 25 bp, Canis familiaris
aattaattcactccagaattccaga

SEQ ID NO: 55174 - DNA, 25 bp, Canis familiaris
aattgactccagaggaaacaaaggt

SEQ ID NO: 55175 - DNA, 25 bp, Canis familiaris
aattcgcccagagggactactaggc

SEQ ID NO: 55176 - DNA, 25 bp, Canis familiaris
aattcctggaaggaggtcaacaggt

SEQ ID NO: 55177 - DNA, 25 bp, Canis familiaris
aatacccaaatggcatggtcagact

SEQ ID NO: 55178 - DNA, 25 bp, Canis familiaris
aatactccagttggtatgtggcact

SEQ ID NO: 55179 - DNA, 25 bp, Canis familiaris
aatactgccgcttaaatgatcacaa

SEQ ID NO: 55180 - DNA, 25 bp, Canis familiaris
aatttggctgctgaaaatattttaa

SEQ ID NO: 55181 - DNA, 25 bp, Canis familiaris
aatattcacctgagccaaatttttt

SEQ ID NO: 55182 - DNA, 25 bp, Canis familiaris
aatactatcctaagcaaatttgcct

SEQ ID NO: 55183 - DNA, 25 bp, Canis familiaris
aatagaatactacgccatgttggcc

SEQ ID NO: 55184 - DNA, 25 bp, Canis familiaris
aataccaacaaccttgtcatcgctc

SEQ ID NO: 55185 - DNA, 25 bp, Canis familiaris
aatacagccagaacgtggtgcccac

SEQ ID NO: 55186 - DNA, 25 bp, Canis familiaris
aatacatgccgacgggcgctgaccc

SEQ ID NO: 55187 - DNA, 25 bp, Canis familiaris
aatacatgccgacgggcgctgaccc

SEQ ID NO: 55188 - DNA, 25 bp, Canis familiaris
aatacatgccgacgggcgctgaccc

SEQ ID NO: 55189 - DNA, 25 bp, Canis familiaris
aatactggctgcagagctggggccc

SEQ ID NO: 55190 - DNA, 25 bp, Canis familiaris
aatatatgtgtggtgcctggatggc

SEQ ID NO: 55191 - DNA, 25 bp, Canis familiaris
aattagtggtggtggtggcagcggt

SEQ ID NO: 55192 - DNA, 25 bp, Canis familiaris
aattgagtaggagtgtggttggtgt

SEQ ID NO: 55193 - DNA, 25 bp, Canis familiaris
aattcattacgagtggttaagttgt

SEQ ID NO: 55194 - DNA, 25 bp, Canis familiaris
aattcagtactgcagttatcaatgt

SEQ ID NO: 55195 - DNA, 25 bp, Canis familiaris
aattcactttgacttaacctgtaat

SEQ ID NO: 55196 - DNA, 25 bp, Canis familiaris
aatttgcttatgtggaccgctgtat

SEQ ID NO: 55197 - DNA, 25 bp, Canis familiaris
aatttgttagcatcagcgacctcct

SEQ ID NO: 55198 - DNA, 25 bp, Canis familiaris
aattttgctaacactcagctctgcc

SEQ ID NO: 55199 - DNA, 25 bp, Canis familiaris
aatttctccgtcttctactatgaga

SEQ ID NO: 55200 - DNA, 25 bp, Canis familiaris
aatttctccattttaccttgagtgt

SEQ ID NO: 55201 - DNA, 25 bp, Canis familiaris
aattttcatcatttctactttaata

SEQ ID NO: 55202 - DNA, 25 bp, Canis familiaris
aattcaaagcccaatactcttaata

SEQ ID NO: 55203 - DNA, 25 bp, Canis familiaris
aattaacagtttcactattcatata

SEQ ID NO: 55204 - DNA, 25 bp, Canis familiaris
aatttaatagttctcttgctgatat

SEQ ID NO: 55205 - DNA, 25 bp, Canis familiaris
aatacttctgggcttcttctgagat

SEQ ID NO: 55206 - DNA, 25 bp, Canis familiaris
caatttgtctttctgttcactggat

SEQ ID NO: 55207 - DNA, 25 bp, Canis familiaris
aattttggttttctactgtcatgtg

SEQ ID NO: 55208 - DNA, 25 bp, Canis familiaris
aattgttggcttatagtatttcgaa

SEQ ID NO: 55209 - DNA, 25 bp, Canis familiaris
aattattgggtcctggttctgggca

SEQ ID NO: 55210 - DNA, 25 bp, Canis familiaris
aattttggggccagttcagtgtccg

SEQ ID NO: 55211 - DNA, 25 bp, Canis familiaris
caatgtttgggtctgcgtatcacta

SEQ ID NO: 55212 - DNA, 25 bp, Canis familiaris
aattgtggcaagtgtaccatactaa

SEQ ID NO: 55213 - DNA, 25 bp, Canis familiaris
aatttagcaaatatgacttaatcaa

SEQ ID NO: 55214 - DNA, 25 bp, Canis familiaris
aatttgagaaggttgttttgataat

SEQ ID NO: 55215 - DNA, 25 bp, Canis familiaris
aatttgagaaggaggctgctgagat

SEQ ID NO: 55216 - DNA, 25 bp, Canis familiaris
aatttgagtttatcggtgatgcaga

SEQ ID NO: 55217 - DNA, 25 bp, Canis familiaris
aatttgagtatatagctgttgcgag

SEQ ID NO: 55218 - DNA, 25 bp, Canis familiaris
aatttagttattagtgtcatccaaa

SEQ ID NO: 55219 - DNA, 25 bp, Canis familiaris
aataaagttatttgtccatctccaa

SEQ ID NO: 55220 - DNA, 25 bp, Canis familiaris
aataaagtatattttcactatcaaa

SEQ ID NO: 55221 - DNA, 25 bp, Canis familiaris
aataggctgttgtctgttcacattc

SEQ ID NO: 55222 - DNA, 25 bp, Canis familiaris
aataggcactagtctgtcctcactt

SEQ ID NO: 55223 - DNA, 25 bp, Canis familiaris
aattggcacaattgctgtgataact

SEQ ID NO: 55224 - DNA, 25 bp, Canis familiaris
aatatggataattctgattggcagg

SEQ ID NO: 55225 - DNA, 25 bp, Canis familiaris
aattgcagtcactaaatgtggcagt

SEQ ID NO: 55226 - DNA, 25 bp, Canis familiaris
aattaatctcaaccaattcgttggc

SEQ ID NO: 55227 - DNA, 25 bp, Canis familiaris
aatatcgagtgcaccaactcagttc

SEQ ID NO: 55228 - DNA, 25 bp, Canis familiaris
aattcaagtctaaataccgccatct

SEQ ID NO: 55229 - DNA, 25 bp, Canis familiaris
aattcaggctgtaaagatggccctc

SEQ ID NO: 55230 - DNA, 25 bp, Canis familiaris
aatatctgactggtatggaggctcc

SEQ ID NO: 55231 - DNA, 25 bp, Canis familiaris
aatactgtcttcaatggagcacctt

SEQ ID NO: 55232 - DNA, 25 bp, Canis familiaris
aatactgtttgtagcctgctcctat

SEQ ID NO: 55233 - DNA, 25 bp, Canis familiaris
aatacggttgattgcttgtgtgctc

SEQ ID NO: 55234 - DNA, 25 bp, Canis familiaris
aatacctatgtatcattttctctga

SEQ ID NO: 55235 - DNA, 25 bp, Canis familiaris
aatacacttggagtatatgcatact

SEQ ID NO: 55236 - DNA, 25 bp, Canis familiaris
aatatcactttgatgagatgtcaat

SEQ ID NO: 55237 - DNA, 25 bp, Canis familiaris
aatatcctataaatctgtgtaaagt

SEQ ID NO: 55238 - DNA, 25 bp, Canis familiaris
aatattgttaatactctgttactaa

SEQ ID NO: 55239 - DNA, 25 bp, Canis familiaris
aatattttatttaccctgattagat

SEQ ID NO: 55240 - DNA, 25 bp, Canis familiaris
aatatgtttctgtttacctttatgt

SEQ ID NO: 55241 - DNA, 25 bp, Canis familiaris
aatattttcttaaactaaagcatgt

SEQ ID NO: 55242 - DNA, 25 bp, Canis familiaris
aatagtctactatcttctaaagagt

SEQ ID NO: 55243 - DNA, 25 bp, Canis familiaris
aatacactactatcatgtcaaataa

SEQ ID NO: 55244 - DNA, 25 bp, Canis familiaris
aataaatagccatttgtccctgcaa

SEQ ID NO: 55245 - DNA, 25 bp, Canis familiaris
cacaggaaacggtgtcccaggacgc

SEQ ID NO: 55246 - DNA, 25 bp, Canis familiaris
cacattaaccggttgtgccgggatc

SEQ ID NO: 55247 - DNA, 25 bp, Canis familiaris
aattccctcttgttgaaagggcatc

SEQ ID NO: 55248 - DNA, 25 bp, Canis familiaris
aatacctttgtgttggagatgccct

SEQ ID NO: 55249 - DNA, 25 bp, Canis familiaris
aatacttttgtattgctgcttgcaa

SEQ ID NO: 55250 - DNA, 25 bp, Canis familiaris
aatttttctgtatttctccaaatgt

SEQ ID NO: 55251 - DNA, 25 bp, Canis familiaris
aatttttttcagttcctatatcata

SEQ ID NO: 55252 - DNA, 25 bp, Canis familiaris
aatttgtttctcagagcttattttt

SEQ ID NO: 55253 - DNA, 25 bp, Canis familiaris
aatacagatgttcttgcctcttttt

SEQ ID NO: 55254 - DNA, 25 bp, Canis familiaris
aatactgcttgtcttttgttttgtt

SEQ ID NO: 55255 - DNA, 25 bp, Canis familiaris
aatacttcattccttgtttttgctg

SEQ ID NO: 55256 - DNA, 25 bp, Canis familiaris
aatactatgattggccagtgttttc

SEQ ID NO: 55257 - DNA, 25 bp, Canis familiaris
aatactttcatcttaatgttttcaa

SEQ ID NO: 55258 - DNA, 25 bp, Canis familiaris
aatattttccttttgggagccagat

SEQ ID NO: 55259 - DNA, 25 bp, Canis familiaris
aatatttttccttgttggatctgga

SEQ ID NO: 55260 - DNA, 25 bp, Canis familiaris
aatatgtccttcttacgttacatgg

SEQ ID NO: 55261 - DNA, 25 bp, Canis familiaris
aatataccaacatcacacgtacatg

SEQ ID NO: 55262 - DNA, 25 bp, Canis familiaris
aattagccagcctcaccaattctgg

SEQ ID NO: 55263 - DNA, 25 bp, Canis familiaris
aatttgagggctcagccaaactgcg

SEQ ID NO: 55264 - DNA, 25 bp, Canis familiaris
aatactcggtggcagaaatatttgc

SEQ ID NO: 55265 - DNA, 25 bp, Canis familiaris
aatactctggtggcggtgaaatctt

SEQ ID NO: 55266 - DNA, 25 bp, Canis familiaris
aatatcacaggtactgggagaagtt

SEQ ID NO: 55267 - DNA, 25 bp, Canis familiaris
aatacaccctgcttcggcagaaatt

SEQ ID NO: 55268 - DNA, 25 bp, Canis familiaris
aatacacctctgttcataagtgaat

SEQ ID NO: 55269 - DNA, 25 bp, Canis familiaris
aatatcctccttactcatggtcgaa

SEQ ID NO: 55270 - DNA, 25 bp, Canis familiaris
aatacagcacactccttgcaatcta

SEQ ID NO: 55271 - DNA, 25 bp, Canis familiaris
aatagcaatctgtacgtctgcaatt

SEQ ID NO: 55272 - DNA, 25 bp, Canis familiaris
aatacacctgaactgttttattgca

SEQ ID NO: 55273 - DNA, 25 bp, Canis familiaris
aatacacttgctatatcatttttgc

SEQ ID NO: 55274 - DNA, 25 bp, Canis familiaris
aatacttagtgaatatctactttga

SEQ ID NO: 55275 - DNA, 25 bp, Canis familiaris
aatacctggtgctgtctaactcata

SEQ ID NO: 55276 - DNA, 25 bp, Canis familiaris
aatacactggtcacatttatcacaa

SEQ ID NO: 55277 - DNA, 25 bp, Canis familiaris
aatatcactggctccatattaaaaa

SEQ ID NO: 55278 - DNA, 25 bp, Canis familiaris
aattcctgttcccactcaaaagaga

SEQ ID NO: 55279 - DNA, 25 bp, Canis familiaris
aattgaccttcccgtgaagaggcgg

SEQ ID NO: 55280 - DNA, 25 bp, Canis familiaris
aattgtccccctctaaagactgaat

SEQ ID NO: 55281 - DNA, 25 bp, Canis familiaris
aattccccccatgtaattattgtga

SEQ ID NO: 55282 - DNA, 25 bp, Canis familiaris
caaacaacccctctatataatagta

SEQ ID NO: 55283 - DNA, 25 bp, Canis familiaris
aatatcatacccagcttttaataaa

SEQ ID NO: 55284 - DNA, 25 bp, Canis familiaris
aatatctaactcaggtggcagtata

SEQ ID NO: 55285 - DNA, 25 bp, Canis familiaris
aatagtcaacatgtgctttaggaaa

SEQ ID NO: 55286 - DNA, 25 bp, Canis familiaris
aatagttcaactagattgtatagaa

SEQ ID NO: 55287 - DNA, 25 bp, Canis familiaris
aatatgctccggtcagatttagaaa

SEQ ID NO: 55288 - DNA, 25 bp, Canis familiaris
aatacttcctgattttgtctgaaaa

SEQ ID NO: 55289 - DNA, 25 bp, Canis familiaris
aatacttctctttctttctgaggga

SEQ ID NO: 55290 - DNA, 25 bp, Canis familiaris
aatactctccatttttctcagattg

SEQ ID NO: 55291 - DNA, 25 bp, Canis familiaris
aatacatagtgattcatttctcaga

SEQ ID NO: 55292 - DNA, 25 bp, Canis familiaris
aatacatagtgtacactttgtgttt

SEQ ID NO: 55293 - DNA, 25 bp, Canis familiaris
aatactcagtttacttctcttgatt

SEQ ID NO: 55294 - DNA, 25 bp, Canis familiaris
aatactggttttaccgcttgctgtc

SEQ ID NO: 55295 - DNA, 25 bp, Canis familiaris
aatacagtgtattttccagcttccc

SEQ ID NO: 55296 - DNA, 25 bp, Canis familiaris
aatagagttttagtccacatccatc

SEQ ID NO: 55297 - DNA, 25 bp, Canis familiaris
aataggtcttattctcaaaccacat

SEQ ID NO: 55298 - DNA, 25 bp, Canis familiaris
aatactggatttctaaacaagcatt

SEQ ID NO: 55299 - DNA, 25 bp, Canis familiaris
aattctctgactgttgaaacccctc

SEQ ID NO: 55300 - DNA, 25 bp, Canis familiaris
aattggcgcatcagttaaaccctcc

SEQ ID NO: 55301 - DNA, 25 bp, Canis familiaris
aattctgccatactgtaaatttcca

SEQ ID NO: 55302 - DNA, 25 bp, Canis familiaris
caagttgcctatcctaactcttggc

SEQ ID NO: 55303 - DNA, 25 bp, Canis familiaris
aattaccggctctatagctctggga

SEQ ID NO: 55304 - DNA, 25 bp, Canis familiaris
aattccttggtaatacttctgggct

SEQ ID NO: 55305 - DNA, 25 bp, Canis familiaris
aattcactgctgagaaactctccgt

SEQ ID NO: 55306 - DNA, 25 bp, Canis familiaris
aatatcagttctcaacagctgccca

SEQ ID NO: 55307 - DNA, 25 bp, Canis familiaris
caatacggcttgcaacagcagcgcg

SEQ ID NO: 55308 - DNA, 25 bp, Canis familiaris
aatactgcccgcaaagctcgcgcta

SEQ ID NO: 55309 - DNA, 25 bp, Canis familiaris
aatacggcaccatattctgtgatga

SEQ ID NO: 55310 - DNA, 25 bp, Canis familiaris
aatacctctcccggtttgagagctg

SEQ ID NO: 55311 - DNA, 25 bp, Canis familiaris
aatacatcttccctcgtacataagg

SEQ ID NO: 55312 - DNA, 25 bp, Canis familiaris
aatatctgtgtctgtctgttctaag

SEQ ID NO: 55313 - DNA, 25 bp, Canis familiaris
aatactcagctcttgtcttcataaa

SEQ ID NO: 55314 - DNA, 25 bp, Canis familiaris
aatactgcattgttgtttctttcca

SEQ ID NO: 55315 - DNA, 25 bp, Canis familiaris
aatactgatttcgttttctgttcaa

SEQ ID NO: 55316 - DNA, 25 bp, Canis familiaris
aattatgcatttgttctttgggtga

SEQ ID NO: 55317 - DNA, 25 bp, Canis familiaris
aattgttaacttttttggcagctca

SEQ ID NO: 55318 - DNA, 25 bp, Canis familiaris
aatattttaatgatttcaggagcta

SEQ ID NO: 55319 - DNA, 25 bp, Canis familiaris
aatatttttcatcttgcacggactt

SEQ ID NO: 55320 - DNA, 25 bp, Canis familiaris
aatattgtaattctgtggcggtttc

SEQ ID NO: 55321 - DNA, 25 bp, Canis familiaris
aattcctatgttcagtagcatggtt

SEQ ID NO: 55322 - DNA, 25 bp, Canis familiaris
aatatgccttgtgctttagagcttt

SEQ ID NO: 55323 - DNA, 25 bp, Canis familiaris
aatacctgcttcttgctttactttt

SEQ ID NO: 55324 - DNA, 25 bp, Canis familiaris
aataccatcttctttataactgtgt

SEQ ID NO: 55325 - DNA, 25 bp, Canis familiaris
aataccatatttatttcactgatat

SEQ ID NO: 55326 - DNA, 25 bp, Canis familiaris
aatatccattaagtccttactgata

SEQ ID NO: 55327 - DNA, 25 bp, Canis familiaris
aatatgcctatatccacctactgca

SEQ ID NO: 55328 - DNA, 25 bp, Canis familiaris
aatatcctgcttgaacttgaccagt

SEQ ID NO: 55329 - DNA, 25 bp, Canis familiaris
aatatcactgcttataatgccgaaa

SEQ ID NO: 55330 - DNA, 25 bp, Canis familiaris
aattcctgttcatcccttgaactta

SEQ ID NO: 55331 - DNA, 25 bp, Canis familiaris
gaattcggatttttccttcttcgat

SEQ ID NO: 55332 - DNA, 25 bp, Canis familiaris
gaattaagtactgtcgttacctata

SEQ ID NO: 55333 - DNA, 25 bp, Canis familiaris
aatttattttctgctgtaaccttgt

SEQ ID NO: 55334 - DNA, 25 bp, Canis familiaris
aatttagcttttcctggcaactctt

SEQ ID NO: 55335 - DNA, 25 bp, Canis familiaris
aattctcctttgcacctcacaaagt

SEQ ID NO: 55336 - DNA, 25 bp, Canis familiaris
aatattttgttcaacgtcgcattcc

SEQ ID NO: 55337 - DNA, 25 bp, Canis familiaris
aataggttgtgtaactggcccacct

SEQ ID NO: 55338 - DNA, 25 bp, Canis familiaris
aatagtttgttaagtgtgcccacgc

SEQ ID NO: 55339 - DNA, 25 bp, Canis familiaris
aatactttgcataaactgactccac

SEQ ID NO: 55340 - DNA, 25 bp, Canis familiaris
aatacctgtgagaacactcagctca

SEQ ID NO: 55341 - DNA, 25 bp, Canis familiaris
aatagccacaggacagaccactagc

SEQ ID NO: 55342 - DNA, 25 bp, Canis familiaris
aatagccaagatacagtaagcaacc

SEQ ID NO: 55343 - DNA, 25 bp, Canis familiaris
aatattcggctagctcaggctaccc

SEQ ID NO: 55344 - DNA, 25 bp, Canis familiaris
aatttcacacttgctagactctgcc

SEQ ID NO: 55345 - DNA, 25 bp, Canis familiaris
aatttagcacctgaggcagccactg

SEQ ID NO: 55346 - DNA, 25 bp, Canis familiaris
aattttctttggttgcatgccctgt

SEQ ID NO: 55347 - DNA, 25 bp, Canis familiaris
aatatattctctgggttctgctttg

SEQ ID NO: 55348 - DNA, 25 bp, Canis familiaris
aatatatgtattctgtttcactaaa

SEQ ID NO: 55349 - DNA, 25 bp, Canis familiaris
aatatattgtcttatgtttaacaga

SEQ ID NO: 55350 - DNA, 25 bp, Canis familiaris
aatagttctctctatatttcccaca

SEQ ID NO: 55351 - DNA, 25 bp, Canis familiaris
aatagctctacccaaaatcagcgcc

SEQ ID NO: 55352 - DNA, 25 bp, Canis familiaris
aatactcgattccaacaacaccacg

SEQ ID NO: 55353 - DNA, 25 bp, Canis familiaris
caaactcgttccacgtatcgcgtga

SEQ ID NO: 55354 - DNA, 25 bp, Canis familiaris
ctacttctgtggctacctacagggc

SEQ ID NO: 55355 - DNA, 25 bp, Canis familiaris
caactgccttggttacgtaggccct

SEQ ID NO: 55356 - DNA, 25 bp, Canis familiaris
gaatgttcttggtgaaaagggccgg

SEQ ID NO: 55357 - DNA, 25 bp, Canis familiaris
gaatttccggaagaagggaagcctg

SEQ ID NO: 55358 - DNA, 25 bp, Canis familiaris
gaaaacctggggattgggatccctg

SEQ ID NO: 55359 - DNA, 25 bp, Canis familiaris
gaaaacgtaagtcaggggatccctg

SEQ ID NO: 55360 - DNA, 25 bp, Canis familiaris
caaaacgatgaacaagtgggtctta

SEQ ID NO: 55361 - DNA, 25 bp, Canis familiaris
caaccaggtgaacacgcgttttgtt

SEQ ID NO: 55362 - DNA, 25 bp, Canis familiaris
caatcaagggtgtatccgtgtttta

SEQ ID NO: 55363 - DNA, 25 bp, Canis familiaris
aatagataggctcctcctgtttttg

SEQ ID NO: 55364 - DNA, 25 bp, Canis familiaris
aatagcaccaatgtccttattttgg

SEQ ID NO: 55365 - DNA, 25 bp, Canis familiaris
aattctcaaatagtcctttggttgg

SEQ ID NO: 55366 - DNA, 25 bp, Canis familiaris
aatactaaatgatccttcagttgta

SEQ ID NO: 55367 - DNA, 25 bp, Canis familiaris
aatactgacgaatacttctttgtga

SEQ ID NO: 55368 - DNA, 25 bp, Canis familiaris
aatactgccggattttgactttgga

SEQ ID NO: 55369 - DNA, 25 bp, Canis familiaris
aatagtcctgtatttgtggtttcaa

SEQ ID NO: 55370 - DNA, 25 bp, Canis familiaris
aattgactgacttactgggatttta

SEQ ID NO: 55371 - DNA, 25 bp, Canis familiaris
aatatgacaactcactcaagattgt

SEQ ID NO: 55372 - DNA, 25 bp, Canis familiaris
aattgacactctcggcctaggtgtt

SEQ ID NO: 55373 - DNA, 25 bp, Canis familiaris
aatatcaacattctccataggattt

SEQ ID NO: 55374 - DNA, 25 bp, Canis familiaris
aatatcacagttcatctgcaaagtg

SEQ ID NO: 55375 - DNA, 25 bp, Canis familiaris
aattactgtgtctgcgtgaagtgat

SEQ ID NO: 55376 - DNA, 25 bp, Canis familiaris
aattgcacgtgcactttcgagacat

SEQ ID NO: 55377 - DNA, 25 bp, Canis familiaris
aatagtcttcagtctttgggtgttt

SEQ ID NO: 55378 - DNA, 25 bp, Canis familiaris
aatactcttaaacttgggtgtgtgt

SEQ ID NO: 55379 - DNA, 25 bp, Canis familiaris
aattcttgttagtcttggtagttat

SEQ ID NO: 55380 - DNA, 25 bp, Canis familiaris
aatatcttttacttgcaagtcagta

SEQ ID NO: 55381 - DNA, 25 bp, Canis familiaris
aattctttgttgtttagcacgtaat

SEQ ID NO: 55382 - DNA, 25 bp, Canis familiaris
aatatcttatttctaacacctcctt

SEQ ID NO: 55383 - DNA, 25 bp, Canis familiaris
aatatttcattccgtaactcttcct

SEQ ID NO: 55384 - DNA, 25 bp, Canis familiaris
aatatttttctggatatgcctcccc

SEQ ID NO: 55385 - DNA, 25 bp, Canis familiaris
aattttctgtgggttcaccacccat

SEQ ID NO: 55386 - DNA, 25 bp, Canis familiaris
aatatttgtgggctacacacacaca

SEQ ID NO: 55387 - DNA, 25 bp, Canis familiaris
aatattttagactttgctgaccaca

SEQ ID NO: 55388 - DNA, 25 bp, Canis familiaris
aatatgatttagtctttgctccctc

SEQ ID NO: 55389 - DNA, 25 bp, Canis familiaris
aatagagtcttgtatcaggctcccc

SEQ ID NO: 55390 - DNA, 25 bp, Canis familiaris
aatatagtgtgttactgtttcccgt

SEQ ID NO: 55391 - DNA, 25 bp, Canis familiaris
aattccagattcaaggctttccctg

SEQ ID NO: 55392 - DNA, 25 bp, Canis familiaris
aatatcaagttcctggtacccacat

SEQ ID NO: 55393 - DNA, 25 bp, Canis familiaris
aatattaattttgtatcccactatg

SEQ ID NO: 55394 - DNA, 25 bp, Canis familiaris
caataatacataaccctacctacct

SEQ ID NO: 55395 - DNA, 25 bp, Canis familiaris
aatagcaatcataaccaaacacaat

SEQ ID NO: 55396 - DNA, 25 bp, Canis familiaris
aatagcaactttaacacctcagata

SEQ ID NO: 55397 - DNA, 25 bp, Canis familiaris
aatatgacaatgacttactttcaaa

SEQ ID NO: 55398 - DNA, 25 bp, Canis familiaris
aatatatgcagccacaatacttgta

SEQ ID NO: 55399 - DNA, 25 bp, Canis familiaris
aatttgcccccattgtttcagggtg

SEQ ID NO: 55400 - DNA, 25 bp, Canis familiaris
aatttcgccttctgatcttaggctt

SEQ ID NO: 55401 - DNA, 25 bp, Canis familiaris
aattttcctattatttgacagttag

SEQ ID NO: 55402 - DNA, 25 bp, Canis familiaris
aatattttctaatacttgagcagtt

SEQ ID NO: 55403 - DNA, 25 bp, Canis familiaris
aattctttgctatatgacttggatt

SEQ ID NO: 55404 - DNA, 25 bp, Canis familiaris
aatatcctgacttacgtgtcatggt

SEQ ID NO: 55405 - DNA, 25 bp, Canis familiaris
gacgatctcaaagagggtaggttac

SEQ ID NO: 55406 - DNA, 25 bp, Canis familiaris
aatatccagaaatgtagtagtttac

SEQ ID NO: 55407 - DNA, 25 bp, Canis familiaris
aattccgacaaacagcaagcttttc

SEQ ID NO: 55408 - DNA, 25 bp, Canis familiaris
aattccaacaacacaggcctggtct

SEQ ID NO: 55409 - DNA, 25 bp, Canis familiaris
aattcaccacaaggaaacaaggcta

SEQ ID NO: 55410 - DNA, 25 bp, Canis familiaris
aatatagtgctctgtgaaacaagtc

SEQ ID NO: 55411 - DNA, 25 bp, Canis familiaris
aattctttcaagtcaaatgaagtca

SEQ ID NO: 55412 - DNA, 25 bp, Canis familiaris
aatatctttaggaccaacaatgaca

SEQ ID NO: 55413 - DNA, 25 bp, Canis familiaris
aattctctgtagtatctgcaacgat

SEQ ID NO: 55414 - DNA, 25 bp, Canis familiaris
aattctcgatcattttaatccataa

SEQ ID NO: 55415 - DNA, 25 bp, Canis familiaris
aattctccatcctttggaccatact

SEQ ID NO: 55416 - DNA, 25 bp, Canis familiaris
aattttgccagtttggacaaagcca

SEQ ID NO: 55417 - DNA, 25 bp, Canis familiaris
aattttccttttgagaagatgtcag

SEQ ID NO: 55418 - DNA, 25 bp, Canis familiaris
aatatttcccttcacatacagtttc

SEQ ID NO: 55419 - DNA, 25 bp, Canis familiaris
aatatttttattgactacagtatcc

SEQ ID NO: 55420 - DNA, 25 bp, Canis familiaris
aattttttattttcatacacacaca

SEQ ID NO: 55421 - DNA, 25 bp, Canis familiaris
aatatcctattcctttcaagaacaa

SEQ ID NO: 55422 - DNA, 25 bp, Canis familiaris
aattccttccctgtgcataaacata

SEQ ID NO: 55423 - DNA, 25 bp, Canis familiaris
aattccattccttccaacaacaatt

SEQ ID NO: 55424 - DNA, 25 bp, Canis familiaris
aattcagtgtcccaaataaatttgt

SEQ ID NO: 55425 - DNA, 25 bp, Canis familiaris
aatatctttccatagtaccatttta

SEQ ID NO: 55426 - DNA, 25 bp, Canis familiaris
aattcttgtgccacactaacatctt

SEQ ID NO: 55427 - DNA, 25 bp, Canis familiaris
aattacctgccttacagaactgttg

SEQ ID NO: 55428 - DNA, 25 bp, Canis familiaris
aattaaagctcatccaaatgctgca

SEQ ID NO: 55429 - DNA, 25 bp, Canis familiaris
aattatactctctactaaggctgaa

SEQ ID NO: 55430 - DNA, 25 bp, Canis familiaris
aattatgcggcttaaagctgtctga

SEQ ID NO: 55431 - DNA, 25 bp, Canis familiaris
aatatcgcggctgtggacttcatat

SEQ ID NO: 55432 - DNA, 25 bp, Canis familiaris
aattccatgtatatgaactatctag

SEQ ID NO: 55433 - DNA, 25 bp, Canis familiaris
aattcctgagaatattccactagtg

SEQ ID NO: 55434 - DNA, 25 bp, Canis familiaris
aattgtctggcaagctttcaccgac

SEQ ID NO: 55435 - DNA, 25 bp, Canis familiaris
aatacctggcacgttgtcagtacac

SEQ ID NO: 55436 - DNA, 25 bp, Canis familiaris
aataggagcgacgttgtacaaacct

SEQ ID NO: 55437 - DNA, 25 bp, Canis familiaris
aatagtgaagtcgtcatatgaaccc

SEQ ID NO: 55438 - DNA, 25 bp, Canis familiaris
aatatctgacagacgacaaaccccc

SEQ ID NO: 55439 - DNA, 25 bp, Canis familiaris
cacagccgacgtgggaaaggcccca

SEQ ID NO: 55440 - DNA, 25 bp, Canis familiaris
caaccgacgagagaacaaccctcgg

SEQ ID NO: 55441 - DNA, 25 bp, Canis familiaris
caaccccgagacataatattcccgg

SEQ ID NO: 55442 - DNA, 25 bp, Canis familiaris
caacccctatacgtgaggaatccca

SEQ ID NO: 55443 - DNA, 25 bp, Canis familiaris
aatattctctaatgtgggactccca

SEQ ID NO: 55444 - DNA, 25 bp, Canis familiaris
aattcttgtacgagagctgacccca

SEQ ID NO: 55445 - DNA, 25 bp, Canis familiaris
aattttcccgaaatggacatgccaa

SEQ ID NO: 55446 - DNA, 25 bp, Canis familiaris
aatttcctccaagataatgcccaaa

SEQ ID NO: 55447 - DNA, 25 bp, Canis familiaris
aatattgactacaaattaacccata

SEQ ID NO: 55448 - DNA, 25 bp, Canis familiaris
aatattagcataaacttccacaact

SEQ ID NO: 55449 - DNA, 25 bp, Canis familiaris
aatttgagctccagattcaccagac

SEQ ID NO: 55450 - DNA, 25 bp, Canis familiaris
aatttgatggcattggatttggcaa

SEQ ID NO: 55451 - DNA, 25 bp, Canis familiaris
aatttggcagcttggattgggatgt

SEQ ID NO: 55452 - DNA, 25 bp, Canis familiaris
aattgtcaagtctagcttgcggagt

SEQ ID NO: 55453 - DNA, 25 bp, Canis familiaris
aatagtgaagtaacgtctagcaatt

SEQ ID NO: 55454 - DNA, 25 bp, Canis familiaris
aataggaacttttgtctccactgag

SEQ ID NO: 55455 - DNA, 25 bp, Canis familiaris
aattggaacattagctgccccaggt

SEQ ID NO: 55456 - DNA, 25 bp, Canis familiaris
aattcaaaattactgcaggggcgtc

SEQ ID NO: 55457 - DNA, 25 bp, Canis familiaris
aattacagaaaaccaggtccatgtc

SEQ ID NO: 55458 - DNA, 25 bp, Canis familiaris
caattacagaaaaccaggtccatgt

SEQ ID NO: 55459 - DNA, 25 bp, Canis familiaris
caaggatgtaaaattcggtgccgat

SEQ ID NO: 55460 - DNA, 25 bp, Canis familiaris
aatagtgctaaactttgggcccaag

SEQ ID NO: 55461 - DNA, 25 bp, Canis familiaris
aattgcgtaaattttgtgccccaag

SEQ ID NO: 55462 - DNA, 25 bp, Canis familiaris
aattctgcaaaatgtgtgtcaccca

SEQ ID NO: 55463 - DNA, 25 bp, Canis familiaris
caacttgattaacgggccaacccat

SEQ ID NO: 55464 - DNA, 25 bp, Canis familiaris
aattcgactagacttggccatacac

SEQ ID NO: 55465 - DNA, 25 bp, Canis familiaris
aatagtcaccaactgtgttctacag

SEQ ID NO: 55466 - DNA, 25 bp, Canis familiaris
aatagtgcctcagtgggtcactcaa

SEQ ID NO: 55467 - DNA, 25 bp, Canis familiaris
aatagaccatgggacggcatctcca

SEQ ID NO: 55468 - DNA, 25 bp, Canis familiaris
aatagtccaggcaatcagattctca

SEQ ID NO: 55469 - DNA, 25 bp, Canis familiaris
aatatttcaggcatcctactacttt

SEQ ID NO: 55470 - DNA, 25 bp, Canis familiaris
aatattcaccagttacaattcaatt

SEQ ID NO: 55471 - DNA, 25 bp, Canis familiaris
caatttcccggctaaatataaatgg

SEQ ID NO: 55472 - DNA, 25 bp, Canis familiaris
caatgcttcaccccaaaaaaagcgt

SEQ ID NO: 55473 - DNA, 25 bp, Canis familiaris
caatgcttccacagcgtaaatacac

SEQ ID NO: 55474 - DNA, 25 bp, Canis familiaris
caatttccccctgaaagaccattca

SEQ ID NO: 55475 - DNA, 25 bp, Canis familiaris
caattattccccatgaacgaggaat

SEQ ID NO: 55476 - DNA, 25 bp, Canis familiaris
aattttcagcccttgaaccctgagt

SEQ ID NO: 55477 - DNA, 25 bp, Canis familiaris
aattttccagtccagataatctgtc

SEQ ID NO: 55478 - DNA, 25 bp, Canis familiaris
aatttcccaatatgatgaatttcaa

SEQ ID NO: 55479 - DNA, 25 bp, Canis familiaris
aattcttcaaatttcaggttctcaa

SEQ ID NO: 55480 - DNA, 25 bp, Canis familiaris
aattttccaattacacagtcttcta

SEQ ID NO: 55481 - DNA, 25 bp, Canis familiaris
aattggctctagactaacggctgct

SEQ ID NO: 55482 - DNA, 25 bp, Canis familiaris
aatatatcttcagttaaccagctct

SEQ ID NO: 55483 - DNA, 25 bp, Canis familiaris
aatatactttctatagccctattca

SEQ ID NO: 55484 - DNA, 25 bp, Canis familiaris
aattacattgccttttgtccattaa

SEQ ID NO: 55485 - DNA, 25 bp, Canis familiaris
aattatgttgaagttagaaagtgat

SEQ ID NO: 55486 - DNA, 25 bp, Canis familiaris
aattatcttgaacctgaaacctgcg

SEQ ID NO: 55487 - DNA, 25 bp, Canis familiaris
aattctgaagacccataatagcctg

SEQ ID NO: 55488 - DNA, 25 bp, Canis familiaris
aattctgggatacacctgagactgg

SEQ ID NO: 55489 - DNA, 25 bp, Canis familiaris
aatatatgggtacaattcctctggt

SEQ ID NO: 55490 - DNA, 25 bp, Canis familiaris
aatttcggtatccaaacctctgctg

SEQ ID NO: 55491 - DNA, 25 bp, Canis familiaris
aatatcttggttggcacatcccttg

SEQ ID NO: 55492 - DNA, 25 bp, Canis familiaris
aattttggtttcctactgcatataa

SEQ ID NO: 55493 - DNA, 25 bp, Canis familiaris
aatttctgtgaatcaccctggaaca

SEQ ID NO: 55494 - DNA, 25 bp, Canis familiaris
aatatgtcttgattgacacacctgg

SEQ ID NO: 55495 - DNA, 25 bp, Canis familiaris
aatagtagctttacatgtcttgcag

SEQ ID NO: 55496 - DNA, 25 bp, Canis familiaris
aattttgcacctactggcatcgatg

SEQ ID NO: 55497 - DNA, 25 bp, Canis familiaris
aattcactacctagccagcatagat

SEQ ID NO: 55498 - DNA, 25 bp, Canis familiaris
aatttcatacaatggccatgcagca

SEQ ID NO: 55499 - DNA, 25 bp, Canis familiaris
aatttctctccattccaaggagctt

SEQ ID NO: 55500 - DNA, 25 bp, Canis familiaris
aatttactcacattcacacgcgatt

SEQ ID NO: 55501 - DNA, 25 bp, Canis familiaris
aattatgtaccaatccaccaatgtt

SEQ ID NO: 55502 - DNA, 25 bp, Canis familiaris
aattttatccaatagccaattcctg

SEQ ID NO: 55503 - DNA, 25 bp, Canis familiaris
aattttgattactaccgacttactg

SEQ ID NO: 55504 - DNA, 25 bp, Canis familiaris
aatttcggtatttctggacccatcg

SEQ ID NO: 55505 - DNA, 25 bp, Canis familiaris
aatttcggtgaatctgccatttatt

SEQ ID NO: 55506 - DNA, 25 bp, Canis familiaris
aattcctgggaatgcatccttgtga

SEQ ID NO: 55507 - DNA, 25 bp, Canis familiaris
caaaccaggggatcaattactagca

SEQ ID NO: 55508 - DNA, 25 bp, Canis familiaris
caataccagggacttcttttcggag

SEQ ID NO: 55509 - DNA, 25 bp, Canis familiaris
aattcaaagtggcatcttttcgcaa

SEQ ID NO: 55510 - DNA, 25 bp, Canis familiaris
aatatataattactcctctcttcga

SEQ ID NO: 55511 - DNA, 25 bp, Canis familiaris
aatttaatcggtcctgtccatcaaa

SEQ ID NO: 55512 - DNA, 25 bp, Canis familiaris
aattatatactgttactttccaaag

SEQ ID NO: 55513 - DNA, 25 bp, Canis familiaris
aattctatgacgttaagttctccca

SEQ ID NO: 55514 - DNA, 25 bp, Canis familiaris
aattctagtgcctgaaatcctttca

SEQ ID NO: 55515 - DNA, 25 bp, Canis familiaris
aatttggtgccatcaagtacattgg

SEQ ID NO: 55516 - DNA, 25 bp, Canis familiaris
aatttggctccatcttgtaagttcc

SEQ ID NO: 55517 - DNA, 25 bp, Canis familiaris
aatttactaccattctgtacatttc

SEQ ID NO: 55518 - DNA, 25 bp, Canis familiaris
aatatgttgtattcttcttttatcc

SEQ ID NO: 55519 - DNA, 25 bp, Canis familiaris
aatattacagtaatgtcttttgcat

SEQ ID NO: 55520 - DNA, 25 bp, Canis familiaris
aatatgctagctgctgtccttttgc

SEQ ID NO: 55521 - DNA, 25 bp, Canis familiaris
aatatgctgaattcttcttttatcc

SEQ ID NO: 55522 - DNA, 25 bp, Canis familiaris
aatatctgtacactacttctgttac

SEQ ID NO: 55523 - DNA, 25 bp, Canis familiaris
aatataatacactactatcatgtca

SEQ ID NO: 55524 - DNA, 25 bp, Canis familiaris
aatatttacaacaatgacattcaat

SEQ ID NO: 55525 - DNA, 25 bp, Canis familiaris
aatagtgatagacctagaagtagaa

SEQ ID NO: 55526 - DNA, 25 bp, Canis familiaris
aattgcttcagatctaaaaaacaaa

SEQ ID NO: 55527 - DNA, 25 bp, Canis familiaris
caattcttagcatatggtaaaaact

SEQ ID NO: 55528 - DNA, 25 bp, Canis familiaris
aattcccagctggagcaggaaaaca

SEQ ID NO: 55529 - DNA, 25 bp, Canis familiaris
aattactcctcagcaggtgccaatc

SEQ ID NO: 55530 - DNA, 25 bp, Canis familiaris
aatattttatcaggagctgctccaa

SEQ ID NO: 55531 - DNA, 25 bp, Canis familiaris
aattgttttcagtgtgcttcagtcg

SEQ ID NO: 55532 - DNA, 25 bp, Canis familiaris
aattcttttgaatgtccatcatgtc

SEQ ID NO: 55533 - DNA, 25 bp, Canis familiaris
aatttttttatagtctgcattccaa

SEQ ID NO: 55534 - DNA, 25 bp, Canis familiaris
aattttttcattgctcatatatcgg

SEQ ID NO: 55535 - DNA, 25 bp, Canis familiaris
aatatagtgtacattgccatataat

SEQ ID NO: 55536 - DNA, 25 bp, Canis familiaris
aattactggcactttattcataaat

SEQ ID NO: 55537 - DNA, 25 bp, Canis familiaris
aattagcaggagttcttttatcatc

SEQ ID NO: 55538 - DNA, 25 bp, Canis familiaris
aattagctcaggtctacttttccct

SEQ ID NO: 55539 - DNA, 25 bp, Canis familiaris
aattgagccagagtctttatattcc

SEQ ID NO: 55540 - DNA, 25 bp, Canis familiaris
aattcgcctgacaatttttcgtcca

SEQ ID NO: 55541 - DNA, 25 bp, Canis familiaris
aattcagcttactattctaacttaa

SEQ ID NO: 55542 - DNA, 25 bp, Canis familiaris
aattagttaccatttgctttatgta

SEQ ID NO: 55543 - DNA, 25 bp, Canis familiaris
aattgaggttgcacatcatgctatt

SEQ ID NO: 55544 - DNA, 25 bp, Canis familiaris
aattagtttcaccacattatgtgtg

SEQ ID NO: 55545 - DNA, 25 bp, Canis familiaris
aattggaattacccttatgactctc

SEQ ID NO: 55546 - DNA, 25 bp, Canis familiaris
aattgctaaaactgcctttgccttc

SEQ ID NO: 55547 - DNA, 25 bp, Canis familiaris
aattcaaaaactcttcctctttcag

SEQ ID NO: 55548 - DNA, 25 bp, Canis familiaris
aattcaaagaagccttttcactatt

SEQ ID NO: 55549 - DNA, 25 bp, Canis familiaris
aattttcatgaacttgtttcttatt

SEQ ID NO: 55550 - DNA, 25 bp, Canis familiaris
aattttcacatacagcccatgctta

SEQ ID NO: 55551 - DNA, 25 bp, Canis familiaris
aatatttcaattggagcgcatctgg

SEQ ID NO: 55552 - DNA, 25 bp, Canis familiaris
aatatatctgcatcaagactgactt

SEQ ID NO: 55553 - DNA, 25 bp, Canis familiaris
aatatagtatacggcctttctggag

SEQ ID NO: 55554 - DNA, 25 bp, Canis familiaris
aatatactcaagctgtctgcttcag

SEQ ID NO: 55555 - DNA, 25 bp, Canis familiaris
aatatcactttggctttttcaggac

SEQ ID NO: 55556 - DNA, 25 bp, Canis familiaris
aattctttctgttatttgtcatggt

SEQ ID NO: 55557 - DNA, 25 bp, Canis familiaris
aattatctgatcctgccaattggct

SEQ ID NO: 55558 - DNA, 25 bp, Canis familiaris
aatatcagcaggcggctattggtaa

SEQ ID NO: 55559 - DNA, 25 bp, Canis familiaris
aattcagtgggttcagtgtggataa

SEQ ID NO: 55560 - DNA, 25 bp, Canis familiaris
aattggtgcggcctatggaaaatag

SEQ ID NO: 55561 - DNA, 25 bp, Canis familiaris
aattctcgcgagctcggaatttgag

SEQ ID NO: 55562 - DNA, 25 bp, Canis familiaris
aattccctgtcttcaggaactctga

SEQ ID NO: 55563 - DNA, 25 bp, Canis familiaris
aattccctttaccagtagcatcatc

SEQ ID NO: 55564 - DNA, 25 bp, Canis familiaris
aattcagctcttacaaaacagcttt

SEQ ID NO: 55565 - DNA, 25 bp, Canis familiaris
aattgacttttcttgaggcaactgt

SEQ ID NO: 55566 - DNA, 25 bp, Canis familiaris
aatatgttttacttgttgccctgtg

SEQ ID NO: 55567 - DNA, 25 bp, Canis familiaris
aatatcttcatttttttgccttgtt

SEQ ID NO: 55568 - DNA, 25 bp, Canis familiaris
aatattttctcattttgttcttgta

SEQ ID NO: 55569 - DNA, 25 bp, Canis familiaris
aatattttggatcgttgctttttga

SEQ ID NO: 55570 - DNA, 25 bp, Canis familiaris
aattttattcatctgggcttttact

SEQ ID NO: 55571 - DNA, 25 bp, Canis familiaris
aatatcttgattgctgtgggttcta

SEQ ID NO: 55572 - DNA, 25 bp, Canis familiaris
aatttgtgcccattgtggagtctgt

SEQ ID NO: 55573 - DNA, 25 bp, Canis familiaris
aatattgccctcctgttaggatgta

SEQ ID NO: 55574 - DNA, 25 bp, Canis familiaris
aatattccctgcctcagtgttagta

SEQ ID NO: 55575 - DNA, 25 bp, Canis familiaris
aattatctgcctgtaagtggggaac

SEQ ID NO: 55576 - DNA, 25 bp, Canis familiaris
aatttgctggtggttcagagtggga

SEQ ID NO: 55577 - DNA, 25 bp, Canis familiaris
aattcgcatcttgattctgggcgga

SEQ ID NO: 55578 - DNA, 25 bp, Canis familiaris
aatttagtggagatctgtggcacga

SEQ ID NO: 55579 - DNA, 25 bp, Canis familiaris
aatttggtgtggacatcgggcctgt

SEQ ID NO: 55580 - DNA, 25 bp, Canis familiaris
aatttggtgtggacatcgggcctgt

SEQ ID NO: 55581 - DNA, 25 bp, Canis familiaris
aatttggtgtggacatcgggcctgt

SEQ ID NO: 55582 - DNA, 25 bp, Canis familiaris
aatttggtgtggacatcgggcctgt

SEQ ID NO: 55583 - DNA, 25 bp, Canis familiaris
aatttggtgtggacatcgggcctgt

SEQ ID NO: 55584 - DNA, 25 bp, Canis familiaris
aatttggtgtggacatcgggcctgt

SEQ ID NO: 55585 - DNA, 25 bp, Canis familiaris
aatttggtgtggacatcgggcctgt

SEQ ID NO: 55586 - DNA, 25 bp, Canis familiaris
aatttggtgtggacatcgggcctgt

SEQ ID NO: 55587 - DNA, 25 bp, Canis familiaris
aatttggttgtgacaatcgggcctg

SEQ ID NO: 55588 - DNA, 25 bp, Canis familiaris
aatttggtgtggacattcgggcctg

SEQ ID NO: 55589 - DNA, 25 bp, Canis familiaris
aatttgtgctatggacttcggggac

SEQ ID NO: 55590 - DNA, 25 bp, Canis familiaris
aatttttgagactttatgggtggct

SEQ ID NO: 55591 - DNA, 25 bp, Canis familiaris
aattagttagatgtttgtgggttga

SEQ ID NO: 55592 - DNA, 25 bp, Canis familiaris
aatttgtgtggtgtgtgtggggggg

SEQ ID NO: 55593 - DNA, 25 bp, Canis familiaris
caacttggtaagccggtagcgtggt

SEQ ID NO: 55594 - DNA, 25 bp, Canis familiaris
aattctgttaagccatgcgtacatg

SEQ ID NO: 55595 - DNA, 25 bp, Canis familiaris
aattcgtatccacagcagctcgagt

SEQ ID NO: 55596 - DNA, 25 bp, Canis familiaris
aattcttcatccccagatcttggaa

SEQ ID NO: 55597 - DNA, 25 bp, Canis familiaris
cactcctaatcccgagttgggttct

SEQ ID NO: 55598 - DNA, 25 bp, Canis familiaris
cactttacagctgttattaggttgc

SEQ ID NO: 55599 - DNA, 25 bp, Canis familiaris
aattttcagtgctttgttatgttta

SEQ ID NO: 55600 - DNA, 25 bp, Canis familiaris
aattctctcattttttgtaggtctg

SEQ ID NO: 55601 - DNA, 25 bp, Canis familiaris
aattctcatatactgtttgtagtgt

SEQ ID NO: 55602 - DNA, 25 bp, Canis familiaris
aatataaatcgtgtgtgtggtgtgt

SEQ ID NO: 55603 - DNA, 25 bp, Canis familiaris
aattaaatcctcagactggtgctgt

SEQ ID NO: 55604 - DNA, 25 bp, Canis familiaris
aattaaatgttttgcagcgttgcct

SEQ ID NO: 55605 - DNA, 25 bp, Canis familiaris
aatatatatatgtctgtggcagtgt

SEQ ID NO: 55606 - DNA, 25 bp, Canis familiaris
aatttgttattgttgcagatgtgaa

SEQ ID NO: 55607 - DNA, 25 bp, Canis familiaris
aattatgtaaattccagtttaggct

SEQ ID NO: 55608 - DNA, 25 bp, Canis familiaris
aatatcatttctttccaggttggga

SEQ ID NO: 55609 - DNA, 25 bp, Canis familiaris
aatatcttgtattctccagttcttg

SEQ ID NO: 55610 - DNA, 25 bp, Canis familiaris
aatatattcatatccgcagcttctg

SEQ ID NO: 55611 - DNA, 25 bp, Canis familiaris
caatcaatcattgccccagttttgg

SEQ ID NO: 55612 - DNA, 25 bp, Canis familiaris
aattccattcccaacaagtattctg

SEQ ID NO: 55613 - DNA, 25 bp, Canis familiaris
aattccagcctccaatagcgatata

SEQ ID NO: 55614 - DNA, 25 bp, Canis familiaris
aattctccccgagtacgagatagca

SEQ ID NO: 55615 - DNA, 25 bp, Canis familiaris
aattctccccgagaaacgagaagca

SEQ ID NO: 55616 - DNA, 25 bp, Canis familiaris
aattccctcccagaattgcgggaga

SEQ ID NO: 55617 - DNA, 25 bp, Canis familiaris
aattcccctccagaattgtcggaga

SEQ ID NO: 55618 - DNA, 25 bp, Canis familiaris
aattcccagtaagtgcggcttcggg

SEQ ID NO: 55619 - DNA, 25 bp, Canis familiaris
aattgctccagcttcctgggttaga

SEQ ID NO: 55620 - DNA, 25 bp, Canis familiaris
aatttgcagctgtctctctgatgtg

SEQ ID NO: 55621 - DNA, 25 bp, Canis familiaris
aattcgatgtgatagctgctggacc

SEQ ID NO: 55622 - DNA, 25 bp, Canis familiaris
aattccaggcacctgctgtgacaca

SEQ ID NO: 55623 - DNA, 25 bp, Canis familiaris
aatttgctgggattctgtgactgga

SEQ ID NO: 55624 - DNA, 25 bp, Canis familiaris
aatattttgcagaacgcgcaaggac

SEQ ID NO: 55625 - DNA, 25 bp, Canis familiaris
aatattttatgcaacacctgggacc

SEQ ID NO: 55626 - DNA, 25 bp, Canis familiaris
aatatttcagtgcacgctctaaccc

SEQ ID NO: 55627 - DNA, 25 bp, Canis familiaris
aatattgtcgtgcgcacactgtgtc

SEQ ID NO: 55628 - DNA, 25 bp, Canis familiaris
aatattgccagtttgacctctgcac

SEQ ID NO: 55629 - DNA, 25 bp, Canis familiaris
aatttgcttgttttcttcatgcctt

SEQ ID NO: 55630 - DNA, 25 bp, Canis familiaris
aatttgcttgttttcttcatgcctt

SEQ ID NO: 55631 - DNA, 25 bp, Canis familiaris
aatattttgtgtttcttgtgtgcta

SEQ ID NO: 55632 - DNA, 25 bp, Canis familiaris
aatattggttgtcatactgtggtca

SEQ ID NO: 55633 - DNA, 25 bp, Canis familiaris
aatttcttttcttagctgtgtggcc

SEQ ID NO: 55634 - DNA, 25 bp, Canis familiaris
aattactgttttatgttgatctgca

SEQ ID NO: 55635 - DNA, 25 bp, Canis familiaris
aattactttttttctaatgtgcata

SEQ ID NO: 55636 - DNA, 25 bp, Canis familiaris
aatatactgttccttaccatatgtg

SEQ ID NO: 55637 - DNA, 25 bp, Canis familiaris
aattcatctttcatttccattataa

SEQ ID NO: 55638 - DNA, 25 bp, Canis familiaris
aatatatttatttttacatgtatga

SEQ ID NO: 55639 - DNA, 25 bp, Canis familiaris
aatataattatcttctctacatcgt

SEQ ID NO: 55640 - DNA, 25 bp, Canis familiaris
aatttgttacactattacatcagct

SEQ ID NO: 55641 - DNA, 25 bp, Canis familiaris
aattgtgttaattatcttctagggg

SEQ ID NO: 55642 - DNA, 25 bp, Canis familiaris
aatttgcctaattatcttatgacaa

SEQ ID NO: 55643 - DNA, 25 bp, Canis familiaris
aatttgctcatagaatctcttgatc

SEQ ID NO: 55644 - DNA, 25 bp, Canis familiaris
aatttgccatactaatcacagctga

SEQ ID NO: 55645 - DNA, 25 bp, Canis familiaris
aatttgcacgtctcaacattgaccc

SEQ ID NO: 55646 - DNA, 25 bp, Canis familiaris
aatttcttgatttcaacatcttccc

SEQ ID NO: 55647 - DNA, 25 bp, Canis familiaris
aatttcttttaatagctctcaactt

SEQ ID NO: 55648 - DNA, 25 bp, Canis familiaris
aatttttctgctttaggttcttgct

SEQ ID NO: 55649 - DNA, 25 bp, Canis familiaris
aatttgttccttgcactgttttgtg

SEQ ID NO: 55650 - DNA, 25 bp, Canis familiaris
aattttatccctcatgtatacttgg

SEQ ID NO: 55651 - DNA, 25 bp, Canis familiaris
aattgttcaccattgctattttttg

SEQ ID NO: 55652 - DNA, 25 bp, Canis familiaris
aattcggcacgaggtcattttatct

SEQ ID NO: 55653 - DNA, 25 bp, Canis familiaris
aattcggcacgagtttcaatatttc

SEQ ID NO: 55654 - DNA, 25 bp, Canis familiaris
aatatagacccactttcaacatttc

SEQ ID NO: 55655 - DNA, 25 bp, Canis familiaris
aatatacagatttctttcagacctc

SEQ ID NO: 55656 - DNA, 25 bp, Canis familiaris
caattcccagattatttcaacctcc

SEQ ID NO: 55657 - DNA, 25 bp, Canis familiaris
caatctgcccgtttccaaggaaatg

SEQ ID NO: 55658 - DNA, 25 bp, Canis familiaris
caatcggcccgagttcaagccagag

SEQ ID NO: 55659 - DNA, 25 bp, Canis familiaris
caatcaggaacaggtcacagggaag

SEQ ID NO: 55660 - DNA, 25 bp, Canis familiaris
caatcgaacactttagcagaaactg

SEQ ID NO: 55661 - DNA, 25 bp, Canis familiaris
aattgaagaaccatcagataactgt

SEQ ID NO: 55662 - DNA, 25 bp, Canis familiaris
caatgtaaaaccaccataaagttgt

SEQ ID NO: 55663 - DNA, 25 bp, Canis familiaris
ctagttaaccccaccaaaatgctgt

SEQ ID NO: 55664 - DNA, 25 bp, Canis familiaris
caatgttcaaccaccaggaaacagg

SEQ ID NO: 55665 - DNA, 25 bp, Canis familiaris
caatgtactaccacgcaagaataaa

SEQ ID NO: 55666 - DNA, 25 bp, Canis familiaris
aatttcgagcctggccatagttaga

SEQ ID NO: 55667 - DNA, 25 bp, Canis familiaris
aattcttgaatttggctcaggtcac

SEQ ID NO: 55668 - DNA, 25 bp, Canis familiaris
aattccagaatgtgtctatggtaca

SEQ ID NO: 55669 - DNA, 25 bp, Canis familiaris
aattacgacttttataggatgagca

SEQ ID NO: 55670 - DNA, 25 bp, Canis familiaris
aattagctactttcacatcgggatc

SEQ ID NO: 55671 - DNA, 25 bp, Canis familiaris
aattttactggactcatctgatggt

SEQ ID NO: 55672 - DNA, 25 bp, Canis familiaris
aatatattgtcttgcctcactttgt

SEQ ID NO: 55673 - DNA, 25 bp, Canis familiaris
caattgtttctgtcactcgttttag

SEQ ID NO: 55674 - DNA, 25 bp, Canis familiaris
aattatgttctgtctaggtcattat

SEQ ID NO: 55675 - DNA, 25 bp, Canis familiaris
aattctctccgtgagggcattttcg

SEQ ID NO: 55676 - DNA, 25 bp, Canis familiaris
aattttccgtgtttgacatctattc

SEQ ID NO: 55677 - DNA, 25 bp, Canis familiaris
aattatgtccacctttactttatgt

SEQ ID NO: 55678 - DNA, 25 bp, Canis familiaris
aattttctaatgcattcctctttgt

SEQ ID NO: 55679 - DNA, 25 bp, Canis familiaris
aatttgccatgtaggattctttttg

SEQ ID NO: 55680 - DNA, 25 bp, Canis familiaris
aatttccatggaaattccatctctt

SEQ ID NO: 55681 - DNA, 25 bp, Canis familiaris
aatatacctggtccttacacatagt

SEQ ID NO: 55682 - DNA, 25 bp, Canis familiaris
aattacttgtgaccattaactagct

SEQ ID NO: 55683 - DNA, 25 bp, Canis familiaris
aatttctagctgtccttggagaatt

SEQ ID NO: 55684 - DNA, 25 bp, Canis familiaris
aattgtgctgaggcaactatggcat

SEQ ID NO: 55685 - DNA, 25 bp, Canis familiaris
aattatgggccaactgctgtgcaga

SEQ ID NO: 55686 - DNA, 25 bp, Canis familiaris
caattagctcccagcagcttctaga

SEQ ID NO: 55687 - DNA, 25 bp, Canis familiaris
aattacatcctgagatttccacttt

SEQ ID NO: 55688 - DNA, 25 bp, Canis familiaris
aattactgtttgaactctcaccctt

SEQ ID NO: 55689 - DNA, 25 bp, Canis familiaris
aatttcgtattgacttaagccactt

SEQ ID NO: 55690 - DNA, 25 bp, Canis familiaris
aatttgcctttgcttaactcatcag

SEQ ID NO: 55691 - DNA, 25 bp, Canis familiaris
aatttccacaattgcccaaatatag

SEQ ID NO: 55692 - DNA, 25 bp, Canis familiaris
caattagccacaatagccaaactat

SEQ ID NO: 55693 - DNA, 25 bp, Canis familiaris
aattagtcaatggaggcccacctgc

SEQ ID NO: 55694 - DNA, 25 bp, Canis familiaris
aattctgtacatggacagtccacac

SEQ ID NO: 55695 - DNA, 25 bp, Canis familiaris
aatttgatcctgcatcctacatcat

SEQ ID NO: 55696 - DNA, 25 bp, Canis familiaris
aatttgatgacatgactcctctttc

SEQ ID NO: 55697 - DNA, 25 bp, Canis familiaris
aatattgatgtcagatcctcttttg

SEQ ID NO: 55698 - DNA, 25 bp, Canis familiaris
aatatttgattgcacgtcacttagt

SEQ ID NO: 55699 - DNA, 25 bp, Canis familiaris
aattgtgttcgccagaacacatgat

SEQ ID NO: 55700 - DNA, 25 bp, Canis familiaris
aattcttctcagacatgaaaatttt

SEQ ID NO: 55701 - DNA, 25 bp, Canis familiaris
aattttctcgaagcaatgttcatct

SEQ ID NO: 55702 - DNA, 25 bp, Canis familiaris
aatttttcagaactccagatatact

SEQ ID NO: 55703 - DNA, 25 bp, Canis familiaris
aattgtgtataggcctccctaattt

SEQ ID NO: 55704 - DNA, 25 bp, Canis familiaris
caattggcaataccttggccttaag

SEQ ID NO: 55705 - DNA, 25 bp, Canis familiaris
aattagagaattccagacccttaga

SEQ ID NO: 55706 - DNA, 25 bp, Canis familiaris
aattggagtttgaggcccctaagct

SEQ ID NO: 55707 - DNA, 25 bp, Canis familiaris
aattgggctttgattggcacttttt

SEQ ID NO: 55708 - DNA, 25 bp, Canis familiaris
aattggagtttatctgttctgtttt

SEQ ID NO: 55709 - DNA, 25 bp, Canis familiaris
aatttgatgttgtgttgtgtttttt

SEQ ID NO: 55710 - DNA, 25 bp, Canis familiaris
aatattcatgccccagtgtgtgtgt

SEQ ID NO: 55711 - DNA, 25 bp, Canis familiaris
aatttacacatgctgtgtgtggcaa

SEQ ID NO: 55712 - DNA, 25 bp, Canis familiaris
aatttcacactccatatgtgttcct

SEQ ID NO: 55713 - DNA, 25 bp, Canis familiaris
aatttcataattcactgatctatca

SEQ ID NO: 55714 - DNA, 25 bp, Canis familiaris
aattctcaggttcacatttcacaag

SEQ ID NO: 55715 - DNA, 25 bp, Canis familiaris
aattctcggtgaggaaaccacaact

SEQ ID NO: 55716 - DNA, 25 bp, Canis familiaris
aattatcaaggactgccaacgcaaa

SEQ ID NO: 55717 - DNA, 25 bp, Canis familiaris
aattcagcaaagtctggcgagatga

SEQ ID NO: 55718 - DNA, 25 bp, Canis familiaris
aattacaggatgccaagccatgagg

SEQ ID NO: 55719 - DNA, 25 bp, Canis familiaris
aattcaaaattgagctctaggccca

SEQ ID NO: 55720 - DNA, 25 bp, Canis familiaris
aattaaaatatgcccctcagaacca

SEQ ID NO: 55721 - DNA, 25 bp, Canis familiaris
aattcaccaatcacacttcaaatcc

SEQ ID NO: 55722 - DNA, 25 bp, Canis familiaris
aattcccttctggagctttgagatt

SEQ ID NO: 55723 - DNA, 25 bp, Canis familiaris
aattacgctttgtctcttgagagtt

SEQ ID NO: 55724 - DNA, 25 bp, Canis familiaris
aatttcccactgccttggatggctt

SEQ ID NO: 55725 - DNA, 25 bp, Canis familiaris
aatttcctcttgctgctggaagtct

SEQ ID NO: 55726 - DNA, 25 bp, Canis familiaris
aatattgcccgacagatgcgacacc

SEQ ID NO: 55727 - DNA, 25 bp, Canis familiaris
aatattgcccgacagatgcgacacc

SEQ ID NO: 55728 - DNA, 25 bp, Canis familiaris
aatattgcccgacagatgcgacacc

SEQ ID NO: 55729 - DNA, 25 bp, Canis familiaris
aatattgcccgacagatgcgacacc

SEQ ID NO: 55730 - DNA, 25 bp, Canis familiaris
aatattgcccgacagatgcgacacc

SEQ ID NO: 55731 - DNA, 25 bp, Canis familiaris
aatttcctcaggcaaacacaccctt

SEQ ID NO: 55732 - DNA, 25 bp, Canis familiaris
aatttccgaacatcaatgcagccct

SEQ ID NO: 55733 - DNA, 25 bp, Canis familiaris
caatatttcagaggcataccaatgc

SEQ ID NO: 55734 - DNA, 25 bp, Canis familiaris
caatttgtcgagccacactgtactc

SEQ ID NO: 55735 - DNA, 25 bp, Canis familiaris
aattgtgtccagtcactgagcccat

SEQ ID NO: 55736 - DNA, 25 bp, Canis familiaris
aatattgtgctttccagagcctcag

SEQ ID NO: 55737 - DNA, 25 bp, Canis familiaris
aatttactgcattgcgagggtagtt

SEQ ID NO: 55738 - DNA, 25 bp, Canis familiaris
aattgattccattgcgggattatgc

SEQ ID NO: 55739 - DNA, 25 bp, Canis familiaris
aattgagtgctgggggctctaagga

SEQ ID NO: 55740 - DNA, 25 bp, Canis familiaris
caattcgtcatcagggcccaagttt

SEQ ID NO: 55741 - DNA, 25 bp, Canis familiaris
aatttccatcggactcccataggtt

SEQ ID NO: 55742 - DNA, 25 bp, Canis familiaris
aattgacctggatttccctaactgt

SEQ ID NO: 55743 - DNA, 25 bp, Canis familiaris
aattacctggaacccataacttgat

SEQ ID NO: 55744 - DNA, 25 bp, Canis familiaris
aattcccgggatccaaaggctgtga

SEQ ID NO: 55745 - DNA, 25 bp, Canis familiaris
aattcccgggatcacaaccatgcgg

SEQ ID NO: 55746 - DNA, 25 bp, Canis familiaris
aattcccgggatcagaacggcaagg

SEQ ID NO: 55747 - DNA, 25 bp, Canis familiaris
aattcccgggatggcaaacagacaa

SEQ ID NO: 55748 - DNA, 25 bp, Canis familiaris
aattccgggttcgacagagacacca

SEQ ID NO: 55749 - DNA, 25 bp, Canis familiaris
aattctgcgtttacacaaaagtgct

SEQ ID NO: 55750 - DNA, 25 bp, Canis familiaris
aattctgtggtaatattaaatggtt

SEQ ID NO: 55751 - DNA, 25 bp, Canis familiaris
caatccttgggaacctacggattct

SEQ ID NO: 55752 - DNA, 25 bp, Canis familiaris
caatcgctctgtctcttctaaaagc

SEQ ID NO: 55753 - DNA, 25 bp, Canis familiaris
caatcgctctgtctcttctaaaagc

SEQ ID NO: 55754 - DNA, 25 bp, Canis familiaris
aattccttaatcattgccacaactt

SEQ ID NO: 55755 - DNA, 25 bp, Canis familiaris
aattcctatgtcagttgccacaacc

SEQ ID NO: 55756 - DNA, 25 bp, Canis familiaris
aattcacgtgactgtggatctcaag

SEQ ID NO: 55757 - DNA, 25 bp, Canis familiaris
caattccgctgtgaggtactaaggc

SEQ ID NO: 55758 - DNA, 25 bp, Canis familiaris
caattctgcgctaccggtgcaatga

SEQ ID NO: 55759 - DNA, 25 bp, Canis familiaris
aattttgcattccgttgcagctgag

SEQ ID NO: 55760 - DNA, 25 bp, Canis familiaris
aattgtggttctcatctgactggct

SEQ ID NO: 55761 - DNA, 25 bp, Canis familiaris
aatttctgttcatgtctttggctca

SEQ ID NO: 55762 - DNA, 25 bp, Canis familiaris
aattttgttgttgctttgtgtccct

SEQ ID NO: 55763 - DNA, 25 bp, Canis familiaris
aatttttattttcatggagtcgcca

SEQ ID NO: 55764 - DNA, 25 bp, Canis familiaris
caattgttggttgtaaaggcttcca

SEQ ID NO: 55765 - DNA, 25 bp, Canis familiaris
aattattgagtattatcaaaccatt

SEQ ID NO: 55766 - DNA, 25 bp, Canis familiaris
aattttgcattatatctaccctctt

SEQ ID NO: 55767 - DNA, 25 bp, Canis familiaris
aatttatgcatttcttaaccagttt

SEQ ID NO: 55768 - DNA, 25 bp, Canis familiaris
aattgcttatttcttaaatgttctt

SEQ ID NO: 55769 - DNA, 25 bp, Canis familiaris
aattgtctctttctagaaactcttt

SEQ ID NO: 55770 - DNA, 25 bp, Canis familiaris
aatttccatttgcaactatactcct

SEQ ID NO: 55771 - DNA, 25 bp, Canis familiaris
aatttccttatggaatctgttttct

SEQ ID NO: 55772 - DNA, 25 bp, Canis familiaris
aattactcccgaaaatgttaatcat

SEQ ID NO: 55773 - DNA, 25 bp, Canis familiaris
aattcgtcaccgatttgttccagca

SEQ ID NO: 55774 - DNA, 25 bp, Canis familiaris
aatttgaatgccgaagttactgacg

SEQ ID NO: 55775 - DNA, 25 bp, Canis familiaris
aattcatgaggcgacaggtcttcaa

SEQ ID NO: 55776 - DNA, 25 bp, Canis familiaris
aattaaggctctggaattctcaagg

SEQ ID NO: 55777 - DNA, 25 bp, Canis familiaris
aattacaggtatgccttccagtgct

SEQ ID NO: 55778 - DNA, 25 bp, Canis familiaris
aattggcagggagcagttgacagtt

SEQ ID NO: 55779 - DNA, 25 bp, Canis familiaris
aattccttgtagggcttagcatttc

SEQ ID NO: 55780 - DNA, 25 bp, Canis familiaris
aattccctgttctagttgagcttgt

SEQ ID NO: 55781 - DNA, 25 bp, Canis familiaris
aattcttcttcctggcaggtagctt

SEQ ID NO: 55782 - DNA, 25 bp, Canis familiaris
aattcactgtgtatagggttagctt

SEQ ID NO: 55783 - DNA, 25 bp, Canis familiaris
aattgcagttgttgccagggttatt

SEQ ID NO: 55784 - DNA, 25 bp, Canis familiaris
aattatgtgtttctgggtctttgta

SEQ ID NO: 55785 - DNA, 25 bp, Canis familiaris
aattagggattgctgtttcccagaa

SEQ ID NO: 55786 - DNA, 25 bp, Canis familiaris
aattggggtggacaattcgccacaa

SEQ ID NO: 55787 - DNA, 25 bp, Canis familiaris
aatattgggaggcctgagttccctt

SEQ ID NO: 55788 - DNA, 25 bp, Canis familiaris
aatttgcagcagccatgggggttcc

SEQ ID NO: 55789 - DNA, 25 bp, Canis familiaris
aatttgcagcagctttctgaggcct

SEQ ID NO: 55790 - DNA, 25 bp, Canis familiaris
caatattgcccgaaccagaatgccg

SEQ ID NO: 55791 - DNA, 25 bp, Canis familiaris
aatttgcctgcattaccggtcgatg

SEQ ID NO: 55792 - DNA, 25 bp, Canis familiaris
aatttcctcagaggcacctgggtgg

SEQ ID NO: 55793 - DNA, 25 bp, Canis familiaris
aattcactttgggcacctgtgtgtg

SEQ ID NO: 55794 - DNA, 25 bp, Canis familiaris
aattggtatgtagccctggtgctgt

SEQ ID NO: 55795 - DNA, 25 bp, Canis familiaris
aatttgtaatatatcctgtttgtat

SEQ ID NO: 55796 - DNA, 25 bp, Canis familiaris
aattttaatatgtctccgcttatct

SEQ ID NO: 55797 - DNA, 25 bp, Canis familiaris
caatctttaaactcttgctggattt

SEQ ID NO: 55798 - DNA, 25 bp, Canis familiaris
aattttggaactctatgccagtgat

SEQ ID NO: 55799 - DNA, 25 bp, Canis familiaris
aattttagtaatcgtgtccgtgtgt

SEQ ID NO: 55800 - DNA, 25 bp, Canis familiaris
aattttactaataagcatcctgtgt

SEQ ID NO: 55801 - DNA, 25 bp, Canis familiaris
aattgtatggcttttcagaactgag

SEQ ID NO: 55802 - DNA, 25 bp, Canis familiaris
caattgatatgtttaaagagactta

SEQ ID NO: 55803 - DNA, 25 bp, Canis familiaris
caatctttacttgcaaaactccagg

SEQ ID NO: 55804 - DNA, 25 bp, Canis familiaris
aattttagcttggcaaccaggacat

SEQ ID NO: 55805 - DNA, 25 bp, Canis familiaris
aattctttgctgtgtctccaggaga

SEQ ID NO: 55806 - DNA, 25 bp, Canis familiaris
aattcacttcagaatccccagagaa

SEQ ID NO: 55807 - DNA, 25 bp, Canis familiaris
aattataatatttcccacagaaagc

SEQ ID NO: 55808 - DNA, 25 bp, Canis familiaris
aattttttttccctgcaggactgct

SEQ ID NO: 55809 - DNA, 25 bp, Canis familiaris
aatttttttcacaatcgagggcgct

SEQ ID NO: 55810 - DNA, 25 bp, Canis familiaris
aattttctttccaagggctatatgc

SEQ ID NO: 55811 - DNA, 25 bp, Canis familiaris
aatttttttgccaatggtgccaagt

SEQ ID NO: 55812 - DNA, 25 bp, Canis familiaris
aattattttgtgcctatttatgaat

SEQ ID NO: 55813 - DNA, 25 bp, Canis familiaris
aattttcttgacctgattggctaaa

SEQ ID NO: 55814 - DNA, 25 bp, Canis familiaris
aatttctgtaaccagtttgctattt

SEQ ID NO: 55815 - DNA, 25 bp, Canis familiaris
caataccgtcaaggctgtttgctcc

SEQ ID NO: 55816 - DNA, 25 bp, Canis familiaris
aatttcccatatgatgatttcatcc

SEQ ID NO: 55817 - DNA, 25 bp, Canis familiaris
aattggccttgacagattcacacag

SEQ ID NO: 55818 - DNA, 25 bp, Canis familiaris
aattgcgtgcattaatcagattcaa

SEQ ID NO: 55819 - DNA, 25 bp, Canis familiaris
aattttcatcatttgcagattacat

SEQ ID NO: 55820 - DNA, 25 bp, Canis familiaris
aattcactcatttggagaataatgt

SEQ ID NO: 55821 - DNA, 25 bp, Canis familiaris
caataatctctgtcaggagcatata

SEQ ID NO: 55822 - DNA, 25 bp, Canis familiaris
tcatgtccagcatcaagctgagaga

SEQ ID NO: 55823 - DNA, 25 bp, Canis familiaris
caataacacaaaggccaatgtcaca

SEQ ID NO: 55824 - DNA, 25 bp, Canis familiaris
aattccacaacgatgcacgtcgaca

SEQ ID NO: 55825 - DNA, 25 bp, Canis familiaris
aattcacgtgaggcactgcagccac

SEQ ID NO: 55826 - DNA, 25 bp, Canis familiaris
aattaggagcaggcctcagggcgca

SEQ ID NO: 55827 - DNA, 25 bp, Canis familiaris
aattatgggtgtgctagaaccaaaa

SEQ ID NO: 55828 - DNA, 25 bp, Canis familiaris
aattagggtcatagctggtcaccaa

SEQ ID NO: 55829 - DNA, 25 bp, Canis familiaris
aattagcagggtaggctgtgacaga

SEQ ID NO: 55830 - DNA, 25 bp, Canis familiaris
aattactgggtgagtgcgtgctgca

SEQ ID NO: 55831 - DNA, 25 bp, Canis familiaris
aattaatggagactctgtggccaga

SEQ ID NO: 55832 - DNA, 25 bp, Canis familiaris
aattctatgctccatggtgtggcca

SEQ ID NO: 55833 - DNA, 25 bp, Canis familiaris
aattattgatcatgttgctggcttt

SEQ ID NO: 55834 - DNA, 25 bp, Canis familiaris
aattgatgctattggaggggctcgt

SEQ ID NO: 55835 - DNA, 25 bp, Canis familiaris
aattcagttcaaagtggtctcaggt

SEQ ID NO: 55836 - DNA, 25 bp, Canis familiaris
caattcggtcaattgtcactgtcat

SEQ ID NO: 55837 - DNA, 25 bp, Canis familiaris
caattcggtcaattgtcactgtcat

SEQ ID NO: 55838 - DNA, 25 bp, Canis familiaris
caatctctttgctatgttccagcca

SEQ ID NO: 55839 - DNA, 25 bp, Canis familiaris
aattcataatgattcctcaattcag

SEQ ID NO: 55840 - DNA, 25 bp, Canis familiaris
aattaacatggtgccacatgccctg

SEQ ID NO: 55841 - DNA, 25 bp, Canis familiaris
caattactcagtgccaagctacctg

SEQ ID NO: 55842 - DNA, 25 bp, Canis familiaris
aattcttaattttagctacctgtat

SEQ ID NO: 55843 - DNA, 25 bp, Canis familiaris
aattctccaagtaatatgtatccgt

SEQ ID NO: 55844 - DNA, 25 bp, Canis familiaris
aatttccatattatcactaccaatc

SEQ ID NO: 55845 - DNA, 25 bp, Canis familiaris
aattttgaagattgacactcacctt

SEQ ID NO: 55846 - DNA, 25 bp, Canis familiaris
aattttcgagtgtacatctcagtgt

SEQ ID NO: 55847 - DNA, 25 bp, Canis familiaris
aattgtttcctatatgtcagttatt

SEQ ID NO: 55848 - DNA, 25 bp, Canis familiaris
aatttttcctagttgccatcacatt

SEQ ID NO: 55849 - DNA, 25 bp, Canis familiaris
caatattgttcgggttgttcctagt

SEQ ID NO: 55850 - DNA, 25 bp, Canis familiaris
caattcttccagtggttcttccaat

SEQ ID NO: 55851 - DNA, 25 bp, Canis familiaris
aattctaccaatcagttcattccca

SEQ ID NO: 55852 - DNA, 25 bp, Canis familiaris
caattataaaatctgttttgccctt

SEQ ID NO: 55853 - DNA, 25 bp, Canis familiaris
aatttaaaggctatctctgtctctc

SEQ ID NO: 55854 - DNA, 25 bp, Canis familiaris
aattagaacaccatctccagatcca

SEQ ID NO: 55855 - DNA, 25 bp, Canis familiaris
caggtagtgaacatacccgtccttc

SEQ ID NO: 55856 - DNA, 25 bp, Canis familiaris
caggtaatacaacacgccggactga

SEQ ID NO: 55857 - DNA, 25 bp, Canis familiaris
cagtttaacatttttcttgagacga

SEQ ID NO: 55858 - DNA, 25 bp, Canis familiaris
aattatcaaatttctttctggcaaa

SEQ ID NO: 55859 - DNA, 25 bp, Canis familiaris
aatttcaaatcactactacccagaa

SEQ ID NO: 55860 - DNA, 25 bp, Canis familiaris
aatttagtcccatctatcaccaaca

SEQ ID NO: 55861 - DNA, 25 bp, Canis familiaris
aattggattccctcatcaaggctac

SEQ ID NO: 55862 - DNA, 25 bp, Canis familiaris
aattggaaccaagctgccgtcatag

SEQ ID NO: 55863 - DNA, 25 bp, Canis familiaris
aattcggcacgagcgctgccgtaag

SEQ ID NO: 55864 - DNA, 25 bp, Canis familiaris
aattcggcacgagcagcggtttagc

SEQ ID NO: 55865 - DNA, 25 bp, Canis familiaris
aattctggactggacactggcctta

SEQ ID NO: 55866 - DNA, 25 bp, Canis familiaris
aattctggacagtaagaggacaata

SEQ ID NO: 55867 - DNA, 25 bp, Canis familiaris
aattccgggccatgcaggaatgcat

SEQ ID NO: 55868 - DNA, 25 bp, Canis familiaris
aattctcggcacgtggaggtcagct

SEQ ID NO: 55869 - DNA, 25 bp, Canis familiaris
aattcataccgggtgtgttctgata

SEQ ID NO: 55870 - DNA, 25 bp, Canis familiaris
aatttagatcggtttctctctgaag

SEQ ID NO: 55871 - DNA, 25 bp, Canis familiaris
aattggagattgttttgtgttgaat

SEQ ID NO: 55872 - DNA, 25 bp, Canis familiaris
aattccacattttattttctacata

SEQ ID NO: 55873 - DNA, 25 bp, Canis familiaris
caattccctgttaatctcattttta

SEQ ID NO: 55874 - DNA, 25 bp, Canis familiaris
aattctgtcttgctgatttttttaa

SEQ ID NO: 55875 - DNA, 25 bp, Canis familiaris
aattagttgtttatgtttagtgata

SEQ ID NO: 55876 - DNA, 25 bp, Canis familiaris
aatttatttttcagtttcagatgta

SEQ ID NO: 55877 - DNA, 25 bp, Canis familiaris
aattttttctgtgtgtttacatgct

SEQ ID NO: 55878 - DNA, 25 bp, Canis familiaris
aatttcttcttctttgtttatctgt

SEQ ID NO: 55879 - DNA, 25 bp, Canis familiaris
aattcacccttcatattatatatct

SEQ ID NO: 55880 - DNA, 25 bp, Canis familiaris
aattataccaacatttgatatgcta

SEQ ID NO: 55881 - DNA, 25 bp, Canis familiaris
aattatcagactatctatgtattta

SEQ ID NO: 55882 - DNA, 25 bp, Canis familiaris
aatttcactgtaatttctactctga

SEQ ID NO: 55883 - DNA, 25 bp, Canis familiaris
aattcccctgaaatgtctcgtagag

SEQ ID NO: 55884 - DNA, 25 bp, Canis familiaris
aattcacccgagtggcacttgagag

SEQ ID NO: 55885 - DNA, 25 bp, Canis familiaris
aattcccgggattggacataggagg

SEQ ID NO: 55886 - DNA, 25 bp, Canis familiaris
aattcccagtggtaggagctccgac

SEQ ID NO: 55887 - DNA, 25 bp, Canis familiaris
aattgcttttgttagcgacccatac

SEQ ID NO: 55888 - DNA, 25 bp, Canis familiaris
aattttcttctatgtgggcactgcc

SEQ ID NO: 55889 - DNA, 25 bp, Canis familiaris
aattttctatctaagtttatgctct

SEQ ID NO: 55890 - DNA, 25 bp, Canis familiaris
aattttgttccaaacattacattga

SEQ ID NO: 55891 - DNA, 25 bp, Canis familiaris
aatttatgttactccttgatctttg

SEQ ID NO: 55892 - DNA, 25 bp, Canis familiaris
aattttctggtaccctggatctagg

SEQ ID NO: 55893 - DNA, 25 bp, Canis familiaris
aatttcttgtatttcttgtgcatta

SEQ ID NO: 55894 - DNA, 25 bp, Canis familiaris
aatttcatttcatagcttgttgcat

SEQ ID NO: 55895 - DNA, 25 bp, Canis familiaris
aattctcttccatatgttgttgtaa

SEQ ID NO: 55896 - DNA, 25 bp, Canis familiaris
aatttttcttccttcgattgctgaa

SEQ ID NO: 55897 - DNA, 25 bp, Canis familiaris
aatttattgtgtccgttgctttgaa

SEQ ID NO: 55898 - DNA, 25 bp, Canis familiaris
aattttgtgatagtccttgatttag

SEQ ID NO: 55899 - DNA, 25 bp, Canis familiaris
aatttcatctatactctcttttcta

SEQ ID NO: 55900 - DNA, 25 bp, Canis familiaris
aatttactatcatctgctttctctg

SEQ ID NO: 55901 - DNA, 25 bp, Canis familiaris
aatttatctattgatccttcctcgg

SEQ ID NO: 55902 - DNA, 25 bp, Canis familiaris
aattctatctgtattaacaccttgg

SEQ ID NO: 55903 - DNA, 25 bp, Canis familiaris
aattctcaggatgtctacagacctt

SEQ ID NO: 55904 - DNA, 25 bp, Canis familiaris
aattcatcaggtttgcccaatccat

SEQ ID NO: 55905 - DNA, 25 bp, Canis familiaris
aattacagattcgatctccacacac

SEQ ID NO: 55906 - DNA, 25 bp, Canis familiaris
aattcacagcttctccaagcatcac

SEQ ID NO: 55907 - DNA, 25 bp, Canis familiaris
aattacatcattttcactggctaaa

SEQ ID NO: 55908 - DNA, 25 bp, Canis familiaris
aattgagacagttttcatccataac

SEQ ID NO: 55909 - DNA, 25 bp, Canis familiaris
aattggacgccattcttcaatctca

SEQ ID NO: 55910 - DNA, 25 bp, Canis familiaris
aattttcccatgtttcctatgcagt

SEQ ID NO: 55911 - DNA, 25 bp, Canis familiaris
aattattccttggtcatacattggg

SEQ ID NO: 55912 - DNA, 25 bp, Canis familiaris
aattttcacatgatgatctgactaa

SEQ ID NO: 55913 - DNA, 25 bp, Canis familiaris
aattagcccatgattctgcaggtca

SEQ ID NO: 55914 - DNA, 25 bp, Canis familiaris
aattcagccacgtatttcagaaaag

SEQ ID NO: 55915 - DNA, 25 bp, Canis familiaris
aattcactcaggattcaggaaagaa

SEQ ID NO: 55916 - DNA, 25 bp, Canis familiaris
aattaatccccttcagtaacaggag

SEQ ID NO: 55917 - DNA, 25 bp, Canis familiaris
aattattctcccatttactgctgaa

SEQ ID NO: 55918 - DNA, 25 bp, Canis familiaris
cacttctttcccatttttcataaat

SEQ ID NO: 55919 - DNA, 25 bp, Canis familiaris
cacttctttcccatttttcataaat

SEQ ID NO: 55920 - DNA, 25 bp, Canis familiaris
caatcttctctctcgtttttaaaat

SEQ ID NO: 55921 - DNA, 25 bp, Canis familiaris
aattgattcacctgtttttgataag

SEQ ID NO: 55922 - DNA, 25 bp, Canis familiaris
caattgtgccagcctggtttggtaa

SEQ ID NO: 55923 - DNA, 25 bp, Canis familiaris
aattttcagcactctcttggctaaa

SEQ ID NO: 55924 - DNA, 25 bp, Canis familiaris
aattttgcagcatttttgtggaata

SEQ ID NO: 55925 - DNA, 25 bp, Canis familiaris
aattgtgctgcattccattttaaaa

SEQ ID NO: 55926 - DNA, 25 bp, Canis familiaris
aattgctgctgcttcatttttaaaa

SEQ ID NO: 55927 - DNA, 25 bp, Canis familiaris
aattctagcttctctgcattaaaca

SEQ ID NO: 55928 - DNA, 25 bp, Canis familiaris
aatttatcctccgtgattcaaacct

SEQ ID NO: 55929 - DNA, 25 bp, Canis familiaris
aatttataatccttgactgatcata

SEQ ID NO: 55930 - DNA, 25 bp, Canis familiaris
aattatatatatgcctgattactgc

SEQ ID NO: 55931 - DNA, 25 bp, Canis familiaris
caatatatgattaatccttttccgg

SEQ ID NO: 55932 - DNA, 25 bp, Canis familiaris
aattcacattttgttcagctcctct

SEQ ID NO: 55933 - DNA, 25 bp, Canis familiaris
aattcaatgaatttttcctctctac

SEQ ID NO: 55934 - DNA, 25 bp, Canis familiaris
aattcaagaatctcaacaccaccct

SEQ ID NO: 55935 - DNA, 25 bp, Canis familiaris
aattgaggtaaattcacacccctgg

SEQ ID NO: 55936 - DNA, 25 bp, Canis familiaris
aattgtggttagctacagccaactt

SEQ ID NO: 55937 - DNA, 25 bp, Canis familiaris
caatctgtgagcactgttgacaccc

SEQ ID NO: 55938 - DNA, 25 bp, Canis familiaris
caattgtgaattctaaaccctgctc

SEQ ID NO: 55939 - DNA, 25 bp, Canis familiaris
aattgggcatttttccaccttgatc

SEQ ID NO: 55940 - DNA, 25 bp, Canis familiaris
caaggaggttttaccccatgtgcca

SEQ ID NO: 55941 - DNA, 25 bp, Canis familiaris
caaccaggggcgcaacctgatggcg

SEQ ID NO: 55942 - DNA, 25 bp, Canis familiaris
caatcgcttgggtaaaccgagggtg

SEQ ID NO: 55943 - DNA, 25 bp, Canis familiaris
aattgcttggtttggacctggcggt

SEQ ID NO: 55944 - DNA, 25 bp, Canis familiaris
aattattgcctcaaggacacctgaa

SEQ ID NO: 55945 - DNA, 25 bp, Canis familiaris
aattcacacattggcggatcacgga

SEQ ID NO: 55946 - DNA, 25 bp, Canis familiaris
aattcaacggcacagtcaaggccga

SEQ ID NO: 55947 - DNA, 25 bp, Canis familiaris
aattaacccaaattcatgggcaata

SEQ ID NO: 55948 - DNA, 25 bp, Canis familiaris
aattagtccctatccaggagcagat

SEQ ID NO: 55949 - DNA, 25 bp, Canis familiaris
aattttgcccaacagaggacatgag

SEQ ID NO: 55950 - DNA, 25 bp, Canis familiaris
aattatctctactgcctatgaacat

SEQ ID NO: 55951 - DNA, 25 bp, Canis familiaris
aattgacaccagtgactcgaagatg

SEQ ID NO: 55952 - DNA, 25 bp, Canis familiaris
aattacagccgttcattcgatcaga

SEQ ID NO: 55953 - DNA, 25 bp, Canis familiaris
aattaagctctcctatttgcatcaa

SEQ ID NO: 55954 - DNA, 25 bp, Canis familiaris
aattatatttcagttgttgcctcaa

SEQ ID NO: 55955 - DNA, 25 bp, Canis familiaris
caatctgtaaactgtgtatcccaag

SEQ ID NO: 55956 - DNA, 25 bp, Canis familiaris
caatattttaattcagtgtcccaaa

SEQ ID NO: 55957 - DNA, 25 bp, Canis familiaris
caaagtatgttctcgtggtcctaag

SEQ ID NO: 55958 - DNA, 25 bp, Canis familiaris
caatttatttgctgcgggtagcttt

SEQ ID NO: 55959 - DNA, 25 bp, Canis familiaris
cagtagttcttccagggcagtggtg

SEQ ID NO: 55960 - DNA, 25 bp, Canis familiaris
cacttttggtccaagcagcctggtg

SEQ ID NO: 55961 - DNA, 25 bp, Canis familiaris
cactttttataatagcccgtgcttg

SEQ ID NO: 55962 - DNA, 25 bp, Canis familiaris
cattattttatagaacgaggtgtaa

SEQ ID NO: 55963 - DNA, 25 bp, Canis familiaris
caatactttaactacctcacaggat

SEQ ID NO: 55964 - DNA, 25 bp, Canis familiaris
aattctgttagtacacttacaagtg

SEQ ID NO: 55965 - DNA, 25 bp, Canis familiaris
aattcttatgaaaccccaagcagga

SEQ ID NO: 55966 - DNA, 25 bp, Canis familiaris
aattccatctaaaatgcccaaaggt

SEQ ID NO: 55967 - DNA, 25 bp, Canis familiaris
aattgaactaaatcccacaatgctt

SEQ ID NO: 55968 - DNA, 25 bp, Canis familiaris
aattaacatgcataccttaaactta

SEQ ID NO: 55969 - DNA, 25 bp, Canis familiaris
aattgagacattcacttttctactt

SEQ ID NO: 55970 - DNA, 25 bp, Canis familiaris
aattaactgacttctctgttcttca

SEQ ID NO: 55971 - DNA, 25 bp, Canis familiaris
aattcaactagttcctgtgtctgcc

SEQ ID NO: 55972 - DNA, 25 bp, Canis familiaris
aattctactaattgccatgtggact

SEQ ID NO: 55973 - DNA, 25 bp, Canis familiaris
aattcatcctcttggatcagtgcta

SEQ ID NO: 55974 - DNA, 25 bp, Canis familiaris
aattctggttcgcatcagttcactc

SEQ ID NO: 55975 - DNA, 25 bp, Canis familiaris
aattctatgtatcttttctgaccac

SEQ ID NO: 55976 - DNA, 25 bp, Canis familiaris
aattctcaacacattttggaccatt

SEQ ID NO: 55977 - DNA, 25 bp, Canis familiaris
aattctgtaatcttttttgactctt

SEQ ID NO: 55978 - DNA, 25 bp, Canis familiaris
aattcttaactgatcaagtccttgc

SEQ ID NO: 55979 - DNA, 25 bp, Canis familiaris
aattagttggctctacattcctcat

SEQ ID NO: 55980 - DNA, 25 bp, Canis familiaris
aattgaaatgtctgtactgatcctc

SEQ ID NO: 55981 - DNA, 25 bp, Canis familiaris
aattgggagtcactggcactgatcc

SEQ ID NO: 55982 - DNA, 25 bp, Canis familiaris
aattggctaatcctccattgtacac

SEQ ID NO: 55983 - DNA, 25 bp, Canis familiaris
aattgtggaatctttctgagtagca

SEQ ID NO: 55984 - DNA, 25 bp, Canis familiaris
aattgtgtacaaatgaaagctagaa

SEQ ID NO: 55985 - DNA, 25 bp, Canis familiaris
aattgattcctcttgaaagttattt

SEQ ID NO: 55986 - DNA, 25 bp, Canis familiaris
aattgatgtcctcctgcaacagatt

SEQ ID NO: 55987 - DNA, 25 bp, Canis familiaris
aattattcctacatatcattctaca

SEQ ID NO: 55988 - DNA, 25 bp, Canis familiaris
aattattactctatcttttagcatt

SEQ ID NO: 55989 - DNA, 25 bp, Canis familiaris
caattttatctccttcatacttacc

SEQ ID NO: 55990 - DNA, 25 bp, Canis familiaris
caattcattttcctacagactaccc

SEQ ID NO: 55991 - DNA, 25 bp, Canis familiaris
caatcttctttccttgagaacactt

SEQ ID NO: 55992 - DNA, 25 bp, Canis familiaris
caagtctgctttcttgaccaagcct

SEQ ID NO: 55993 - DNA, 25 bp, Canis familiaris
caagccattggtatctaccggcctg

SEQ ID NO: 55994 - DNA, 25 bp, Canis familiaris
aattttggtgtggacatcgggcctg

SEQ ID NO: 55995 - DNA, 25 bp, Canis familiaris
aattgctctgggtaacacaggactt

SEQ ID NO: 55996 - DNA, 25 bp, Canis familiaris
aattgagggagtccagcaccggatt

SEQ ID NO: 55997 - DNA, 25 bp, Canis familiaris
tcaattcgggggctaggggttacat

SEQ ID NO: 55998 - DNA, 25 bp, Canis familiaris
caattccgttctgtacgggggactg

SEQ ID NO: 55999 - DNA, 25 bp, Canis familiaris
caactcgaggttgtacttagtgggt

SEQ ID NO: 56000 - DNA, 25 bp, Canis familiaris
cagtccaaggttgtggctgtttggc

SEQ ID NO: 56001 - DNA, 25 bp, Canis familiaris
tagtagtaggttgtggcccttctgg

SEQ ID NO: 56002 - DNA, 25 bp, Canis familiaris
gagtttagagtcagaggtcctttgg

SEQ ID NO: 56003 - DNA, 25 bp, Canis familiaris
aattctaaactatcgtgcctgttgg

SEQ ID NO: 56004 - DNA, 25 bp, Canis familiaris
aattctaaagtttcacacactgtca

SEQ ID NO: 56005 - DNA, 25 bp, Canis familiaris
aattctgtaggagttcatagttgta

SEQ ID NO: 56006 - DNA, 25 bp, Canis familiaris
aattctccgaggtctcaagtatata

SEQ ID NO: 56007 - DNA, 25 bp, Canis familiaris
aattcccttgtattgctcagtattc

SEQ ID NO: 56008 - DNA, 25 bp, Canis familiaris
aattacgattcttgatgtgcagcta

SEQ ID NO: 56009 - DNA, 25 bp, Canis familiaris
caatccccatcagtatgtggcagaa

SEQ ID NO: 56010 - DNA, 25 bp, Canis familiaris
aattcacacagcttgatgttagaga

SEQ ID NO: 56011 - DNA, 25 bp, Canis familiaris
aattaagcatgttgtcttagatttt

SEQ ID NO: 56012 - DNA, 25 bp, Canis familiaris
aattccagctttactgtgaagttct

SEQ ID NO: 56013 - DNA, 25 bp, Canis familiaris
caattcggactctctggacagtgct

SEQ ID NO: 56014 - DNA, 25 bp, Canis familiaris
aattgcattagtttctttagaatgt

SEQ ID NO: 56015 - DNA, 25 bp, Canis familiaris
caattgttgttcccattttttgtag

SEQ ID NO: 56016 - DNA, 25 bp, Canis familiaris
aattgttgcattaagttcattttag

SEQ ID NO: 56017 - DNA, 25 bp, Canis familiaris
aattgtatgctttcagaataaatta

SEQ ID NO: 56018 - DNA, 25 bp, Canis familiaris
aattgctactgtacacacacgcacg

SEQ ID NO: 56019 - DNA, 25 bp, Canis familiaris
aattcattcatgtttcacatctgaa

SEQ ID NO: 56020 - DNA, 25 bp, Canis familiaris
aattaacagatttcagcataagaat

SEQ ID NO: 56021 - DNA, 25 bp, Canis familiaris
aattctacgatccccataagcagta

SEQ ID NO: 56022 - DNA, 25 bp, Canis familiaris
caatcttacgacctccagatcatcg

SEQ ID NO: 56023 - DNA, 25 bp, Canis familiaris
caatcgtcacgttcgaatagctcga

SEQ ID NO: 56024 - DNA, 25 bp, Canis familiaris
caatcccactcgtccagaacagtga

SEQ ID NO: 56025 - DNA, 25 bp, Canis familiaris
caatctttcctggtcagactcggac

SEQ ID NO: 56026 - DNA, 25 bp, Canis familiaris
caatctcattccagttactctcgat

SEQ ID NO: 56027 - DNA, 25 bp, Canis familiaris
caatacattccaaattaccccttgt

SEQ ID NO: 56028 - DNA, 25 bp, Canis familiaris
caaaatttaaagcacttcctcttct

SEQ ID NO: 56029 - DNA, 25 bp, Canis familiaris
caataaaataaactccttccgcctg

SEQ ID NO: 56030 - DNA, 25 bp, Canis familiaris
caataaagtttattcctctcctgct

SEQ ID NO: 56031 - DNA, 25 bp, Canis familiaris
caataaagtctttgaactgcccaaa

SEQ ID NO: 56032 - DNA, 25 bp, Canis familiaris
caataaagactaaccaagcctcaaa

SEQ ID NO: 56033 - DNA, 25 bp, Canis familiaris
caataaaagcaattccaacctcaaa

SEQ ID NO: 56034 - DNA, 25 bp, Canis familiaris
caaggaaaacttccagcagcccttc

SEQ ID NO: 56035 - DNA, 25 bp, Canis familiaris
caatgatgaccagcttacgggccac

SEQ ID NO: 56036 - DNA, 25 bp, Canis familiaris
caaggccacacatttacttgtccac

SEQ ID NO: 56037 - DNA, 25 bp, Canis familiaris
aattgcacaatttccagtactccac

SEQ ID NO: 56038 - DNA, 25 bp, Canis familiaris
aattgacagctcttctacattttat

SEQ ID NO: 56039 - DNA, 25 bp, Canis familiaris
aattgaagctgctataccatatatg

SEQ ID NO: 56040 - DNA, 25 bp, Canis familiaris
caagtatagctgatattcttatgga

SEQ ID NO: 56041 - DNA, 25 bp, Canis familiaris
caagcttgggaaagaatttggacca

SEQ ID NO: 56042 - DNA, 25 bp, Canis familiaris
caagaagtggaaacacgtatgaacc

SEQ ID NO: 56043 - DNA, 25 bp, Canis familiaris
caagccgaggaccacggcttaacac

SEQ ID NO: 56044 - DNA, 25 bp, Canis familiaris
caacctagaactcaactactaacct

SEQ ID NO: 56045 - DNA, 25 bp, Canis familiaris
caacccgacactcaagtaaaggtca

SEQ ID NO: 56046 - DNA, 25 bp, Canis familiaris
caaccagaaattctggcccgggtcg

SEQ ID NO: 56047 - DNA, 25 bp, Canis familiaris
cacactcaggagttttagaccgggt

SEQ ID NO: 56048 - DNA, 25 bp, Canis familiaris
caattactaactttggatccgggca

SEQ ID NO: 56049 - DNA, 25 bp, Canis familiaris
aattcacttattgtactccttggca

SEQ ID NO: 56050 - DNA, 25 bp, Canis familiaris
aattctctatttgacttctttggtt

SEQ ID NO: 56051 - DNA, 25 bp, Canis familiaris
aattgatcttgaactacgacttagg

SEQ ID NO: 56052 - DNA, 25 bp, Canis familiaris
aattacattacatttctgactttga

SEQ ID NO: 56053 - DNA, 25 bp, Canis familiaris
aattagcactaatctggcactttat

SEQ ID NO: 56054 - DNA, 25 bp, Canis familiaris
aattcaccttgattctggcactatc

SEQ ID NO: 56055 - DNA, 25 bp, Canis familiaris
aattcaactgccaattccactagta

SEQ ID NO: 56056 - DNA, 25 bp, Canis familiaris
aattacaggccaatatccctgagga

SEQ ID NO: 56057 - DNA, 25 bp, Canis familiaris
aattcaaggcacaatcccttggcta

SEQ ID NO: 56058 - DNA, 25 bp, Canis familiaris
aattcatgggcaatatctacttacc

SEQ ID NO: 56059 - DNA, 25 bp, Canis familiaris
aattcagcaagcatttatctcatga

SEQ ID NO: 56060 - DNA, 25 bp, Canis familiaris
aattcacaacttttcatctatagat

SEQ ID NO: 56061 - DNA, 25 bp, Canis familiaris
aattgccatttcttttccaagcatt

SEQ ID NO: 56062 - DNA, 25 bp, Canis familiaris
aattccattattctatcacacttta

SEQ ID NO: 56063 - DNA, 25 bp, Canis familiaris
caagcaccttttataacactttgat

SEQ ID NO: 56064 - DNA, 25 bp, Canis familiaris
caagatgcttgtgtaaaaccctata

SEQ ID NO: 56065 - DNA, 25 bp, Canis familiaris
caattctttgccgatgaaaccgata

SEQ ID NO: 56066 - DNA, 25 bp, Canis familiaris
aattcatttgacgtcgataggccat

SEQ ID NO: 56067 - DNA, 25 bp, Canis familiaris
aattcatatgtccctcgtgaggctg

SEQ ID NO: 56068 - DNA, 25 bp, Canis familiaris
aattccatggcaccgtcaaggctga

SEQ ID NO: 56069 - DNA, 25 bp, Canis familiaris
caatatccgactccccaagttagtc

SEQ ID NO: 56070 - DNA, 25 bp, Canis familiaris
aattccgatcatacgaacgcttttc

SEQ ID NO: 56071 - DNA, 25 bp, Canis familiaris
caaccccaaagggacgcgctttgcg

SEQ ID NO: 56072 - DNA, 25 bp, Canis familiaris
caagtcccagaaagagtccttctct

SEQ ID NO: 56073 - DNA, 25 bp, Canis familiaris
caatcctacagggtggtgcgtggcc

SEQ ID NO: 56074 - DNA, 25 bp, Canis familiaris
cccctacgccgtgtgaatcaggcca

SEQ ID NO: 56075 - DNA, 25 bp, Canis familiaris
cccctacgccgtgtgaatcaggcca

SEQ ID NO: 56076 - DNA, 25 bp, Canis familiaris
cccctacgccgtgtgaatcaggcca

SEQ ID NO: 56077 - DNA, 25 bp, Canis familiaris
cccctacgccgtgtgaatcaggcca

SEQ ID NO: 56078 - DNA, 25 bp, Canis familiaris
cccctttccgtcttgaaatggcgcg

SEQ ID NO: 56079 - DNA, 25 bp, Canis familiaris
cccaccttcggagtttgaagccgct

SEQ ID NO: 56080 - DNA, 25 bp, Canis familiaris
caaccctttggaatgtaactgccct

SEQ ID NO: 56081 - DNA, 25 bp, Canis familiaris
aattcccgggatattgagtctccat

SEQ ID NO: 56082 - DNA, 25 bp, Canis familiaris
aattcccgggatcggtgatgatccc

SEQ ID NO: 56083 - DNA, 25 bp, Canis familiaris
aattcccgggattgggcatctgcct

SEQ ID NO: 56084 - DNA, 25 bp, Canis familiaris
aattccctgtgtgtgaacactgcta

SEQ ID NO: 56085 - DNA, 25 bp, Canis familiaris
aattctgttttgcctgatacacagt

SEQ ID NO: 56086 - DNA, 25 bp, Canis familiaris
aattcagattttccagactcacaga

SEQ ID NO: 56087 - DNA, 25 bp, Canis familiaris
aattcatcatgtatggagctctcaa

SEQ ID NO: 56088 - DNA, 25 bp, Canis familiaris
aattcatctaaaggagctcacacca

SEQ ID NO: 56089 - DNA, 25 bp, Canis familiaris
aattctctcaaaagacggcatctat

SEQ ID NO: 56090 - DNA, 25 bp, Canis familiaris
aattgctataataccactgtggctt

SEQ ID NO: 56091 - DNA, 25 bp, Canis familiaris
caatcgctgaaccacccaggtggtt

SEQ ID NO: 56092 - DNA, 25 bp, Canis familiaris
caatgcaggcaaggaaacagttact

SEQ ID NO: 56093 - DNA, 25 bp, Canis familiaris
caaggcgcagctacagagggttcac

SEQ ID NO: 56094 - DNA, 25 bp, Canis familiaris
aattcagagacaaagtggcaccact

SEQ ID NO: 56095 - DNA, 25 bp, Canis familiaris
aattgcaagtcagcatggggcccta

SEQ ID NO: 56096 - DNA, 25 bp, Canis familiaris
aattgggtagagaggcacttctaat

SEQ ID NO: 56097 - DNA, 25 bp, Canis familiaris
caattggttaagtgctgcctttagc

SEQ ID NO: 56098 - DNA, 25 bp, Canis familiaris
caattggttaaacctctgccttcag

SEQ ID NO: 56099 - DNA, 25 bp, Canis familiaris
caatgtatgttatcattattcctac

SEQ ID NO: 56100 - DNA, 25 bp, Canis familiaris
caattatgccaatcacatcttccca

SEQ ID NO: 56101 - DNA, 25 bp, Canis familiaris
cacttagcctaagatgtctcaaaac

SEQ ID NO: 56102 - DNA, 25 bp, Canis familiaris
caatatacctatttgtgtccaacca

SEQ ID NO: 56103 - DNA, 25 bp, Canis familiaris
aattgttcctcaaggtagcaacctg

SEQ ID NO: 56104 - DNA, 25 bp, Canis familiaris
caatcttccccaaggtggccaagtg

SEQ ID NO: 56105 - DNA, 25 bp, Canis familiaris
caatttgctcgtcaggtctgccaat

SEQ ID NO: 56106 - DNA, 25 bp, Canis familiaris
caattactgagtcatctgtctgccc

SEQ ID NO: 56107 - DNA, 25 bp, Canis familiaris
caataattcagtgtcgtcttcccgt

SEQ ID NO: 56108 - DNA, 25 bp, Canis familiaris
caataaatcgtactcatgtctccct

SEQ ID NO: 56109 - DNA, 25 bp, Canis familiaris
caataggctctgaaggcagttctca

SEQ ID NO: 56110 - DNA, 25 bp, Canis familiaris
caatcaggtctattcatcaggataa

SEQ ID NO: 56111 - DNA, 25 bp, Canis familiaris
caatcatctctcatatctcaagtga

SEQ ID NO: 56112 - DNA, 25 bp, Canis familiaris
caatttttttctcagattgtcttta

SEQ ID NO: 56113 - DNA, 25 bp, Canis familiaris
aattcttccctcatggatcatgcct

SEQ ID NO: 56114 - DNA, 25 bp, Canis familiaris
caattttccccagtgaattcctgag

SEQ ID NO: 56115 - DNA, 25 bp, Canis familiaris
aattctaccacttagaaatagctag

SEQ ID NO: 56116 - DNA, 25 bp, Canis familiaris
aattctcccacttaaaatctatcag

SEQ ID NO: 56117 - DNA, 25 bp, Canis familiaris
caatttctccttttaaatatgtaga

SEQ ID NO: 56118 - DNA, 25 bp, Canis familiaris
aattgcttttatttcaagacattag

SEQ ID NO: 56119 - DNA, 25 bp, Canis familiaris
aattgcagtttattgccactattta

SEQ ID NO: 56120 - DNA, 25 bp, Canis familiaris
caatgtattgcttttccctatttgg

SEQ ID NO: 56121 - DNA, 25 bp, Canis familiaris
caatctagtgtgtgttacttttgct

SEQ ID NO: 56122 - DNA, 25 bp, Canis familiaris
aattaattcatcgttcatctctcat

SEQ ID NO: 56123 - DNA, 25 bp, Canis familiaris
aattgtattatcctttcatagcatt

SEQ ID NO: 56124 - DNA, 25 bp, Canis familiaris
aattgcatattcactgctgtacagt

SEQ ID NO: 56125 - DNA, 25 bp, Canis familiaris
aattgattcatgacccactaatgtg

SEQ ID NO: 56126 - DNA, 25 bp, Canis familiaris
caattcgtgagatccacaaagtgga

SEQ ID NO: 56127 - DNA, 25 bp, Canis familiaris
caatcgggtcatgccacaaagctgg

SEQ ID NO: 56128 - DNA, 25 bp, Canis familiaris
caacgggacttgtccaaagtgtccg

SEQ ID NO: 56129 - DNA, 25 bp, Canis familiaris
caaccagtggtatcaaccagttcct

SEQ ID NO: 56130 - DNA, 25 bp, Canis familiaris
caatccagtggtgtcaatgagcgtt

SEQ ID NO: 56131 - DNA, 25 bp, Canis familiaris
aattgcagtggtgcatctagcgcct

SEQ ID NO: 56132 - DNA, 25 bp, Canis familiaris
caattgcactgagtcgcacatcccg

SEQ ID NO: 56133 - DNA, 25 bp, Canis familiaris
aattgacagatttaatcctcaggga

SEQ ID NO: 56134 - DNA, 25 bp, Canis familiaris
aattcatcgtctaaatcgtcacagg

SEQ ID NO: 56135 - DNA, 25 bp, Canis familiaris
aattcactgatctatcaacagtaat

SEQ ID NO: 56136 - DNA, 25 bp, Canis familiaris
aattcacatgagcacagtcctggag

SEQ ID NO: 56137 - DNA, 25 bp, Canis familiaris
aattctagagctaatacatgccgac

SEQ ID NO: 56138 - DNA, 25 bp, Canis familiaris
aattctagagctaatacatgccgac

SEQ ID NO: 56139 - DNA, 25 bp, Canis familiaris
caattctcagcacttcatacatgtc

SEQ ID NO: 56140 - DNA, 25 bp, Canis familiaris
caatctcactggtctcaaattcact

SEQ ID NO: 56141 - DNA, 25 bp, Canis familiaris
caatgtcaatagcccaaaaactttc

SEQ ID NO: 56142 - DNA, 25 bp, Canis familiaris
caaggaaagcctgagaagcccccgt

SEQ ID NO: 56143 - DNA, 25 bp, Canis familiaris
caatcggaagccgagaacgcccttc

SEQ ID NO: 56144 - DNA, 25 bp, Canis familiaris
caatctgccataaaagccactccgt

SEQ ID NO: 56145 - DNA, 25 bp, Canis familiaris
aattgccaatgagactacaagctgt

SEQ ID NO: 56146 - DNA, 25 bp, Canis familiaris
caattgccagagacagttacatagt

SEQ ID NO: 56147 - DNA, 25 bp, Canis familiaris
aattctgcaacttgtatccatacta

SEQ ID NO: 56148 - DNA, 25 bp, Canis familiaris
caataagcatactgtcctctagcca

SEQ ID NO: 56149 - DNA, 25 bp, Canis familiaris
caattaagcatctgactttggctca

SEQ ID NO: 56150 - DNA, 25 bp, Canis familiaris
aattcaaatctcgtgttgggctcca

SEQ ID NO: 56151 - DNA, 25 bp, Canis familiaris
aattcataatccgttctttccactt

SEQ ID NO: 56152 - DNA, 25 bp, Canis familiaris
caattctgaatccttgtttttccct

SEQ ID NO: 56153 - DNA, 25 bp, Canis familiaris
caatcttcaggccatatgtttactc

SEQ ID NO: 56154 - DNA, 25 bp, Canis familiaris
aattctctgtgccaacattgctttc

SEQ ID NO: 56155 - DNA, 25 bp, Canis familiaris
aattccatgctcctatatgcgtata

SEQ ID NO: 56156 - DNA, 25 bp, Canis familiaris
aattctctgatccattgtcattagc

SEQ ID NO: 56157 - DNA, 25 bp, Canis familiaris
aattcatagatcctctgttcttgcc

SEQ ID NO: 56158 - DNA, 25 bp, Canis familiaris
aattcattatctgttccttgcaatc

SEQ ID NO: 56159 - DNA, 25 bp, Canis familiaris
aattctttatttacctatcagccac

SEQ ID NO: 56160 - DNA, 25 bp, Canis familiaris
aattctgaaatttgaccttagttgc

SEQ ID NO: 56161 - DNA, 25 bp, Canis familiaris
aattctctagatccatgactctgtt

SEQ ID NO: 56162 - DNA, 25 bp, Canis familiaris
aattctaacatatgactgctgtatc

SEQ ID NO: 56163 - DNA, 25 bp, Canis familiaris
aattgccagaagtaactgctgtgca

SEQ ID NO: 56164 - DNA, 25 bp, Canis familiaris
aattcctggataatagctgtgtcat

SEQ ID NO: 56165 - DNA, 25 bp, Canis familiaris
aattgcttggcacttctgtatgtat

SEQ ID NO: 56166 - DNA, 25 bp, Canis familiaris
aattctgggcagcctctgaatgaaa

SEQ ID NO: 56167 - DNA, 25 bp, Canis familiaris
aattctggaggcccgatctgaaatc

SEQ ID NO: 56168 - DNA, 25 bp, Canis familiaris
aattctccaacctattctgacaatc

SEQ ID NO: 56169 - DNA, 25 bp, Canis familiaris
caatctctctcataaatacatacat

SEQ ID NO: 56170 - DNA, 25 bp, Canis familiaris
aattgctcttccaataagaaatcta

SEQ ID NO: 56171 - DNA, 25 bp, Canis familiaris
aattgcgattcactatacaggatat

SEQ ID NO: 56172 - DNA, 25 bp, Canis familiaris
aattctagtcctttcagagattccc

SEQ ID NO: 56173 - DNA, 25 bp, Canis familiaris
aattggtgtcctttgcacagttagc

SEQ ID NO: 56174 - DNA, 25 bp, Canis familiaris
aattggcgatccttgtcaaagagag

SEQ ID NO: 56175 - DNA, 25 bp, Canis familiaris
aattggctggccttctgaacagaaa

SEQ ID NO: 56176 - DNA, 25 bp, Canis familiaris
aattggcttgtgcttagaagtcatg

SEQ ID NO: 56177 - DNA, 25 bp, Canis familiaris
aattggcctgtgagtagatattatc

SEQ ID NO: 56178 - DNA, 25 bp, Canis familiaris
caattagggcattagtagtttgtcc

SEQ ID NO: 56179 - DNA, 25 bp, Canis familiaris
aattcagagtcttatgttggagtgt

SEQ ID NO: 56180 - DNA, 25 bp, Canis familiaris
caattcgagtaaagctttgtgttta

SEQ ID NO: 56181 - DNA, 25 bp, Canis familiaris
aattcaggtgtttgcttatctttgt

SEQ ID NO: 56182 - DNA, 25 bp, Canis familiaris
aattcatgtttttgtattctttgag

SEQ ID NO: 56183 - DNA, 25 bp, Canis familiaris
aattctgttgtttgtattaaatctt

SEQ ID NO: 56184 - DNA, 25 bp, Canis familiaris
aattcttttcaacttataacactat

SEQ ID NO: 56185 - DNA, 25 bp, Canis familiaris
aattcttttcagtcctataatcatt

SEQ ID NO: 56186 - DNA, 25 bp, Canis familiaris
aattctattaagttgctatgttttc

SEQ ID NO: 56187 - DNA, 25 bp, Canis familiaris
aattccactcaacttttgagttgtc

SEQ ID NO: 56188 - DNA, 25 bp, Canis familiaris
aattccccagagctgctagagactg

SEQ ID NO: 56189 - DNA, 25 bp, Canis familiaris
caatatcccaaagggcggcagccgc

SEQ ID NO: 56190 - DNA, 25 bp, Canis familiaris
aattctcgcaaatgggacatctcga

SEQ ID NO: 56191 - DNA, 25 bp, Canis familiaris
aattcttgaagaggttgtactgcag

SEQ ID NO: 56192 - DNA, 25 bp, Canis familiaris
aattccgaatgcgtctgttatctaa

SEQ ID NO: 56193 - DNA, 25 bp, Canis familiaris
aattcctaatgcctgtttactgcta

SEQ ID NO: 56194 - DNA, 25 bp, Canis familiaris
caatatgcctttgtgtcttatgtga

SEQ ID NO: 56195 - DNA, 25 bp, Canis familiaris
aattccattctggtgttgtctgctg

SEQ ID NO: 56196 - DNA, 25 bp, Canis familiaris
aattgcagaattgcgttgccctgat

SEQ ID NO: 56197 - DNA, 25 bp, Canis familiaris
caattgcaggtattaattgcgggat

SEQ ID NO: 56198 - DNA, 25 bp, Canis familiaris
caatcagcctgttctacttggtgaa

SEQ ID NO: 56199 - DNA, 25 bp, Canis familiaris
caatagcacctgtagatcctgttta

SEQ ID NO: 56200 - DNA, 25 bp, Canis familiaris
caattcctctggtaaatgtctgtat

SEQ ID NO: 56201 - DNA, 25 bp, Canis familiaris
aattgcacctggtaactgtcgcata

SEQ ID NO: 56202 - DNA, 25 bp, Canis familiaris
caattctcaccttaacttctgcaaa

SEQ ID NO: 56203 - DNA, 25 bp, Canis familiaris
caatccgcaccattacgtgtgccac

SEQ ID NO: 56204 - DNA, 25 bp, Canis familiaris
caatcggaccaatctgttcacagct

SEQ ID NO: 56205 - DNA, 25 bp, Canis familiaris
aattctgtgcaaacctgttccattc

SEQ ID NO: 56206 - DNA, 25 bp, Canis familiaris
aattcttaatcagcttgtcttgttt

SEQ ID NO: 56207 - DNA, 25 bp, Canis familiaris
aattcttatagggtcatctcttttt

SEQ ID NO: 56208 - DNA, 25 bp, Canis familiaris
aattgtatttgtttgcctttatgtt

SEQ ID NO: 56209 - DNA, 25 bp, Canis familiaris
aattgtcattttttggttgtccagt

SEQ ID NO: 56210 - DNA, 25 bp, Canis familiaris
aattctctttctactgaggtttcac

SEQ ID NO: 56211 - DNA, 25 bp, Canis familiaris
aattcttttgcactgttggcgcttc

SEQ ID NO: 56212 - DNA, 25 bp, Canis familiaris
aattcttcattggtgtgctttcctc

SEQ ID NO: 56213 - DNA, 25 bp, Canis familiaris
aattcattgcacttttctttcaata

SEQ ID NO: 56214 - DNA, 25 bp, Canis familiaris
aattctctggtgatgttaatcaata

SEQ ID NO: 56215 - DNA, 25 bp, Canis familiaris
aattgcactttaatttgcacactaa

SEQ ID NO: 56216 - DNA, 25 bp, Canis familiaris
aattggctttttaggaacaccagca

SEQ ID NO: 56217 - DNA, 25 bp, Canis familiaris
aattggtctattgaggcatttcctt

SEQ ID NO: 56218 - DNA, 25 bp, Canis familiaris
aattggtttgtcgatggctttcttc

SEQ ID NO: 56219 - DNA, 25 bp, Canis familiaris
aattgtttattggcctgtttctttg

SEQ ID NO: 56220 - DNA, 25 bp, Canis familiaris
aattgttaattatcagctctactat

SEQ ID NO: 56221 - DNA, 25 bp, Canis familiaris
aattggccaatgtaaggttaaatag

SEQ ID NO: 56222 - DNA, 25 bp, Canis familiaris
aattggacacatttcactgttcaaa

SEQ ID NO: 56223 - DNA, 25 bp, Canis familiaris
caattggccacttccacggagtgaa

SEQ ID NO: 56224 - DNA, 25 bp, Canis familiaris
caattggcggtaaccgggggcaatg

SEQ ID NO: 56225 - DNA, 25 bp, Canis familiaris
caatgaaggtgaaggccggcgggcg

SEQ ID NO: 56226 - DNA, 25 bp, Canis familiaris
caatgtggggcagcccagggggctc

SEQ ID NO: 56227 - DNA, 25 bp, Canis familiaris
aattgggaattcctttgctgggcca

SEQ ID NO: 56228 - DNA, 25 bp, Canis familiaris
aattgggactgtgtttgggagcctc

SEQ ID NO: 56229 - DNA, 25 bp, Canis familiaris
aattgttgtggtgttggtgggtctg

SEQ ID NO: 56230 - DNA, 25 bp, Canis familiaris
aattgtgctgctgtttaggggggga

SEQ ID NO: 56231 - DNA, 25 bp, Canis familiaris
aattctgctgctgtgatggggtgtg

SEQ ID NO: 56232 - DNA, 25 bp, Canis familiaris
aattctgcactttgacagtggtggc

SEQ ID NO: 56233 - DNA, 25 bp, Canis familiaris
caatttcctcctgactgtgatggcc

SEQ ID NO: 56234 - DNA, 25 bp, Canis familiaris
caattttgtcagttacgtgtgtaaa

SEQ ID NO: 56235 - DNA, 25 bp, Canis familiaris
aattctagtcagctgacctgagtct

SEQ ID NO: 56236 - DNA, 25 bp, Canis familiaris
caatggtagacaccatgcccgcaag

SEQ ID NO: 56237 - DNA, 25 bp, Canis familiaris
caatgttgacacttatggcttaact

SEQ ID NO: 56238 - DNA, 25 bp, Canis familiaris
caatttgtcgactatgtgctttcaa

SEQ ID NO: 56239 - DNA, 25 bp, Canis familiaris
caattgctgttactttgcttcaaga

SEQ ID NO: 56240 - DNA, 25 bp, Canis familiaris
aattgttccatttctgtgacataga

SEQ ID NO: 56241 - DNA, 25 bp, Canis familiaris
aattgtgactcattctcttgtatag

SEQ ID NO: 56242 - DNA, 25 bp, Canis familiaris
aattgagcatcttttcatgtgtcta

SEQ ID NO: 56243 - DNA, 25 bp, Canis familiaris
caattgtgattgctgtgctgcctct

SEQ ID NO: 56244 - DNA, 25 bp, Canis familiaris
aattgtgattgaagaccatttagta

SEQ ID NO: 56245 - DNA, 25 bp, Canis familiaris
caatctggtggaacacacctgtgag

SEQ ID NO: 56246 - DNA, 25 bp, Canis familiaris
caatcacactggacctccaagtgag

SEQ ID NO: 56247 - DNA, 25 bp, Canis familiaris
caatcacacttcaaatccgactcaa

SEQ ID NO: 56248 - DNA, 25 bp, Canis familiaris
caatcaatcctcacagtcaacatct

SEQ ID NO: 56249 - DNA, 25 bp, Canis familiaris
caatcattcctccatctgtaggtta

SEQ ID NO: 56250 - DNA, 25 bp, Canis familiaris
caatgcatttcccactgtaagtttc

SEQ ID NO: 56251 - DNA, 25 bp, Canis familiaris
cagtttctgccctgtagtggttcga

SEQ ID NO: 56252 - DNA, 25 bp, Canis familiaris
caatccctccgggtggtgagttcga

SEQ ID NO: 56253 - DNA, 25 bp, Canis familiaris
caacctcgacgggtggcatcgttaa

SEQ ID NO: 56254 - DNA, 25 bp, Canis familiaris
caacttcgggtgtggaagagctgaa

SEQ ID NO: 56255 - DNA, 25 bp, Canis familiaris
cggcccggagggcaaggacgacaag

SEQ ID NO: 56256 - DNA, 25 bp, Canis familiaris
cacgcccgtagtgtagggtcagggg

SEQ ID NO: 56257 - DNA, 25 bp, Canis familiaris
caatcctcggagtcctagggtcgag

SEQ ID NO: 56258 - DNA, 25 bp, Canis familiaris
caatgactcggacttccagggtccc

SEQ ID NO: 56259 - DNA, 25 bp, Canis familiaris
caatgcctagtgcctggcaagaggc

SEQ ID NO: 56260 - DNA, 25 bp, Canis familiaris
caatctcaagagctgctgcagaaaa

SEQ ID NO: 56261 - DNA, 25 bp, Canis familiaris
caatcgtcatgaggagatggaacat

SEQ ID NO: 56262 - DNA, 25 bp, Canis familiaris
caatcaacatgctggtgaaggtgaa

SEQ ID NO: 56263 - DNA, 25 bp, Canis familiaris
caatgcaagacttgttgccaatatg

SEQ ID NO: 56264 - DNA, 25 bp, Canis familiaris
caatcaaaagtgtaccatctcaagg

SEQ ID NO: 56265 - DNA, 25 bp, Canis familiaris
caatgaatacggctacagcaacagg

SEQ ID NO: 56266 - DNA, 25 bp, Canis familiaris
caaagaccaggactaacccaggttg

SEQ ID NO: 56267 - DNA, 25 bp, Canis familiaris
caataccttggccttaagaatttgg

SEQ ID NO: 56268 - DNA, 25 bp, Canis familiaris
caatcccttgggcccatggagattt

SEQ ID NO: 56269 - DNA, 25 bp, Canis familiaris
caagtcctggggccacgtgaatgtg

SEQ ID NO: 56270 - DNA, 25 bp, Canis familiaris
aattcgcaccggtcacagggatgtc

SEQ ID NO: 56271 - DNA, 25 bp, Canis familiaris
aattgcacctctctacagggtggac

SEQ ID NO: 56272 - DNA, 25 bp, Canis familiaris
aattcgccttcagcaaggagtggaa

SEQ ID NO: 56273 - DNA, 25 bp, Canis familiaris
caattgggcccatcaacttgaggaa

SEQ ID NO: 56274 - DNA, 25 bp, Canis familiaris
aattgggcccatgatggtctgattg

SEQ ID NO: 56275 - DNA, 25 bp, Canis familiaris
aattgggcccatgaaactgtctacc

SEQ ID NO: 56276 - DNA, 25 bp, Canis familiaris
aattgaccaggctcacaactgtttc

SEQ ID NO: 56277 - DNA, 25 bp, Canis familiaris
aattgtcactgtcatcagaatctgt

SEQ ID NO: 56278 - DNA, 25 bp, Canis familiaris
aattgagcttgttgaccaacttgca

SEQ ID NO: 56279 - DNA, 25 bp, Canis familiaris
aattggtcatgtcaccagcacaatg

SEQ ID NO: 56280 - DNA, 25 bp, Canis familiaris
caattggctatgttcccagcaaact

SEQ ID NO: 56281 - DNA, 25 bp, Canis familiaris
aattgccttattcagacagagatct

SEQ ID NO: 56282 - DNA, 25 bp, Canis familiaris
caattgaccttcctagaagcagagc

SEQ ID NO: 56283 - DNA, 25 bp, Canis familiaris
caatatggccgtcctggaggtgcct

SEQ ID NO: 56284 - DNA, 25 bp, Canis familiaris
caacatctcggtgcgaacgtcttca

SEQ ID NO: 56285 - DNA, 25 bp, Canis familiaris
caatttcgtatctagaaccctctga

SEQ ID NO: 56286 - DNA, 25 bp, Canis familiaris
aattgtgaattctaaaccctgctct

SEQ ID NO: 56287 - DNA, 25 bp, Canis familiaris
aattctgtagtctccagacctcttg

SEQ ID NO: 56288 - DNA, 25 bp, Canis familiaris
caattttagcctgctcttgaccttg

SEQ ID NO: 56289 - DNA, 25 bp, Canis familiaris
caattaaagctcttcctgcaacctt

SEQ ID NO: 56290 - DNA, 25 bp, Canis familiaris
caataaaaccatcgcctgccaagac

SEQ ID NO: 56291 - DNA, 25 bp, Canis familiaris
caataaaactatcacaccctgcttc

SEQ ID NO: 56292 - DNA, 25 bp, Canis familiaris
caataagccctaaacactcacttgg

SEQ ID NO: 56293 - DNA, 25 bp, Canis familiaris
cactgaaccactaaattcaccctga

SEQ ID NO: 56294 - DNA, 25 bp, Canis familiaris
caatacccagctgtatgtcacacct

SEQ ID NO: 56295 - DNA, 25 bp, Canis familiaris
caatatcccagtatcaaactcccct

SEQ ID NO: 56296 - DNA, 25 bp, Canis familiaris
caattctcaaggacatcataacccc

SEQ ID NO: 56297 - DNA, 25 bp, Canis familiaris
caatggcccagtcatcaaggcccca

SEQ ID NO: 56298 - DNA, 25 bp, Canis familiaris
caatggcaacagctttgccacccga

SEQ ID NO: 56299 - DNA, 25 bp, Canis familiaris
cacgggaaccaaatgccaaacggag

SEQ ID NO: 56300 - DNA, 25 bp, Canis familiaris
cacgggaactcggtccatcaatttg

SEQ ID NO: 56301 - DNA, 25 bp, Canis familiaris
caagggaacaagctacacttttcta

SEQ ID NO: 56302 - DNA, 25 bp, Canis familiaris
caaggccaaccgatatttttctcca

SEQ ID NO: 56303 - DNA, 25 bp, Canis familiaris
caagtaaacctccaatcttacccat

SEQ ID NO: 56304 - DNA, 25 bp, Canis familiaris
caagtaggacctcaacacacacaga

SEQ ID NO: 56305 - DNA, 25 bp, Canis familiaris
caatggggatagaccaccccaccag

SEQ ID NO: 56306 - DNA, 25 bp, Canis familiaris
caagggggagatgaccacctacttc

SEQ ID NO: 56307 - DNA, 25 bp, Canis familiaris
caagggtgaagatacaagtcttaac

SEQ ID NO: 56308 - DNA, 25 bp, Canis familiaris
caaggaggacagcaacgggctaata

SEQ ID NO: 56309 - DNA, 25 bp, Canis familiaris
caagaaagacgggccctgggtctag

SEQ ID NO: 56310 - DNA, 25 bp, Canis familiaris
caatgggcaaaggcctccggttaag

SEQ ID NO: 56311 - DNA, 25 bp, Canis familiaris
caacaaagtcagattccctttaaat

SEQ ID NO: 56312 - DNA, 25 bp, Canis familiaris
caataaactcaccttctcctgaaaa

SEQ ID NO: 56313 - DNA, 25 bp, Canis familiaris
caaagtacctggaacatcctttaag

SEQ ID NO: 56314 - DNA, 25 bp, Canis familiaris
cacacctaccggggcaacttattgg

SEQ ID NO: 56315 - DNA, 25 bp, Canis familiaris
caacgtgaccggcgaactgtactgg

SEQ ID NO: 56316 - DNA, 25 bp, Canis familiaris
caagggacgacgagaacttccggcg

SEQ ID NO: 56317 - DNA, 25 bp, Canis familiaris
caaggggaggcgttgaagcttccag

SEQ ID NO: 56318 - DNA, 25 bp, Canis familiaris
caagtgacggggcttgtcatgccca

SEQ ID NO: 56319 - DNA, 25 bp, Canis familiaris
tagggagaccggctagtacccttct

SEQ ID NO: 56320 - DNA, 25 bp, Canis familiaris
caacgtgcccggcatttactacttc

SEQ ID NO: 56321 - DNA, 25 bp, Canis familiaris
caacgtcaacgtcatcttaaatttc

SEQ ID NO: 56322 - DNA, 25 bp, Canis familiaris
caacgtcgggtcctgtcttagaatc

SEQ ID NO: 56323 - DNA, 25 bp, Canis familiaris
caatcgtgctggtttttctctgagc

SEQ ID NO: 56324 - DNA, 25 bp, Canis familiaris
caatgtatcattgttggattctgac

SEQ ID NO: 56325 - DNA, 25 bp, Canis familiaris
caatgtcatcaacggtggttcccat

SEQ ID NO: 56326 - DNA, 25 bp, Canis familiaris
caatgacctgagggtggggccctgg

SEQ ID NO: 56327 - DNA, 25 bp, Canis familiaris
caatgacactggctttgtggacctc

SEQ ID NO: 56328 - DNA, 25 bp, Canis familiaris
caaggcctttttggctgataccatc

SEQ ID NO: 56329 - DNA, 25 bp, Canis familiaris
caacgtcctaggtgtcaaccacagg

SEQ ID NO: 56330 - DNA, 25 bp, Canis familiaris
caaggacctttatgccaacaacgtg

SEQ ID NO: 56331 - DNA, 25 bp, Canis familiaris
caaggaccgcttattagatccactg

SEQ ID NO: 56332 - DNA, 25 bp, Canis familiaris
caatgggccaccttcttaagcccaa

SEQ ID NO: 56333 - DNA, 25 bp, Canis familiaris
caatgaggtgcctttcttaaccgac

SEQ ID NO: 56334 - DNA, 25 bp, Canis familiaris
caaggggcctgagtttgtacgcaac

SEQ ID NO: 56335 - DNA, 25 bp, Canis familiaris
caatcagagtgccggttcttacgag

SEQ ID NO: 56336 - DNA, 25 bp, Canis familiaris
caataggtgaagctctggccttgag

SEQ ID NO: 56337 - DNA, 25 bp, Canis familiaris
caataaagatctccaggccctgtgg

SEQ ID NO: 56338 - DNA, 25 bp, Canis familiaris
caagcacattcagtcaaaggccatt

SEQ ID NO: 56339 - DNA, 25 bp, Canis familiaris
caagctgcactacaaacccaatcgc

SEQ ID NO: 56340 - DNA, 25 bp, Canis familiaris
caatgagcgtttaaaccaagaagcc

SEQ ID NO: 56341 - DNA, 25 bp, Canis familiaris
caatgggtgttcctcaacaagaagt

SEQ ID NO: 56342 - DNA, 25 bp, Canis familiaris
caagtggatttcctgcccagggaag

SEQ ID NO: 56343 - DNA, 25 bp, Canis familiaris
caagatgagatgattgatgtcatcg

SEQ ID NO: 56344 - DNA, 25 bp, Canis familiaris
aattgcaggcaactgatgtccctcg

SEQ ID NO: 56345 - DNA, 25 bp, Canis familiaris
aattgggccagtggattctcgcagg

SEQ ID NO: 56346 - DNA, 25 bp, Canis familiaris
aattggccctgaagttctagcatgt

SEQ ID NO: 56347 - DNA, 25 bp, Canis familiaris
aattgctacctactttctgttgttt

SEQ ID NO: 56348 - DNA, 25 bp, Canis familiaris
caattgtacttccttttgtattctt

SEQ ID NO: 56349 - DNA, 25 bp, Canis familiaris
aattgcatactcctcagttagtcat

SEQ ID NO: 56350 - DNA, 25 bp, Canis familiaris
aattgatccccttatatgtgcacat

SEQ ID NO: 56351 - DNA, 25 bp, Canis familiaris
aattgacccagaagataggcatatg

SEQ ID NO: 56352 - DNA, 25 bp, Canis familiaris
aattgcccaaagcacaggtgattca

SEQ ID NO: 56353 - DNA, 25 bp, Canis familiaris
aattgcccaacaccaagatgcgatc

SEQ ID NO: 56354 - DNA, 25 bp, Canis familiaris
caattgcccaaggtccatggctgcg

SEQ ID NO: 56355 - DNA, 25 bp, Canis familiaris
caatcccagacagcccaggatgtag

SEQ ID NO: 56356 - DNA, 25 bp, Canis familiaris
caatcaagaggtggcccagcagatt

SEQ ID NO: 56357 - DNA, 25 bp, Canis familiaris
caatcacaggagagcccgcaagcaa

SEQ ID NO: 56358 - DNA, 25 bp, Canis familiaris
caatatgaagcgtgtctgccaagaa

SEQ ID NO: 56359 - DNA, 25 bp, Canis familiaris
caattctagcttctctgcattaaac

SEQ ID NO: 56360 - DNA, 25 bp, Canis familiaris
caatttttctcttctcatcataaca

SEQ ID NO: 56361 - DNA, 25 bp, Canis familiaris
caattttgcctgtatctccatgaaa

SEQ ID NO: 56362 - DNA, 25 bp, Canis familiaris
aattgtcacctgttttcaagactta

SEQ ID NO: 56363 - DNA, 25 bp, Canis familiaris
aattgtctcctttcctgaaggctgt

SEQ ID NO: 56364 - DNA, 25 bp, Canis familiaris
aattgttttttcctgagacgcagtt

SEQ ID NO: 56365 - DNA, 25 bp, Canis familiaris
aattgtcttttcatgtagcccactt

SEQ ID NO: 56366 - DNA, 25 bp, Canis familiaris
caatggttctaagcttcaggcctct

SEQ ID NO: 56367 - DNA, 25 bp, Canis familiaris
caaggctcactaggtttctggtcct

SEQ ID NO: 56368 - DNA, 25 bp, Canis familiaris
caagtcatccaagggttgcgggcct

SEQ ID NO: 56369 - DNA, 25 bp, Canis familiaris
caaggctgaaagggaaaccgcctat

SEQ ID NO: 56370 - DNA, 25 bp, Canis familiaris
caaggggcaagcccaaagctccctt

SEQ ID NO: 56371 - DNA, 25 bp, Canis familiaris
caacgggcagttcaagacctacgct

SEQ ID NO: 56372 - DNA, 25 bp, Canis familiaris
caatggggagttcactacccttctg

SEQ ID NO: 56373 - DNA, 25 bp, Canis familiaris
caaggcggaaacgcgccgccaactg

SEQ ID NO: 56374 - DNA, 25 bp, Canis familiaris
caagagcagagagacccagcctaga

SEQ ID NO: 56375 - DNA, 25 bp, Canis familiaris
caagatacacgcagcctatgcctgg

SEQ ID NO: 56376 - DNA, 25 bp, Canis familiaris
caagcagattccactctgaggtcag

SEQ ID NO: 56377 - DNA, 25 bp, Canis familiaris
caatgcgggcacacgctcttacagt

SEQ ID NO: 56378 - DNA, 25 bp, Canis familiaris
caatgcgggcacacgctcttacagt

SEQ ID NO: 56379 - DNA, 25 bp, Canis familiaris
caatggttgagcagctgtcttcagc

SEQ ID NO: 56380 - DNA, 25 bp, Canis familiaris
caaggaaatgcatgcgtgcccagtg

SEQ ID NO: 56381 - DNA, 25 bp, Canis familiaris
caagtagaattctcatcccatgatg

SEQ ID NO: 56382 - DNA, 25 bp, Canis familiaris
caatgctggatcgttttcccacatg

SEQ ID NO: 56383 - DNA, 25 bp, Canis familiaris
caaggagattgtggttcccagcctg

SEQ ID NO: 56384 - DNA, 25 bp, Canis familiaris
caaggaatctgtcttctcgcagtgc

SEQ ID NO: 56385 - DNA, 25 bp, Canis familiaris
caaggaggctggtttcgagaggccc

SEQ ID NO: 56386 - DNA, 25 bp, Canis familiaris
caatggacgggttttgggagaccag

SEQ ID NO: 56387 - DNA, 25 bp, Canis familiaris
caaggacgtggtctgaggggcctag

SEQ ID NO: 56388 - DNA, 25 bp, Canis familiaris
caaggtttgtgtttgaagaggtttg

SEQ ID NO: 56389 - DNA, 25 bp, Canis familiaris
caacgttgggttcgacagcgggatt

SEQ ID NO: 56390 - DNA, 25 bp, Canis familiaris
caaccttgtttagtgccagcgatta

SEQ ID NO: 56391 - DNA, 25 bp, Canis familiaris
caagccttagttcattacgatctcc

SEQ ID NO: 56392 - DNA, 25 bp, Canis familiaris
caagttccatttcttatcgactccg

SEQ ID NO: 56393 - DNA, 25 bp, Canis familiaris
caagatttttttttgccacagctcc

SEQ ID NO: 56394 - DNA, 25 bp, Canis familiaris
caagttctgtttggaggccacaaga

SEQ ID NO: 56395 - DNA, 25 bp, Canis familiaris
caagcgccttacgaaaggcggcaaa

SEQ ID NO: 56396 - DNA, 25 bp, Canis familiaris
catacagtcctatcaagggggaaag

SEQ ID NO: 56397 - DNA, 25 bp, Canis familiaris
caaatgtagcttttggggagggaag

SEQ ID NO: 56398 - DNA, 25 bp, Canis familiaris
aattgtggcacttggggcgaggaca

SEQ ID NO: 56399 - DNA, 25 bp, Canis familiaris
aattgttgcctcggcagctggtgcg

SEQ ID NO: 56400 - DNA, 25 bp, Canis familiaris
aattgggctgtttggtggtgctgga

SEQ ID NO: 56401 - DNA, 25 bp, Canis familiaris
aattggtgtcttgtggtggatgtca

SEQ ID NO: 56402 - DNA, 25 bp, Canis familiaris
aattggtgttctttgcagaagatgt

SEQ ID NO: 56403 - DNA, 25 bp, Canis familiaris
aattggtatttattcataggcagtt

SEQ ID NO: 56404 - DNA, 25 bp, Canis familiaris
caattggttcctttctagtgccttt

SEQ ID NO: 56405 - DNA, 25 bp, Canis familiaris
caaattgacgcccttcaaggccttt

SEQ ID NO: 56406 - DNA, 25 bp, Canis familiaris
caaattaggctcctttttgacttat

SEQ ID NO: 56407 - DNA, 25 bp, Canis familiaris
taagacccgttatctttgactttct

SEQ ID NO: 56408 - DNA, 25 bp, Canis familiaris
caaacccgttgcactgttaccaacg

SEQ ID NO: 56409 - DNA, 25 bp, Canis familiaris
caatacacctttgttgttcttcctc

SEQ ID NO: 56410 - DNA, 25 bp, Canis familiaris
caataaactccggttgtgtttcaca

SEQ ID NO: 56411 - DNA, 25 bp, Canis familiaris
caataaatacctttctttggtcaag

SEQ ID NO: 56412 - DNA, 25 bp, Canis familiaris
caataaaaccactctttctggccaa

SEQ ID NO: 56413 - DNA, 25 bp, Canis familiaris
caataaaaggcatgtgttcccccca

SEQ ID NO: 56414 - DNA, 25 bp, Canis familiaris
caataacaggtctgtgatgccctta

SEQ ID NO: 56415 - DNA, 25 bp, Canis familiaris
caataacaggtctgtgatgccctta

SEQ ID NO: 56416 - DNA, 25 bp, Canis familiaris
caataggcaggaccggactcacttc

SEQ ID NO: 56417 - DNA, 25 bp, Canis familiaris
caatagagccgtacagctgccttct

SEQ ID NO: 56418 - DNA, 25 bp, Canis familiaris
caatatgacccatcacgtgcttttg

SEQ ID NO: 56419 - DNA, 25 bp, Canis familiaris
caattggccaaaccggaattcggat

SEQ ID NO: 56420 - DNA, 25 bp, Canis familiaris
caattggtcaaagaggtgtccgcag

SEQ ID NO: 56421 - DNA, 25 bp, Canis familiaris
caatatacttttccaggttcccagc

SEQ ID NO: 56422 - DNA, 25 bp, Canis familiaris
caagatatttttgaggtccccctct

SEQ ID NO: 56423 - DNA, 25 bp, Canis familiaris
cacaagttggttgagagttccccct

SEQ ID NO: 56424 - DNA, 25 bp, Canis familiaris
caaggtgggaagggagattcacccg

SEQ ID NO: 56425 - DNA, 25 bp, Canis familiaris
caagggggagggcatttgggctctg

SEQ ID NO: 56426 - DNA, 25 bp, Canis familiaris
caagctggagggtggtgtgggcctt

SEQ ID NO: 56427 - DNA, 25 bp, Canis familiaris
caattggagggttgctgccagggca

SEQ ID NO: 56428 - DNA, 25 bp, Canis familiaris
caattccgggttcgacagagacacc

SEQ ID NO: 56429 - DNA, 25 bp, Canis familiaris
caatgtcctgggtccgaagtcagtg

SEQ ID NO: 56430 - DNA, 25 bp, Canis familiaris
caatgccgtcggtgatgggtcttgg

SEQ ID NO: 56431 - DNA, 25 bp, Canis familiaris
caattagtctagggatgtgtgtgtg

SEQ ID NO: 56432 - DNA, 25 bp, Canis familiaris
caatcggttggtcggtttgtgtcgt

SEQ ID NO: 56433 - DNA, 25 bp, Canis familiaris
caatctggtttgaggtgtgtgtatg

SEQ ID NO: 56434 - DNA, 25 bp, Canis familiaris
aattggtcctgagatgctgcttttc

SEQ ID NO: 56435 - DNA, 25 bp, Canis familiaris
aattggtaccaaatctgtctgatac

SEQ ID NO: 56436 - DNA, 25 bp, Canis familiaris
caatatggtaccattctggcctcca

SEQ ID NO: 56437 - DNA, 25 bp, Canis familiaris
caattgttcccaatttgggcttggg

SEQ ID NO: 56438 - DNA, 25 bp, Canis familiaris
caatgtgttttccttttccttgagg

SEQ ID NO: 56439 - DNA, 25 bp, Canis familiaris
caatgtgttttctttaatcctggtt

SEQ ID NO: 56440 - DNA, 25 bp, Canis familiaris
caaggttgttcaataaagtgatttt

SEQ ID NO: 56441 - DNA, 25 bp, Canis familiaris
caagagttgtttgcaaacttttgta

SEQ ID NO: 56442 - DNA, 25 bp, Canis familiaris
caaggtttgtcccacaaccaactga

SEQ ID NO: 56443 - DNA, 25 bp, Canis familiaris
cacaagttatgtgggaacctggaaa

SEQ ID NO: 56444 - DNA, 25 bp, Canis familiaris
caaggccatagtggtaaccaggaga

SEQ ID NO: 56445 - DNA, 25 bp, Canis familiaris
caaggccaagtttctacaggaagcg

SEQ ID NO: 56446 - DNA, 25 bp, Canis familiaris
caaggacatatggaatccacaggaa

SEQ ID NO: 56447 - DNA, 25 bp, Canis familiaris
caaggaaaggccaaccaggcggcgc

SEQ ID NO: 56448 - DNA, 25 bp, Canis familiaris
caaggaagggtcgtcgtggtgggca

SEQ ID NO: 56449 - DNA, 25 bp, Canis familiaris
caaggaatccgggctcggggacagc

SEQ ID NO: 56450 - DNA, 25 bp, Canis familiaris
caaggagttgtaggtcggtgtgacg

SEQ ID NO: 56451 - DNA, 25 bp, Canis familiaris
caaggcaggctccgcagttagagga

SEQ ID NO: 56452 - DNA, 25 bp, Canis familiaris
caatacgtgcttccaatgttgaggt

SEQ ID NO: 56453 - DNA, 25 bp, Canis familiaris
caatgtctgcagttacaatggtagc

SEQ ID NO: 56454 - DNA, 25 bp, Canis familiaris
caatttcataattcactgatctatc

SEQ ID NO: 56455 - DNA, 25 bp, Canis familiaris
aattgtcacaataccaactgtcccc

SEQ ID NO: 56456 - DNA, 25 bp, Canis familiaris
aattgatctcattgaccagaattca

SEQ ID NO: 56457 - DNA, 25 bp, Canis familiaris
caatctctccaatgccagaattata

SEQ ID NO: 56458 - DNA, 25 bp, Canis familiaris
caatccacccaaggtgtttgataat

SEQ ID NO: 56459 - DNA, 25 bp, Canis familiaris
caatccaatcatgagggttctatcc

SEQ ID NO: 56460 - DNA, 25 bp, Canis familiaris
caatcctatcaaaccattttacctg

SEQ ID NO: 56461 - DNA, 25 bp, Canis familiaris
caatccacaataaccttcaggccac

SEQ ID NO: 56462 - DNA, 25 bp, Canis familiaris
caaaagccaacgctatcaggccagc

SEQ ID NO: 56463 - DNA, 25 bp, Canis familiaris
caatgaagcctaccttgcaaagccc

SEQ ID NO: 56464 - DNA, 25 bp, Canis familiaris
caataacccttcaatcagccagagc

SEQ ID NO: 56465 - DNA, 25 bp, Canis familiaris
caatgagcactccttcaacaacttc

SEQ ID NO: 56466 - DNA, 25 bp, Canis familiaris
caatgaccccttcattgacctcaac

SEQ ID NO: 56467 - DNA, 25 bp, Canis familiaris
caagaaccgattccaggatcccagc

SEQ ID NO: 56468 - DNA, 25 bp, Canis familiaris
caaggacgggtgaggcatcctccgg

SEQ ID NO: 56469 - DNA, 25 bp, Canis familiaris
caagtactcggtgtggatcggcggc

SEQ ID NO: 56470 - DNA, 25 bp, Canis familiaris
caagtttcgtgggggaccgcagaat

SEQ ID NO: 56471 - DNA, 25 bp, Canis familiaris
caatctgtgatgggggtcgacctct

SEQ ID NO: 56472 - DNA, 25 bp, Canis familiaris
caatcatgatgttggggaccctctt

SEQ ID NO: 56473 - DNA, 25 bp, Canis familiaris
caatatgtgtccagggatcccgggg

SEQ ID NO: 56474 - DNA, 25 bp, Canis familiaris
caatgcccactcaggagatccctgg

SEQ ID NO: 56475 - DNA, 25 bp, Canis familiaris
caatccctgtcaatgtgagccccag

SEQ ID NO: 56476 - DNA, 25 bp, Canis familiaris
caatacctggattggtcacctgggc

SEQ ID NO: 56477 - DNA, 25 bp, Canis familiaris
caatcctctggatggcatcctctga

SEQ ID NO: 56478 - DNA, 25 bp, Canis familiaris
caatatcttgatggctgtccctcta

SEQ ID NO: 56479 - DNA, 25 bp, Canis familiaris
caattgatggtggccatgcctcttc

SEQ ID NO: 56480 - DNA, 25 bp, Canis familiaris
caattcaggatgctctggctgcttc

SEQ ID NO: 56481 - DNA, 25 bp, Canis familiaris
aattgtaatgtgttggctttctcta

SEQ ID NO: 56482 - DNA, 25 bp, Canis familiaris
aattgtcacagtttgtactttcaac

SEQ ID NO: 56483 - DNA, 25 bp, Canis familiaris
aattgtctcaatttgtactatctgt

SEQ ID NO: 56484 - DNA, 25 bp, Canis familiaris
caattactcaatttgcaactatctg

SEQ ID NO: 56485 - DNA, 25 bp, Canis familiaris
caatttcttctcttgaactcagctc

SEQ ID NO: 56486 - DNA, 25 bp, Canis familiaris
caattgtcttacttggttagccatt

SEQ ID NO: 56487 - DNA, 25 bp, Canis familiaris
caatttctcttgtatgagtttcctt

SEQ ID NO: 56488 - DNA, 25 bp, Canis familiaris
caattttactggtttttctctgctt

SEQ ID NO: 56489 - DNA, 25 bp, Canis familiaris
caataaaacgtgcttttctctctta

SEQ ID NO: 56490 - DNA, 25 bp, Canis familiaris
caataaaacgtgcttttctctcttg

SEQ ID NO: 56491 - DNA, 25 bp, Canis familiaris
caataaaacagccctttccatacct

SEQ ID NO: 56492 - DNA, 25 bp, Canis familiaris
cacagaataatacatttgtcattac

SEQ ID NO: 56493 - DNA, 25 bp, Canis familiaris
caagtcatttccagcttgtcgtcac

SEQ ID NO: 56494 - DNA, 25 bp, Canis familiaris
caagctgaaaccactatggggcctg

SEQ ID NO: 56495 - DNA, 25 bp, Canis familiaris
caagggacacactgcttggagggtc

SEQ ID NO: 56496 - DNA, 25 bp, Canis familiaris
caatgggaaagctcttcgaggggag

SEQ ID NO: 56497 - DNA, 25 bp, Canis familiaris
caatgggagaacccctcgagtggag

SEQ ID NO: 56498 - DNA, 25 bp, Canis familiaris
caattttgacctcccatctggggaa

SEQ ID NO: 56499 - DNA, 25 bp, Canis familiaris
caacttttccgggacttctcggatg

SEQ ID NO: 56500 - DNA, 25 bp, Canis familiaris
caactttgccactgactttctggga

SEQ ID NO: 56501 - DNA, 25 bp, Canis familiaris
caagtttgccgtggagctagagggg

SEQ ID NO: 56502 - DNA, 25 bp, Canis familiaris
caatgtttacaggggctcggatggg

SEQ ID NO: 56503 - DNA, 25 bp, Canis familiaris
caactcctaagtacagacgaatcga

SEQ ID NO: 56504 - DNA, 25 bp, Canis familiaris
caatccctaccaagagagggagtca

SEQ ID NO: 56505 - DNA, 25 bp, Canis familiaris
caactttgacctcagggtaggacgg

SEQ ID NO: 56506 - DNA, 25 bp, Canis familiaris
cactccctgaccctggggtaggtag

SEQ ID NO: 56507 - DNA, 25 bp, Canis familiaris
caatcgccggccctagggatatggg

SEQ ID NO: 56508 - DNA, 25 bp, Canis familiaris
caatgcgtctgtccgcgtttaaggg

SEQ ID NO: 56509 - DNA, 25 bp, Canis familiaris
caagatggccccggttgtaaggtga

SEQ ID NO: 56510 - DNA, 25 bp, Canis familiaris
caagaagcccacaactttttaatgg

SEQ ID NO: 56511 - DNA, 25 bp, Canis familiaris
caagcccccagtgtttgtattttga

SEQ ID NO: 56512 - DNA, 25 bp, Canis familiaris
caaccccatcaagcttaccttttgg

SEQ ID NO: 56513 - DNA, 25 bp, Canis familiaris
caatccttgctaaacttaccatgtt

SEQ ID NO: 56514 - DNA, 25 bp, Canis familiaris
caacctgttaaccatgtaccagtga

SEQ ID NO: 56515 - DNA, 25 bp, Canis familiaris
caacctggtaaccatatacccgtga

SEQ ID NO: 56516 - DNA, 25 bp, Canis familiaris
caatgactagtctcttaaccctgag

SEQ ID NO: 56517 - DNA, 25 bp, Canis familiaris
caagatcgcgtttcggaacaacgag

SEQ ID NO: 56518 - DNA, 25 bp, Canis familiaris
caagatcgagctctgcttgggttct

SEQ ID NO: 56519 - DNA, 25 bp, Canis familiaris
caattccatgccttctttggtttcc

SEQ ID NO: 56520 - DNA, 25 bp, Canis familiaris
caagtgtcatccttctttggaaccc

SEQ ID NO: 56521 - DNA, 25 bp, Canis familiaris
caatggtgcaacgtcttcctgaacc

SEQ ID NO: 56522 - DNA, 25 bp, Canis familiaris
caatagcgacgcgctggcgttacag

SEQ ID NO: 56523 - DNA, 25 bp, Canis familiaris
cagatacgtccgcagggttggcgac

SEQ ID NO: 56524 - DNA, 25 bp, Canis familiaris
caatagcgcacacggcggggtggga

SEQ ID NO: 56525 - DNA, 25 bp, Canis familiaris
caatgggtggggaggagctgcggac

SEQ ID NO: 56526 - DNA, 25 bp, Canis familiaris
caaggtcgagggaggagtccgcaaa

SEQ ID NO: 56527 - DNA, 25 bp, Canis familiaris
caaggtttatgttgtgggtctccaa

SEQ ID NO: 56528 - DNA, 25 bp, Canis familiaris
caaggtctagtttggactgcccgta

SEQ ID NO: 56529 - DNA, 25 bp, Canis familiaris
caaggttctttctagacttccttct

SEQ ID NO: 56530 - DNA, 25 bp, Canis familiaris
caaggttctggttccatgcgttttc

SEQ ID NO: 56531 - DNA, 25 bp, Canis familiaris
caaggcctttattcactgggtgtca

SEQ ID NO: 56532 - DNA, 25 bp, Canis familiaris
caagggatgcccacacggggcttaa

SEQ ID NO: 56533 - DNA, 25 bp, Canis familiaris
caaggttcaccaacacggtggttga

SEQ ID NO: 56534 - DNA, 25 bp, Canis familiaris
caaggtcaagacgcaaggttgtaga

SEQ ID NO: 56535 - DNA, 25 bp, Canis familiaris
caaggtaaggcagcaggctgcgcat

SEQ ID NO: 56536 - DNA, 25 bp, Canis familiaris
caaggtgagttagagctgcagtaat

SEQ ID NO: 56537 - DNA, 25 bp, Canis familiaris
caaggtagtctatgcccttaacatg

SEQ ID NO: 56538 - DNA, 25 bp, Canis familiaris
caatgttacttgagctccttatcct

SEQ ID NO: 56539 - DNA, 25 bp, Canis familiaris
caatatttttagctctattccccag

SEQ ID NO: 56540 - DNA, 25 bp, Canis familiaris
caatggtattcttggtttactcccg

SEQ ID NO: 56541 - DNA, 25 bp, Canis familiaris
caagggtttggggacgacatccctg

SEQ ID NO: 56542 - DNA, 25 bp, Canis familiaris
caactgccaattacgagacgaatcc

SEQ ID NO: 56543 - DNA, 25 bp, Canis familiaris
caatctctacttgcagaacagcccc

SEQ ID NO: 56544 - DNA, 25 bp, Canis familiaris
caatgtcaacgagaaccacgctcca

SEQ ID NO: 56545 - DNA, 25 bp, Canis familiaris
caatgttgacaatataccagctcca

SEQ ID NO: 56546 - DNA, 25 bp, Canis familiaris
caagttcacaagaatatcccttcag

SEQ ID NO: 56547 - DNA, 25 bp, Canis familiaris
caaggaaccaaaattgcgtctgatg

SEQ ID NO: 56548 - DNA, 25 bp, Canis familiaris
caagagttcgcaatatttcccgctg

SEQ ID NO: 56549 - DNA, 25 bp, Canis familiaris
caatgagattcgtgttcctcctgtg

SEQ ID NO: 56550 - DNA, 25 bp, Canis familiaris
caatgaattcctgttcaccactggg

SEQ ID NO: 56551 - DNA, 25 bp, Canis familiaris
caatcaatgctccatttgtcagccc

SEQ ID NO: 56552 - DNA, 25 bp, Canis familiaris
caatcaagctccttttggggaaatg

SEQ ID NO: 56553 - DNA, 25 bp, Canis familiaris
caatcacccctctctgggaagagag

SEQ ID NO: 56554 - DNA, 25 bp, Canis familiaris
caaacctctcccttcaggaaaggtg

SEQ ID NO: 56555 - DNA, 25 bp, Canis familiaris
caacctgttcctcaactgcagaagg

SEQ ID NO: 56556 - DNA, 25 bp, Canis familiaris
caatcccattttacaactgcagcaa

SEQ ID NO: 56557 - DNA, 25 bp, Canis familiaris
caatcaatcctgaagttactgaaca

SEQ ID NO: 56558 - DNA, 25 bp, Canis familiaris
caatcgtcctaactacgtgaaagaa

SEQ ID NO: 56559 - DNA, 25 bp, Canis familiaris
caacctcaataaaacttgtcgtata

SEQ ID NO: 56560 - DNA, 25 bp, Canis familiaris
caatggccaaaaatctttgggatga

SEQ ID NO: 56561 - DNA, 25 bp, Canis familiaris
caatccaccagattttttgagaatc

SEQ ID NO: 56562 - DNA, 25 bp, Canis familiaris
caatgccccctttgatgttggaatc

SEQ ID NO: 56563 - DNA, 25 bp, Canis familiaris
caatgctctcacccttttggtgaat

SEQ ID NO: 56564 - DNA, 25 bp, Canis familiaris
caagttcacgccttattgtcaaaaa

SEQ ID NO: 56565 - DNA, 25 bp, Canis familiaris
caatgatatgaaggccttttgtaag

SEQ ID NO: 56566 - DNA, 25 bp, Canis familiaris
caatatatacagccatcttttctca

SEQ ID NO: 56567 - DNA, 25 bp, Canis familiaris
caatgatgtgactcctgtgttctgc

SEQ ID NO: 56568 - DNA, 25 bp, Canis familiaris
caatagtactgtgcctctttctgaa

SEQ ID NO: 56569 - DNA, 25 bp, Canis familiaris
caagaagagattgcctttttgaaga

SEQ ID NO: 56570 - DNA, 25 bp, Canis familiaris
caataaaggacccttcatttgccaa

SEQ ID NO: 56571 - DNA, 25 bp, Canis familiaris
caatgaaatgaatcctcctcttcca

SEQ ID NO: 56572 - DNA, 25 bp, Canis familiaris
caataacaaacatctcagcctaccc

SEQ ID NO: 56573 - DNA, 25 bp, Canis familiaris
caatcgaggaactctgggatcacac

SEQ ID NO: 56574 - DNA, 25 bp, Canis familiaris
caatggcggagaccgtggcggacac

SEQ ID NO: 56575 - DNA, 25 bp, Canis familiaris
caatggcgtgatacggttgactcac

SEQ ID NO: 56576 - DNA, 25 bp, Canis familiaris
caatggtaattgtcgtagatctgca

SEQ ID NO: 56577 - DNA, 25 bp, Canis familiaris
caatgcgcttttgcccagaatgcac

SEQ ID NO: 56578 - DNA, 25 bp, Canis familiaris
caaggcatatgattgctcttcccca

SEQ ID NO: 56579 - DNA, 25 bp, Canis familiaris
caatggaaggtgcctgtcacccacg

SEQ ID NO: 56580 - DNA, 25 bp, Canis familiaris
caataggagagacagccatcccacg

SEQ ID NO: 56581 - DNA, 25 bp, Canis familiaris
caagagtcagatgtaggcagccccg

SEQ ID NO: 56582 - DNA, 25 bp, Canis familiaris
caagtggaggcccagggccctcaag

SEQ ID NO: 56583 - DNA, 25 bp, Canis familiaris
caatcttgcaacagagggccagcca

SEQ ID NO: 56584 - DNA, 25 bp, Canis familiaris
caatgctacaatgggcaggagcccc

SEQ ID NO: 56585 - DNA, 25 bp, Canis familiaris
caaggacatcacacatggcaaccgc

SEQ ID NO: 56586 - DNA, 25 bp, Canis familiaris
caagggatcctttgaaagcacccac

SEQ ID NO: 56587 - DNA, 25 bp, Canis familiaris
caagggtgcccaagtaggaccgcat

SEQ ID NO: 56588 - DNA, 25 bp, Canis familiaris
caaggtccccatcgtggagaacagc

SEQ ID NO: 56589 - DNA, 25 bp, Canis familiaris
caaggatcccccagtgacaacggga

SEQ ID NO: 56590 - DNA, 25 bp, Canis familiaris
caagctgaacgagcacgttaactgg

SEQ ID NO: 56591 - DNA, 25 bp, Canis familiaris
caaggaactgacctttgataaagtc

SEQ ID NO: 56592 - DNA, 25 bp, Canis familiaris
caaggaatttcccatttaagcagac

SEQ ID NO: 56593 - DNA, 25 bp, Canis familiaris
caagggaaaccctattcatcagaca

SEQ ID NO: 56594 - DNA, 25 bp, Canis familiaris
caaggccaaacataaacacgcatac

SEQ ID NO: 56595 - DNA, 25 bp, Canis familiaris
caactaaaaatttcaaatcactact

SEQ ID NO: 56596 - DNA, 25 bp, Canis familiaris
caacaataatactcaacataccttt

SEQ ID NO: 56597 - DNA, 25 bp, Canis familiaris
cagaaccccacttcaggatactttt

SEQ ID NO: 56598 - DNA, 25 bp, Canis familiaris
cactgactcttggtcaacgtttttt

SEQ ID NO: 56599 - DNA, 25 bp, Canis familiaris
cactgaatttcaaaacctgttgtct

SEQ ID NO: 56600 - DNA, 25 bp, Canis familiaris
cacgattttcgacaacgatttccgg

SEQ ID NO: 56601 - DNA, 25 bp, Canis familiaris
cattccttccaacaacaatttaagc

SEQ ID NO: 56602 - DNA, 25 bp, Canis familiaris
cattccttcaaataaagtaatttgg

SEQ ID NO: 56603 - DNA, 25 bp, Canis familiaris
gaaccttcaggacaacagaacttat

SEQ ID NO: 56604 - DNA, 25 bp, Canis familiaris
caactcttcagagaacggatacaaa

SEQ ID NO: 56605 - DNA, 25 bp, Canis familiaris
caactgtgcccaaaggccttacaca

SEQ ID NO: 56606 - DNA, 25 bp, Canis familiaris
caagtgtcaccagagcccaataaga

SEQ ID NO: 56607 - DNA, 25 bp, Canis familiaris
caagtgagaatctccgccgacagag

SEQ ID NO: 56608 - DNA, 25 bp, Canis familiaris
caaggcacaaaagcccagagcacag

SEQ ID NO: 56609 - DNA, 25 bp, Canis familiaris
caaggacactattacctgctagcct

SEQ ID NO: 56610 - DNA, 25 bp, Canis familiaris
caatggccactcaggccgagagcct

SEQ ID NO: 56611 - DNA, 25 bp, Canis familiaris
caaggcgatctcagcagcagcaagt

SEQ ID NO: 56612 - DNA, 25 bp, Canis familiaris
caagggtgcgtcggacaagtgcagc

SEQ ID NO: 56613 - DNA, 25 bp, Canis familiaris
caagatggtcttcggacttcgacgg

SEQ ID NO: 56614 - DNA, 25 bp, Canis familiaris
caatgtgagccccagtcctgtggat

SEQ ID NO: 56615 - DNA, 25 bp, Canis familiaris
caatgcagtgctttcagtcacttgg

SEQ ID NO: 56616 - DNA, 25 bp, Canis familiaris
caatgtctgtaaagtgctctgaggt

SEQ ID NO: 56617 - DNA, 25 bp, Canis familiaris
caatggtgctattctgtgtcaaaca

SEQ ID NO: 56618 - DNA, 25 bp, Canis familiaris
caatggtgctattctgtgtcaaaca

SEQ ID NO: 56619 - DNA, 25 bp, Canis familiaris
caatggtgctattctgtgtcaaaca

SEQ ID NO: 56620 - DNA, 25 bp, Canis familiaris
caatgatgcctatgatgcactcaaa

SEQ ID NO: 56621 - DNA, 25 bp, Canis familiaris
caaggagcgcattgatactagaaat

SEQ ID NO: 56622 - DNA, 25 bp, Canis familiaris
caatgggcagattatttggccgata

SEQ ID NO: 56623 - DNA, 25 bp, Canis familiaris
caatcggaacacattcagctgctgg

SEQ ID NO: 56624 - DNA, 25 bp, Canis familiaris
caatcgaggacactctgcactgtgg

SEQ ID NO: 56625 - DNA, 25 bp, Canis familiaris
caatgcaggccccatctgagcctgc

SEQ ID NO: 56626 - DNA, 25 bp, Canis familiaris
caatgtcatccactgcaagagcctg

SEQ ID NO: 56627 - DNA, 25 bp, Canis familiaris
caatgctgctgctgtcaccacagca

SEQ ID NO: 56628 - DNA, 25 bp, Canis familiaris
caatgtgcgctaccgctgcaatgac

SEQ ID NO: 56629 - DNA, 25 bp, Canis familiaris
caatctggctgatcctgcaggtgcc

SEQ ID NO: 56630 - DNA, 25 bp, Canis familiaris
caaccgctgggagcaagtgccgtta

SEQ ID NO: 56631 - DNA, 25 bp, Canis familiaris
caacctgggtgactcatggatgctc

SEQ ID NO: 56632 - DNA, 25 bp, Canis familiaris
caactgctgcaaggtgctatgaggg

SEQ ID NO: 56633 - DNA, 25 bp, Canis familiaris
caagagctgaaggatacatgcaatt

SEQ ID NO: 56634 - DNA, 25 bp, Canis familiaris
caaggagctagggcacagcactcag

SEQ ID NO: 56635 - DNA, 25 bp, Canis familiaris
caagtggtgtggacacaactgcggt

SEQ ID NO: 56636 - DNA, 25 bp, Canis familiaris
caatgtgagcagccaggccatcctg

SEQ ID NO: 56637 - DNA, 25 bp, Canis familiaris
caatggagcagtggccatctttccc

SEQ ID NO: 56638 - DNA, 25 bp, Canis familiaris
caagcacggatcgtgcctttctccg

SEQ ID NO: 56639 - DNA, 25 bp, Canis familiaris
caatctcgagaactgcttttccctc

SEQ ID NO: 56640 - DNA, 25 bp, Canis familiaris
caatccggagttatgcgtcctcttg

SEQ ID NO: 56641 - DNA, 25 bp, Canis familiaris
caatttaattctaaccctgctctta

SEQ ID NO: 56642 - DNA, 25 bp, Canis familiaris
caatcttaaccattattctccttat

SEQ ID NO: 56643 - DNA, 25 bp, Canis familiaris
caatctataatcaacaaatcctcta

SEQ ID NO: 56644 - DNA, 25 bp, Canis familiaris
caattctacatcacactgcaaccaa

SEQ ID NO: 56645 - DNA, 25 bp, Canis familiaris
caatttccaatgcacctgaccagtg

SEQ ID NO: 56646 - DNA, 25 bp, Canis familiaris
caatttgtcatttactctgcaccag

SEQ ID NO: 56647 - DNA, 25 bp, Canis familiaris
caatcctactaattctcgcaaatgg

SEQ ID NO: 56648 - DNA, 25 bp, Canis familiaris
caatcctgaagttactgaacaatgg

SEQ ID NO: 56649 - DNA, 25 bp, Canis familiaris
caatgcttagcagaactgttcagat

SEQ ID NO: 56650 - DNA, 25 bp, Canis familiaris
caactgtcagatgatttgaatagat

SEQ ID NO: 56651 - DNA, 25 bp, Canis familiaris
cacgctgtcagaaactcggacgtcc

SEQ ID NO: 56652 - DNA, 25 bp, Canis familiaris
caatcgacttgtgttgcatcctgag

SEQ ID NO: 56653 - DNA, 25 bp, Canis familiaris
caatcgtttgtggaatgtcctctgg

SEQ ID NO: 56654 - DNA, 25 bp, Canis familiaris
caatatttttgctgttcctgtgtgt

SEQ ID NO: 56655 - DNA, 25 bp, Canis familiaris
caataatttctattgaatcctttga

SEQ ID NO: 56656 - DNA, 25 bp, Canis familiaris
caataattctattgaatccctttga

SEQ ID NO: 56657 - DNA, 25 bp, Canis familiaris
caataagtgctatttctctcctgtt

SEQ ID NO: 56658 - DNA, 25 bp, Canis familiaris
caataaagtgtctcactcttgattt

SEQ ID NO: 56659 - DNA, 25 bp, Canis familiaris
caaggaaagctcttcaaccgtgtct

SEQ ID NO: 56660 - DNA, 25 bp, Canis familiaris
caagtaaagcacttacaccgggctt

SEQ ID NO: 56661 - DNA, 25 bp, Canis familiaris
caagacgaaccatgacatcgccctg

SEQ ID NO: 56662 - DNA, 25 bp, Canis familiaris
caagcagctgagccagaatacatac

SEQ ID NO: 56663 - DNA, 25 bp, Canis familiaris
caagatatagccaaataaccccagc

SEQ ID NO: 56664 - DNA, 25 bp, Canis familiaris
caagatttccaatgaacactccccc

SEQ ID NO: 56665 - DNA, 25 bp, Canis familiaris
cagatggtttctgaggacgtcccgc

SEQ ID NO: 56666 - DNA, 25 bp, Canis familiaris
caaggctattttaggacctcctcct

SEQ ID NO: 56667 - DNA, 25 bp, Canis familiaris
caagtgctgattacggccaatccct

SEQ ID NO: 56668 - DNA, 25 bp, Canis familiaris
caaggtttggagtcacaagccatct

SEQ ID NO: 56669 - DNA, 25 bp, Canis familiaris
caatggatgagtgaacacacacaca

SEQ ID NO: 56670 - DNA, 25 bp, Canis familiaris
caagtatgagttttccccacagact

SEQ ID NO: 56671 - DNA, 25 bp, Canis familiaris
caagggaggaagacccacatcaaca

SEQ ID NO: 56672 - DNA, 25 bp, Canis familiaris
caacagtaaaaaacccatccaatcg

SEQ ID NO: 56673 - DNA, 25 bp, Canis familiaris
caagagtaaaaccaagctattccca

SEQ ID NO: 56674 - DNA, 25 bp, Canis familiaris
caagattcacataactcggtatccc

SEQ ID NO: 56675 - DNA, 25 bp, Canis familiaris
caatgcatggaatacccaaatccca

SEQ ID NO: 56676 - DNA, 25 bp, Canis familiaris
caatccacacaaacccaaatttaga

SEQ ID NO: 56677 - DNA, 25 bp, Canis familiaris
caatgtccacaaggaccaattttta

SEQ ID NO: 56678 - DNA, 25 bp, Canis familiaris
caatgggcagcttcgatccattctg

SEQ ID NO: 56679 - DNA, 25 bp, Canis familiaris
caatgtggccgaggactttgattgc

SEQ ID NO: 56680 - DNA, 25 bp, Canis familiaris
caaggcgctggtggcctattaccag

SEQ ID NO: 56681 - DNA, 25 bp, Canis familiaris
caaggagggccagctgttggccccc

SEQ ID NO: 56682 - DNA, 25 bp, Canis familiaris
caaggacgaccccagtgtgggactc

SEQ ID NO: 56683 - DNA, 25 bp, Canis familiaris
caaggacggccgcacggtgaatctg

SEQ ID NO: 56684 - DNA, 25 bp, Canis familiaris
caagtagggtcctcggtgagtggac

SEQ ID NO: 56685 - DNA, 25 bp, Canis familiaris
caagggggatactcagcccagggat

SEQ ID NO: 56686 - DNA, 25 bp, Canis familiaris
caagtcctaaacacagaccactgga

SEQ ID NO: 56687 - DNA, 25 bp, Canis familiaris
caaggtccaaacttcaaggcttggc

SEQ ID NO: 56688 - DNA, 25 bp, Canis familiaris
caaggtctctttttctacgttggat

SEQ ID NO: 56689 - DNA, 25 bp, Canis familiaris
caaggtccatgttcttctgactctt

SEQ ID NO: 56690 - DNA, 25 bp, Canis familiaris
caagttcctgtactactggcttttg

SEQ ID NO: 56691 - DNA, 25 bp, Canis familiaris
caagttccttagatgtccatttctc

SEQ ID NO: 56692 - DNA, 25 bp, Canis familiaris
caagtacatcttgtctgaacatctt

SEQ ID NO: 56693 - DNA, 25 bp, Canis familiaris
caaggaaggtgttgcgcaacttctt

SEQ ID NO: 56694 - DNA, 25 bp, Canis familiaris
caaggacagggttggccaatatggt

SEQ ID NO: 56695 - DNA, 25 bp, Canis familiaris
caaggaaggagcagccacaagtggc

SEQ ID NO: 56696 - DNA, 25 bp, Canis familiaris
caaggatctggtcatgctacatagg

SEQ ID NO: 56697 - DNA, 25 bp, Canis familiaris
caagtatatacattcagctgacata

SEQ ID NO: 56698 - DNA, 25 bp, Canis familiaris
caatctacaccattgatggactcaa

SEQ ID NO: 56699 - DNA, 25 bp, Canis familiaris
caatgtgtcagcccatggaagccaa

SEQ ID NO: 56700 - DNA, 25 bp, Canis familiaris
caaggggcacctggattgctcagat

SEQ ID NO: 56701 - DNA, 25 bp, Canis familiaris
caaggggccctgtcttcaggattta

SEQ ID NO: 56702 - DNA, 25 bp, Canis familiaris
caagggggcagttcttgacgcctta

SEQ ID NO: 56703 - DNA, 25 bp, Canis familiaris
caatgaggtctgcttcttacagcct

SEQ ID NO: 56704 - DNA, 25 bp, Canis familiaris
caagacatgtctgttctagtccctc

SEQ ID NO: 56705 - DNA, 25 bp, Canis familiaris
caaggtgtgctggacctagtggcgc

SEQ ID NO: 56706 - DNA, 25 bp, Canis familiaris
caagttcgtggggcttctggagcta

SEQ ID NO: 56707 - DNA, 25 bp, Canis familiaris
caaggtcgataggttcattgttcta

SEQ ID NO: 56708 - DNA, 25 bp, Canis familiaris
caatgcactcgatcttgtcattttt

SEQ ID NO: 56709 - DNA, 25 bp, Canis familiaris
caatgacatctaccaggtcactcct

SEQ ID NO: 56710 - DNA, 25 bp, Canis familiaris
caatgactctcacatttgtctcttc

SEQ ID NO: 56711 - DNA, 25 bp, Canis familiaris
caatgactctcacatttgtctcttc

SEQ ID NO: 56712 - DNA, 25 bp, Canis familiaris
caatgactctcacatttgtctcttc

SEQ ID NO: 56713 - DNA, 25 bp, Canis familiaris
caatggtctccacgatggttttcca

SEQ ID NO: 56714 - DNA, 25 bp, Canis familiaris
caatcttctccacatcagggttggt

SEQ ID NO: 56715 - DNA, 25 bp, Canis familiaris
caacgtgagtccgatccggttggct

SEQ ID NO: 56716 - DNA, 25 bp, Canis familiaris
caacggagttgctcgtaattcgtcc

SEQ ID NO: 56717 - DNA, 25 bp, Canis familiaris
cacccagggggtgaaatctctcctc

SEQ ID NO: 56718 - DNA, 25 bp, Canis familiaris
caaccagccgggcggaaattccgca

SEQ ID NO: 56719 - DNA, 25 bp, Canis familiaris
caagccacccggtggaggttccaag

SEQ ID NO: 56720 - DNA, 25 bp, Canis familiaris
caagttccaaggtgaagctgttctc

SEQ ID NO: 56721 - DNA, 25 bp, Canis familiaris
caagttcgccggcagaagcttcagt

SEQ ID NO: 56722 - DNA, 25 bp, Canis familiaris
caagttcgccggcagaagcttcaga

SEQ ID NO: 56723 - DNA, 25 bp, Canis familiaris
caatggtgcgcctgctggaagatgc

SEQ ID NO: 56724 - DNA, 25 bp, Canis familiaris
caatcacagccatttctggaagcac

SEQ ID NO: 56725 - DNA, 25 bp, Canis familiaris
caagatcaccagtcctgaggcagca

SEQ ID NO: 56726 - DNA, 25 bp, Canis familiaris
caagtccaaatcctggatgagacca

SEQ ID NO: 56727 - DNA, 25 bp, Canis familiaris
caaggcgcaagttggggagacccct

SEQ ID NO: 56728 - DNA, 25 bp, Canis familiaris
caaggccaagttcggggtgttcgtg

SEQ ID NO: 56729 - DNA, 25 bp, Canis familiaris
caagcccaaggtctgaggtgattca

SEQ ID NO: 56730 - DNA, 25 bp, Canis familiaris
caaccaccaggaaacaggttatgac

SEQ ID NO: 56731 - DNA, 25 bp, Canis familiaris
caagcccgcctaatggaggttcaac

SEQ ID NO: 56732 - DNA, 25 bp, Canis familiaris
caaggacggctgaggcggctaaacc

SEQ ID NO: 56733 - DNA, 25 bp, Canis familiaris
caaggaaggcagcaggcgcgcaaat

SEQ ID NO: 56734 - DNA, 25 bp, Canis familiaris
caaggggctcagaaccccaacattc

SEQ ID NO: 56735 - DNA, 25 bp, Canis familiaris
caagggcttcagaaccttcattcct

SEQ ID NO: 56736 - DNA, 25 bp, Canis familiaris
caagtactacgatgccattgcctgc

SEQ ID NO: 56737 - DNA, 25 bp, Canis familiaris
cgagataataaatcagttactgcac

SEQ ID NO: 56738 - DNA, 25 bp, Canis familiaris
caaaaagtaaaggttgcattgcaca

SEQ ID NO: 56739 - DNA, 25 bp, Canis familiaris
caaggaagtcaattggaccaagaca

SEQ ID NO: 56740 - DNA, 25 bp, Canis familiaris
caaggaagctaattggaccagtaca

SEQ ID NO: 56741 - DNA, 25 bp, Canis familiaris
caaggccgtcagtgggccatgtcca

SEQ ID NO: 56742 - DNA, 25 bp, Canis familiaris
caaggccctggaaggagcctgcaca

SEQ ID NO: 56743 - DNA, 25 bp, Canis familiaris
caatggccctggaacagccttggag

SEQ ID NO: 56744 - DNA, 25 bp, Canis familiaris
caaggtcattgcacacggcaaagac

SEQ ID NO: 56745 - DNA, 25 bp, Canis familiaris
caaggataccttacggacaagagct

SEQ ID NO: 56746 - DNA, 25 bp, Canis familiaris
caaagatacttttctggtaacattt

SEQ ID NO: 56747 - DNA, 25 bp, Canis familiaris
caaaaccttttgcagtctactcatt

SEQ ID NO: 56748 - DNA, 25 bp, Canis familiaris
caatgaccactttgtcaagctcatt

SEQ ID NO: 56749 - DNA, 25 bp, Canis familiaris
caatgacaactttgtcaagctcatt

SEQ ID NO: 56750 - DNA, 25 bp, Canis familiaris
caatcaaattttccaggttgtcctt

SEQ ID NO: 56751 - DNA, 25 bp, Canis familiaris
caatcatgacatgctgtccagtttg

SEQ ID NO: 56752 - DNA, 25 bp, Canis familiaris
cagaccagtaagcccgttctgggtt

SEQ ID NO: 56753 - DNA, 25 bp, Canis familiaris
caatccaccagaccacgatgttgtg

SEQ ID NO: 56754 - DNA, 25 bp, Canis familiaris
caatgccatcacctgtacggcttgt

SEQ ID NO: 56755 - DNA, 25 bp, Canis familiaris
caaggctgccgttcaagtgcttgat

SEQ ID NO: 56756 - DNA, 25 bp, Canis familiaris
caagatcttcgttcagggtgtcatc

SEQ ID NO: 56757 - DNA, 25 bp, Canis familiaris
caagaaggtgtccaggctcttatcc

SEQ ID NO: 56758 - DNA, 25 bp, Canis familiaris
caatgcaaagtgtccttcctttacc

SEQ ID NO: 56759 - DNA, 25 bp, Canis familiaris
caatcaacggactttccaatgttcg

SEQ ID NO: 56760 - DNA, 25 bp, Canis familiaris
caataatcccccactcagtgtatcc

SEQ ID NO: 56761 - DNA, 25 bp, Canis familiaris
caaagtcttccattaccaagtaaag

SEQ ID NO: 56762 - DNA, 25 bp, Canis familiaris
caaggttgtcctggtgccaaaaaga

SEQ ID NO: 56763 - DNA, 25 bp, Canis familiaris
caagagttctttgctacagataaga

SEQ ID NO: 56764 - DNA, 25 bp, Canis familiaris
caaggcttccttggctgcaaagttg

SEQ ID NO: 56765 - DNA, 25 bp, Canis familiaris
caaggttgtcctggcctatgagcct

SEQ ID NO: 56766 - DNA, 25 bp, Canis familiaris
caaggtgggccagtgactagtgcgt

SEQ ID NO: 56767 - DNA, 25 bp, Canis familiaris
caaggtggggcctataaggcctcct

SEQ ID NO: 56768 - DNA, 25 bp, Canis familiaris
caaggtggggcttgatccaggacct

SEQ ID NO: 56769 - DNA, 25 bp, Canis familiaris
caaggctggggcaggcatgggaccc

SEQ ID NO: 56770 - DNA, 25 bp, Canis familiaris
caagtctggtgggatctgaggctga

SEQ ID NO: 56771 - DNA, 25 bp, Canis familiaris
caagtgtgattgatataagcctgat

SEQ ID NO: 56772 - DNA, 25 bp, Canis familiaris
caatgtagcactttatactgacagt

SEQ ID NO: 56773 - DNA, 25 bp, Canis familiaris
caatgctaactgatcacacggatga

SEQ ID NO: 56774 - DNA, 25 bp, Canis familiaris
caatgatcaagggcacacctgcgaa

SEQ ID NO: 56775 - DNA, 25 bp, Canis familiaris
caatgatcatatggatacccactgg

SEQ ID NO: 56776 - DNA, 25 bp, Canis familiaris
caatctcaagtgttctccactgggt

SEQ ID NO: 56777 - DNA, 25 bp, Canis familiaris
caatcccagcgttgctcaagcaggg

SEQ ID NO: 56778 - DNA, 25 bp, Canis familiaris
caatgcccgatttccagggtgcatg

SEQ ID NO: 56779 - DNA, 25 bp, Canis familiaris
caatgccctagctagcctgggactt

SEQ ID NO: 56780 - DNA, 25 bp, Canis familiaris
caatcgagaagcttgccgggacctc

SEQ ID NO: 56781 - DNA, 25 bp, Canis familiaris
caatctgaaagccctgctgcaggac

SEQ ID NO: 56782 - DNA, 25 bp, Canis familiaris
caatctgcgctaccggtgcaatgac

SEQ ID NO: 56783 - DNA, 25 bp, Canis familiaris
caatctgcgctaccggtgcaatgac

SEQ ID NO: 56784 - DNA, 25 bp, Canis familiaris
caatctgcgctaccggtgcaatgac

SEQ ID NO: 56785 - DNA, 25 bp, Canis familiaris
caatctgcgctaccggtgcaatgac

SEQ ID NO: 56786 - DNA, 25 bp, Canis familiaris
caatctgcgctaccggtgcaatgac

SEQ ID NO: 56787 - DNA, 25 bp, Canis familiaris
caatctgcgctaccggtgcaatgac

SEQ ID NO: 56788 - DNA, 25 bp, Canis familiaris
caatctgctgcaactggtgtgctgc

SEQ ID NO: 56789 - DNA, 25 bp, Canis familiaris
caagtgctcacggcagctgtgtgcc

SEQ ID NO: 56790 - DNA, 25 bp, Canis familiaris
caatgcacaaaggctgtgtgtgtgt

SEQ ID NO: 56791 - DNA, 25 bp, Canis familiaris
caatgccaaggccatggctgcgcgt

SEQ ID NO: 56792 - DNA, 25 bp, Canis familiaris
caagtctggtgccagcagccgcggt

SEQ ID NO: 56793 - DNA, 25 bp, Canis familiaris
caagtctttgtgtcacactgctcat

SEQ ID NO: 56794 - DNA, 25 bp, Canis familiaris
caaggccattgccataactctctgt

SEQ ID NO: 56795 - DNA, 25 bp, Canis familiaris
caaggctatgctcttcacctatgac

SEQ ID NO: 56796 - DNA, 25 bp, Canis familiaris
caatcatctcatacctaagccttac

SEQ ID NO: 56797 - DNA, 25 bp, Canis familiaris
caatgcttatattctaacaccatac

SEQ ID NO: 56798 - DNA, 25 bp, Canis familiaris
caatgccaagacggagaccctagct

SEQ ID NO: 56799 - DNA, 25 bp, Canis familiaris
caatgccataaaggaggtctcatat

SEQ ID NO: 56800 - DNA, 25 bp, Canis familiaris
caatcctcagcaagacccttgcatt

SEQ ID NO: 56801 - DNA, 25 bp, Canis familiaris
caatcctactaatcctctcaaatag

SEQ ID NO: 56802 - DNA, 25 bp, Canis familiaris
caatctcaatgcctaaaccttaaac

SEQ ID NO: 56803 - DNA, 25 bp, Canis familiaris
caatctaaggtcgagcctcattaaa

SEQ ID NO: 56804 - DNA, 25 bp, Canis familiaris
caatctaagagtcgagcctccatta

SEQ ID NO: 56805 - DNA, 25 bp, Canis familiaris
caatcccagagggacccaagtactt

SEQ ID NO: 56806 - DNA, 25 bp, Canis familiaris
caaccccataggaaccgaggatcgc

SEQ ID NO: 56807 - DNA, 25 bp, Canis familiaris
caaccccagagaagcacatccaggc

SEQ ID NO: 56808 - DNA, 25 bp, Canis familiaris
caagcctcccattaaagccagacgg

SEQ ID NO: 56809 - DNA, 25 bp, Canis familiaris
caagagccatccaggaagcggacct

SEQ ID NO: 56810 - DNA, 25 bp, Canis familiaris
caaggccaaccgcgagaagatgacc

SEQ ID NO: 56811 - DNA, 25 bp, Canis familiaris
ctcggagaatccgggaatttgactg

SEQ ID NO: 56812 - DNA, 25 bp, Canis familiaris
caagggttccggcatttctgagtgc

SEQ ID NO: 56813 - DNA, 25 bp, Canis familiaris
caaggagggcccctgatatttatat

SEQ ID NO: 56814 - DNA, 25 bp, Canis familiaris
caaggggcaatatttttatctatgt

SEQ ID NO: 56815 - DNA, 25 bp, Canis familiaris
caatggcccatttagttttatagtt

SEQ ID NO: 56816 - DNA, 25 bp, Canis familiaris
caatgtgcacatgttagttttctat

SEQ ID NO: 56817 - DNA, 25 bp, Canis familiaris
caagtgccaggctgatggttttgtt

SEQ ID NO: 56818 - DNA, 25 bp, Canis familiaris
caaggcacagtctgggctttggctc

SEQ ID NO: 56819 - DNA, 25 bp, Canis familiaris
ctagcgtcacttaggcgttgggtca

SEQ ID NO: 56820 - DNA, 25 bp, Canis familiaris
caaggtcacattttggtttgttact

SEQ ID NO: 56821 - DNA, 25 bp, Canis familiaris
caagactcgcctttagttgtttgtt

SEQ ID NO: 56822 - DNA, 25 bp, Canis familiaris
caaggactgttgtataatatttttt

SEQ ID NO: 56823 - DNA, 25 bp, Canis familiaris
caatgagattttccttttttcactt

SEQ ID NO: 56824 - DNA, 25 bp, Canis familiaris
caaggattttatttcatttcccatt

SEQ ID NO: 56825 - DNA, 25 bp, Canis familiaris
caagagttcttatgtgctattgccc

SEQ ID NO: 56826 - DNA, 25 bp, Canis familiaris
caagaggttcgatgtccagtcaccg

SEQ ID NO: 56827 - DNA, 25 bp, Canis familiaris
caatgcagggctcaatcccagaacc

SEQ ID NO: 56828 - DNA, 25 bp, Canis familiaris
caagagaggccctatcccaactcgg

SEQ ID NO: 56829 - DNA, 25 bp, Canis familiaris
caagggagtcgatcccaacagcagg

SEQ ID NO: 56830 - DNA, 25 bp, Canis familiaris
caacggcgactatccttactttgaa

SEQ ID NO: 56831 - DNA, 25 bp, Canis familiaris
caagtactgaacaccttccatttgc

SEQ ID NO: 56832 - DNA, 25 bp, Canis familiaris
caagtgaccaactcaattccagtta

SEQ ID NO: 56833 - DNA, 25 bp, Canis familiaris
caagttcggagttctgttctcgtca

SEQ ID NO: 56834 - DNA, 25 bp, Canis familiaris
caatgttgttggaacttgcccgtgc

SEQ ID NO: 56835 - DNA, 25 bp, Canis familiaris
caatgtgtgaggtgactgtccggag

SEQ ID NO: 56836 - DNA, 25 bp, Canis familiaris
caatgactgggcagcactctcccag

SEQ ID NO: 56837 - DNA, 25 bp, Canis familiaris
caatgactccagagatgcctctcca

SEQ ID NO: 56838 - DNA, 25 bp, Canis familiaris
caatgacaccgacttgagatgccct

SEQ ID NO: 56839 - DNA, 25 bp, Canis familiaris
caatgaagtccatggcaggccagct

SEQ ID NO: 56840 - DNA, 25 bp, Canis familiaris
caatgacgttctgagagcccatgca

SEQ ID NO: 56841 - DNA, 25 bp, Canis familiaris
caatgatgcggtggtagatcccctg

SEQ ID NO: 56842 - DNA, 25 bp, Canis familiaris
caatgagggcagctacattcccgtt

SEQ ID NO: 56843 - DNA, 25 bp, Canis familiaris
caaggcaggagtcatcttccctgtg

SEQ ID NO: 56844 - DNA, 25 bp, Canis familiaris
caagtgggagctccattttctgccc

SEQ ID NO: 56845 - DNA, 25 bp, Canis familiaris
caatgttagatggcctttttccttc

SEQ ID NO: 56846 - DNA, 25 bp, Canis familiaris
caatggctttgaactttcttccttc

SEQ ID NO: 56847 - DNA, 25 bp, Canis familiaris
caaggtatggtttttcttctcccag

SEQ ID NO: 56848 - DNA, 25 bp, Canis familiaris
caagttgggtttctgagtcctgcca

SEQ ID NO: 56849 - DNA, 25 bp, Canis familiaris
caagttgtggtaagggagcccttgc

SEQ ID NO: 56850 - DNA, 25 bp, Canis familiaris
caagttgtgtgtcttgggcccttat

SEQ ID NO: 56851 - DNA, 25 bp, Canis familiaris
caagttgtggaatcatctggtcttt

SEQ ID NO: 56852 - DNA, 25 bp, Canis familiaris
caagttgctggttgaactggtccaa

SEQ ID NO: 56853 - DNA, 25 bp, Canis familiaris
caatgtgagttttgtttggcaccaa

SEQ ID NO: 56854 - DNA, 25 bp, Canis familiaris
caatggaatatttttcagccacaaa

SEQ ID NO: 56855 - DNA, 25 bp, Canis familiaris
caatggaatatcacccagccactaa

SEQ ID NO: 56856 - DNA, 25 bp, Canis familiaris
caaggagattttttggccctatttg

SEQ ID NO: 56857 - DNA, 25 bp, Canis familiaris
caagtgagttttcaccatcctcttg

SEQ ID NO: 56858 - DNA, 25 bp, Canis familiaris
caagtggttattccacgcccagttt

SEQ ID NO: 56859 - DNA, 25 bp, Canis familiaris
caaggtcctatcgcaagccaagttc

SEQ ID NO: 56860 - DNA, 25 bp, Canis familiaris
caagggctcttttcaaccaagaaca

SEQ ID NO: 56861 - DNA, 25 bp, Canis familiaris
caaggtgttctaaccaccgggcaag

SEQ ID NO: 56862 - DNA, 25 bp, Canis familiaris
caagttgtgttaagaccgggataag

SEQ ID NO: 56863 - DNA, 25 bp, Canis familiaris
caagttctgtaaaggcaatgggaga

SEQ ID NO: 56864 - DNA, 25 bp, Canis familiaris
caatgttcgtcagaggcaatgggtg

SEQ ID NO: 56865 - DNA, 25 bp, Canis familiaris
caatgttcgtcaaatcaaggacagt

SEQ ID NO: 56866 - DNA, 25 bp, Canis familiaris
cacactgggctcctaaaagcatcaa

SEQ ID NO: 56867 - DNA, 25 bp, Canis familiaris
caagtgggcggcatatcgagctcat

SEQ ID NO: 56868 - DNA, 25 bp, Canis familiaris
caaggggaagcagttcacgtgcaaa

SEQ ID NO: 56869 - DNA, 25 bp, Canis familiaris
caaggatgccaagatccgcgtgcaa

SEQ ID NO: 56870 - DNA, 25 bp, Canis familiaris
caagttcccatccacgggtgtggac

SEQ ID NO: 56871 - DNA, 25 bp, Canis familiaris
caagcttcccatccaattagagtca

SEQ ID NO: 56872 - DNA, 25 bp, Canis familiaris
caaggtggccagccagatcggactc

SEQ ID NO: 56873 - DNA, 25 bp, Canis familiaris
caatgtgggcaacaatccagagtcc

SEQ ID NO: 56874 - DNA, 25 bp, Canis familiaris
caagtggcaaagtcctccaagctgc

SEQ ID NO: 56875 - DNA, 25 bp, Canis familiaris
caatgtggccaagtccaatcaaggc

SEQ ID NO: 56876 - DNA, 25 bp, Canis familiaris
caagatggccaagatgtgtcaaggg

SEQ ID NO: 56877 - DNA, 25 bp, Canis familiaris
caaggtccagatgaggcccaagtga

SEQ ID NO: 56878 - DNA, 25 bp, Canis familiaris
caatggtggcgtgatggcccagcag

SEQ ID NO: 56879 - DNA, 25 bp, Canis familiaris
caatggtggcggcaagtgatcagtg

SEQ ID NO: 56880 - DNA, 25 bp, Canis familiaris
caagatgtgatctttgacagtgaaa

SEQ ID NO: 56881 - DNA, 25 bp, Canis familiaris
caagatgatgactatctggcgttat

SEQ ID NO: 56882 - DNA, 25 bp, Canis familiaris
caatgtatgatgccctgtctgttta

SEQ ID NO: 56883 - DNA, 25 bp, Canis familiaris
caatgcttgtgcccacactgtatac

SEQ ID NO: 56884 - DNA, 25 bp, Canis familiaris
caatgcatctggatcacaggatcag

SEQ ID NO: 56885 - DNA, 25 bp, Canis familiaris
caatgcgcttggccaaggaagccca

SEQ ID NO: 56886 - DNA, 25 bp, Canis familiaris
caatgatgaccgccaagtgaagact

SEQ ID NO: 56887 - DNA, 25 bp, Canis familiaris
caatgggcacggtgtagagccatgc

SEQ ID NO: 56888 - DNA, 25 bp, Canis familiaris
caatggaagcgcgggtatacggcgg

SEQ ID NO: 56889 - DNA, 25 bp, Canis familiaris
caaggtcatcagcgagctcaacggg

SEQ ID NO: 56890 - DNA, 25 bp, Canis familiaris
caagtccatagctgcacgaacggtg

SEQ ID NO: 56891 - DNA, 25 bp, Canis familiaris
caatgttcattctgggacactgttg

SEQ ID NO: 56892 - DNA, 25 bp, Canis familiaris
caagtgttacattgtggccacagtt

SEQ ID NO: 56893 - DNA, 25 bp, Canis familiaris
caactttggcattgtggaagggctc

SEQ ID NO: 56894 - DNA, 25 bp, Canis familiaris
caatggtggtcttgggaggcttgcc

SEQ ID NO: 56895 - DNA, 25 bp, Canis familiaris
caagaggatgggggagagcagttcg

SEQ ID NO: 56896 - DNA, 25 bp, Canis familiaris
caatgggcggtcctgcgcaagattc

SEQ ID NO: 56897 - DNA, 25 bp, Canis familiaris
caagtgggtgatgccagcggttgca

SEQ ID NO: 56898 - DNA, 25 bp, Canis familiaris
caaggaagatgctgccaataactat

SEQ ID NO: 56899 - DNA, 25 bp, Canis familiaris
caaggacgaggggacatacacatgt

SEQ ID NO: 56900 - DNA, 25 bp, Canis familiaris
caatgcgcaccatgggacataagga

SEQ ID NO: 56901 - DNA, 25 bp, Canis familiaris
caacaacctggttattcaaggaaag

SEQ ID NO: 56902 - DNA, 25 bp, Canis familiaris
caagcaactcggtacttttagtggg

SEQ ID NO: 56903 - DNA, 25 bp, Canis familiaris
caaaaccagggatctgtacaagggc

SEQ ID NO: 56904 - DNA, 25 bp, Canis familiaris
caaaaccagggatgtccgggtggct

SEQ ID NO: 56905 - DNA, 25 bp, Canis familiaris
caaaaccaagggcagggggtgtctg

SEQ ID NO: 56906 - DNA, 25 bp, Canis familiaris
caagaataagcgccggaggggttgt

SEQ ID NO: 56907 - DNA, 25 bp, Canis familiaris
caagataagcgccggagggtttgtc

SEQ ID NO: 56908 - DNA, 25 bp, Canis familiaris
caatgaaaccctggcaacttgttgc

SEQ ID NO: 56909 - DNA, 25 bp, Canis familiaris
caagacctctccagattttttgcct

SEQ ID NO: 56910 - DNA, 25 bp, Canis familiaris
caaggccctccagatggttgttatc

SEQ ID NO: 56911 - DNA, 25 bp, Canis familiaris
caaggaactccagctgtctttttcc

SEQ ID NO: 56912 - DNA, 25 bp, Canis familiaris
caatggagatccccggtttttctct

SEQ ID NO: 56913 - DNA, 25 bp, Canis familiaris
caaggagaccgcacggactttccga

SEQ ID NO: 56914 - DNA, 25 bp, Canis familiaris
caagccaaccacacaggtttctccg

SEQ ID NO: 56915 - DNA, 25 bp, Canis familiaris
caaggccacacagccagaatcttcc

SEQ ID NO: 56916 - DNA, 25 bp, Canis familiaris
caaggctctcccacaaagcttggag

SEQ ID NO: 56917 - DNA, 25 bp, Canis familiaris
caaggctacctcagcagagaccaga

SEQ ID NO: 56918 - DNA, 25 bp, Canis familiaris
caaggctccagcttccagaggaaga

SEQ ID NO: 56919 - DNA, 25 bp, Canis familiaris
caagtgccccattccaaagggagca

SEQ ID NO: 56920 - DNA, 25 bp, Canis familiaris
caagggccgcctgagcaaggaggag

SEQ ID NO: 56921 - DNA, 25 bp, Canis familiaris
caaaggggccgctgcgaggacggcc

SEQ ID NO: 56922 - DNA, 25 bp, Canis familiaris
caagtcggagcccaggctggggggc

SEQ ID NO: 56923 - DNA, 25 bp, Canis familiaris
caagtagggccggagcgtggccgag

SEQ ID NO: 56924 - DNA, 25 bp, Canis familiaris
cagaagggtcctggagccaaccctg

SEQ ID NO: 56925 - DNA, 25 bp, Canis familiaris
caaggaggtgttcggcgacaccctg

SEQ ID NO: 56926 - DNA, 25 bp, Canis familiaris
caaactgctgaccacgccgaatccg

SEQ ID NO: 56927 - DNA, 25 bp, Canis familiaris
caagacgcgacgcggccaacttttg

SEQ ID NO: 56928 - DNA, 25 bp, Canis familiaris
caagcagcgcctgagggctcaagtg

SEQ ID NO: 56929 - DNA, 25 bp, Canis familiaris
caagcagctggaagatggccgcact

SEQ ID NO: 56930 - DNA, 25 bp, Canis familiaris
caatgagctgcgtgtggcccctgag

SEQ ID NO: 56931 - DNA, 25 bp, Canis familiaris
caatgagctgcgtgtggctcccgag

SEQ ID NO: 56932 - DNA, 25 bp, Canis familiaris
caaggctgcagaagcggctgccagc

SEQ ID NO: 56933 - DNA, 25 bp, Canis familiaris
caaggggcacagcgtgccctgggag

SEQ ID NO: 56934 - DNA, 25 bp, Canis familiaris
caaggtggagaccgtgaaccgcgag

SEQ ID NO: 56935 - DNA, 25 bp, Canis familiaris
caaggtggagatggactacccaaca

SEQ ID NO: 56936 - DNA, 25 bp, Canis familiaris
caaggaagaagctcttgctccacca

SEQ ID NO: 56937 - DNA, 25 bp, Canis familiaris
caaggctaagcagtatctcgctccc

SEQ ID NO: 56938 - DNA, 25 bp, Canis familiaris
caatggaaatcccatcaccatcttc

SEQ ID NO: 56939 - DNA, 25 bp, Canis familiaris
caaggaccaccaataccagtttctg

SEQ ID NO: 56940 - DNA, 25 bp, Canis familiaris
caaggacagcaggccttcctttgtt

SEQ ID NO: 56941 - DNA, 25 bp, Canis familiaris
caaggaagcaggccttctctctaga

SEQ ID NO: 56942 - DNA, 25 bp, Canis familiaris
caatgtcaagaacgtatctgtcaaa

SEQ ID NO: 56943 - DNA, 25 bp, Canis familiaris
caagtccagaccacatgtagcacac

SEQ ID NO: 56944 - DNA, 25 bp, Canis familiaris
caagggagacagtccagtccccttc

SEQ ID NO: 56945 - DNA, 25 bp, Canis familiaris
caagcagggggaccgataccctctg

SEQ ID NO: 56946 - DNA, 25 bp, Canis familiaris
caaggtgggcgtcaacgacttctgc

SEQ ID NO: 56947 - DNA, 25 bp, Canis familiaris
caaggacagggtcctgacggccctg

SEQ ID NO: 56948 - DNA, 25 bp, Canis familiaris
caaggccaaagccctacgtgccttg

SEQ ID NO: 56949 - DNA, 25 bp, Canis familiaris
caagacccaatgctatactgtccat

SEQ ID NO: 56950 - DNA, 25 bp, Canis familiaris
caatggcacctttgttaagctcaac

SEQ ID NO: 56951 - DNA, 25 bp, Canis familiaris
caagtccctgtatttatggtcatac

SEQ ID NO: 56952 - DNA, 25 bp, Canis familiaris
caatggggcagtcattagatttgac

SEQ ID NO: 56953 - DNA, 25 bp, Canis familiaris
caagtgtggctacatctagagtgcg

SEQ ID NO: 56954 - DNA, 25 bp, Canis familiaris
caaggagcgctacgcacaggagcgg

SEQ ID NO: 56955 - DNA, 25 bp, Canis familiaris
caatggcagcgcgggccagaagcgc

SEQ ID NO: 56956 - DNA, 25 bp, Canis familiaris
caagtgcatcaggtatgctcccacc

SEQ ID NO: 56957 - DNA, 25 bp, Canis familiaris
caaggcagacgtgcagtccatcatc

SEQ ID NO: 56958 - DNA, 25 bp, Canis familiaris
caatggcacggtgcagatctcctgc

SEQ ID NO: 56959 - DNA, 25 bp, Canis familiaris
caaggacaaggtcatctcactgcct

SEQ ID NO: 56960 - DNA, 25 bp, Canis familiaris
caaggacaaagactgctgtcactcc

SEQ ID NO: 56961 - DNA, 25 bp, Canis familiaris
caaggatgggaagctgctgcctgcc

SEQ ID NO: 56962 - DNA, 25 bp, Canis familiaris
caaggtgctggatgcgagctcactg

SEQ ID NO: 56963 - DNA, 25 bp, Canis familiaris
caaggagctgggccgaggactgcct

SEQ ID NO: 56964 - DNA, 25 bp, Canis familiaris
caagggtacggttagccatgcgctg

SEQ ID NO: 56965 - DNA, 25 bp, Canis familiaris
caagggcccaggacagggcagcctc

SEQ ID NO: 56966 - DNA, 25 bp, Canis familiaris
caaggcattctacaagggcaccatc

SEQ ID NO: 56967 - DNA, 25 bp, Canis familiaris
caaagcttaacaacaagccccacgg

SEQ ID NO: 56968 - DNA, 25 bp, Canis familiaris
caaggctcttgtcaaagccccagga

SEQ ID NO: 56969 - DNA, 25 bp, Canis familiaris
caaaacgtgtggaggcccaaggaag

SEQ ID NO: 56970 - DNA, 25 bp, Canis familiaris
caagaaggtggcgcggaccattggc

SEQ ID NO: 56971 - DNA, 25 bp, Canis familiaris
caagaaggtggcgcggaccattggc

SEQ ID NO: 56972 - DNA, 25 bp, Canis familiaris
caaggtggtggaggggatcctggac

SEQ ID NO: 56973 - DNA, 25 bp, Canis familiaris
caagaggggatggggctgtcctgtg

SEQ ID NO: 56974 - DNA, 25 bp, Canis familiaris
caagagggatgcagctggggcctag

SEQ ID NO: 56975 - DNA, 25 bp, Canis familiaris
caaggaagtgcttgcatggcgcgcg

SEQ ID NO: 56976 - DNA, 25 bp, Canis familiaris
caagtatgcagcctgcagtggcccg

SEQ ID NO: 56977 - DNA, 25 bp, Canis familiaris
caaggctgcgcacgaggagtccagc

SEQ ID NO: 56978 - DNA, 25 bp, Canis familiaris
caaggcgcggagatcagctccatcg

SEQ ID NO: 56979 - DNA, 25 bp, Canis familiaris
caaggagctgtgtatgtgccacccg

SEQ ID NO: 56980 - DNA, 25 bp, Canis familiaris
caatgggtgtgctagtgcgcagggc

SEQ ID NO: 56981 - DNA, 25 bp, Canis familiaris
caaggagcatgttgattggaggccc

SEQ ID NO: 56982 - DNA, 25 bp, Canis familiaris
caaggtgcatgcagtctgtcctgac

SEQ ID NO: 56983 - DNA, 25 bp, Canis familiaris
caatggtgcgcatgaatgtcctggc

SEQ ID NO: 56984 - DNA, 25 bp, Canis familiaris
caatggtgccattatccacctggcc

SEQ ID NO: 56985 - DNA, 25 bp, Canis familiaris
caagtggccaaaggagctcagcccc

SEQ ID NO: 56986 - DNA, 25 bp, Canis familiaris
caagtggccaacgtggttctctact

SEQ ID NO: 56987 - DNA, 25 bp, Canis familiaris
caaggcagacactgctggatttaga

SEQ ID NO: 56988 - DNA, 25 bp, Canis familiaris
caaggaacacaggcaagagtatcgc

SEQ ID NO: 56989 - DNA, 25 bp, Canis familiaris
caaggagtgccagtaccagttccgt

SEQ ID NO: 56990 - DNA, 25 bp, Canis familiaris
caaggcactccagtacaagtctagg

SEQ ID NO: 56991 - DNA, 25 bp, Canis familiaris
caaggcctcaccaagaactctgaga

SEQ ID NO: 56992 - DNA, 25 bp, Canis familiaris
caaggctccagacatcattctgctg

SEQ ID NO: 56993 - DNA, 25 bp, Canis familiaris
caaggctcccagggatggctgtgct

SEQ ID NO: 56994 - DNA, 25 bp, Canis familiaris
caaggccatcgaggagggcacgctg

SEQ ID NO: 56995 - DNA, 25 bp, Canis familiaris
caagaacatggaaggggcggcggcg

SEQ ID NO: 56996 - DNA, 25 bp, Canis familiaris
caaggtcagtgaggggccggtaggc

SEQ ID NO: 56997 - DNA, 25 bp, Canis familiaris
caaggtcagggggtctcaggagagg

SEQ ID NO: 56998 - DNA, 25 bp, Canis familiaris
caatgtctcaggccacgtcaaggag

SEQ ID NO: 56999 - DNA, 25 bp, Canis familiaris
caagttcatggccagcatatccgga

SEQ ID NO: 57000 - DNA, 25 bp, Canis familiaris
caagagtcagacaatcacccaggag

SEQ ID NO: 57001 - DNA, 25 bp, Canis familiaris
caagtgctctgaaatcaccttccac

SEQ ID NO: 57002 - DNA, 25 bp, Canis familiaris
caagatgactatatctccttccggc

SEQ ID NO: 57003 - DNA, 25 bp, Canis familiaris
ctagttcttttcactggctggagct

SEQ ID NO: 57004 - DNA, 25 bp, Canis familiaris
caatgttttcctatctagtggtcat

SEQ ID NO: 57005 - DNA, 25 bp, Canis familiaris
caagtttgtctgagtctgtaggtta

SEQ ID NO: 57006 - DNA, 25 bp, Canis familiaris
caagtctttttggtgttatgtggtt

SEQ ID NO: 57007 - DNA, 25 bp, Canis familiaris
caagtctttacatttgactggatag

SEQ ID NO: 57008 - DNA, 25 bp, Canis familiaris
caagtgttctacaaccacgtgcaga

SEQ ID NO: 57009 - DNA, 25 bp, Canis familiaris
caaggaatctcttaacagttgcaga

SEQ ID NO: 57010 - DNA, 25 bp, Canis familiaris
caaggcaagccttgtccttgtcgtt

SEQ ID NO: 57011 - DNA, 25 bp, Canis familiaris
caaggtggctgttgctgccttggtc

SEQ ID NO: 57012 - DNA, 25 bp, Canis familiaris
caaggatggcctggtccatggggaa

SEQ ID NO: 57013 - DNA, 25 bp, Canis familiaris
caagaatgtccaagccctagcggag

SEQ ID NO: 57014 - DNA, 25 bp, Canis familiaris
catagaattccattctttagggggt

SEQ ID NO: 57015 - DNA, 25 bp, Canis familiaris
caagtcattcctgcatgtctactgt

SEQ ID NO: 57016 - DNA, 25 bp, Canis familiaris
caagattgtcagcaatgcctcctgc

SEQ ID NO: 57017 - DNA, 25 bp, Canis familiaris
caaggtttgcgattgcttcttctga

SEQ ID NO: 57018 - DNA, 25 bp, Canis familiaris
caagaatattctcagcaactctatg

SEQ ID NO: 57019 - DNA, 25 bp, Canis familiaris
caagctatcgtcccgcagattatag

SEQ ID NO: 57020 - DNA, 25 bp, Canis familiaris
caagcttctgccttctggaatatag

SEQ ID NO: 57021 - DNA, 25 bp, Canis familiaris
caaggtgctgctcatcgagaatgtg

SEQ ID NO: 57022 - DNA, 25 bp, Canis familiaris
caagaggactcttcgagacatcgag

SEQ ID NO: 57023 - DNA, 25 bp, Canis familiaris
caaggacgcttattagatcactgag

SEQ ID NO: 57024 - DNA, 25 bp, Canis familiaris
caaggacgcttattagatcactgag

SEQ ID NO: 57025 - DNA, 25 bp, Canis familiaris
caaggacgcttattagatcactgag

SEQ ID NO: 57026 - DNA, 25 bp, Canis familiaris
caaggacgcttattagatcactgag

SEQ ID NO: 57027 - DNA, 25 bp, Canis familiaris
caaggacgcttattagatcactgag

SEQ ID NO: 57028 - DNA, 25 bp, Canis familiaris
caaggacgcttattagatcactgag

SEQ ID NO: 57029 - DNA, 25 bp, Canis familiaris
caaggcccttaagatagtagtcact

SEQ ID NO: 57030 - DNA, 25 bp, Canis familiaris
caaggtcctttactaactaatcact

SEQ ID NO: 57031 - DNA, 25 bp, Canis familiaris
caagtgactttccagtcccaagtca

SEQ ID NO: 57032 - DNA, 25 bp, Canis familiaris
caagttctgttggaggccaaagaca

SEQ ID NO: 57033 - DNA, 25 bp, Canis familiaris
cacgtcctaaagaggccagaacaga

SEQ ID NO: 57034 - DNA, 25 bp, Canis familiaris
caaccctaaatgcggaagaaataag

SEQ ID NO: 57035 - DNA, 25 bp, Canis familiaris
caacactgggaatgggggcaaaaca

SEQ ID NO: 57036 - DNA, 25 bp, Canis familiaris
caaggcagactgttaggcgggcaaa

SEQ ID NO: 57037 - DNA, 25 bp, Canis familiaris
caaggcagacacgtggtgctgggcg

SEQ ID NO: 57038 - DNA, 25 bp, Canis familiaris
caaggaagcctgggagctggtgcct

SEQ ID NO: 57039 - DNA, 25 bp, Canis familiaris
caaggccagcatcagcctgtgggct

SEQ ID NO: 57040 - DNA, 25 bp, Canis familiaris
caaggccagagccagtgctcgggcc

SEQ ID NO: 57041 - DNA, 25 bp, Canis familiaris
caagtgacatagacatcgccggggc

SEQ ID NO: 57042 - DNA, 25 bp, Canis familiaris
caaggtgctggagcagctcacgggc

SEQ ID NO: 57043 - DNA, 25 bp, Canis familiaris
caaggtgctggagcagctcacgggc

SEQ ID NO: 57044 - DNA, 25 bp, Canis familiaris
caagagttagggcctcggggccttg

SEQ ID NO: 57045 - DNA, 25 bp, Canis familiaris
caaaattctgtaccaagggcccttg

SEQ ID NO: 57046 - DNA, 25 bp, Canis familiaris
caaaatccggagtggggctccatcc

SEQ ID NO: 57047 - DNA, 25 bp, Canis familiaris
caaagttggaactgggtcccatcct

SEQ ID NO: 57048 - DNA, 25 bp, Canis familiaris
caaacaaggaactggtccgcaacca

SEQ ID NO: 57049 - DNA, 25 bp, Canis familiaris
caagtaaggtccaggtggcgcaccc

SEQ ID NO: 57050 - DNA, 25 bp, Canis familiaris
caagtaaggtccaggtggcgcaccc

SEQ ID NO: 57051 - DNA, 25 bp, Canis familiaris
caagtaaggtccaggtggcgcaccc

SEQ ID NO: 57052 - DNA, 25 bp, Canis familiaris
cacggaaggggaagggacacagtca

SEQ ID NO: 57053 - DNA, 25 bp, Canis familiaris
caaggaagagggtatgcgggccgtc

SEQ ID NO: 57054 - DNA, 25 bp, Canis familiaris
gaaacttcatgctagtgtcgaagcc

SEQ ID NO: 57055 - DNA, 25 bp, Canis familiaris
caaggagaaggcgagagccacccgg

SEQ ID NO: 57056 - DNA, 25 bp, Canis familiaris
caaggtgaaagccacaggcctcctg

SEQ ID NO: 57057 - DNA, 25 bp, Canis familiaris
caaggtgacaagaagcaggcgtacc

SEQ ID NO: 57058 - DNA, 25 bp, Canis familiaris
caagtggaaagtggatggtgtcatc

SEQ ID NO: 57059 - DNA, 25 bp, Canis familiaris
caaggtcattagggcattttctcgt

SEQ ID NO: 57060 - DNA, 25 bp, Canis familiaris
caagagtcttcgtgcattaattcta

SEQ ID NO: 57061 - DNA, 25 bp, Canis familiaris
caacgtcttgcgggatgatcatggt

SEQ ID NO: 57062 - DNA, 25 bp, Canis familiaris
caagggtgtgctggctgtgactgtg

SEQ ID NO: 57063 - DNA, 25 bp, Canis familiaris
caagggtgccatgcgtgtcagtgat

SEQ ID NO: 57064 - DNA, 25 bp, Canis familiaris
caaggatgccctgctggtaggtgtt

SEQ ID NO: 57065 - DNA, 25 bp, Canis familiaris
caagtggccctattgggatgcctgc

SEQ ID NO: 57066 - DNA, 25 bp, Canis familiaris
caatggccccgatgggatggagccc

SEQ ID NO: 57067 - DNA, 25 bp, Canis familiaris
caatggctccggcctggtgaaagcc

SEQ ID NO: 57068 - DNA, 25 bp, Canis familiaris
caagacctcggcatgggcagaagct

SEQ ID NO: 57069 - DNA, 25 bp, Canis familiaris
caagtactctgtgtggatcggtggc

SEQ ID NO: 57070 - DNA, 25 bp, Canis familiaris
caagggctttgaatgaccactgggc

SEQ ID NO: 57071 - DNA, 25 bp, Canis familiaris
caagtggagttgatggggctgtggc

SEQ ID NO: 57072 - DNA, 25 bp, Canis familiaris
caagtgggtgtgccaggacgtgtcc

SEQ ID NO: 57073 - DNA, 25 bp, Canis familiaris
caaggtgctttccagtatcctgtgc

SEQ ID NO: 57074 - DNA, 25 bp, Canis familiaris
caagatgtgtccttggagtcctctc

SEQ ID NO: 57075 - DNA, 25 bp, Canis familiaris
caagagttctcactgtgacagccct

SEQ ID NO: 57076 - DNA, 25 bp, Canis familiaris
caagatgagccgcctgtacatcact

SEQ ID NO: 57077 - DNA, 25 bp, Canis familiaris
caaggatgcgtgcttattcctctgg

SEQ ID NO: 57078 - DNA, 25 bp, Canis familiaris
caaggtctgcagccttgaaccttct

SEQ ID NO: 57079 - DNA, 25 bp, Canis familiaris
caaggtcagagacttgcctcacctt

SEQ ID NO: 57080 - DNA, 25 bp, Canis familiaris
caaggtgtagatctcctagccgatg

SEQ ID NO: 57081 - DNA, 25 bp, Canis familiaris
caagggttgatgcatctaagcctga

SEQ ID NO: 57082 - DNA, 25 bp, Canis familiaris
caagaggaatgactgtttatgccat

SEQ ID NO: 57083 - DNA, 25 bp, Canis familiaris
gcaggcatgcaaaggtgttaatgga

SEQ ID NO: 57084 - DNA, 25 bp, Canis familiaris
caagcatgctcaaaattatcctgga

SEQ ID NO: 57085 - DNA, 25 bp, Canis familiaris
caaggcatgcttgtgatgactctgt

SEQ ID NO: 57086 - DNA, 25 bp, Canis familiaris
caaggatgctacagaggcacttttg

SEQ ID NO: 57087 - DNA, 25 bp, Canis familiaris
caaggacatcagtgggacctccagc

SEQ ID NO: 57088 - DNA, 25 bp, Canis familiaris
caaggcgctggctgaggaggtggag

SEQ ID NO: 57089 - DNA, 25 bp, Canis familiaris
caaggcctgtgatgagtcggtgctg

SEQ ID NO: 57090 - DNA, 25 bp, Canis familiaris
caagatcctgtacagccacgtgtgg

SEQ ID NO: 57091 - DNA, 25 bp, Canis familiaris
caagatcctttgtcacgagggtgcg

SEQ ID NO: 57092 - DNA, 25 bp, Canis familiaris
caagtattttactgatgctggccca

SEQ ID NO: 57093 - DNA, 25 bp, Canis familiaris
caagcctttaactgactgtgccact

SEQ ID NO: 57094 - DNA, 25 bp, Canis familiaris
caagtgcttctaggcggactgttac

SEQ ID NO: 57095 - DNA, 25 bp, Canis familiaris
caagtctttccagagaagtttctta

SEQ ID NO: 57096 - DNA, 25 bp, Canis familiaris
cacaccgttccgagacagttgactt

SEQ ID NO: 57097 - DNA, 25 bp, Canis familiaris
caaaccaccctaagacctagacttg

SEQ ID NO: 57098 - DNA, 25 bp, Canis familiaris
caaccctaatccaaactctaacctg

SEQ ID NO: 57099 - DNA, 25 bp, Canis familiaris
ccctctaaacctcagtggtacctgg

SEQ ID NO: 57100 - DNA, 25 bp, Canis familiaris
caactttaactcctagatagtcccg

SEQ ID NO: 57101 - DNA, 25 bp, Canis familiaris
caagttgcttgaccggagaagcccc

SEQ ID NO: 57102 - DNA, 25 bp, Canis familiaris
caagggcattcttcccagaagcccc

SEQ ID NO: 57103 - DNA, 25 bp, Canis familiaris
caagggctctgttgcctaagacacc

SEQ ID NO: 57104 - DNA, 25 bp, Canis familiaris
caaggttctgtgtccaaagccatca

SEQ ID NO: 57105 - DNA, 25 bp, Canis familiaris
caaggttctgtgtccaaagccatca

SEQ ID NO: 57106 - DNA, 25 bp, Canis familiaris
caaggatattgacctcagtccctgc

SEQ ID NO: 57107 - DNA, 25 bp, Canis familiaris
caagtttctgaggctggtggccgcc

SEQ ID NO: 57108 - DNA, 25 bp, Canis familiaris
caagtttcaggactaggctccaggg

SEQ ID NO: 57109 - DNA, 25 bp, Canis familiaris
caagtacgcggacaagcctgcgggc

SEQ ID NO: 57110 - DNA, 25 bp, Canis familiaris
caagtagagagggccccctcgtggg

SEQ ID NO: 57111 - DNA, 25 bp, Canis familiaris
caagtaagaagggccatcacgcgtg

SEQ ID NO: 57112 - DNA, 25 bp, Canis familiaris
caagtccaatcaaggccaatccgga

SEQ ID NO: 57113 - DNA, 25 bp, Canis familiaris
caagatccatccaatggcctaccag

SEQ ID NO: 57114 - DNA, 25 bp, Canis familiaris
caagtccgccaaacttcactgagaa

SEQ ID NO: 57115 - DNA, 25 bp, Canis familiaris
caagccccacagaacttcattacaa

SEQ ID NO: 57116 - DNA, 25 bp, Canis familiaris
caagcatcctcacagtttgcattcc

SEQ ID NO: 57117 - DNA, 25 bp, Canis familiaris
caagctcgagagcacagtcggctcc

SEQ ID NO: 57118 - DNA, 25 bp, Canis familiaris
caagatcatgaacccgctcagagtc

SEQ ID NO: 57119 - DNA, 25 bp, Canis familiaris
caagaagaatgccctgtcacagatc

SEQ ID NO: 57120 - DNA, 25 bp, Canis familiaris
caaggaaatccagtgctcgcttgca

SEQ ID NO: 57121 - DNA, 25 bp, Canis familiaris
caaggaagtggctgctcttgtcatg

SEQ ID NO: 57122 - DNA, 25 bp, Canis familiaris
caagtattccgagcagtctgtcatg

SEQ ID NO: 57123 - DNA, 25 bp, Canis familiaris
caagtgagtgcccaccatttcacat

SEQ ID NO: 57124 - DNA, 25 bp, Canis familiaris
caagtggattgccaggcttcgccac

SEQ ID NO: 57125 - DNA, 25 bp, Canis familiaris
caagtgcctgtgcaagtgtccggcc

SEQ ID NO: 57126 - DNA, 25 bp, Canis familiaris
caagtgcttcattgagagttccccc

SEQ ID NO: 57127 - DNA, 25 bp, Canis familiaris
caagtgttacagcaactcttccacc

SEQ ID NO: 57128 - DNA, 25 bp, Canis familiaris
caaggttccagcaagttcttccctt

SEQ ID NO: 57129 - DNA, 25 bp, Canis familiaris
caagaaaacagccagctttttcctt

SEQ ID NO: 57130 - DNA, 25 bp, Canis familiaris
caagagaactcaggccttatgttaa

SEQ ID NO: 57131 - DNA, 25 bp, Canis familiaris
caaggacatcatacccctattgtac

SEQ ID NO: 57132 - DNA, 25 bp, Canis familiaris
caaggactacatagccactgatggt

SEQ ID NO: 57133 - DNA, 25 bp, Canis familiaris
caagagtttataagcacgatgtgag

SEQ ID NO: 57134 - DNA, 25 bp, Canis familiaris
caagtgtttgtgtgcctggagagac

SEQ ID NO: 57135 - DNA, 25 bp, Canis familiaris
caaggttagattgtctgtaggcatc

SEQ ID NO: 57136 - DNA, 25 bp, Canis familiaris
caagttaagcttgtactgggatcaa

SEQ ID NO: 57137 - DNA, 25 bp, Canis familiaris
caactcctgagctcctacttggaga

SEQ ID NO: 57138 - DNA, 25 bp, Canis familiaris
cacacctaccatccagaacttggtt

SEQ ID NO: 57139 - DNA, 25 bp, Canis familiaris
caagcgtaccatccagtttgtggac

SEQ ID NO: 57140 - DNA, 25 bp, Canis familiaris
caagcctatacacagtttggaggaa

SEQ ID NO: 57141 - DNA, 25 bp, Canis familiaris
caactcctacagcttttggctagca

SEQ ID NO: 57142 - DNA, 25 bp, Canis familiaris
caagtcctacccttgggtcagtatc

SEQ ID NO: 57143 - DNA, 25 bp, Canis familiaris
caagtcccccaaatggttcggatcg

SEQ ID NO: 57144 - DNA, 25 bp, Canis familiaris
caacgcccaacgaggtcgtggacgt

SEQ ID NO: 57145 - DNA, 25 bp, Canis familiaris
caaccccagaccaggccagagggtg

SEQ ID NO: 57146 - DNA, 25 bp, Canis familiaris
caaccccagaccaggccagagggtg

SEQ ID NO: 57147 - DNA, 25 bp, Canis familiaris
caacccccccaatgtgaagctggga

SEQ ID NO: 57148 - DNA, 25 bp, Canis familiaris
caaaccctcctacatgggtggggat

SEQ ID NO: 57149 - DNA, 25 bp, Canis familiaris
caagccttcccctctgggaggggtg

SEQ ID NO: 57150 - DNA, 25 bp, Canis familiaris
ctacccctgtcctgtgttgacgggg

SEQ ID NO: 57151 - DNA, 25 bp, Canis familiaris
caacgcacgtgttcataatttgcac

SEQ ID NO: 57152 - DNA, 25 bp, Canis familiaris
caacggtgttaccttcattgaccct

SEQ ID NO: 57153 - DNA, 25 bp, Canis familiaris
caggccaagttgtgttaagaccggg

SEQ ID NO: 57154 - DNA, 25 bp, Canis familiaris
cactccaagtggtgtgtagccccag

SEQ ID NO: 57155 - DNA, 25 bp, Canis familiaris
caactcgttgtacggtaacccagtg

SEQ ID NO: 57156 - DNA, 25 bp, Canis familiaris
caagatctttaacctgtaccccagg

SEQ ID NO: 57157 - DNA, 25 bp, Canis familiaris
ctttgatttaatctggggccctgga

SEQ ID NO: 57158 - DNA, 25 bp, Canis familiaris
cttggtgtggggtggggacctgaca

SEQ ID NO: 57159 - DNA, 25 bp, Canis familiaris
caagggtgaccgtggtgagaccggc

SEQ ID NO: 57160 - DNA, 25 bp, Canis familiaris
caaccgatcccgtgggtatcgaggc

SEQ ID NO: 57161 - DNA, 25 bp, Canis familiaris
gcagaaggtccctggggttcgaggg

SEQ ID NO: 57162 - DNA, 25 bp, Canis familiaris
caagagttcgtgtgggttgtggggg

SEQ ID NO: 57163 - DNA, 25 bp, Canis familiaris
caaggttctgtgtctagtgtggggg

SEQ ID NO: 57164 - DNA, 25 bp, Canis familiaris
caaggtgcttggggggagagggagg

SEQ ID NO: 57165 - DNA, 25 bp, Canis familiaris
caagttcattggggctgggggctgc

SEQ ID NO: 57166 - DNA, 25 bp, Canis familiaris
caagtgctctggaaaagggggctgc

SEQ ID NO: 57167 - DNA, 25 bp, Canis familiaris
caaggtcctggaaaccttgcttcca

SEQ ID NO: 57168 - DNA, 25 bp, Canis familiaris
caagtctttgataatactttgtttc

SEQ ID NO: 57169 - DNA, 25 bp, Canis familiaris
caagtcacttggtatattttgttac

SEQ ID NO: 57170 - DNA, 25 bp, Canis familiaris
caagtcccgtatattatgtgtcata

SEQ ID NO: 57171 - DNA, 25 bp, Canis familiaris
caagttcctgtctttgttgtgatat

SEQ ID NO: 57172 - DNA, 25 bp, Canis familiaris
caagcttccaaccttgggaatctga

SEQ ID NO: 57173 - DNA, 25 bp, Canis familiaris
caacttgccagagcttcctgagtat

SEQ ID NO: 57174 - DNA, 25 bp, Canis familiaris
caagcctccgtgacagtccggaaac

SEQ ID NO: 57175 - DNA, 25 bp, Canis familiaris
caaccacatccgtgcccggaaattt

SEQ ID NO: 57176 - DNA, 25 bp, Canis familiaris
caagtcttacgaagcccaggatcct

SEQ ID NO: 57177 - DNA, 25 bp, Canis familiaris
caagttccggcagggccaggagcag

SEQ ID NO: 57178 - DNA, 25 bp, Canis familiaris
caagttacccgtggcaagtgcatgc

SEQ ID NO: 57179 - DNA, 25 bp, Canis familiaris
caaggtgacctggagcgcacagtgc

SEQ ID NO: 57180 - DNA, 25 bp, Canis familiaris
caagctgaaccgccagcagaccatg

SEQ ID NO: 57181 - DNA, 25 bp, Canis familiaris
caagcatgagttacaagcaaactgc

SEQ ID NO: 57182 - DNA, 25 bp, Canis familiaris
caagcagacgtacagcacggagccc

SEQ ID NO: 57183 - DNA, 25 bp, Canis familiaris
caaggacactgagcaagagaggccc

SEQ ID NO: 57184 - DNA, 25 bp, Canis familiaris
caaggtcactggccaaggtatcaca

SEQ ID NO: 57185 - DNA, 25 bp, Canis familiaris
caaggactcctgccagggtgactct

SEQ ID NO: 57186 - DNA, 25 bp, Canis familiaris
caaggactgaattggggtgccctcc

SEQ ID NO: 57187 - DNA, 25 bp, Canis familiaris
caaggtgtgaattggaatgacccca

SEQ ID NO: 57188 - DNA, 25 bp, Canis familiaris
caagggctgaactgatggccaccag

SEQ ID NO: 57189 - DNA, 25 bp, Canis familiaris
caagaggtatggccgaggccccgtc

SEQ ID NO: 57190 - DNA, 25 bp, Canis familiaris
caagggtacccaggcacccaaattg

SEQ ID NO: 57191 - DNA, 25 bp, Canis familiaris
caagaggacacggggacccaaagtg

SEQ ID NO: 57192 - DNA, 25 bp, Canis familiaris
caagaaaccccgtacctataagcag

SEQ ID NO: 57193 - DNA, 25 bp, Canis familiaris
caacccacctaggatatcccaatag

SEQ ID NO: 57194 - DNA, 25 bp, Canis familiaris
caacccaagtgtgacattccaaaaa

SEQ ID NO: 57195 - DNA, 25 bp, Canis familiaris
caacccacagttgacttggaaacaa

SEQ ID NO: 57196 - DNA, 25 bp, Canis familiaris
caacccctagttgcctgggagacaa

SEQ ID NO: 57197 - DNA, 25 bp, Canis familiaris
caacaccccaactcggaggataaat

SEQ ID NO: 57198 - DNA, 25 bp, Canis familiaris
caagacctcccctgttgggaagaag

SEQ ID NO: 57199 - DNA, 25 bp, Canis familiaris
caaccccttcggattcgtgaaaatg

SEQ ID NO: 57200 - DNA, 25 bp, Canis familiaris
caacctccgtttcttctgtaaaatg

SEQ ID NO: 57201 - DNA, 25 bp, Canis familiaris
cacaactctgggcttttcctaaagt

SEQ ID NO: 57202 - DNA, 25 bp, Canis familiaris
caaccacttggcatttccacgaata

SEQ ID NO: 57203 - DNA, 25 bp, Canis familiaris
caagtactctggcagtttcccagat

SEQ ID NO: 57204 - DNA, 25 bp, Canis familiaris
caagtttggtgctgtattggccgag

SEQ ID NO: 57205 - DNA, 25 bp, Canis familiaris
caagttctggctttggttgctgcct

SEQ ID NO: 57206 - DNA, 25 bp, Canis familiaris
caagagtcaggcgggggagctggca

SEQ ID NO: 57207 - DNA, 25 bp, Canis familiaris
caaggtgggccaaggggctgtctgg

SEQ ID NO: 57208 - DNA, 25 bp, Canis familiaris
caaggagggctcagagggctgtccc

SEQ ID NO: 57209 - DNA, 25 bp, Canis familiaris
caagagacgcgagagacgtgcttcc

SEQ ID NO: 57210 - DNA, 25 bp, Canis familiaris
caagaccgtgaggaacgtcaactcc

SEQ ID NO: 57211 - DNA, 25 bp, Canis familiaris
caagggtatcgacaggtacaatcct

SEQ ID NO: 57212 - DNA, 25 bp, Canis familiaris
caactgggacgacatggagaagatc

SEQ ID NO: 57213 - DNA, 25 bp, Canis familiaris
caagggtgacacatctggagactac

SEQ ID NO: 57214 - DNA, 25 bp, Canis familiaris
caaggtggacacgctgagtcagcct

SEQ ID NO: 57215 - DNA, 25 bp, Canis familiaris
caagcagcttgattccaccaatcag

SEQ ID NO: 57216 - DNA, 25 bp, Canis familiaris
caagagctggcctcccagaagattt

SEQ ID NO: 57217 - DNA, 25 bp, Canis familiaris
caagtgacgagctgcccaaagatcc

SEQ ID NO: 57218 - DNA, 25 bp, Canis familiaris
caagatgaagcgccaagccaaggac

SEQ ID NO: 57219 - DNA, 25 bp, Canis familiaris
caagagaaggacaagcacgcggagg

SEQ ID NO: 57220 - DNA, 25 bp, Canis familiaris
caagagaagcgacggctcctgtgca

SEQ ID NO: 57221 - DNA, 25 bp, Canis familiaris
caaggagagcggggcggctgtgtga

SEQ ID NO: 57222 - DNA, 25 bp, Canis familiaris
caaggagagcgggcaggagggggtg

SEQ ID NO: 57223 - DNA, 25 bp, Canis familiaris
caaggatcagctggccatggggagg

SEQ ID NO: 57224 - DNA, 25 bp, Canis familiaris
caagagaagtaggcagaagaagctg

SEQ ID NO: 57225 - DNA, 25 bp, Canis familiaris
caagccaatgtgtcacagagccaag

SEQ ID NO: 57226 - DNA, 25 bp, Canis familiaris
caagccagaatcttcgactgatgaa

SEQ ID NO: 57227 - DNA, 25 bp, Canis familiaris
caaggaggacctcactgagatcagg

SEQ ID NO: 57228 - DNA, 25 bp, Canis familiaris
caagccaacacccaactgcaaatgg

SEQ ID NO: 57229 - DNA, 25 bp, Canis familiaris
caagtactccccgcagaatgatgtg

SEQ ID NO: 57230 - DNA, 25 bp, Canis familiaris
caagatgaccatgcccaagctaggg

SEQ ID NO: 57231 - DNA, 25 bp, Canis familiaris
caagagagcaactccgctctagcgc

SEQ ID NO: 57232 - DNA, 25 bp, Canis familiaris
caagggcggcagaccgccaaggctc

SEQ ID NO: 57233 - DNA, 25 bp, Canis familiaris
caaggggccaggtctcaaagcgttt

SEQ ID NO: 57234 - DNA, 25 bp, Canis familiaris
caaggaggccagagtgaccacgttc

SEQ ID NO: 57235 - DNA, 25 bp, Canis familiaris
caagacacccagttggagtccgttg

SEQ ID NO: 57236 - DNA, 25 bp, Canis familiaris
caagacactacggtgggcactcttt

SEQ ID NO: 57237 - DNA, 25 bp, Canis familiaris
caagaacatcaacctacggctcttc

SEQ ID NO: 57238 - DNA, 25 bp, Canis familiaris
caagaatgtaacatcccagccttcc

SEQ ID NO: 57239 - DNA, 25 bp, Canis familiaris
caagacttgaacttgcccagaagta

SEQ ID NO: 57240 - DNA, 25 bp, Canis familiaris
gcacaacttgaacacctaaaagggg

SEQ ID NO: 57241 - DNA, 25 bp, Canis familiaris
caactcttgcaggaacctaaaatgg

SEQ ID NO: 57242 - DNA, 25 bp, Canis familiaris
caactgtatggggaacataaaagta

SEQ ID NO: 57243 - DNA, 25 bp, Canis familiaris
caagcggtcgacattgcagaaaagt

SEQ ID NO: 57244 - DNA, 25 bp, Canis familiaris
caagtgttctccactgggtaatgtg

SEQ ID NO: 57245 - DNA, 25 bp, Canis familiaris
caagtttggccccggaattcattgg

SEQ ID NO: 57246 - DNA, 25 bp, Canis familiaris
caagatttaccccggacatggcagg

SEQ ID NO: 57247 - DNA, 25 bp, Canis familiaris
caagaactccctgctgggcatggaa

SEQ ID NO: 57248 - DNA, 25 bp, Canis familiaris
caagtacttcttggcagagctgctg

SEQ ID NO: 57249 - DNA, 25 bp, Canis familiaris
caagtatttcatgggcactcctggt

SEQ ID NO: 57250 - DNA, 25 bp, Canis familiaris
caaggtttctgccagcccactgttg

SEQ ID NO: 57251 - DNA, 25 bp, Canis familiaris
caagtgttctctgtgacacacaaca

SEQ ID NO: 57252 - DNA, 25 bp, Canis familiaris
caagttctacaattgaccacaagcg

SEQ ID NO: 57253 - DNA, 25 bp, Canis familiaris
caagttctaccagtgagcaggccct

SEQ ID NO: 57254 - DNA, 25 bp, Canis familiaris
caagatcctacatgctgctgcaggc

SEQ ID NO: 57255 - DNA, 25 bp, Canis familiaris
caagtcctagctgtgccggcacagc

SEQ ID NO: 57256 - DNA, 25 bp, Canis familiaris
caaggtcaagctgtggccaacatct

SEQ ID NO: 57257 - DNA, 25 bp, Canis familiaris
caaggtgaagctgtctcaaacattc

SEQ ID NO: 57258 - DNA, 25 bp, Canis familiaris
caagggaacttgactctagaactag

SEQ ID NO: 57259 - DNA, 25 bp, Canis familiaris
caagcggaactgcgcttaaaacagc

SEQ ID NO: 57260 - DNA, 25 bp, Canis familiaris
caagggaagttgctgtcctgaaccc

SEQ ID NO: 57261 - DNA, 25 bp, Canis familiaris
caagggaatgcctggccctgaaaac

SEQ ID NO: 57262 - DNA, 25 bp, Canis familiaris
caaggggagcattggccccggaaag

SEQ ID NO: 57263 - DNA, 25 bp, Canis familiaris
caagccccacattggatcctgggga

SEQ ID NO: 57264 - DNA, 25 bp, Canis familiaris
caagcccagcagggagtccttgctg

SEQ ID NO: 57265 - DNA, 25 bp, Canis familiaris
caactggcatgggtggccactttga

SEQ ID NO: 57266 - DNA, 25 bp, Canis familiaris
caaggtgctgaggggctcattcctg

SEQ ID NO: 57267 - DNA, 25 bp, Canis familiaris
caaggtgctggacgtgctgtgttcc

SEQ ID NO: 57268 - DNA, 25 bp, Canis familiaris
caagggatgtgctggagtgtggccc

SEQ ID NO: 57269 - DNA, 25 bp, Canis familiaris
caagtgtgagtgtggcagctgcgtg

SEQ ID NO: 57270 - DNA, 25 bp, Canis familiaris
caactctgcatttgtggctgctgct

SEQ ID NO: 57271 - DNA, 25 bp, Canis familiaris
caagtgctgctggcagttcttctct

SEQ ID NO: 57272 - DNA, 25 bp, Canis familiaris
caagatggctgcgctcttgtcgaga

SEQ ID NO: 57273 - DNA, 25 bp, Canis familiaris
caagatgcggcgtctcaatgtcagc

SEQ ID NO: 57274 - DNA, 25 bp, Canis familiaris
caagccagagagactgcaattcaac

SEQ ID NO: 57275 - DNA, 25 bp, Canis familiaris
caagccaagcaggtgattgtccagg

SEQ ID NO: 57276 - DNA, 25 bp, Canis familiaris
caaccagatgacgtgtactactgtg

SEQ ID NO: 57277 - DNA, 25 bp, Canis familiaris
caagcttgacagctgctagttctgt

SEQ ID NO: 57278 - DNA, 25 bp, Canis familiaris
caagtggtcagcttttgctttctct

SEQ ID NO: 57279 - DNA, 25 bp, Canis familiaris
caagtggtcaacaaactctcttctc

SEQ ID NO: 57280 - DNA, 25 bp, Canis familiaris
caagtttgaactgatcctctgtctc

SEQ ID NO: 57281 - DNA, 25 bp, Canis familiaris
caagtttatcacacacactgcttcc

SEQ ID NO: 57282 - DNA, 25 bp, Canis familiaris
cagttgtaatcccccagagtttata

SEQ ID NO: 57283 - DNA, 25 bp, Canis familiaris
cagcattttaatgacctacttttaa

SEQ ID NO: 57284 - DNA, 25 bp, Canis familiaris
cagatttgttgacacctacccaaaa

SEQ ID NO: 57285 - DNA, 25 bp, Canis familiaris
cagtcctgtaatcctcctaagtaag

SEQ ID NO: 57286 - DNA, 25 bp, Canis familiaris
cagtcctgacaaccccaaagggacg

SEQ ID NO: 57287 - DNA, 25 bp, Canis familiaris
caagcctgactcacctgacaagggt

SEQ ID NO: 57288 - DNA, 25 bp, Canis familiaris
caagccatcaggaactcaacagaag

SEQ ID NO: 57289 - DNA, 25 bp, Canis familiaris
caagcagatctactactcggacaag

SEQ ID NO: 57290 - DNA, 25 bp, Canis familiaris
caagtaagatgcctgtctctgcttc

SEQ ID NO: 57291 - DNA, 25 bp, Canis familiaris
caagtatatgtacacgctctatctg

SEQ ID NO: 57292 - DNA, 25 bp, Canis familiaris
caagtatgtgtacgactctgccttc

SEQ ID NO: 57293 - DNA, 25 bp, Canis familiaris
caagtagtgtcttcctacctatctc

SEQ ID NO: 57294 - DNA, 25 bp, Canis familiaris
caagttttctagttcacctttgcgg

SEQ ID NO: 57295 - DNA, 25 bp, Canis familiaris
caacttttaacttgccctgtgatgc

SEQ ID NO: 57296 - DNA, 25 bp, Canis familiaris
caacgtagtgattatcagccttact

SEQ ID NO: 57297 - DNA, 25 bp, Canis familiaris
caactgataagtttcccgtatggtc

SEQ ID NO: 57298 - DNA, 25 bp, Canis familiaris
caagttaaaggtcccaggtggcgca

SEQ ID NO: 57299 - DNA, 25 bp, Canis familiaris
caagaaaaacctggccagccggcga

SEQ ID NO: 57300 - DNA, 25 bp, Canis familiaris
ctagagctaatacatgccgacgggc

SEQ ID NO: 57301 - DNA, 25 bp, Canis familiaris
cacaggtaatacaacacgccggact

SEQ ID NO: 57302 - DNA, 25 bp, Canis familiaris
cacagttagcccacacggatagacc

SEQ ID NO: 57303 - DNA, 25 bp, Canis familiaris
caaggtgacaccagcacgaaaaacc

SEQ ID NO: 57304 - DNA, 25 bp, Canis familiaris
caaggtgactcctggaataaccccg

SEQ ID NO: 57305 - DNA, 25 bp, Canis familiaris
caagagctattttagcctataaccc

SEQ ID NO: 57306 - DNA, 25 bp, Canis familiaris
caagcctatttggaccaggaaccct

SEQ ID NO: 57307 - DNA, 25 bp, Canis familiaris
caagcgctacagttacctgaaaccc

SEQ ID NO: 57308 - DNA, 25 bp, Canis familiaris
caagctgtggcttttttccaactct

SEQ ID NO: 57309 - DNA, 25 bp, Canis familiaris
caagtctgaggggtttccacctttg

SEQ ID NO: 57310 - DNA, 25 bp, Canis familiaris
caagttgggaggtatcccatccctc

SEQ ID NO: 57311 - DNA, 25 bp, Canis familiaris
caagttgaagtacctggccttcctc

SEQ ID NO: 57312 - DNA, 25 bp, Canis familiaris
caagttgaagtacctggccttcctc

SEQ ID NO: 57313 - DNA, 25 bp, Canis familiaris
caagtctaaataccgccatctttca

SEQ ID NO: 57314 - DNA, 25 bp, Canis familiaris
caagtctcaagactgcccagttttt

SEQ ID NO: 57315 - DNA, 25 bp, Canis familiaris
caagattcacgttaccaattaagtt

SEQ ID NO: 57316 - DNA, 25 bp, Canis familiaris
caagagtcaggtaacctccttatca

SEQ ID NO: 57317 - DNA, 25 bp, Canis familiaris
caagtatccgaaactcatctcctac

SEQ ID NO: 57318 - DNA, 25 bp, Canis familiaris
caagctaatcgttgaccattcccaa

SEQ ID NO: 57319 - DNA, 25 bp, Canis familiaris
caagtgcaagcgtgacagcttcccc

SEQ ID NO: 57320 - DNA, 25 bp, Canis familiaris
caagtgcgagtctaaacttcctccc

SEQ ID NO: 57321 - DNA, 25 bp, Canis familiaris
caagggggcgcagagctctgccccc

SEQ ID NO: 57322 - DNA, 25 bp, Canis familiaris
caaggggaggaggactcgcggtgca

SEQ ID NO: 57323 - DNA, 25 bp, Canis familiaris
caagggcgagtggaagccccggcag

SEQ ID NO: 57324 - DNA, 25 bp, Canis familiaris
caagggctgcaggaaagcgcccagc

SEQ ID NO: 57325 - DNA, 25 bp, Canis familiaris
caagggcatcgtgaagggacatcat

SEQ ID NO: 57326 - DNA, 25 bp, Canis familiaris
caagcttgcctgttgaagaaatata

SEQ ID NO: 57327 - DNA, 25 bp, Canis familiaris
caagcctattgactgaagagagaca

SEQ ID NO: 57328 - DNA, 25 bp, Canis familiaris
caactctgcgcagcgacgagaccat

SEQ ID NO: 57329 - DNA, 25 bp, Canis familiaris
caagtctaaccgttgatcacctggc

SEQ ID NO: 57330 - DNA, 25 bp, Canis familiaris
caagtctaaccgttgatcacctggc

SEQ ID NO: 57331 - DNA, 25 bp, Canis familiaris
caagtctaaccgttgatcacctggc

SEQ ID NO: 57332 - DNA, 25 bp, Canis familiaris
caagtctactctcgtggatacacag

SEQ ID NO: 57333 - DNA, 25 bp, Canis familiaris
caagtcatcactattggcaacgagc

SEQ ID NO: 57334 - DNA, 25 bp, Canis familiaris
caagctcaatcgacttgccacatcg

SEQ ID NO: 57335 - DNA, 25 bp, Canis familiaris
caagctcaatcgacttgcctacatc

SEQ ID NO: 57336 - DNA, 25 bp, Canis familiaris
caagctgcaagaacttacccacatg

SEQ ID NO: 57337 - DNA, 25 bp, Canis familiaris
caagagccatgaacagttaccactg

SEQ ID NO: 57338 - DNA, 25 bp, Canis familiaris
caagaccagctttgcagtgaccgct

SEQ ID NO: 57339 - DNA, 25 bp, Canis familiaris
caagccctgtcggagatgatccagt

SEQ ID NO: 57340 - DNA, 25 bp, Canis familiaris
caagaaggttgccatgctgatccgg

SEQ ID NO: 57341 - DNA, 25 bp, Canis familiaris
caagaagcccctgctcatccagggg

SEQ ID NO: 57342 - DNA, 25 bp, Canis familiaris
caagacgtccctgtggtgagctggg

SEQ ID NO: 57343 - DNA, 25 bp, Canis familiaris
caagacctctccacggtggtgagga

SEQ ID NO: 57344 - DNA, 25 bp, Canis familiaris
caagtcctgttcacgcttggatggg

SEQ ID NO: 57345 - DNA, 25 bp, Canis familiaris
caaccgcgcctcaggagttatgggt

SEQ ID NO: 57346 - DNA, 25 bp, Canis familiaris
caacaggctgactgggtgttagtgg

SEQ ID NO: 57347 - DNA, 25 bp, Canis familiaris
caacctcagacttgggtggcctgtg

SEQ ID NO: 57348 - DNA, 25 bp, Canis familiaris
caagcaatcaacaagttcacgcctt

SEQ ID NO: 57349 - DNA, 25 bp, Canis familiaris
caagaatacacttgtgtccccgtgc

SEQ ID NO: 57350 - DNA, 25 bp, Canis familiaris
caagactacaatgcttctctccaag

SEQ ID NO: 57351 - DNA, 25 bp, Canis familiaris
caagtccacagctcatagttctcat

SEQ ID NO: 57352 - DNA, 25 bp, Canis familiaris
caagtgcccctactatgagattatg

SEQ ID NO: 57353 - DNA, 25 bp, Canis familiaris
caagggactctgcccatgtgtttgc

SEQ ID NO: 57354 - DNA, 25 bp, Canis familiaris
caagggagtcacacagattttctac

SEQ ID NO: 57355 - DNA, 25 bp, Canis familiaris
caagaaagtccaaagctccatccta

SEQ ID NO: 57356 - DNA, 25 bp, Canis familiaris
caagaatactccaagaggccccttt

SEQ ID NO: 57357 - DNA, 25 bp, Canis familiaris
caagaataccagcaggccctgttgc

SEQ ID NO: 57358 - DNA, 25 bp, Canis familiaris
caagttgcccaatgtgcggtgttcg

SEQ ID NO: 57359 - DNA, 25 bp, Canis familiaris
caagtgtgcccaactgtgcaatgac

SEQ ID NO: 57360 - DNA, 25 bp, Canis familiaris
caagtgtgcccagggctgcatctgc

SEQ ID NO: 57361 - DNA, 25 bp, Canis familiaris
caagggctctgagggctgatctggg

SEQ ID NO: 57362 - DNA, 25 bp, Canis familiaris
caacggcgctgaggacgagtcggcc

SEQ ID NO: 57363 - DNA, 25 bp, Canis familiaris
caagccggggaaggagccaggcctg

SEQ ID NO: 57364 - DNA, 25 bp, Canis familiaris
caagccccaattttgaaaggcctgg

SEQ ID NO: 57365 - DNA, 25 bp, Canis familiaris
caagctccaaggctgtgaaagtcct

SEQ ID NO: 57366 - DNA, 25 bp, Canis familiaris
caagcccactcgagggtagtctgtc

SEQ ID NO: 57367 - DNA, 25 bp, Canis familiaris
caagcccttgggtggggctctgtgc

SEQ ID NO: 57368 - DNA, 25 bp, Canis familiaris
caagcccggggaggaggccttatgc

SEQ ID NO: 57369 - DNA, 25 bp, Canis familiaris
caagaccagggggcgttctgtggac

SEQ ID NO: 57370 - DNA, 25 bp, Canis familiaris
caaaccaaggtctgtaggggcactg

SEQ ID NO: 57371 - DNA, 25 bp, Canis familiaris
caagaccaaggcaggtggagcccct

SEQ ID NO: 57372 - DNA, 25 bp, Canis familiaris
caagacaaaggcggtttcccgctca

SEQ ID NO: 57373 - DNA, 25 bp, Canis familiaris
caagagaattggtcacctacccacc

SEQ ID NO: 57374 - DNA, 25 bp, Canis familiaris
caagcaaagggaacctgtcgcctcc

SEQ ID NO: 57375 - DNA, 25 bp, Canis familiaris
caagaacaaatcaaggcttcagcct

SEQ ID NO: 57376 - DNA, 25 bp, Canis familiaris
caagaccaattgaagcgttatgaaa

SEQ ID NO: 57377 - DNA, 25 bp, Canis familiaris
caagcactcaggccacaagtctaaa

SEQ ID NO: 57378 - DNA, 25 bp, Canis familiaris
cacaggctgctgcgcaaagggaact

SEQ ID NO: 57379 - DNA, 25 bp, Canis familiaris
caagagctgctgcagaaaagctatt

SEQ ID NO: 57380 - DNA, 25 bp, Canis familiaris
caagagcctttgaaacatgcatttt

SEQ ID NO: 57381 - DNA, 25 bp, Canis familiaris
caagccccttgatgacgctttgtta

SEQ ID NO: 57382 - DNA, 25 bp, Canis familiaris
caagccctgctacaaggttgtttac

SEQ ID NO: 57383 - DNA, 25 bp, Canis familiaris
caagacgctctatggggtttactac

SEQ ID NO: 57384 - DNA, 25 bp, Canis familiaris
caaacgccattctgggagtgtccct

SEQ ID NO: 57385 - DNA, 25 bp, Canis familiaris
caacacccttcgaggattcctcaat

SEQ ID NO: 57386 - DNA, 25 bp, Canis familiaris
caagaaccattccaccagtttgtaa

SEQ ID NO: 57387 - DNA, 25 bp, Canis familiaris
caagaacttgctggaccgcttggag

SEQ ID NO: 57388 - DNA, 25 bp, Canis familiaris
caagaacatgtgggtgcacttgtct

SEQ ID NO: 57389 - DNA, 25 bp, Canis familiaris
caagcagatctgcctggtcatgctc

SEQ ID NO: 57390 - DNA, 25 bp, Canis familiaris
caagctgcacaggatggcagcagtg

SEQ ID NO: 57391 - DNA, 25 bp, Canis familiaris
caagtcagcagtagtctgcagtcca

SEQ ID NO: 57392 - DNA, 25 bp, Canis familiaris
caagtcagcacaagtgtcgccacag

SEQ ID NO: 57393 - DNA, 25 bp, Canis familiaris
caagtaccatatggactgctcatat

SEQ ID NO: 57394 - DNA, 25 bp, Canis familiaris
caagaatctcattggatgctggtgt

SEQ ID NO: 57395 - DNA, 25 bp, Canis familiaris
caagtatcacgtcgatgctgtgtgc

SEQ ID NO: 57396 - DNA, 25 bp, Canis familiaris
caagtgtcacagacgtgctgctggg

SEQ ID NO: 57397 - DNA, 25 bp, Canis familiaris
caagataaagaaatgtgtgtgtgtg

SEQ ID NO: 57398 - DNA, 25 bp, Canis familiaris
caaaacccaaatctgtggtcgcgcc

SEQ ID NO: 57399 - DNA, 25 bp, Canis familiaris
caaaacccaaatctggtcataatct

SEQ ID NO: 57400 - DNA, 25 bp, Canis familiaris
caacgatcccgattcctgtaaaatg

SEQ ID NO: 57401 - DNA, 25 bp, Canis familiaris
caacctctcccagccaataaaataa

SEQ ID NO: 57402 - DNA, 25 bp, Canis familiaris
caagtcttgctttcccagacagaaa

SEQ ID NO: 57403 - DNA, 25 bp, Canis familiaris
caagatcattgctcctcctgagcgc

SEQ ID NO: 57404 - DNA, 25 bp, Canis familiaris
caagaatgtgcccagtcgtggtgcc

SEQ ID NO: 57405 - DNA, 25 bp, Canis familiaris
caagacttgtgccagtctgctttcc

SEQ ID NO: 57406 - DNA, 25 bp, Canis familiaris
caacgttctggcccgttatgccagc

SEQ ID NO: 57407 - DNA, 25 bp, Canis familiaris
caagcgtttgtgccgcgttggcacc

SEQ ID NO: 57408 - DNA, 25 bp, Canis familiaris
caacgttttggccacaggctgcatg

SEQ ID NO: 57409 - DNA, 25 bp, Canis familiaris
caacgtcttgaacaggcgctgatga

SEQ ID NO: 57410 - DNA, 25 bp, Canis familiaris
caagaccactaaccacagccttgat

SEQ ID NO: 57411 - DNA, 25 bp, Canis familiaris
caagaacctgtgttcacaccttctt

SEQ ID NO: 57412 - DNA, 25 bp, Canis familiaris
caaagaccctactcccattatgggg

SEQ ID NO: 57413 - DNA, 25 bp, Canis familiaris
caagaagccctcgatacctaatatt

SEQ ID NO: 57414 - DNA, 25 bp, Canis familiaris
caactagccagttgtatactcagtt

SEQ ID NO: 57415 - DNA, 25 bp, Canis familiaris
caagccacacagtagatgatgatct

SEQ ID NO: 57416 - DNA, 25 bp, Canis familiaris
caagctaatcactgaggatgttgca

SEQ ID NO: 57417 - DNA, 25 bp, Canis familiaris
caagccagtagctcatgttgtagca

SEQ ID NO: 57418 - DNA, 25 bp, Canis familiaris
caacacaactgcttgcactggtaca

SEQ ID NO: 57419 - DNA, 25 bp, Canis familiaris
caaaccacggtgtcgggagcttagg

SEQ ID NO: 57420 - DNA, 25 bp, Canis familiaris
caagaccgtggtcccaggagtgttc

SEQ ID NO: 57421 - DNA, 25 bp, Canis familiaris
caacacggggtgctcagtactttac

SEQ ID NO: 57422 - DNA, 25 bp, Canis familiaris
caaaagggagtcctcggagcctgta

SEQ ID NO: 57423 - DNA, 25 bp, Canis familiaris
caagacggaacccctgagaccgtgt

SEQ ID NO: 57424 - DNA, 25 bp, Canis familiaris
caagacggaccagagcgaaagcatt

SEQ ID NO: 57425 - DNA, 25 bp, Canis familiaris
caagccggaggagagccatgcactg

SEQ ID NO: 57426 - DNA, 25 bp, Canis familiaris
caagtccaaagagctgcaccctgat

SEQ ID NO: 57427 - DNA, 25 bp, Canis familiaris
caagtgcgagaagcagctggccctg

SEQ ID NO: 57428 - DNA, 25 bp, Canis familiaris
caagccgcaaaggcagcaggctacc

SEQ ID NO: 57429 - DNA, 25 bp, Canis familiaris
caagagatgcagcgggcagcagctc

SEQ ID NO: 57430 - DNA, 25 bp, Canis familiaris
caagagatgtgccaggggctgctgg

SEQ ID NO: 57431 - DNA, 25 bp, Canis familiaris
caagaagagctgctgctcctgctgc

SEQ ID NO: 57432 - DNA, 25 bp, Canis familiaris
caagcaagcactgatgctcctgctg

SEQ ID NO: 57433 - DNA, 25 bp, Canis familiaris
caagcaagctgctgagtgcacctgg

SEQ ID NO: 57434 - DNA, 25 bp, Canis familiaris
caagcgatgtcatgaggcaccatat

SEQ ID NO: 57435 - DNA, 25 bp, Canis familiaris
caagcgttcagcagtaccactttat

SEQ ID NO: 57436 - DNA, 25 bp, Canis familiaris
caacgtagatgcagtgcaccctggc

SEQ ID NO: 57437 - DNA, 25 bp, Canis familiaris
caactaaagctggtggcctcatctc

SEQ ID NO: 57438 - DNA, 25 bp, Canis familiaris
caaccaaagggctacttcttcgtgg

SEQ ID NO: 57439 - DNA, 25 bp, Canis familiaris
cacacctaaaacacctctttgtctc

SEQ ID NO: 57440 - DNA, 25 bp, Canis familiaris
caacccaaaagcaacccattcagcc

SEQ ID NO: 57441 - DNA, 25 bp, Canis familiaris
caacatcaaaacatactctaaccac

SEQ ID NO: 57442 - DNA, 25 bp, Canis familiaris
caactacaaccaatcccaaaaatct

SEQ ID NO: 57443 - DNA, 25 bp, Canis familiaris
cacccacaaaccacgaaggagacta

SEQ ID NO: 57444 - DNA, 25 bp, Canis familiaris
caacaccaaacgttcgggcgtaatg

SEQ ID NO: 57445 - DNA, 25 bp, Canis familiaris
caacattccatagaccggggtagtt

SEQ ID NO: 57446 - DNA, 25 bp, Canis familiaris
caagcaatgcacaccaacagggggg

SEQ ID NO: 57447 - DNA, 25 bp, Canis familiaris
caagcactccctctaaggcagtggt

SEQ ID NO: 57448 - DNA, 25 bp, Canis familiaris
caagcactcggcacttcagaggaag

SEQ ID NO: 57449 - DNA, 25 bp, Canis familiaris
caacccaggccctggaggaccagat

SEQ ID NO: 57450 - DNA, 25 bp, Canis familiaris
caacggggccgagggagggagatat

SEQ ID NO: 57451 - DNA, 25 bp, Canis familiaris
caacggcgagcctggcaaggctggt

SEQ ID NO: 57452 - DNA, 25 bp, Canis familiaris
caacttggaggcactgcctggctgg

SEQ ID NO: 57453 - DNA, 25 bp, Canis familiaris
caagaacgggcacctggctgtggtg

SEQ ID NO: 57454 - DNA, 25 bp, Canis familiaris
caagaacggggaattgcggcgctcg

SEQ ID NO: 57455 - DNA, 25 bp, Canis familiaris
caacacccggaaatttggtcaatgg

SEQ ID NO: 57456 - DNA, 25 bp, Canis familiaris
caacacccagaggttgtttgaatgg

SEQ ID NO: 57457 - DNA, 25 bp, Canis familiaris
caaccaccctggattttggtcctgt

SEQ ID NO: 57458 - DNA, 25 bp, Canis familiaris
caagtaccactgttttgttgctgcc

SEQ ID NO: 57459 - DNA, 25 bp, Canis familiaris
caaccagccctgtgattctgtgtgc

SEQ ID NO: 57460 - DNA, 25 bp, Canis familiaris
caacgacctcatgtgacctgtgggt

SEQ ID NO: 57461 - DNA, 25 bp, Canis familiaris
caacaccctgctacttcccagggtg

SEQ ID NO: 57462 - DNA, 25 bp, Canis familiaris
caacgtgtttcacttgtccagggga

SEQ ID NO: 57463 - DNA, 25 bp, Canis familiaris
caactggtttattttcatggggtgg

SEQ ID NO: 57464 - DNA, 25 bp, Canis familiaris
caactagtttgcatttccctggagg

SEQ ID NO: 57465 - DNA, 25 bp, Canis familiaris
caccgccattggacgttcaaatggg

SEQ ID NO: 57466 - DNA, 25 bp, Canis familiaris
caagacaatttgaccctagaatggg

SEQ ID NO: 57467 - DNA, 25 bp, Canis familiaris
caagaccacttggacctaacacggc

SEQ ID NO: 57468 - DNA, 25 bp, Canis familiaris
cactagccctgtaccctgaaaagtg

SEQ ID NO: 57469 - DNA, 25 bp, Canis familiaris
caaagaccaatcgtcctaactacgt

SEQ ID NO: 57470 - DNA, 25 bp, Canis familiaris
caagagactctaacacctacacgtt

SEQ ID NO: 57471 - DNA, 25 bp, Canis familiaris
caagattctctagcaccaactcagc

SEQ ID NO: 57472 - DNA, 25 bp, Canis familiaris
caagttctcttggacctactgatga

SEQ ID NO: 57473 - DNA, 25 bp, Canis familiaris
caagtttctatagctctcacatgag

SEQ ID NO: 57474 - DNA, 25 bp, Canis familiaris
caagtctttcatagcccttcaagtg

SEQ ID NO: 57475 - DNA, 25 bp, Canis familiaris
caagatctcttaaatccttcacaag

SEQ ID NO: 57476 - DNA, 25 bp, Canis familiaris
caagatcacccacgtgcagttcaat

SEQ ID NO: 57477 - DNA, 25 bp, Canis familiaris
caagatcctggacgacgtctccatc

SEQ ID NO: 57478 - DNA, 25 bp, Canis familiaris
caagatgcagcttgaggaccctctc

SEQ ID NO: 57479 - DNA, 25 bp, Canis familiaris
caagattgcgaaggacacctccacc

SEQ ID NO: 57480 - DNA, 25 bp, Canis familiaris
caagaatgcgaattagatccctaga

SEQ ID NO: 57481 - DNA, 25 bp, Canis familiaris
caagaattaaattactgcccagagt

SEQ ID NO: 57482 - DNA, 25 bp, Canis familiaris
caagagtctaattcaccatcctccg

SEQ ID NO: 57483 - DNA, 25 bp, Canis familiaris
caagagaagcactctgtctccttcg

SEQ ID NO: 57484 - DNA, 25 bp, Canis familiaris
caagagggacatgcttccccttgtc

SEQ ID NO: 57485 - DNA, 25 bp, Canis familiaris
caagaggtggatgcttacccgactc

SEQ ID NO: 57486 - DNA, 25 bp, Canis familiaris
caaatgcgttatgttaatgaccagc

SEQ ID NO: 57487 - DNA, 25 bp, Canis familiaris
caacatgttttctttgagagattag

SEQ ID NO: 57488 - DNA, 25 bp, Canis familiaris
caacggctcttcgttggcatgatcc

SEQ ID NO: 57489 - DNA, 25 bp, Canis familiaris
caacgtcatcctggtcaagcttacc

SEQ ID NO: 57490 - DNA, 25 bp, Canis familiaris
caacatgtcatgtctgagttcgtta

SEQ ID NO: 57491 - DNA, 25 bp, Canis familiaris
caagctgtgcagtggtcctattgtt

SEQ ID NO: 57492 - DNA, 25 bp, Canis familiaris
caagcttaggtattgccagtctctt

SEQ ID NO: 57493 - DNA, 25 bp, Canis familiaris
caagtataacttccctgtcatctat

SEQ ID NO: 57494 - DNA, 25 bp, Canis familiaris
caagaatgatactttcctccttatt

SEQ ID NO: 57495 - DNA, 25 bp, Canis familiaris
caagagatttgagctttcttttttg

SEQ ID NO: 57496 - DNA, 25 bp, Canis familiaris
caagagtgtttcccttttgagtttg

SEQ ID NO: 57497 - DNA, 25 bp, Canis familiaris
caagacagtattaactttgctagtt

SEQ ID NO: 57498 - DNA, 25 bp, Canis familiaris
caagaggtttcagcattcccaatta

SEQ ID NO: 57499 - DNA, 25 bp, Canis familiaris
caagcgtttttggcatttccacctg

SEQ ID NO: 57500 - DNA, 25 bp, Canis familiaris
caagtttacttgttgttcccagagt

SEQ ID NO: 57501 - DNA, 25 bp, Canis familiaris
caagtatttcttatcatctgcccag

SEQ ID NO: 57502 - DNA, 25 bp, Canis familiaris
caagttcctctattgtatatgaagg

SEQ ID NO: 57503 - DNA, 25 bp, Canis familiaris
caagttccatccaatctatgtgaag

SEQ ID NO: 57504 - DNA, 25 bp, Canis familiaris
caagttccactgcattacatgcaaa

SEQ ID NO: 57505 - DNA, 25 bp, Canis familiaris
caagatctgtgccggtctgacaaat

SEQ ID NO: 57506 - DNA, 25 bp, Canis familiaris
caagctgggccagatgctgagcatc

SEQ ID NO: 57507 - DNA, 25 bp, Canis familiaris
caagaggacaatcatctgggccaat

SEQ ID NO: 57508 - DNA, 25 bp, Canis familiaris
caagttacaatgcacttggcctcct

SEQ ID NO: 57509 - DNA, 25 bp, Canis familiaris
caagttcaacgtcctctatgaccga

SEQ ID NO: 57510 - DNA, 25 bp, Canis familiaris
caagttagcacttcgtctgcaacct

SEQ ID NO: 57511 - DNA, 25 bp, Canis familiaris
caagttgagccgtgacgagcaccga

SEQ ID NO: 57512 - DNA, 25 bp, Canis familiaris
caagaagagcatcgggcagcggcac

SEQ ID NO: 57513 - DNA, 25 bp, Canis familiaris
caagagagcagctcaggcacccagc

SEQ ID NO: 57514 - DNA, 25 bp, Canis familiaris
caagagcacagctcagcatggtccc

SEQ ID NO: 57515 - DNA, 25 bp, Canis familiaris
caagatgggctccagtggatccctt

SEQ ID NO: 57516 - DNA, 25 bp, Canis familiaris
caagcagggctcaaggacacccgtg

SEQ ID NO: 57517 - DNA, 25 bp, Canis familiaris
caacctggccgaggacatcatgcgg

SEQ ID NO: 57518 - DNA, 25 bp, Canis familiaris
caactgcaggccaaggtactggagt

SEQ ID NO: 57519 - DNA, 25 bp, Canis familiaris
caactgcaggccaagtatgagtgat

SEQ ID NO: 57520 - DNA, 25 bp, Canis familiaris
caagatgattctgtgctatgaggat

SEQ ID NO: 57521 - DNA, 25 bp, Canis familiaris
caagaggctctgctctaggagtccc

SEQ ID NO: 57522 - DNA, 25 bp, Canis familiaris
ggggcagctgaagtcacacatgaag

SEQ ID NO: 57523 - DNA, 25 bp, Canis familiaris
caagccgtccagcacaagacaactt

SEQ ID NO: 57524 - DNA, 25 bp, Canis familiaris
caagacgcctggcagcagagagccc

SEQ ID NO: 57525 - DNA, 25 bp, Canis familiaris
caagacgccagggagtcatgtcctc

SEQ ID NO: 57526 - DNA, 25 bp, Canis familiaris
caagaggcgcaggggtcttgtctgg

SEQ ID NO: 57527 - DNA, 25 bp, Canis familiaris
caagcaggctgcctggcggttcatc

SEQ ID NO: 57528 - DNA, 25 bp, Canis familiaris
caagctgcgagcatgcagggggcag

SEQ ID NO: 57529 - DNA, 25 bp, Canis familiaris
caagctctgaagacggcgaggctgg

SEQ ID NO: 57530 - DNA, 25 bp, Canis familiaris
caagttgtacacaaaacagctggta

SEQ ID NO: 57531 - DNA, 25 bp, Canis familiaris
caacgttgtacaaagaagcaggctg

SEQ ID NO: 57532 - DNA, 25 bp, Canis familiaris
caagcagctgttccgggaggcggtg

SEQ ID NO: 57533 - DNA, 25 bp, Canis familiaris
cagaaggattcctatgtgggcgacg

SEQ ID NO: 57534 - DNA, 25 bp, Canis familiaris
caagaggttgcatgtccaggagacg

SEQ ID NO: 57535 - DNA, 25 bp, Canis familiaris
caagaggtggtggcacagcgggagc

SEQ ID NO: 57536 - DNA, 25 bp, Canis familiaris
caagacaaggtgacaagaagcaggc

SEQ ID NO: 57537 - DNA, 25 bp, Canis familiaris
caaccactggtgccaggaacacgag

SEQ ID NO: 57538 - DNA, 25 bp, Canis familiaris
caaccacagggggcacaacagcggg

SEQ ID NO: 57539 - DNA, 25 bp, Canis familiaris
caacaacggccggaatccgcagacg

SEQ ID NO: 57540 - DNA, 25 bp, Canis familiaris
caaagacagcccggagttggaaagg

SEQ ID NO: 57541 - DNA, 25 bp, Canis familiaris
caactgacctccacagggatacagg

SEQ ID NO: 57542 - DNA, 25 bp, Canis familiaris
caacgactccagggaggtcacgacc

SEQ ID NO: 57543 - DNA, 25 bp, Canis familiaris
caacaagcccacagggtacggctcc

SEQ ID NO: 57544 - DNA, 25 bp, Canis familiaris
caacctgctaccagggtgggtgccc

SEQ ID NO: 57545 - DNA, 25 bp, Canis familiaris
caaccctgatcgtggggatcgtcct

SEQ ID NO: 57546 - DNA, 25 bp, Canis familiaris
caacacacaccgggtgacgtcgtcc

SEQ ID NO: 57547 - DNA, 25 bp, Canis familiaris
caacctacagcagcgatatcgtccc

SEQ ID NO: 57548 - DNA, 25 bp, Canis familiaris
caagcctatcaagcaggccttctac

SEQ ID NO: 57549 - DNA, 25 bp, Canis familiaris
caaccttaattccctcattcatata

SEQ ID NO: 57550 - DNA, 25 bp, Canis familiaris
caactttaatgtccctcttttagcg

SEQ ID NO: 57551 - DNA, 25 bp, Canis familiaris
caagcctaaaggtttctttctactg

SEQ ID NO: 57552 - DNA, 25 bp, Canis familiaris
caagctctcaacctgactgttttat

SEQ ID NO: 57553 - DNA, 25 bp, Canis familiaris
caagatcccaccaactgtacatttt

SEQ ID NO: 57554 - DNA, 25 bp, Canis familiaris
caagatcctcaccttcgatcagttg

SEQ ID NO: 57555 - DNA, 25 bp, Canis familiaris
caagcatcctacctcacagaaatat

SEQ ID NO: 57556 - DNA, 25 bp, Canis familiaris
caagacccactcgtcagacagaaac

SEQ ID NO: 57557 - DNA, 25 bp, Canis familiaris
caagacctcctccaaatcagaagaa

SEQ ID NO: 57558 - DNA, 25 bp, Canis familiaris
caagagcccacccaaaggagcaggg

SEQ ID NO: 57559 - DNA, 25 bp, Canis familiaris
caagagacacaggcagagagagaag

SEQ ID NO: 57560 - DNA, 25 bp, Canis familiaris
caagaggcgcgcgggagagagagga

SEQ ID NO: 57561 - DNA, 25 bp, Canis familiaris
caagaagggcagccgagggcagcct

SEQ ID NO: 57562 - DNA, 25 bp, Canis familiaris
caagatctgggactctgtggaagcc

SEQ ID NO: 57563 - DNA, 25 bp, Canis familiaris
caagaaggcggtggggacgcccgtg

SEQ ID NO: 57564 - DNA, 25 bp, Canis familiaris
caagaagcgggtcgggacgcacatc

SEQ ID NO: 57565 - DNA, 25 bp, Canis familiaris
caaaagccgcgcagggacatctgtc

SEQ ID NO: 57566 - DNA, 25 bp, Canis familiaris
caaatggtcctggggccatcatctg

SEQ ID NO: 57567 - DNA, 25 bp, Canis familiaris
caagagggcactggtggcctgacag

SEQ ID NO: 57568 - DNA, 25 bp, Canis familiaris
caagcaggacatgctgtgtgccggg

SEQ ID NO: 57569 - DNA, 25 bp, Canis familiaris
caacatggagaccttgtaccgcgtc

SEQ ID NO: 57570 - DNA, 25 bp, Canis familiaris
caagccgcatgacgggtaccgggat

SEQ ID NO: 57571 - DNA, 25 bp, Canis familiaris
caagcctgtgatatggtcagcccgg

SEQ ID NO: 57572 - DNA, 25 bp, Canis familiaris
caacctggcaattggctaatcctcc

SEQ ID NO: 57573 - DNA, 25 bp, Canis familiaris
caagcgtgtgtatatctggagcccc

SEQ ID NO: 57574 - DNA, 25 bp, Canis familiaris
caagcagggtacgagtcctgcccct

SEQ ID NO: 57575 - DNA, 25 bp, Canis familiaris
caagacgaaggcgatggcgcgctcc

SEQ ID NO: 57576 - DNA, 25 bp, Canis familiaris
caagaagaagtgtctgcccaccatc

SEQ ID NO: 57577 - DNA, 25 bp, Canis familiaris
caacaccaaagattgccagcaaacc

SEQ ID NO: 57578 - DNA, 25 bp, Canis familiaris
caaccacatcaagtatgccaccaac

SEQ ID NO: 57579 - DNA, 25 bp, Canis familiaris
caaccaaatggttcgtacagcagcg

SEQ ID NO: 57580 - DNA, 25 bp, Canis familiaris
caagccaagtggttcttgaaatttg

SEQ ID NO: 57581 - DNA, 25 bp, Canis familiaris
caagcccagtccttcagagaaatat

SEQ ID NO: 57582 - DNA, 25 bp, Canis familiaris
caagccgcagctatccagaaattct

SEQ ID NO: 57583 - DNA, 25 bp, Canis familiaris
caagccttgcctagaagtaatttct

SEQ ID NO: 57584 - DNA, 25 bp, Canis familiaris
caacctgtccgagatacacaatatc

SEQ ID NO: 57585 - DNA, 25 bp, Canis familiaris
caacctcatttgctggaccaaatct

SEQ ID NO: 57586 - DNA, 25 bp, Canis familiaris
cacacaccatttctatgacctaaaa

SEQ ID NO: 57587 - DNA, 25 bp, Canis familiaris
caaaccctgtgaatagactgtaaaa

SEQ ID NO: 57588 - DNA, 25 bp, Canis familiaris
caaccctctggtaatacattgaaat

SEQ ID NO: 57589 - DNA, 25 bp, Canis familiaris
caagccgctctgtggtgacattaag

SEQ ID NO: 57590 - DNA, 25 bp, Canis familiaris
caagcggtgctgggttcactttgag

SEQ ID NO: 57591 - DNA, 25 bp, Canis familiaris
caagaggtagctggtctcaaccggg

SEQ ID NO: 57592 - DNA, 25 bp, Canis familiaris
caagaggtagctgccctagaggggc

SEQ ID NO: 57593 - DNA, 25 bp, Canis familiaris
caagacgtcgctggccaaggaggtg

SEQ ID NO: 57594 - DNA, 25 bp, Canis familiaris
caagaccagcctggccaacatggtg

SEQ ID NO: 57595 - DNA, 25 bp, Canis familiaris
caaccacacgtacaacatggcgccc

SEQ ID NO: 57596 - DNA, 25 bp, Canis familiaris
caagaccatcttactacacaggccc

SEQ ID NO: 57597 - DNA, 25 bp, Canis familiaris
caagagcctgctgttcacatgggcc

SEQ ID NO: 57598 - DNA, 25 bp, Canis familiaris
caagagcctactgtgttggccactc

SEQ ID NO: 57599 - DNA, 25 bp, Canis familiaris
caagagtctgaggcttggggcacct

SEQ ID NO: 57600 - DNA, 25 bp, Canis familiaris
caacctgctgcagctggaggaggcc

SEQ ID NO: 57601 - DNA, 25 bp, Canis familiaris
caaccagtcgggcgagagcgcctac

SEQ ID NO: 57602 - DNA, 25 bp, Canis familiaris
caacggatcaggaggcaacagccat

SEQ ID NO: 57603 - DNA, 25 bp, Canis familiaris
caacgcgtctgggagggaacgcacc

SEQ ID NO: 57604 - DNA, 25 bp, Canis familiaris
caactcgttggtacgggaccagtgc

SEQ ID NO: 57605 - DNA, 25 bp, Canis familiaris
cacaccgggtttcggaaccagctgt

SEQ ID NO: 57606 - DNA, 25 bp, Canis familiaris
caaacgggctggaggaccgcgtgca

SEQ ID NO: 57607 - DNA, 25 bp, Canis familiaris
caagaatgggtgcagtggcccggcc

SEQ ID NO: 57608 - DNA, 25 bp, Canis familiaris
caagaagagtggggcggctcagcag

SEQ ID NO: 57609 - DNA, 25 bp, Canis familiaris
caagaagcatctgaagcgtgtagca

SEQ ID NO: 57610 - DNA, 25 bp, Canis familiaris
caagaagcagccgatcaaagtccag

SEQ ID NO: 57611 - DNA, 25 bp, Canis familiaris
caagaaagtttcacagctccatatg

SEQ ID NO: 57612 - DNA, 25 bp, Canis familiaris
caagaatggttaatagagtcctatc

SEQ ID NO: 57613 - DNA, 25 bp, Canis familiaris
gaaaaggtttaatgcacgaataggg

SEQ ID NO: 57614 - DNA, 25 bp, Canis familiaris
caagaaggctgtaaatgccaagaaa

SEQ ID NO: 57615 - DNA, 25 bp, Canis familiaris
caagacaggctgtggatccgcagga

SEQ ID NO: 57616 - DNA, 25 bp, Canis familiaris
caagagcacctggttgatcctgcac

SEQ ID NO: 57617 - DNA, 25 bp, Canis familiaris
caagagcacgcagtttgagtatgcc

SEQ ID NO: 57618 - DNA, 25 bp, Canis familiaris
caagcagcagggctctggctggtgc

SEQ ID NO: 57619 - DNA, 25 bp, Canis familiaris
caagaggtggcaattggccgctcct

SEQ ID NO: 57620 - DNA, 25 bp, Canis familiaris
caagaggcggcgaaaccgctgccag

SEQ ID NO: 57621 - DNA, 25 bp, Canis familiaris
caagacggagaaatccctggccaac

SEQ ID NO: 57622 - DNA, 25 bp, Canis familiaris
caaaaggaagcacacgtggcccacg

SEQ ID NO: 57623 - DNA, 25 bp, Canis familiaris
caacagggaccacccagtgggagcc

SEQ ID NO: 57624 - DNA, 25 bp, Canis familiaris
caacgtgaaaacagctgtctgtgac

SEQ ID NO: 57625 - DNA, 25 bp, Canis familiaris
caagctgtgaccagcatttccctga

SEQ ID NO: 57626 - DNA, 25 bp, Canis familiaris
caacattcactcagaacatcccagc

SEQ ID NO: 57627 - DNA, 25 bp, Canis familiaris
caactccacctggatacatgggcct

SEQ ID NO: 57628 - DNA, 25 bp, Canis familiaris
caacaccccgccaagatggtactta

SEQ ID NO: 57629 - DNA, 25 bp, Canis familiaris
caagccccacagccaaagtgctgac

SEQ ID NO: 57630 - DNA, 25 bp, Canis familiaris
caagccccacaagcagatgctcagt

SEQ ID NO: 57631 - DNA, 25 bp, Canis familiaris
caagccctcacaaatctgggctctc

SEQ ID NO: 57632 - DNA, 25 bp, Canis familiaris
caagacagtcacaacagggagcccc

SEQ ID NO: 57633 - DNA, 25 bp, Canis familiaris
caagagaacagagccggagcctgcc

SEQ ID NO: 57634 - DNA, 25 bp, Canis familiaris
caagaagaaactgtggctgccatga

SEQ ID NO: 57635 - DNA, 25 bp, Canis familiaris
caaaacaaactggtcaggcgaatcc

SEQ ID NO: 57636 - DNA, 25 bp, Canis familiaris
caagaatcgacagctgtggggaccc

SEQ ID NO: 57637 - DNA, 25 bp, Canis familiaris
caaacatctggtcggtggggtcgtc

SEQ ID NO: 57638 - DNA, 25 bp, Canis familiaris
cagaaccaggttcttgcgcgtctat

SEQ ID NO: 57639 - DNA, 25 bp, Canis familiaris
caaactcaaattcttcacctaacca

SEQ ID NO: 57640 - DNA, 25 bp, Canis familiaris
caaactcaaatttttcacctggact

SEQ ID NO: 57641 - DNA, 25 bp, Canis familiaris
caagactgcaacttttaacttgccc

SEQ ID NO: 57642 - DNA, 25 bp, Canis familiaris
caagactgtcaacttttagctgccc

SEQ ID NO: 57643 - DNA, 25 bp, Canis familiaris
caagacttatcttctgttaaccctt

SEQ ID NO: 57644 - DNA, 25 bp, Canis familiaris
caagctctttcttttcaaattactt

SEQ ID NO: 57645 - DNA, 25 bp, Canis familiaris
caagcctgcttcctattttagtttt

SEQ ID NO: 57646 - DNA, 25 bp, Canis familiaris
caagcatctttcattgcgtctagaa

SEQ ID NO: 57647 - DNA, 25 bp, Canis familiaris
caagcctgtcttgttgctgttgaga

SEQ ID NO: 57648 - DNA, 25 bp, Canis familiaris
caagctcttccttgttctttagtca

SEQ ID NO: 57649 - DNA, 25 bp, Canis familiaris
caagctctcctgggttattgtttga

SEQ ID NO: 57650 - DNA, 25 bp, Canis familiaris
caacttcgtgggttttgctcactgc

SEQ ID NO: 57651 - DNA, 25 bp, Canis familiaris
caacttcgtgaatttgattccaagt

SEQ ID NO: 57652 - DNA, 25 bp, Canis familiaris
cgacttcgacaatttcgtccggtgt

SEQ ID NO: 57653 - DNA, 25 bp, Canis familiaris
cagcgtttgacataccgtcgtaggc

SEQ ID NO: 57654 - DNA, 25 bp, Canis familiaris
caagcttgtagctgcaccgttgttt

SEQ ID NO: 57655 - DNA, 25 bp, Canis familiaris
cacactttagatgattgctttgctt

SEQ ID NO: 57656 - DNA, 25 bp, Canis familiaris
caacttctcagttacttttttgaag

SEQ ID NO: 57657 - DNA, 25 bp, Canis familiaris
caaccttcagtttgttttatatgat

SEQ ID NO: 57658 - DNA, 25 bp, Canis familiaris
caagcttaccttctctgtttatatc

SEQ ID NO: 57659 - DNA, 25 bp, Canis familiaris
caacttaccttgcaaatgatttacc

SEQ ID NO: 57660 - DNA, 25 bp, Canis familiaris
caagctatactcacaaccagtcatt

SEQ ID NO: 57661 - DNA, 25 bp, Canis familiaris
caaccatcaccacaaccgattttag

SEQ ID NO: 57662 - DNA, 25 bp, Canis familiaris
caacctcacacgtagaccgacaagt

SEQ ID NO: 57663 - DNA, 25 bp, Canis familiaris
caacccctagaatccaaccatgatt

SEQ ID NO: 57664 - DNA, 25 bp, Canis familiaris
caaccacctggagagccacaagcta

SEQ ID NO: 57665 - DNA, 25 bp, Canis familiaris
caacccagggagacagacctggttt

SEQ ID NO: 57666 - DNA, 25 bp, Canis familiaris
caaccacaagatcacagaactgctg

SEQ ID NO: 57667 - DNA, 25 bp, Canis familiaris
caagcacacacagtccacataaggg

SEQ ID NO: 57668 - DNA, 25 bp, Canis familiaris
caagaaccccataatatactgcccc

SEQ ID NO: 57669 - DNA, 25 bp, Canis familiaris
caagagcagccctgagagcaactcc

SEQ ID NO: 57670 - DNA, 25 bp, Canis familiaris
caagcttggcctcgcatggcaaatc

SEQ ID NO: 57671 - DNA, 25 bp, Canis familiaris
caacctgtccatcctgagaactaat

SEQ ID NO: 57672 - DNA, 25 bp, Canis familiaris
caaacttctcagcgtaaagcaatcc

SEQ ID NO: 57673 - DNA, 25 bp, Canis familiaris
caagcactgttccagagggaagagt

SEQ ID NO: 57674 - DNA, 25 bp, Canis familiaris
cacagaatttcttgaggcgggcctt

SEQ ID NO: 57675 - DNA, 25 bp, Canis familiaris
caagaaatcctggagccgctggaca

SEQ ID NO: 57676 - DNA, 25 bp, Canis familiaris
caagaacacctgcgagcacatctac

SEQ ID NO: 57677 - DNA, 25 bp, Canis familiaris
caagagccagactcggagcatccaa

SEQ ID NO: 57678 - DNA, 25 bp, Canis familiaris
caagagctcaaaaggctggcctctc

SEQ ID NO: 57679 - DNA, 25 bp, Canis familiaris
caagagccaaaccgaggagcgcctg

SEQ ID NO: 57680 - DNA, 25 bp, Canis familiaris
caagccgaggcccgaggactacggc

SEQ ID NO: 57681 - DNA, 25 bp, Canis familiaris
caagctgggtgtcctgaaagcccgg

SEQ ID NO: 57682 - DNA, 25 bp, Canis familiaris
caagcgggatgtctactaccgcctg

SEQ ID NO: 57683 - DNA, 25 bp, Canis familiaris
caacgatggtgtctttatcaggcgt

SEQ ID NO: 57684 - DNA, 25 bp, Canis familiaris
caacgattggagcttctacgtccgg

SEQ ID NO: 57685 - DNA, 25 bp, Canis familiaris
caactaaggaggtttagccaccgcg

SEQ ID NO: 57686 - DNA, 25 bp, Canis familiaris
caactaaacagtctaacctcacacc

SEQ ID NO: 57687 - DNA, 25 bp, Canis familiaris
gcaaaaaacttgagaccgatcccca

SEQ ID NO: 57688 - DNA, 25 bp, Canis familiaris
caagaagaagtccaaaccgtgcctc

SEQ ID NO: 57689 - DNA, 25 bp, Canis familiaris
caaactgaatgtccaaagtaccttc

SEQ ID NO: 57690 - DNA, 25 bp, Canis familiaris
caaccgacaaggacctgtactcctc

SEQ ID NO: 57691 - DNA, 25 bp, Canis familiaris
caacctgaaatacctgctgaagctc

SEQ ID NO: 57692 - DNA, 25 bp, Canis familiaris
caaccagagaaacctctgaccccct

SEQ ID NO: 57693 - DNA, 25 bp, Canis familiaris
cacaccaaacaaaatcgacccacga

SEQ ID NO: 57694 - DNA, 25 bp, Canis familiaris
caactactacaagacgaccacgcag

SEQ ID NO: 57695 - DNA, 25 bp, Canis familiaris
caagctagctacgcaacgtgtcctg

SEQ ID NO: 57696 - DNA, 25 bp, Canis familiaris
caagctagctacgcaacgtgtcctg

SEQ ID NO: 57697 - DNA, 25 bp, Canis familiaris
caagcttgtgaggccaccttgttca

SEQ ID NO: 57698 - DNA, 25 bp, Canis familiaris
caagcatagtgctgcccatttttta

SEQ ID NO: 57699 - DNA, 25 bp, Canis familiaris
caaccagtctactctatttttatga

SEQ ID NO: 57700 - DNA, 25 bp, Canis familiaris
caaccttctcacccagttattgaaa

SEQ ID NO: 57701 - DNA, 25 bp, Canis familiaris
caaccatcctggcccagagctatag

SEQ ID NO: 57702 - DNA, 25 bp, Canis familiaris
caactaccgggtgggcgagagcttc

SEQ ID NO: 57703 - DNA, 25 bp, Canis familiaris
caactaccgggtgggcgagagcttc

SEQ ID NO: 57704 - DNA, 25 bp, Canis familiaris
caactaccgggtgggcgagagcttc

SEQ ID NO: 57705 - DNA, 25 bp, Canis familiaris
caactaccgggtgggcgagagcttc

SEQ ID NO: 57706 - DNA, 25 bp, Canis familiaris
caactaccgggtgggcgagagcttc

SEQ ID NO: 57707 - DNA, 25 bp, Canis familiaris
caactaccgggtgggcgagagcttc

SEQ ID NO: 57708 - DNA, 25 bp, Canis familiaris
caactccctttgtacgtggatttca

SEQ ID NO: 57709 - DNA, 25 bp, Canis familiaris
caacccgctttttctggtatggaca

SEQ ID NO: 57710 - DNA, 25 bp, Canis familiaris
caacccgctttctctggtatgaaca

SEQ ID NO: 57711 - DNA, 25 bp, Canis familiaris
caaactcttttgcttgggctgaata

SEQ ID NO: 57712 - DNA, 25 bp, Canis familiaris
caagacatcttaccgcttggttcct

SEQ ID NO: 57713 - DNA, 25 bp, Canis familiaris
caagcctcttttggctatgaatgct

SEQ ID NO: 57714 - DNA, 25 bp, Canis familiaris
caagctcatttcctggtatgacaat

SEQ ID NO: 57715 - DNA, 25 bp, Canis familiaris
caagctctagaccttatgtgactct

SEQ ID NO: 57716 - DNA, 25 bp, Canis familiaris
caagcattcaagccttcattctctt

SEQ ID NO: 57717 - DNA, 25 bp, Canis familiaris
caagcggaaggccatcactgcttca

SEQ ID NO: 57718 - DNA, 25 bp, Canis familiaris
caagcaggccaaccacatgctgctg

SEQ ID NO: 57719 - DNA, 25 bp, Canis familiaris
caagcagacctggccacagatcaga

SEQ ID NO: 57720 - DNA, 25 bp, Canis familiaris
caagcagacctgggcaatgtctggc

SEQ ID NO: 57721 - DNA, 25 bp, Canis familiaris
caagcatgcccttggagtcgtggag

SEQ ID NO: 57722 - DNA, 25 bp, Canis familiaris
caagcagccagcaaaggggctggaa

SEQ ID NO: 57723 - DNA, 25 bp, Canis familiaris
caagaccactcacgtgtgtgtgtgt

SEQ ID NO: 57724 - DNA, 25 bp, Canis familiaris
caagcatcaccctgggagtgttttg

SEQ ID NO: 57725 - DNA, 25 bp, Canis familiaris
caagctgacccacaggaggtcctgc

SEQ ID NO: 57726 - DNA, 25 bp, Canis familiaris
caaccacagtcgcgggtgtgccgcg

SEQ ID NO: 57727 - DNA, 25 bp, Canis familiaris
caagccctgtcaccgtggaatggag

SEQ ID NO: 57728 - DNA, 25 bp, Canis familiaris
caagccctgtcaccgtggaatggag

SEQ ID NO: 57729 - DNA, 25 bp, Canis familiaris
caagccctgtcaccgtggaatggag

SEQ ID NO: 57730 - DNA, 25 bp, Canis familiaris
caagccatcttgcccgagttaggga

SEQ ID NO: 57731 - DNA, 25 bp, Canis familiaris
caagctcctcgcccagggtgaggag

SEQ ID NO: 57732 - DNA, 25 bp, Canis familiaris
caagctaatccctggggatgtgcag

SEQ ID NO: 57733 - DNA, 25 bp, Canis familiaris
caagctcaatccccatttggttcgt

SEQ ID NO: 57734 - DNA, 25 bp, Canis familiaris
caagcacagagccccattttttttt

SEQ ID NO: 57735 - DNA, 25 bp, Canis familiaris
caacctggccacctggattggtttt

SEQ ID NO: 57736 - DNA, 25 bp, Canis familiaris
caacctgccaacctagttggtcctc

SEQ ID NO: 57737 - DNA, 25 bp, Canis familiaris
caacctgccaaggcctggggagact

SEQ ID NO: 57738 - DNA, 25 bp, Canis familiaris
caggagtcagaagccctaggtaccc

SEQ ID NO: 57739 - DNA, 25 bp, Canis familiaris
caacgtactgaaggcccaggtcacc

SEQ ID NO: 57740 - DNA, 25 bp, Canis familiaris
caacgagaccttggtccaggccaac

SEQ ID NO: 57741 - DNA, 25 bp, Canis familiaris
caactgggcttgtttcactggaacc

SEQ ID NO: 57742 - DNA, 25 bp, Canis familiaris
taactgtactgtatttaggaacctt

SEQ ID NO: 57743 - DNA, 25 bp, Canis familiaris
cacacttacgaactcttagccaaac

SEQ ID NO: 57744 - DNA, 25 bp, Canis familiaris
caagctttgcgaacgctacgccatg

SEQ ID NO: 57745 - DNA, 25 bp, Canis familiaris
caagctttgcgaacgctacgccatg

SEQ ID NO: 57746 - DNA, 25 bp, Canis familiaris
caagctttgcgaacgctacgccatg

SEQ ID NO: 57747 - DNA, 25 bp, Canis familiaris
caagctttgcgaacgctacgccatg

SEQ ID NO: 57748 - DNA, 25 bp, Canis familiaris
caagctttgcgaacgctacgccatg

SEQ ID NO: 57749 - DNA, 25 bp, Canis familiaris
caagctttgcgaacgctacgccatg

SEQ ID NO: 57750 - DNA, 25 bp, Canis familiaris
caagctttgcgaacgctacgccatg

SEQ ID NO: 57751 - DNA, 25 bp, Canis familiaris
caagctttgcgaacgctacgccatg

SEQ ID NO: 57752 - DNA, 25 bp, Canis familiaris
caagctttgcgactgcgatatctcg

SEQ ID NO: 57753 - DNA, 25 bp, Canis familiaris
cacagtagctgagatcaaatgcatc

SEQ ID NO: 57754 - DNA, 25 bp, Canis familiaris
caagctgctgctcgaagaaatctat

SEQ ID NO: 57755 - DNA, 25 bp, Canis familiaris
caacatctagcaaatgttatgcata

SEQ ID NO: 57756 - DNA, 25 bp, Canis familiaris
caacatagagcattatactcagcag

SEQ ID NO: 57757 - DNA, 25 bp, Canis familiaris
caagccaaaggactctgcagcaggg

SEQ ID NO: 57758 - DNA, 25 bp, Canis familiaris
caaccatcaatgccaggctgccgtt

SEQ ID NO: 57759 - DNA, 25 bp, Canis familiaris
caagcgcaagctggagcgcatctcg

SEQ ID NO: 57760 - DNA, 25 bp, Canis familiaris
caagctcttctggcagcgattctga

SEQ ID NO: 57761 - DNA, 25 bp, Canis familiaris
caagccattgcagcggcatttggtc

SEQ ID NO: 57762 - DNA, 25 bp, Canis familiaris
caacgatgtcacctgcgtgttggac

SEQ ID NO: 57763 - DNA, 25 bp, Canis familiaris
caacggacggtggatgttcgaccct

SEQ ID NO: 57764 - DNA, 25 bp, Canis familiaris
ctacgaaggaatgtgtcctccccac

SEQ ID NO: 57765 - DNA, 25 bp, Canis familiaris
caaaacaggagtgcattttccccct

SEQ ID NO: 57766 - DNA, 25 bp, Canis familiaris
caaaagttgaatgagttccccactt

SEQ ID NO: 57767 - DNA, 25 bp, Canis familiaris
caagaagggaaggctgtcgccaccc

SEQ ID NO: 57768 - DNA, 25 bp, Canis familiaris
caagaacaaaaggctcccttccact

SEQ ID NO: 57769 - DNA, 25 bp, Canis familiaris
caagaaaagcaagtcacctctctcc

SEQ ID NO: 57770 - DNA, 25 bp, Canis familiaris
caagcagaaagcaagcccaggcagt

SEQ ID NO: 57771 - DNA, 25 bp, Canis familiaris
caactgatggactatgcccggaatg

SEQ ID NO: 57772 - DNA, 25 bp, Canis familiaris
caagctgcagtattcccgggactgc

SEQ ID NO: 57773 - DNA, 25 bp, Canis familiaris
caacggataacaccggagagcccct

SEQ ID NO: 57774 - DNA, 25 bp, Canis familiaris
caagctgtgaagtcctccacaggcc

SEQ ID NO: 57775 - DNA, 25 bp, Canis familiaris
caactgcttagcacccctggccaag

SEQ ID NO: 57776 - DNA, 25 bp, Canis familiaris
caacctattgtaagccctggactga

SEQ ID NO: 57777 - DNA, 25 bp, Canis familiaris
caagcatctgttaaaccctccagaa

SEQ ID NO: 57778 - DNA, 25 bp, Canis familiaris
caagcagttttgaaccttgcccaac

SEQ ID NO: 57779 - DNA, 25 bp, Canis familiaris
caacagctctaataacttgcccact

SEQ ID NO: 57780 - DNA, 25 bp, Canis familiaris
caactctcttcctaagtttccatta

SEQ ID NO: 57781 - DNA, 25 bp, Canis familiaris
caaacgattccctggttatgattca

SEQ ID NO: 57782 - DNA, 25 bp, Canis familiaris
caaccatttacctgagttggtactg

SEQ ID NO: 57783 - DNA, 25 bp, Canis familiaris
caactcttttcccgaagggtcactg

SEQ ID NO: 57784 - DNA, 25 bp, Canis familiaris
caagcctctttcctggaacggggct

SEQ ID NO: 57785 - DNA, 25 bp, Canis familiaris
caaccacgttcggggaggcaggagc

SEQ ID NO: 57786 - DNA, 25 bp, Canis familiaris
caagctccttttggggaaatggagc

SEQ ID NO: 57787 - DNA, 25 bp, Canis familiaris
caaccttctttcctggggatggaat

SEQ ID NO: 57788 - DNA, 25 bp, Canis familiaris
cacccttcttaggggggcactgact

SEQ ID NO: 57789 - DNA, 25 bp, Canis familiaris
caactcttgggacagtgggcactac

SEQ ID NO: 57790 - DNA, 25 bp, Canis familiaris
caactctttatacggttggctctca

SEQ ID NO: 57791 - DNA, 25 bp, Canis familiaris
caacctatgtgttcgtgtttcctgg

SEQ ID NO: 57792 - DNA, 25 bp, Canis familiaris
caactgcaagtggggtgtccagcct

SEQ ID NO: 57793 - DNA, 25 bp, Canis familiaris
caagcctgaggactgggttcagccc

SEQ ID NO: 57794 - DNA, 25 bp, Canis familiaris
caagcatcgatgattttggtccccc

SEQ ID NO: 57795 - DNA, 25 bp, Canis familiaris
caaatagactttctggttcccagca

SEQ ID NO: 57796 - DNA, 25 bp, Canis familiaris
cacacttatttatagtttaccgaag

SEQ ID NO: 57797 - DNA, 25 bp, Canis familiaris
caacttcttcaggaatgtttgaccg

SEQ ID NO: 57798 - DNA, 25 bp, Canis familiaris
caacgttaccaaagtgcctgacaca

SEQ ID NO: 57799 - DNA, 25 bp, Canis familiaris
caacggcacagtcaaggccgagaat

SEQ ID NO: 57800 - DNA, 25 bp, Canis familiaris
caacggcacagtcaaggccgagaat

SEQ ID NO: 57801 - DNA, 25 bp, Canis familiaris
caaccccagttatgctgccagtagt

SEQ ID NO: 57802 - DNA, 25 bp, Canis familiaris
caacctgtagttgaccgtgggtgcg

SEQ ID NO: 57803 - DNA, 25 bp, Canis familiaris
caactctgtggtgaacgtgggctgc

SEQ ID NO: 57804 - DNA, 25 bp, Canis familiaris
caagccctgcctgaaggaggagccc

SEQ ID NO: 57805 - DNA, 25 bp, Canis familiaris
caagcagtctccaagaaccgggacc

SEQ ID NO: 57806 - DNA, 25 bp, Canis familiaris
caagcgctgagcgaagacccggtgg

SEQ ID NO: 57807 - DNA, 25 bp, Canis familiaris
caagctgtgggcgatgtggcctggg

SEQ ID NO: 57808 - DNA, 25 bp, Canis familiaris
caagctgtacactaccatgcctgtg

SEQ ID NO: 57809 - DNA, 25 bp, Canis familiaris
caagctgctactgacgaggctgctg

SEQ ID NO: 57810 - DNA, 25 bp, Canis familiaris
caagcatctacaccctgagtggctg

SEQ ID NO: 57811 - DNA, 25 bp, Canis familiaris
caactctggcagacctggaggatga

SEQ ID NO: 57812 - DNA, 25 bp, Canis familiaris
caagctctccagagcgtgccagaga

SEQ ID NO: 57813 - DNA, 25 bp, Canis familiaris
caactcctcactgggtccatggaga

SEQ ID NO: 57814 - DNA, 25 bp, Canis familiaris
caactcttcctatagcctggatcac

SEQ ID NO: 57815 - DNA, 25 bp, Canis familiaris
caaccttgcaaaagagcctgggccc

SEQ ID NO: 57816 - DNA, 25 bp, Canis familiaris
caagccttcaacagaagctgtgctg

SEQ ID NO: 57817 - DNA, 25 bp, Canis familiaris
caagcctctcaacagaagctgtgca

SEQ ID NO: 57818 - DNA, 25 bp, Canis familiaris
caagccagccaccaagaattatcag

SEQ ID NO: 57819 - DNA, 25 bp, Canis familiaris
caagctcagccagtcttactattca

SEQ ID NO: 57820 - DNA, 25 bp, Canis familiaris
caactacaccagctcacatttctag

SEQ ID NO: 57821 - DNA, 25 bp, Canis familiaris
caaccacacccgacattgtttacgt

SEQ ID NO: 57822 - DNA, 25 bp, Canis familiaris
caacccacgccacatttttataatt

SEQ ID NO: 57823 - DNA, 25 bp, Canis familiaris
caactccaattcccagttatttatt

SEQ ID NO: 57824 - DNA, 25 bp, Canis familiaris
caagcccaataatcgttcatctcaa

SEQ ID NO: 57825 - DNA, 25 bp, Canis familiaris
caagccctaaaggaaagcatcccat

SEQ ID NO: 57826 - DNA, 25 bp, Canis familiaris
caagcccagaactgcaaagccacct

SEQ ID NO: 57827 - DNA, 25 bp, Canis familiaris
caagcaccaaagggcaggactacct

SEQ ID NO: 57828 - DNA, 25 bp, Canis familiaris
caacaccacagggcaggtactacct

SEQ ID NO: 57829 - DNA, 25 bp, Canis familiaris
caaccaccctgtgggctaaaccagg

SEQ ID NO: 57830 - DNA, 25 bp, Canis familiaris
caaaaccgtggcctattcaacaacg

SEQ ID NO: 57831 - DNA, 25 bp, Canis familiaris
caagcaaagcgtgttattcatgaaa

SEQ ID NO: 57832 - DNA, 25 bp, Canis familiaris
caagctgaaggaatctactgttaga

SEQ ID NO: 57833 - DNA, 25 bp, Canis familiaris
caagcacacaggacctcgcttgggc

SEQ ID NO: 57834 - DNA, 25 bp, Canis familiaris
caaaacgggatgttcttgggtctca

SEQ ID NO: 57835 - DNA, 25 bp, Canis familiaris
caaaatctgtttgtttaggcccaat

SEQ ID NO: 57836 - DNA, 25 bp, Canis familiaris
caaacatggacctctttaaaaacag

SEQ ID NO: 57837 - DNA, 25 bp, Canis familiaris
caaaggtgccaatgtatttaaaaag

SEQ ID NO: 57838 - DNA, 25 bp, Canis familiaris
caagcagacgcctttgttttgacag

SEQ ID NO: 57839 - DNA, 25 bp, Canis familiaris
caagcactctgtatttcttcttctg

SEQ ID NO: 57840 - DNA, 25 bp, Canis familiaris
caaccatctttatctttttgtggat

SEQ ID NO: 57841 - DNA, 25 bp, Canis familiaris
caactgcatttcacagcttttccgg

SEQ ID NO: 57842 - DNA, 25 bp, Canis familiaris
caactttgtcaagctcatttcctgg

SEQ ID NO: 57843 - DNA, 25 bp, Canis familiaris
caactttgtcaagctcatttcctgg

SEQ ID NO: 57844 - DNA, 25 bp, Canis familiaris
caacttcgtccagtcacaggtggga

SEQ ID NO: 57845 - DNA, 25 bp, Canis familiaris
caagccctgtccatcatgggtgtta

SEQ ID NO: 57846 - DNA, 25 bp, Canis familiaris
caacccttgccaggcagggtggttc

SEQ ID NO: 57847 - DNA, 25 bp, Canis familiaris
caacccaagccatgcagctggtgaa

SEQ ID NO: 57848 - DNA, 25 bp, Canis familiaris
caacaccagtgactcggctgggacc

SEQ ID NO: 57849 - DNA, 25 bp, Canis familiaris
caagcccatggattcgggggaacag

SEQ ID NO: 57850 - DNA, 25 bp, Canis familiaris
caaccaagccttcgggtgcaaacgt

SEQ ID NO: 57851 - DNA, 25 bp, Canis familiaris
caaccaagacaccgggacaaacact

SEQ ID NO: 57852 - DNA, 25 bp, Canis familiaris
caaatgcaaaaccttgcagaacaga

SEQ ID NO: 57853 - DNA, 25 bp, Canis familiaris
caacgcccaccatttgatagagagg

SEQ ID NO: 57854 - DNA, 25 bp, Canis familiaris
caacgcgacctacaatggtgacgtg

SEQ ID NO: 57855 - DNA, 25 bp, Canis familiaris
caactggcaaaagaacgtgacacgt

SEQ ID NO: 57856 - DNA, 25 bp, Canis familiaris
caaatcgggagagccacgttcctaa

SEQ ID NO: 57857 - DNA, 25 bp, Canis familiaris
caactcgggcacactcagcaggtgc

SEQ ID NO: 57858 - DNA, 25 bp, Canis familiaris
caacttcagtcactgtctcagctgc

SEQ ID NO: 57859 - DNA, 25 bp, Canis familiaris
caagcctgatggagtccagcgcagc

SEQ ID NO: 57860 - DNA, 25 bp, Canis familiaris
caaccagcagttcctggcaggcact

SEQ ID NO: 57861 - DNA, 25 bp, Canis familiaris
caagcagagcatgtcctagtggatt

SEQ ID NO: 57862 - DNA, 25 bp, Canis familiaris
caagcagagcacatgcacgacagga

SEQ ID NO: 57863 - DNA, 25 bp, Canis familiaris
caagccagatcggatgagacagaca

SEQ ID NO: 57864 - DNA, 25 bp, Canis familiaris
caagcgggccaaaggctgacaagcc

SEQ ID NO: 57865 - DNA, 25 bp, Canis familiaris
caacaagcgaaccacacgacaagcc

SEQ ID NO: 57866 - DNA, 25 bp, Canis familiaris
caactggctaacctcactcaaagtg

SEQ ID NO: 57867 - DNA, 25 bp, Canis familiaris
caactggctaacctcactcaaagtg

SEQ ID NO: 57868 - DNA, 25 bp, Canis familiaris
caacatggctcatctacaaaaggtg

SEQ ID NO: 57869 - DNA, 25 bp, Canis familiaris
caagcaggccatcttagcagctcag

SEQ ID NO: 57870 - DNA, 25 bp, Canis familiaris
caagcccgggtgcagagcgcagggc

SEQ ID NO: 57871 - DNA, 25 bp, Canis familiaris
caagcgggggacagaggcagatgga

SEQ ID NO: 57872 - DNA, 25 bp, Canis familiaris
caagcagggtgtggctagaaagtga

SEQ ID NO: 57873 - DNA, 25 bp, Canis familiaris
cacaagtgggttttgaggggaagat

SEQ ID NO: 57874 - DNA, 25 bp, Canis familiaris
cagctacttggattttgtggggttt

SEQ ID NO: 57875 - DNA, 25 bp, Canis familiaris
cagtaaacatatttctccggtattt

SEQ ID NO: 57876 - DNA, 25 bp, Canis familiaris
cagtagcaaattcttccgtgttaaa

SEQ ID NO: 57877 - DNA, 25 bp, Canis familiaris
cattaaactgttttccaacttgcaa

SEQ ID NO: 57878 - DNA, 25 bp, Canis familiaris
caaaacacagtgtttctgacctaaa

SEQ ID NO: 57879 - DNA, 25 bp, Canis familiaris
cgaaaatggggcacgacctatgatt

SEQ ID NO: 57880 - DNA, 25 bp, Canis familiaris
caaccgatgtccgaacaaccgataa

SEQ ID NO: 57881 - DNA, 25 bp, Canis familiaris
caagctgggccggtacaacgaagag

SEQ ID NO: 57882 - DNA, 25 bp, Canis familiaris
caacatggtgagcgccggacgaagg

SEQ ID NO: 57883 - DNA, 25 bp, Canis familiaris
caactgcgcggtgcaaggaccaagt

SEQ ID NO: 57884 - DNA, 25 bp, Canis familiaris
caaccgcgactccaaggagccgagg

SEQ ID NO: 57885 - DNA, 25 bp, Canis familiaris
caaccgcagcctgcgggagctggac

SEQ ID NO: 57886 - DNA, 25 bp, Canis familiaris
caacgacaggctccgagctcagtgg

SEQ ID NO: 57887 - DNA, 25 bp, Canis familiaris
caacgagtgtgacgaggccgaggcc

SEQ ID NO: 57888 - DNA, 25 bp, Canis familiaris
caaccgatgtgcttgacccggtgtc

SEQ ID NO: 57889 - DNA, 25 bp, Canis familiaris
caagctatgtgtcaccacacagggt

SEQ ID NO: 57890 - DNA, 25 bp, Canis familiaris
caacgtctagaagcatcagaaagat

SEQ ID NO: 57891 - DNA, 25 bp, Canis familiaris
caacgtcaagaagcatcagaagatg

SEQ ID NO: 57892 - DNA, 25 bp, Canis familiaris
caacctcaagcacgtcatgcggaga

SEQ ID NO: 57893 - DNA, 25 bp, Canis familiaris
caaaccatatagctcatcagagtac

SEQ ID NO: 57894 - DNA, 25 bp, Canis familiaris
caaacagacttgctctagatttcaa

SEQ ID NO: 57895 - DNA, 25 bp, Canis familiaris
caacgagacctgcttcaacatccag

SEQ ID NO: 57896 - DNA, 25 bp, Canis familiaris
caacgaatttggctacagcaacagg

SEQ ID NO: 57897 - DNA, 25 bp, Canis familiaris
caacgcaattcgggtcagacataag

SEQ ID NO: 57898 - DNA, 25 bp, Canis familiaris
cacccttgtcctgtctgaataatca

SEQ ID NO: 57899 - DNA, 25 bp, Canis familiaris
caacgattccccactgaatacaagg

SEQ ID NO: 57900 - DNA, 25 bp, Canis familiaris
ctgacggtggacggacgaataaaag

SEQ ID NO: 57901 - DNA, 25 bp, Canis familiaris
caagctggtggctggaccaatgtaa

SEQ ID NO: 57902 - DNA, 25 bp, Canis familiaris
caagctgcgggcctgagaacacatg

SEQ ID NO: 57903 - DNA, 25 bp, Canis familiaris
caagcgtgtgagtctgagagagcct

SEQ ID NO: 57904 - DNA, 25 bp, Canis familiaris
caagcgctgggacatgaagctccgt

SEQ ID NO: 57905 - DNA, 25 bp, Canis familiaris
caagcgctgggacatgaagctccgt

SEQ ID NO: 57906 - DNA, 25 bp, Canis familiaris
caagcgctgggacatgaagctccgt

SEQ ID NO: 57907 - DNA, 25 bp, Canis familiaris
caactgtgttgaaggcactgcccga

SEQ ID NO: 57908 - DNA, 25 bp, Canis familiaris
caactgtatctaactgcatgtgctg

SEQ ID NO: 57909 - DNA, 25 bp, Canis familiaris
caacttgtgtgcgtctcagatgtcg

SEQ ID NO: 57910 - DNA, 25 bp, Canis familiaris
caaccctgtgcagttggtgctgtgc

SEQ ID NO: 57911 - DNA, 25 bp, Canis familiaris
caactggctgcaggtctgggcctgc

SEQ ID NO: 57912 - DNA, 25 bp, Canis familiaris
caaccagtgcagcgtgagtgccacg

SEQ ID NO: 57913 - DNA, 25 bp, Canis familiaris
caagcgcctgacatgtgagatctcc

SEQ ID NO: 57914 - DNA, 25 bp, Canis familiaris
caacctcatgacagatgacctccct

SEQ ID NO: 57915 - DNA, 25 bp, Canis familiaris
caacctgtgagggtcccatcaattg

SEQ ID NO: 57916 - DNA, 25 bp, Canis familiaris
caaccagttgagttccagatactat

SEQ ID NO: 57917 - DNA, 25 bp, Canis familiaris
caagcggttgtatccagagtcttcc

SEQ ID NO: 57918 - DNA, 25 bp, Canis familiaris
caacgtgttgtaccatcgaattctg

SEQ ID NO: 57919 - DNA, 25 bp, Canis familiaris
caagcgttttatgacattgattcaa

SEQ ID NO: 57920 - DNA, 25 bp, Canis familiaris
caagcgcttatttaccaccttaaag

SEQ ID NO: 57921 - DNA, 25 bp, Canis familiaris
caacctgttttgacctccatagaag

SEQ ID NO: 57922 - DNA, 25 bp, Canis familiaris
caacgtggctaaacctcactcaaag

SEQ ID NO: 57923 - DNA, 25 bp, Canis familiaris
caagcggacaagtattccaccaaag

SEQ ID NO: 57924 - DNA, 25 bp, Canis familiaris
caagccgaaaggtcccatcaaaggt

SEQ ID NO: 57925 - DNA, 25 bp, Canis familiaris
caagccgaggggtctcatctagagg

SEQ ID NO: 57926 - DNA, 25 bp, Canis familiaris
caaccagatggtgattttcaaggga

SEQ ID NO: 57927 - DNA, 25 bp, Canis familiaris
caagccaaggtgtccctgtgcaaaa

SEQ ID NO: 57928 - DNA, 25 bp, Canis familiaris
caacttcgatggtcctctgtgaccc

SEQ ID NO: 57929 - DNA, 25 bp, Canis familiaris
caagctgttgtgggacatcgtattc

SEQ ID NO: 57930 - DNA, 25 bp, Canis familiaris
caagctctggctgggtcaagccttc

SEQ ID NO: 57931 - DNA, 25 bp, Canis familiaris
caactgcctgctctgtaaggccatc

SEQ ID NO: 57932 - DNA, 25 bp, Canis familiaris
caactgtgttccgtaatcagcctcc

SEQ ID NO: 57933 - DNA, 25 bp, Canis familiaris
caactttcgatggtagtcgccgtgc

SEQ ID NO: 57934 - DNA, 25 bp, Canis familiaris
caaccccgatttagtcgtatctctt

SEQ ID NO: 57935 - DNA, 25 bp, Canis familiaris
caacccaagatcattatgcttttga

SEQ ID NO: 57936 - DNA, 25 bp, Canis familiaris
caactccatgaagttttttgttaga

SEQ ID NO: 57937 - DNA, 25 bp, Canis familiaris
caactccagaacccgggtttggcag

SEQ ID NO: 57938 - DNA, 25 bp, Canis familiaris
caacccaatacttccttgctttggc

SEQ ID NO: 57939 - DNA, 25 bp, Canis familiaris
caacattaaatcaccagcccttgcc

SEQ ID NO: 57940 - DNA, 25 bp, Canis familiaris
cagaaaaaccaagagccagaggctc

SEQ ID NO: 57941 - DNA, 25 bp, Canis familiaris
caaataaaccgtgtgaacagcccca

SEQ ID NO: 57942 - DNA, 25 bp, Canis familiaris
caacaagacaccggacaaacactaa

SEQ ID NO: 57943 - DNA, 25 bp, Canis familiaris
caagccaattggagaaagacacata

SEQ ID NO: 57944 - DNA, 25 bp, Canis familiaris
caagccacgggaccaaggaacttcg

SEQ ID NO: 57945 - DNA, 25 bp, Canis familiaris
caacccggagaccacagaagacccg

SEQ ID NO: 57946 - DNA, 25 bp, Canis familiaris
caacgtggggacacgacagcacgcc

SEQ ID NO: 57947 - DNA, 25 bp, Canis familiaris
caacagggggtcaatacacaccggg

SEQ ID NO: 57948 - DNA, 25 bp, Canis familiaris
caaccaggggaagttcaaccttgag

SEQ ID NO: 57949 - DNA, 25 bp, Canis familiaris
caaccagttttaattctggccttga

SEQ ID NO: 57950 - DNA, 25 bp, Canis familiaris
caaccagttgtctgactcttcattt

SEQ ID NO: 57951 - DNA, 25 bp, Canis familiaris
caacttctttcatgcacctgttttg

SEQ ID NO: 57952 - DNA, 25 bp, Canis familiaris
caacctttatctcccttttatatat

SEQ ID NO: 57953 - DNA, 25 bp, Canis familiaris
cacaatcctgttttccttttagttg

SEQ ID NO: 57954 - DNA, 25 bp, Canis familiaris
cacaaaaacttcccactttacatct

SEQ ID NO: 57955 - DNA, 25 bp, Canis familiaris
caaaaaatcagtttcagttcttgcc

SEQ ID NO: 57956 - DNA, 25 bp, Canis familiaris
caaataaatttttcagtactgtaca

SEQ ID NO: 57957 - DNA, 25 bp, Canis familiaris
caacgaaacttttcagcatcactga

SEQ ID NO: 57958 - DNA, 25 bp, Canis familiaris
caacgaaacggaacagctcagccac

SEQ ID NO: 57959 - DNA, 25 bp, Canis familiaris
cactggcaaacgggaactcccacct

SEQ ID NO: 57960 - DNA, 25 bp, Canis familiaris
cacgtcgaagtgggagaccccttct

SEQ ID NO: 57961 - DNA, 25 bp, Canis familiaris
cacggttgcaggagaaccctcgact

SEQ ID NO: 57962 - DNA, 25 bp, Canis familiaris
cacaggtgtcgtgaaaaccaccgct

SEQ ID NO: 57963 - DNA, 25 bp, Canis familiaris
cacaggtgccttaaagggcccttgt

SEQ ID NO: 57964 - DNA, 25 bp, Canis familiaris
caacctgcctgaataaaagaccttt

SEQ ID NO: 57965 - DNA, 25 bp, Canis familiaris
caacgccttgtgaaaagccacctcg

SEQ ID NO: 57966 - DNA, 25 bp, Canis familiaris
caactccctggtgaagttgctcctg

SEQ ID NO: 57967 - DNA, 25 bp, Canis familiaris
tcaactcgggccacaaggtcccgtt

SEQ ID NO: 57968 - DNA, 25 bp, Canis familiaris
caacttgggccaaagggttctctct

SEQ ID NO: 57969 - DNA, 25 bp, Canis familiaris
caacttggtgttgtggcctgttgct

SEQ ID NO: 57970 - DNA, 25 bp, Canis familiaris
caaccttatgaccttgtccgtgtgt

SEQ ID NO: 57971 - DNA, 25 bp, Canis familiaris
caacctcttacgtgcgcctttctgc

SEQ ID NO: 57972 - DNA, 25 bp, Canis familiaris
caacctcttacgtgcgcctttctgc

SEQ ID NO: 57973 - DNA, 25 bp, Canis familiaris
caacctatttttttgactcttcatc

SEQ ID NO: 57974 - DNA, 25 bp, Canis familiaris
caagccttattcattacaatctcct

SEQ ID NO: 57975 - DNA, 25 bp, Canis familiaris
caagcctctcttcaatgacatcact

SEQ ID NO: 57976 - DNA, 25 bp, Canis familiaris
caagcctcgtttatgagctcacctg

SEQ ID NO: 57977 - DNA, 25 bp, Canis familiaris
caagccttgttttggtgccagaatg

SEQ ID NO: 57978 - DNA, 25 bp, Canis familiaris
caagcctgtattcatgtaccgagtg

SEQ ID NO: 57979 - DNA, 25 bp, Canis familiaris
caactatgtgttcgtgttcctgggc

SEQ ID NO: 57980 - DNA, 25 bp, Canis familiaris
caactgatggtgcttgctttctgtg

SEQ ID NO: 57981 - DNA, 25 bp, Canis familiaris
caactcagacatttgtgctttcagt

SEQ ID NO: 57982 - DNA, 25 bp, Canis familiaris
caactggcatcttgttcctccagtg

SEQ ID NO: 57983 - DNA, 25 bp, Canis familiaris
caacgtgcactcctaggcttggtgc

SEQ ID NO: 57984 - DNA, 25 bp, Canis familiaris
caacgctcatctgcggggtggtgtg

SEQ ID NO: 57985 - DNA, 25 bp, Canis familiaris
caaaatcatcgcgggggtactgggc

SEQ ID NO: 57986 - DNA, 25 bp, Canis familiaris
caaagttcaccctgaaggctgggca

SEQ ID NO: 57987 - DNA, 25 bp, Canis familiaris
caaacttcgcacgtacgatgagtgg

SEQ ID NO: 57988 - DNA, 25 bp, Canis familiaris
caaactactgtcatttatgaaggat

SEQ ID NO: 57989 - DNA, 25 bp, Canis familiaris
caaacagaccatttatgtactagga

SEQ ID NO: 57990 - DNA, 25 bp, Canis familiaris
caaccggcacatctatgtccttgtg

SEQ ID NO: 57991 - DNA, 25 bp, Canis familiaris
caactcggattacatgtgcttggcg

SEQ ID NO: 57992 - DNA, 25 bp, Canis familiaris
caactgggtgtagagcctttgggcc

SEQ ID NO: 57993 - DNA, 25 bp, Canis familiaris
caacatgggttaaggctttcttgaa

SEQ ID NO: 57994 - DNA, 25 bp, Canis familiaris
caacagggtggttgagttcctccgg

SEQ ID NO: 57995 - DNA, 25 bp, Canis familiaris
caacaacttagcggaaacttctcag

SEQ ID NO: 57996 - DNA, 25 bp, Canis familiaris
caaaactcgggaccaacatgttctg

SEQ ID NO: 57997 - DNA, 25 bp, Canis familiaris
caaaaccgatttgcaattctcctaa

SEQ ID NO: 57998 - DNA, 25 bp, Canis familiaris
cacataagcacgtgggaaatgcaac

SEQ ID NO: 57999 - DNA, 25 bp, Canis familiaris
caaaggaggttaggaaatgcatagt

SEQ ID NO: 58000 - DNA, 25 bp, Canis familiaris
cacaatcgagtcttacgagaaggga

SEQ ID NO: 58001 - DNA, 25 bp, Canis familiaris
caacatgctggtgaaggtgaaaggc

SEQ ID NO: 58002 - DNA, 25 bp, Canis familiaris
caactttgctttagattgaacaggc

SEQ ID NO: 58003 - DNA, 25 bp, Canis familiaris
caagccctggatgatggtgaactgg

SEQ ID NO: 58004 - DNA, 25 bp, Canis familiaris
caagccctgtgcgaagggcatttgc

SEQ ID NO: 58005 - DNA, 25 bp, Canis familiaris
caaccacatggccaaggtgctgacc

SEQ ID NO: 58006 - DNA, 25 bp, Canis familiaris
caaacgtagcgcaggagcgcccgtc

SEQ ID NO: 58007 - DNA, 25 bp, Canis familiaris
caactcaacaggctggagacccggc

SEQ ID NO: 58008 - DNA, 25 bp, Canis familiaris
caaaaagcaggctggtaccggtccg

SEQ ID NO: 58009 - DNA, 25 bp, Canis familiaris
caaaaagcaggctggtaccggtccg

SEQ ID NO: 58010 - DNA, 25 bp, Canis familiaris
caaaaagcaggctggtaccgtccgg

SEQ ID NO: 58011 - DNA, 25 bp, Canis familiaris
caaagaaaggactggcccttcttgg

SEQ ID NO: 58012 - DNA, 25 bp, Canis familiaris
caacgacgaggtttgctaccctctt

SEQ ID NO: 58013 - DNA, 25 bp, Canis familiaris
caacttcaaggtttctgccagccca

SEQ ID NO: 58014 - DNA, 25 bp, Canis familiaris
caacctcaattgaaccgtcaaccaa

SEQ ID NO: 58015 - DNA, 25 bp, Canis familiaris
caacctagttggtcctctatgaaaa

SEQ ID NO: 58016 - DNA, 25 bp, Canis familiaris
caaccgggatgccctcgttaaagag

SEQ ID NO: 58017 - DNA, 25 bp, Canis familiaris
caaccgggcatccagcatcatggat

SEQ ID NO: 58018 - DNA, 25 bp, Canis familiaris
caacctggtgcttcagacccaccag

SEQ ID NO: 58019 - DNA, 25 bp, Canis familiaris
caacctggatggttgccccgtgaga

SEQ ID NO: 58020 - DNA, 25 bp, Canis familiaris
caaactggggttggaggctctaagg

SEQ ID NO: 58021 - DNA, 25 bp, Canis familiaris
caaactgtccaatatgtggtctgaa

SEQ ID NO: 58022 - DNA, 25 bp, Canis familiaris
caaacctacctggtggttctgtgcc

SEQ ID NO: 58023 - DNA, 25 bp, Canis familiaris
caacagccccttggggtcgatgtcc

SEQ ID NO: 58024 - DNA, 25 bp, Canis familiaris
caaagaccctcaacggtctggtcct

SEQ ID NO: 58025 - DNA, 25 bp, Canis familiaris
caaagacaggctacccactagggcc

SEQ ID NO: 58026 - DNA, 25 bp, Canis familiaris
caaaacatggacatgccccagctgg

SEQ ID NO: 58027 - DNA, 25 bp, Canis familiaris
caacgactgagctgtgacgggtggc

SEQ ID NO: 58028 - DNA, 25 bp, Canis familiaris
caaccagctgtgccctagggttgcc

SEQ ID NO: 58029 - DNA, 25 bp, Canis familiaris
caacccttccattggggttgcctgg

SEQ ID NO: 58030 - DNA, 25 bp, Canis familiaris
caactcaagtccttggccctagttg

SEQ ID NO: 58031 - DNA, 25 bp, Canis familiaris
cacactcaaccctggatagaaggtc

SEQ ID NO: 58032 - DNA, 25 bp, Canis familiaris
cagactactcccttgtgaagtaagt

SEQ ID NO: 58033 - DNA, 25 bp, Canis familiaris
caaccaatactcttgtgaaccttat

SEQ ID NO: 58034 - DNA, 25 bp, Canis familiaris
caacgaccactttgtcaagctcatt

SEQ ID NO: 58035 - DNA, 25 bp, Canis familiaris
caacgaatactgagcatctatctgt

SEQ ID NO: 58036 - DNA, 25 bp, Canis familiaris
caacctattctgacaatccatctgc

SEQ ID NO: 58037 - DNA, 25 bp, Canis familiaris
caaccagcattcttatattcagtct

SEQ ID NO: 58038 - DNA, 25 bp, Canis familiaris
caacgccttccaacattgcaacagg

SEQ ID NO: 58039 - DNA, 25 bp, Canis familiaris
caacccatgtccatccattaaagaa

SEQ ID NO: 58040 - DNA, 25 bp, Canis familiaris
caacccttgaagtgcttgacaatca

SEQ ID NO: 58041 - DNA, 25 bp, Canis familiaris
caaccctgaaggtgcttgacatgca

SEQ ID NO: 58042 - DNA, 25 bp, Canis familiaris
caaccagctggaggcattcttgact

SEQ ID NO: 58043 - DNA, 25 bp, Canis familiaris
caacacaggcgcaagcttcttcgca

SEQ ID NO: 58044 - DNA, 25 bp, Canis familiaris
caaccagggctgcaccttggatgcc

SEQ ID NO: 58045 - DNA, 25 bp, Canis familiaris
caaccagggtggcctttgtgtgcta

SEQ ID NO: 58046 - DNA, 25 bp, Canis familiaris
caaccaggatgttggtcctgtgcct

SEQ ID NO: 58047 - DNA, 25 bp, Canis familiaris
caaccatgcgtgagaacctgtccac

SEQ ID NO: 58048 - DNA, 25 bp, Canis familiaris
caaccagcagctgaacacccaaatc

SEQ ID NO: 58049 - DNA, 25 bp, Canis familiaris
caaaagactgtgcacaggccaaatt

SEQ ID NO: 58050 - DNA, 25 bp, Canis familiaris
caaaaacctgccgagctctacaatg

SEQ ID NO: 58051 - DNA, 25 bp, Canis familiaris
cacaaaccctgcaaacccaaagata

SEQ ID NO: 58052 - DNA, 25 bp, Canis familiaris
cacaaaccccagaaagccaacggtg

SEQ ID NO: 58053 - DNA, 25 bp, Canis familiaris
caaaagccccaaaatcacaacagtc

SEQ ID NO: 58054 - DNA, 25 bp, Canis familiaris
caactcccccagaagtctgaactct

SEQ ID NO: 58055 - DNA, 25 bp, Canis familiaris
caaccgcctgcaggaggctctgaac

SEQ ID NO: 58056 - DNA, 25 bp, Canis familiaris
caacagtactgctagggcctgaaga

SEQ ID NO: 58057 - DNA, 25 bp, Canis familiaris
caacactactgtttggggcacatga

SEQ ID NO: 58058 - DNA, 25 bp, Canis familiaris
caacacccgttaatgggcaaagact

SEQ ID NO: 58059 - DNA, 25 bp, Canis familiaris
caaaggtaattcagggaacagactt

SEQ ID NO: 58060 - DNA, 25 bp, Canis familiaris
caaaaggagaacctgggaaaatgct

SEQ ID NO: 58061 - DNA, 25 bp, Canis familiaris
cacaggggaaacacgtgacttatgt

SEQ ID NO: 58062 - DNA, 25 bp, Canis familiaris
caccgggccaccagagaacattttt

SEQ ID NO: 58063 - DNA, 25 bp, Canis familiaris
cacccaggggccctggaacatttct

SEQ ID NO: 58064 - DNA, 25 bp, Canis familiaris
caaccaggagaccggggccatgatt

SEQ ID NO: 58065 - DNA, 25 bp, Canis familiaris
cacagccaagcatgggggccctggt

SEQ ID NO: 58066 - DNA, 25 bp, Canis familiaris
caaccaacatagggaggctcactca

SEQ ID NO: 58067 - DNA, 25 bp, Canis familiaris
caaccatactacatcaactcctaat

SEQ ID NO: 58068 - DNA, 25 bp, Canis familiaris
caaaatctctacatattctcgtcat

SEQ ID NO: 58069 - DNA, 25 bp, Canis familiaris
caaagtgcctgacacattccgttac

SEQ ID NO: 58070 - DNA, 25 bp, Canis familiaris
caaacatcccagtagcatttcgtat

SEQ ID NO: 58071 - DNA, 25 bp, Canis familiaris
caacctctaagatgactatcacttc

SEQ ID NO: 58072 - DNA, 25 bp, Canis familiaris
caaccagtaaatgaatgccatcttt

SEQ ID NO: 58073 - DNA, 25 bp, Canis familiaris
caacaatatacttccaagccttatt

SEQ ID NO: 58074 - DNA, 25 bp, Canis familiaris
cacacagttgaatggacccttttta

SEQ ID NO: 58075 - DNA, 25 bp, Canis familiaris
caacagattgcctggttctcattct

SEQ ID NO: 58076 - DNA, 25 bp, Canis familiaris
caaccactcacggcttttattctgc

SEQ ID NO: 58077 - DNA, 25 bp, Canis familiaris
caaactccccacttatttatttgtg

SEQ ID NO: 58078 - DNA, 25 bp, Canis familiaris
caaaccacaacctctagttatccag

SEQ ID NO: 58079 - DNA, 25 bp, Canis familiaris
caaaccacaacgtgaattttgcaaa

SEQ ID NO: 58080 - DNA, 25 bp, Canis familiaris
caaacaaacacctccattttcacat

SEQ ID NO: 58081 - DNA, 25 bp, Canis familiaris
cacaaaagaacctctacgaccactt

SEQ ID NO: 58082 - DNA, 25 bp, Canis familiaris
caaaacgtaccaccaaagaccatct

SEQ ID NO: 58083 - DNA, 25 bp, Canis familiaris
caacccttaccaccagcaaggaagg

SEQ ID NO: 58084 - DNA, 25 bp, Canis familiaris
caacccatgctgacctcacagaggg

SEQ ID NO: 58085 - DNA, 25 bp, Canis familiaris
caacaccttgctactccagggtgag

SEQ ID NO: 58086 - DNA, 25 bp, Canis familiaris
caacctgcttccctgacaaggtgtg

SEQ ID NO: 58087 - DNA, 25 bp, Canis familiaris
caacatctgctttctctaccagaga

SEQ ID NO: 58088 - DNA, 25 bp, Canis familiaris
caactccttgtccatagcagcaggc

SEQ ID NO: 58089 - DNA, 25 bp, Canis familiaris
caacagatctctccacataggggct

SEQ ID NO: 58090 - DNA, 25 bp, Canis familiaris
caacgtgtgctgaaccgggagctgc

SEQ ID NO: 58091 - DNA, 25 bp, Canis familiaris
caaagagatggagagctgggatatt

SEQ ID NO: 58092 - DNA, 25 bp, Canis familiaris
caaaaggggcacttgggccactcag

SEQ ID NO: 58093 - DNA, 25 bp, Canis familiaris
caaactagggcttgacggccaccag

SEQ ID NO: 58094 - DNA, 25 bp, Canis familiaris
caaaattaggcttcctgttgaccca

SEQ ID NO: 58095 - DNA, 25 bp, Canis familiaris
caacctaaatgtacttgtctgtccc

SEQ ID NO: 58096 - DNA, 25 bp, Canis familiaris
cagaaataaagatcttttgtccctt

SEQ ID NO: 58097 - DNA, 25 bp, Canis familiaris
caaaacagggataattttgtgccct

SEQ ID NO: 58098 - DNA, 25 bp, Canis familiaris
caccaacaaaatggtcttttccttg

SEQ ID NO: 58099 - DNA, 25 bp, Canis familiaris
caacaacaaagctgctcttccctgg

SEQ ID NO: 58100 - DNA, 25 bp, Canis familiaris
caaacagaacgggttctcccatggg

SEQ ID NO: 58101 - DNA, 25 bp, Canis familiaris
caaaagggcggagttgtagctcggg

SEQ ID NO: 58102 - DNA, 25 bp, Canis familiaris
caaaagtgtggcctttgggctctgc

SEQ ID NO: 58103 - DNA, 25 bp, Canis familiaris
caacggttgggcaactgccgtcagc

SEQ ID NO: 58104 - DNA, 25 bp, Canis familiaris
caaccggtggtggactcatggtcca

SEQ ID NO: 58105 - DNA, 25 bp, Canis familiaris
caacctggggccacacagaacaact

SEQ ID NO: 58106 - DNA, 25 bp, Canis familiaris
caaagtccttgcccccaagaaattg

SEQ ID NO: 58107 - DNA, 25 bp, Canis familiaris
caaaggccttgccccaacagtatta

SEQ ID NO: 58108 - DNA, 25 bp, Canis familiaris
caaagacctgtacgccaacacagtg

SEQ ID NO: 58109 - DNA, 25 bp, Canis familiaris
caacccctgttataacactggaaat

SEQ ID NO: 58110 - DNA, 25 bp, Canis familiaris
caccccgttatagcaaccagaacct

SEQ ID NO: 58111 - DNA, 25 bp, Canis familiaris
caccccttatttgcctcaaggaact

SEQ ID NO: 58112 - DNA, 25 bp, Canis familiaris
cacgctaattatttaccccaggaca

SEQ ID NO: 58113 - DNA, 25 bp, Canis familiaris
cacagattcttaagtggccccaacc

SEQ ID NO: 58114 - DNA, 25 bp, Canis familiaris
caacagacagctaatggtgcccacc

SEQ ID NO: 58115 - DNA, 25 bp, Canis familiaris
caacagcaacaacagtccagcctgc

SEQ ID NO: 58116 - DNA, 25 bp, Canis familiaris
caacaccacacagagacccctgtgg

SEQ ID NO: 58117 - DNA, 25 bp, Canis familiaris
caacccaaggaaacccactgtcata

SEQ ID NO: 58118 - DNA, 25 bp, Canis familiaris
caaacacattaatcacggacttctg

SEQ ID NO: 58119 - DNA, 25 bp, Canis familiaris
cataacctaataaactgagtatttc

SEQ ID NO: 58120 - DNA, 25 bp, Canis familiaris
caaattctaaaatctgacagtctat

SEQ ID NO: 58121 - DNA, 25 bp, Canis familiaris
cataatccgacgatgtagaagggtc

SEQ ID NO: 58122 - DNA, 25 bp, Canis familiaris
cacaatcctcggagtcctagggtcg

SEQ ID NO: 58123 - DNA, 25 bp, Canis familiaris
cacatacccggattttccagggatc

SEQ ID NO: 58124 - DNA, 25 bp, Canis familiaris
caaaccgcgaagtttgctccggtgc

SEQ ID NO: 58125 - DNA, 25 bp, Canis familiaris
caacactgggcatctttttctgagt

SEQ ID NO: 58126 - DNA, 25 bp, Canis familiaris
caactctgtatgattatttctctca

SEQ ID NO: 58127 - DNA, 25 bp, Canis familiaris
caacatctatcatccttttcttgct

SEQ ID NO: 58128 - DNA, 25 bp, Canis familiaris
caacttccaacagtcttcttcatgg

SEQ ID NO: 58129 - DNA, 25 bp, Canis familiaris
caacctccaagcgctcaacttagag

SEQ ID NO: 58130 - DNA, 25 bp, Canis familiaris
caacccaaaccaggaagatgtagac

SEQ ID NO: 58131 - DNA, 25 bp, Canis familiaris
cagacccagaactctcggattactt

SEQ ID NO: 58132 - DNA, 25 bp, Canis familiaris
caaccggcacaatcctgcagttagg

SEQ ID NO: 58133 - DNA, 25 bp, Canis familiaris
caacccccaaacgatcagatttcag

SEQ ID NO: 58134 - DNA, 25 bp, Canis familiaris
caacctcccagctatctaagatgtt

SEQ ID NO: 58135 - DNA, 25 bp, Canis familiaris
caacctccacaggatcctatttttg

SEQ ID NO: 58136 - DNA, 25 bp, Canis familiaris
caacacccaacaaccttcttttgat

SEQ ID NO: 58137 - DNA, 25 bp, Canis familiaris
caacacccattttcctttaatctgt

SEQ ID NO: 58138 - DNA, 25 bp, Canis familiaris
caaacttttttccctttgacatgct

SEQ ID NO: 58139 - DNA, 25 bp, Canis familiaris
caaaatttgtttagctctccaacgg

SEQ ID NO: 58140 - DNA, 25 bp, Canis familiaris
caaaattcattattcatgcccctcc

SEQ ID NO: 58141 - DNA, 25 bp, Canis familiaris
caaaattaaaaccccaatcatccag

SEQ ID NO: 58142 - DNA, 25 bp, Canis familiaris
caaatctagatctgactcccaaacc

SEQ ID NO: 58143 - DNA, 25 bp, Canis familiaris
caaagttgagctgacccgatacctg

SEQ ID NO: 58144 - DNA, 25 bp, Canis familiaris
caactgttgaccatggccaagacct

SEQ ID NO: 58145 - DNA, 25 bp, Canis familiaris
caactgttgaagctggtccacaagt

SEQ ID NO: 58146 - DNA, 25 bp, Canis familiaris
caacttgagaagcgatctcctccct

SEQ ID NO: 58147 - DNA, 25 bp, Canis familiaris
caacttgcaaagcgttcgcatcgcc

SEQ ID NO: 58148 - DNA, 25 bp, Canis familiaris
caacccacacaatgtctacatgccc

SEQ ID NO: 58149 - DNA, 25 bp, Canis familiaris
caacctggcaaatggctaatccccc

SEQ ID NO: 58150 - DNA, 25 bp, Canis familiaris
cacaccaggaaatggaaccccacca

SEQ ID NO: 58151 - DNA, 25 bp, Canis familiaris
caacacaggaaaccaaacccacaca

SEQ ID NO: 58152 - DNA, 25 bp, Canis familiaris
caaccccatacacggaactgcaaaa

SEQ ID NO: 58153 - DNA, 25 bp, Canis familiaris
caaaccttacacagaaccacttcag

SEQ ID NO: 58154 - DNA, 25 bp, Canis familiaris
caaacctgtcaaggaggcctccatt

SEQ ID NO: 58155 - DNA, 25 bp, Canis familiaris
caaacttgtaaaaggctctaaatgg

SEQ ID NO: 58156 - DNA, 25 bp, Canis familiaris
caaaccaattctaaggccaataagt

SEQ ID NO: 58157 - DNA, 25 bp, Canis familiaris
cacacatacacacaaaggagcaaaa

SEQ ID NO: 58158 - DNA, 25 bp, Canis familiaris
cacacaaaacgatagcttaagaata

SEQ ID NO: 58159 - DNA, 25 bp, Canis familiaris
caaagccagagcccaagcctaaaaa

SEQ ID NO: 58160 - DNA, 25 bp, Canis familiaris
caaacgctaccgccagagtatgaac

SEQ ID NO: 58161 - DNA, 25 bp, Canis familiaris
caaaagcccagagcacagtagaact

SEQ ID NO: 58162 - DNA, 25 bp, Canis familiaris
caaaggcccaggtccaggagtcaga

SEQ ID NO: 58163 - DNA, 25 bp, Canis familiaris
caaagtccagatctctatctactaa

SEQ ID NO: 58164 - DNA, 25 bp, Canis familiaris
caaacttcagttcctatctgactaa

SEQ ID NO: 58165 - DNA, 25 bp, Canis familiaris
cagtcacgtatcgcgtgatctccga

SEQ ID NO: 58166 - DNA, 25 bp, Canis familiaris
caacctgagactgctgcatgtccac

SEQ ID NO: 58167 - DNA, 25 bp, Canis familiaris
caactcgaggctatgcagacccagc

SEQ ID NO: 58168 - DNA, 25 bp, Canis familiaris
caacacgaagcgtagcagccgggct

SEQ ID NO: 58169 - DNA, 25 bp, Canis familiaris
caaaatgaaagaaattgcagaggct

SEQ ID NO: 58170 - DNA, 25 bp, Canis familiaris
ctaaagtattttgtgtgcagagacc

SEQ ID NO: 58171 - DNA, 25 bp, Canis familiaris
caaaggttttatcttgagagagcga

SEQ ID NO: 58172 - DNA, 25 bp, Canis familiaris
cacaaggtttacctcggaagacaag

SEQ ID NO: 58173 - DNA, 25 bp, Canis familiaris
caaaggctttccctccaggtgaaag

SEQ ID NO: 58174 - DNA, 25 bp, Canis familiaris
caaaagcttttctcacactggacaa

SEQ ID NO: 58175 - DNA, 25 bp, Canis familiaris
caaaacttggctcccaaagcaccaa

SEQ ID NO: 58176 - DNA, 25 bp, Canis familiaris
caacattcgtgcgccaaaacctgag

SEQ ID NO: 58177 - DNA, 25 bp, Canis familiaris
caaattccctcccaagacagaagga

SEQ ID NO: 58178 - DNA, 25 bp, Canis familiaris
caaaacctgctccgaggtggacgag

SEQ ID NO: 58179 - DNA, 25 bp, Canis familiaris
caaaatgcccctcgggagacactgg

SEQ ID NO: 58180 - DNA, 25 bp, Canis familiaris
caaaggtccctcggggatcacttct

SEQ ID NO: 58181 - DNA, 25 bp, Canis familiaris
caaaggccccagtgtagaggcttct

SEQ ID NO: 58182 - DNA, 25 bp, Canis familiaris
caaatggccccgtaggggagcctgg

SEQ ID NO: 58183 - DNA, 25 bp, Canis familiaris
caactccctaagacagggccagccg

SEQ ID NO: 58184 - DNA, 25 bp, Canis familiaris
caaccccgagcgcaagatgatcagc

SEQ ID NO: 58185 - DNA, 25 bp, Canis familiaris
caacccaaccaggaagatggcacca

SEQ ID NO: 58186 - DNA, 25 bp, Canis familiaris
caactccagactttgggtcagcacc

SEQ ID NO: 58187 - DNA, 25 bp, Canis familiaris
caacttagtcatttggagctcaaga

SEQ ID NO: 58188 - DNA, 25 bp, Canis familiaris
caacttgagtcttcaggtctccatc

SEQ ID NO: 58189 - DNA, 25 bp, Canis familiaris
caacttagatatttttccacactgt

SEQ ID NO: 58190 - DNA, 25 bp, Canis familiaris
cacagtttgtttcctaaagcctggg

SEQ ID NO: 58191 - DNA, 25 bp, Canis familiaris
caaccctggtgtctaaagccttgga

SEQ ID NO: 58192 - DNA, 25 bp, Canis familiaris
caaacctgcagttttaaagcatttt

SEQ ID NO: 58193 - DNA, 25 bp, Canis familiaris
caacacccaattaggcaagatgaca

SEQ ID NO: 58194 - DNA, 25 bp, Canis familiaris
cacattccaaagggccaagagagtt

SEQ ID NO: 58195 - DNA, 25 bp, Canis familiaris
cacttggcacaatggtataattttt

SEQ ID NO: 58196 - DNA, 25 bp, Canis familiaris
cagattggtaccgattcaagttttt

SEQ ID NO: 58197 - DNA, 25 bp, Canis familiaris
caactagctcccgcacaagtgttgt

SEQ ID NO: 58198 - DNA, 25 bp, Canis familiaris
caacggatcccgggtcaggttgtgg

SEQ ID NO: 58199 - DNA, 25 bp, Canis familiaris
caaccgacccgtgggaggctgatgg

SEQ ID NO: 58200 - DNA, 25 bp, Canis familiaris
caacccaggccttcttgaggcagag

SEQ ID NO: 58201 - DNA, 25 bp, Canis familiaris
cactccacaggagacttcgggaaga

SEQ ID NO: 58202 - DNA, 25 bp, Canis familiaris
caaacacagaagttattcatgggaa

SEQ ID NO: 58203 - DNA, 25 bp, Canis familiaris
caaacagccaaattctgccatcagg

SEQ ID NO: 58204 - DNA, 25 bp, Canis familiaris
caacaagcgcatcaacgccatggca

SEQ ID NO: 58205 - DNA, 25 bp, Canis familiaris
caacagaagctgtgctgccacggca

SEQ ID NO: 58206 - DNA, 25 bp, Canis familiaris
cacataggtgtgttgcttcccaaat

SEQ ID NO: 58207 - DNA, 25 bp, Canis familiaris
caaaggtgggtcttctccaacttga

SEQ ID NO: 58208 - DNA, 25 bp, Canis familiaris
caaagtatggttttccctgagttca

SEQ ID NO: 58209 - DNA, 25 bp, Canis familiaris
caaagttcacaatgtggccgaggac

SEQ ID NO: 58210 - DNA, 25 bp, Canis familiaris
caacagtggcacaaggggccctggc

SEQ ID NO: 58211 - DNA, 25 bp, Canis familiaris
caacagggaacagggtgcctcccac

SEQ ID NO: 58212 - DNA, 25 bp, Canis familiaris
caaagggcatacctggtctggcacc

SEQ ID NO: 58213 - DNA, 25 bp, Canis familiaris
caaaaggtgaccagcctgacagcct

SEQ ID NO: 58214 - DNA, 25 bp, Canis familiaris
caaaatgagattccaggcctccacc

SEQ ID NO: 58215 - DNA, 25 bp, Canis familiaris
cagagttcaaatcccagcaaccaca

SEQ ID NO: 58216 - DNA, 25 bp, Canis familiaris
caaaaaagacatccgcacacacaca

SEQ ID NO: 58217 - DNA, 25 bp, Canis familiaris
caaaacagtgaaatctccgcaacag

SEQ ID NO: 58218 - DNA, 25 bp, Canis familiaris
caaataagtgttctcaccccttttg

SEQ ID NO: 58219 - DNA, 25 bp, Canis familiaris
caaaacattttcatacgcccatagt

SEQ ID NO: 58220 - DNA, 25 bp, Canis familiaris
caaacctgtttgcccacgtttagag

SEQ ID NO: 58221 - DNA, 25 bp, Canis familiaris
caaacctgtttgagtaatagtatgg

SEQ ID NO: 58222 - DNA, 25 bp, Canis familiaris
caacccttgtgaccgtaatatatta

SEQ ID NO: 58223 - DNA, 25 bp, Canis familiaris
caaccctctgtctctgacaacaatg

SEQ ID NO: 58224 - DNA, 25 bp, Canis familiaris
cacacgccctgtgggctcgtaaata

SEQ ID NO: 58225 - DNA, 25 bp, Canis familiaris
caacccgcttctctggtatgaacat

SEQ ID NO: 58226 - DNA, 25 bp, Canis familiaris
caacccgcttctctggtatgaacat

SEQ ID NO: 58227 - DNA, 25 bp, Canis familiaris
caactcatccgactggtggtatacg

SEQ ID NO: 58228 - DNA, 25 bp, Canis familiaris
caactgcactcgctttggcattgca

SEQ ID NO: 58229 - DNA, 25 bp, Canis familiaris
caaagcctcagcccttagtatcagg

SEQ ID NO: 58230 - DNA, 25 bp, Canis familiaris
cagaaggacacacgcttcttcgggc

SEQ ID NO: 58231 - DNA, 25 bp, Canis familiaris
caaagatgatccctaatactcgcgg

SEQ ID NO: 58232 - DNA, 25 bp, Canis familiaris
caaagttcttggctatcacgctggg

SEQ ID NO: 58233 - DNA, 25 bp, Canis familiaris
cattaactttagctatcctggtggc

SEQ ID NO: 58234 - DNA, 25 bp, Canis familiaris
caaaagttctatcattctgtggtac

SEQ ID NO: 58235 - DNA, 25 bp, Canis familiaris
caacaggtgtcggtcttgctgtgga

SEQ ID NO: 58236 - DNA, 25 bp, Canis familiaris
caacattgtggcccatttgctgctg

SEQ ID NO: 58237 - DNA, 25 bp, Canis familiaris
caacatgaggatgcctgagtggctc

SEQ ID NO: 58238 - DNA, 25 bp, Canis familiaris
caacagtgtgttccatgagcttcct

SEQ ID NO: 58239 - DNA, 25 bp, Canis familiaris
caacgtggagatggatgcagccccc

SEQ ID NO: 58240 - DNA, 25 bp, Canis familiaris
caactgtgcagagcatgtgcgccgc

SEQ ID NO: 58241 - DNA, 25 bp, Canis familiaris
caacagtgcgtggctggggcagcca

SEQ ID NO: 58242 - DNA, 25 bp, Canis familiaris
cacacggcggggtgggaccaaattg

SEQ ID NO: 58243 - DNA, 25 bp, Canis familiaris
cacaggagggagtggtggaccaaac

SEQ ID NO: 58244 - DNA, 25 bp, Canis familiaris
caaaagggattgagtaactatacac

SEQ ID NO: 58245 - DNA, 25 bp, Canis familiaris
caaaggctggttatttagcccacca

SEQ ID NO: 58246 - DNA, 25 bp, Canis familiaris
caaaagccagttactgtgtcaccgc

SEQ ID NO: 58247 - DNA, 25 bp, Canis familiaris
caacaacaactaaaggtcagtctgt

SEQ ID NO: 58248 - DNA, 25 bp, Canis familiaris
caaacacgactattctggtcctttt

SEQ ID NO: 58249 - DNA, 25 bp, Canis familiaris
caaatgaagcattaccgtgacccct

SEQ ID NO: 58250 - DNA, 25 bp, Canis familiaris
caaatttgctactcgaggatccctg

SEQ ID NO: 58251 - DNA, 25 bp, Canis familiaris
cacaacttgtcctggaggtggtccg

SEQ ID NO: 58252 - DNA, 25 bp, Canis familiaris
caaacttgactctgacccagtctgc

SEQ ID NO: 58253 - DNA, 25 bp, Canis familiaris
caaatcgtcatcagggccaagttcg

SEQ ID NO: 58254 - DNA, 25 bp, Canis familiaris
caaaccctgtaaggccaacttctgt

SEQ ID NO: 58255 - DNA, 25 bp, Canis familiaris
caacccacttattcagtacgttctt

SEQ ID NO: 58256 - DNA, 25 bp, Canis familiaris
gaaccaacttttctgggtctcgtga

SEQ ID NO: 58257 - DNA, 25 bp, Canis familiaris
caacaaacgtttatgggcctgccag

SEQ ID NO: 58258 - DNA, 25 bp, Canis familiaris
caaaaaggcttctttattccaggtg

SEQ ID NO: 58259 - DNA, 25 bp, Canis familiaris
caaacacggcctgtctttcggaggc

SEQ ID NO: 58260 - DNA, 25 bp, Canis familiaris
caacaagagggcgccttactggacc

SEQ ID NO: 58261 - DNA, 25 bp, Canis familiaris
caacacaggaccacagttccggacg

SEQ ID NO: 58262 - DNA, 25 bp, Canis familiaris
caaaaaacacaaccgttctgaacag

SEQ ID NO: 58263 - DNA, 25 bp, Canis familiaris
caaaatacccaactgcttactctac

SEQ ID NO: 58264 - DNA, 25 bp, Canis familiaris
cacgtgatacccgttctgtaattcc

SEQ ID NO: 58265 - DNA, 25 bp, Canis familiaris
caactcatacccttttgtattccct

SEQ ID NO: 58266 - DNA, 25 bp, Canis familiaris
caacattatctctcttattatccca

SEQ ID NO: 58267 - DNA, 25 bp, Canis familiaris
caacatttcatccgtgtgtgtgtgc

SEQ ID NO: 58268 - DNA, 25 bp, Canis familiaris
caactcctatgcactgctgctggag

SEQ ID NO: 58269 - DNA, 25 bp, Canis familiaris
caacaaccagcagttcctggcaggc

SEQ ID NO: 58270 - DNA, 25 bp, Canis familiaris
caaagaccacctttatggaaccctg

SEQ ID NO: 58271 - DNA, 25 bp, Canis familiaris
caaacaccaactacaaaaacaccat

SEQ ID NO: 58272 - DNA, 25 bp, Canis familiaris
caaaaacacaacacaaataacacac

SEQ ID NO: 58273 - DNA, 25 bp, Canis familiaris
caaaaacccacagcaggaccacaga

SEQ ID NO: 58274 - DNA, 25 bp, Canis familiaris
caaaagaggcccttgtgcgggtcgc

SEQ ID NO: 58275 - DNA, 25 bp, Canis familiaris
caaaagcagagcccgtggctgggcc

SEQ ID NO: 58276 - DNA, 25 bp, Canis familiaris
caaaacagtcttttgcctggtcctt

SEQ ID NO: 58277 - DNA, 25 bp, Canis familiaris
caaaatggtcttttccttgtctgta

SEQ ID NO: 58278 - DNA, 25 bp, Canis familiaris
caaatgggtttgttctttggtgttg

SEQ ID NO: 58279 - DNA, 25 bp, Canis familiaris
caacagggaattgggccttgggcct

SEQ ID NO: 58280 - DNA, 25 bp, Canis familiaris
caaaggtaattttgcccttgccctg

SEQ ID NO: 58281 - DNA, 25 bp, Canis familiaris
cactaggtaatcctactcgttcttt

SEQ ID NO: 58282 - DNA, 25 bp, Canis familiaris
cactggttattcgttagcggttctt

SEQ ID NO: 58283 - DNA, 25 bp, Canis familiaris
caactgttttgtatacttgttttca

SEQ ID NO: 58284 - DNA, 25 bp, Canis familiaris
caacgtcttgtgtctcgtctatgat

SEQ ID NO: 58285 - DNA, 25 bp, Canis familiaris
caacggcttctgtactgtttatgct

SEQ ID NO: 58286 - DNA, 25 bp, Canis familiaris
caactggcattccactatattaatt

SEQ ID NO: 58287 - DNA, 25 bp, Canis familiaris
caaactgcattccacatattatttt

SEQ ID NO: 58288 - DNA, 25 bp, Canis familiaris
caactgcctcccaaagtcatgtttg

SEQ ID NO: 58289 - DNA, 25 bp, Canis familiaris
caacgtcgaccatcgtcagattcga

SEQ ID NO: 58290 - DNA, 25 bp, Canis familiaris
caacgtcgtgaaattgtcgcattcg

SEQ ID NO: 58291 - DNA, 25 bp, Canis familiaris
cagaagtcgggaacgtgccccgtgt

SEQ ID NO: 58292 - DNA, 25 bp, Canis familiaris
caacatggggagaccgtttcctctt

SEQ ID NO: 58293 - DNA, 25 bp, Canis familiaris
caacgggcagatcggctggtttccc

SEQ ID NO: 58294 - DNA, 25 bp, Canis familiaris
gcaacaggtcggggtaatttagcta

SEQ ID NO: 58295 - DNA, 25 bp, Canis familiaris
cacaaggctctcccagtaaattact

SEQ ID NO: 58296 - DNA, 25 bp, Canis familiaris
cataagcccctacctacaattattt

SEQ ID NO: 58297 - DNA, 25 bp, Canis familiaris
caaacaagcctatacacagtttgga

SEQ ID NO: 58298 - DNA, 25 bp, Canis familiaris
caaacaaccatcaaaacagtcatca

SEQ ID NO: 58299 - DNA, 25 bp, Canis familiaris
caacaacaccacgacaacaaataac

SEQ ID NO: 58300 - DNA, 25 bp, Canis familiaris
cagaaccagccatgccaaaaaaaaa

SEQ ID NO: 58301 - DNA, 25 bp, Canis familiaris
caaaccacgaaggagactaacgaag

SEQ ID NO: 58302 - DNA, 25 bp, Canis familiaris
cataaactctaacaccacaactgaa

SEQ ID NO: 58303 - DNA, 25 bp, Canis familiaris
caacttcatcattaaaacactccta

SEQ ID NO: 58304 - DNA, 25 bp, Canis familiaris
caactcattgtttaaaagcttccag

SEQ ID NO: 58305 - DNA, 25 bp, Canis familiaris
caaatcacagacccaaaaagttcag

SEQ ID NO: 58306 - DNA, 25 bp, Canis familiaris
caaaacaagcaccataatccgccta

SEQ ID NO: 58307 - DNA, 25 bp, Canis familiaris
caaaacgacagccagagcagtcccc

SEQ ID NO: 58308 - DNA, 25 bp, Canis familiaris
caaataccagctgagcgaggcccag

SEQ ID NO: 58309 - DNA, 25 bp, Canis familiaris
caactctcgatctcagggtcataag

SEQ ID NO: 58310 - DNA, 25 bp, Canis familiaris
caactccctcaagattgtcagcaat

SEQ ID NO: 58311 - DNA, 25 bp, Canis familiaris
caactgccccaaattctgtgaatgt

SEQ ID NO: 58312 - DNA, 25 bp, Canis familiaris
caccattcccaatttcggaccttgg

SEQ ID NO: 58313 - DNA, 25 bp, Canis familiaris
caacattatccgtgtcggacccgtg

SEQ ID NO: 58314 - DNA, 25 bp, Canis familiaris
caacatctaccagtggtgcggctcc

SEQ ID NO: 58315 - DNA, 25 bp, Canis familiaris
caacatgtaccaggatggacatcac

SEQ ID NO: 58316 - DNA, 25 bp, Canis familiaris
caacgtcaccagacactgaacaggc

SEQ ID NO: 58317 - DNA, 25 bp, Canis familiaris
caaagtacacagatcaggacggcaa

SEQ ID NO: 58318 - DNA, 25 bp, Canis familiaris
caaagaacacacttaggccttccaa

SEQ ID NO: 58319 - DNA, 25 bp, Canis familiaris
taaataaaactgtaggccgccacca

SEQ ID NO: 58320 - DNA, 25 bp, Canis familiaris
caaataaagacctgtgctggcccca

SEQ ID NO: 58321 - DNA, 25 bp, Canis familiaris
caaaactggaccttggtggccacgt

SEQ ID NO: 58322 - DNA, 25 bp, Canis familiaris
caaatacggtactttgaggccttgg

SEQ ID NO: 58323 - DNA, 25 bp, Canis familiaris
caaacacgggagcttggcacccggc

SEQ ID NO: 58324 - DNA, 25 bp, Canis familiaris
caaagacaacggctgggactgaccc

SEQ ID NO: 58325 - DNA, 25 bp, Canis familiaris
caaaacatactacagggggatccct

SEQ ID NO: 58326 - DNA, 25 bp, Canis familiaris
caaatacttctccaagttgggtgcc

SEQ ID NO: 58327 - DNA, 25 bp, Canis familiaris
caaatacactctgaagttgaccttc

SEQ ID NO: 58328 - DNA, 25 bp, Canis familiaris
caaagaccaatgtaactaaacttat

SEQ ID NO: 58329 - DNA, 25 bp, Canis familiaris
caaaggccgtgtcattaaaccaatt

SEQ ID NO: 58330 - DNA, 25 bp, Canis familiaris
caacggctccggcatgtgcaaggcc

SEQ ID NO: 58331 - DNA, 25 bp, Canis familiaris
caactggccgcttacttgcacggcc

SEQ ID NO: 58332 - DNA, 25 bp, Canis familiaris
caacagttagtcaacttgcaccaga

SEQ ID NO: 58333 - DNA, 25 bp, Canis familiaris
caacattttttcattggccaaggca

SEQ ID NO: 58334 - DNA, 25 bp, Canis familiaris
caacttcttcccatttgccaagagg

SEQ ID NO: 58335 - DNA, 25 bp, Canis familiaris
caactccttctcaaggttcaccaag

SEQ ID NO: 58336 - DNA, 25 bp, Canis familiaris
caacaagtgtcctcgctgtaacaag

SEQ ID NO: 58337 - DNA, 25 bp, Canis familiaris
cacaaactgtacacctttgagaaac

SEQ ID NO: 58338 - DNA, 25 bp, Canis familiaris
caacaagttcacgccttattgtcaa

SEQ ID NO: 58339 - DNA, 25 bp, Canis familiaris
caaaagcattcaggccctgctctgt

SEQ ID NO: 58340 - DNA, 25 bp, Canis familiaris
caacaggaatcagctccagcacagc

SEQ ID NO: 58341 - DNA, 25 bp, Canis familiaris
caacggagtctgcactctgcaagtc

SEQ ID NO: 58342 - DNA, 25 bp, Canis familiaris
caactggagtatccctgccaaatca

SEQ ID NO: 58343 - DNA, 25 bp, Canis familiaris
cacaaggcaggacccttaaaatttg

SEQ ID NO: 58344 - DNA, 25 bp, Canis familiaris
cacacggggcctacttgaacaaccg

SEQ ID NO: 58345 - DNA, 25 bp, Canis familiaris
cacacaaggggaccttaaccctctg

SEQ ID NO: 58346 - DNA, 25 bp, Canis familiaris
caacacttgggaactaaacacactt

SEQ ID NO: 58347 - DNA, 25 bp, Canis familiaris
caactctttgtaaattttaactcat

SEQ ID NO: 58348 - DNA, 25 bp, Canis familiaris
caacttttgtgtatattttactagg

SEQ ID NO: 58349 - DNA, 25 bp, Canis familiaris
caaattgcttttctattttcccagt

SEQ ID NO: 58350 - DNA, 25 bp, Canis familiaris
caaagtgttaatcctttttgtcctg

SEQ ID NO: 58351 - DNA, 25 bp, Canis familiaris
caaacagttaatcctctacctggtt

SEQ ID NO: 58352 - DNA, 25 bp, Canis familiaris
caaatatttattgtaacacttgaat

SEQ ID NO: 58353 - DNA, 25 bp, Canis familiaris
caaattttatttgaaccgggcattg

SEQ ID NO: 58354 - DNA, 25 bp, Canis familiaris
caaatttaatttctacccttgtatg

SEQ ID NO: 58355 - DNA, 25 bp, Canis familiaris
caaaataaagtacttcaccattctt

SEQ ID NO: 58356 - DNA, 25 bp, Canis familiaris
caaagtcaaacttcttcgatccctt

SEQ ID NO: 58357 - DNA, 25 bp, Canis familiaris
caaaacaataaacacgattccctct

SEQ ID NO: 58358 - DNA, 25 bp, Canis familiaris
caaagaaacaaacgacggcagcccg

SEQ ID NO: 58359 - DNA, 25 bp, Canis familiaris
caacaaagacaaactcggggcaacg

SEQ ID NO: 58360 - DNA, 25 bp, Canis familiaris
caacaacgtcatagtcggggggcac

SEQ ID NO: 58361 - DNA, 25 bp, Canis familiaris
caacaacaagatggccctgtggggc

SEQ ID NO: 58362 - DNA, 25 bp, Canis familiaris
caacaactcagggggcgggaggaag

SEQ ID NO: 58363 - DNA, 25 bp, Canis familiaris
caacaaccttgggcgcagaggacct

SEQ ID NO: 58364 - DNA, 25 bp, Canis familiaris
caactacttgctggtgcgagtggcc

SEQ ID NO: 58365 - DNA, 25 bp, Canis familiaris
caacttcatcgctgtggtgcaggcc

SEQ ID NO: 58366 - DNA, 25 bp, Canis familiaris
caacttaccaaccgtgaagcacaag

SEQ ID NO: 58367 - DNA, 25 bp, Canis familiaris
caacttcccagctctgctgaaggca

SEQ ID NO: 58368 - DNA, 25 bp, Canis familiaris
caactactcttgtcccatatactaa

SEQ ID NO: 58369 - DNA, 25 bp, Canis familiaris
caactacatggtttacatgttccaa

SEQ ID NO: 58370 - DNA, 25 bp, Canis familiaris
caactacatggtctacatgttccag

SEQ ID NO: 58371 - DNA, 25 bp, Canis familiaris
caactaactggcctactcattgccc

SEQ ID NO: 58372 - DNA, 25 bp, Canis familiaris
caacagcaacccgacctcaatgtcg

SEQ ID NO: 58373 - DNA, 25 bp, Canis familiaris
caactgcaaccagccacttggtcat

SEQ ID NO: 58374 - DNA, 25 bp, Canis familiaris
caacactcccaacactattgtattt

SEQ ID NO: 58375 - DNA, 25 bp, Canis familiaris
caactctccacccaaaatggaaatt

SEQ ID NO: 58376 - DNA, 25 bp, Canis familiaris
cagacgtcccctcaagaggttcttg

SEQ ID NO: 58377 - DNA, 25 bp, Canis familiaris
caaaatccgcttcaacagtgtctcc

SEQ ID NO: 58378 - DNA, 25 bp, Canis familiaris
caaaaacctttcaagcagtcgccct

SEQ ID NO: 58379 - DNA, 25 bp, Canis familiaris
gacttaagccttataaggggccagt

SEQ ID NO: 58380 - DNA, 25 bp, Canis familiaris
tccttcccttttcaagggtcaagtg

SEQ ID NO: 58381 - DNA, 25 bp, Canis familiaris
cactctttcgttgaaaggtgataaa

SEQ ID NO: 58382 - DNA, 25 bp, Canis familiaris
cactctttagggttttggaaatcag

SEQ ID NO: 58383 - DNA, 25 bp, Canis familiaris
cattccttgaagcattttgggtaca

SEQ ID NO: 58384 - DNA, 25 bp, Canis familiaris
cagaacttaagactttcgggacgcg

SEQ ID NO: 58385 - DNA, 25 bp, Canis familiaris
caacactctacaccctgacagggac

SEQ ID NO: 58386 - DNA, 25 bp, Canis familiaris
caactcccaaatcgtcatcagggcc

SEQ ID NO: 58387 - DNA, 25 bp, Canis familiaris
caactcccagaagttcgaagtcctg

SEQ ID NO: 58388 - DNA, 25 bp, Canis familiaris
caacatcccagaacccgttgtcatt

SEQ ID NO: 58389 - DNA, 25 bp, Canis familiaris
caacactcctgagcacattgttccg

SEQ ID NO: 58390 - DNA, 25 bp, Canis familiaris
caactcctggagccagcagatgctc

SEQ ID NO: 58391 - DNA, 25 bp, Canis familiaris
caactgctctgacaacaatctctag

SEQ ID NO: 58392 - DNA, 25 bp, Canis familiaris
caactgctctgggacacagcacttg

SEQ ID NO: 58393 - DNA, 25 bp, Canis familiaris
caacagctgcggggaccactttaag

SEQ ID NO: 58394 - DNA, 25 bp, Canis familiaris
caaactgtgagaaacctgccttaag

SEQ ID NO: 58395 - DNA, 25 bp, Canis familiaris
caacactgtgaatgtgctcggtggc

SEQ ID NO: 58396 - DNA, 25 bp, Canis familiaris
caacactgccaacggtccagatgac

SEQ ID NO: 58397 - DNA, 25 bp, Canis familiaris
caacaaggacagcttccaagttttt

SEQ ID NO: 58398 - DNA, 25 bp, Canis familiaris
caaagaaggtgcattactatttttt

SEQ ID NO: 58399 - DNA, 25 bp, Canis familiaris
caaagaaagccacaactttttatgg

SEQ ID NO: 58400 - DNA, 25 bp, Canis familiaris
cacacggaaccacgcagactttgga

SEQ ID NO: 58401 - DNA, 25 bp, Canis familiaris
caacaggaaccagcagactttggag

SEQ ID NO: 58402 - DNA, 25 bp, Canis familiaris
caacagggaccagcaccactttaaa

SEQ ID NO: 58403 - DNA, 25 bp, Canis familiaris
caacaggggccccatcaagttcaac

SEQ ID NO: 58404 - DNA, 25 bp, Canis familiaris
caaaaggcgaagcacgacttgccca

SEQ ID NO: 58405 - DNA, 25 bp, Canis familiaris
caaaacacgaagctctagctctccc

SEQ ID NO: 58406 - DNA, 25 bp, Canis familiaris
caaaaaagaatgttctatttcctgc

SEQ ID NO: 58407 - DNA, 25 bp, Canis familiaris
cagaaaacaggttccatttcgcctt

SEQ ID NO: 58408 - DNA, 25 bp, Canis familiaris
caacagaacggtccgctgtgtacct

SEQ ID NO: 58409 - DNA, 25 bp, Canis familiaris
caaaagagcctccactgggatacct

SEQ ID NO: 58410 - DNA, 25 bp, Canis familiaris
caaactgtccaccatcagggaacct

SEQ ID NO: 58411 - DNA, 25 bp, Canis familiaris
caaagttccaggacggagacctcac

SEQ ID NO: 58412 - DNA, 25 bp, Canis familiaris
caaaggtcgaggagccaggaggcac

SEQ ID NO: 58413 - DNA, 25 bp, Canis familiaris
caaacgtcgcaagggctctgggcgg

SEQ ID NO: 58414 - DNA, 25 bp, Canis familiaris
caaaccggatcagtgcctttggcta

SEQ ID NO: 58415 - DNA, 25 bp, Canis familiaris
caacacactactatcagctttgccc

SEQ ID NO: 58416 - DNA, 25 bp, Canis familiaris
caacaaacctgaatgcacttctggc

SEQ ID NO: 58417 - DNA, 25 bp, Canis familiaris
caacaaaagcataacctcctccttg

SEQ ID NO: 58418 - DNA, 25 bp, Canis familiaris
caacataagccaaaagcccatgcct

SEQ ID NO: 58419 - DNA, 25 bp, Canis familiaris
caaataagtttggaccaatgctgtt

SEQ ID NO: 58420 - DNA, 25 bp, Canis familiaris
caaaaggctgttgagtcttggtgtc

SEQ ID NO: 58421 - DNA, 25 bp, Canis familiaris
caaagggagtctcactcagtgggtc

SEQ ID NO: 58422 - DNA, 25 bp, Canis familiaris
caaaggccattctgttggcggagtc

SEQ ID NO: 58423 - DNA, 25 bp, Canis familiaris
caacagcccaactgtgggaggagcc

SEQ ID NO: 58424 - DNA, 25 bp, Canis familiaris
caacagccccaccgaggaagaggag

SEQ ID NO: 58425 - DNA, 25 bp, Canis familiaris
caaacccccggggcaatggagcaag

SEQ ID NO: 58426 - DNA, 25 bp, Canis familiaris
caaaccccacgttgggtgtagagat

SEQ ID NO: 58427 - DNA, 25 bp, Canis familiaris
caaacccttgagtgttgtcttgaga

SEQ ID NO: 58428 - DNA, 25 bp, Canis familiaris
caaacccttgctttatgctgttgtc

SEQ ID NO: 58429 - DNA, 25 bp, Canis familiaris
caaacattttataattgttctgatg

SEQ ID NO: 58430 - DNA, 25 bp, Canis familiaris
caaaatgtgtttatttgccttttct

SEQ ID NO: 58431 - DNA, 25 bp, Canis familiaris
caaaaggaagttgctctcctcgtcc

SEQ ID NO: 58432 - DNA, 25 bp, Canis familiaris
caaaaaggcggaacatgctcccccg

SEQ ID NO: 58433 - DNA, 25 bp, Canis familiaris
caaaagggcttgaccaatctcccgg

SEQ ID NO: 58434 - DNA, 25 bp, Canis familiaris
caaaatagacttattttctcctggg

SEQ ID NO: 58435 - DNA, 25 bp, Canis familiaris
caaacttgatctccatctttggctc

SEQ ID NO: 58436 - DNA, 25 bp, Canis familiaris
caaagcttctctctttgggtgcact

SEQ ID NO: 58437 - DNA, 25 bp, Canis familiaris
caaatgccctctctggtgacgtttg

SEQ ID NO: 58438 - DNA, 25 bp, Canis familiaris
caacaggccttgatggtccgtttac

SEQ ID NO: 58439 - DNA, 25 bp, Canis familiaris
caaaggccctgtaagtgccgtacca

SEQ ID NO: 58440 - DNA, 25 bp, Canis familiaris
caaacgtgtcttccagtcggtaagc

SEQ ID NO: 58441 - DNA, 25 bp, Canis familiaris
caaacggtctcagcctgggattggg

SEQ ID NO: 58442 - DNA, 25 bp, Canis familiaris
caacaccaccatcaccgaggattgg

SEQ ID NO: 58443 - DNA, 25 bp, Canis familiaris
caacacacaccaagaacaaggtggg

SEQ ID NO: 58444 - DNA, 25 bp, Canis familiaris
caacagtgcccaagagacgggtggg

SEQ ID NO: 58445 - DNA, 25 bp, Canis familiaris
caacagggtctttggcatggggtgg

SEQ ID NO: 58446 - DNA, 25 bp, Canis familiaris
caaagtggtccgtgtgtggctggtg

SEQ ID NO: 58447 - DNA, 25 bp, Canis familiaris
caaagttgcccccagtgggtggctg

SEQ ID NO: 58448 - DNA, 25 bp, Canis familiaris
caaagtgtgcctgctgggggatacg

SEQ ID NO: 58449 - DNA, 25 bp, Canis familiaris
caaatgcttctagatggactgttac

SEQ ID NO: 58450 - DNA, 25 bp, Canis familiaris
caaactccgagcatgctgcatcagt

SEQ ID NO: 58451 - DNA, 25 bp, Canis familiaris
caacactctcagacattggacagga

SEQ ID NO: 58452 - DNA, 25 bp, Canis familiaris
caacatcttgatctttccagtgcag

SEQ ID NO: 58453 - DNA, 25 bp, Canis familiaris
caaagcattctcatcagtcgcaatg

SEQ ID NO: 58454 - DNA, 25 bp, Canis familiaris
caaacaatctcaagagctgctgcag

SEQ ID NO: 58455 - DNA, 25 bp, Canis familiaris
caaaaccagcatcagctcgctttac

SEQ ID NO: 58456 - DNA, 25 bp, Canis familiaris
caaaaccatcatcatccacttggat

SEQ ID NO: 58457 - DNA, 25 bp, Canis familiaris
caaaatgtcatcttgtcctttaaaa

SEQ ID NO: 58458 - DNA, 25 bp, Canis familiaris
caaatatagctgtgtttttcaaaaa

SEQ ID NO: 58459 - DNA, 25 bp, Canis familiaris
caaatgccagcgtgtctacatctgc

SEQ ID NO: 58460 - DNA, 25 bp, Canis familiaris
caaaccacagacaatgcagaattca

SEQ ID NO: 58461 - DNA, 25 bp, Canis familiaris
caacaccacccttcagatttctgga

SEQ ID NO: 58462 - DNA, 25 bp, Canis familiaris
caaaccaccacttcggatttgaagc

SEQ ID NO: 58463 - DNA, 25 bp, Canis familiaris
caacaccccatgcactggtgtcgag

SEQ ID NO: 58464 - DNA, 25 bp, Canis familiaris
caacaaaccaggaggagttgagttt

SEQ ID NO: 58465 - DNA, 25 bp, Canis familiaris
cacacaacctgccaacctagttggt

SEQ ID NO: 58466 - DNA, 25 bp, Canis familiaris
cagcgaacacttctactactttcta

SEQ ID NO: 58467 - DNA, 25 bp, Canis familiaris
caactatacactcttctacatttcg

SEQ ID NO: 58468 - DNA, 25 bp, Canis familiaris
caacacaactctctataaacctcgg

SEQ ID NO: 58469 - DNA, 25 bp, Canis familiaris
caacagcaacgtcttgaacaggcgc

SEQ ID NO: 58470 - DNA, 25 bp, Canis familiaris
caacatgaacgacctggtgtccgag

SEQ ID NO: 58471 - DNA, 25 bp, Canis familiaris
caacatgaacgaccttgtctctgag

SEQ ID NO: 58472 - DNA, 25 bp, Canis familiaris
caacagaccaggtcatggctccagc

SEQ ID NO: 58473 - DNA, 25 bp, Canis familiaris
caacaacgtgtgtaacttcgcctcc

SEQ ID NO: 58474 - DNA, 25 bp, Canis familiaris
caaaattgggcatcctgctcccaac

SEQ ID NO: 58475 - DNA, 25 bp, Canis familiaris
caaagttgtatgagccttccaacac

SEQ ID NO: 58476 - DNA, 25 bp, Canis familiaris
caacagtggcggagacccgacaatc

SEQ ID NO: 58477 - DNA, 25 bp, Canis familiaris
caacagttctgtctgacgccagagc

SEQ ID NO: 58478 - DNA, 25 bp, Canis familiaris
caacagtctttaaaccatcggtcca

SEQ ID NO: 58479 - DNA, 25 bp, Canis familiaris
cacttcctttcaaagccaacttctc

SEQ ID NO: 58480 - DNA, 25 bp, Canis familiaris
tccgggtttaaacacactatatcct

SEQ ID NO: 58481 - DNA, 25 bp, Canis familiaris
cacggtttatactcttacgatactt

SEQ ID NO: 58482 - DNA, 25 bp, Canis familiaris
cacagttttaacacaggggctttct

SEQ ID NO: 58483 - DNA, 25 bp, Canis familiaris
cacagttgtaaatgctagttttttt

SEQ ID NO: 58484 - DNA, 25 bp, Canis familiaris
caaactctaaactatgaggttttat

SEQ ID NO: 58485 - DNA, 25 bp, Canis familiaris
caaagtctacgatacggatagtctt

SEQ ID NO: 58486 - DNA, 25 bp, Canis familiaris
caaattttgcgctcggtgcgatact

SEQ ID NO: 58487 - DNA, 25 bp, Canis familiaris
cacaagggggacatggatctgtaat

SEQ ID NO: 58488 - DNA, 25 bp, Canis familiaris
caaaggtagctgtgtgtgaaaaatt

SEQ ID NO: 58489 - DNA, 25 bp, Canis familiaris
cacacggtccagtggtaccaaagta

SEQ ID NO: 58490 - DNA, 25 bp, Canis familiaris
cacataggaccagggtggaccagaa

SEQ ID NO: 58491 - DNA, 25 bp, Canis familiaris
caaagtgaagacattgtaccagaat

SEQ ID NO: 58492 - DNA, 25 bp, Canis familiaris
caaagtggcaaaatttagctacagt

SEQ ID NO: 58493 - DNA, 25 bp, Canis familiaris
caaagcccaaattaaagtgacctct

SEQ ID NO: 58494 - DNA, 25 bp, Canis familiaris
cagaagggggtctaacgtgacctct

SEQ ID NO: 58495 - DNA, 25 bp, Canis familiaris
caaacgggtgttcatcgtgtctcca

SEQ ID NO: 58496 - DNA, 25 bp, Canis familiaris
caaattagcttgtttaccatttcca

SEQ ID NO: 58497 - DNA, 25 bp, Canis familiaris
caacattgactttcttcatcactgc

SEQ ID NO: 58498 - DNA, 25 bp, Canis familiaris
caacactaatggctatcaccgctct

SEQ ID NO: 58499 - DNA, 25 bp, Canis familiaris
caaaaacaggcactcagcccagctc

SEQ ID NO: 58500 - DNA, 25 bp, Canis familiaris
caaagaccacgactcatcggttcac

SEQ ID NO: 58501 - DNA, 25 bp, Canis familiaris
caaagcagtcatcatgcgcatccgt

SEQ ID NO: 58502 - DNA, 25 bp, Canis familiaris
cacaagcgtctaaggcactaagggg

SEQ ID NO: 58503 - DNA, 25 bp, Canis familiaris
caaaggcatttacatcacaacaccg

SEQ ID NO: 58504 - DNA, 25 bp, Canis familiaris
caaatcgtctaagatgacacatcgc

SEQ ID NO: 58505 - DNA, 25 bp, Canis familiaris
caaatgtgctctagaccaaccttgc

SEQ ID NO: 58506 - DNA, 25 bp, Canis familiaris
cagaaggcctacttaactctcgtga

SEQ ID NO: 58507 - DNA, 25 bp, Canis familiaris
caaagaccatcttctaactacttga

SEQ ID NO: 58508 - DNA, 25 bp, Canis familiaris
caaaaccaattaaagctcatttcaa

SEQ ID NO: 58509 - DNA, 25 bp, Canis familiaris
caaaagggattccgcctcattgcta

SEQ ID NO: 58510 - DNA, 25 bp, Canis familiaris
caacaggtagttgagcagtactgct

SEQ ID NO: 58511 - DNA, 25 bp, Canis familiaris
caaagttacttctcgtagtctgcct

SEQ ID NO: 58512 - DNA, 25 bp, Canis familiaris
caaactggacttttctgggttctgt

SEQ ID NO: 58513 - DNA, 25 bp, Canis familiaris
cagaagcagaacccttcgggctttg

SEQ ID NO: 58514 - DNA, 25 bp, Canis familiaris
cagggaacacccacgggagtagact

SEQ ID NO: 58515 - DNA, 25 bp, Canis familiaris
cagaaaacggccacagcgaagtccc

SEQ ID NO: 58516 - DNA, 25 bp, Canis familiaris
ccaaaaggcgaagcacgacttgccc

SEQ ID NO: 58517 - DNA, 25 bp, Canis familiaris
ctgaagaaggttgtccgccttgcgc

SEQ ID NO: 58518 - DNA, 25 bp, Canis familiaris
caacacaatttggacagcccctttc

SEQ ID NO: 58519 - DNA, 25 bp, Canis familiaris
caacatagacttgactcccttaaac

SEQ ID NO: 58520 - DNA, 25 bp, Canis familiaris
cacctagatccgggtgcccgtatag

SEQ ID NO: 58521 - DNA, 25 bp, Canis familiaris
cacacaagtccctggagctcggaca

SEQ ID NO: 58522 - DNA, 25 bp, Canis familiaris
caacaatgtggcctgtggccctggc

SEQ ID NO: 58523 - DNA, 25 bp, Canis familiaris
caacaaggtctcggtgctgactggc

SEQ ID NO: 58524 - DNA, 25 bp, Canis familiaris
caacaaggtctacgtccgatggctg

SEQ ID NO: 58525 - DNA, 25 bp, Canis familiaris
caacaagctgtgacacagctccgtg

SEQ ID NO: 58526 - DNA, 25 bp, Canis familiaris
caacacgattgatcaccacctggtt

SEQ ID NO: 58527 - DNA, 25 bp, Canis familiaris
caacatcatattcagcccatcacgc

SEQ ID NO: 58528 - DNA, 25 bp, Canis familiaris
caacagaatgaccagtgcctgccac

SEQ ID NO: 58529 - DNA, 25 bp, Canis familiaris
caacatgtatcactagccctgtacc

SEQ ID NO: 58530 - DNA, 25 bp, Canis familiaris
cacatgctgcaatctgctgcaactg

SEQ ID NO: 58531 - DNA, 25 bp, Canis familiaris
cacacatgcacgtacgcagagcatt

SEQ ID NO: 58532 - DNA, 25 bp, Canis familiaris
caaagcatgccttctgagcactgca

SEQ ID NO: 58533 - DNA, 25 bp, Canis familiaris
caacacagccttggagacgctgcac

SEQ ID NO: 58534 - DNA, 25 bp, Canis familiaris
caacagcaccagggacttgctgcag

SEQ ID NO: 58535 - DNA, 25 bp, Canis familiaris
caacagccagattgcaatcctctca

SEQ ID NO: 58536 - DNA, 25 bp, Canis familiaris
caacactgagcatctccctcacaat

SEQ ID NO: 58537 - DNA, 25 bp, Canis familiaris
caaagctgagattcttcttaaacta

SEQ ID NO: 58538 - DNA, 25 bp, Canis familiaris
caaagctgcgagtccgcttcaaact

SEQ ID NO: 58539 - DNA, 25 bp, Canis familiaris
caacagcccaggctgctccaaggat

SEQ ID NO: 58540 - DNA, 25 bp, Canis familiaris
caacacgccggactgactctggcgg

SEQ ID NO: 58541 - DNA, 25 bp, Canis familiaris
caacaggccagtggctggcgctcgg

SEQ ID NO: 58542 - DNA, 25 bp, Canis familiaris
caacagttgcagcatgccgctgggg

SEQ ID NO: 58543 - DNA, 25 bp, Canis familiaris
caacagcatgggcagcagcctgacc

SEQ ID NO: 58544 - DNA, 25 bp, Canis familiaris
caacagcgggctacaaggacacctc

SEQ ID NO: 58545 - DNA, 25 bp, Canis familiaris
caacagaggtgtcccggaccgtgac

SEQ ID NO: 58546 - DNA, 25 bp, Canis familiaris
caacaagtctatgctcgtgattcag

SEQ ID NO: 58547 - DNA, 25 bp, Canis familiaris
caacaagtctatgctcgtgattcag

SEQ ID NO: 58548 - DNA, 25 bp, Canis familiaris
caacaagctacagcatcggtcctct

SEQ ID NO: 58549 - DNA, 25 bp, Canis familiaris
caacaatccagagtccggttcttac

SEQ ID NO: 58550 - DNA, 25 bp, Canis familiaris
caaaattcagtgtcaagctttctta

SEQ ID NO: 58551 - DNA, 25 bp, Canis familiaris
caaacttgagtgagtgtcattttca

SEQ ID NO: 58552 - DNA, 25 bp, Canis familiaris
caaagctttctggtggtcttctgtc

SEQ ID NO: 58553 - DNA, 25 bp, Canis familiaris
caaactgttgccgtgcagttacctt

SEQ ID NO: 58554 - DNA, 25 bp, Canis familiaris
caacagcagcctgcagctggattac

SEQ ID NO: 58555 - DNA, 25 bp, Canis familiaris
caacagcagcctgcccaagaagctg

SEQ ID NO: 58556 - DNA, 25 bp, Canis familiaris
caacaggcttgccccaggtagtttt

SEQ ID NO: 58557 - DNA, 25 bp, Canis familiaris
caaaggcaatgtccccgtttaatgg

SEQ ID NO: 58558 - DNA, 25 bp, Canis familiaris
caacaggaagaaccgccaattaatg

SEQ ID NO: 58559 - DNA, 25 bp, Canis familiaris
caaaggaaatacactcagcatatga

SEQ ID NO: 58560 - DNA, 25 bp, Canis familiaris
caaaggaagtttgctatgaacaaat

SEQ ID NO: 58561 - DNA, 25 bp, Canis familiaris
caacaggaaaaaagtgggaccacat

SEQ ID NO: 58562 - DNA, 25 bp, Canis familiaris
cacaaggaaacaaggctatggacca

SEQ ID NO: 58563 - DNA, 25 bp, Canis familiaris
cactaaacgcaaactgtatggggaa

SEQ ID NO: 58564 - DNA, 25 bp, Canis familiaris
gagaaaacgctaagttttagtggat

SEQ ID NO: 58565 - DNA, 25 bp, Canis familiaris
caaacaagcgtagctattagagggt

SEQ ID NO: 58566 - DNA, 25 bp, Canis familiaris
caaaatcgcccaccgtgatgcagag

SEQ ID NO: 58567 - DNA, 25 bp, Canis familiaris
cacaaacctcgtcactgtagtctga

SEQ ID NO: 58568 - DNA, 25 bp, Canis familiaris
caacacaggctcgctacttttctga

SEQ ID NO: 58569 - DNA, 25 bp, Canis familiaris
cacaccaggcatggttttcttccga

SEQ ID NO: 58570 - DNA, 25 bp, Canis familiaris
caacagagtgagcatttctcctccc

SEQ ID NO: 58571 - DNA, 25 bp, Canis familiaris
caaatggtactgatttgcctcgggg

SEQ ID NO: 58572 - DNA, 25 bp, Canis familiaris
caaatggtcctttttacttgccttg

SEQ ID NO: 58573 - DNA, 25 bp, Canis familiaris
caaacttcttttgtacatttcttat

SEQ ID NO: 58574 - DNA, 25 bp, Canis familiaris
caacacaatcctgttttccttttag

SEQ ID NO: 58575 - DNA, 25 bp, Canis familiaris
caacaaatcccagtctctgaccaat

SEQ ID NO: 58576 - DNA, 25 bp, Canis familiaris
caacaagtcatccctcgtacaattg

SEQ ID NO: 58577 - DNA, 25 bp, Canis familiaris
caaaattatctgatcctgccaattg

SEQ ID NO: 58578 - DNA, 25 bp, Canis familiaris
caaaattattccactggctcagccc

SEQ ID NO: 58579 - DNA, 25 bp, Canis familiaris
caaaatttcaccactgaaaccctgc

SEQ ID NO: 58580 - DNA, 25 bp, Canis familiaris
cacacaaaccagggttaaacccatg

SEQ ID NO: 58581 - DNA, 25 bp, Canis familiaris
cacagaaaccgtgaaaatccccctg

SEQ ID NO: 58582 - DNA, 25 bp, Canis familiaris
cacaaccggcgggacaacatcgccc

SEQ ID NO: 58583 - DNA, 25 bp, Canis familiaris
caaatcctggatgagaccacacctc

SEQ ID NO: 58584 - DNA, 25 bp, Canis familiaris
caaattctgcaagacccaacctcag

SEQ ID NO: 58585 - DNA, 25 bp, Canis familiaris
caacaatctcgtggtccacacacac

SEQ ID NO: 58586 - DNA, 25 bp, Canis familiaris
caacaagggcatgggccgcttcatc

SEQ ID NO: 58587 - DNA, 25 bp, Canis familiaris
caacaagggctctagttcttctttc

SEQ ID NO: 58588 - DNA, 25 bp, Canis familiaris
caaaattagccaagttcattctttc

SEQ ID NO: 58589 - DNA, 25 bp, Canis familiaris
cactttgttccaagactccattttc

SEQ ID NO: 58590 - DNA, 25 bp, Canis familiaris
caaattttgccttacattcttttca

SEQ ID NO: 58591 - DNA, 25 bp, Canis familiaris
cacaattctatgcctgaagttttag

SEQ ID NO: 58592 - DNA, 25 bp, Canis familiaris
cacagcattgatggcctcaaccttg

SEQ ID NO: 58593 - DNA, 25 bp, Canis familiaris
cacacactgtcctcaacctgaagga

SEQ ID NO: 58594 - DNA, 25 bp, Canis familiaris
caacaccttcttgatcactgcgagg

SEQ ID NO: 58595 - DNA, 25 bp, Canis familiaris
caaagccttcttcaagggcgcgtgg

SEQ ID NO: 58596 - DNA, 25 bp, Canis familiaris
caaacctaaggaaagtgcccggcag

SEQ ID NO: 58597 - DNA, 25 bp, Canis familiaris
caaaccgagggtggcctgcctcggg

SEQ ID NO: 58598 - DNA, 25 bp, Canis familiaris
caaactcgggttgcactacatctgt

SEQ ID NO: 58599 - DNA, 25 bp, Canis familiaris
caaagctagggttctcattcctttc

SEQ ID NO: 58600 - DNA, 25 bp, Canis familiaris
caaagtgtgtggctccaaccttctg

SEQ ID NO: 58601 - DNA, 25 bp, Canis familiaris
caaatgttgactctggaaccgctct

SEQ ID NO: 58602 - DNA, 25 bp, Canis familiaris
caaatctattatcttcaaacgtctg

SEQ ID NO: 58603 - DNA, 25 bp, Canis familiaris
caaactgttttctctatactctctg

SEQ ID NO: 58604 - DNA, 25 bp, Canis familiaris
caaacatttttcttcagtctctctc

SEQ ID NO: 58605 - DNA, 25 bp, Canis familiaris
caaactggttctggtttgtcacccg

SEQ ID NO: 58606 - DNA, 25 bp, Canis familiaris
caaatgggttccgttctgtatcgtc

SEQ ID NO: 58607 - DNA, 25 bp, Canis familiaris
caaaagtgtgttcattcttactccc

SEQ ID NO: 58608 - DNA, 25 bp, Canis familiaris
caaacagtctgtctttgttcctgtc

SEQ ID NO: 58609 - DNA, 25 bp, Canis familiaris
caaatccttgggtttcattcacttc

SEQ ID NO: 58610 - DNA, 25 bp, Canis familiaris
caacaccatgggctaacagtctttc

SEQ ID NO: 58611 - DNA, 25 bp, Canis familiaris
caaaacggtttccacagtcttatca

SEQ ID NO: 58612 - DNA, 25 bp, Canis familiaris
cacagatcaaagtttcccaggtttc

SEQ ID NO: 58613 - DNA, 25 bp, Canis familiaris
caaatcaagcttttcacctggtgtt

SEQ ID NO: 58614 - DNA, 25 bp, Canis familiaris
caacacctgattttgggctggggcc

SEQ ID NO: 58615 - DNA, 25 bp, Canis familiaris
caacacagtgttgtctggtggtacc

SEQ ID NO: 58616 - DNA, 25 bp, Canis familiaris
caaacatgttctgtgctggggaccc

SEQ ID NO: 58617 - DNA, 25 bp, Canis familiaris
cacaagtgtttagctgagccgtccc

SEQ ID NO: 58618 - DNA, 25 bp, Canis familiaris
cacaagttattgtcacttgcccaga

SEQ ID NO: 58619 - DNA, 25 bp, Canis familiaris
cacagagtacttcagttccacaagg

SEQ ID NO: 58620 - DNA, 25 bp, Canis familiaris
cacaagtatgccaaagacatccagc

SEQ ID NO: 58621 - DNA, 25 bp, Canis familiaris
cacagtgtaccgaatgctcttagcc

SEQ ID NO: 58622 - DNA, 25 bp, Canis familiaris
caacacatagcccgtgctgttgtcc

SEQ ID NO: 58623 - DNA, 25 bp, Canis familiaris
caaataggccagctgtgtttcttcc

SEQ ID NO: 58624 - DNA, 25 bp, Canis familiaris
cacaaacgtcggcgtattgctttga

SEQ ID NO: 58625 - DNA, 25 bp, Canis familiaris
cacaaacatcccatgggttgttgga

SEQ ID NO: 58626 - DNA, 25 bp, Canis familiaris
caaaaacactcttctgcttttctgg

SEQ ID NO: 58627 - DNA, 25 bp, Canis familiaris
caaatagacctttgctgttgattaa

SEQ ID NO: 58628 - DNA, 25 bp, Canis familiaris
caaaggacactttctagcttgtaaa

SEQ ID NO: 58629 - DNA, 25 bp, Canis familiaris
caaagactcctttcttgcttgttgg

SEQ ID NO: 58630 - DNA, 25 bp, Canis familiaris
cagaattctctggtcacggttttgg

SEQ ID NO: 58631 - DNA, 25 bp, Canis familiaris
cacaatgcgtctgtccgcgtttaag

SEQ ID NO: 58632 - DNA, 25 bp, Canis familiaris
caaagtgtgggtccaggctttccag

SEQ ID NO: 58633 - DNA, 25 bp, Canis familiaris
caacacgggggccgtgctgttcgtg

SEQ ID NO: 58634 - DNA, 25 bp, Canis familiaris
caacaagtcgagtgcctctcttttg

SEQ ID NO: 58635 - DNA, 25 bp, Canis familiaris
caacaagagcgatccctgttctttt

SEQ ID NO: 58636 - DNA, 25 bp, Canis familiaris
caaaggggaaccctcttgcactgtt

SEQ ID NO: 58637 - DNA, 25 bp, Canis familiaris
caaagagcggatcgccgacgtcagg

SEQ ID NO: 58638 - DNA, 25 bp, Canis familiaris
caaatggcggatgacgccggtgctg

SEQ ID NO: 58639 - DNA, 25 bp, Canis familiaris
cacaaggacgtggcagctgctcagg

SEQ ID NO: 58640 - DNA, 25 bp, Canis familiaris
caaagtacttcttgtgtgcagagac

SEQ ID NO: 58641 - DNA, 25 bp, Canis familiaris
caaactacaccttgatctgaaagct

SEQ ID NO: 58642 - DNA, 25 bp, Canis familiaris
caaaccatagactgtgccaaatgta

SEQ ID NO: 58643 - DNA, 25 bp, Canis familiaris
caaacacataggtcctgctcagcac

SEQ ID NO: 58644 - DNA, 25 bp, Canis familiaris
caaaccaacgaggctgccaacctgt

SEQ ID NO: 58645 - DNA, 25 bp, Canis familiaris
caaaaaagcaggctggtaccgtccg

SEQ ID NO: 58646 - DNA, 25 bp, Canis familiaris
caaaaaagccctcagaatccgttct

SEQ ID NO: 58647 - DNA, 25 bp, Canis familiaris
caaagaaagcccataaacctgcact

SEQ ID NO: 58648 - DNA, 25 bp, Canis familiaris
caaaaactgcctactaatttctcct

SEQ ID NO: 58649 - DNA, 25 bp, Canis familiaris
caaaaacgccacatacacatttcct

SEQ ID NO: 58650 - DNA, 25 bp, Canis familiaris
caaaggtccctaggacactttgcct

SEQ ID NO: 58651 - DNA, 25 bp, Canis familiaris
caaaggcctcgttttacatcttcct

SEQ ID NO: 58652 - DNA, 25 bp, Canis familiaris
caaacctttgatactttacttcact

SEQ ID NO: 58653 - DNA, 25 bp, Canis familiaris
caaaccaatagattccttactagac

SEQ ID NO: 58654 - DNA, 25 bp, Canis familiaris
caaacgcagtatctccactcaaaga

SEQ ID NO: 58655 - DNA, 25 bp, Canis familiaris
caaatcggtgcactgatcgctgcca

SEQ ID NO: 58656 - DNA, 25 bp, Canis familiaris
caaacggtcacaagtatgccaaaga

SEQ ID NO: 58657 - DNA, 25 bp, Canis familiaris
caaactggatggaactatgcccgga

SEQ ID NO: 58658 - DNA, 25 bp, Canis familiaris
caaactggggctaaatccgcagcaa

SEQ ID NO: 58659 - DNA, 25 bp, Canis familiaris
caaactggcacagaatttgcccaag

SEQ ID NO: 58660 - DNA, 25 bp, Canis familiaris
caaactgtgcacaaagttccccggt

SEQ ID NO: 58661 - DNA, 25 bp, Canis familiaris
caaactctgactggagattcactcc

SEQ ID NO: 58662 - DNA, 25 bp, Canis familiaris
caaactcgcactttgcaatctctgc

SEQ ID NO: 58663 - DNA, 25 bp, Canis familiaris
caaaatcctgtgttgaagccctaac

SEQ ID NO: 58664 - DNA, 25 bp, Canis familiaris
caaaatcgacactatgggcacctac

SEQ ID NO: 58665 - DNA, 25 bp, Canis familiaris
caaagtctacattctgttgccctta

SEQ ID NO: 58666 - DNA, 25 bp, Canis familiaris
caaagtgccattgtttgcctttaag

SEQ ID NO: 58667 - DNA, 25 bp, Canis familiaris
caaagtccttatgggtggttcttca

SEQ ID NO: 58668 - DNA, 25 bp, Canis familiaris
caaagacctttaagcccttcatctg

SEQ ID NO: 58669 - DNA, 25 bp, Canis familiaris
caaaaccattaacactctctctctg

SEQ ID NO: 58670 - DNA, 25 bp, Canis familiaris
caaaacccaacctattctcattgct

SEQ ID NO: 58671 - DNA, 25 bp, Canis familiaris
caaacacccattttattctttcatt

SEQ ID NO: 58672 - DNA, 25 bp, Canis familiaris
caaagcccacagctgttatgctttt

SEQ ID NO: 58673 - DNA, 25 bp, Canis familiaris
caaataccacatgatttcactcatg

SEQ ID NO: 58674 - DNA, 25 bp, Canis familiaris
caaaatcatccagatccatcagcct

SEQ ID NO: 58675 - DNA, 25 bp, Canis familiaris
cacaaagatgtcgaacctagccctc

SEQ ID NO: 58676 - DNA, 25 bp, Canis familiaris
cacaagaagtccttcgctgtccagt

SEQ ID NO: 58677 - DNA, 25 bp, Canis familiaris
caaaatcagtcgccttcgtcgagag

SEQ ID NO: 58678 - DNA, 25 bp, Canis familiaris
caaaatcagtcgccttcgtcgagag

SEQ ID NO: 58679 - DNA, 25 bp, Canis familiaris
caaaatcgatgctgctctcttctgg

SEQ ID NO: 58680 - DNA, 25 bp, Canis familiaris
caacaatctggctctatgcttctgc

SEQ ID NO: 58681 - DNA, 25 bp, Canis familiaris
caaaagctgctgctatgtctctctc

SEQ ID NO: 58682 - DNA, 25 bp, Canis familiaris
caaacatgctgtgatcgctttataa

SEQ ID NO: 58683 - DNA, 25 bp, Canis familiaris
caaactctagccttgcttgttaaag

SEQ ID NO: 58684 - DNA, 25 bp, Canis familiaris
caaagcctcccaggtgttctggaac

SEQ ID NO: 58685 - DNA, 25 bp, Canis familiaris
caaagcccccagagatgctgtgacc

SEQ ID NO: 58686 - DNA, 25 bp, Canis familiaris
caaagcagcctaaaccgctgcgcac

SEQ ID NO: 58687 - DNA, 25 bp, Canis familiaris
caaactgacatacatccctgtaccc

SEQ ID NO: 58688 - DNA, 25 bp, Canis familiaris
caaactcaattggctttcataaccc

SEQ ID NO: 58689 - DNA, 25 bp, Canis familiaris
cacaatccgccaggtttgcaaaccc

SEQ ID NO: 58690 - DNA, 25 bp, Canis familiaris
caaaagctgccaggattggccaaca

SEQ ID NO: 58691 - DNA, 25 bp, Canis familiaris
caaaggcgccagaatctaccacata

SEQ ID NO: 58692 - DNA, 25 bp, Canis familiaris
caaagctgcccactgtcataaaaag

SEQ ID NO: 58693 - DNA, 25 bp, Canis familiaris
caaactggcgcacttcggaggagac

SEQ ID NO: 58694 - DNA, 25 bp, Canis familiaris
cacttcttcgactgggaggagcact

SEQ ID NO: 58695 - DNA, 25 bp, Canis familiaris
cacagtgcccgtgtcggagccgcgc

SEQ ID NO: 58696 - DNA, 25 bp, Canis familiaris
catccaggacgtgtcgagtccgtcg

SEQ ID NO: 58697 - DNA, 25 bp, Canis familiaris
cacaaggaggagttcaggcccaacg

SEQ ID NO: 58698 - DNA, 25 bp, Canis familiaris
caaagtggcggctgcagtgtggaca

SEQ ID NO: 58699 - DNA, 25 bp, Canis familiaris
cacagagatgggccccgggtaaggt

SEQ ID NO: 58700 - DNA, 25 bp, Canis familiaris
caaaagggcccacagtgaccagctg

SEQ ID NO: 58701 - DNA, 25 bp, Canis familiaris
caaaagggacccgagaggccatctt

SEQ ID NO: 58702 - DNA, 25 bp, Canis familiaris
caaaggtgctacgaccaagtggttt

SEQ ID NO: 58703 - DNA, 25 bp, Canis familiaris
caaagcaggcccgagccgcctggat

SEQ ID NO: 58704 - DNA, 25 bp, Canis familiaris
caaagcaggcccgagccgcctggat

SEQ ID NO: 58705 - DNA, 25 bp, Canis familiaris
caaacatgagtcactgccacctaat

SEQ ID NO: 58706 - DNA, 25 bp, Canis familiaris
caaaagcagccaaccatctttcaaa

SEQ ID NO: 58707 - DNA, 25 bp, Canis familiaris
cacagaggaccaacgctttctcagg

SEQ ID NO: 58708 - DNA, 25 bp, Canis familiaris
caaaaggccgaggccttccaggcgc

SEQ ID NO: 58709 - DNA, 25 bp, Canis familiaris
caaatacccagaggtcctccagacc

SEQ ID NO: 58710 - DNA, 25 bp, Canis familiaris
caaatcccataatatcatgctccaa

SEQ ID NO: 58711 - DNA, 25 bp, Canis familiaris
caaatctgctcaaattgcgggtcaa

SEQ ID NO: 58712 - DNA, 25 bp, Canis familiaris
caaactgctaaatgcctgcggcttc

SEQ ID NO: 58713 - DNA, 25 bp, Canis familiaris
caaaatgttcactcatctcgacgtc

SEQ ID NO: 58714 - DNA, 25 bp, Canis familiaris
caaagactaccatctctattcgctc

SEQ ID NO: 58715 - DNA, 25 bp, Canis familiaris
caaatgactcccaactgtttctctt

SEQ ID NO: 58716 - DNA, 25 bp, Canis familiaris
gaactggctaccaggtttcttgaaa

SEQ ID NO: 58717 - DNA, 25 bp, Canis familiaris
caaatggtaccagcgttctcttaaa

SEQ ID NO: 58718 - DNA, 25 bp, Canis familiaris
caaattatacccctgatatcccaat

SEQ ID NO: 58719 - DNA, 25 bp, Canis familiaris
caaagtattgccacaaatccccact

SEQ ID NO: 58720 - DNA, 25 bp, Canis familiaris
caaaattttctctgaaccatccctt

SEQ ID NO: 58721 - DNA, 25 bp, Canis familiaris
caaatatttttcataaaagcacttt

SEQ ID NO: 58722 - DNA, 25 bp, Canis familiaris
ctactattatccacataaaccccct

SEQ ID NO: 58723 - DNA, 25 bp, Canis familiaris
caaatttcttcatctaaggtcccct

SEQ ID NO: 58724 - DNA, 25 bp, Canis familiaris
caaacttgcttttctattgggtaca

SEQ ID NO: 58725 - DNA, 25 bp, Canis familiaris
caaactttttttgctgagtgctaat

SEQ ID NO: 58726 - DNA, 25 bp, Canis familiaris
cacacacgtatatatgagactgggt

SEQ ID NO: 58727 - DNA, 25 bp, Canis familiaris
caaatcgctatcttgctatgaagga

SEQ ID NO: 58728 - DNA, 25 bp, Canis familiaris
caaagctccattactagaagacgcc

SEQ ID NO: 58729 - DNA, 25 bp, Canis familiaris
caaatgccctagcatgcagggactt

SEQ ID NO: 58730 - DNA, 25 bp, Canis familiaris
caaatcactgttcagcaggctgttg

SEQ ID NO: 58731 - DNA, 25 bp, Canis familiaris
caaaacagtgtcaagcatcagcctt

SEQ ID NO: 58732 - DNA, 25 bp, Canis familiaris
caaaaaggcacaacagctcctgccc

SEQ ID NO: 58733 - DNA, 25 bp, Canis familiaris
caaaaagcacaggacgccacgttct

SEQ ID NO: 58734 - DNA, 25 bp, Canis familiaris
caaagaaatggaacccacgttcagg

SEQ ID NO: 58735 - DNA, 25 bp, Canis familiaris
caaaaaatggtcctccgtgtgtcgc

SEQ ID NO: 58736 - DNA, 25 bp, Canis familiaris
caaaaacgcaatcctccttggacgt

SEQ ID NO: 58737 - DNA, 25 bp, Canis familiaris
caaaaagccaagccctgttgcgggg

SEQ ID NO: 58738 - DNA, 25 bp, Canis familiaris
caaagaagccggtggcctggggagt

SEQ ID NO: 58739 - DNA, 25 bp, Canis familiaris
caaataacgggttggcctgggctgg

SEQ ID NO: 58740 - DNA, 25 bp, Canis familiaris
caaaacactggagttgtgggaggtc

SEQ ID NO: 58741 - DNA, 25 bp, Canis familiaris
cattaaactggagacggtgctgagc

SEQ ID NO: 58742 - DNA, 25 bp, Canis familiaris
cattccaagggacaccgttaacctg

SEQ ID NO: 58743 - DNA, 25 bp, Canis familiaris
cttccggggagatccgtagatacct

SEQ ID NO: 58744 - DNA, 25 bp, Canis familiaris
cacacccgggaatccaagtgaacct

SEQ ID NO: 58745 - DNA, 25 bp, Canis familiaris
caaaccgagctgaatccaaactaaa

SEQ ID NO: 58746 - DNA, 25 bp, Canis familiaris
caaatgtgaatgcagaccaaagaaa

SEQ ID NO: 58747 - DNA, 25 bp, Canis familiaris
caaagctcagtgtagaaaagaacaa

SEQ ID NO: 58748 - DNA, 25 bp, Canis familiaris
caaaccactaaaaagaacacacaca

SEQ ID NO: 58749 - DNA, 25 bp, Canis familiaris
caaagactcaaacatacaacaacaa

SEQ ID NO: 58750 - DNA, 25 bp, Canis familiaris
caaaacttgatttaacactccagaa

SEQ ID NO: 58751 - DNA, 25 bp, Canis familiaris
caaaacttattgtactcccaactct

SEQ ID NO: 58752 - DNA, 25 bp, Canis familiaris
caaaagatcttttcactcccaattt

SEQ ID NO: 58753 - DNA, 25 bp, Canis familiaris
caaaagatacttctcctccatgttt

SEQ ID NO: 58754 - DNA, 25 bp, Canis familiaris
cacacacaataaaaacccctgactt

SEQ ID NO: 58755 - DNA, 25 bp, Canis familiaris
caaacaaaaacatcctcacgactcc

SEQ ID NO: 58756 - DNA, 25 bp, Canis familiaris
caaagacaacaagacctacacctcc

SEQ ID NO: 58757 - DNA, 25 bp, Canis familiaris
caaagtcaccaagtactttctcttc

SEQ ID NO: 58758 - DNA, 25 bp, Canis familiaris
caaagtccaaagaaccatgctttcc

SEQ ID NO: 58759 - DNA, 25 bp, Canis familiaris
caaatccacaaaatgagctactttc

SEQ ID NO: 58760 - DNA, 25 bp, Canis familiaris
caaagccatcaagaagccacattag

SEQ ID NO: 58761 - DNA, 25 bp, Canis familiaris
caaacccagaagtgccagtcagagg

SEQ ID NO: 58762 - DNA, 25 bp, Canis familiaris
caaacaccaacaactgtcaccaggg

SEQ ID NO: 58763 - DNA, 25 bp, Canis familiaris
caaaagcactaaatctgtttctggg

SEQ ID NO: 58764 - DNA, 25 bp, Canis familiaris
caaagaacttacagcttctccagcc

SEQ ID NO: 58765 - DNA, 25 bp, Canis familiaris
caaagtttcttgatgcttctggagc

SEQ ID NO: 58766 - DNA, 25 bp, Canis familiaris
caaagttcttgcattcacgctgggc

SEQ ID NO: 58767 - DNA, 25 bp, Canis familiaris
caaagctggcttgcttgcaaggttt

SEQ ID NO: 58768 - DNA, 25 bp, Canis familiaris
caaaccagggccatgaagcaggtgg

SEQ ID NO: 58769 - DNA, 25 bp, Canis familiaris
cacacccagggcacgaggacctgtt

SEQ ID NO: 58770 - DNA, 25 bp, Canis familiaris
cacacccgcgtcgcgcaaaaatgtc

SEQ ID NO: 58771 - DNA, 25 bp, Canis familiaris
cacaaccgttggtccacgacggtgt

SEQ ID NO: 58772 - DNA, 25 bp, Canis familiaris
caaatccgagtgccaccaggacgtg

SEQ ID NO: 58773 - DNA, 25 bp, Canis familiaris
caaacggagtcaaccagcttccttg

SEQ ID NO: 58774 - DNA, 25 bp, Canis familiaris
caaacctgaggtaccactgtccttg

SEQ ID NO: 58775 - DNA, 25 bp, Canis familiaris
caaaccttggtttcggaactctgtg

SEQ ID NO: 58776 - DNA, 25 bp, Canis familiaris
caaagccattggctccgcgaattct

SEQ ID NO: 58777 - DNA, 25 bp, Canis familiaris
caaagtcatttgcttctgtgccttc

SEQ ID NO: 58778 - DNA, 25 bp, Canis familiaris
cataatttttggctttccccagact

SEQ ID NO: 58779 - DNA, 25 bp, Canis familiaris
caaatattctgtatttcccccaatg

SEQ ID NO: 58780 - DNA, 25 bp, Canis familiaris
caaaaattattcattccacccttgc

SEQ ID NO: 58781 - DNA, 25 bp, Canis familiaris
cataaaagttttccctgaccacttg

SEQ ID NO: 58782 - DNA, 25 bp, Canis familiaris
caaaaaggcgggcccagggcattcg

SEQ ID NO: 58783 - DNA, 25 bp, Canis familiaris
caaaaatggcggcggcgatgcgcgt

SEQ ID NO: 58784 - DNA, 25 bp, Canis familiaris
caaagaatgacgatcgggctggccc

SEQ ID NO: 58785 - DNA, 25 bp, Canis familiaris
caaagggacgtggctgtggctggtt

SEQ ID NO: 58786 - DNA, 25 bp, Canis familiaris
caaaggcttgtgagttcctggtttc

SEQ ID NO: 58787 - DNA, 25 bp, Canis familiaris
caaaggctcgtgagaagtccgtccc

SEQ ID NO: 58788 - DNA, 25 bp, Canis familiaris
caaagaagctggtggagtccctgcc

SEQ ID NO: 58789 - DNA, 25 bp, Canis familiaris
caaagaggaccatggagttccagca

SEQ ID NO: 58790 - DNA, 25 bp, Canis familiaris
caaacagtaccacgagaacatctct

SEQ ID NO: 58791 - DNA, 25 bp, Canis familiaris
caaactgtaccactaattcattccc

SEQ ID NO: 58792 - DNA, 25 bp, Canis familiaris
caaacattacaaagaatttccacag

SEQ ID NO: 58793 - DNA, 25 bp, Canis familiaris
caaagattataatgagaccctaatg

SEQ ID NO: 58794 - DNA, 25 bp, Canis familiaris
caaacttgtatgtaagccacctgaa

SEQ ID NO: 58795 - DNA, 25 bp, Canis familiaris
caaacctattgagagctaacatgga

SEQ ID NO: 58796 - DNA, 25 bp, Canis familiaris
caaacctcttacaatgctaaatgca

SEQ ID NO: 58797 - DNA, 25 bp, Canis familiaris
cacacaccaagttcgaccaaagcaa

SEQ ID NO: 58798 - DNA, 25 bp, Canis familiaris
caaatccaaccaccctgaggagcag

SEQ ID NO: 58799 - DNA, 25 bp, Canis familiaris
caaagcgctcagggtcctgtggacg

SEQ ID NO: 58800 - DNA, 25 bp, Canis familiaris
caaacaccacgtggcgcgtgtagcg

SEQ ID NO: 58801 - DNA, 25 bp, Canis familiaris
caaagacgacttcccatttacagac

SEQ ID NO: 58802 - DNA, 25 bp, Canis familiaris
caaagccttttgtccatttcaagca

SEQ ID NO: 58803 - DNA, 25 bp, Canis familiaris
caaagcgcttgttgcctattacaga

SEQ ID NO: 58804 - DNA, 25 bp, Canis familiaris
caaagcctgataacgcgaaacaagt

SEQ ID NO: 58805 - DNA, 25 bp, Canis familiaris
cacaacgtgaattttgcaaacaggg

SEQ ID NO: 58806 - DNA, 25 bp, Canis familiaris
cacatacaaggttataccaacgggg

SEQ ID NO: 58807 - DNA, 25 bp, Canis familiaris
caaactgaaggttaccagaggggag

SEQ ID NO: 58808 - DNA, 25 bp, Canis familiaris
caaactgaggggtactggaggggag

SEQ ID NO: 58809 - DNA, 25 bp, Canis familiaris
caaactgttggtggtctggggggag

SEQ ID NO: 58810 - DNA, 25 bp, Canis familiaris
caaacatttggtttagctaggggca

SEQ ID NO: 58811 - DNA, 25 bp, Canis familiaris
caaatcatttttgctgcaccgaggg

SEQ ID NO: 58812 - DNA, 25 bp, Canis familiaris
caaacatgttttactcccaaccaga

SEQ ID NO: 58813 - DNA, 25 bp, Canis familiaris
caaacatttagatctccgcaacaga

SEQ ID NO: 58814 - DNA, 25 bp, Canis familiaris
caaatattttgcacttcaaccagat

SEQ ID NO: 58815 - DNA, 25 bp, Canis familiaris
caaatattcattctagaccagccag

SEQ ID NO: 58816 - DNA, 25 bp, Canis familiaris
caaagttcatggcctggagctctgc

SEQ ID NO: 58817 - DNA, 25 bp, Canis familiaris
caaactccagagactgatgtgcctc

SEQ ID NO: 58818 - DNA, 25 bp, Canis familiaris
caaacggcagatgctggtggcctct

SEQ ID NO: 58819 - DNA, 25 bp, Canis familiaris
caaactagaggccttggtcctcctt

SEQ ID NO: 58820 - DNA, 25 bp, Canis familiaris
caaactggggctctggaggccctgc

SEQ ID NO: 58821 - DNA, 25 bp, Canis familiaris
caaacgccacagagatggggcccag

SEQ ID NO: 58822 - DNA, 25 bp, Canis familiaris
caaatcctgcaagtggagggccccc

SEQ ID NO: 58823 - DNA, 25 bp, Canis familiaris
caaagccatatccgagggctgccac

SEQ ID NO: 58824 - DNA, 25 bp, Canis familiaris
caaagccatatccgagggctgccac

SEQ ID NO: 58825 - DNA, 25 bp, Canis familiaris
cacacacggattcagggcatgctgt

SEQ ID NO: 58826 - DNA, 25 bp, Canis familiaris
cacacacggcattgcaaaaccattg

SEQ ID NO: 58827 - DNA, 25 bp, Canis familiaris
cacacacggaatattactcagtgat

SEQ ID NO: 58828 - DNA, 25 bp, Canis familiaris
cacacactggaatatcattaagtca

SEQ ID NO: 58829 - DNA, 25 bp, Canis familiaris
cacacaccggaatattaaccatgaa

SEQ ID NO: 58830 - DNA, 25 bp, Canis familiaris
cacaacgcggtattatccaacctta

SEQ ID NO: 58831 - DNA, 25 bp, Canis familiaris
caaacccactattaccatagtcttt

SEQ ID NO: 58832 - DNA, 25 bp, Canis familiaris
caaactccattctcacaattgcctt

SEQ ID NO: 58833 - DNA, 25 bp, Canis familiaris
caaagccagcatttggaaatttttt

SEQ ID NO: 58834 - DNA, 25 bp, Canis familiaris
caaagccaacttctcagttactttt

SEQ ID NO: 58835 - DNA, 25 bp, Canis familiaris
caaaggccctgtcatctttcctttg

SEQ ID NO: 58836 - DNA, 25 bp, Canis familiaris
caaacccctgtgttaagaccttctg

SEQ ID NO: 58837 - DNA, 25 bp, Canis familiaris
caaaccaccttgggaagcacctgga

SEQ ID NO: 58838 - DNA, 25 bp, Canis familiaris
caaaccatcctgtgtgaagcagcgt

SEQ ID NO: 58839 - DNA, 25 bp, Canis familiaris
cactaccaagtgcgcggactggcgg

SEQ ID NO: 58840 - DNA, 25 bp, Canis familiaris
caaagcgaaagcggcaggatcgacg

SEQ ID NO: 58841 - DNA, 25 bp, Canis familiaris
caaagctaatgatcacggatatgac

SEQ ID NO: 58842 - DNA, 25 bp, Canis familiaris
caaaggcaataaagctggttggggg

SEQ ID NO: 58843 - DNA, 25 bp, Canis familiaris
caaaggagtgaaatgatccccgggt

SEQ ID NO: 58844 - DNA, 25 bp, Canis familiaris
caaagaagtggtagacccctccagt

SEQ ID NO: 58845 - DNA, 25 bp, Canis familiaris
caaacaagtggacaccccactcgtg

SEQ ID NO: 58846 - DNA, 25 bp, Canis familiaris
caaatgtaggaggacaccccactgg

SEQ ID NO: 58847 - DNA, 25 bp, Canis familiaris
caaatttgaagagagctgccacctg

SEQ ID NO: 58848 - DNA, 25 bp, Canis familiaris
cacaagggaaagagcgcctgcctgc

SEQ ID NO: 58849 - DNA, 25 bp, Canis familiaris
caaagtgaaagccacagctgcccct

SEQ ID NO: 58850 - DNA, 25 bp, Canis familiaris
caaatgcggacgcacagtgggcctg

SEQ ID NO: 58851 - DNA, 25 bp, Canis familiaris
caaagccgaggacgaggtgcagcgc

SEQ ID NO: 58852 - DNA, 25 bp, Canis familiaris
caaaccaaggccaggctgcagctgc

SEQ ID NO: 58853 - DNA, 25 bp, Canis familiaris
caaactcagagggctcaggccgata

SEQ ID NO: 58854 - DNA, 25 bp, Canis familiaris
caaaccacaggcacattgctaaagg

SEQ ID NO: 58855 - DNA, 25 bp, Canis familiaris
caaaccagggactatcatctaagag

SEQ ID NO: 58856 - DNA, 25 bp, Canis familiaris
caaattgagtggtctgtccttcaag

SEQ ID NO: 58857 - DNA, 25 bp, Canis familiaris
caaatacttggtgatcctggccttg

SEQ ID NO: 58858 - DNA, 25 bp, Canis familiaris
cacattatttggggcgcctgggttg

SEQ ID NO: 58859 - DNA, 25 bp, Canis familiaris
caaacttggggcttgcctggagttg

SEQ ID NO: 58860 - DNA, 25 bp, Canis familiaris
caaactgcttgtgttggctaagctt

SEQ ID NO: 58861 - DNA, 25 bp, Canis familiaris
caaactcttccactatcctaatgtt

SEQ ID NO: 58862 - DNA, 25 bp, Canis familiaris
caaagcccccaaaattcactgtgta

SEQ ID NO: 58863 - DNA, 25 bp, Canis familiaris
caaagctccccttagaatttgccta

SEQ ID NO: 58864 - DNA, 25 bp, Canis familiaris
cacaagtccctttatgagttattct

SEQ ID NO: 58865 - DNA, 25 bp, Canis familiaris
cacaagatccctgtctcgatgtgac

SEQ ID NO: 58866 - DNA, 25 bp, Canis familiaris
cacaagatcttcgttcagggtgtca

SEQ ID NO: 58867 - DNA, 25 bp, Canis familiaris
cacaaatctacagtgtcaactcata

SEQ ID NO: 58868 - DNA, 25 bp, Canis familiaris
caaaccaacagcctcttcatgtgaa

SEQ ID NO: 58869 - DNA, 25 bp, Canis familiaris
cacaatccaaactcatgttgctcaa

SEQ ID NO: 58870 - DNA, 25 bp, Canis familiaris
cacaaaacattctctttgcttctga

SEQ ID NO: 58871 - DNA, 25 bp, Canis familiaris
cacaacaattctattcttcggcggc

SEQ ID NO: 58872 - DNA, 25 bp, Canis familiaris
cacaaaattctaactgcctggggca

SEQ ID NO: 58873 - DNA, 25 bp, Canis familiaris
cacaaagggggtgcctgggagctcc

SEQ ID NO: 58874 - DNA, 25 bp, Canis familiaris
cacacaagctggtggtcgtgggcgg

SEQ ID NO: 58875 - DNA, 25 bp, Canis familiaris
cacacaacgtggctgcacagggcaa

SEQ ID NO: 58876 - DNA, 25 bp, Canis familiaris
caaacaggtggttgacagtgcctat

SEQ ID NO: 58877 - DNA, 25 bp, Canis familiaris
caaactctgtgactggaaccgctat

SEQ ID NO: 58878 - DNA, 25 bp, Canis familiaris
caaatctcgatgctactacgttcat

SEQ ID NO: 58879 - DNA, 25 bp, Canis familiaris
caaagccagatggtccttgcacttc

SEQ ID NO: 58880 - DNA, 25 bp, Canis familiaris
caaagccatggaaggtgtgccctcc

SEQ ID NO: 58881 - DNA, 25 bp, Canis familiaris
caaagccgcgagctgtgaggccttc

SEQ ID NO: 58882 - DNA, 25 bp, Canis familiaris
caaagcagccgacgtgtggagcctg

SEQ ID NO: 58883 - DNA, 25 bp, Canis familiaris
caaagagcctgctttcagtgtcctt

SEQ ID NO: 58884 - DNA, 25 bp, Canis familiaris
caaagacacagctcagccttcactt

SEQ ID NO: 58885 - DNA, 25 bp, Canis familiaris
caaattcaactgtcaggcgtcactt

SEQ ID NO: 58886 - DNA, 25 bp, Canis familiaris
cacaactcggcagagctggtcactg

SEQ ID NO: 58887 - DNA, 25 bp, Canis familiaris
caaaccagcaccaacttcatacagc

SEQ ID NO: 58888 - DNA, 25 bp, Canis familiaris
caaatctggccctcatgtcagacat

SEQ ID NO: 58889 - DNA, 25 bp, Canis familiaris
caaatctggcccgtgctgaggattg

SEQ ID NO: 58890 - DNA, 25 bp, Canis familiaris
caaactggcagccactccaggttgc

SEQ ID NO: 58891 - DNA, 25 bp, Canis familiaris
caaagctggtctcctcaagctttcc

SEQ ID NO: 58892 - DNA, 25 bp, Canis familiaris
caaagctggtcatctaagctgagtt

SEQ ID NO: 58893 - DNA, 25 bp, Canis familiaris
caaagcgagctctcagcacagggtt

SEQ ID NO: 58894 - DNA, 25 bp, Canis familiaris
cacagacaactgttccaaggacatt

SEQ ID NO: 58895 - DNA, 25 bp, Canis familiaris
cacaggtgacgtttgatcggacttg

SEQ ID NO: 58896 - DNA, 25 bp, Canis familiaris
caaaggagcactttatgcggcgcgg

SEQ ID NO: 58897 - DNA, 25 bp, Canis familiaris
caaagcgatgaatccagcggctcgg

SEQ ID NO: 58898 - DNA, 25 bp, Canis familiaris
caaacgcagaatttcgatcgcctgg

SEQ ID NO: 58899 - DNA, 25 bp, Canis familiaris
caaataggagcctgctgtctccagg

SEQ ID NO: 58900 - DNA, 25 bp, Canis familiaris
caaattggactctggttctgggccg

SEQ ID NO: 58901 - DNA, 25 bp, Canis familiaris
cacaactggggcagggtcgtggcca

SEQ ID NO: 58902 - DNA, 25 bp, Canis familiaris
caaacgttcgggcgtaatggccttg

SEQ ID NO: 58903 - DNA, 25 bp, Canis familiaris
cacaaagattccgctttaattcctt

SEQ ID NO: 58904 - DNA, 25 bp, Canis familiaris
cacctaatccacgccttaattattt

SEQ ID NO: 58905 - DNA, 25 bp, Canis familiaris
cagcactaacccggtgtttggtttg

SEQ ID NO: 58906 - DNA, 25 bp, Canis familiaris
cacacataatatcctgctttttcgt

SEQ ID NO: 58907 - DNA, 25 bp, Canis familiaris
cacacaaatgcatatatctcttagg

SEQ ID NO: 58908 - DNA, 25 bp, Canis familiaris
cacaataacctgtatgcctggggac

SEQ ID NO: 58909 - DNA, 25 bp, Canis familiaris
caaagacatccttatccagtacgac

SEQ ID NO: 58910 - DNA, 25 bp, Canis familiaris
caaagtcatccatgaccacttcggc

SEQ ID NO: 58911 - DNA, 25 bp, Canis familiaris
caaatgaaccaacccaaaccacaag

SEQ ID NO: 58912 - DNA, 25 bp, Canis familiaris
caaagaacggagaccagcacccatc

SEQ ID NO: 58913 - DNA, 25 bp, Canis familiaris
caaagggcaggggccctgcacctca

SEQ ID NO: 58914 - DNA, 25 bp, Canis familiaris
caaaggacacggggctttcacaatc

SEQ ID NO: 58915 - DNA, 25 bp, Canis familiaris
caaagggtcgctttgctgttcatcg

SEQ ID NO: 58916 - DNA, 25 bp, Canis familiaris
caaatggagttgcgcactgtgtgat

SEQ ID NO: 58917 - DNA, 25 bp, Canis familiaris
cacacagcagatctgagccgcttgg

SEQ ID NO: 58918 - DNA, 25 bp, Canis familiaris
caaagagttatgacttctgcagctg

SEQ ID NO: 58919 - DNA, 25 bp, Canis familiaris
cacacatggtttgtttcgatctgac

SEQ ID NO: 58920 - DNA, 25 bp, Canis familiaris
caaatggttcctttgacgtcttctt

SEQ ID NO: 58921 - DNA, 25 bp, Canis familiaris
caaatgatttcatattgaccttttt

SEQ ID NO: 58922 - DNA, 25 bp, Canis familiaris
cacaacttggctaattacctgtttt

SEQ ID NO: 58923 - DNA, 25 bp, Canis familiaris
caaagttcctagactacctgcaagt

SEQ ID NO: 58924 - DNA, 25 bp, Canis familiaris
caaagtacctgcttgcttcttcaga

SEQ ID NO: 58925 - DNA, 25 bp, Canis familiaris
caaagtactcaggccctttctaagt

SEQ ID NO: 58926 - DNA, 25 bp, Canis familiaris
cacacagtcccaacgggttcttagt

SEQ ID NO: 58927 - DNA, 25 bp, Canis familiaris
taatttcccaccagttcattcggtc

SEQ ID NO: 58928 - DNA, 25 bp, Canis familiaris
cacagttcttactggttttcctgcc

SEQ ID NO: 58929 - DNA, 25 bp, Canis familiaris
ctcaggtctgggaggtcttttttga

SEQ ID NO: 58930 - DNA, 25 bp, Canis familiaris
ccgttgtgggactgttttctattca

SEQ ID NO: 58931 - DNA, 25 bp, Canis familiaris
caaagatgagggtcggtgttatgct

SEQ ID NO: 58932 - DNA, 25 bp, Canis familiaris
caaactgacctgccggtgaatcctg

SEQ ID NO: 58933 - DNA, 25 bp, Canis familiaris
cacaatcttccgacagggacaccaa

SEQ ID NO: 58934 - DNA, 25 bp, Canis familiaris
cacaatccccaaagctaatcaacaa

SEQ ID NO: 58935 - DNA, 25 bp, Canis familiaris
caaagccccaacatttgcacacaaa

SEQ ID NO: 58936 - DNA, 25 bp, Canis familiaris
caaagccctcaaggaaccaccaaga

SEQ ID NO: 58937 - DNA, 25 bp, Canis familiaris
caaagccctcaaggaaccaccaaga

SEQ ID NO: 58938 - DNA, 25 bp, Canis familiaris
caaagccctcaaggaaccaccaaga

SEQ ID NO: 58939 - DNA, 25 bp, Canis familiaris
caaagccctcaaggaaccaccaaga

SEQ ID NO: 58940 - DNA, 25 bp, Canis familiaris
caaaccctaaggaacctcagctgaa

SEQ ID NO: 58941 - DNA, 25 bp, Canis familiaris
caaattcttaatcaacctacataca

SEQ ID NO: 58942 - DNA, 25 bp, Canis familiaris
caaattttctattaaactcccagag

SEQ ID NO: 58943 - DNA, 25 bp, Canis familiaris
caaatgcctttttaaaactcatcag

SEQ ID NO: 58944 - DNA, 25 bp, Canis familiaris
caaaccagtcttaaaactccacagt

SEQ ID NO: 58945 - DNA, 25 bp, Canis familiaris
caaagacagcgctcaaaactcggtg

SEQ ID NO: 58946 - DNA, 25 bp, Canis familiaris
caaatactgcccgcaaagctcgcgc

SEQ ID NO: 58947 - DNA, 25 bp, Canis familiaris
caaattctgccccagtggagcatgg

SEQ ID NO: 58948 - DNA, 25 bp, Canis familiaris
caaagtcatgggcgcggagctcaga

SEQ ID NO: 58949 - DNA, 25 bp, Canis familiaris
caaagtcagcctgggcctggaagca

SEQ ID NO: 58950 - DNA, 25 bp, Canis familiaris
cacaacctgtcggagtcggaagatg

SEQ ID NO: 58951 - DNA, 25 bp, Canis familiaris
cacacactgtggcaggtgggacaag

SEQ ID NO: 58952 - DNA, 25 bp, Canis familiaris
cacacactatactggagggatttca

SEQ ID NO: 58953 - DNA, 25 bp, Canis familiaris
cacacacgatcccttgattttctta

SEQ ID NO: 58954 - DNA, 25 bp, Canis familiaris
caaagctgatgtgtgcttttgtcta

SEQ ID NO: 58955 - DNA, 25 bp, Canis familiaris
cacaagatgatgactatctggcgtt

SEQ ID NO: 58956 - DNA, 25 bp, Canis familiaris
cacaatgaacactcttcgttcccaa

SEQ ID NO: 58957 - DNA, 25 bp, Canis familiaris
caaatgtatgccagtaccttccaca

SEQ ID NO: 58958 - DNA, 25 bp, Canis familiaris
caaatgagatccagactcctcaccc

SEQ ID NO: 58959 - DNA, 25 bp, Canis familiaris
caaagagtcaaagctgccattgcca

SEQ ID NO: 58960 - DNA, 25 bp, Canis familiaris
caaagagcaaaccctctggtgccag

SEQ ID NO: 58961 - DNA, 25 bp, Canis familiaris
caaaggcaaggaacctggccgtggg

SEQ ID NO: 58962 - DNA, 25 bp, Canis familiaris
caaaggcagcaggctaccggacggc

SEQ ID NO: 58963 - DNA, 25 bp, Canis familiaris
caaaggaacctatgcagatgactgc

SEQ ID NO: 58964 - DNA, 25 bp, Canis familiaris
caaaggaggctcggacaagtgcagc

SEQ ID NO: 58965 - DNA, 25 bp, Canis familiaris
caaagaagcttcgggggcatgcgcc

SEQ ID NO: 58966 - DNA, 25 bp, Canis familiaris
caaagtctgttctggcggcattgtg

SEQ ID NO: 58967 - DNA, 25 bp, Canis familiaris
caaagtctggtatcctaagcttgaa

SEQ ID NO: 58968 - DNA, 25 bp, Canis familiaris
caaagtcaggtttatcagaagggat

SEQ ID NO: 58969 - DNA, 25 bp, Canis familiaris
cacaattcgggaacaagatgatggg

SEQ ID NO: 58970 - DNA, 25 bp, Canis familiaris
caaatttcagcgaagctaattccag

SEQ ID NO: 58971 - DNA, 25 bp, Canis familiaris
caaatggtctgcctggtatctgtcc

SEQ ID NO: 58972 - DNA, 25 bp, Canis familiaris
cacagggtgctcgtggtttccctgg

SEQ ID NO: 58973 - DNA, 25 bp, Canis familiaris
cacatgggtttctctattccctggt

SEQ ID NO: 58974 - DNA, 25 bp, Canis familiaris
cacaagtgtttcaacctgtcctgta

SEQ ID NO: 58975 - DNA, 25 bp, Canis familiaris
cacaaccacttcaacactacgttat

SEQ ID NO: 58976 - DNA, 25 bp, Canis familiaris
cacaacaagttgaccctgacgtaga

SEQ ID NO: 58977 - DNA, 25 bp, Canis familiaris
caaatctaattgggctctactgtca

SEQ ID NO: 58978 - DNA, 25 bp, Canis familiaris
caaattgataccctgccataagtcc

SEQ ID NO: 58979 - DNA, 25 bp, Canis familiaris
caaattcagaaccatcgcacaaccc

SEQ ID NO: 58980 - DNA, 25 bp, Canis familiaris
caaatagagtaaccacgcacacacc

SEQ ID NO: 58981 - DNA, 25 bp, Canis familiaris
caaagaatctcagtcacaccaaacc

SEQ ID NO: 58982 - DNA, 25 bp, Canis familiaris
cacacagagactcatcacctgcaga

SEQ ID NO: 58983 - DNA, 25 bp, Canis familiaris
cacacaagaatggccaccgagtccg

SEQ ID NO: 58984 - DNA, 25 bp, Canis familiaris
cacacctaacaggcagccaaggccg

SEQ ID NO: 58985 - DNA, 25 bp, Canis familiaris
cacaccaaggcctgccaagtcttgg

SEQ ID NO: 58986 - DNA, 25 bp, Canis familiaris
cacacccaccctcagaagttaaagt

SEQ ID NO: 58987 - DNA, 25 bp, Canis familiaris
cacactcccaaacttaagctctgga

SEQ ID NO: 58988 - DNA, 25 bp, Canis familiaris
caaatgcctaaatcttcaattctga

SEQ ID NO: 58989 - DNA, 25 bp, Canis familiaris
caaagctctgaaatactcatttttt

SEQ ID NO: 58990 - DNA, 25 bp, Canis familiaris
caaaggtgatgtcaccatttgatct

SEQ ID NO: 58991 - DNA, 25 bp, Canis familiaris
caaagggtgtgggcgtctctacacg

SEQ ID NO: 58992 - DNA, 25 bp, Canis familiaris
caaagtggttggtgctcactccttg

SEQ ID NO: 58993 - DNA, 25 bp, Canis familiaris
caaaggcagttttttctctctcttt

SEQ ID NO: 58994 - DNA, 25 bp, Canis familiaris
caaatgccagttttttacatacttg

SEQ ID NO: 58995 - DNA, 25 bp, Canis familiaris
caaagccgtaattcattacaatctc

SEQ ID NO: 58996 - DNA, 25 bp, Canis familiaris
caaagccgtggaggactcgaagccc

SEQ ID NO: 58997 - DNA, 25 bp, Canis familiaris
caaagccgtaaccggggaccatcat

SEQ ID NO: 58998 - DNA, 25 bp, Canis familiaris
cacaccggtaaatggggcagactat

SEQ ID NO: 58999 - DNA, 25 bp, Canis familiaris
caccccagattgtcaacggggacca

SEQ ID NO: 59000 - DNA, 25 bp, Canis familiaris
cacacctcacggggacgggatggac

SEQ ID NO: 59001 - DNA, 25 bp, Canis familiaris
cacacagtacgagtccggggaggca

SEQ ID NO: 59002 - DNA, 25 bp, Canis familiaris
cacacttcctgagtgccagtggggc

SEQ ID NO: 59003 - DNA, 25 bp, Canis familiaris
cacacagtttgttgccgtgagaggg

SEQ ID NO: 59004 - DNA, 25 bp, Canis familiaris
cacacgtgtttccgccgaatacgga

SEQ ID NO: 59005 - DNA, 25 bp, Canis familiaris
cacactttatacatgccgacgagcg

SEQ ID NO: 59006 - DNA, 25 bp, Canis familiaris
cacactgaattcactcccaatgagc

SEQ ID NO: 59007 - DNA, 25 bp, Canis familiaris
cacacatatttttctcacctagctg

SEQ ID NO: 59008 - DNA, 25 bp, Canis familiaris
cacttactatttgactcctgctgaa

SEQ ID NO: 59009 - DNA, 25 bp, Canis familiaris
cacttttattgagtcaccgatccca

SEQ ID NO: 59010 - DNA, 25 bp, Canis familiaris
cacttcaaatccgactcaagaccca

SEQ ID NO: 59011 - DNA, 25 bp, Canis familiaris
cacttaatgctaccaaaatagcact

SEQ ID NO: 59012 - DNA, 25 bp, Canis familiaris
cacttaactcctcaaatttgttttg

SEQ ID NO: 59013 - DNA, 25 bp, Canis familiaris
cacaccataccctcaaaggattttt

SEQ ID NO: 59014 - DNA, 25 bp, Canis familiaris
cacaagccacccccacagagggggt

SEQ ID NO: 59015 - DNA, 25 bp, Canis familiaris
cacaacctccctgacatgcaaggat

SEQ ID NO: 59016 - DNA, 25 bp, Canis familiaris
cacaacccctctaggagcagtggca

SEQ ID NO: 59017 - DNA, 25 bp, Canis familiaris
cacaatccccctatacgggctaatt

SEQ ID NO: 59018 - DNA, 25 bp, Canis familiaris
cacttctccccttctattggaataa

SEQ ID NO: 59019 - DNA, 25 bp, Canis familiaris
cacattattgccctttagaacttaa

SEQ ID NO: 59020 - DNA, 25 bp, Canis familiaris
cacatccattccacctggttttata

SEQ ID NO: 59021 - DNA, 25 bp, Canis familiaris
cactccagtacagatgtcgtgttct

SEQ ID NO: 59022 - DNA, 25 bp, Canis familiaris
cactcagcttacagtgtttggcctc

SEQ ID NO: 59023 - DNA, 25 bp, Canis familiaris
caaagtaactgccttttgggtcagg

SEQ ID NO: 59024 - DNA, 25 bp, Canis familiaris
caaaggcaagcccgtggcagggccg

SEQ ID NO: 59025 - DNA, 25 bp, Canis familiaris
cacaaccaaaccgagggtggcctgc

SEQ ID NO: 59026 - DNA, 25 bp, Canis familiaris
cacacaccaagaacaaggtgggact

SEQ ID NO: 59027 - DNA, 25 bp, Canis familiaris
cacagactcaggaccaattgcgtct

SEQ ID NO: 59028 - DNA, 25 bp, Canis familiaris
caaagcagcaggccctaggcaagct

SEQ ID NO: 59029 - DNA, 25 bp, Canis familiaris
caaagcagagcttcctactgcacct

SEQ ID NO: 59030 - DNA, 25 bp, Canis familiaris
caaataatcattaccatcccttttc

SEQ ID NO: 59031 - DNA, 25 bp, Canis familiaris
caaataaagtcaaccccttgcatcc

SEQ ID NO: 59032 - DNA, 25 bp, Canis familiaris
cacaaatgtcagtcaaccccgacac

SEQ ID NO: 59033 - DNA, 25 bp, Canis familiaris
cacaaattgcccaacaccaagatgc

SEQ ID NO: 59034 - DNA, 25 bp, Canis familiaris
caaattgcccaacaccaagatgcga

SEQ ID NO: 59035 - DNA, 25 bp, Canis familiaris
caaataagaaaccccagatgtcaga

SEQ ID NO: 59036 - DNA, 25 bp, Canis familiaris
caaattaggaaatactgctctctga

SEQ ID NO: 59037 - DNA, 25 bp, Canis familiaris
cacaattgggaataacctgtctcaa

SEQ ID NO: 59038 - DNA, 25 bp, Canis familiaris
cacacagggtaataaggatgctcag

SEQ ID NO: 59039 - DNA, 25 bp, Canis familiaris
caaagatttctagtaatgattctag

SEQ ID NO: 59040 - DNA, 25 bp, Canis familiaris
caaagaccctgactcactattccag

SEQ ID NO: 59041 - DNA, 25 bp, Canis familiaris
cacactggccctctgaaatgtccag

SEQ ID NO: 59042 - DNA, 25 bp, Canis familiaris
caaaggccctgagtagaggaccagg

SEQ ID NO: 59043 - DNA, 25 bp, Canis familiaris
cacaaggacgtgtctagaccccagg

SEQ ID NO: 59044 - DNA, 25 bp, Canis familiaris
caaagaaagttgcagatccccgggt

SEQ ID NO: 59045 - DNA, 25 bp, Canis familiaris
cacaagaaggttctttccctcaagt

SEQ ID NO: 59046 - DNA, 25 bp, Canis familiaris
caaagaaggcattcctttgcccacc

SEQ ID NO: 59047 - DNA, 25 bp, Canis familiaris
cacaaagactcaccctttgaccact

SEQ ID NO: 59048 - DNA, 25 bp, Canis familiaris
cacaacgagctatcctttgtgcccc

SEQ ID NO: 59049 - DNA, 25 bp, Canis familiaris
cacacacgttagtcgttagggccac

SEQ ID NO: 59050 - DNA, 25 bp, Canis familiaris
cagcacggggactgtccagggaacc

SEQ ID NO: 59051 - DNA, 25 bp, Canis familiaris
cacacggccgaatgatcctggatct

SEQ ID NO: 59052 - DNA, 25 bp, Canis familiaris
cacagctgggccacgtatcgtgtta

SEQ ID NO: 59053 - DNA, 25 bp, Canis familiaris
cacactgggcacatgaggacccttc

SEQ ID NO: 59054 - DNA, 25 bp, Canis familiaris
cacaggggccttgacgacaatgtca

SEQ ID NO: 59055 - DNA, 25 bp, Canis familiaris
gacaccgcggttgacgttggtcggt

SEQ ID NO: 59056 - DNA, 25 bp, Canis familiaris
cacacgagcgtgaccaacgtaggcc

SEQ ID NO: 59057 - DNA, 25 bp, Canis familiaris
cacacaagggcatcatccggcagtg

SEQ ID NO: 59058 - DNA, 25 bp, Canis familiaris
cactcaagtgagatcctcgtgcaga

SEQ ID NO: 59059 - DNA, 25 bp, Canis familiaris
cacaatcaagcggtcgacattgcag

SEQ ID NO: 59060 - DNA, 25 bp, Canis familiaris
cacaagcgcaagcctacacattcag

SEQ ID NO: 59061 - DNA, 25 bp, Canis familiaris
cacagacctcatggaagccattcgg

SEQ ID NO: 59062 - DNA, 25 bp, Canis familiaris
cacaatcccacttagcgattacagt

SEQ ID NO: 59063 - DNA, 25 bp, Canis familiaris
gacccccacgagtgtctaagtcgtg

SEQ ID NO: 59064 - DNA, 25 bp, Canis familiaris
cacggccccaagtgttttatcgatg

SEQ ID NO: 59065 - DNA, 25 bp, Canis familiaris
cacaacccggagagtctgttcatcc

SEQ ID NO: 59066 - DNA, 25 bp, Canis familiaris
cacaaccggatgtcttgattgattt

SEQ ID NO: 59067 - DNA, 25 bp, Canis familiaris
cacaccaggtgaatgtcgttcttac

SEQ ID NO: 59068 - DNA, 25 bp, Canis familiaris
cacacacaggtttgtcttccatttt

SEQ ID NO: 59069 - DNA, 25 bp, Canis familiaris
cacaagaggtctttccctcagtttc

SEQ ID NO: 59070 - DNA, 25 bp, Canis familiaris
cacaagaggtctttccctcagtttc

SEQ ID NO: 59071 - DNA, 25 bp, Canis familiaris
cacacaagagttttccgttgtcacc

SEQ ID NO: 59072 - DNA, 25 bp, Canis familiaris
cacaaaagccagttactgtgtcacc

SEQ ID NO: 59073 - DNA, 25 bp, Canis familiaris
caaatactggctctactattcagct

SEQ ID NO: 59074 - DNA, 25 bp, Canis familiaris
caaattctggctgtatcacttcctg

SEQ ID NO: 59075 - DNA, 25 bp, Canis familiaris
caaagtcgtgctgggaaccctgcgt

SEQ ID NO: 59076 - DNA, 25 bp, Canis familiaris
caaattctggtgccagcaaccctcg

SEQ ID NO: 59077 - DNA, 25 bp, Canis familiaris
caaagtctggtgccatgcaagccgc

SEQ ID NO: 59078 - DNA, 25 bp, Canis familiaris
caaagttatgattgagcagctcctc

SEQ ID NO: 59079 - DNA, 25 bp, Canis familiaris
caaattgtacaccatcatcttgctc

SEQ ID NO: 59080 - DNA, 25 bp, Canis familiaris
caaatctgtttgtctcacttgctga

SEQ ID NO: 59081 - DNA, 25 bp, Canis familiaris
caaatgtctccgtaatctgtgctgt

SEQ ID NO: 59082 - DNA, 25 bp, Canis familiaris
caaatacatccctaatcgtggtccc

SEQ ID NO: 59083 - DNA, 25 bp, Canis familiaris
cacaaacatccttgaagagctggtg

SEQ ID NO: 59084 - DNA, 25 bp, Canis familiaris
cacaccattccttcaaggtgggaag

SEQ ID NO: 59085 - DNA, 25 bp, Canis familiaris
cacacacttcctgacgggcgtgtgc

SEQ ID NO: 59086 - DNA, 25 bp, Canis familiaris
cacacatcagtccccatcgaggggt

SEQ ID NO: 59087 - DNA, 25 bp, Canis familiaris
cacaatcgtcgtgcagcaagctgac

SEQ ID NO: 59088 - DNA, 25 bp, Canis familiaris
caaatctctcattccacaactgatt

SEQ ID NO: 59089 - DNA, 25 bp, Canis familiaris
cacaatcatctcatacctaagcctt

SEQ ID NO: 59090 - DNA, 25 bp, Canis familiaris
cacacatttgtatgcttctcagcct

SEQ ID NO: 59091 - DNA, 25 bp, Canis familiaris
caaatgtctgtgacaattccgcccc

SEQ ID NO: 59092 - DNA, 25 bp, Canis familiaris
caaatcacatcttagttccgtcacc

SEQ ID NO: 59093 - DNA, 25 bp, Canis familiaris
caaatgatcatttccttcctttgct

SEQ ID NO: 59094 - DNA, 25 bp, Canis familiaris
caaattatcacgtttccattttttg

SEQ ID NO: 59095 - DNA, 25 bp, Canis familiaris
caaatattttctgcctcttcttttg

SEQ ID NO: 59096 - DNA, 25 bp, Canis familiaris
caaataacttgcttcgacttcaaat

SEQ ID NO: 59097 - DNA, 25 bp, Canis familiaris
cacaatcagacaccactctacattc

SEQ ID NO: 59098 - DNA, 25 bp, Canis familiaris
cacaatctcaagaattcgttttggg

SEQ ID NO: 59099 - DNA, 25 bp, Canis familiaris
cacaacccgacatcggttctgaccc

SEQ ID NO: 59100 - DNA, 25 bp, Canis familiaris
cacacatccccctgggtttatttcg

SEQ ID NO: 59101 - DNA, 25 bp, Canis familiaris
cacaccccaacaaggcagtcttaat

SEQ ID NO: 59102 - DNA, 25 bp, Canis familiaris
cacatcaaccccggggagcttagac

SEQ ID NO: 59103 - DNA, 25 bp, Canis familiaris
cacacaaccccagtgttgttggccc

SEQ ID NO: 59104 - DNA, 25 bp, Canis familiaris
cacacacccttaattcctgtgggct

SEQ ID NO: 59105 - DNA, 25 bp, Canis familiaris
cacacccctggaattgctttgagtt

SEQ ID NO: 59106 - DNA, 25 bp, Canis familiaris
cacacgctcctatattttcatttaa

SEQ ID NO: 59107 - DNA, 25 bp, Canis familiaris
cacactgcctctgaatgttccaggg

SEQ ID NO: 59108 - DNA, 25 bp, Canis familiaris
cacccacaacaatgtaccgggagaa

SEQ ID NO: 59109 - DNA, 25 bp, Canis familiaris
cacagccctgagatcgtgacctggg

SEQ ID NO: 59110 - DNA, 25 bp, Canis familiaris
cacacacaccagtacggagtctgac

SEQ ID NO: 59111 - DNA, 25 bp, Canis familiaris
cacacgcacttatcaggaacgcctc

SEQ ID NO: 59112 - DNA, 25 bp, Canis familiaris
cacaccccaaaccgagaaccattgg

SEQ ID NO: 59113 - DNA, 25 bp, Canis familiaris
cacaccctgataactcaaggtaaag

SEQ ID NO: 59114 - DNA, 25 bp, Canis familiaris
cacaccggttggacaaagctgaagg

SEQ ID NO: 59115 - DNA, 25 bp, Canis familiaris
cacaccgttgtgctatggagagtac

SEQ ID NO: 59116 - DNA, 25 bp, Canis familiaris
cacacgcgctttttaactaggacca

SEQ ID NO: 59117 - DNA, 25 bp, Canis familiaris
cacactctttgttgaacacacgatg

SEQ ID NO: 59118 - DNA, 25 bp, Canis familiaris
cacagccttttatcagcaagcttct

SEQ ID NO: 59119 - DNA, 25 bp, Canis familiaris
cacagtcttctataacttactcatc

SEQ ID NO: 59120 - DNA, 25 bp, Canis familiaris
cacagtgcttcctagaaaggactca

SEQ ID NO: 59121 - DNA, 25 bp, Canis familiaris
cacagtttccaagacaatgcctatt

SEQ ID NO: 59122 - DNA, 25 bp, Canis familiaris
caaatgtccccaaagatcagcctta

SEQ ID NO: 59123 - DNA, 25 bp, Canis familiaris
cagaatgttactggaagctaaattt

SEQ ID NO: 59124 - DNA, 25 bp, Canis familiaris
cagaatgtctaccagacccgacttt

SEQ ID NO: 59125 - DNA, 25 bp, Canis familiaris
caaagtggaggaccccattctatct

SEQ ID NO: 59126 - DNA, 25 bp, Canis familiaris
caaagaggggcaagcgccatcctct

SEQ ID NO: 59127 - DNA, 25 bp, Canis familiaris
cactagggaagcacatggcaccatc

SEQ ID NO: 59128 - DNA, 25 bp, Canis familiaris
cacacaggaaacagctatgaccatt

SEQ ID NO: 59129 - DNA, 25 bp, Canis familiaris
cacacaggcagatctgagttcccct

SEQ ID NO: 59130 - DNA, 25 bp, Canis familiaris
cacacactggcacgcgtgtttgcca

SEQ ID NO: 59131 - DNA, 25 bp, Canis familiaris
cacaccggcagggcagtagttccgt

SEQ ID NO: 59132 - DNA, 25 bp, Canis familiaris
cacacaggcggggagctcagaacct

SEQ ID NO: 59133 - DNA, 25 bp, Canis familiaris
caaagtgcgggactgtacaccatca

SEQ ID NO: 59134 - DNA, 25 bp, Canis familiaris
cacatagtaggtgctgaataaatat

SEQ ID NO: 59135 - DNA, 25 bp, Canis familiaris
cactactggccatctgatctacaaa

SEQ ID NO: 59136 - DNA, 25 bp, Canis familiaris
cactagccgacggctatctgccacc

SEQ ID NO: 59137 - DNA, 25 bp, Canis familiaris
cacagacaccagggtactcctgctc

SEQ ID NO: 59138 - DNA, 25 bp, Canis familiaris
cacaagaccggatgacccgtcggaa

SEQ ID NO: 59139 - DNA, 25 bp, Canis familiaris
cacagagacctggatcagatcccag

SEQ ID NO: 59140 - DNA, 25 bp, Canis familiaris
cacagaggtccttcagacccaggga

SEQ ID NO: 59141 - DNA, 25 bp, Canis familiaris
caaaggtcaatatccaacgcagcca

SEQ ID NO: 59142 - DNA, 25 bp, Canis familiaris
cacaaggttaatttctccgcagcca

SEQ ID NO: 59143 - DNA, 25 bp, Canis familiaris
cacaagtttcaactctgcacctagc

SEQ ID NO: 59144 - DNA, 25 bp, Canis familiaris
cacaacttcaaattccactctagct

SEQ ID NO: 59145 - DNA, 25 bp, Canis familiaris
cacagaacccattcaccacgttctg

SEQ ID NO: 59146 - DNA, 25 bp, Canis familiaris
cacagaacctgtcattgccttttat

SEQ ID NO: 59147 - DNA, 25 bp, Canis familiaris
caaatcccagctaaagcctttatag

SEQ ID NO: 59148 - DNA, 25 bp, Canis familiaris
caaattccagattcaaggctttccc

SEQ ID NO: 59149 - DNA, 25 bp, Canis familiaris
caaatcccaccaggggctaatgccc

SEQ ID NO: 59150 - DNA, 25 bp, Canis familiaris
caaatccctcccatagagacatcgc

SEQ ID NO: 59151 - DNA, 25 bp, Canis familiaris
cacaacggtcccagggcatcatggg

SEQ ID NO: 59152 - DNA, 25 bp, Canis familiaris
cctagggatccctccagtagatggt

SEQ ID NO: 59153 - DNA, 25 bp, Canis familiaris
cacaaaaggcccgtccgaaggagct

SEQ ID NO: 59154 - DNA, 25 bp, Canis familiaris
cacaagaagggagccctggaccctc

SEQ ID NO: 59155 - DNA, 25 bp, Canis familiaris
cataagtagggtcccctgggtggct

SEQ ID NO: 59156 - DNA, 25 bp, Canis familiaris
cacacaattcggatccctgggtggc

SEQ ID NO: 59157 - DNA, 25 bp, Canis familiaris
caccaatctcgtgactccacggatg

SEQ ID NO: 59158 - DNA, 25 bp, Canis familiaris
cactaaacaccaccccaaggatgtg

SEQ ID NO: 59159 - DNA, 25 bp, Canis familiaris
cacaaaaccccacacacatgtgtat

SEQ ID NO: 59160 - DNA, 25 bp, Canis familiaris
cacacaaacacacaaacaatggact

SEQ ID NO: 59161 - DNA, 25 bp, Canis familiaris
cacacaacaacacaatccacttgcc

SEQ ID NO: 59162 - DNA, 25 bp, Canis familiaris
cacaccaagatacagatcatcaact

SEQ ID NO: 59163 - DNA, 25 bp, Canis familiaris
cagactattggacaagcatcgatga

SEQ ID NO: 59164 - DNA, 25 bp, Canis familiaris
cagactctgggacaaacgggtactt

SEQ ID NO: 59165 - DNA, 25 bp, Canis familiaris
cacactctgtggctacaatcgaatt

SEQ ID NO: 59166 - DNA, 25 bp, Canis familiaris
cacactggctaacctcaatcaaagt

SEQ ID NO: 59167 - DNA, 25 bp, Canis familiaris
cacacttttgcgttccacataacat

SEQ ID NO: 59168 - DNA, 25 bp, Canis familiaris
cacagttttccttccacaatttagt

SEQ ID NO: 59169 - DNA, 25 bp, Canis familiaris
cacagtgctcgtacgtcagatcact

SEQ ID NO: 59170 - DNA, 25 bp, Canis familiaris
cacacaccgtgggtcagatcacact

SEQ ID NO: 59171 - DNA, 25 bp, Canis familiaris
cacaacacgcagtgacagatgcaaa

SEQ ID NO: 59172 - DNA, 25 bp, Canis familiaris
cagaggcccagagacgttagattac

SEQ ID NO: 59173 - DNA, 25 bp, Canis familiaris
cacagagcccaaggacggggtttca

SEQ ID NO: 59174 - DNA, 25 bp, Canis familiaris
cacagaaccgggcccagaagttgct

SEQ ID NO: 59175 - DNA, 25 bp, Canis familiaris
cacaacaggtgcccccaaaggtgtg

SEQ ID NO: 59176 - DNA, 25 bp, Canis familiaris
cacaatcgaggacccgaaaggttcg

SEQ ID NO: 59177 - DNA, 25 bp, Canis familiaris
cacaatcgagggcgctatataggat

SEQ ID NO: 59178 - DNA, 25 bp, Canis familiaris
cacaagcaggggctgatgttgtgga

SEQ ID NO: 59179 - DNA, 25 bp, Canis familiaris
cacactggttgtcctgagctttggt

SEQ ID NO: 59180 - DNA, 25 bp, Canis familiaris
cacaagtggcggacgtgccttggtg

SEQ ID NO: 59181 - DNA, 25 bp, Canis familiaris
cacagcagtcagctaaggcccaggt

SEQ ID NO: 59182 - DNA, 25 bp, Canis familiaris
cacaggtgggctttggggcacgtag

SEQ ID NO: 59183 - DNA, 25 bp, Canis familiaris
cacagaggggcgtcgcgacaacaga

SEQ ID NO: 59184 - DNA, 25 bp, Canis familiaris
cacaagaggcgcgcgggagagagag

SEQ ID NO: 59185 - DNA, 25 bp, Canis familiaris
cacaacaatgtaccgggagaatacc

SEQ ID NO: 59186 - DNA, 25 bp, Canis familiaris
cacaaacatgtaccgttccacaggc

SEQ ID NO: 59187 - DNA, 25 bp, Canis familiaris
cacaaacatggagcctcttcctagc

SEQ ID NO: 59188 - DNA, 25 bp, Canis familiaris
cacagaacaggggcccttgccaagg

SEQ ID NO: 59189 - DNA, 25 bp, Canis familiaris
cacagaaatggtggggaacccgagt

SEQ ID NO: 59190 - DNA, 25 bp, Canis familiaris
cacaaacaggtggttgacagtgcct

SEQ ID NO: 59191 - DNA, 25 bp, Canis familiaris
cacttatagtccatggggtcctcac

SEQ ID NO: 59192 - DNA, 25 bp, Canis familiaris
cacacaaagctttctggtggtcttc

SEQ ID NO: 59193 - DNA, 25 bp, Canis familiaris
cacacaccactagtcggggtgtgcc

SEQ ID NO: 59194 - DNA, 25 bp, Canis familiaris
cacacggctctgaacaagggtttcc

SEQ ID NO: 59195 - DNA, 25 bp, Canis familiaris
cacaggagccatgaacagggtgcat

SEQ ID NO: 59196 - DNA, 25 bp, Canis familiaris
caaatgagccatccagaagccctgc

SEQ ID NO: 59197 - DNA, 25 bp, Canis familiaris
caaatggccatatatccaccaccaa

SEQ ID NO: 59198 - DNA, 25 bp, Canis familiaris
cacaagaatctttatcccacacaaa

SEQ ID NO: 59199 - DNA, 25 bp, Canis familiaris
cacaaactttaaatcagcctgctac

SEQ ID NO: 59200 - DNA, 25 bp, Canis familiaris
cacaatcaaaccagtcggtgcaatc

SEQ ID NO: 59201 - DNA, 25 bp, Canis familiaris
cacaaaggaccaggtctggacaaaa

SEQ ID NO: 59202 - DNA, 25 bp, Canis familiaris
cacaaagccagccacggttaaaaat

SEQ ID NO: 59203 - DNA, 25 bp, Canis familiaris
cacacaactggccacctgattaaaa

SEQ ID NO: 59204 - DNA, 25 bp, Canis familiaris
cacagtgcaccgaatgctcttagcc

SEQ ID NO: 59205 - DNA, 25 bp, Canis familiaris
caaatactagcaattcataaccaaa

SEQ ID NO: 59206 - DNA, 25 bp, Canis familiaris
caaatgcctctgccttgacaaaaga

SEQ ID NO: 59207 - DNA, 25 bp, Canis familiaris
cacacagcatccttctttcaaaaag

SEQ ID NO: 59208 - DNA, 25 bp, Canis familiaris
cacacagcacacattttttaaaaag

SEQ ID NO: 59209 - DNA, 25 bp, Canis familiaris
caaatgctctattgttttctaaaca

SEQ ID NO: 59210 - DNA, 25 bp, Canis familiaris
caaatctcttctttttggtagcctt

SEQ ID NO: 59211 - DNA, 25 bp, Canis familiaris
cacagtggtcttttttagaatcctt

SEQ ID NO: 59212 - DNA, 25 bp, Canis familiaris
caaatctttgttgttaaattcttcg

SEQ ID NO: 59213 - DNA, 25 bp, Canis familiaris
cagaatcatctttaacctaactttt

SEQ ID NO: 59214 - DNA, 25 bp, Canis familiaris
cacacactctgttatcacctaaatt

SEQ ID NO: 59215 - DNA, 25 bp, Canis familiaris
cacacagcattaattctatctgcaa

SEQ ID NO: 59216 - DNA, 25 bp, Canis familiaris
cacaacttcatcatcttcttcagat

SEQ ID NO: 59217 - DNA, 25 bp, Canis familiaris
caaatttcatcaccttgtcacagcc

SEQ ID NO: 59218 - DNA, 25 bp, Canis familiaris
cacaccgacacaccattgatatacc

SEQ ID NO: 59219 - DNA, 25 bp, Canis familiaris
cacacactcacccgtggatatgcag

SEQ ID NO: 59220 - DNA, 25 bp, Canis familiaris
cacacaccgccgcggataattccag

SEQ ID NO: 59221 - DNA, 25 bp, Canis familiaris
cacaccccccagataatagatgccg

SEQ ID NO: 59222 - DNA, 25 bp, Canis familiaris
cactcctggaaccttcactaaccag

SEQ ID NO: 59223 - DNA, 25 bp, Canis familiaris
cacacgtaaacgggaccacaccatg

SEQ ID NO: 59224 - DNA, 25 bp, Canis familiaris
cacactgtaacacggagaccacccg

SEQ ID NO: 59225 - DNA, 25 bp, Canis familiaris
cacaatctcaggcctggtatccatc

SEQ ID NO: 59226 - DNA, 25 bp, Canis familiaris
caaattctgtgccattgtgtcttct

SEQ ID NO: 59227 - DNA, 25 bp, Canis familiaris
caaattcactgatttgcctctctct

SEQ ID NO: 59228 - DNA, 25 bp, Canis familiaris
caaatgtatgcatgctttctctctc

SEQ ID NO: 59229 - DNA, 25 bp, Canis familiaris
caatatcatcaccacacgcacttat

SEQ ID NO: 59230 - DNA, 25 bp, Canis familiaris
cacacttgttccagctctttgaaat

SEQ ID NO: 59231 - DNA, 25 bp, Canis familiaris
cacacggattcagggcatgctgtgt

SEQ ID NO: 59232 - DNA, 25 bp, Canis familiaris
cacacccatactggctgctgattgg

SEQ ID NO: 59233 - DNA, 25 bp, Canis familiaris
cacacactattctgggattggtctg

SEQ ID NO: 59234 - DNA, 25 bp, Canis familiaris
caaatctgaatctttggagatgccc

SEQ ID NO: 59235 - DNA, 25 bp, Canis familiaris
cacgattatcatcttcgtgctcccc

SEQ ID NO: 59236 - DNA, 25 bp, Canis familiaris
cacaggtatatcgttcactgccacc

SEQ ID NO: 59237 - DNA, 25 bp, Canis familiaris
cacagtatgcatctgtagcctgccc

SEQ ID NO: 59238 - DNA, 25 bp, Canis familiaris
caaattgatgttcagctgcatacac

SEQ ID NO: 59239 - DNA, 25 bp, Canis familiaris
caaatgggtctgggcagcatcccgt

SEQ ID NO: 59240 - DNA, 25 bp, Canis familiaris
cagattgggtctgtacattccgggg

SEQ ID NO: 59241 - DNA, 25 bp, Canis familiaris
cacaatgggtctgtaggtccccgga

SEQ ID NO: 59242 - DNA, 25 bp, Canis familiaris
cacagcctggtctgaaagtctcctc

SEQ ID NO: 59243 - DNA, 25 bp, Canis familiaris
cacacgtggtgatgttacattccta

SEQ ID NO: 59244 - DNA, 25 bp, Canis familiaris
cacactgtggaatgccttcttcctg

SEQ ID NO: 59245 - DNA, 25 bp, Canis familiaris
cacaaaggacttcttcattccaccc

SEQ ID NO: 59246 - DNA, 25 bp, Canis familiaris
cacaaaggatttcatcatttcccta

SEQ ID NO: 59247 - DNA, 25 bp, Canis familiaris
cacagaccagattatatttttccct

SEQ ID NO: 59248 - DNA, 25 bp, Canis familiaris
cacagacaagggctttttctcctcc

SEQ ID NO: 59249 - DNA, 25 bp, Canis familiaris
cacagtcaaggtcttgtcctgtcgc

SEQ ID NO: 59250 - DNA, 25 bp, Canis familiaris
cacatgtcacaaagctttcccgtgc

SEQ ID NO: 59251 - DNA, 25 bp, Canis familiaris
cacagtcaaaatattcctaagcctt

SEQ ID NO: 59252 - DNA, 25 bp, Canis familiaris
cacaagtaagtcaattgcccagagc

SEQ ID NO: 59253 - DNA, 25 bp, Canis familiaris
cacaggtggactcgagtccctgtca

SEQ ID NO: 59254 - DNA, 25 bp, Canis familiaris
cacaagtttgctcgtgtcactagtc

SEQ ID NO: 59255 - DNA, 25 bp, Canis familiaris
cacaactgttgcaaggctactaggt

SEQ ID NO: 59256 - DNA, 25 bp, Canis familiaris
cacaactgtatggggaacataaaag

SEQ ID NO: 59257 - DNA, 25 bp, Canis familiaris
cagcaactttctgtggaacaaccag

SEQ ID NO: 59258 - DNA, 25 bp, Canis familiaris
cacagattgtatcggggaacctccg

SEQ ID NO: 59259 - DNA, 25 bp, Canis familiaris
cacagtgctgtctggaggtaccacc

SEQ ID NO: 59260 - DNA, 25 bp, Canis familiaris
cacagtgctgtctggcggcaccacc

SEQ ID NO: 59261 - DNA, 25 bp, Canis familiaris
cacagtatgctgcggcgcaacctac

SEQ ID NO: 59262 - DNA, 25 bp, Canis familiaris
cacattacatgtcagtcacttgcta

SEQ ID NO: 59263 - DNA, 25 bp, Canis familiaris
cacatttcatgttttgcacggtatt

SEQ ID NO: 59264 - DNA, 25 bp, Canis familiaris
cacagtctggcatctatgacggtga

SEQ ID NO: 59265 - DNA, 25 bp, Canis familiaris
cacagtgatgatgtcgagatcggaa

SEQ ID NO: 59266 - DNA, 25 bp, Canis familiaris
cacatcagtgatgacagcattagga

SEQ ID NO: 59267 - DNA, 25 bp, Canis familiaris
cacaccagagccagacatagccatt

SEQ ID NO: 59268 - DNA, 25 bp, Canis familiaris
cacacacctgcgccagaagtgtcat

SEQ ID NO: 59269 - DNA, 25 bp, Canis familiaris
cacacactgtcccatgcaaggtgac

SEQ ID NO: 59270 - DNA, 25 bp, Canis familiaris
cacacactttattgcaaggtttcag

SEQ ID NO: 59271 - DNA, 25 bp, Canis familiaris
cagcagtctgtttccgagggtacag

SEQ ID NO: 59272 - DNA, 25 bp, Canis familiaris
cagagttgtcaagccttgtaactgg

SEQ ID NO: 59273 - DNA, 25 bp, Canis familiaris
gcaagctgaacgagcacgttaactg

SEQ ID NO: 59274 - DNA, 25 bp, Canis familiaris
cacactgaacagagacttccgcacg

SEQ ID NO: 59275 - DNA, 25 bp, Canis familiaris
cacactacactagtgaacccgcgcg

SEQ ID NO: 59276 - DNA, 25 bp, Canis familiaris
cacactacagaagaacgcggcggcc

SEQ ID NO: 59277 - DNA, 25 bp, Canis familiaris
cacttaagggacacctggctggctc

SEQ ID NO: 59278 - DNA, 25 bp, Canis familiaris
cactcaggaagtgctgtccgggtcc

SEQ ID NO: 59279 - DNA, 25 bp, Canis familiaris
cacacaggaagcccgacatgggact

SEQ ID NO: 59280 - DNA, 25 bp, Canis familiaris
cacagccgtagcacagaacagacct

SEQ ID NO: 59281 - DNA, 25 bp, Canis familiaris
cacaccagaacaaaggtcagaatct

SEQ ID NO: 59282 - DNA, 25 bp, Canis familiaris
cacacacgaacaataaacaactctt

SEQ ID NO: 59283 - DNA, 25 bp, Canis familiaris
cacacacgtccatggatacatactt

SEQ ID NO: 59284 - DNA, 25 bp, Canis familiaris
cacataagatacggagtacatcctc

SEQ ID NO: 59285 - DNA, 25 bp, Canis familiaris
cacacaaataccgcatgctcatagc

SEQ ID NO: 59286 - DNA, 25 bp, Canis familiaris
cacacacacacacagatagtcatac

SEQ ID NO: 59287 - DNA, 25 bp, Canis familiaris
cacacacgccaggacacagtcaaag

SEQ ID NO: 59288 - DNA, 25 bp, Canis familiaris
cacacacccaaagcacacacagggt

SEQ ID NO: 59289 - DNA, 25 bp, Canis familiaris
cacaacgcacatcaccaagactgtg

SEQ ID NO: 59290 - DNA, 25 bp, Canis familiaris
cacaacgatacaacacagttttttt

SEQ ID NO: 59291 - DNA, 25 bp, Canis familiaris
cacaactaatagtaagcatcttttt

SEQ ID NO: 59292 - DNA, 25 bp, Canis familiaris
cacaaccttctgtaacatctctatt

SEQ ID NO: 59293 - DNA, 25 bp, Canis familiaris
caaatctcttctacaagctcctatc

SEQ ID NO: 59294 - DNA, 25 bp, Canis familiaris
cacaatctctctcataaatacatac

SEQ ID NO: 59295 - DNA, 25 bp, Canis familiaris
cacaatcacagtattatttcattta

SEQ ID NO: 59296 - DNA, 25 bp, Canis familiaris
cacacacgcaggattattactcagt

SEQ ID NO: 59297 - DNA, 25 bp, Canis familiaris
cacacaccacggaatattacccaac

SEQ ID NO: 59298 - DNA, 25 bp, Canis familiaris
cacacaccaaggaatccttcccagt

SEQ ID NO: 59299 - DNA, 25 bp, Canis familiaris
cacacacgcaatggaatactcagcc

SEQ ID NO: 59300 - DNA, 25 bp, Canis familiaris
cacacactaacatactatcagctcg

SEQ ID NO: 59301 - DNA, 25 bp, Canis familiaris
cacatcctactgtcaagtacctctg

SEQ ID NO: 59302 - DNA, 25 bp, Canis familiaris
cacatgtcgccgacagagacgcctc

SEQ ID NO: 59303 - DNA, 25 bp, Canis familiaris
cacagatccctgaggttcagctcac

SEQ ID NO: 59304 - DNA, 25 bp, Canis familiaris
cacagatatccatgcctgttttaca

SEQ ID NO: 59305 - DNA, 25 bp, Canis familiaris
cacaatgatccttggggtcttctca

SEQ ID NO: 59306 - DNA, 25 bp, Canis familiaris
cacaagtcactaaggagctcttcaa

SEQ ID NO: 59307 - DNA, 25 bp, Canis familiaris
cacaagatcctaacaactcctcgtg

SEQ ID NO: 59308 - DNA, 25 bp, Canis familiaris
cacagagatcctaaaaccctcgtcc

SEQ ID NO: 59309 - DNA, 25 bp, Canis familiaris
cacaaaccttgtaaaccttcgcaca

SEQ ID NO: 59310 - DNA, 25 bp, Canis familiaris
cacaatcccttggctaaatttcaaa

SEQ ID NO: 59311 - DNA, 25 bp, Canis familiaris
cactcccacttttttgacttcaaga

SEQ ID NO: 59312 - DNA, 25 bp, Canis familiaris
cactctccatttctcttatgttaaa

SEQ ID NO: 59313 - DNA, 25 bp, Canis familiaris
cacttccaatttcttcggttcaagt

SEQ ID NO: 59314 - DNA, 25 bp, Canis familiaris
caccccaattcactttgggcacctg

SEQ ID NO: 59315 - DNA, 25 bp, Canis familiaris
cacacccaaatcaattacgtccagt

SEQ ID NO: 59316 - DNA, 25 bp, Canis familiaris
cacactctcaagatttagacctagt

SEQ ID NO: 59317 - DNA, 25 bp, Canis familiaris
cacacaccacaggtttttgcctgag

SEQ ID NO: 59318 - DNA, 25 bp, Canis familiaris
cacacagcacaagctgttcctgctc

SEQ ID NO: 59319 - DNA, 25 bp, Canis familiaris
cacaccacacatttgtatgcttctc

SEQ ID NO: 59320 - DNA, 25 bp, Canis familiaris
cacaactctgctttgatcctatgtt

SEQ ID NO: 59321 - DNA, 25 bp, Canis familiaris
cacaagcctgctgggtcgttttata

SEQ ID NO: 59322 - DNA, 25 bp, Canis familiaris
cacaagccttgtggcctttatgcca

SEQ ID NO: 59323 - DNA, 25 bp, Canis familiaris
cacaatccccatggcttattatcca

SEQ ID NO: 59324 - DNA, 25 bp, Canis familiaris
cacacacgcaaatgttattcagcca

SEQ ID NO: 59325 - DNA, 25 bp, Canis familiaris
cacacactcaaatgctacattctaa

SEQ ID NO: 59326 - DNA, 25 bp, Canis familiaris
cacacacatcaatatctccttaacc

SEQ ID NO: 59327 - DNA, 25 bp, Canis familiaris
cacacactcaatcgtacgtgtatat

SEQ ID NO: 59328 - DNA, 25 bp, Canis familiaris
cacaacctcatcctatcattataat

SEQ ID NO: 59329 - DNA, 25 bp, Canis familiaris
cacaatctgccatgtcctaaaatgt

SEQ ID NO: 59330 - DNA, 25 bp, Canis familiaris
cacacactccataccgcaaagattt

SEQ ID NO: 59331 - DNA, 25 bp, Canis familiaris
cacactctccacagacagaggttcc

SEQ ID NO: 59332 - DNA, 25 bp, Canis familiaris
cactcatcttaacgacaggggatgt

SEQ ID NO: 59333 - DNA, 25 bp, Canis familiaris
caccatcaaaagcaattccggagga

SEQ ID NO: 59334 - DNA, 25 bp, Canis familiaris
cacactgaataataattctctgggc

SEQ ID NO: 59335 - DNA, 25 bp, Canis familiaris
cacactggacaagaatcctctatta

SEQ ID NO: 59336 - DNA, 25 bp, Canis familiaris
cacagggacaggaaacagtttgcta

SEQ ID NO: 59337 - DNA, 25 bp, Canis familiaris
cacggggggaaatggttgaggcaca

SEQ ID NO: 59338 - DNA, 25 bp, Canis familiaris
cacggggaggggtggttcagcctct

SEQ ID NO: 59339 - DNA, 25 bp, Canis familiaris
cacaggaagggaggccggaatcggt

SEQ ID NO: 59340 - DNA, 25 bp, Canis familiaris
cacagagctcatgggacaccgggtg

SEQ ID NO: 59341 - DNA, 25 bp, Canis familiaris
cacagcagtgaggctgccaggcggc

SEQ ID NO: 59342 - DNA, 25 bp, Canis familiaris
cacacactgagagccaggcacatgt

SEQ ID NO: 59343 - DNA, 25 bp, Canis familiaris
cacacacagaaagctgcgcactctc

SEQ ID NO: 59344 - DNA, 25 bp, Canis familiaris
cacacacagaaaaggccaccagact

SEQ ID NO: 59345 - DNA, 25 bp, Canis familiaris
cacatgttactattggccatccagg

SEQ ID NO: 59346 - DNA, 25 bp, Canis familiaris
cacttctagacatgtcctggcaggg

SEQ ID NO: 59347 - DNA, 25 bp, Canis familiaris
cacttgcagcagcaactgttgcggg

SEQ ID NO: 59348 - DNA, 25 bp, Canis familiaris
cacatatgcacctgacttagggcaa

SEQ ID NO: 59349 - DNA, 25 bp, Canis familiaris
cacacctgcgcactgactaagtgga

SEQ ID NO: 59350 - DNA, 25 bp, Canis familiaris
cacatgctcctattcaccaatggga

SEQ ID NO: 59351 - DNA, 25 bp, Canis familiaris
cacagctactaggcccattgagggg

SEQ ID NO: 59352 - DNA, 25 bp, Canis familiaris
caccttcttgccagttagtgagggg

SEQ ID NO: 59353 - DNA, 25 bp, Canis familiaris
cacactggctctgctagttggtatg

SEQ ID NO: 59354 - DNA, 25 bp, Canis familiaris
caaattgcttagatgtgtgtgtgtg

SEQ ID NO: 59355 - DNA, 25 bp, Canis familiaris
caaattgttcagcccacagttggta

SEQ ID NO: 59356 - DNA, 25 bp, Canis familiaris
caaatttgctccccaacctggagag

SEQ ID NO: 59357 - DNA, 25 bp, Canis familiaris
caaattcgtcgccaaaaatcaaagc

SEQ ID NO: 59358 - DNA, 25 bp, Canis familiaris
cacacttctgttccaaatactaaag

SEQ ID NO: 59359 - DNA, 25 bp, Canis familiaris
cacactttttctttaactatactct

SEQ ID NO: 59360 - DNA, 25 bp, Canis familiaris
cactcttaaacatcataaaagcctc

SEQ ID NO: 59361 - DNA, 25 bp, Canis familiaris
cactttccccaacacatagtttatt

SEQ ID NO: 59362 - DNA, 25 bp, Canis familiaris
cagtttccctatttccaagttacat

SEQ ID NO: 59363 - DNA, 25 bp, Canis familiaris
cagttcccgttgtccaaagagtaca

SEQ ID NO: 59364 - DNA, 25 bp, Canis familiaris
cacagtcccagtatcctctaggaaa

SEQ ID NO: 59365 - DNA, 25 bp, Canis familiaris
cacaggcaatgcattctaatctgga

SEQ ID NO: 59366 - DNA, 25 bp, Canis familiaris
cacacgcacacagttctggacagac

SEQ ID NO: 59367 - DNA, 25 bp, Canis familiaris
cacactgacagtaatgcatgaacga

SEQ ID NO: 59368 - DNA, 25 bp, Canis familiaris
cacactgacagtcctagcatccagg

SEQ ID NO: 59369 - DNA, 25 bp, Canis familiaris
cacacagagcagtcactcgatgccc

SEQ ID NO: 59370 - DNA, 25 bp, Canis familiaris
cacataccagattctcgatcagccc

SEQ ID NO: 59371 - DNA, 25 bp, Canis familiaris
cacaatgaaatactacatagccata

SEQ ID NO: 59372 - DNA, 25 bp, Canis familiaris
cacagtggaatgtgactcagccatt

SEQ ID NO: 59373 - DNA, 25 bp, Canis familiaris
cacacgcaaatgttattcagccatt

SEQ ID NO: 59374 - DNA, 25 bp, Canis familiaris
cacactaacatctttgctaatatct

SEQ ID NO: 59375 - DNA, 25 bp, Canis familiaris
cacacaagacacattgccagtgcac

SEQ ID NO: 59376 - DNA, 25 bp, Canis familiaris
cacacagaggcagagacacaggcag

SEQ ID NO: 59377 - DNA, 25 bp, Canis familiaris
cacacagagatagagcacagaacag

SEQ ID NO: 59378 - DNA, 25 bp, Canis familiaris
cacacagagatagacacaagccaga

SEQ ID NO: 59379 - DNA, 25 bp, Canis familiaris
cacacagttagcccacacggataga

SEQ ID NO: 59380 - DNA, 25 bp, Canis familiaris
cacacagttcgtcacacgtgggacc

SEQ ID NO: 59381 - DNA, 25 bp, Canis familiaris
cacacttctgggcacacgggaatga

SEQ ID NO: 59382 - DNA, 25 bp, Canis familiaris
cacagttctggacagacggactcaa

SEQ ID NO: 59383 - DNA, 25 bp, Canis familiaris
cacagctccgtgccaaagctaacta

SEQ ID NO: 59384 - DNA, 25 bp, Canis familiaris
cacagtcctctccaagtcatgaaat

SEQ ID NO: 59385 - DNA, 25 bp, Canis familiaris
cacagaccctcacagaacagtacaa

SEQ ID NO: 59386 - DNA, 25 bp, Canis familiaris
cacacacgcccagaaacataaaatg

SEQ ID NO: 59387 - DNA, 25 bp, Canis familiaris
cactaccccagcaactaaacaaagt

SEQ ID NO: 59388 - DNA, 25 bp, Canis familiaris
cagtaactacaatctgaaacaagat

SEQ ID NO: 59389 - DNA, 25 bp, Canis familiaris
cactatattaattttgcccaaagat

SEQ ID NO: 59390 - DNA, 25 bp, Canis familiaris
cagcttaaaatttcccaacgaatgt

SEQ ID NO: 59391 - DNA, 25 bp, Canis familiaris
cacttaagcctttgggtaatattgt

SEQ ID NO: 59392 - DNA, 25 bp, Canis familiaris
cacttaacagtttttggtctttatg

SEQ ID NO: 59393 - DNA, 25 bp, Canis familiaris
cacattctaatgaggttcgatcttt

SEQ ID NO: 59394 - DNA, 25 bp, Canis familiaris
cacagccgaagcacgttctgtcgag

SEQ ID NO: 59395 - DNA, 25 bp, Canis familiaris
cacaccacaagatccttcttctgat

SEQ ID NO: 59396 - DNA, 25 bp, Canis familiaris
cacaagcacaaatctttcccactag

SEQ ID NO: 59397 - DNA, 25 bp, Canis familiaris
cactgaccaaatccttaaccttagc

SEQ ID NO: 59398 - DNA, 25 bp, Canis familiaris
cactagtctacttttacacactttc

SEQ ID NO: 59399 - DNA, 25 bp, Canis familiaris
cactacctacctttcacagacgtgg

SEQ ID NO: 59400 - DNA, 25 bp, Canis familiaris
cacaacctacctatctgcattcagg

SEQ ID NO: 59401 - DNA, 25 bp, Canis familiaris
cacaaccatctcattcctattcgag

SEQ ID NO: 59402 - DNA, 25 bp, Canis familiaris
cactcgatgcctagttcgctaatcg

SEQ ID NO: 59403 - DNA, 25 bp, Canis familiaris
cactttgactagattcgttggcccc

SEQ ID NO: 59404 - DNA, 25 bp, Canis familiaris
cagacttactttctccattggaacc

SEQ ID NO: 59405 - DNA, 25 bp, Canis familiaris
cacacattgcccttttctcagggaa

SEQ ID NO: 59406 - DNA, 25 bp, Canis familiaris
cacacttctgcctcttgcaagattg

SEQ ID NO: 59407 - DNA, 25 bp, Canis familiaris
cacactcctgtgtacactgaagaat

SEQ ID NO: 59408 - DNA, 25 bp, Canis familiaris
cacactcagcgaaccacagcagaaa

SEQ ID NO: 59409 - DNA, 25 bp, Canis familiaris
cacttcccaacccgcagatttgggg

SEQ ID NO: 59410 - DNA, 25 bp, Canis familiaris
cacttcccaggtggccctggtgagg

SEQ ID NO: 59411 - DNA, 25 bp, Canis familiaris
cacttaatgatgctttatctggggg

SEQ ID NO: 59412 - DNA, 25 bp, Canis familiaris
cacaagatcttggtgttatctggga

SEQ ID NO: 59413 - DNA, 25 bp, Canis familiaris
cacaatgtcttgcatgttgtctcaa

SEQ ID NO: 59414 - DNA, 25 bp, Canis familiaris
cacagagctcttagagcttcgccaa

SEQ ID NO: 59415 - DNA, 25 bp, Canis familiaris
cacagagctgtccgacttctagaca

SEQ ID NO: 59416 - DNA, 25 bp, Canis familiaris
cacaggtgatccgagctttagccga

SEQ ID NO: 59417 - DNA, 25 bp, Canis familiaris
cacaggagtctctattttttcgtaa

SEQ ID NO: 59418 - DNA, 25 bp, Canis familiaris
cacaagagttccttttttccacatc

SEQ ID NO: 59419 - DNA, 25 bp, Canis familiaris
cacaagggttcctttttctgcacat

SEQ ID NO: 59420 - DNA, 25 bp, Canis familiaris
cacaggggtttctcttgggagcaga

SEQ ID NO: 59421 - DNA, 25 bp, Canis familiaris
cacagggctggtagaccctggccag

SEQ ID NO: 59422 - DNA, 25 bp, Canis familiaris
ctcagggggttgtgacggtgccctt

SEQ ID NO: 59423 - DNA, 25 bp, Canis familiaris
cacaagagggttccgtgcggcagtc

SEQ ID NO: 59424 - DNA, 25 bp, Canis familiaris
cacaagagggcttggggcgtggggt

SEQ ID NO: 59425 - DNA, 25 bp, Canis familiaris
cacagtggtattggggaggtggggc

SEQ ID NO: 59426 - DNA, 25 bp, Canis familiaris
ctcagtgaactatagggtgggggcc

SEQ ID NO: 59427 - DNA, 25 bp, Canis familiaris
ctcggccaaaaagagtgctccgggc

SEQ ID NO: 59428 - DNA, 25 bp, Canis familiaris
cagggcccagttcaagttccctggc

SEQ ID NO: 59429 - DNA, 25 bp, Canis familiaris
catggacccgtagtaacatttccga

SEQ ID NO: 59430 - DNA, 25 bp, Canis familiaris
cagattccaccaatataaattcccg

SEQ ID NO: 59431 - DNA, 25 bp, Canis familiaris
cacttcttccataaaaaatcacaag

SEQ ID NO: 59432 - DNA, 25 bp, Canis familiaris
cacacacttctgttccaaatactaa

SEQ ID NO: 59433 - DNA, 25 bp, Canis familiaris
cacatcacgttttaaagtcacttaa

SEQ ID NO: 59434 - DNA, 25 bp, Canis familiaris
cacacacgtgtttctaaaaactatc

SEQ ID NO: 59435 - DNA, 25 bp, Canis familiaris
cacacactgggctcctaaaagcatc

SEQ ID NO: 59436 - DNA, 25 bp, Canis familiaris
cacaccatcagtcttctacataaat

SEQ ID NO: 59437 - DNA, 25 bp, Canis familiaris
cacacccctctttcaggctaaaaat

SEQ ID NO: 59438 - DNA, 25 bp, Canis familiaris
cacaccccccaccaggtgaaagata

SEQ ID NO: 59439 - DNA, 25 bp, Canis familiaris
cacacacccgttcagggagcacagt

SEQ ID NO: 59440 - DNA, 25 bp, Canis familiaris
cacaaagcacttgtcagaggaagag

SEQ ID NO: 59441 - DNA, 25 bp, Canis familiaris
cacaagcactgttccagagggaaga

SEQ ID NO: 59442 - DNA, 25 bp, Canis familiaris
cacagagactgttgcctagaggcct

SEQ ID NO: 59443 - DNA, 25 bp, Canis familiaris
cacagatcgtgaacctagatggcat

SEQ ID NO: 59444 - DNA, 25 bp, Canis familiaris
cacagattgatgaactatgcgggct

SEQ ID NO: 59445 - DNA, 25 bp, Canis familiaris
cacagaattgactttgcagctacta

SEQ ID NO: 59446 - DNA, 25 bp, Canis familiaris
cacaaaggacttactgatactggaa

SEQ ID NO: 59447 - DNA, 25 bp, Canis familiaris
cacaacaggtttttgcacatctgca

SEQ ID NO: 59448 - DNA, 25 bp, Canis familiaris
cacaaagattttaggcgcacagagg

SEQ ID NO: 59449 - DNA, 25 bp, Canis familiaris
cacacaacactctgcatgggcacag

SEQ ID NO: 59450 - DNA, 25 bp, Canis familiaris
cacacacaggccactgggcaaggtc

SEQ ID NO: 59451 - DNA, 25 bp, Canis familiaris
cacaacatggacactctgctggaga

SEQ ID NO: 59452 - DNA, 25 bp, Canis familiaris
cacacactaatctccattggagaca

SEQ ID NO: 59453 - DNA, 25 bp, Canis familiaris
cacacctacacattccaggaggcac

SEQ ID NO: 59454 - DNA, 25 bp, Canis familiaris
cacacgggccttcagagaggcctgc

SEQ ID NO: 59455 - DNA, 25 bp, Canis familiaris
cacactgtgcccatctacgagggct

SEQ ID NO: 59456 - DNA, 25 bp, Canis familiaris
cacaagagcccaagtacgagcctgc

SEQ ID NO: 59457 - DNA, 25 bp, Canis familiaris
cacaaagcacagcggatgggcaccc

SEQ ID NO: 59458 - DNA, 25 bp, Canis familiaris
cacacacagaaaatgggggagccac

SEQ ID NO: 59459 - DNA, 25 bp, Canis familiaris
cacaacacaacaagggaacatcccc

SEQ ID NO: 59460 - DNA, 25 bp, Canis familiaris
cacaccactagtcggggtgtgcccc

SEQ ID NO: 59461 - DNA, 25 bp, Canis familiaris
cacactgcctgacatgtagggcccc

SEQ ID NO: 59462 - DNA, 25 bp, Canis familiaris
cacacggctgatctcggagacacac

SEQ ID NO: 59463 - DNA, 25 bp, Canis familiaris
cacagcgatcgaagtacaggaccac

SEQ ID NO: 59464 - DNA, 25 bp, Canis familiaris
cacaggtggaccgagccagacctgc

SEQ ID NO: 59465 - DNA, 25 bp, Canis familiaris
cacaggcatgtacactgagaacgct

SEQ ID NO: 59466 - DNA, 25 bp, Canis familiaris
cacagacatgtacactttctctctc

SEQ ID NO: 59467 - DNA, 25 bp, Canis familiaris
cacagcgatgttctctcctgtttaa

SEQ ID NO: 59468 - DNA, 25 bp, Canis familiaris
cacacctggcttagcacagctggat

SEQ ID NO: 59469 - DNA, 25 bp, Canis familiaris
cacacactccatgagcactcagaag

SEQ ID NO: 59470 - DNA, 25 bp, Canis familiaris
cacacactcatatagacatatatag

SEQ ID NO: 59471 - DNA, 25 bp, Canis familiaris
cacacacacagatagtcatactatt

SEQ ID NO: 59472 - DNA, 25 bp, Canis familiaris
cacacagcacacatacacatactct

SEQ ID NO: 59473 - DNA, 25 bp, Canis familiaris
cacatcagactcatgacaaatgtcc

SEQ ID NO: 59474 - DNA, 25 bp, Canis familiaris
cacacacgcatgctcacaaatagcc

SEQ ID NO: 59475 - DNA, 25 bp, Canis familiaris
cacacacggagctacagagattcca

SEQ ID NO: 59476 - DNA, 25 bp, Canis familiaris
cacacacgtgcacacgcatgaacac

SEQ ID NO: 59477 - DNA, 25 bp, Canis familiaris
cacacacacacagaggcagagacac

SEQ ID NO: 59478 - DNA, 25 bp, Canis familiaris
cacacaacaccactcggtgatgctc

SEQ ID NO: 59479 - DNA, 25 bp, Canis familiaris
cacacacatacccacacgtatgtat

SEQ ID NO: 59480 - DNA, 25 bp, Canis familiaris
cacacaatcctcatccattggttca

SEQ ID NO: 59481 - DNA, 25 bp, Canis familiaris
cacagtacctgctatttctggtcca

SEQ ID NO: 59482 - DNA, 25 bp, Canis familiaris
cacatggacaaggtgattctggtac

SEQ ID NO: 59483 - DNA, 25 bp, Canis familiaris
cacaggcacaggggaacacgcaagc

SEQ ID NO: 59484 - DNA, 25 bp, Canis familiaris
caccccagagggcctcaactaggcc

SEQ ID NO: 59485 - DNA, 25 bp, Canis familiaris
cacaccttgggtgccagaggggcct

SEQ ID NO: 59486 - DNA, 25 bp, Canis familiaris
cacaccctgagcctggctgcagggt

SEQ ID NO: 59487 - DNA, 25 bp, Canis familiaris
cacacgcttagcctagcgctatcgg

SEQ ID NO: 59488 - DNA, 25 bp, Canis familiaris
cacaccgtacgtactctcaagagtt

SEQ ID NO: 59489 - DNA, 25 bp, Canis familiaris
cacactcagggggtcctctagagtc

SEQ ID NO: 59490 - DNA, 25 bp, Canis familiaris
cacactcggggatgacccactgtga

SEQ ID NO: 59491 - DNA, 25 bp, Canis familiaris
cacaggggagggtgagccagtgcgc

SEQ ID NO: 59492 - DNA, 25 bp, Canis familiaris
cacattgggaggccctcctagggct

SEQ ID NO: 59493 - DNA, 25 bp, Canis familiaris
cacatttgccaagtcctcttgggcc

SEQ ID NO: 59494 - DNA, 25 bp, Canis familiaris
cacatcgtgacatacctctttaagc

SEQ ID NO: 59495 - DNA, 25 bp, Canis familiaris
cacacgtacacaactttatggtctc

SEQ ID NO: 59496 - DNA, 25 bp, Canis familiaris
cacaggctgatgagagttttggttt

SEQ ID NO: 59497 - DNA, 25 bp, Canis familiaris
cacagcagctggggagactcttccg

SEQ ID NO: 59498 - DNA, 25 bp, Canis familiaris
cacagcaggtgtgtatccgctcctg

SEQ ID NO: 59499 - DNA, 25 bp, Canis familiaris
cacacactgtgtgattccactttgt

SEQ ID NO: 59500 - DNA, 25 bp, Canis familiaris
cacattttgcttatccattactggt

SEQ ID NO: 59501 - DNA, 25 bp, Canis familiaris
cacatttggacaaaccttatgggtt

SEQ ID NO: 59502 - DNA, 25 bp, Canis familiaris
cacatttggaataaacagcttcgtg

SEQ ID NO: 59503 - DNA, 25 bp, Canis familiaris
cacattattcttacaaactgtcggt

SEQ ID NO: 59504 - DNA, 25 bp, Canis familiaris
cacattgtcttgcttaacatggcag

SEQ ID NO: 59505 - DNA, 25 bp, Canis familiaris
cacaacatagagcattatactcagc

SEQ ID NO: 59506 - DNA, 25 bp, Canis familiaris
cacacttcatgaggcatattaaatg

SEQ ID NO: 59507 - DNA, 25 bp, Canis familiaris
cacacacacacagatagtcatacta

SEQ ID NO: 59508 - DNA, 25 bp, Canis familiaris
cacacacagatagtcatactattta

SEQ ID NO: 59509 - DNA, 25 bp, Canis familiaris
cacagacagctagtcattagctatt

SEQ ID NO: 59510 - DNA, 25 bp, Canis familiaris
cacagaagatgactatgctggcgtc

SEQ ID NO: 59511 - DNA, 25 bp, Canis familiaris
cacagaaagcaggcatctccgtctt

SEQ ID NO: 59512 - DNA, 25 bp, Canis familiaris
cacagcaaggagacatggccgacat

SEQ ID NO: 59513 - DNA, 25 bp, Canis familiaris
cacacatacatatatggctgccaca

SEQ ID NO: 59514 - DNA, 25 bp, Canis familiaris
cacagtacatgatgctggagcagac

SEQ ID NO: 59515 - DNA, 25 bp, Canis familiaris
cacagagtcagatgtgcggccctgt

SEQ ID NO: 59516 - DNA, 25 bp, Canis familiaris
cacagatgcctgtgtggtgctttcc

SEQ ID NO: 59517 - DNA, 25 bp, Canis familiaris
cacatgcatgcacgtggtggcttct

SEQ ID NO: 59518 - DNA, 25 bp, Canis familiaris
cacagcatcacaggtgtcggctgct

SEQ ID NO: 59519 - DNA, 25 bp, Canis familiaris
cacaggctgcatggcagtggctggt

SEQ ID NO: 59520 - DNA, 25 bp, Canis familiaris
cacacgtgcatggaggtctgggagg

SEQ ID NO: 59521 - DNA, 25 bp, Canis familiaris
cacacctgggcgctgtggtgatggc

SEQ ID NO: 59522 - DNA, 25 bp, Canis familiaris
cacacctgccaccagcagtgagggg

SEQ ID NO: 59523 - DNA, 25 bp, Canis familiaris
cacagcctgcgcagccaggagtgta

SEQ ID NO: 59524 - DNA, 25 bp, Canis familiaris
cacagctccgtgagagagagtgcac

SEQ ID NO: 59525 - DNA, 25 bp, Canis familiaris
cacagcccctggggctcacagactg

SEQ ID NO: 59526 - DNA, 25 bp, Canis familiaris
cacatacccggagtcccagatagac

SEQ ID NO: 59527 - DNA, 25 bp, Canis familiaris
cacagagcccggatccatcaaaggc

SEQ ID NO: 59528 - DNA, 25 bp, Canis familiaris
cacatagcacccgttctgatagaac

SEQ ID NO: 59529 - DNA, 25 bp, Canis familiaris
cacagaccactggatgtgagtaaac

SEQ ID NO: 59530 - DNA, 25 bp, Canis familiaris
cacacagctagtgagtgatgagcca

SEQ ID NO: 59531 - DNA, 25 bp, Canis familiaris
cacacagggtgatgagcagcgccga

SEQ ID NO: 59532 - DNA, 25 bp, Canis familiaris
cacacagggtgacacagcattcaca

SEQ ID NO: 59533 - DNA, 25 bp, Canis familiaris
cacacaggggacaacagcatgcaac

SEQ ID NO: 59534 - DNA, 25 bp, Canis familiaris
cacaccctgtgaaattcagcacacc

SEQ ID NO: 59535 - DNA, 25 bp, Canis familiaris
cacagatgcactgacacatgtaccc

SEQ ID NO: 59536 - DNA, 25 bp, Canis familiaris
cacagacatctgaagactcgcacca

SEQ ID NO: 59537 - DNA, 25 bp, Canis familiaris
cacacatgcacaaggactcgcaggc

SEQ ID NO: 59538 - DNA, 25 bp, Canis familiaris
cacacatgagaacactggtggccca

SEQ ID NO: 59539 - DNA, 25 bp, Canis familiaris
cacaccaaaggcgagcagggcctct

SEQ ID NO: 59540 - DNA, 25 bp, Canis familiaris
cacaccctcaggtctgaaggcctga

SEQ ID NO: 59541 - DNA, 25 bp, Canis familiaris
cacaccccgatgttgtaatccaatg

SEQ ID NO: 59542 - DNA, 25 bp, Canis familiaris
cacaccatccaattttttccttgtt

SEQ ID NO: 59543 - DNA, 25 bp, Canis familiaris
cacaccccaccgatgattgtttgtt

SEQ ID NO: 59544 - DNA, 25 bp, Canis familiaris
cacacacccatcagaatttttgggt

SEQ ID NO: 59545 - DNA, 25 bp, Canis familiaris
cacacaccactagatgattttattc

SEQ ID NO: 59546 - DNA, 25 bp, Canis familiaris
cacacccactaggatagctttaaac

SEQ ID NO: 59547 - DNA, 25 bp, Canis familiaris
cacacctactaggatggctgttatc

SEQ ID NO: 59548 - DNA, 25 bp, Canis familiaris
cacaggtcaccacgtggatttctgc

SEQ ID NO: 59549 - DNA, 25 bp, Canis familiaris
cacaggataccatgtcaacctcgct

SEQ ID NO: 59550 - DNA, 25 bp, Canis familiaris
cacagagaaacatgcctacacgccc

SEQ ID NO: 59551 - DNA, 25 bp, Canis familiaris
cacacagaaaaggccaccagactcc

SEQ ID NO: 59552 - DNA, 25 bp, Canis familiaris
cacacagtgaaagccactttctcaa

SEQ ID NO: 59553 - DNA, 25 bp, Canis familiaris
cacataggagtgcatccgctttcct

SEQ ID NO: 59554 - DNA, 25 bp, Canis familiaris
cacattggctgtgtccactgttgta

SEQ ID NO: 59555 - DNA, 25 bp, Canis familiaris
cacacaggctgtgtctcacttggtc

SEQ ID NO: 59556 - DNA, 25 bp, Canis familiaris
cacacagagctgtagctccctgcgt

SEQ ID NO: 59557 - DNA, 25 bp, Canis familiaris
cacacactctgaagttctgctggaa

SEQ ID NO: 59558 - DNA, 25 bp, Canis familiaris
cacacactcttcttgttgctgtggg

SEQ ID NO: 59559 - DNA, 25 bp, Canis familiaris
cacacactcttttgtttgttagttg

SEQ ID NO: 59560 - DNA, 25 bp, Canis familiaris
cacacactggtattttacccagttg

SEQ ID NO: 59561 - DNA, 25 bp, Canis familiaris
cactcctgggtatttatcccaaata

SEQ ID NO: 59562 - DNA, 25 bp, Canis familiaris
cacttctcggtgaggctcctcaagt

SEQ ID NO: 59563 - DNA, 25 bp, Canis familiaris
cacttctttgtcggtttcctagact

SEQ ID NO: 59564 - DNA, 25 bp, Canis familiaris
cactgcccttgatggtgtttcttca

SEQ ID NO: 59565 - DNA, 25 bp, Canis familiaris
cactgccatccccagggtttttaat

SEQ ID NO: 59566 - DNA, 25 bp, Canis familiaris
cacagtgtccggtggagtttctgga

SEQ ID NO: 59567 - DNA, 25 bp, Canis familiaris
cacggaactgggaaggctgttttga

SEQ ID NO: 59568 - DNA, 25 bp, Canis familiaris
cacgtaccgtggagaatttcttaca

SEQ ID NO: 59569 - DNA, 25 bp, Canis familiaris
cacagtccagggtcaatgttttgtt

SEQ ID NO: 59570 - DNA, 25 bp, Canis familiaris
cacagtctacttaccaggctttctt

SEQ ID NO: 59571 - DNA, 25 bp, Canis familiaris
cacaggctgattacctaggatttat

SEQ ID NO: 59572 - DNA, 25 bp, Canis familiaris
cacactgcagtgaaccggtatgttg

SEQ ID NO: 59573 - DNA, 25 bp, Canis familiaris
cacacacatgcacacgcggtgattt

SEQ ID NO: 59574 - DNA, 25 bp, Canis familiaris
cacacagctcgggtgcgggatatcg

SEQ ID NO: 59575 - DNA, 25 bp, Canis familiaris
cacaggtgcgtcttctgtggaatgg

SEQ ID NO: 59576 - DNA, 25 bp, Canis familiaris
cacacagctgtgacttgatttgaaa

SEQ ID NO: 59577 - DNA, 25 bp, Canis familiaris
cacacctctctctgtttgaagacaa

SEQ ID NO: 59578 - DNA, 25 bp, Canis familiaris
cacacgttgtaggtgtaactgtcac

SEQ ID NO: 59579 - DNA, 25 bp, Canis familiaris
cacatagccttaatggtaccgtaat

SEQ ID NO: 59580 - DNA, 25 bp, Canis familiaris
cactactttgttcctgacacttgga

SEQ ID NO: 59581 - DNA, 25 bp, Canis familiaris
cacttggggatctttgacacttgaa

SEQ ID NO: 59582 - DNA, 25 bp, Canis familiaris
cactgtgttgtattttaccccgaat

SEQ ID NO: 59583 - DNA, 25 bp, Canis familiaris
cacatgtgaagtattacacacacac

SEQ ID NO: 59584 - DNA, 25 bp, Canis familiaris
cacaggaattcccaaagcagccagc

SEQ ID NO: 59585 - DNA, 25 bp, Canis familiaris
cacagccatttctggaagcacgagt

SEQ ID NO: 59586 - DNA, 25 bp, Canis familiaris
cacaggcttctctgagggcctggtg

SEQ ID NO: 59587 - DNA, 25 bp, Canis familiaris
cacaggttccagggacggatggctg

SEQ ID NO: 59588 - DNA, 25 bp, Canis familiaris
cacagcctgtcactgggagggaggg

SEQ ID NO: 59589 - DNA, 25 bp, Canis familiaris
cacagtcctcaaaggtggaacggag

SEQ ID NO: 59590 - DNA, 25 bp, Canis familiaris
cacactctcagccagaggaggaatc

SEQ ID NO: 59591 - DNA, 25 bp, Canis familiaris
cacacactgagctgaggaataatga

SEQ ID NO: 59592 - DNA, 25 bp, Canis familiaris
cacacacgagcttgtttaaatgcaa

SEQ ID NO: 59593 - DNA, 25 bp, Canis familiaris
cacacactgcatgtgtgcttgaaaa

SEQ ID NO: 59594 - DNA, 25 bp, Canis familiaris
cacacaccatgctggcttgaatttc

SEQ ID NO: 59595 - DNA, 25 bp, Canis familiaris
cacagccagagatggtggacattcc

SEQ ID NO: 59596 - DNA, 25 bp, Canis familiaris
cacagtgagttgggttggctctccc

SEQ ID NO: 59597 - DNA, 25 bp, Canis familiaris
cacagtggtaggacttttctcccct

SEQ ID NO: 59598 - DNA, 25 bp, Canis familiaris
cacaggagcaaacggtcttcgtccc

SEQ ID NO: 59599 - DNA, 25 bp, Canis familiaris
cacaggaagacctgcaccactgtcg

SEQ ID NO: 59600 - DNA, 25 bp, Canis familiaris
cacaggaagacctgcaccactgtcg

SEQ ID NO: 59601 - DNA, 25 bp, Canis familiaris
cacaggaaccaattaaatggtcgtt

SEQ ID NO: 59602 - DNA, 25 bp, Canis familiaris
cacggaaccatcctaaatttagtgg

SEQ ID NO: 59603 - DNA, 25 bp, Canis familiaris
cactaaagccccagcacttctagtg

SEQ ID NO: 59604 - DNA, 25 bp, Canis familiaris
cactgtttcctcaaggtagtctatg

SEQ ID NO: 59605 - DNA, 25 bp, Canis familiaris
cacgtttacccatgtcaccatgtga

SEQ ID NO: 59606 - DNA, 25 bp, Canis familiaris
cactttcacggggattcaccatgga

SEQ ID NO: 59607 - DNA, 25 bp, Canis familiaris
cactttacaggaacacaacttggct

SEQ ID NO: 59608 - DNA, 25 bp, Canis familiaris
cactttcaaggagccctttggcacc

SEQ ID NO: 59609 - DNA, 25 bp, Canis familiaris
cctttggggaccacttagcctgtgg

SEQ ID NO: 59610 - DNA, 25 bp, Canis familiaris
cgatgttggggtctacttttcaggg

SEQ ID NO: 59611 - DNA, 25 bp, Canis familiaris
cacatttgtgcgttttacctttgag

SEQ ID NO: 59612 - DNA, 25 bp, Canis familiaris
cactttggactttttgctttagatg

SEQ ID NO: 59613 - DNA, 25 bp, Canis familiaris
cacatgttaactttaggcttgtaca

SEQ ID NO: 59614 - DNA, 25 bp, Canis familiaris
cacaggtggagttctagctccgttc

SEQ ID NO: 59615 - DNA, 25 bp, Canis familiaris
cacagctagtagttcttgctcctgg

SEQ ID NO: 59616 - DNA, 25 bp, Canis familiaris
cacacaggatagtatctcccgcgag

SEQ ID NO: 59617 - DNA, 25 bp, Canis familiaris
cacaggtaagtcaatgccccagagc

SEQ ID NO: 59618 - DNA, 25 bp, Canis familiaris
cacagccaaaacatgtccacaaaca

SEQ ID NO: 59619 - DNA, 25 bp, Canis familiaris
cacaccagaatcatttccacgaaaa

SEQ ID NO: 59620 - DNA, 25 bp, Canis familiaris
cactccaggtttctccagtaaagaa

SEQ ID NO: 59621 - DNA, 25 bp, Canis familiaris
cacatgcgagaggtccactccagta

SEQ ID NO: 59622 - DNA, 25 bp, Canis familiaris
cacatgcagacaccaggtctccagg

SEQ ID NO: 59623 - DNA, 25 bp, Canis familiaris
cacacagcagcaggccaggtacaga

SEQ ID NO: 59624 - DNA, 25 bp, Canis familiaris
cacacagccagtttgggacagagct

SEQ ID NO: 59625 - DNA, 25 bp, Canis familiaris
cacatctgctgcctcaagtggaaga

SEQ ID NO: 59626 - DNA, 25 bp, Canis familiaris
cacactgctctacatgctgtacatc

SEQ ID NO: 59627 - DNA, 25 bp, Canis familiaris
cacacctgctcaacatgctgaacat

SEQ ID NO: 59628 - DNA, 25 bp, Canis familiaris
cacacattgctatttcagaatcatt

SEQ ID NO: 59629 - DNA, 25 bp, Canis familiaris
cacactgtgctattgtcacactctg

SEQ ID NO: 59630 - DNA, 25 bp, Canis familiaris
cacagctgatattagacacacccca

SEQ ID NO: 59631 - DNA, 25 bp, Canis familiaris
cacacagcatcataagatcaccccc

SEQ ID NO: 59632 - DNA, 25 bp, Canis familiaris
cacatctgccatagaagtccaaccc

SEQ ID NO: 59633 - DNA, 25 bp, Canis familiaris
cacatggctttgaaacccacacttt

SEQ ID NO: 59634 - DNA, 25 bp, Canis familiaris
cacagagggatgaactgccccactc

SEQ ID NO: 59635 - DNA, 25 bp, Canis familiaris
cacagcagggctaagcccagcggcc

SEQ ID NO: 59636 - DNA, 25 bp, Canis familiaris
cactcacggcaaattcaacggcaca

SEQ ID NO: 59637 - DNA, 25 bp, Canis familiaris
cactccaagagaagacggggcccgg

SEQ ID NO: 59638 - DNA, 25 bp, Canis familiaris
gaaccaagttcgtgggccactggac

SEQ ID NO: 59639 - DNA, 25 bp, Canis familiaris
cacacataacttcaaggaccactgg

SEQ ID NO: 59640 - DNA, 25 bp, Canis familiaris
cacacttcctctggaaggagcccgc

SEQ ID NO: 59641 - DNA, 25 bp, Canis familiaris
cacacagtcctcaaaggtggaacgg

SEQ ID NO: 59642 - DNA, 25 bp, Canis familiaris
cactcgttcatgcataacttgaaag

SEQ ID NO: 59643 - DNA, 25 bp, Canis familiaris
cactcgttcaaaatccaggtctagc

SEQ ID NO: 59644 - DNA, 25 bp, Canis familiaris
cacactttcctcatccagatttaag

SEQ ID NO: 59645 - DNA, 25 bp, Canis familiaris
cacattttccggcatcagctttaag

SEQ ID NO: 59646 - DNA, 25 bp, Canis familiaris
cacatttctacaccaatcatcatca

SEQ ID NO: 59647 - DNA, 25 bp, Canis familiaris
cacattatttgtcctactagctcct

SEQ ID NO: 59648 - DNA, 25 bp, Canis familiaris
cacattagttctcccagtagtcgac

SEQ ID NO: 59649 - DNA, 25 bp, Canis familiaris
cacattgagtttcccaagctgactg

SEQ ID NO: 59650 - DNA, 25 bp, Canis familiaris
cacattcagtcttctcggtgttctg

SEQ ID NO: 59651 - DNA, 25 bp, Canis familiaris
cacactcattctccttggattcttg

SEQ ID NO: 59652 - DNA, 25 bp, Canis familiaris
cacactacaggccgggagctttggg

SEQ ID NO: 59653 - DNA, 25 bp, Canis familiaris
cacagtcaaggccgagaatgggaag

SEQ ID NO: 59654 - DNA, 25 bp, Canis familiaris
cacagtaaatggtcataatgttcag

SEQ ID NO: 59655 - DNA, 25 bp, Canis familiaris
cacattcccagttcataacctatgc

SEQ ID NO: 59656 - DNA, 25 bp, Canis familiaris
cactttgccaggtttccttactgta

SEQ ID NO: 59657 - DNA, 25 bp, Canis familiaris
cacttagtcaagtctgtggcttact

SEQ ID NO: 59658 - DNA, 25 bp, Canis familiaris
cactcgatggcttacttgacttatt

SEQ ID NO: 59659 - DNA, 25 bp, Canis familiaris
cactaaggctatctttttctctcct

SEQ ID NO: 59660 - DNA, 25 bp, Canis familiaris
cactatattcatatttttaccccca

SEQ ID NO: 59661 - DNA, 25 bp, Canis familiaris
cactattcttgtgttttccagacca

SEQ ID NO: 59662 - DNA, 25 bp, Canis familiaris
cactcacacattgtttggggaccca

SEQ ID NO: 59663 - DNA, 25 bp, Canis familiaris
cactagaaaactgcgctgggggcca

SEQ ID NO: 59664 - DNA, 25 bp, Canis familiaris
cactcagtagagtccactctggggg

SEQ ID NO: 59665 - DNA, 25 bp, Canis familiaris
cactagtaagtccctccagattcgg

SEQ ID NO: 59666 - DNA, 25 bp, Canis familiaris
cactagtaaactatcactgcactga

SEQ ID NO: 59667 - DNA, 25 bp, Canis familiaris
cacataggaccacttttgccactat

SEQ ID NO: 59668 - DNA, 25 bp, Canis familiaris
cacataggagtcctttcctctgttc

SEQ ID NO: 59669 - DNA, 25 bp, Canis familiaris
cacagatgggtgttttgcccttccg

SEQ ID NO: 59670 - DNA, 25 bp, Canis familiaris
cacagttggtgatttctccactctt

SEQ ID NO: 59671 - DNA, 25 bp, Canis familiaris
cacatttgtttctctctcaactaaa

SEQ ID NO: 59672 - DNA, 25 bp, Canis familiaris
cacatttttgtaacactcaggaaaa

SEQ ID NO: 59673 - DNA, 25 bp, Canis familiaris
cacattttgtaacactcagaaaata

SEQ ID NO: 59674 - DNA, 25 bp, Canis familiaris
cactttctgaaatacttgtctcaaa

SEQ ID NO: 59675 - DNA, 25 bp, Canis familiaris
cacatttcgttatgagcttttctca

SEQ ID NO: 59676 - DNA, 25 bp, Canis familiaris
cacacagtcgtgaaacagttttgcg

SEQ ID NO: 59677 - DNA, 25 bp, Canis familiaris
cacacagtgctgttagggttagcat

SEQ ID NO: 59678 - DNA, 25 bp, Canis familiaris
cacacagtgtcctgtcattctggct

SEQ ID NO: 59679 - DNA, 25 bp, Canis familiaris
cacagagttctctttcatttgccta

SEQ ID NO: 59680 - DNA, 25 bp, Canis familiaris
cacacgcctctcatttggagtcatt

SEQ ID NO: 59681 - DNA, 25 bp, Canis familiaris
cacacgtcatctcatcttaactatt

SEQ ID NO: 59682 - DNA, 25 bp, Canis familiaris
cacactctcacagcatctagtacta

SEQ ID NO: 59683 - DNA, 25 bp, Canis familiaris
cacatatatgcatcctgtaatcctc

SEQ ID NO: 59684 - DNA, 25 bp, Canis familiaris
cacacatacatacactaagcagtct

SEQ ID NO: 59685 - DNA, 25 bp, Canis familiaris
cacactcacacacactatagctgac

SEQ ID NO: 59686 - DNA, 25 bp, Canis familiaris
cacactggccagcactgcaatgtag

SEQ ID NO: 59687 - DNA, 25 bp, Canis familiaris
cacagtctgtcccagctgattttgt

SEQ ID NO: 59688 - DNA, 25 bp, Canis familiaris
cacagagctgtggccagttctcgtg

SEQ ID NO: 59689 - DNA, 25 bp, Canis familiaris
cacagagctgggcagattctggaga

SEQ ID NO: 59690 - DNA, 25 bp, Canis familiaris
cacagtgtatgtcaactgcccagat

SEQ ID NO: 59691 - DNA, 25 bp, Canis familiaris
cacactgtgtgtgggagccccatgt

SEQ ID NO: 59692 - DNA, 25 bp, Canis familiaris
cacttgtggtcggtccaggcagtgt

SEQ ID NO: 59693 - DNA, 25 bp, Canis familiaris
cacttctggtggctactggtgtctc

SEQ ID NO: 59694 - DNA, 25 bp, Canis familiaris
cactccaggggcctaaggcacttca

SEQ ID NO: 59695 - DNA, 25 bp, Canis familiaris
cactgcaaggcctcagcgaggactt

SEQ ID NO: 59696 - DNA, 25 bp, Canis familiaris
cactcacaggagtccaggggagccc

SEQ ID NO: 59697 - DNA, 25 bp, Canis familiaris
cacagccaaaaccgaggcgagccct

SEQ ID NO: 59698 - DNA, 25 bp, Canis familiaris
cacaggcagcaaactggatggaact

SEQ ID NO: 59699 - DNA, 25 bp, Canis familiaris
cacatgggcatactcggctgtgaca

SEQ ID NO: 59700 - DNA, 25 bp, Canis familiaris
cacagtccaagcaggcagtgtaagc

SEQ ID NO: 59701 - DNA, 25 bp, Canis familiaris
cacactctccgaatggggtataccg

SEQ ID NO: 59702 - DNA, 25 bp, Canis familiaris
cacttcctccaaagatggtttcctt

SEQ ID NO: 59703 - DNA, 25 bp, Canis familiaris
cactttcctcctattgtgttcttta

SEQ ID NO: 59704 - DNA, 25 bp, Canis familiaris
cacttaccttctctgattgtttttc

SEQ ID NO: 59705 - DNA, 25 bp, Canis familiaris
cacttacatgtttgttgttgttgtt

SEQ ID NO: 59706 - DNA, 25 bp, Canis familiaris
cacactgatcatcttccttttttgt

SEQ ID NO: 59707 - DNA, 25 bp, Canis familiaris
cacagctggaggttccctgagtttg

SEQ ID NO: 59708 - DNA, 25 bp, Canis familiaris
cacgtggaaagctcctgtctgttgg

SEQ ID NO: 59709 - DNA, 25 bp, Canis familiaris
cacaggggagacttcccgtgtacac

SEQ ID NO: 59710 - DNA, 25 bp, Canis familiaris
cacaggaacaactgccggtgatact

SEQ ID NO: 59711 - DNA, 25 bp, Canis familiaris
cacagaggacacttcagccttggac

SEQ ID NO: 59712 - DNA, 25 bp, Canis familiaris
cacagggaagcaatgtctctctgaa

SEQ ID NO: 59713 - DNA, 25 bp, Canis familiaris
cacaggccacattcatgtctacgat

SEQ ID NO: 59714 - DNA, 25 bp, Canis familiaris
cacaggtctcttaatcacactgaag

SEQ ID NO: 59715 - DNA, 25 bp, Canis familiaris
cacatagcctgttagtgcaacccag

SEQ ID NO: 59716 - DNA, 25 bp, Canis familiaris
cactcacttgtctaagaattcagct

SEQ ID NO: 59717 - DNA, 25 bp, Canis familiaris
cacatagctttcctcaagattcctc

SEQ ID NO: 59718 - DNA, 25 bp, Canis familiaris
cactcgtgttggaccaaccagacgg

SEQ ID NO: 59719 - DNA, 25 bp, Canis familiaris
cactagtgacccacagtcacaaagg

SEQ ID NO: 59720 - DNA, 25 bp, Canis familiaris
cacttggaccgaacaacgggagcct

SEQ ID NO: 59721 - DNA, 25 bp, Canis familiaris
cacattggcccaaataaagttgaaa

SEQ ID NO: 59722 - DNA, 25 bp, Canis familiaris
cacactggtccccaatgcaaggtga

SEQ ID NO: 59723 - DNA, 25 bp, Canis familiaris
cacactgagctgcccagagagcggg

SEQ ID NO: 59724 - DNA, 25 bp, Canis familiaris
cacagcttgctgagcatgcagtgtg

SEQ ID NO: 59725 - DNA, 25 bp, Canis familiaris
cacagctagctgatacatggcatat

SEQ ID NO: 59726 - DNA, 25 bp, Canis familiaris
cacagccgcttgacaatgcagatct

SEQ ID NO: 59727 - DNA, 25 bp, Canis familiaris
cacatccctctgaagcagcagcata

SEQ ID NO: 59728 - DNA, 25 bp, Canis familiaris
cacatcctgcttactcaggccatgt

SEQ ID NO: 59729 - DNA, 25 bp, Canis familiaris
cacactctgtgtttcttgcactgag

SEQ ID NO: 59730 - DNA, 25 bp, Canis familiaris
cacagtctagtaatgctctcggcag

SEQ ID NO: 59731 - DNA, 25 bp, Canis familiaris
cacagttcattttgctgatcctgat

SEQ ID NO: 59732 - DNA, 25 bp, Canis familiaris
cacagtttcctgtttgcacatgttt

SEQ ID NO: 59733 - DNA, 25 bp, Canis familiaris
cacagtttctttttgatcatttttt

SEQ ID NO: 59734 - DNA, 25 bp, Canis familiaris
cacagttgtcccactacattcaaat

SEQ ID NO: 59735 - DNA, 25 bp, Canis familiaris
cacagtctgacagcttctacttcgt

SEQ ID NO: 59736 - DNA, 25 bp, Canis familiaris
cacagtctcacagtttccactaatg

SEQ ID NO: 59737 - DNA, 25 bp, Canis familiaris
cacagttcactgttaacattgcttg

SEQ ID NO: 59738 - DNA, 25 bp, Canis familiaris
cacaggtcctgggaaatttgctcaa

SEQ ID NO: 59739 - DNA, 25 bp, Canis familiaris
cacagccacgctgctggcaagttgc

SEQ ID NO: 59740 - DNA, 25 bp, Canis familiaris
cacatgcccgtgccaactaacatgt

SEQ ID NO: 59741 - DNA, 25 bp, Canis familiaris
cacagcctcagacctgagtttctgt

SEQ ID NO: 59742 - DNA, 25 bp, Canis familiaris
cacactgctcattgcctgagatgtt

SEQ ID NO: 59743 - DNA, 25 bp, Canis familiaris
cacagctcacattgcttgcaagttt

SEQ ID NO: 59744 - DNA, 25 bp, Canis familiaris
cacagcttcctcatgaacttttcta

SEQ ID NO: 59745 - DNA, 25 bp, Canis familiaris
cacagcgcaccctgaggctgtagtt

SEQ ID NO: 59746 - DNA, 25 bp, Canis familiaris
cacagacagccccggtggggttggg

SEQ ID NO: 59747 - DNA, 25 bp, Canis familiaris
cacagacacgcggtggttcggtgag

SEQ ID NO: 59748 - DNA, 25 bp, Canis familiaris
cacagtcaccacgtcgatgatcagg

SEQ ID NO: 59749 - DNA, 25 bp, Canis familiaris
cacagccccacaggactgtcagggc

SEQ ID NO: 59750 - DNA, 25 bp, Canis familiaris
cacaccccacgttcttaatcacgtg

SEQ ID NO: 59751 - DNA, 25 bp, Canis familiaris
cacaccctcagactactaatacaca

SEQ ID NO: 59752 - DNA, 25 bp, Canis familiaris
cacacctcatctgtaccaatggaag

SEQ ID NO: 59753 - DNA, 25 bp, Canis familiaris
cacatgccctttctaaatggaacat

SEQ ID NO: 59754 - DNA, 25 bp, Canis familiaris
cacatgcccttctccaataaaacaa

SEQ ID NO: 59755 - DNA, 25 bp, Canis familiaris
cactctctatcctctcagataacat

SEQ ID NO: 59756 - DNA, 25 bp, Canis familiaris
cactgccttgtctacatctgaaaaa

SEQ ID NO: 59757 - DNA, 25 bp, Canis familiaris
cacaccttgctcaacaccagagagt

SEQ ID NO: 59758 - DNA, 25 bp, Canis familiaris
cacatgccattgacaaccacagatc

SEQ ID NO: 59759 - DNA, 25 bp, Canis familiaris
cacaggtatatctcccagatcggtg

SEQ ID NO: 59760 - DNA, 25 bp, Canis familiaris
cacaggtcttccacgagatcctgga

SEQ ID NO: 59761 - DNA, 25 bp, Canis familiaris
cacaggccttccgaaaatgcgcggc

SEQ ID NO: 59762 - DNA, 25 bp, Canis familiaris
cacatgtgaattccaacgttgacgt

SEQ ID NO: 59763 - DNA, 25 bp, Canis familiaris
cacattgcagatactaacccttggt

SEQ ID NO: 59764 - DNA, 25 bp, Canis familiaris
cactaagtggcctaccgttgtgcct

SEQ ID NO: 59765 - DNA, 25 bp, Canis familiaris
cactaaggctgttactacctgccct

SEQ ID NO: 59766 - DNA, 25 bp, Canis familiaris
cacatcggttggtagtagcccgcct

SEQ ID NO: 59767 - DNA, 25 bp, Canis familiaris
cacaggcggtcaaagttcccgtctt

SEQ ID NO: 59768 - DNA, 25 bp, Canis familiaris
cacatggtggcgtgcagttccacgg

SEQ ID NO: 59769 - DNA, 25 bp, Canis familiaris
cacaggtgggaggcactggctcccc

SEQ ID NO: 59770 - DNA, 25 bp, Canis familiaris
cacagagagggacagacgcccctcc

SEQ ID NO: 59771 - DNA, 25 bp, Canis familiaris
cacagggggctgagacccctctatc

SEQ ID NO: 59772 - DNA, 25 bp, Canis familiaris
cacaggggcctgggagccagggttg

SEQ ID NO: 59773 - DNA, 25 bp, Canis familiaris
cacatggtggcctcggctgaggagg

SEQ ID NO: 59774 - DNA, 25 bp, Canis familiaris
cacatgggccccaaagctggttgag

SEQ ID NO: 59775 - DNA, 25 bp, Canis familiaris
cacagaggcagcaacggagtgtctt

SEQ ID NO: 59776 - DNA, 25 bp, Canis familiaris
cacagagctgaagcaggtggcttac

SEQ ID NO: 59777 - DNA, 25 bp, Canis familiaris
cacagacatgacgcctggttgtgcc

SEQ ID NO: 59778 - DNA, 25 bp, Canis familiaris
cacagagtgaccacgagctcttgga

SEQ ID NO: 59779 - DNA, 25 bp, Canis familiaris
cacgggacaagtgacccgcgcaact

SEQ ID NO: 59780 - DNA, 25 bp, Canis familiaris
cacagggtaagggaccagcgcgggg

SEQ ID NO: 59781 - DNA, 25 bp, Canis familiaris
cacaggttcaaagacccaaaggttg

SEQ ID NO: 59782 - DNA, 25 bp, Canis familiaris
cacaggtttaaatcccaagaccatg

SEQ ID NO: 59783 - DNA, 25 bp, Canis familiaris
cacaggtgcttctcacccaaatatc

SEQ ID NO: 59784 - DNA, 25 bp, Canis familiaris
cacaggttgtgtgcacaccgttgtg

SEQ ID NO: 59785 - DNA, 25 bp, Canis familiaris
gacggtagctgtgaaccttggcttc

SEQ ID NO: 59786 - DNA, 25 bp, Canis familiaris
cactagtggattggaagcctcatga

SEQ ID NO: 59787 - DNA, 25 bp, Canis familiaris
cacatagtcaacccaagcccatgac

SEQ ID NO: 59788 - DNA, 25 bp, Canis familiaris
cacatacacacagccaaggcaaaag

SEQ ID NO: 59789 - DNA, 25 bp, Canis familiaris
cactaccggccctggatcaataagg

SEQ ID NO: 59790 - DNA, 25 bp, Canis familiaris
cactttaacccacgcttcaatgaag

SEQ ID NO: 59791 - DNA, 25 bp, Canis familiaris
cactttccacccctcaggaataggt

SEQ ID NO: 59792 - DNA, 25 bp, Canis familiaris
cactgtctatcagtacgtcggcaat

SEQ ID NO: 59793 - DNA, 25 bp, Canis familiaris
cactacaaactgttgccgtgcagtt

SEQ ID NO: 59794 - DNA, 25 bp, Canis familiaris
cactaaccagagagctgctgtgctt

SEQ ID NO: 59795 - DNA, 25 bp, Canis familiaris
cacattaccagcttgtctacacttg

SEQ ID NO: 59796 - DNA, 25 bp, Canis familiaris
cactgctactcagtagtcccaagtg

SEQ ID NO: 59797 - DNA, 25 bp, Canis familiaris
cacttagccgctgtctcgccgtgtc

SEQ ID NO: 59798 - DNA, 25 bp, Canis familiaris
cacaccccagatgttggccaattgc

SEQ ID NO: 59799 - DNA, 25 bp, Canis familiaris
cactcccaatgtgaacccaacagct

SEQ ID NO: 59800 - DNA, 25 bp, Canis familiaris
cacgcccaagaacacccaaattggg

SEQ ID NO: 59801 - DNA, 25 bp, Canis familiaris
cacggcaggaaaccaagctctaatt

SEQ ID NO: 59802 - DNA, 25 bp, Canis familiaris
cacccaggaaactgacctcttcttt

SEQ ID NO: 59803 - DNA, 25 bp, Canis familiaris
cacccgtgggaatatcaccttttga

SEQ ID NO: 59804 - DNA, 25 bp, Canis familiaris
catgtcggtcggactcttaattttt

SEQ ID NO: 59805 - DNA, 25 bp, Canis familiaris
cagtaggttggattcctaagttctt

SEQ ID NO: 59806 - DNA, 25 bp, Canis familiaris
cagatatcgtctctattcaaagtat

SEQ ID NO: 59807 - DNA, 25 bp, Canis familiaris
cagtagcagatgccgttcaaaaggt

SEQ ID NO: 59808 - DNA, 25 bp, Canis familiaris
cactctctgagatgctgtaaaaggg

SEQ ID NO: 59809 - DNA, 25 bp, Canis familiaris
cactgttcagcaggctgttggaagc

SEQ ID NO: 59810 - DNA, 25 bp, Canis familiaris
cacatggtgccactctgcataggga

SEQ ID NO: 59811 - DNA, 25 bp, Canis familiaris
cacagcgcctgagctgcagggcgag

SEQ ID NO: 59812 - DNA, 25 bp, Canis familiaris
cacagtacagcagtcctggaggatg

SEQ ID NO: 59813 - DNA, 25 bp, Canis familiaris
cacatgattatggtccggaggacca

SEQ ID NO: 59814 - DNA, 25 bp, Canis familiaris
cacagagcgggttcagtgagggcca

SEQ ID NO: 59815 - DNA, 25 bp, Canis familiaris
cacagctgggcgtgagatgaagtct

SEQ ID NO: 59816 - DNA, 25 bp, Canis familiaris
cactgggtcgaccggaagctcgacg

SEQ ID NO: 59817 - DNA, 25 bp, Canis familiaris
cacagggctcggggaaactctgctg

SEQ ID NO: 59818 - DNA, 25 bp, Canis familiaris
cacagggcctggggcagctagtggg

SEQ ID NO: 59819 - DNA, 25 bp, Canis familiaris
cacagcccgggccaggcaagggctg

SEQ ID NO: 59820 - DNA, 25 bp, Canis familiaris
cacagccagcgtcaaggaagcggcc

SEQ ID NO: 59821 - DNA, 25 bp, Canis familiaris
cacagacgtgtgccagagagagagg

SEQ ID NO: 59822 - DNA, 25 bp, Canis familiaris
cacagaggtgcccatggagcgcgtg

SEQ ID NO: 59823 - DNA, 25 bp, Canis familiaris
cacaggagagcccgcaagcaaggat

SEQ ID NO: 59824 - DNA, 25 bp, Canis familiaris
cacagtaacacgccaacagctcagt

SEQ ID NO: 59825 - DNA, 25 bp, Canis familiaris
cacagtgaacactgcttcccgaatg

SEQ ID NO: 59826 - DNA, 25 bp, Canis familiaris
cacaggcaacaccctttttgaagtt

SEQ ID NO: 59827 - DNA, 25 bp, Canis familiaris
cacaggcaagaacctagtcaccctt

SEQ ID NO: 59828 - DNA, 25 bp, Canis familiaris
cactagacaggtccttgacccagct

SEQ ID NO: 59829 - DNA, 25 bp, Canis familiaris
cactggaaggccttcggcctactat

SEQ ID NO: 59830 - DNA, 25 bp, Canis familiaris
cactagagttccattgtgcctacta

SEQ ID NO: 59831 - DNA, 25 bp, Canis familiaris
cacatccaattcgacttggcctggc

SEQ ID NO: 59832 - DNA, 25 bp, Canis familiaris
cacagggagttccttggcctgatcc

SEQ ID NO: 59833 - DNA, 25 bp, Canis familiaris
cacaggatggttctcactgcctggc

SEQ ID NO: 59834 - DNA, 25 bp, Canis familiaris
cacaggatgtctgtgtcagccctca

SEQ ID NO: 59835 - DNA, 25 bp, Canis familiaris
cacagtggctattatgtctccctgc

SEQ ID NO: 59836 - DNA, 25 bp, Canis familiaris
cacagggatcatgaatgcccctccc

SEQ ID NO: 59837 - DNA, 25 bp, Canis familiaris
cacagtagctttatgccaacttccc

SEQ ID NO: 59838 - DNA, 25 bp, Canis familiaris
cacagctctcctattgaaacttgcc

SEQ ID NO: 59839 - DNA, 25 bp, Canis familiaris
cactgctatgcctgttgtcaactag

SEQ ID NO: 59840 - DNA, 25 bp, Canis familiaris
cactgcgacgaggttggcttcaatg

SEQ ID NO: 59841 - DNA, 25 bp, Canis familiaris
cactggacagggaaggtatggagaa

SEQ ID NO: 59842 - DNA, 25 bp, Canis familiaris
cacatatcctagcttctggacctga

SEQ ID NO: 59843 - DNA, 25 bp, Canis familiaris
cacagatcactaagcttcagaacct

SEQ ID NO: 59844 - DNA, 25 bp, Canis familiaris
cacagacacatctgctctctataac

SEQ ID NO: 59845 - DNA, 25 bp, Canis familiaris
cacagcataacaggccttgtgccag

SEQ ID NO: 59846 - DNA, 25 bp, Canis familiaris
cactcaatcacagccatttctggaa

SEQ ID NO: 59847 - DNA, 25 bp, Canis familiaris
cactcactctggacctaacttgaaa

SEQ ID NO: 59848 - DNA, 25 bp, Canis familiaris
cacatcccggtcatatagtctggcc

SEQ ID NO: 59849 - DNA, 25 bp, Canis familiaris
cacagcctccgtatatagcatcaga

SEQ ID NO: 59850 - DNA, 25 bp, Canis familiaris
cacagcctcctgatgcgttgaaaat

SEQ ID NO: 59851 - DNA, 25 bp, Canis familiaris
cactcattcacgttgtgttaaaata

SEQ ID NO: 59852 - DNA, 25 bp, Canis familiaris
cactattcgtttccttcattactat

SEQ ID NO: 59853 - DNA, 25 bp, Canis familiaris
cacttttgagtaccatggattaata

SEQ ID NO: 59854 - DNA, 25 bp, Canis familiaris
cacatctttccctcacgatagaata

SEQ ID NO: 59855 - DNA, 25 bp, Canis familiaris
cacttctgtcccttaggtcaggtgc

SEQ ID NO: 59856 - DNA, 25 bp, Canis familiaris
cacgtcgttcgactgggtaggagcc

SEQ ID NO: 59857 - DNA, 25 bp, Canis familiaris
cacagtgttgtctggtggtaccacc

SEQ ID NO: 59858 - DNA, 25 bp, Canis familiaris
cacagtgttgtctggtggtaccacc

SEQ ID NO: 59859 - DNA, 25 bp, Canis familiaris
cacagttttcgctctggtgaatgca

SEQ ID NO: 59860 - DNA, 25 bp, Canis familiaris
cactttctggccactgagagaatct

SEQ ID NO: 59861 - DNA, 25 bp, Canis familiaris
cactatggtatggacgctaagcgtt

SEQ ID NO: 59862 - DNA, 25 bp, Canis familiaris
cactgctgtaaggaagaaaccatta

SEQ ID NO: 59863 - DNA, 25 bp, Canis familiaris
cactcttcagagatcggataccaat

SEQ ID NO: 59864 - DNA, 25 bp, Canis familiaris
cacatttatgcactttgtatccccc

SEQ ID NO: 59865 - DNA, 25 bp, Canis familiaris
cactgctgtacatttttaactcccc

SEQ ID NO: 59866 - DNA, 25 bp, Canis familiaris
cactggtgactttaaccatgcccct

SEQ ID NO: 59867 - DNA, 25 bp, Canis familiaris
cacggtgtctactaacgaccaacat

SEQ ID NO: 59868 - DNA, 25 bp, Canis familiaris
cacgctgggtacaacccagaaagct

SEQ ID NO: 59869 - DNA, 25 bp, Canis familiaris
cacgggttttacggctgaagcagca

SEQ ID NO: 59870 - DNA, 25 bp, Canis familiaris
caccggttctttcgagtggacaggt

SEQ ID NO: 59871 - DNA, 25 bp, Canis familiaris
caccctatgtacctgtgggaagagg

SEQ ID NO: 59872 - DNA, 25 bp, Canis familiaris
cactttgggcacctgtgtgtgaaat

SEQ ID NO: 59873 - DNA, 25 bp, Canis familiaris
cactataggaaccaggtgtgtacaa

SEQ ID NO: 59874 - DNA, 25 bp, Canis familiaris
cacttagaatcccttttactcaaca

SEQ ID NO: 59875 - DNA, 25 bp, Canis familiaris
cactgtagctagtcttttataccat

SEQ ID NO: 59876 - DNA, 25 bp, Canis familiaris
cacattctggtacttgtatatacct

SEQ ID NO: 59877 - DNA, 25 bp, Canis familiaris
cacattccttgcatattataatcct

SEQ ID NO: 59878 - DNA, 25 bp, Canis familiaris
cacttctctttttttgacacagctg

SEQ ID NO: 59879 - DNA, 25 bp, Canis familiaris
cactttgcttctcttggacacggtg

SEQ ID NO: 59880 - DNA, 25 bp, Canis familiaris
cacttttactaacttgcctgggtca

SEQ ID NO: 59881 - DNA, 25 bp, Canis familiaris
cacttttataagccctggtggggat

SEQ ID NO: 59882 - DNA, 25 bp, Canis familiaris
cacttttacaagccgcaaaggcagc

SEQ ID NO: 59883 - DNA, 25 bp, Canis familiaris
cacttttgcagattgggtaacacag

SEQ ID NO: 59884 - DNA, 25 bp, Canis familiaris
cacttatttgtacagcatgacccag

SEQ ID NO: 59885 - DNA, 25 bp, Canis familiaris
cacatggtttgttcaagcacactta

SEQ ID NO: 59886 - DNA, 25 bp, Canis familiaris
cacagacctgtttcaagtactcaag

SEQ ID NO: 59887 - DNA, 25 bp, Canis familiaris
cacagtttagtgtcacttgcccaga

SEQ ID NO: 59888 - DNA, 25 bp, Canis familiaris
cacagttaacgttcttgtcagcatt

SEQ ID NO: 59889 - DNA, 25 bp, Canis familiaris
cacagtctgcaaacgtcttgctcaa

SEQ ID NO: 59890 - DNA, 25 bp, Canis familiaris
cactgtcatcagaatctgtcggcca

SEQ ID NO: 59891 - DNA, 25 bp, Canis familiaris
cacttatcatcaaggaatgcccatt

SEQ ID NO: 59892 - DNA, 25 bp, Canis familiaris
cactttgcccagtaatgctgccatc

SEQ ID NO: 59893 - DNA, 25 bp, Canis familiaris
cactcttgcgctcatgacttaacat

SEQ ID NO: 59894 - DNA, 25 bp, Canis familiaris
cacatcttgcctctgggtctcagag

SEQ ID NO: 59895 - DNA, 25 bp, Canis familiaris
cacatttctgcttttcgacctagaa

SEQ ID NO: 59896 - DNA, 25 bp, Canis familiaris
cacatattcatctcttgccaaataa

SEQ ID NO: 59897 - DNA, 25 bp, Canis familiaris
cacttaatatcacttgctcaaatct

SEQ ID NO: 59898 - DNA, 25 bp, Canis familiaris
cacttagaggaaatgtgcacacagt

SEQ ID NO: 59899 - DNA, 25 bp, Canis familiaris
cacatggcagatggacctggccctg

SEQ ID NO: 59900 - DNA, 25 bp, Canis familiaris
cacatgtagacgtggccgctgtgtt

SEQ ID NO: 59901 - DNA, 25 bp, Canis familiaris
cacatgttttgaagatgcacagctg

SEQ ID NO: 59902 - DNA, 25 bp, Canis familiaris
cacatgctttgtacagcgcagcggg

SEQ ID NO: 59903 - DNA, 25 bp, Canis familiaris
cacatccaaggaaggcagcaggcgc

SEQ ID NO: 59904 - DNA, 25 bp, Canis familiaris
cacatctgcagaccacgtgtcaggc

SEQ ID NO: 59905 - DNA, 25 bp, Canis familiaris
cacattgcagagcccagtgctgggt

SEQ ID NO: 59906 - DNA, 25 bp, Canis familiaris
cacatctcatgggcacaaccgagat

SEQ ID NO: 59907 - DNA, 25 bp, Canis familiaris
cacatcatcagcgcgcaagagggca

SEQ ID NO: 59908 - DNA, 25 bp, Canis familiaris
cacatctcccgcaacaaggaacagg

SEQ ID NO: 59909 - DNA, 25 bp, Canis familiaris
cacatctcccaataagggtcacact

SEQ ID NO: 59910 - DNA, 25 bp, Canis familiaris
cacatttccaaaactgggatccatt

SEQ ID NO: 59911 - DNA, 25 bp, Canis familiaris
cactttcccataagctgtgtgaaga

SEQ ID NO: 59912 - DNA, 25 bp, Canis familiaris
cacttctactgctattatgttaaaa

SEQ ID NO: 59913 - DNA, 25 bp, Canis familiaris
cacattcaactggaggtctttataa

SEQ ID NO: 59914 - DNA, 25 bp, Canis familiaris
cacttgccacatcagagctcttgga

SEQ ID NO: 59915 - DNA, 25 bp, Canis familiaris
cacttatcagcacattgatcgctgg

SEQ ID NO: 59916 - DNA, 25 bp, Canis familiaris
cactcagtagatccatctgggggtg

SEQ ID NO: 59917 - DNA, 25 bp, Canis familiaris
cactcagtaatgttttgtggcctct

SEQ ID NO: 59918 - DNA, 25 bp, Canis familiaris
cacagggaatgcttttcatcctctc

SEQ ID NO: 59919 - DNA, 25 bp, Canis familiaris
cacagggacaagtggagcctctcgg

SEQ ID NO: 59920 - DNA, 25 bp, Canis familiaris
cacagagagacccacggagtcactc

SEQ ID NO: 59921 - DNA, 25 bp, Canis familiaris
cacaggaaccaactctagacatcat

SEQ ID NO: 59922 - DNA, 25 bp, Canis familiaris
cacatggaaacatgctatgaccatt

SEQ ID NO: 59923 - DNA, 25 bp, Canis familiaris
cacagggatacttctgagttttgtc

SEQ ID NO: 59924 - DNA, 25 bp, Canis familiaris
cacatgttgagagtccggttgctgc

SEQ ID NO: 59925 - DNA, 25 bp, Canis familiaris
cacatgtactgagcccttgcagctc

SEQ ID NO: 59926 - DNA, 25 bp, Canis familiaris
cacagatcctcaggaccatctcagg

SEQ ID NO: 59927 - DNA, 25 bp, Canis familiaris
cacataccatatgatcctctagagt

SEQ ID NO: 59928 - DNA, 25 bp, Canis familiaris
cacttccatgtacccctataggtaa

SEQ ID NO: 59929 - DNA, 25 bp, Canis familiaris
cacttcctgacacccatgtcaagga

SEQ ID NO: 59930 - DNA, 25 bp, Canis familiaris
cactgatgtctgtgtccaccaagaa

SEQ ID NO: 59931 - DNA, 25 bp, Canis familiaris
cactgtgcttgtttcaacagcaggt

SEQ ID NO: 59932 - DNA, 25 bp, Canis familiaris
cacattgtttgcttaaatggcagac

SEQ ID NO: 59933 - DNA, 25 bp, Canis familiaris
cactagattttgccaactgccaatc

SEQ ID NO: 59934 - DNA, 25 bp, Canis familiaris
cacataaggtttttgctgacattca

SEQ ID NO: 59935 - DNA, 25 bp, Canis familiaris
cactaaggttgttggtgaagctctt

SEQ ID NO: 59936 - DNA, 25 bp, Canis familiaris
cactaagtgttttgagctttccttg

SEQ ID NO: 59937 - DNA, 25 bp, Canis familiaris
cactccctgatttcacactatatca

SEQ ID NO: 59938 - DNA, 25 bp, Canis familiaris
cactcaccatttaatcatttccagc

SEQ ID NO: 59939 - DNA, 25 bp, Canis familiaris
cactatgccatcatcaagtgtcccc

SEQ ID NO: 59940 - DNA, 25 bp, Canis familiaris
cactatgagctttcagaggtccctt

SEQ ID NO: 59941 - DNA, 25 bp, Canis familiaris
cacattggcctagggtgccatgcct

SEQ ID NO: 59942 - DNA, 25 bp, Canis familiaris
cacatgtggcacaggtgaggctcct

SEQ ID NO: 59943 - DNA, 25 bp, Canis familiaris
cacagtgtgcctgggagaacctcgg

SEQ ID NO: 59944 - DNA, 25 bp, Canis familiaris
cacaggtggctgggacaatctcctt

SEQ ID NO: 59945 - DNA, 25 bp, Canis familiaris
cacaggaggtgtgcatcgtccagct

SEQ ID NO: 59946 - DNA, 25 bp, Canis familiaris
cacggggtctcagagtacaccccct

SEQ ID NO: 59947 - DNA, 25 bp, Canis familiaris
cacaggggcttggaagaacccacac

SEQ ID NO: 59948 - DNA, 25 bp, Canis familiaris
cacatgggccttgcgagaacctggc

SEQ ID NO: 59949 - DNA, 25 bp, Canis familiaris
cacaggagctgctgcacaggtaatt

SEQ ID NO: 59950 - DNA, 25 bp, Canis familiaris
cacagtgcctgtgccgatgtattgt

SEQ ID NO: 59951 - DNA, 25 bp, Canis familiaris
cacgtgcctacctgttgttttaagt

SEQ ID NO: 59952 - DNA, 25 bp, Canis familiaris
cacttggcaatccttttgccgggaa

SEQ ID NO: 59953 - DNA, 25 bp, Canis familiaris
cacttcctcatcctttacgtggaac

SEQ ID NO: 59954 - DNA, 25 bp, Canis familiaris
cactccctctctgtgtaggtggttt

SEQ ID NO: 59955 - DNA, 25 bp, Canis familiaris
cactcgtcactttttagtcgagatc

SEQ ID NO: 59956 - DNA, 25 bp, Canis familiaris
cactcagacctttatttgtttcact

SEQ ID NO: 59957 - DNA, 25 bp, Canis familiaris
cactaaccatcttttgtcattgcca

SEQ ID NO: 59958 - DNA, 25 bp, Canis familiaris
cacattcacctttgtctactatcaa

SEQ ID NO: 59959 - DNA, 25 bp, Canis familiaris
cacatgtgcccacttgatttgcttc

SEQ ID NO: 59960 - DNA, 25 bp, Canis familiaris
cacatatgcctgttctgaaggatgt

SEQ ID NO: 59961 - DNA, 25 bp, Canis familiaris
cacatgtcactctgccaaggattgg

SEQ ID NO: 59962 - DNA, 25 bp, Canis familiaris
cacattctccgcgccagaatatgtg

SEQ ID NO: 59963 - DNA, 25 bp, Canis familiaris
cactcttccacggcagctatatatc

SEQ ID NO: 59964 - DNA, 25 bp, Canis familiaris
cactcagtgtcagtgatcactcatt

SEQ ID NO: 59965 - DNA, 25 bp, Canis familiaris
cacttgtgagatgtactgctgctag

SEQ ID NO: 59966 - DNA, 25 bp, Canis familiaris
cacttgctacagtttctctgctgat

SEQ ID NO: 59967 - DNA, 25 bp, Canis familiaris
cactgctgttaggcttccatgagca

SEQ ID NO: 59968 - DNA, 25 bp, Canis familiaris
cactctttgagtaccactggagttt

SEQ ID NO: 59969 - DNA, 25 bp, Canis familiaris
cacttgagtgactaccactggatgt

SEQ ID NO: 59970 - DNA, 25 bp, Canis familiaris
cactatttgacatggatggcgatgg

SEQ ID NO: 59971 - DNA, 25 bp, Canis familiaris
cacttccacacacgagatccgagga

SEQ ID NO: 59972 - DNA, 25 bp, Canis familiaris
caggaccatcaaaaattaaggcaat

SEQ ID NO: 59973 - DNA, 25 bp, Canis familiaris
caggaccatccaaaattaaggccat

SEQ ID NO: 59974 - DNA, 25 bp, Canis familiaris
cacgggatcaataagtttaggtctg

SEQ ID NO: 59975 - DNA, 25 bp, Canis familiaris
cacatgtgtgatattggtttgggat

SEQ ID NO: 59976 - DNA, 25 bp, Canis familiaris
cacgggttttggagtgggagcctca

SEQ ID NO: 59977 - DNA, 25 bp, Canis familiaris
cactggaagttttccaggtggacct

SEQ ID NO: 59978 - DNA, 25 bp, Canis familiaris
cactggtcatgtatacctggtagta

SEQ ID NO: 59979 - DNA, 25 bp, Canis familiaris
cacttgtggaaccccaggatgagat

SEQ ID NO: 59980 - DNA, 25 bp, Canis familiaris
cacttgggagaccaacactctagag

SEQ ID NO: 59981 - DNA, 25 bp, Canis familiaris
cactgtaggaagggcccttgaagct

SEQ ID NO: 59982 - DNA, 25 bp, Canis familiaris
cactgatagaaatgacccccacttg

SEQ ID NO: 59983 - DNA, 25 bp, Canis familiaris
cactgatataaatgacccccacttg

SEQ ID NO: 59984 - DNA, 25 bp, Canis familiaris
cactgtaacacggagaccacccggg

SEQ ID NO: 59985 - DNA, 25 bp, Canis familiaris
cactgagaaccgagaagcgccttgg

SEQ ID NO: 59986 - DNA, 25 bp, Canis familiaris
cacagtgagccccggaaggagttcg

SEQ ID NO: 59987 - DNA, 25 bp, Canis familiaris
cacagtgggcccagcagagggcgac

SEQ ID NO: 59988 - DNA, 25 bp, Canis familiaris
cacaggggacaacagcatgcaacag

SEQ ID NO: 59989 - DNA, 25 bp, Canis familiaris
cacggggattcaccatggaagagat

SEQ ID NO: 59990 - DNA, 25 bp, Canis familiaris
cagacgggttcgactaaggatgttc

SEQ ID NO: 59991 - DNA, 25 bp, Canis familiaris
cacttgggtttgagaagcttgcttc

SEQ ID NO: 59992 - DNA, 25 bp, Canis familiaris
caccttgggttgtggagttcccagc

SEQ ID NO: 59993 - DNA, 25 bp, Canis familiaris
cactctagggacacggtggtcgccc

SEQ ID NO: 59994 - DNA, 25 bp, Canis familiaris
gccataatttacacaggggtccccg

SEQ ID NO: 59995 - DNA, 25 bp, Canis familiaris
gcaaaatttagccacggggaacgat

SEQ ID NO: 59996 - DNA, 25 bp, Canis familiaris
ccagaactctagctctagttaacgt

SEQ ID NO: 59997 - DNA, 25 bp, Canis familiaris
cactaatattgactacaaattaacc

SEQ ID NO: 59998 - DNA, 25 bp, Canis familiaris
cactactattatccacataaacccc

SEQ ID NO: 59999 - DNA, 25 bp, Canis familiaris
cactatgttgtacacatgaaaccaa

SEQ ID NO: 60000 - DNA, 25 bp, Canis familiaris
cactatactgtacatctaaaactaa

SEQ ID NO: 60001 - DNA, 25 bp, Canis familiaris
cacatatttttgttctaaaggtaga

SEQ ID NO: 60002 - DNA, 25 bp, Canis familiaris
cactttcactgtttcctcaaggtag

SEQ ID NO: 60003 - DNA, 25 bp, Canis familiaris
cacttgtccatagttcacattaggt

SEQ ID NO: 60004 - DNA, 25 bp, Canis familiaris
cacatcttcctatccatttatcagt

SEQ ID NO: 60005 - DNA, 25 bp, Canis familiaris
cactttcctatagctgtcctttgtg

SEQ ID NO: 60006 - DNA, 25 bp, Canis familiaris
cacttccctttgacttttggtcatg

SEQ ID NO: 60007 - DNA, 25 bp, Canis familiaris
cacatctccccttcaaatcgggtgt

SEQ ID NO: 60008 - DNA, 25 bp, Canis familiaris
cacatcccagacatcatcaaggtgg

SEQ ID NO: 60009 - DNA, 25 bp, Canis familiaris
cacattccagacatcatcaaggtgg

SEQ ID NO: 60010 - DNA, 25 bp, Canis familiaris
cacttccagactaatctcaagccca

SEQ ID NO: 60011 - DNA, 25 bp, Canis familiaris
cactcattaacttttcactctggcg

SEQ ID NO: 60012 - DNA, 25 bp, Canis familiaris
cactaatattctttccactgttctg

SEQ ID NO: 60013 - DNA, 25 bp, Canis familiaris
cactagacttctatccgtgacctgt

SEQ ID NO: 60014 - DNA, 25 bp, Canis familiaris
cacttgttgattattggttcctggc

SEQ ID NO: 60015 - DNA, 25 bp, Canis familiaris
cactggttgaatgtctgcgttggcc

SEQ ID NO: 60016 - DNA, 25 bp, Canis familiaris
cacgcgtctaactacgagtagacta

SEQ ID NO: 60017 - DNA, 25 bp, Canis familiaris
gacttggccatacacgggggcgatg

SEQ ID NO: 60018 - DNA, 25 bp, Canis familiaris
cagcgtggacattctactggggacc

SEQ ID NO: 60019 - DNA, 25 bp, Canis familiaris
cacgtgggttctagctgcgggaaat

SEQ ID NO: 60020 - DNA, 25 bp, Canis familiaris
cacgtggggggcctggggcaaatga

SEQ ID NO: 60021 - DNA, 25 bp, Canis familiaris
cactgtggttcgccccgaaaagaag

SEQ ID NO: 60022 - DNA, 25 bp, Canis familiaris
cacgttgcagtccgtcactgaaaat

SEQ ID NO: 60023 - DNA, 25 bp, Canis familiaris
cactctgtcgtcctgaattgaccga

SEQ ID NO: 60024 - DNA, 25 bp, Canis familiaris
cactgctgtttccatataagccctt

SEQ ID NO: 60025 - DNA, 25 bp, Canis familiaris
cagctttttccttaactcagatcga

SEQ ID NO: 60026 - DNA, 25 bp, Canis familiaris
cactatattatcgctaatccaacgg

SEQ ID NO: 60027 - DNA, 25 bp, Canis familiaris
cacttgattatttcccactctaggg

SEQ ID NO: 60028 - DNA, 25 bp, Canis familiaris
cacatatgatatatctccccgtggc

SEQ ID NO: 60029 - DNA, 25 bp, Canis familiaris
cacatggataccttccaggtggcgc

SEQ ID NO: 60030 - DNA, 25 bp, Canis familiaris
cacttgtccacttccaaaggcagtt

SEQ ID NO: 60031 - DNA, 25 bp, Canis familiaris
cacttttatcttagttaggatgtgt

SEQ ID NO: 60032 - DNA, 25 bp, Canis familiaris
cacttatttttctgtattgtatgtc

SEQ ID NO: 60033 - DNA, 25 bp, Canis familiaris
cactaattcattcccctattgtttt

SEQ ID NO: 60034 - DNA, 25 bp, Canis familiaris
cactaacttgtggcctctttgtgca

SEQ ID NO: 60035 - DNA, 25 bp, Canis familiaris
cactaccttatggttctgtctgcca

SEQ ID NO: 60036 - DNA, 25 bp, Canis familiaris
cacttcctatcagctcttgttgctg

SEQ ID NO: 60037 - DNA, 25 bp, Canis familiaris
cacatccctgtccttttgttgaggg

SEQ ID NO: 60038 - DNA, 25 bp, Canis familiaris
cactccatcgatgttcttcttcgga

SEQ ID NO: 60039 - DNA, 25 bp, Canis familiaris
cacttgattatctttgctattacaa

SEQ ID NO: 60040 - DNA, 25 bp, Canis familiaris
cacattgtctctttctttagaatag

SEQ ID NO: 60041 - DNA, 25 bp, Canis familiaris
cacatttttcaggttgggtatactt

SEQ ID NO: 60042 - DNA, 25 bp, Canis familiaris
cacatttggctccgttggcaattga

SEQ ID NO: 60043 - DNA, 25 bp, Canis familiaris
cactttgtcacttgtggctgctttg

SEQ ID NO: 60044 - DNA, 25 bp, Canis familiaris
cactttctcacttatcaggaggtcc

SEQ ID NO: 60045 - DNA, 25 bp, Canis familiaris
cactgtacactccatcatcagcaag

SEQ ID NO: 60046 - DNA, 25 bp, Canis familiaris
cacattagtctcctgatccaatcag

SEQ ID NO: 60047 - DNA, 25 bp, Canis familiaris
cacattggcttcagtcaaatcaagg

SEQ ID NO: 60048 - DNA, 25 bp, Canis familiaris
cacattcctctccccaaatgaaagg

SEQ ID NO: 60049 - DNA, 25 bp, Canis familiaris
cacttccactcacctgatatttaag

SEQ ID NO: 60050 - DNA, 25 bp, Canis familiaris
cacattgcccgctgtgtgggtaagg

SEQ ID NO: 60051 - DNA, 25 bp, Canis familiaris
cacaggcacctgtgtgcggggatgt

SEQ ID NO: 60052 - DNA, 25 bp, Canis familiaris
cacatggcaccctctggtggagagc

SEQ ID NO: 60053 - DNA, 25 bp, Canis familiaris
cacaggcgcggctcctgtggaagga

SEQ ID NO: 60054 - DNA, 25 bp, Canis familiaris
cacaggtgctggctgctttggtagg

SEQ ID NO: 60055 - DNA, 25 bp, Canis familiaris
cacaggttgaggttgcttttgaggc

SEQ ID NO: 60056 - DNA, 25 bp, Canis familiaris
cacaggtgccgtcttgttcatgggc

SEQ ID NO: 60057 - DNA, 25 bp, Canis familiaris
cactgaggcggtcattggtgctctg

SEQ ID NO: 60058 - DNA, 25 bp, Canis familiaris
cacttgcagctgtttaacgtgcttg

SEQ ID NO: 60059 - DNA, 25 bp, Canis familiaris
cactcagggtctaaacctcctgcaa

SEQ ID NO: 60060 - DNA, 25 bp, Canis familiaris
cactgggcagatctagaccgcgtgc

SEQ ID NO: 60061 - DNA, 25 bp, Canis familiaris
cacatgccgagacctgagactcagc

SEQ ID NO: 60062 - DNA, 25 bp, Canis familiaris
cacatgccatcccttagattcagag

SEQ ID NO: 60063 - DNA, 25 bp, Canis familiaris
cacatgccaccaactcagagtagcg

SEQ ID NO: 60064 - DNA, 25 bp, Canis familiaris
cacaggcactgcgacgaggttggct

SEQ ID NO: 60065 - DNA, 25 bp, Canis familiaris
cactccactggaggattgatacctg

SEQ ID NO: 60066 - DNA, 25 bp, Canis familiaris
cactgccttgaatgttaacccacgg

SEQ ID NO: 60067 - DNA, 25 bp, Canis familiaris
cttacttacatataacccccagtgc

SEQ ID NO: 60068 - DNA, 25 bp, Canis familiaris
tcatttcctaaacaacccttaggag

SEQ ID NO: 60069 - DNA, 25 bp, Canis familiaris
cacttcctaataccagaccatcaaa

SEQ ID NO: 60070 - DNA, 25 bp, Canis familiaris
cacatcccttactcagaagccagag

SEQ ID NO: 60071 - DNA, 25 bp, Canis familiaris
cactcaaattagtaaagaccaattt

SEQ ID NO: 60072 - DNA, 25 bp, Canis familiaris
cactccaattagtaaagacaaattt

SEQ ID NO: 60073 - DNA, 25 bp, Canis familiaris
cactcctggtcacaattgagaattt

SEQ ID NO: 60074 - DNA, 25 bp, Canis familiaris
cacatcctcggcccttgagaaatgt

SEQ ID NO: 60075 - DNA, 25 bp, Canis familiaris
cactccgcccggagtgaggtgtccc

SEQ ID NO: 60076 - DNA, 25 bp, Canis familiaris
cacataccaccgagggaggacttcc

SEQ ID NO: 60077 - DNA, 25 bp, Canis familiaris
cactacccagggggtgggggctcag

SEQ ID NO: 60078 - DNA, 25 bp, Canis familiaris
cacatacccagtcctggaggaatgg

SEQ ID NO: 60079 - DNA, 25 bp, Canis familiaris
cacatgccgtcggccatgacggtgt

SEQ ID NO: 60080 - DNA, 25 bp, Canis familiaris
cactgctggtgccagtcttgcaggt

SEQ ID NO: 60081 - DNA, 25 bp, Canis familiaris
cactgtagtgacatcctgaggccaa

SEQ ID NO: 60082 - DNA, 25 bp, Canis familiaris
cactgatcagtagagccggagacct

SEQ ID NO: 60083 - DNA, 25 bp, Canis familiaris
cactaattagcttcctgctgcagac

SEQ ID NO: 60084 - DNA, 25 bp, Canis familiaris
cactcagtttgttctctatggtcaa

SEQ ID NO: 60085 - DNA, 25 bp, Canis familiaris
cacattttgaattcttcagtgtaaa

SEQ ID NO: 60086 - DNA, 25 bp, Canis familiaris
cacatttgtgtgtatcctgcctgta

SEQ ID NO: 60087 - DNA, 25 bp, Canis familiaris
cacatattctgtgatgctggccaat

SEQ ID NO: 60088 - DNA, 25 bp, Canis familiaris
cacttccgctgctgcggcagcatat

SEQ ID NO: 60089 - DNA, 25 bp, Canis familiaris
cacttccgctgctgcggcagcatat

SEQ ID NO: 60090 - DNA, 25 bp, Canis familiaris
cactctgttctctgaggcagctaaa

SEQ ID NO: 60091 - DNA, 25 bp, Canis familiaris
cactctgatcccacgtggtcagata

SEQ ID NO: 60092 - DNA, 25 bp, Canis familiaris
cactctgaccccagtcagacctatg

SEQ ID NO: 60093 - DNA, 25 bp, Canis familiaris
cacttgaccccacgaaaccagaggg

SEQ ID NO: 60094 - DNA, 25 bp, Canis familiaris
cacttgacccattcaaaatccacgg

SEQ ID NO: 60095 - DNA, 25 bp, Canis familiaris
cacaggccccaatgagaacctcctg

SEQ ID NO: 60096 - DNA, 25 bp, Canis familiaris
cacaggccagcacctgaggaggccc

SEQ ID NO: 60097 - DNA, 25 bp, Canis familiaris
cacattgccgactgatgaagacagc

SEQ ID NO: 60098 - DNA, 25 bp, Canis familiaris
cacatcgcctggtcacgaggaatcc

SEQ ID NO: 60099 - DNA, 25 bp, Canis familiaris
cacatcgtgcgggaggtggaccggc

SEQ ID NO: 60100 - DNA, 25 bp, Canis familiaris
cacatcgtcgtgcaagcagctgacc

SEQ ID NO: 60101 - DNA, 25 bp, Canis familiaris
cacaggccagataaacagtgcacca

SEQ ID NO: 60102 - DNA, 25 bp, Canis familiaris
cacaggcgaggaccagcttcatgcc

SEQ ID NO: 60103 - DNA, 25 bp, Canis familiaris
cacaggctgagaactcgttcacctc

SEQ ID NO: 60104 - DNA, 25 bp, Canis familiaris
cacaggctgagaactcgttcacctc

SEQ ID NO: 60105 - DNA, 25 bp, Canis familiaris
cacatggatggtgtcctcttcttgc

SEQ ID NO: 60106 - DNA, 25 bp, Canis familiaris
cacatggatggtgtcctcttcttgc

SEQ ID NO: 60107 - DNA, 25 bp, Canis familiaris
cacatgggtgtcttcagtcactccc

SEQ ID NO: 60108 - DNA, 25 bp, Canis familiaris
cactgtgtgcttgtagtgatccccc

SEQ ID NO: 60109 - DNA, 25 bp, Canis familiaris
cactcttcatgtggaagggttctct

SEQ ID NO: 60110 - DNA, 25 bp, Canis familiaris
cacgttcatgtgtaagagagtcttc

SEQ ID NO: 60111 - DNA, 25 bp, Canis familiaris
cactttcatgggacagcctgtcccc

SEQ ID NO: 60112 - DNA, 25 bp, Canis familiaris
cactagtataatacccttacaccct

SEQ ID NO: 60113 - DNA, 25 bp, Canis familiaris
cactcctaaaaccacactacaaact

SEQ ID NO: 60114 - DNA, 25 bp, Canis familiaris
cactctccaaggacctaccaaaagc

SEQ ID NO: 60115 - DNA, 25 bp, Canis familiaris
cacatgcacacaaaaccaaccaaaa

SEQ ID NO: 60116 - DNA, 25 bp, Canis familiaris
cacatacacatgcacacaaaaccaa

SEQ ID NO: 60117 - DNA, 25 bp, Canis familiaris
cacatacacccaacagagtcactat

SEQ ID NO: 60118 - DNA, 25 bp, Canis familiaris
cacatacactgtaaccagactctta

SEQ ID NO: 60119 - DNA, 25 bp, Canis familiaris
cacatccacgctgctggcagagact

SEQ ID NO: 60120 - DNA, 25 bp, Canis familiaris
cacatgagcacagtcctggaggatg

SEQ ID NO: 60121 - DNA, 25 bp, Canis familiaris
cacggcacgctccatgaaagctagg

SEQ ID NO: 60122 - DNA, 25 bp, Canis familiaris
cactggcatcgtgatggactccggt

SEQ ID NO: 60123 - DNA, 25 bp, Canis familiaris
cacttgctcgtccatccctcaagag

SEQ ID NO: 60124 - DNA, 25 bp, Canis familiaris
cacttacgatgcccttgtgcagatg

SEQ ID NO: 60125 - DNA, 25 bp, Canis familiaris
cactctagggctctgcactgaatgg

SEQ ID NO: 60126 - DNA, 25 bp, Canis familiaris
cactctagggctctgcactgaatgg

SEQ ID NO: 60127 - DNA, 25 bp, Canis familiaris
cactctagggctctgcactgaatgg

SEQ ID NO: 60128 - DNA, 25 bp, Canis familiaris
cactcacgggtgaatgatctccagg

SEQ ID NO: 60129 - DNA, 25 bp, Canis familiaris
cactacatgacaggtaacagccaaa

SEQ ID NO: 60130 - DNA, 25 bp, Canis familiaris
cacatgggaccatgacacaccaaac

SEQ ID NO: 60131 - DNA, 25 bp, Canis familiaris
cactgtttcctacttcctgaaagca

SEQ ID NO: 60132 - DNA, 25 bp, Canis familiaris
cgacttaccgaaatgccttacacat

SEQ ID NO: 60133 - DNA, 25 bp, Canis familiaris
cagacttacctagatgcttgagctc

SEQ ID NO: 60134 - DNA, 25 bp, Canis familiaris
cagacgtacggtttgccgagtttat

SEQ ID NO: 60135 - DNA, 25 bp, Canis familiaris
cactgggacggttgtgtctggttta

SEQ ID NO: 60136 - DNA, 25 bp, Canis familiaris
cacccgactagattggtcttttcgt

SEQ ID NO: 60137 - DNA, 25 bp, Canis familiaris
cacccagtcccaaggatcctggttt

SEQ ID NO: 60138 - DNA, 25 bp, Canis familiaris
cacatttgatccgaaggacctcttc

SEQ ID NO: 60139 - DNA, 25 bp, Canis familiaris
cacattcgaccctggaattccagga

SEQ ID NO: 60140 - DNA, 25 bp, Canis familiaris
cactttgaaccagaagcttccaggg

SEQ ID NO: 60141 - DNA, 25 bp, Canis familiaris
cacttctccccagaggagctcaagg

SEQ ID NO: 60142 - DNA, 25 bp, Canis familiaris
cacttctcttcgataaagcccgtgt

SEQ ID NO: 60143 - DNA, 25 bp, Canis familiaris
cacttctctatggatcttactgccc

SEQ ID NO: 60144 - DNA, 25 bp, Canis familiaris
cacattctgcttccacttaactggc

SEQ ID NO: 60145 - DNA, 25 bp, Canis familiaris
cacttctctgctcattaatatctgt

SEQ ID NO: 60146 - DNA, 25 bp, Canis familiaris
cacatacacatatatatacattctt

SEQ ID NO: 60147 - DNA, 25 bp, Canis familiaris
cacatgcaggcttccattatcttta

SEQ ID NO: 60148 - DNA, 25 bp, Canis familiaris
cacatgctgtgtggccaaagctttt

SEQ ID NO: 60149 - DNA, 25 bp, Canis familiaris
cacatgctggactggactgcttttc

SEQ ID NO: 60150 - DNA, 25 bp, Canis familiaris
cacatgtgggcaggtggctccctgt

SEQ ID NO: 60151 - DNA, 25 bp, Canis familiaris
cacattgccagaggtggttcctagt

SEQ ID NO: 60152 - DNA, 25 bp, Canis familiaris
cacatcccaaaggtggagtcttcca

SEQ ID NO: 60153 - DNA, 25 bp, Canis familiaris
cacatctccaaaggggaccattggc

SEQ ID NO: 60154 - DNA, 25 bp, Canis familiaris
cacttccacaagggctggcaacggc

SEQ ID NO: 60155 - DNA, 25 bp, Canis familiaris
cagctgtcaacgagggagtacgtca

SEQ ID NO: 60156 - DNA, 25 bp, Canis familiaris
cactgtaacgttgggaagatggctc

SEQ ID NO: 60157 - DNA, 25 bp, Canis familiaris
cactgggtcgcttagaaagtggtac

SEQ ID NO: 60158 - DNA, 25 bp, Canis familiaris
cacttggtgctgtaagacacgtgga

SEQ ID NO: 60159 - DNA, 25 bp, Canis familiaris
cacggtgggacatggacgatcagga

SEQ ID NO: 60160 - DNA, 25 bp, Canis familiaris
cacggcgggaaggcgacgtggctgc

SEQ ID NO: 60161 - DNA, 25 bp, Canis familiaris
cactggggagggccgaggctgaggc

SEQ ID NO: 60162 - DNA, 25 bp, Canis familiaris
cactggacggattcaggaggccggc

SEQ ID NO: 60163 - DNA, 25 bp, Canis familiaris
cacggaactgaattgaaagccccca

SEQ ID NO: 60164 - DNA, 25 bp, Canis familiaris
cactgagaagcaaaatgcccaaccc

SEQ ID NO: 60165 - DNA, 25 bp, Canis familiaris
cactgagcaagagaggccctatccc

SEQ ID NO: 60166 - DNA, 25 bp, Canis familiaris
cactgagcaaactttgtgagcgtca

SEQ ID NO: 60167 - DNA, 25 bp, Canis familiaris
cactgagctgcattgccttggatcg

SEQ ID NO: 60168 - DNA, 25 bp, Canis familiaris
cacgagctcagtccttcatgatgag

SEQ ID NO: 60169 - DNA, 25 bp, Canis familiaris
cactgagatcagggacatgctgctg

SEQ ID NO: 60170 - DNA, 25 bp, Canis familiaris
cactgaagtgggactcctccactct

SEQ ID NO: 60171 - DNA, 25 bp, Canis familiaris
cactgctggggagtccctgccacac

SEQ ID NO: 60172 - DNA, 25 bp, Canis familiaris
cactcaggtggagattctgccccag

SEQ ID NO: 60173 - DNA, 25 bp, Canis familiaris
cactcggtggacaacgacctcaaga

SEQ ID NO: 60174 - DNA, 25 bp, Canis familiaris
cacgctcgtagagaccacactcaaa

SEQ ID NO: 60175 - DNA, 25 bp, Canis familiaris
cactattatgcagaatccacgccag

SEQ ID NO: 60176 - DNA, 25 bp, Canis familiaris
cactcagctaatgacattgccccaa

SEQ ID NO: 60177 - DNA, 25 bp, Canis familiaris
cactctgctactgcacagagcctcc

SEQ ID NO: 60178 - DNA, 25 bp, Canis familiaris
cactgcgtactggaagggcttcaag

SEQ ID NO: 60179 - DNA, 25 bp, Canis familiaris
cactgggccaggtagggaccacagg

SEQ ID NO: 60180 - DNA, 25 bp, Canis familiaris
ccggggaggtccataccaagacaca

SEQ ID NO: 60181 - DNA, 25 bp, Canis familiaris
cacgcgggaagcttttaccagggca

SEQ ID NO: 60182 - DNA, 25 bp, Canis familiaris
cactcatttattctttcccatggga

SEQ ID NO: 60183 - DNA, 25 bp, Canis familiaris
cactttttatttcctttcatgggct

SEQ ID NO: 60184 - DNA, 25 bp, Canis familiaris
cactcattccttgtagcttttagtc

SEQ ID NO: 60185 - DNA, 25 bp, Canis familiaris
cactttggcttcactgctttagact

SEQ ID NO: 60186 - DNA, 25 bp, Canis familiaris
cacttaccactcactgatttcatga

SEQ ID NO: 60187 - DNA, 25 bp, Canis familiaris
cacggaacaatttcagtgttctgac

SEQ ID NO: 60188 - DNA, 25 bp, Canis familiaris
cacggagagaccacggtccgtgcac

SEQ ID NO: 60189 - DNA, 25 bp, Canis familiaris
cacgaggacccacagtacttgtcca

SEQ ID NO: 60190 - DNA, 25 bp, Canis familiaris
caccgtgtccctaagctaggtctag

SEQ ID NO: 60191 - DNA, 25 bp, Canis familiaris
cactatggggcctggctggggtgag

SEQ ID NO: 60192 - DNA, 25 bp, Canis familiaris
cactggggtgcctcagtggttgggc

SEQ ID NO: 60193 - DNA, 25 bp, Canis familiaris
cacataggggcctcactgagtcccc

SEQ ID NO: 60194 - DNA, 25 bp, Canis familiaris
cacggagggtgctcctgattccgtg

SEQ ID NO: 60195 - DNA, 25 bp, Canis familiaris
cacggggacgtagtttatcacgata

SEQ ID NO: 60196 - DNA, 25 bp, Canis familiaris
cacgggatcgtggaggttgacccaa

SEQ ID NO: 60197 - DNA, 25 bp, Canis familiaris
cacgagacatttcagttcttcccat

SEQ ID NO: 60198 - DNA, 25 bp, Canis familiaris
cactgaacttcagagcatctcccac

SEQ ID NO: 60199 - DNA, 25 bp, Canis familiaris
cactgactctaagagtgtcctgaac

SEQ ID NO: 60200 - DNA, 25 bp, Canis familiaris
cactgtctatcagaaggtcccacac

SEQ ID NO: 60201 - DNA, 25 bp, Canis familiaris
cacttcttctgtgatattccctcac

SEQ ID NO: 60202 - DNA, 25 bp, Canis familiaris
cactttttcaagtttcacctgcatc

SEQ ID NO: 60203 - DNA, 25 bp, Canis familiaris
cactatcttgactaggttattctat

SEQ ID NO: 60204 - DNA, 25 bp, Canis familiaris
cactcttggactgggcggttattga

SEQ ID NO: 60205 - DNA, 25 bp, Canis familiaris
cactcacgaggtgtcggttttaacg

SEQ ID NO: 60206 - DNA, 25 bp, Canis familiaris
tcaattgggactgttaattttaaag

SEQ ID NO: 60207 - DNA, 25 bp, Canis familiaris
cagcattggcaaatggtataatttt

SEQ ID NO: 60208 - DNA, 25 bp, Canis familiaris
cactgtggcctttcttagcattttt

SEQ ID NO: 60209 - DNA, 25 bp, Canis familiaris
cacattggtgctcccttggattgaa

SEQ ID NO: 60210 - DNA, 25 bp, Canis familiaris
cacttgggctgagcgctgggtgata

SEQ ID NO: 60211 - DNA, 25 bp, Canis familiaris
cacatacggctacccaggtggattt

SEQ ID NO: 60212 - DNA, 25 bp, Canis familiaris
gcaaacggtgcgccacaggtaagtt

SEQ ID NO: 60213 - DNA, 25 bp, Canis familiaris
cagagatgggccccgggtaaggtgg

SEQ ID NO: 60214 - DNA, 25 bp, Canis familiaris
catgtggtagcccaggggaaaggaa

SEQ ID NO: 60215 - DNA, 25 bp, Canis familiaris
cactggtcccaaggtgtaaagcttt

SEQ ID NO: 60216 - DNA, 25 bp, Canis familiaris
cactggtcccaggctgttaagtctg

SEQ ID NO: 60217 - DNA, 25 bp, Canis familiaris
cactagccctaactatgtgaagtcc

SEQ ID NO: 60218 - DNA, 25 bp, Canis familiaris
cactggccaaaaccgttcagtcagc

SEQ ID NO: 60219 - DNA, 25 bp, Canis familiaris
cacgctggggaaggcggtcttgagc

SEQ ID NO: 60220 - DNA, 25 bp, Canis familiaris
cactctgggtgaaatgatttcttcc

SEQ ID NO: 60221 - DNA, 25 bp, Canis familiaris
caccggggtttgactgagttccagt

SEQ ID NO: 60222 - DNA, 25 bp, Canis familiaris
cacggagaggatttactgagattta

SEQ ID NO: 60223 - DNA, 25 bp, Canis familiaris
cactggaagccttgtccaaattaat

SEQ ID NO: 60224 - DNA, 25 bp, Canis familiaris
cactggtgatcctggcaaaaatggt

SEQ ID NO: 60225 - DNA, 25 bp, Canis familiaris
cactgggtcctactgctagcaaagg

SEQ ID NO: 60226 - DNA, 25 bp, Canis familiaris
cactagagccctgctggccaagggc

SEQ ID NO: 60227 - DNA, 25 bp, Canis familiaris
cacattagccctgagccaaagcggt

SEQ ID NO: 60228 - DNA, 25 bp, Canis familiaris
caccgtccccgagcatgaacggatc

SEQ ID NO: 60229 - DNA, 25 bp, Canis familiaris
ctcccccaaccagaaacaactattg

SEQ ID NO: 60230 - DNA, 25 bp, Canis familiaris
cattccccaaccagttttaattctg

SEQ ID NO: 60231 - DNA, 25 bp, Canis familiaris
cttccgccactcacgttgaagtttt

SEQ ID NO: 60232 - DNA, 25 bp, Canis familiaris
cagccccctctgagtgttaattttt

SEQ ID NO: 60233 - DNA, 25 bp, Canis familiaris
cactcccacctggtggactacttcc

SEQ ID NO: 60234 - DNA, 25 bp, Canis familiaris
cacttggacctgggtagttgcccct

SEQ ID NO: 60235 - DNA, 25 bp, Canis familiaris
cacttggtgtggctgtatggccccc

SEQ ID NO: 60236 - DNA, 25 bp, Canis familiaris
cacttgagcggggtggattgccctc

SEQ ID NO: 60237 - DNA, 25 bp, Canis familiaris
cacggacaggaggcggcgtgacctc

SEQ ID NO: 60238 - DNA, 25 bp, Canis familiaris
cactgaccggagagccgaggcacgt

SEQ ID NO: 60239 - DNA, 25 bp, Canis familiaris
cacggccgaatgatcctggatcttt

SEQ ID NO: 60240 - DNA, 25 bp, Canis familiaris
cacggtcagagagttcgactttgtt

SEQ ID NO: 60241 - DNA, 25 bp, Canis familiaris
cacttacaagacctcccttttggag

SEQ ID NO: 60242 - DNA, 25 bp, Canis familiaris
cacttaggaacctctcatttgcttc

SEQ ID NO: 60243 - DNA, 25 bp, Canis familiaris
cacttcctggtcaaatccatttgct

SEQ ID NO: 60244 - DNA, 25 bp, Canis familiaris
cactctcactaggataaacttcatg

SEQ ID NO: 60245 - DNA, 25 bp, Canis familiaris
cactcccaaggggagcacttggccc

SEQ ID NO: 60246 - DNA, 25 bp, Canis familiaris
cactcccaaggggagcacttggccc

SEQ ID NO: 60247 - DNA, 25 bp, Canis familiaris
cactctccaaaggtaattttgccct

SEQ ID NO: 60248 - DNA, 25 bp, Canis familiaris
gaccctaggggaaaatcttccagct

SEQ ID NO: 60249 - DNA, 25 bp, Canis familiaris
cactctttgttacaaatttccgcat

SEQ ID NO: 60250 - DNA, 25 bp, Canis familiaris
cactttttttaattccttcatccat

SEQ ID NO: 60251 - DNA, 25 bp, Canis familiaris
cactttgtacttaagtccttccatc

SEQ ID NO: 60252 - DNA, 25 bp, Canis familiaris
cactttgtacttaagcacctgttct

SEQ ID NO: 60253 - DNA, 25 bp, Canis familiaris
cacgtgatgctatctatgacccgac

SEQ ID NO: 60254 - DNA, 25 bp, Canis familiaris
cactgtggtcagctaccaccgagct

SEQ ID NO: 60255 - DNA, 25 bp, Canis familiaris
cactgtgtgtagcgtgagcccgaga

SEQ ID NO: 60256 - DNA, 25 bp, Canis familiaris
cactgtctggagcctgcagaggcct

SEQ ID NO: 60257 - DNA, 25 bp, Canis familiaris
cactgatcgcgacgggagcacagct

SEQ ID NO: 60258 - DNA, 25 bp, Canis familiaris
cactgtcagcgtcacttgcagctgt

SEQ ID NO: 60259 - DNA, 25 bp, Canis familiaris
cactgatcgctgccaatgcactcga

SEQ ID NO: 60260 - DNA, 25 bp, Canis familiaris
cactgaactgctgagccatccagag

SEQ ID NO: 60261 - DNA, 25 bp, Canis familiaris
cactgaggctgcgctgggcgcaagg

SEQ ID NO: 60262 - DNA, 25 bp, Canis familiaris
cactatgccactttggggcgagcgc

SEQ ID NO: 60263 - DNA, 25 bp, Canis familiaris
cacttctctctaaggagaatggccc

SEQ ID NO: 60264 - DNA, 25 bp, Canis familiaris
caccctttacgactactgggccttg

SEQ ID NO: 60265 - DNA, 25 bp, Canis familiaris
cactcgcctaactaacagggtgcca

SEQ ID NO: 60266 - DNA, 25 bp, Canis familiaris
cactctggcttaaaccactggtcaa

SEQ ID NO: 60267 - DNA, 25 bp, Canis familiaris
cacatttttatgaactctctaccaa

SEQ ID NO: 60268 - DNA, 25 bp, Canis familiaris
cactttaaagtgactcttaccctgg

SEQ ID NO: 60269 - DNA, 25 bp, Canis familiaris
cacgtccaaaagatcttcatccctg

SEQ ID NO: 60270 - DNA, 25 bp, Canis familiaris
cactgtcccagtagttcttccaggg

SEQ ID NO: 60271 - DNA, 25 bp, Canis familiaris
cactcgcccatgtattacttcatcg

SEQ ID NO: 60272 - DNA, 25 bp, Canis familiaris
cactgcttccatttcagactctatg

SEQ ID NO: 60273 - DNA, 25 bp, Canis familiaris
cacgctggacattgtcgcaagtcac

SEQ ID NO: 60274 - DNA, 25 bp, Canis familiaris
cacgaggaaatgtagctgaccagaa

SEQ ID NO: 60275 - DNA, 25 bp, Canis familiaris
cacttgggaatgtggcgctcagcca

SEQ ID NO: 60276 - DNA, 25 bp, Canis familiaris
cacttggaggatcggggccggctat

SEQ ID NO: 60277 - DNA, 25 bp, Canis familiaris
cactggaacataggatgggcccgat

SEQ ID NO: 60278 - DNA, 25 bp, Canis familiaris
cacgagaccatccgagggacacggc

SEQ ID NO: 60279 - DNA, 25 bp, Canis familiaris
cacggcccttaaggacacattgggg

SEQ ID NO: 60280 - DNA, 25 bp, Canis familiaris
cactccaccataaacctcagactgg

SEQ ID NO: 60281 - DNA, 25 bp, Canis familiaris
cactccatcaaatcaacatcgtcgg

SEQ ID NO: 60282 - DNA, 25 bp, Canis familiaris
cactcgtccctgaagaatcggctgg

SEQ ID NO: 60283 - DNA, 25 bp, Canis familiaris
cacttgtatcctgagaccagcctga

SEQ ID NO: 60284 - DNA, 25 bp, Canis familiaris
cactttgcagcctcaggtcatgcag

SEQ ID NO: 60285 - DNA, 25 bp, Canis familiaris
cactattggccgcctgcaggatgag

SEQ ID NO: 60286 - DNA, 25 bp, Canis familiaris
cactcatgggctggcctggaatgat

SEQ ID NO: 60287 - DNA, 25 bp, Canis familiaris
cacttgggcttggctctgagaatgc

SEQ ID NO: 60288 - DNA, 25 bp, Canis familiaris
cactttgactcttttgcagcaggct

SEQ ID NO: 60289 - DNA, 25 bp, Canis familiaris
cactttgatctatttgatggtctta

SEQ ID NO: 60290 - DNA, 25 bp, Canis familiaris
cactctggattcgctgaagtttagt

SEQ ID NO: 60291 - DNA, 25 bp, Canis familiaris
cactggtactgcgctgaagggaagt

SEQ ID NO: 60292 - DNA, 25 bp, Canis familiaris
cactgtgtatagggttagcttaaaa

SEQ ID NO: 60293 - DNA, 25 bp, Canis familiaris
cacttgctcaaatcttagtctccaa

SEQ ID NO: 60294 - DNA, 25 bp, Canis familiaris
cactttcaacatttctattattcta

SEQ ID NO: 60295 - DNA, 25 bp, Canis familiaris
cactcttcttcttgtcgtggtatct

SEQ ID NO: 60296 - DNA, 25 bp, Canis familiaris
cactcatatttttttggcttgtcca

SEQ ID NO: 60297 - DNA, 25 bp, Canis familiaris
cactttttctttttgattgtctcta

SEQ ID NO: 60298 - DNA, 25 bp, Canis familiaris
cactttttaattggtgttacctcag

SEQ ID NO: 60299 - DNA, 25 bp, Canis familiaris
cactttcttagcaggttctacaccc

SEQ ID NO: 60300 - DNA, 25 bp, Canis familiaris
cactatcctttcatgctgtggcata

SEQ ID NO: 60301 - DNA, 25 bp, Canis familiaris
cacttcatcatcttccttgtgtgaa

SEQ ID NO: 60302 - DNA, 25 bp, Canis familiaris
cactaccagtgaacttgcttgaagg

SEQ ID NO: 60303 - DNA, 25 bp, Canis familiaris
cactaccaggtaattctatgacatc

SEQ ID NO: 60304 - DNA, 25 bp, Canis familiaris
cacttctagggctctgcactgaatg

SEQ ID NO: 60305 - DNA, 25 bp, Canis familiaris
cacttcgagggggctacagcacccc

SEQ ID NO: 60306 - DNA, 25 bp, Canis familiaris
cacttggggcgaggacaaaggccca

SEQ ID NO: 60307 - DNA, 25 bp, Canis familiaris
cacttggtggcggccaccttggggc

SEQ ID NO: 60308 - DNA, 25 bp, Canis familiaris
cacttgtggggagatccttgcctgc

SEQ ID NO: 60309 - DNA, 25 bp, Canis familiaris
cacttggtgaggccaccaactcctc

SEQ ID NO: 60310 - DNA, 25 bp, Canis familiaris
cacttcgcttggcttcaacaacatc

SEQ ID NO: 60311 - DNA, 25 bp, Canis familiaris
cactcctgctgtttttcaagacgtt

SEQ ID NO: 60312 - DNA, 25 bp, Canis familiaris
cactctttgttcattaatactatta

SEQ ID NO: 60313 - DNA, 25 bp, Canis familiaris
cactccttgttattttttcatgact

SEQ ID NO: 60314 - DNA, 25 bp, Canis familiaris
cactacttttaccatgtttcatctt

SEQ ID NO: 60315 - DNA, 25 bp, Canis familiaris
cactgacatgctttcaaaggtctca

SEQ ID NO: 60316 - DNA, 25 bp, Canis familiaris
cactgaatctaccgatcttgtctcg

SEQ ID NO: 60317 - DNA, 25 bp, Canis familiaris
cactgacatgtacattcatctgctc

SEQ ID NO: 60318 - DNA, 25 bp, Canis familiaris
cactactacacaatccattgcccat

SEQ ID NO: 60319 - DNA, 25 bp, Canis familiaris
cactcttctcaaactctgaccagat

SEQ ID NO: 60320 - DNA, 25 bp, Canis familiaris
cactctaacacaccttgtcctgagg

SEQ ID NO: 60321 - DNA, 25 bp, Canis familiaris
cactatcaactcttctttccaagac

SEQ ID NO: 60322 - DNA, 25 bp, Canis familiaris
cactaacaccacgtttcttcagatc

SEQ ID NO: 60323 - DNA, 25 bp, Canis familiaris
cacttgacagcccctttctgaaggc

SEQ ID NO: 60324 - DNA, 25 bp, Canis familiaris
cactctgagcacgcctgttgataga

SEQ ID NO: 60325 - DNA, 25 bp, Canis familiaris
cactgtcaagctacgtgtactatga

SEQ ID NO: 60326 - DNA, 25 bp, Canis familiaris
cacttcatagctttggcctcataaa

SEQ ID NO: 60327 - DNA, 25 bp, Canis familiaris
cagcatgactggtgttcttataaaa

SEQ ID NO: 60328 - DNA, 25 bp, Canis familiaris
cagcaggcggctattggtaaacgct

SEQ ID NO: 60329 - DNA, 25 bp, Canis familiaris
cacggatggtcgtggggaaccctgc

SEQ ID NO: 60330 - DNA, 25 bp, Canis familiaris
cacggggcctacttgaacaaccgtg

SEQ ID NO: 60331 - DNA, 25 bp, Canis familiaris
cacgggatgttacttcccgtccagg

SEQ ID NO: 60332 - DNA, 25 bp, Canis familiaris
cacgggtgggaggaacctgtccaag

SEQ ID NO: 60333 - DNA, 25 bp, Canis familiaris
cacggggggatacacacatcccaca

SEQ ID NO: 60334 - DNA, 25 bp, Canis familiaris
cactatggtgggaaaagcctccccg

SEQ ID NO: 60335 - DNA, 25 bp, Canis familiaris
cactggagtgagggcaaccggcccc

SEQ ID NO: 60336 - DNA, 25 bp, Canis familiaris
cactggtgttttcatatcgtggccc

SEQ ID NO: 60337 - DNA, 25 bp, Canis familiaris
cactggttttgccggtagagcagcc

SEQ ID NO: 60338 - DNA, 25 bp, Canis familiaris
cactgtgcgttttagagtatgcaag

SEQ ID NO: 60339 - DNA, 25 bp, Canis familiaris
cactgttgtcagagaagttgaactc

SEQ ID NO: 60340 - DNA, 25 bp, Canis familiaris
cactaatcacaagggatggggactt

SEQ ID NO: 60341 - DNA, 25 bp, Canis familiaris
cactagcgcacgaaggtgggctcct

SEQ ID NO: 60342 - DNA, 25 bp, Canis familiaris
cactgtgccctgaggaggtggcctg

SEQ ID NO: 60343 - DNA, 25 bp, Canis familiaris
cactgtgactctgtggtggggctgg

SEQ ID NO: 60344 - DNA, 25 bp, Canis familiaris
cactgtgtccagatgcctgtggttt

SEQ ID NO: 60345 - DNA, 25 bp, Canis familiaris
cacgtgactaacctggtggctttcc

SEQ ID NO: 60346 - DNA, 25 bp, Canis familiaris
cacgtggaacactttgggtttgtgg

SEQ ID NO: 60347 - DNA, 25 bp, Canis familiaris
cacgggagcgactgtgggtttggtc

SEQ ID NO: 60348 - DNA, 25 bp, Canis familiaris
cacgtggacgacagccgggagtgtg

SEQ ID NO: 60349 - DNA, 25 bp, Canis familiaris
cacgtgaacaaggagccgccgaggt

SEQ ID NO: 60350 - DNA, 25 bp, Canis familiaris
cacggacaagatggtgccgccggtg

SEQ ID NO: 60351 - DNA, 25 bp, Canis familiaris
cacggcatacgagggccagcgtgtc

SEQ ID NO: 60352 - DNA, 25 bp, Canis familiaris
cacggtgcacgtgtgaccggttctg

SEQ ID NO: 60353 - DNA, 25 bp, Canis familiaris
cagcggacagccaggacacggtggc

SEQ ID NO: 60354 - DNA, 25 bp, Canis familiaris
cactggacagtgacggagacggcga

SEQ ID NO: 60355 - DNA, 25 bp, Canis familiaris
cactgagccaggctcaaggccgcca

SEQ ID NO: 60356 - DNA, 25 bp, Canis familiaris
cactgcaccaataatcaacgcctga

SEQ ID NO: 60357 - DNA, 25 bp, Canis familiaris
cactccgatctcacatcaatcatcg

SEQ ID NO: 60358 - DNA, 25 bp, Canis familiaris
cactcggacacgtacactcagaggg

SEQ ID NO: 60359 - DNA, 25 bp, Canis familiaris
cactcgggcctatgccaaggatgta

SEQ ID NO: 60360 - DNA, 25 bp, Canis familiaris
cactttggccagggcaacaatggta

SEQ ID NO: 60361 - DNA, 25 bp, Canis familiaris
cactctgtggtctggaccaggcagt

SEQ ID NO: 60362 - DNA, 25 bp, Canis familiaris
cactgcttatgtgaggagctgggag

SEQ ID NO: 60363 - DNA, 25 bp, Canis familiaris
cactcatccgctccaggagctggga

SEQ ID NO: 60364 - DNA, 25 bp, Canis familiaris
cactccagcctgggcgacagagcga

SEQ ID NO: 60365 - DNA, 25 bp, Canis familiaris
cactctcacgttttgcacaaggcaa

SEQ ID NO: 60366 - DNA, 25 bp, Canis familiaris
cactcacacgtattctgtatcggct

SEQ ID NO: 60367 - DNA, 25 bp, Canis familiaris
cactcaccagtagtctcttcaagaa

SEQ ID NO: 60368 - DNA, 25 bp, Canis familiaris
cactcatccttgagctcttgaggac

SEQ ID NO: 60369 - DNA, 25 bp, Canis familiaris
cactgattcttgttccactgattac

SEQ ID NO: 60370 - DNA, 25 bp, Canis familiaris
cactgcctttaaactctgatgtccc

SEQ ID NO: 60371 - DNA, 25 bp, Canis familiaris
cactctttctaatgctctgatctat

SEQ ID NO: 60372 - DNA, 25 bp, Canis familiaris
cacttcttataatccttttcgtcta

SEQ ID NO: 60373 - DNA, 25 bp, Canis familiaris
cactgctcttaagccctttttgttt

SEQ ID NO: 60374 - DNA, 25 bp, Canis familiaris
cacgcctgtaatcccagcactttgg

SEQ ID NO: 60375 - DNA, 25 bp, Canis familiaris
cacggactagtgacaagctctgctg

SEQ ID NO: 60376 - DNA, 25 bp, Canis familiaris
cacggtcattgacacacttgtgcgc

SEQ ID NO: 60377 - DNA, 25 bp, Canis familiaris
cactgagcatctccctcacaatttc

SEQ ID NO: 60378 - DNA, 25 bp, Canis familiaris
cactagcccccaaacatttaacatg

SEQ ID NO: 60379 - DNA, 25 bp, Canis familiaris
cacccaatcaacggactttccaatg

SEQ ID NO: 60380 - DNA, 25 bp, Canis familiaris
cacccagcattaaccctttaactga

SEQ ID NO: 60381 - DNA, 25 bp, Canis familiaris
cacttcagatggctccactttaaaa

SEQ ID NO: 60382 - DNA, 25 bp, Canis familiaris
cacttttgctattacacttttaatg

SEQ ID NO: 60383 - DNA, 25 bp, Canis familiaris
cactgtgctctttaaacttcttcaa

SEQ ID NO: 60384 - DNA, 25 bp, Canis familiaris
cactgccagtcccaaacagggtcaa

SEQ ID NO: 60385 - DNA, 25 bp, Canis familiaris
cactgcagcccccaaaggggctagg

SEQ ID NO: 60386 - DNA, 25 bp, Canis familiaris
cactacccctgccaattgcagttag

SEQ ID NO: 60387 - DNA, 25 bp, Canis familiaris
cacgtcctcgtggaaacactggcgg

SEQ ID NO: 60388 - DNA, 25 bp, Canis familiaris
cacgccccagggtgggctgggggag

SEQ ID NO: 60389 - DNA, 25 bp, Canis familiaris
cactgcccctgggacgcaagaaggg

SEQ ID NO: 60390 - DNA, 25 bp, Canis familiaris
cactgcccctgggacgcaagaaggg

SEQ ID NO: 60391 - DNA, 25 bp, Canis familiaris
cactgcccctgggacgcaagaaggg

SEQ ID NO: 60392 - DNA, 25 bp, Canis familiaris
cactgcccctgggacgcaagaaggg

SEQ ID NO: 60393 - DNA, 25 bp, Canis familiaris
cactctcgtgcttgccaggaaggag

SEQ ID NO: 60394 - DNA, 25 bp, Canis familiaris
cactactgtgatcccggagggcagg

SEQ ID NO: 60395 - DNA, 25 bp, Canis familiaris
cacttttcctcccgatggagcagag

SEQ ID NO: 60396 - DNA, 25 bp, Canis familiaris
cacctttccgtcccagacggaggct

SEQ ID NO: 60397 - DNA, 25 bp, Canis familiaris
cacgtcttagcttccgaacgtttct

SEQ ID NO: 60398 - DNA, 25 bp, Canis familiaris
caccacttgggggccaaggttgttg

SEQ ID NO: 60399 - DNA, 25 bp, Canis familiaris
cacgccctttgggtaacaggtgccg

SEQ ID NO: 60400 - DNA, 25 bp, Canis familiaris
cacctaactgttctggacaggggcc

SEQ ID NO: 60401 - DNA, 25 bp, Canis familiaris
cacttacctgtgacgcaggcacggt

SEQ ID NO: 60402 - DNA, 25 bp, Canis familiaris
cacttatcttgtgtgctgtcggggc

SEQ ID NO: 60403 - DNA, 25 bp, Canis familiaris
cactttctgggttttctgtgctgca

SEQ ID NO: 60404 - DNA, 25 bp, Canis familiaris
cacttttgagaatctgactgcatca

SEQ ID NO: 60405 - DNA, 25 bp, Canis familiaris
cacgtggtgatgttacattcctatg

SEQ ID NO: 60406 - DNA, 25 bp, Canis familiaris
cactgggttgattcatgtctgcaca

SEQ ID NO: 60407 - DNA, 25 bp, Canis familiaris
cactggcaattggatctttacccgt

SEQ ID NO: 60408 - DNA, 25 bp, Canis familiaris
cactgcactgttggggttacccttt

SEQ ID NO: 60409 - DNA, 25 bp, Canis familiaris
cactgggttctgggattcagcctct

SEQ ID NO: 60410 - DNA, 25 bp, Canis familiaris
cactgggaggtggtgacgcacggct

SEQ ID NO: 60411 - DNA, 25 bp, Canis familiaris
cactggggaacatttgccacgggct

SEQ ID NO: 60412 - DNA, 25 bp, Canis familiaris
cacggaagcctcttactactgggtg

SEQ ID NO: 60413 - DNA, 25 bp, Canis familiaris
cactggaagccacttagaatcgcgc

SEQ ID NO: 60414 - DNA, 25 bp, Canis familiaris
cactgtgcgatgaccgtgggtcgcc

SEQ ID NO: 60415 - DNA, 25 bp, Canis familiaris
cactggaggatccactggtgtgccc

SEQ ID NO: 60416 - DNA, 25 bp, Canis familiaris
cactggggcatctcttgctgatata

SEQ ID NO: 60417 - DNA, 25 bp, Canis familiaris
cacgaggcagaacctagtgctttta

SEQ ID NO: 60418 - DNA, 25 bp, Canis familiaris
cacgaggaaagcctggagcctgacg

SEQ ID NO: 60419 - DNA, 25 bp, Canis familiaris
cacgacgacgaggtgacggtcacgg

SEQ ID NO: 60420 - DNA, 25 bp, Canis familiaris
cacgaggactaaggcaccctagccg

SEQ ID NO: 60421 - DNA, 25 bp, Canis familiaris
cacggattctagtgcccactatccg

SEQ ID NO: 60422 - DNA, 25 bp, Canis familiaris
cacgtgtttatgaggccttgtcgcc

SEQ ID NO: 60423 - DNA, 25 bp, Canis familiaris
cacgtgggcttaggggctggtgttc

SEQ ID NO: 60424 - DNA, 25 bp, Canis familiaris
cagcttgaggactccggcgagtatt

SEQ ID NO: 60425 - DNA, 25 bp, Canis familiaris
cactcgacgacgaaagggagctgaa

SEQ ID NO: 60426 - DNA, 25 bp, Canis familiaris
cactgcccaacagtcacggggagaa

SEQ ID NO: 60427 - DNA, 25 bp, Canis familiaris
cactccgcactcccaaggggagcat

SEQ ID NO: 60428 - DNA, 25 bp, Canis familiaris
cactccgcactccaaggggagcatt

SEQ ID NO: 60429 - DNA, 25 bp, Canis familiaris
cactccgcactccataggggagcat

SEQ ID NO: 60430 - DNA, 25 bp, Canis familiaris
cactcaccaccaccgatggatgaag

SEQ ID NO: 60431 - DNA, 25 bp, Canis familiaris
cactagcccacctgtggtgcagtgg

SEQ ID NO: 60432 - DNA, 25 bp, Canis familiaris
cactaccagcacgtggctgctgtgg

SEQ ID NO: 60433 - DNA, 25 bp, Canis familiaris
cactcgcacacacggttgtgggtcc

SEQ ID NO: 60434 - DNA, 25 bp, Canis familiaris
cactccgcgagctgtatcgggtggt

SEQ ID NO: 60435 - DNA, 25 bp, Canis familiaris
cactgcggcggctgtagtgggtttt

SEQ ID NO: 60436 - DNA, 25 bp, Canis familiaris
cactgggcggaggctgggagagttt

SEQ ID NO: 60437 - DNA, 25 bp, Canis familiaris
cactggccgggagtggggcatgggt

SEQ ID NO: 60438 - DNA, 25 bp, Canis familiaris
cactgcatgcttcggggagggcaag

SEQ ID NO: 60439 - DNA, 25 bp, Canis familiaris
cactgtgctctgggtgggattgcct

SEQ ID NO: 60440 - DNA, 25 bp, Canis familiaris
cactctgttgggagagttccttctc

SEQ ID NO: 60441 - DNA, 25 bp, Canis familiaris
cactcttgatggtgagagtctccat

SEQ ID NO: 60442 - DNA, 25 bp, Canis familiaris
cactcaagattgtcagcaatgcatc

SEQ ID NO: 60443 - DNA, 25 bp, Canis familiaris
cactcaggacatccagaggctccag

SEQ ID NO: 60444 - DNA, 25 bp, Canis familiaris
cagcatcagcagtcatctcgctagt

SEQ ID NO: 60445 - DNA, 25 bp, Canis familiaris
cagcatatgcagcccgtgctaacat

SEQ ID NO: 60446 - DNA, 25 bp, Canis familiaris
cactatgccatcctgcagctgaaat

SEQ ID NO: 60447 - DNA, 25 bp, Canis familiaris
cactatccttcttgtaaatcatcca

SEQ ID NO: 60448 - DNA, 25 bp, Canis familiaris
cactgactcttctgtcaaggagcct

SEQ ID NO: 60449 - DNA, 25 bp, Canis familiaris
cactcacctgcctcacagaggatgg

SEQ ID NO: 60450 - DNA, 25 bp, Canis familiaris
cacggcctgctaacacatggggtgt

SEQ ID NO: 60451 - DNA, 25 bp, Canis familiaris
cacggctcgctgttcacgaggagct

SEQ ID NO: 60452 - DNA, 25 bp, Canis familiaris
cacgtcgggttccatgcatggagcc

SEQ ID NO: 60453 - DNA, 25 bp, Canis familiaris
cactgtggggttacgagggccagcg

SEQ ID NO: 60454 - DNA, 25 bp, Canis familiaris
cacgggaggggcggaaggccgcttg

SEQ ID NO: 60455 - DNA, 25 bp, Canis familiaris
cactgaggagagggcggacctccct

SEQ ID NO: 60456 - DNA, 25 bp, Canis familiaris
cacgaggatgtcgcgtgtcgcatcg

SEQ ID NO: 60457 - DNA, 25 bp, Canis familiaris
cactgaggattggccacctctacgg

SEQ ID NO: 60458 - DNA, 25 bp, Canis familiaris
cactgacaactgtccgaccaagcgg

SEQ ID NO: 60459 - DNA, 25 bp, Canis familiaris
cactgactactgtccagggcattgc

SEQ ID NO: 60460 - DNA, 25 bp, Canis familiaris
cactactcgcgggcaagcagcagtg

SEQ ID NO: 60461 - DNA, 25 bp, Canis familiaris
cactgaatggggtcaccgcaggtgg

SEQ ID NO: 60462 - DNA, 25 bp, Canis familiaris
cacgtacgtggacgcctggatgtag

SEQ ID NO: 60463 - DNA, 25 bp, Canis familiaris
cactctaccccactgcttgaggtag

SEQ ID NO: 60464 - DNA, 25 bp, Canis familiaris
cacccaatcccactgttgatttggt

SEQ ID NO: 60465 - DNA, 25 bp, Canis familiaris
cacccaacccacatataaccatgta

SEQ ID NO: 60466 - DNA, 25 bp, Canis familiaris
cactacctccaagatgaaacctgaa

SEQ ID NO: 60467 - DNA, 25 bp, Canis familiaris
cactacctcccgaaacacatagtta

SEQ ID NO: 60468 - DNA, 25 bp, Canis familiaris
cactacagctccaagtatccactat

SEQ ID NO: 60469 - DNA, 25 bp, Canis familiaris
cactcacaatcacagttggctcttc

SEQ ID NO: 60470 - DNA, 25 bp, Canis familiaris
cactcaaactgctagagctggcatc

SEQ ID NO: 60471 - DNA, 25 bp, Canis familiaris
cactgtatgacttgagcacgctgcc

SEQ ID NO: 60472 - DNA, 25 bp, Canis familiaris
cacgccatgagccaaaggcagccgc

SEQ ID NO: 60473 - DNA, 25 bp, Canis familiaris
cacgtggagcaagaaggcacgctgg

SEQ ID NO: 60474 - DNA, 25 bp, Canis familiaris
cacgtggatgaaggaacgaccaggc

SEQ ID NO: 60475 - DNA, 25 bp, Canis familiaris
cacggagtgccagcagcacaacgcg

SEQ ID NO: 60476 - DNA, 25 bp, Canis familiaris
cacggctgatctcggagacacacgc

SEQ ID NO: 60477 - DNA, 25 bp, Canis familiaris
cactagctgctccggggatacagaa

SEQ ID NO: 60478 - DNA, 25 bp, Canis familiaris
cactggagccgtgggcagctacaat

SEQ ID NO: 60479 - DNA, 25 bp, Canis familiaris
cactgggcgcagagcctgcttaaga

SEQ ID NO: 60480 - DNA, 25 bp, Canis familiaris
cactgacttgagaccagttgaataa

SEQ ID NO: 60481 - DNA, 25 bp, Canis familiaris
cactactatcatgtcaaataattac

SEQ ID NO: 60482 - DNA, 25 bp, Canis familiaris
cactcacttgcaactccatttatta

SEQ ID NO: 60483 - DNA, 25 bp, Canis familiaris
cactctcatatgcgtctcttgtgat

SEQ ID NO: 60484 - DNA, 25 bp, Canis familiaris
cactctgctctagacttcttgattg

SEQ ID NO: 60485 - DNA, 25 bp, Canis familiaris
cactctgctctagacttcttgattg

SEQ ID NO: 60486 - DNA, 25 bp, Canis familiaris
cactctgattgtgccttcatggtag

SEQ ID NO: 60487 - DNA, 25 bp, Canis familiaris
cactctttggacatgctcatctagg

SEQ ID NO: 60488 - DNA, 25 bp, Canis familiaris
cacctgttcctgatgtatatagagc

SEQ ID NO: 60489 - DNA, 25 bp, Canis familiaris
cactcaagccctgatgcttctagag

SEQ ID NO: 60490 - DNA, 25 bp, Canis familiaris
cactcagacctttagctttcaatgt

SEQ ID NO: 60491 - DNA, 25 bp, Canis familiaris
cactaacctgtatgctcttttgata

SEQ ID NO: 60492 - DNA, 25 bp, Canis familiaris
cactacacacgatacacttgtgagt

SEQ ID NO: 60493 - DNA, 25 bp, Canis familiaris
cactaccacgaagagctgtgagaga

SEQ ID NO: 60494 - DNA, 25 bp, Canis familiaris
cttactgccggtgaggctgaaacgc

SEQ ID NO: 60495 - DNA, 25 bp, Canis familiaris
cgatcgtcgggggagtcggaccgag

SEQ ID NO: 60496 - DNA, 25 bp, Canis familiaris
cgatttcggacggtggcgatccggg

SEQ ID NO: 60497 - DNA, 25 bp, Canis familiaris
cactgcttaggggaggggattcggg

SEQ ID NO: 60498 - DNA, 25 bp, Canis familiaris
cactgcttcagggcaagggggatac

SEQ ID NO: 60499 - DNA, 25 bp, Canis familiaris
cactgtcacagtggccaggagactt

SEQ ID NO: 60500 - DNA, 25 bp, Canis familiaris
cactccacagacctcatggaagcca

SEQ ID NO: 60501 - DNA, 25 bp, Canis familiaris
cactctccgagaccaggatggctgc

SEQ ID NO: 60502 - DNA, 25 bp, Canis familiaris
cactcttcccaggagtatgagcgcc

SEQ ID NO: 60503 - DNA, 25 bp, Canis familiaris
cactctgtgcccagtggacagtgcc

SEQ ID NO: 60504 - DNA, 25 bp, Canis familiaris
cactgtgtccaagcggacatcgctc

SEQ ID NO: 60505 - DNA, 25 bp, Canis familiaris
cactgttccagagggaagagtgtcc

SEQ ID NO: 60506 - DNA, 25 bp, Canis familiaris
cacgggccacagcagggatgttccc

SEQ ID NO: 60507 - DNA, 25 bp, Canis familiaris
cacgggagacacaagggagttaaca

SEQ ID NO: 60508 - DNA, 25 bp, Canis familiaris
caccgggtcagttggggccaagact

SEQ ID NO: 60509 - DNA, 25 bp, Canis familiaris
cttcgagactcgtgggccacacaga

SEQ ID NO: 60510 - DNA, 25 bp, Canis familiaris
cactccagagccgggggctacaagg

SEQ ID NO: 60511 - DNA, 25 bp, Canis familiaris
cactccaggtctcgagaggtggcca

SEQ ID NO: 60512 - DNA, 25 bp, Canis familiaris
cactctagctgccccagggggctag

SEQ ID NO: 60513 - DNA, 25 bp, Canis familiaris
cactctggctacatcaggggacaca

SEQ ID NO: 60514 - DNA, 25 bp, Canis familiaris
cactcgtggcacacaggggacacag

SEQ ID NO: 60515 - DNA, 25 bp, Canis familiaris
cacggggacaacatgctggagccct

SEQ ID NO: 60516 - DNA, 25 bp, Canis familiaris
cactcccaaaacctgctgagagccg

SEQ ID NO: 60517 - DNA, 25 bp, Canis familiaris
gactcccttaagctgtaacaggtgg

SEQ ID NO: 60518 - DNA, 25 bp, Canis familiaris
cactcccttaaagtgcctttgcgct

SEQ ID NO: 60519 - DNA, 25 bp, Canis familiaris
cactccttaaagaagccttgctttt

SEQ ID NO: 60520 - DNA, 25 bp, Canis familiaris
cactgcctaaaggggctctagctac

SEQ ID NO: 60521 - DNA, 25 bp, Canis familiaris
cactccccagagaggattagcataa

SEQ ID NO: 60522 - DNA, 25 bp, Canis familiaris
cactcccctcagggagcaacctaca

SEQ ID NO: 60523 - DNA, 25 bp, Canis familiaris
cacccactttgagcaggcactatag

SEQ ID NO: 60524 - DNA, 25 bp, Canis familiaris
cagccacctttagcctacagaagta

SEQ ID NO: 60525 - DNA, 25 bp, Canis familiaris
cactccctttcagcctggtaaattc

SEQ ID NO: 60526 - DNA, 25 bp, Canis familiaris
cactccctgtcctacttggaaaata

SEQ ID NO: 60527 - DNA, 25 bp, Canis familiaris
cactccgtgctttggctgtaaaaaa

SEQ ID NO: 60528 - DNA, 25 bp, Canis familiaris
cactctctcagctttagtggagaac

SEQ ID NO: 60529 - DNA, 25 bp, Canis familiaris
cactctctgcatcattagtctgggc

SEQ ID NO: 60530 - DNA, 25 bp, Canis familiaris
cactcatctgccctagagtgctctg

SEQ ID NO: 60531 - DNA, 25 bp, Canis familiaris
cactctgcttcctatgaattcgagc

SEQ ID NO: 60532 - DNA, 25 bp, Canis familiaris
cactcatgatcctactgaatgttca

SEQ ID NO: 60533 - DNA, 25 bp, Canis familiaris
cactcagatggctctgtcagcctct

SEQ ID NO: 60534 - DNA, 25 bp, Canis familiaris
cactgctctacatgctgtacatctc

SEQ ID NO: 60535 - DNA, 25 bp, Canis familiaris
cactgcttgaaagtgcttcctggcc

SEQ ID NO: 60536 - DNA, 25 bp, Canis familiaris
cactggtgaagaggttgccatgcgc

SEQ ID NO: 60537 - DNA, 25 bp, Canis familiaris
cactgagcgaggagtctgccttggg

SEQ ID NO: 60538 - DNA, 25 bp, Canis familiaris
cactgatccccaagtcggtgtgtga

SEQ ID NO: 60539 - DNA, 25 bp, Canis familiaris
cactctacaggcagctgcaggtggg

SEQ ID NO: 60540 - DNA, 25 bp, Canis familiaris
cactgcttcaacatgctgcacatct

SEQ ID NO: 60541 - DNA, 25 bp, Canis familiaris
cccccaggctggacaattcctggaa

SEQ ID NO: 60542 - DNA, 25 bp, Canis familiaris
cactctccacagacagaggttccta

SEQ ID NO: 60543 - DNA, 25 bp, Canis familiaris
cactctagcaggacactggtgcttt

SEQ ID NO: 60544 - DNA, 25 bp, Canis familiaris
cactctatcgtgtcacacttgatgt

SEQ ID NO: 60545 - DNA, 25 bp, Canis familiaris
cactccatgcgcaagcagacgtggt

SEQ ID NO: 60546 - DNA, 25 bp, Canis familiaris
cactgcccagctggatggcggagtc

SEQ ID NO: 60547 - DNA, 25 bp, Canis familiaris
cacgttcagcctgggcgacatgtca

SEQ ID NO: 60548 - DNA, 25 bp, Canis familiaris
cacgttccagtgctcagtgattctg

SEQ ID NO: 60549 - DNA, 25 bp, Canis familiaris
cacgtcaccttgcagcacatatgtc

SEQ ID NO: 60550 - DNA, 25 bp, Canis familiaris
cacgtcacctaacatcactgttact

SEQ ID NO: 60551 - DNA, 25 bp, Canis familiaris
cactgtcccaaagacctgatctacc

SEQ ID NO: 60552 - DNA, 25 bp, Canis familiaris
cactgtcacactcagtaccttctat

SEQ ID NO: 60553 - DNA, 25 bp, Canis familiaris
cactgttctcgatgaacgcattctc

SEQ ID NO: 60554 - DNA, 25 bp, Canis familiaris
cactggcctctgtgatgggttatca

SEQ ID NO: 60555 - DNA, 25 bp, Canis familiaris
cactcgctgttgtgctgggagttct

SEQ ID NO: 60556 - DNA, 25 bp, Canis familiaris
cactccagtgtctgcttggagccct

SEQ ID NO: 60557 - DNA, 25 bp, Canis familiaris
cacgagcgtgtctttgggacactca

SEQ ID NO: 60558 - DNA, 25 bp, Canis familiaris
cacggagatgtctaggggcaccatg

SEQ ID NO: 60559 - DNA, 25 bp, Canis familiaris
cactgctggcacatcaggggacaca

SEQ ID NO: 60560 - DNA, 25 bp, Canis familiaris
cactgctggtatacaggaacactac

SEQ ID NO: 60561 - DNA, 25 bp, Canis familiaris
cactgctggatttagaaattctatt

SEQ ID NO: 60562 - DNA, 25 bp, Canis familiaris
cactgtgtgactaagacttctctct

SEQ ID NO: 60563 - DNA, 25 bp, Canis familiaris
cactgtgaataatgacttcttgcat

SEQ ID NO: 60564 - DNA, 25 bp, Canis familiaris
cactgtgagtaacatctactattcc

SEQ ID NO: 60565 - DNA, 25 bp, Canis familiaris
cacggcagctatatatctggaagat

SEQ ID NO: 60566 - DNA, 25 bp, Canis familiaris
cactggcatgttgttggagattgat

SEQ ID NO: 60567 - DNA, 25 bp, Canis familiaris
cactggcatgttctttggatcggca

SEQ ID NO: 60568 - DNA, 25 bp, Canis familiaris
cactgtctatctgttcataagggca

SEQ ID NO: 60569 - DNA, 25 bp, Canis familiaris
cacgtattctgctctatcataatta

SEQ ID NO: 60570 - DNA, 25 bp, Canis familiaris
cactgttgtctaatctacatccata

SEQ ID NO: 60571 - DNA, 25 bp, Canis familiaris
cacgtgctgtatgccgacatcaaga

SEQ ID NO: 60572 - DNA, 25 bp, Canis familiaris
cacgagcttctcccagacaagggtt

SEQ ID NO: 60573 - DNA, 25 bp, Canis familiaris
cacgaaggctttttcaaggcctaag

SEQ ID NO: 60574 - DNA, 25 bp, Canis familiaris
cactgaaggttttaaatgactcttt

SEQ ID NO: 60575 - DNA, 25 bp, Canis familiaris
cactctagagttccaagatatccgc

SEQ ID NO: 60576 - DNA, 25 bp, Canis familiaris
cacctagaattttcgtgcaattgta

SEQ ID NO: 60577 - DNA, 25 bp, Canis familiaris
cacccagcagtttagcttaatttgc

SEQ ID NO: 60578 - DNA, 25 bp, Canis familiaris
cactctacgatatgtgtataatctt

SEQ ID NO: 60579 - DNA, 25 bp, Canis familiaris
cactgctacgatttctgttcttttc

SEQ ID NO: 60580 - DNA, 25 bp, Canis familiaris
cactgtgtcagtttctgttcttgtg

SEQ ID NO: 60581 - DNA, 25 bp, Canis familiaris
cacggtcgttgtgttcggtgtgtgt

SEQ ID NO: 60582 - DNA, 25 bp, Canis familiaris
cacgaccctggtatctctgaggttg

SEQ ID NO: 60583 - DNA, 25 bp, Canis familiaris
cacgtgtcctgtcacgttggagtcg

SEQ ID NO: 60584 - DNA, 25 bp, Canis familiaris
cacggtccttcagcagattgattcc

SEQ ID NO: 60585 - DNA, 25 bp, Canis familiaris
cacgggccttcagagaggcctgccc

SEQ ID NO: 60586 - DNA, 25 bp, Canis familiaris
cactggtgccaagggagagcccggc

SEQ ID NO: 60587 - DNA, 25 bp, Canis familiaris
cactggacgcgcgaggagagctacg

SEQ ID NO: 60588 - DNA, 25 bp, Canis familiaris
cacggcactccgcgagctgtatcgg

SEQ ID NO: 60589 - DNA, 25 bp, Canis familiaris
cacgtgcccatccaaaatgttctag

SEQ ID NO: 60590 - DNA, 25 bp, Canis familiaris
cactgtgacccgttggagtttcagc

SEQ ID NO: 60591 - DNA, 25 bp, Canis familiaris
cacggacttctgtttgtggttagga

SEQ ID NO: 60592 - DNA, 25 bp, Canis familiaris
cacgtgccttcttcagtgaggtgga

SEQ ID NO: 60593 - DNA, 25 bp, Canis familiaris
cactgctctcattctcatttgggag

SEQ ID NO: 60594 - DNA, 25 bp, Canis familiaris
cactgtgctgatgtccatgtgtggg

SEQ ID NO: 60595 - DNA, 25 bp, Canis familiaris
cactctcttctgtcactgatgatga

SEQ ID NO: 60596 - DNA, 25 bp, Canis familiaris
cactccacatgttgcactgatgcgt

SEQ ID NO: 60597 - DNA, 25 bp, Canis familiaris
cactgccaaatgtcatatattgctg

SEQ ID NO: 60598 - DNA, 25 bp, Canis familiaris
cactcctatatttattgcagcatta

SEQ ID NO: 60599 - DNA, 25 bp, Canis familiaris
cactccttttccaacacattattgc

SEQ ID NO: 60600 - DNA, 25 bp, Canis familiaris
cactcccttcccatgaagatcttgg

SEQ ID NO: 60601 - DNA, 25 bp, Canis familiaris
cactcctgtcacacattgagaattt

SEQ ID NO: 60602 - DNA, 25 bp, Canis familiaris
cactcctgtcccgagatgatttctt

SEQ ID NO: 60603 - DNA, 25 bp, Canis familiaris
cactcttctctcataggattgttgt

SEQ ID NO: 60604 - DNA, 25 bp, Canis familiaris
cactctgattacattggcctgggca

SEQ ID NO: 60605 - DNA, 25 bp, Canis familiaris
cactgcgtggaccctggaaaggcaa

SEQ ID NO: 60606 - DNA, 25 bp, Canis familiaris
cactgggtgaggggggacggcaagg

SEQ ID NO: 60607 - DNA, 25 bp, Canis familiaris
cactggggagccaggtggtgcgtca

SEQ ID NO: 60608 - DNA, 25 bp, Canis familiaris
cacggcaggtgcgtggagggccgct

SEQ ID NO: 60609 - DNA, 25 bp, Canis familiaris
cacgagctagggcgatgcgggcgcc

SEQ ID NO: 60610 - DNA, 25 bp, Canis familiaris
cacggaagtgccttatggggccctc

SEQ ID NO: 60611 - DNA, 25 bp, Canis familiaris
cacgtccacgacttgagggacctcc

SEQ ID NO: 60612 - DNA, 25 bp, Canis familiaris
cacgtcaccgtttattcgacgtcct

SEQ ID NO: 60613 - DNA, 25 bp, Canis familiaris
cacgtcacctttgtttgtcgataat

SEQ ID NO: 60614 - DNA, 25 bp, Canis familiaris
cacgtttatttttggtgggatagca

SEQ ID NO: 60615 - DNA, 25 bp, Canis familiaris
cagcctttttgtctctggggaactg

SEQ ID NO: 60616 - DNA, 25 bp, Canis familiaris
caccctatttgtaatgggctaaacg

SEQ ID NO: 60617 - DNA, 25 bp, Canis familiaris
cactccgagggtttggttagactct

SEQ ID NO: 60618 - DNA, 25 bp, Canis familiaris
cactgcttagggtttagttaaggca

SEQ ID NO: 60619 - DNA, 25 bp, Canis familiaris
cactcttagggctcttgcactgaat

SEQ ID NO: 60620 - DNA, 25 bp, Canis familiaris
caggcttcggacttcgtccgagcag

SEQ ID NO: 60621 - DNA, 25 bp, Canis familiaris
cagacttaagtatgccctaacaggg

SEQ ID NO: 60622 - DNA, 25 bp, Canis familiaris
cagacccgaattacccgaagcaggc

SEQ ID NO: 60623 - DNA, 25 bp, Canis familiaris
cagaagccgtcatccggctcaaagg

SEQ ID NO: 60624 - DNA, 25 bp, Canis familiaris
cagaacggtcgtccgacggttgcag

SEQ ID NO: 60625 - DNA, 25 bp, Canis familiaris
cagagtcggttctacgagggtcctg

SEQ ID NO: 60626 - DNA, 25 bp, Canis familiaris
catagccggatatggagggcctact

SEQ ID NO: 60627 - DNA, 25 bp, Canis familiaris
cggcccgtacgaggggccatatgca

SEQ ID NO: 60628 - DNA, 25 bp, Canis familiaris
cggcgccttagccgatgaacctttc

SEQ ID NO: 60629 - DNA, 25 bp, Canis familiaris
cagggccttctgtttaaccataatg

SEQ ID NO: 60630 - DNA, 25 bp, Canis familiaris
cacgggctttttacaaaccatcatt

SEQ ID NO: 60631 - DNA, 25 bp, Canis familiaris
cacggcgttgtttctaatgtttaca

SEQ ID NO: 60632 - DNA, 25 bp, Canis familiaris
cacgcgttttgttctaagtttacat

SEQ ID NO: 60633 - DNA, 25 bp, Canis familiaris
cacgcttttggatcttcaggaagac

SEQ ID NO: 60634 - DNA, 25 bp, Canis familiaris
cacgtaacttgagctggaatgtacc

SEQ ID NO: 60635 - DNA, 25 bp, Canis familiaris
cactggactcttcccttgagtcaga

SEQ ID NO: 60636 - DNA, 25 bp, Canis familiaris
cactgtagctgcaccctatagattt

SEQ ID NO: 60637 - DNA, 25 bp, Canis familiaris
cacgctagtcccactattgagcata

SEQ ID NO: 60638 - DNA, 25 bp, Canis familiaris
cactgataccccattattccaagat

SEQ ID NO: 60639 - DNA, 25 bp, Canis familiaris
cactgtatttacatttaccttgatg

SEQ ID NO: 60640 - DNA, 25 bp, Canis familiaris
cactgttttgtggtcttactttata

SEQ ID NO: 60641 - DNA, 25 bp, Canis familiaris
cactgtgtttgacgtcattacattg

SEQ ID NO: 60642 - DNA, 25 bp, Canis familiaris
cagctttcctacccattttggtgaa

SEQ ID NO: 60643 - DNA, 25 bp, Canis familiaris
catggacccaacactattcttgtgg

SEQ ID NO: 60644 - DNA, 25 bp, Canis familiaris
cacgacacctaggacttgacgttcg

SEQ ID NO: 60645 - DNA, 25 bp, Canis familiaris
cacgaccctttacttcacgtggagc

SEQ ID NO: 60646 - DNA, 25 bp, Canis familiaris
cacgtcctttcttttgtggtcgatc

SEQ ID NO: 60647 - DNA, 25 bp, Canis familiaris
cacgtccgtggtttcagttgtatat

SEQ ID NO: 60648 - DNA, 25 bp, Canis familiaris
cagttccagttgtgctcagtttcaa

SEQ ID NO: 60649 - DNA, 25 bp, Canis familiaris
cagtttaccggctatcattattcaa

SEQ ID NO: 60650 - DNA, 25 bp, Canis familiaris
cactgaacccggccatcatataaat

SEQ ID NO: 60651 - DNA, 25 bp, Canis familiaris
cactctgatcccgtttctagaacat

SEQ ID NO: 60652 - DNA, 25 bp, Canis familiaris
cactctgaccattgtggttccaacc

SEQ ID NO: 60653 - DNA, 25 bp, Canis familiaris
cactcgaaatcatgacttatccacc

SEQ ID NO: 60654 - DNA, 25 bp, Canis familiaris
cacgtacgtacgtctgatgatacac

SEQ ID NO: 60655 - DNA, 25 bp, Canis familiaris
cagccggcctacccagagtagccgg

SEQ ID NO: 60656 - DNA, 25 bp, Canis familiaris
cagccaagcctctctaaccaggctg

SEQ ID NO: 60657 - DNA, 25 bp, Canis familiaris
caggagggtccgggaccgacgatgt

SEQ ID NO: 60658 - DNA, 25 bp, Canis familiaris
caggtgggtgggcagaccgagaata

SEQ ID NO: 60659 - DNA, 25 bp, Canis familiaris
cacgtggtcttgggacgccaaacac

SEQ ID NO: 60660 - DNA, 25 bp, Canis familiaris
cacgttgtttgagtacgccaaggac

SEQ ID NO: 60661 - DNA, 25 bp, Canis familiaris
cacgttgctgtcgattaagaccgga

SEQ ID NO: 60662 - DNA, 25 bp, Canis familiaris
cactgttttacaagaagctgactgg

SEQ ID NO: 60663 - DNA, 25 bp, Canis familiaris
cagcttctttacctgaaaaatgagg

SEQ ID NO: 60664 - DNA, 25 bp, Canis familiaris
ccttttaccccagaactgcatggtg

SEQ ID NO: 60665 - DNA, 25 bp, Canis familiaris
ctaattaatcccacttcccatggaa

SEQ ID NO: 60666 - DNA, 25 bp, Canis familiaris
cataagtaacccagtttccctgatt

SEQ ID NO: 60667 - DNA, 25 bp, Canis familiaris
ccaggtaccctgtggataccctatt

SEQ ID NO: 60668 - DNA, 25 bp, Canis familiaris
cacggtgaacacctacagaacctta

SEQ ID NO: 60669 - DNA, 25 bp, Canis familiaris
cacgggcaacaagtgcaaaccctgt

SEQ ID NO: 60670 - DNA, 25 bp, Canis familiaris
cacggacgacaatggcaaacgtttt

SEQ ID NO: 60671 - DNA, 25 bp, Canis familiaris
cacgaccgacgttgaatatttgttt

SEQ ID NO: 60672 - DNA, 25 bp, Canis familiaris
cacgcagccagaaccagattatttt

SEQ ID NO: 60673 - DNA, 25 bp, Canis familiaris
cactctggcacaacttgtctttcta

SEQ ID NO: 60674 - DNA, 25 bp, Canis familiaris
cactcccacacacttgattttacaa

SEQ ID NO: 60675 - DNA, 25 bp, Canis familiaris
cagacgggagcctcttttaagggag

SEQ ID NO: 60676 - DNA, 25 bp, Canis familiaris
cacccacgccctctttttaagagag

SEQ ID NO: 60677 - DNA, 25 bp, Canis familiaris
cacggttgtaatgttcttaaggcag

SEQ ID NO: 60678 - DNA, 25 bp, Canis familiaris
cactcgttcgatttttttacaggcg

SEQ ID NO: 60679 - DNA, 25 bp, Canis familiaris
cactgaagacctgtttttagcccta

SEQ ID NO: 60680 - DNA, 25 bp, Canis familiaris
cactgaggaccaggttgtctcctgc

SEQ ID NO: 60681 - DNA, 25 bp, Canis familiaris
cactgaggtcctggaggccttgatg

SEQ ID NO: 60682 - DNA, 25 bp, Canis familiaris
cactggagtactacatgggcttagc

SEQ ID NO: 60683 - DNA, 25 bp, Canis familiaris
cactgggctcctaaaagcatcaact

SEQ ID NO: 60684 - DNA, 25 bp, Canis familiaris
cactgagcccccgagagactcagac

SEQ ID NO: 60685 - DNA, 25 bp, Canis familiaris
cacgagctccagcagctgaagccaa

SEQ ID NO: 60686 - DNA, 25 bp, Canis familiaris
cacgacctggtggctagcagccaac

SEQ ID NO: 60687 - DNA, 25 bp, Canis familiaris
cactcctcgtgaggctggatctcaa

SEQ ID NO: 60688 - DNA, 25 bp, Canis familiaris
cactccatctagagctgtgcagtca

SEQ ID NO: 60689 - DNA, 25 bp, Canis familiaris
cactcgctcttgtgcttcagatatt

SEQ ID NO: 60690 - DNA, 25 bp, Canis familiaris
cactcccctgtacttcagattatgt

SEQ ID NO: 60691 - DNA, 25 bp, Canis familiaris
cacctccacgggactcataggattc

SEQ ID NO: 60692 - DNA, 25 bp, Canis familiaris
cacgggagcaaggttcaaggcattc

SEQ ID NO: 60693 - DNA, 25 bp, Canis familiaris
cacgggtgaatgatctccaggaagc

SEQ ID NO: 60694 - DNA, 25 bp, Canis familiaris
cacggcatgtggtgttctcaggttc

SEQ ID NO: 60695 - DNA, 25 bp, Canis familiaris
cacggatgggtgctacttggtgtca

SEQ ID NO: 60696 - DNA, 25 bp, Canis familiaris
cacggaggactgcaacgtgctgctg

SEQ ID NO: 60697 - DNA, 25 bp, Canis familiaris
cacccagtgcatctgaatcgtccta

SEQ ID NO: 60698 - DNA, 25 bp, Canis familiaris
cacccagctgctcctggattatcag

SEQ ID NO: 60699 - DNA, 25 bp, Canis familiaris
cactgctcagcaacctggaggaagc

SEQ ID NO: 60700 - DNA, 25 bp, Canis familiaris
cactgcaagaccccagactgcaagg

SEQ ID NO: 60701 - DNA, 25 bp, Canis familiaris
cactccatataccatcaggcctagg

SEQ ID NO: 60702 - DNA, 25 bp, Canis familiaris
cactgccaaggccgaggagctggtg

SEQ ID NO: 60703 - DNA, 25 bp, Canis familiaris
cactccacagaacaggtcagggcgc

SEQ ID NO: 60704 - DNA, 25 bp, Canis familiaris
cactcccaaaaattaaggcaggcca

SEQ ID NO: 60705 - DNA, 25 bp, Canis familiaris
cacccaataaagaaagcctgacccg

SEQ ID NO: 60706 - DNA, 25 bp, Canis familiaris
cacccgactcaagagacctccgggg

SEQ ID NO: 60707 - DNA, 25 bp, Canis familiaris
cacccaccgaatgaacgatccaggg

SEQ ID NO: 60708 - DNA, 25 bp, Canis familiaris
cactccccacaataaagcatctgca

SEQ ID NO: 60709 - DNA, 25 bp, Canis familiaris
cactccacacgctttacagcagaag

SEQ ID NO: 60710 - DNA, 25 bp, Canis familiaris
cactgccacctctcaaatcagcaga

SEQ ID NO: 60711 - DNA, 25 bp, Canis familiaris
cactcccctcaggtagatgcacaga

SEQ ID NO: 60712 - DNA, 25 bp, Canis familiaris
cactcccctcagattgaggagatag

SEQ ID NO: 60713 - DNA, 25 bp, Canis familiaris
cactcctcctcacggtggaatggag

SEQ ID NO: 60714 - DNA, 25 bp, Canis familiaris
cacccccaagctcgggaaacgtgct

SEQ ID NO: 60715 - DNA, 25 bp, Canis familiaris
caccacccgtgtcggggacaggaca

SEQ ID NO: 60716 - DNA, 25 bp, Canis familiaris
cactgacccgtgtcgagggactgtg

SEQ ID NO: 60717 - DNA, 25 bp, Canis familiaris
cactgcactccagcctgggcgacag

SEQ ID NO: 60718 - DNA, 25 bp, Canis familiaris
cactgctcccaggggggcaggagga

SEQ ID NO: 60719 - DNA, 25 bp, Canis familiaris
cacgtccccgaggctgaaggacaag

SEQ ID NO: 60720 - DNA, 25 bp, Canis familiaris
cacgaaacacgacgcgcaaggcgca

SEQ ID NO: 60721 - DNA, 25 bp, Canis familiaris
cacgttcagcaccacggagatggcg

SEQ ID NO: 60722 - DNA, 25 bp, Canis familiaris
cacggtcctgagacggagctggaaa

SEQ ID NO: 60723 - DNA, 25 bp, Canis familiaris
cacggtcctgagacggagctggaaa

SEQ ID NO: 60724 - DNA, 25 bp, Canis familiaris
cacggtcctgagacggagctggaaa

SEQ ID NO: 60725 - DNA, 25 bp, Canis familiaris
cacggtcctgagacggagctggaaa

SEQ ID NO: 60726 - DNA, 25 bp, Canis familiaris
cacctgtcctaccgtatctggaatg

SEQ ID NO: 60727 - DNA, 25 bp, Canis familiaris
cacctctcctttcacatcaggaagg

SEQ ID NO: 60728 - DNA, 25 bp, Canis familiaris
caccggaatattaaccatgaaaagg

SEQ ID NO: 60729 - DNA, 25 bp, Canis familiaris
caccaggagtttcccattaaatact

SEQ ID NO: 60730 - DNA, 25 bp, Canis familiaris
cacccaccttcttaattacaatacg

SEQ ID NO: 60731 - DNA, 25 bp, Canis familiaris
cacccagccttatttaaaagaccag

SEQ ID NO: 60732 - DNA, 25 bp, Canis familiaris
caccctcttcgacttcaaacaaggc

SEQ ID NO: 60733 - DNA, 25 bp, Canis familiaris
cacggccacggacaagagcacgggc

SEQ ID NO: 60734 - DNA, 25 bp, Canis familiaris
cacggccgggtggaaggcctggaag

SEQ ID NO: 60735 - DNA, 25 bp, Canis familiaris
cacgaccgagaagtaaacctgaagt

SEQ ID NO: 60736 - DNA, 25 bp, Canis familiaris
cacgacccagacatcaagaaccacg

SEQ ID NO: 60737 - DNA, 25 bp, Canis familiaris
cacgccgtggggaagaacaccctgc

SEQ ID NO: 60738 - DNA, 25 bp, Canis familiaris
cacggcttgtggaaggagacacacc

SEQ ID NO: 60739 - DNA, 25 bp, Canis familiaris
cacgagaagttgaccaaggccatcc

SEQ ID NO: 60740 - DNA, 25 bp, Canis familiaris
caccaaaggcgagcagggcctctac

SEQ ID NO: 60741 - DNA, 25 bp, Canis familiaris
cacccaagacaggaaggacccctca

SEQ ID NO: 60742 - DNA, 25 bp, Canis familiaris
caccccaaatcaaattacgtcccag

SEQ ID NO: 60743 - DNA, 25 bp, Canis familiaris
caccccagaagtgttagcctgtggc

SEQ ID NO: 60744 - DNA, 25 bp, Canis familiaris
cacggtcgtcattcgttgtccgtgg

SEQ ID NO: 60745 - DNA, 25 bp, Canis familiaris
cacgtccgtcagtgcgtgaccagtg

SEQ ID NO: 60746 - DNA, 25 bp, Canis familiaris
cacggccatgtattactgtgcaccc

SEQ ID NO: 60747 - DNA, 25 bp, Canis familiaris
cacggccatatattactgtacgcat

SEQ ID NO: 60748 - DNA, 25 bp, Canis familiaris
cacgactctgagatccagaatcaca

SEQ ID NO: 60749 - DNA, 25 bp, Canis familiaris
cacgactgcagagagcacggcctgc

SEQ ID NO: 60750 - DNA, 25 bp, Canis familiaris
cacgactagatatcatccagccgct

SEQ ID NO: 60751 - DNA, 25 bp, Canis familiaris
cacgaatatgaatttccactcagga

SEQ ID NO: 60752 - DNA, 25 bp, Canis familiaris
cactgagaaggttgttttcgagcaa

SEQ ID NO: 60753 - DNA, 25 bp, Canis familiaris
cactggcacgcgtgtttgccagcac

SEQ ID NO: 60754 - DNA, 25 bp, Canis familiaris
cactgaagggacccttgccgatcac

SEQ ID NO: 60755 - DNA, 25 bp, Canis familiaris
cactgaagggcatcttgggctacac

SEQ ID NO: 60756 - DNA, 25 bp, Canis familiaris
cactgaatggctgacctgacctgat

SEQ ID NO: 60757 - DNA, 25 bp, Canis familiaris
cactgaatggctgacctgacctgat

SEQ ID NO: 60758 - DNA, 25 bp, Canis familiaris
cactgactggctcagcgtgtgccta

SEQ ID NO: 60759 - DNA, 25 bp, Canis familiaris
cactgactggctcagcgtgtgccta

SEQ ID NO: 60760 - DNA, 25 bp, Canis familiaris
cactgtctgagccatagggtgagta

SEQ ID NO: 60761 - DNA, 25 bp, Canis familiaris
cacggctgagctggagccctagtga

SEQ ID NO: 60762 - DNA, 25 bp, Canis familiaris
cactgcggtctgggctagccagtga

SEQ ID NO: 60763 - DNA, 25 bp, Canis familiaris
cactggtgtctgggtcccagggttt

SEQ ID NO: 60764 - DNA, 25 bp, Canis familiaris
cactggagagtggggccacaaggct

SEQ ID NO: 60765 - DNA, 25 bp, Canis familiaris
cacccgggatagccccaagtgttat

SEQ ID NO: 60766 - DNA, 25 bp, Canis familiaris
cacgctggggcaggtccccagtgtg

SEQ ID NO: 60767 - DNA, 25 bp, Canis familiaris
cacgtgcagggcgggacgcccaagg

SEQ ID NO: 60768 - DNA, 25 bp, Canis familiaris
cacgaggagtcaaggcaccatccaa

SEQ ID NO: 60769 - DNA, 25 bp, Canis familiaris
cacgatggggcaaacatactgtcac

SEQ ID NO: 60770 - DNA, 25 bp, Canis familiaris
cacggggacaaactacttcatcaag

SEQ ID NO: 60771 - DNA, 25 bp, Canis familiaris
cactgcggagaaaatatcctgacca

SEQ ID NO: 60772 - DNA, 25 bp, Canis familiaris
caccaataaagaaagcctgacccgt

SEQ ID NO: 60773 - DNA, 25 bp, Canis familiaris
caccctgaatttaacctgagtctcc

SEQ ID NO: 60774 - DNA, 25 bp, Canis familiaris
caccctgaccgagtgactctggtcc

SEQ ID NO: 60775 - DNA, 25 bp, Canis familiaris
cacccggactgctgtgatcggtttc

SEQ ID NO: 60776 - DNA, 25 bp, Canis familiaris
caccgtgggtcagatcacacttttc

SEQ ID NO: 60777 - DNA, 25 bp, Canis familiaris
cacccttttcagtgcagagccttta

SEQ ID NO: 60778 - DNA, 25 bp, Canis familiaris
cacccttactcacaaactttctgtc

SEQ ID NO: 60779 - DNA, 25 bp, Canis familiaris
cacccggacaccaagaagttcctct

SEQ ID NO: 60780 - DNA, 25 bp, Canis familiaris
cagccccgactgcaaaaacactgtc

SEQ ID NO: 60781 - DNA, 25 bp, Canis familiaris
caccccaagccactgaaaacacttt

SEQ ID NO: 60782 - DNA, 25 bp, Canis familiaris
cacccataacccctaaatcatgctc

SEQ ID NO: 60783 - DNA, 25 bp, Canis familiaris
caccctgatttttgaaaatgcccgg

SEQ ID NO: 60784 - DNA, 25 bp, Canis familiaris
cacgcccattttgagccaacttgtg

SEQ ID NO: 60785 - DNA, 25 bp, Canis familiaris
caccgaagataatatctaacatcgt

SEQ ID NO: 60786 - DNA, 25 bp, Canis familiaris
cagccagtaccactaatttcaccgt

SEQ ID NO: 60787 - DNA, 25 bp, Canis familiaris
cagcttgaaccccagtttaacgtct

SEQ ID NO: 60788 - DNA, 25 bp, Canis familiaris
cactgtggacacccagttcatcgac

SEQ ID NO: 60789 - DNA, 25 bp, Canis familiaris
cactggccacacgtagtatccatgg

SEQ ID NO: 60790 - DNA, 25 bp, Canis familiaris
cactggctgtgcaccaaacctggtg

SEQ ID NO: 60791 - DNA, 25 bp, Canis familiaris
cacggtttcccattatgccattgga

SEQ ID NO: 60792 - DNA, 25 bp, Canis familiaris
cactggtattcctctcataactaga

SEQ ID NO: 60793 - DNA, 25 bp, Canis familiaris
cactgttatccgtattctaaccaga

SEQ ID NO: 60794 - DNA, 25 bp, Canis familiaris
cactgtatacgccttccatatacct

SEQ ID NO: 60795 - DNA, 25 bp, Canis familiaris
cactgattactgccatagcctcata

SEQ ID NO: 60796 - DNA, 25 bp, Canis familiaris
cactgatatacttaagccttgttga

SEQ ID NO: 60797 - DNA, 25 bp, Canis familiaris
cactgtgttgcataagccttgtcca

SEQ ID NO: 60798 - DNA, 25 bp, Canis familiaris
cactgtgacccaaagcccgtacagt

SEQ ID NO: 60799 - DNA, 25 bp, Canis familiaris
cacggactggaggatccacggacgg

SEQ ID NO: 60800 - DNA, 25 bp, Canis familiaris
cactgggctggaccttgttggaggg

SEQ ID NO: 60801 - DNA, 25 bp, Canis familiaris
cacggtgtagagccatgcatttgag

SEQ ID NO: 60802 - DNA, 25 bp, Canis familiaris
cacggtgatgaaagccactctgaga

SEQ ID NO: 60803 - DNA, 25 bp, Canis familiaris
cactgactgagcatagccagcgcta

SEQ ID NO: 60804 - DNA, 25 bp, Canis familiaris
cactgcacatccatacccatgatac

SEQ ID NO: 60805 - DNA, 25 bp, Canis familiaris
cacgcacacagcatccatgtcagtg

SEQ ID NO: 60806 - DNA, 25 bp, Canis familiaris
cacgctgcgagcatgcgtgccagtg

SEQ ID NO: 60807 - DNA, 25 bp, Canis familiaris
cacgggcagcaggcttgctgagctg

SEQ ID NO: 60808 - DNA, 25 bp, Canis familiaris
cacggagcgcatgatgtgcgcggag

SEQ ID NO: 60809 - DNA, 25 bp, Canis familiaris
cacgaggcgcatgagttctccaaca

SEQ ID NO: 60810 - DNA, 25 bp, Canis familiaris
cacgtcgggcattttgctgccaaac

SEQ ID NO: 60811 - DNA, 25 bp, Canis familiaris
cacgtcgtggagcatcatgccacac

SEQ ID NO: 60812 - DNA, 25 bp, Canis familiaris
cacgtcgtgaatcacagccactgtg

SEQ ID NO: 60813 - DNA, 25 bp, Canis familiaris
cacgtcgcagcactaaaaatggatg

SEQ ID NO: 60814 - DNA, 25 bp, Canis familiaris
cacgcatcgggttcgaaataagaag

SEQ ID NO: 60815 - DNA, 25 bp, Canis familiaris
cactgcacagcggtccggaagacga

SEQ ID NO: 60816 - DNA, 25 bp, Canis familiaris
cactgcaccgccgatatggagacag

SEQ ID NO: 60817 - DNA, 25 bp, Canis familiaris
cacgccctcagccataggcagatgc

SEQ ID NO: 60818 - DNA, 25 bp, Canis familiaris
cacgcgcgctacactgactggctca

SEQ ID NO: 60819 - DNA, 25 bp, Canis familiaris
cacgcgcgctacactgactggctca

SEQ ID NO: 60820 - DNA, 25 bp, Canis familiaris
cacgcacttatcaggaacgcctcga

SEQ ID NO: 60821 - DNA, 25 bp, Canis familiaris
cacgcacttatcaggaacgcctcga

SEQ ID NO: 60822 - DNA, 25 bp, Canis familiaris
caccgtttccgaagaccttctgaag

SEQ ID NO: 60823 - DNA, 25 bp, Canis familiaris
caccagtttccctaggtttaatctg

SEQ ID NO: 60824 - DNA, 25 bp, Canis familiaris
caccaatttccctgtgtccagaagg

SEQ ID NO: 60825 - DNA, 25 bp, Canis familiaris
cacgcaaccccgtgtggactgaagg

SEQ ID NO: 60826 - DNA, 25 bp, Canis familiaris
cacgagacaacacccgttaatgggc

SEQ ID NO: 60827 - DNA, 25 bp, Canis familiaris
cacgaacccagcggcagtttgagtg

SEQ ID NO: 60828 - DNA, 25 bp, Canis familiaris
cacctgacccgcagaggttgatctt

SEQ ID NO: 60829 - DNA, 25 bp, Canis familiaris
cacctgaggcccaggtccatacaga

SEQ ID NO: 60830 - DNA, 25 bp, Canis familiaris
cacctgaggcccaggccaacagagt

SEQ ID NO: 60831 - DNA, 25 bp, Canis familiaris
cacgcggaggcgaggcgcaaacgcc

SEQ ID NO: 60832 - DNA, 25 bp, Canis familiaris
cacgggagtcgacatcgtctgaccg

SEQ ID NO: 60833 - DNA, 25 bp, Canis familiaris
cacgacggacgatcacgtgtgccca

SEQ ID NO: 60834 - DNA, 25 bp, Canis familiaris
cacgagggaagatggcggcggccgt

SEQ ID NO: 60835 - DNA, 25 bp, Canis familiaris
cacggagaactgagtcggggcccgg

SEQ ID NO: 60836 - DNA, 25 bp, Canis familiaris
cacggaaaggaactcgtgcttcacc

SEQ ID NO: 60837 - DNA, 25 bp, Canis familiaris
cacgaaaagaaactcgtgcttcacc

SEQ ID NO: 60838 - DNA, 25 bp, Canis familiaris
cactgagaagtaaaatgcctaaccc

SEQ ID NO: 60839 - DNA, 25 bp, Canis familiaris
cactgacaaggtcaagcagctcctc

SEQ ID NO: 60840 - DNA, 25 bp, Canis familiaris
cactgtttagcacagtgcctcctct

SEQ ID NO: 60841 - DNA, 25 bp, Canis familiaris
cacgattgtaaaagtgtttctctta

SEQ ID NO: 60842 - DNA, 25 bp, Canis familiaris
cagcttttcacgagatttgtcctta

SEQ ID NO: 60843 - DNA, 25 bp, Canis familiaris
catcctcttaggttaggttctttca

SEQ ID NO: 60844 - DNA, 25 bp, Canis familiaris
cacgacgtagtgttatcctttcttc

SEQ ID NO: 60845 - DNA, 25 bp, Canis familiaris
cactggctaagcttttcttttcttt

SEQ ID NO: 60846 - DNA, 25 bp, Canis familiaris
cagctgacaaacttaatcctttttt

SEQ ID NO: 60847 - DNA, 25 bp, Canis familiaris
caccacaaaccctatactattaatt

SEQ ID NO: 60848 - DNA, 25 bp, Canis familiaris
caccagaaccatcctttgtcattaa

SEQ ID NO: 60849 - DNA, 25 bp, Canis familiaris
caccagaaccacctgtggagcctta

SEQ ID NO: 60850 - DNA, 25 bp, Canis familiaris
cacgaaagccgccgtggcgcaatga

SEQ ID NO: 60851 - DNA, 25 bp, Canis familiaris
cacgaggagcggggaggctatcagc

SEQ ID NO: 60852 - DNA, 25 bp, Canis familiaris
cacgagcaagcacgcgaaggtggca

SEQ ID NO: 60853 - DNA, 25 bp, Canis familiaris
cactgagcgccacgaaaggtccatg

SEQ ID NO: 60854 - DNA, 25 bp, Canis familiaris
cacgacctcagacatcaaatcctgc

SEQ ID NO: 60855 - DNA, 25 bp, Canis familiaris
cacgactcatcaaggtaccaacagc

SEQ ID NO: 60856 - DNA, 25 bp, Canis familiaris
cactgacctcagacaggcacttact

SEQ ID NO: 60857 - DNA, 25 bp, Canis familiaris
cacgagcaccaaatggcggatgacg

SEQ ID NO: 60858 - DNA, 25 bp, Canis familiaris
cactgtcccatctttcatggcataa

SEQ ID NO: 60859 - DNA, 25 bp, Canis familiaris
cacgctgccagctttactggagaac

SEQ ID NO: 60860 - DNA, 25 bp, Canis familiaris
cacggccagcattgccatctggagt

SEQ ID NO: 60861 - DNA, 25 bp, Canis familiaris
cacgggatgctcggcactgagagct

SEQ ID NO: 60862 - DNA, 25 bp, Canis familiaris
cacggccatgctgagaccaagcacg

SEQ ID NO: 60863 - DNA, 25 bp, Canis familiaris
cacggtcatcaccaaccaagagggc

SEQ ID NO: 60864 - DNA, 25 bp, Canis familiaris
cacgccgacaccaccaagtgggagt

SEQ ID NO: 60865 - DNA, 25 bp, Canis familiaris
cacgttgtccgagccaatggggaaa

SEQ ID NO: 60866 - DNA, 25 bp, Canis familiaris
cacgtttcccgacaggaggcgaagg

SEQ ID NO: 60867 - DNA, 25 bp, Canis familiaris
cacccttcgccataaagcaggaaac

SEQ ID NO: 60868 - DNA, 25 bp, Canis familiaris
cacccctaccaataaaatgaatcca

SEQ ID NO: 60869 - DNA, 25 bp, Canis familiaris
cacccgcgtcgcgcaaaaatgtcta

SEQ ID NO: 60870 - DNA, 25 bp, Canis familiaris
caccggcacttagaggaaatttgaa

SEQ ID NO: 60871 - DNA, 25 bp, Canis familiaris
cacccgatccttccggaatttgaga

SEQ ID NO: 60872 - DNA, 25 bp, Canis familiaris
cacccgaccttcgcaattattttgt

SEQ ID NO: 60873 - DNA, 25 bp, Canis familiaris
caccaccccggtgtattcatttata

SEQ ID NO: 60874 - DNA, 25 bp, Canis familiaris
cacccctttggtgtgattatttcat

SEQ ID NO: 60875 - DNA, 25 bp, Canis familiaris
cacggcacttagaggaggttatttc

SEQ ID NO: 60876 - DNA, 25 bp, Canis familiaris
cacggccctacatggggtcatcatt

SEQ ID NO: 60877 - DNA, 25 bp, Canis familiaris
cacgggcttactattgttcagcttt

SEQ ID NO: 60878 - DNA, 25 bp, Canis familiaris
cacgatgtaatgttttagttcctta

SEQ ID NO: 60879 - DNA, 25 bp, Canis familiaris
cacctaagggcttctgatttcggta

SEQ ID NO: 60880 - DNA, 25 bp, Canis familiaris
ccccaagtaattcttttggtcatct

SEQ ID NO: 60881 - DNA, 25 bp, Canis familiaris
caccgcagcgtatttacctttttct

SEQ ID NO: 60882 - DNA, 25 bp, Canis familiaris
cacccactgacatgtacattcatct

SEQ ID NO: 60883 - DNA, 25 bp, Canis familiaris
cacccaaccagactttctcaattta

SEQ ID NO: 60884 - DNA, 25 bp, Canis familiaris
caccctacaaggctcctagtgtaac

SEQ ID NO: 60885 - DNA, 25 bp, Canis familiaris
cacctccaaaggtccctaggacact

SEQ ID NO: 60886 - DNA, 25 bp, Canis familiaris
caccccgaaggcgcgcaggtgaagg

SEQ ID NO: 60887 - DNA, 25 bp, Canis familiaris
cacccctggaggagaagaggaagga

SEQ ID NO: 60888 - DNA, 25 bp, Canis familiaris
cacccttggtggagcttgaggagct

SEQ ID NO: 60889 - DNA, 25 bp, Canis familiaris
cacccttaccgagcattatgacatt

SEQ ID NO: 60890 - DNA, 25 bp, Canis familiaris
cactgttatacctctgcttatgttt

SEQ ID NO: 60891 - DNA, 25 bp, Canis familiaris
cactggcttacctcactctaagtgt

SEQ ID NO: 60892 - DNA, 25 bp, Canis familiaris
cacgttacagcctccttaagtaaag

SEQ ID NO: 60893 - DNA, 25 bp, Canis familiaris
cacgttactggctggcgtgcacagg

SEQ ID NO: 60894 - DNA, 25 bp, Canis familiaris
cactgttaagttggtggctcaggga

SEQ ID NO: 60895 - DNA, 25 bp, Canis familiaris
cactgtctgggtggggggcaggaga

SEQ ID NO: 60896 - DNA, 25 bp, Canis familiaris
cacgcctgccttcagtaggtgaaga

SEQ ID NO: 60897 - DNA, 25 bp, Canis familiaris
cacgccgtccgctatttggaaagaa

SEQ ID NO: 60898 - DNA, 25 bp, Canis familiaris
cacccacaccaagtgctctggaaaa

SEQ ID NO: 60899 - DNA, 25 bp, Canis familiaris
cacccactcctgtgtgtgagggaca

SEQ ID NO: 60900 - DNA, 25 bp, Canis familiaris
cacccacctaggggctagaggcagg

SEQ ID NO: 60901 - DNA, 25 bp, Canis familiaris
cacctacaccggggacaagaaggcg

SEQ ID NO: 60902 - DNA, 25 bp, Canis familiaris
cacccgaccacgggacagggaccag

SEQ ID NO: 60903 - DNA, 25 bp, Canis familiaris
cacccaaccaaaaccagggatctgt

SEQ ID NO: 60904 - DNA, 25 bp, Canis familiaris
cacggggccatgtacaacgggatcg

SEQ ID NO: 60905 - DNA, 25 bp, Canis familiaris
cacggggtcgtccaacagatcgacg

SEQ ID NO: 60906 - DNA, 25 bp, Canis familiaris
cagcgggtttgttacgcagatccgg

SEQ ID NO: 60907 - DNA, 25 bp, Canis familiaris
cagctggggctgaggaccagtcctg

SEQ ID NO: 60908 - DNA, 25 bp, Canis familiaris
cactggagccgtgtgacttgtctgg

SEQ ID NO: 60909 - DNA, 25 bp, Canis familiaris
cacgctggacgtggtgtcctacgag

SEQ ID NO: 60910 - DNA, 25 bp, Canis familiaris
cacgctgtcaagtgaagactagcaa

SEQ ID NO: 60911 - DNA, 25 bp, Canis familiaris
cacgcttagtggtctcacactcaga

SEQ ID NO: 60912 - DNA, 25 bp, Canis familiaris
cacgatgcaacatgactcagccacg

SEQ ID NO: 60913 - DNA, 25 bp, Canis familiaris
cactggccccatgtgagccaaggaa

SEQ ID NO: 60914 - DNA, 25 bp, Canis familiaris
cactgggccctggggacacaggaat

SEQ ID NO: 60915 - DNA, 25 bp, Canis familiaris
cacggccacctgggtgacccaggag

SEQ ID NO: 60916 - DNA, 25 bp, Canis familiaris
cacggcgaccgagagaggccagtgc

SEQ ID NO: 60917 - DNA, 25 bp, Canis familiaris
cacggcgacccaggagactatcctg

SEQ ID NO: 60918 - DNA, 25 bp, Canis familiaris
cacggcaaaacaaaggctatggctt

SEQ ID NO: 60919 - DNA, 25 bp, Canis familiaris
cacgcccaaacaaaccagagtctaa

SEQ ID NO: 60920 - DNA, 25 bp, Canis familiaris
caccactccaaaatgaccaactcaa

SEQ ID NO: 60921 - DNA, 25 bp, Canis familiaris
cacctgctcatacagggaagcctga

SEQ ID NO: 60922 - DNA, 25 bp, Canis familiaris
cacggcctccaccggaggccatgga

SEQ ID NO: 60923 - DNA, 25 bp, Canis familiaris
cactgggctccctggaggattggct

SEQ ID NO: 60924 - DNA, 25 bp, Canis familiaris
cactggggacactggatggactggt

SEQ ID NO: 60925 - DNA, 25 bp, Canis familiaris
cactgggggctctggagggctaagt

SEQ ID NO: 60926 - DNA, 25 bp, Canis familiaris
cacgtgggccttgacaggcgcaaag

SEQ ID NO: 60927 - DNA, 25 bp, Canis familiaris
cacgttggccttttacagctgtaga

SEQ ID NO: 60928 - DNA, 25 bp, Canis familiaris
cacgtcggttctccaagagcagtaa

SEQ ID NO: 60929 - DNA, 25 bp, Canis familiaris
cacgtgctttactcaaggctgacct

SEQ ID NO: 60930 - DNA, 25 bp, Canis familiaris
caccctgataactcaaggtaaagag

SEQ ID NO: 60931 - DNA, 25 bp, Canis familiaris
caccttggaaaatatgcttgtacgg

SEQ ID NO: 60932 - DNA, 25 bp, Canis familiaris
caccttaataagtttcatgattccg

SEQ ID NO: 60933 - DNA, 25 bp, Canis familiaris
cacctgttatctcgtattcggaccg

SEQ ID NO: 60934 - DNA, 25 bp, Canis familiaris
cacgaagtatctcttgctcttggtc

SEQ ID NO: 60935 - DNA, 25 bp, Canis familiaris
cacggagttggtggtgtgcttggtg

SEQ ID NO: 60936 - DNA, 25 bp, Canis familiaris
cacgagatttagtgctttcatagct

SEQ ID NO: 60937 - DNA, 25 bp, Canis familiaris
cactggtttcagtcggatatcaacg

SEQ ID NO: 60938 - DNA, 25 bp, Canis familiaris
cactggattctacctggattctgcc

SEQ ID NO: 60939 - DNA, 25 bp, Canis familiaris
cacggattcagggcatgctgtgtcc

SEQ ID NO: 60940 - DNA, 25 bp, Canis familiaris
cactggacaagtgcgtgtgttcata

SEQ ID NO: 60941 - DNA, 25 bp, Canis familiaris
cagctggccggtgttgtagactagg

SEQ ID NO: 60942 - DNA, 25 bp, Canis familiaris
cacgcgtaatgtcttgcacgattag

SEQ ID NO: 60943 - DNA, 25 bp, Canis familiaris
cagcctgggaggattacgtctggtt

SEQ ID NO: 60944 - DNA, 25 bp, Canis familiaris
caccgggggattgaatggaggctca

SEQ ID NO: 60945 - DNA, 25 bp, Canis familiaris
caccgtgggtcgtcaaatcgaatta

SEQ ID NO: 60946 - DNA, 25 bp, Canis familiaris
caccggggctgcccatacttaatgt

SEQ ID NO: 60947 - DNA, 25 bp, Canis familiaris
caccagggaagccactaccctgatg

SEQ ID NO: 60948 - DNA, 25 bp, Canis familiaris
cacctggattggtgtaccctgcact

SEQ ID NO: 60949 - DNA, 25 bp, Canis familiaris
cacgtgttatatttctaatcctact

SEQ ID NO: 60950 - DNA, 25 bp, Canis familiaris
cacgagttttcttaatgacccagtc

SEQ ID NO: 60951 - DNA, 25 bp, Canis familiaris
cacgcgtttttggagaagtgcgagg

SEQ ID NO: 60952 - DNA, 25 bp, Canis familiaris
cacggttctttcgagtgaacaggtg

SEQ ID NO: 60953 - DNA, 25 bp, Canis familiaris
cacgcgttttgtcaatgtccagggc

SEQ ID NO: 60954 - DNA, 25 bp, Canis familiaris
cacggtggttgaccgtgcctatgag

SEQ ID NO: 60955 - DNA, 25 bp, Canis familiaris
cacggcttgttgatcttgttccagc

SEQ ID NO: 60956 - DNA, 25 bp, Canis familiaris
cacgagctggcattcattctttctc

SEQ ID NO: 60957 - DNA, 25 bp, Canis familiaris
cacgaggcttatttctcatggctcc

SEQ ID NO: 60958 - DNA, 25 bp, Canis familiaris
cacgagaccacttttaactcatcat

SEQ ID NO: 60959 - DNA, 25 bp, Canis familiaris
cattctaccacatgttaactaatcc

SEQ ID NO: 60960 - DNA, 25 bp, Canis familiaris
cagtctactaatccttaattaccac

SEQ ID NO: 60961 - DNA, 25 bp, Canis familiaris
cacctaccagtgtttacgatatcct

SEQ ID NO: 60962 - DNA, 25 bp, Canis familiaris
cacgctgaccagcgttcaggagtcc

SEQ ID NO: 60963 - DNA, 25 bp, Canis familiaris
cacgataccttggattcagaaaccc

SEQ ID NO: 60964 - DNA, 25 bp, Canis familiaris
cacgtccacttgtatgtcaccaaaa

SEQ ID NO: 60965 - DNA, 25 bp, Canis familiaris
cacgtccacttgtatgtcaccaaaa

SEQ ID NO: 60966 - DNA, 25 bp, Canis familiaris
cactggccactgctatggcccaaga

SEQ ID NO: 60967 - DNA, 25 bp, Canis familiaris
cactggctgcgtctcagagggaagg

SEQ ID NO: 60968 - DNA, 25 bp, Canis familiaris
cacgagcgctgccgtaaggaaagga

SEQ ID NO: 60969 - DNA, 25 bp, Canis familiaris
cacggcgtccctttgaaaagcttgg

SEQ ID NO: 60970 - DNA, 25 bp, Canis familiaris
cacggcttccccttgaagcaacaat

SEQ ID NO: 60971 - DNA, 25 bp, Canis familiaris
cacgtggtcctggacgacgaaccat

SEQ ID NO: 60972 - DNA, 25 bp, Canis familiaris
cacgctggtgcagggatcgttaccc

SEQ ID NO: 60973 - DNA, 25 bp, Canis familiaris
cacctggagagggatagttgactgg

SEQ ID NO: 60974 - DNA, 25 bp, Canis familiaris
cagcggcggtgggtaattagaggtc

SEQ ID NO: 60975 - DNA, 25 bp, Canis familiaris
cacgggtgactgggaatacagtggt

SEQ ID NO: 60976 - DNA, 25 bp, Canis familiaris
cacgggtgactggggaatcaagggt

SEQ ID NO: 60977 - DNA, 25 bp, Canis familiaris
cacggtgtgttggaggttgacgctg

SEQ ID NO: 60978 - DNA, 25 bp, Canis familiaris
cactggtggctacagggaggcactg

SEQ ID NO: 60979 - DNA, 25 bp, Canis familiaris
cactggtgaccaatggcggagccca

SEQ ID NO: 60980 - DNA, 25 bp, Canis familiaris
cactggtgaccatttggggctggga

SEQ ID NO: 60981 - DNA, 25 bp, Canis familiaris
cactggtgtcctcctggaggcggaa

SEQ ID NO: 60982 - DNA, 25 bp, Canis familiaris
cacggtctgcctctgatgaaggtga

SEQ ID NO: 60983 - DNA, 25 bp, Canis familiaris
cacggctcctctcagagaagctatt

SEQ ID NO: 60984 - DNA, 25 bp, Canis familiaris
cacggctcctctcagagaagctatt

SEQ ID NO: 60985 - DNA, 25 bp, Canis familiaris
cacggctcctctcagagaagctatt

SEQ ID NO: 60986 - DNA, 25 bp, Canis familiaris
cacggctcctctcagagaagctatt

SEQ ID NO: 60987 - DNA, 25 bp, Canis familiaris
cacggctcctctcagagaagctgtt

SEQ ID NO: 60988 - DNA, 25 bp, Canis familiaris
cacggctcctctcagagaagctgtt

SEQ ID NO: 60989 - DNA, 25 bp, Canis familiaris
cacggctcctctcagagaagctgtt

SEQ ID NO: 60990 - DNA, 25 bp, Canis familiaris
cacgtctccctgctgaaattgggtg

SEQ ID NO: 60991 - DNA, 25 bp, Canis familiaris
cacgtcacacctctgaacaagctag

SEQ ID NO: 60992 - DNA, 25 bp, Canis familiaris
cacgctaccttcttaaatactcagt

SEQ ID NO: 60993 - DNA, 25 bp, Canis familiaris
cacctacgtgatgctgaagaaccag

SEQ ID NO: 60994 - DNA, 25 bp, Canis familiaris
cacgcacacagttctggacagacgg

SEQ ID NO: 60995 - DNA, 25 bp, Canis familiaris
cacgctcaacattccatagaccggg

SEQ ID NO: 60996 - DNA, 25 bp, Canis familiaris
cacgtcgaatcagcaacctcaagga

SEQ ID NO: 60997 - DNA, 25 bp, Canis familiaris
caccatggacaagcaccccaattga

SEQ ID NO: 60998 - DNA, 25 bp, Canis familiaris
cacgcttgagaacccgaggcaactc

SEQ ID NO: 60999 - DNA, 25 bp, Canis familiaris
cacgtctagaccgtcgacagaacct

SEQ ID NO: 61000 - DNA, 25 bp, Canis familiaris
caccctgaactggccgacaagaatg

SEQ ID NO: 61001 - DNA, 25 bp, Canis familiaris
cacccaggcatcccacatgaaggat

SEQ ID NO: 61002 - DNA, 25 bp, Canis familiaris
cacgtcaggctccctgcatggagcc

SEQ ID NO: 61003 - DNA, 25 bp, Canis familiaris
cacggcaccatcttggatctgagcc

SEQ ID NO: 61004 - DNA, 25 bp, Canis familiaris
cactggcactcagctgtgttggagc

SEQ ID NO: 61005 - DNA, 25 bp, Canis familiaris
cactggcatctgtagcatcgttggg

SEQ ID NO: 61006 - DNA, 25 bp, Canis familiaris
cacgtcatctgctccatgttgagtg

SEQ ID NO: 61007 - DNA, 25 bp, Canis familiaris
cacgtgcaccagcactgcattagtg

SEQ ID NO: 61008 - DNA, 25 bp, Canis familiaris
cacgctcgctagcagctgctaaggt

SEQ ID NO: 61009 - DNA, 25 bp, Canis familiaris
cacgctcctaaatgcatctgatttg

SEQ ID NO: 61010 - DNA, 25 bp, Canis familiaris
cacgtcgatgatcaggctctcagtg

SEQ ID NO: 61011 - DNA, 25 bp, Canis familiaris
cactggctgttcacagtctctgtgt

SEQ ID NO: 61012 - DNA, 25 bp, Canis familiaris
cacggctgattctcacagtctgttg

SEQ ID NO: 61013 - DNA, 25 bp, Canis familiaris
cacgtggcttctgcacagacttata

SEQ ID NO: 61014 - DNA, 25 bp, Canis familiaris
cacggccaccatgaagtctggcaac

SEQ ID NO: 61015 - DNA, 25 bp, Canis familiaris
cactggctcccatttatttacaatt

SEQ ID NO: 61016 - DNA, 25 bp, Canis familiaris
cacgatggcccttggcatttaacaa

SEQ ID NO: 61017 - DNA, 25 bp, Canis familiaris
cagaggacgcacaggcttttaaaaa

SEQ ID NO: 61018 - DNA, 25 bp, Canis familiaris
cacctacggttcctttctagagaag

SEQ ID NO: 61019 - DNA, 25 bp, Canis familiaris
cagctccgggtgtctttttaaaatg

SEQ ID NO: 61020 - DNA, 25 bp, Canis familiaris
cacgacgtcttgcaatttttaaatt

SEQ ID NO: 61021 - DNA, 25 bp, Canis familiaris
caccctcctctggatatttcttata

SEQ ID NO: 61022 - DNA, 25 bp, Canis familiaris
cacccagccactattttgttgacta

SEQ ID NO: 61023 - DNA, 25 bp, Canis familiaris
cacccatcccaattttagtttcatg

SEQ ID NO: 61024 - DNA, 25 bp, Canis familiaris
cagtaccccaaagttcagtaatatt

SEQ ID NO: 61025 - DNA, 25 bp, Canis familiaris
cacccccgcaaagatactggcaatt

SEQ ID NO: 61026 - DNA, 25 bp, Canis familiaris
caccctgcccggggtgacgaggttg

SEQ ID NO: 61027 - DNA, 25 bp, Canis familiaris
cacccccggatcctgaaggaagttg

SEQ ID NO: 61028 - DNA, 25 bp, Canis familiaris
caccccttgcttccagaaagggtct

SEQ ID NO: 61029 - DNA, 25 bp, Canis familiaris
caccccttgcttccagaaagggtct

SEQ ID NO: 61030 - DNA, 25 bp, Canis familiaris
caccccttgcttccagaaagggtct

SEQ ID NO: 61031 - DNA, 25 bp, Canis familiaris
caccccttgcttccagaaagggtct

SEQ ID NO: 61032 - DNA, 25 bp, Canis familiaris
caccccttgcttccagaaagggtct

SEQ ID NO: 61033 - DNA, 25 bp, Canis familiaris
caccccttgcttccagaaagggtct

SEQ ID NO: 61034 - DNA, 25 bp, Canis familiaris
caccccttgcttccagaaagggtct

SEQ ID NO: 61035 - DNA, 25 bp, Canis familiaris
caccccttgcttccagaaagggtct

SEQ ID NO: 61036 - DNA, 25 bp, Canis familiaris
caccccttgcttccagaaagggtct

SEQ ID NO: 61037 - DNA, 25 bp, Canis familiaris
caccccttgcttccagaaagggtct

SEQ ID NO: 61038 - DNA, 25 bp, Canis familiaris
caccccttgcttccagaaagggtct

SEQ ID NO: 61039 - DNA, 25 bp, Canis familiaris
caccccttgcttccagaaagggtct

SEQ ID NO: 61040 - DNA, 25 bp, Canis familiaris
cacgcgtccgatttcagtgcaaggg

SEQ ID NO: 61041 - DNA, 25 bp, Canis familiaris
cagcgtttggtgttgattcgagcgg

SEQ ID NO: 61042 - DNA, 25 bp, Canis familiaris
cacgtttggcactactttgacttat

SEQ ID NO: 61043 - DNA, 25 bp, Canis familiaris
cacgtaatggagtttttgctattta

SEQ ID NO: 61044 - DNA, 25 bp, Canis familiaris
cacgggagtagacttcttttctata

SEQ ID NO: 61045 - DNA, 25 bp, Canis familiaris
cacggggacacattgtctctttctt

SEQ ID NO: 61046 - DNA, 25 bp, Canis familiaris
cacgtggagtccctgtgttttgtgt

SEQ ID NO: 61047 - DNA, 25 bp, Canis familiaris
cacgggactctctatgtttgatatg

SEQ ID NO: 61048 - DNA, 25 bp, Canis familiaris
cacgaggactggcagactagctttt

SEQ ID NO: 61049 - DNA, 25 bp, Canis familiaris
cacgaggccgagcaagcgagcggtc

SEQ ID NO: 61050 - DNA, 25 bp, Canis familiaris
cacgcagaggcaccgagggacaggt

SEQ ID NO: 61051 - DNA, 25 bp, Canis familiaris
cacgagagcgccgagagcgatgggc

SEQ ID NO: 61052 - DNA, 25 bp, Canis familiaris
cacggatgctggtggactgcgtgcc

SEQ ID NO: 61053 - DNA, 25 bp, Canis familiaris
cacgagagctggtgctttgtggccg

SEQ ID NO: 61054 - DNA, 25 bp, Canis familiaris
cacgtggctgtgcacatttgcttga

SEQ ID NO: 61055 - DNA, 25 bp, Canis familiaris
cacgaggcgtggtcatatctatctt

SEQ ID NO: 61056 - DNA, 25 bp, Canis familiaris
cacgaggcgagcgaggactgcatct

SEQ ID NO: 61057 - DNA, 25 bp, Canis familiaris
cacgatgtggaggagtggctgcccc

SEQ ID NO: 61058 - DNA, 25 bp, Canis familiaris
cacgatggaatgggtgtgggcgctc

SEQ ID NO: 61059 - DNA, 25 bp, Canis familiaris
cacgtggtatgagggtccggggagg

SEQ ID NO: 61060 - DNA, 25 bp, Canis familiaris
cacgctttatgagggctacgggaac

SEQ ID NO: 61061 - DNA, 25 bp, Canis familiaris
cacctggaaaatcctacgcgggact

SEQ ID NO: 61062 - DNA, 25 bp, Canis familiaris
cacctaaacagtcctcaccagtttt

SEQ ID NO: 61063 - DNA, 25 bp, Canis familiaris
caccgaggtcgtcctcaaagcattt

SEQ ID NO: 61064 - DNA, 25 bp, Canis familiaris
caccgaggaagctccaaaggtatgc

SEQ ID NO: 61065 - DNA, 25 bp, Canis familiaris
caccggtgaacgcccattccggtgc

SEQ ID NO: 61066 - DNA, 25 bp, Canis familiaris
caccgcgtgcaaggttttcgcggca

SEQ ID NO: 61067 - DNA, 25 bp, Canis familiaris
cacccggcgcaagtgggaagcggca

SEQ ID NO: 61068 - DNA, 25 bp, Canis familiaris
caccccgagaacgcaaagctggctg

SEQ ID NO: 61069 - DNA, 25 bp, Canis familiaris
caccccgagatcattacctgggctg

SEQ ID NO: 61070 - DNA, 25 bp, Canis familiaris
caccaccagggctttctttggggtg

SEQ ID NO: 61071 - DNA, 25 bp, Canis familiaris
caccgcagccgtatctgtttggcgg

SEQ ID NO: 61072 - DNA, 25 bp, Canis familiaris
cacccaccaggcactttggagaaga

SEQ ID NO: 61073 - DNA, 25 bp, Canis familiaris
cagccgaccggaactttgttggact

SEQ ID NO: 61074 - DNA, 25 bp, Canis familiaris
cagcccgccaggacacgggtttact

SEQ ID NO: 61075 - DNA, 25 bp, Canis familiaris
caccggcagcagatcggcggttttc

SEQ ID NO: 61076 - DNA, 25 bp, Canis familiaris
caccccatggttggacctgtaattc

SEQ ID NO: 61077 - DNA, 25 bp, Canis familiaris
caccctttgcttggttttaagtatg

SEQ ID NO: 61078 - DNA, 25 bp, Canis familiaris
caccctttgcttggttttaagtatg

SEQ ID NO: 61079 - DNA, 25 bp, Canis familiaris
caccctttgcttggttttaagtatg

SEQ ID NO: 61080 - DNA, 25 bp, Canis familiaris
cagcccgtacctggtgtaaaagaag

SEQ ID NO: 61081 - DNA, 25 bp, Canis familiaris
caccggcgacctgcggtcaagaata

SEQ ID NO: 61082 - DNA, 25 bp, Canis familiaris
caccgtccaactgtatgacctgcaa

SEQ ID NO: 61083 - DNA, 25 bp, Canis familiaris
caccttccaactgccaagtcaaatt

SEQ ID NO: 61084 - DNA, 25 bp, Canis familiaris
cacctccccaccacaaaaatattag

SEQ ID NO: 61085 - DNA, 25 bp, Canis familiaris
caccctcccccaacaaagagggatg

SEQ ID NO: 61086 - DNA, 25 bp, Canis familiaris
caccctcttccctgggagcaggaag

SEQ ID NO: 61087 - DNA, 25 bp, Canis familiaris
caccttttcccccaaggagatgtag

SEQ ID NO: 61088 - DNA, 25 bp, Canis familiaris
caccggtgctcctcaacgaggatgt

SEQ ID NO: 61089 - DNA, 25 bp, Canis familiaris
caccagggcttcaccaggagccctg

SEQ ID NO: 61090 - DNA, 25 bp, Canis familiaris
caccgagacggaatccaggacccat

SEQ ID NO: 61091 - DNA, 25 bp, Canis familiaris
cacctttctggtttcaacacccagc

SEQ ID NO: 61092 - DNA, 25 bp, Canis familiaris
cacggtgtaggttttacagtctcct

SEQ ID NO: 61093 - DNA, 25 bp, Canis familiaris
cacgttgtaggtgtaactgtcactg

SEQ ID NO: 61094 - DNA, 25 bp, Canis familiaris
cacgttgtacgttctggatgctcgc

SEQ ID NO: 61095 - DNA, 25 bp, Canis familiaris
cacgttgtatccggatagtctccag

SEQ ID NO: 61096 - DNA, 25 bp, Canis familiaris
cacgtattccacgagttctgcatcc

SEQ ID NO: 61097 - DNA, 25 bp, Canis familiaris
caccctgtcagcagcaggacttctc

SEQ ID NO: 61098 - DNA, 25 bp, Canis familiaris
cacggtctatgccagcgtgacgttc

SEQ ID NO: 61099 - DNA, 25 bp, Canis familiaris
caccgttattggcctgccagtttga

SEQ ID NO: 61100 - DNA, 25 bp, Canis familiaris
cacgtttgtgggcctggagactttt

SEQ ID NO: 61101 - DNA, 25 bp, Canis familiaris
cacgctgctcacagtggtaggactt

SEQ ID NO: 61102 - DNA, 25 bp, Canis familiaris
cacccttcagcgtgctggcagaatt

SEQ ID NO: 61103 - DNA, 25 bp, Canis familiaris
cacccaccaggtccaagaacagttc

SEQ ID NO: 61104 - DNA, 25 bp, Canis familiaris
cacccagccgtccctaaaaggatga

SEQ ID NO: 61105 - DNA, 25 bp, Canis familiaris
cacccacctgcccaataaacaggct

SEQ ID NO: 61106 - DNA, 25 bp, Canis familiaris
cacgaacgtcaggaaccacctggtc

SEQ ID NO: 61107 - DNA, 25 bp, Canis familiaris
cacctactgacggactgtacctagt

SEQ ID NO: 61108 - DNA, 25 bp, Canis familiaris
caccgaggagcatcactgtcactcc

SEQ ID NO: 61109 - DNA, 25 bp, Canis familiaris
cacgatgagaaaccacctcacacca

SEQ ID NO: 61110 - DNA, 25 bp, Canis familiaris
cacgcacatggacacacacttacca

SEQ ID NO: 61111 - DNA, 25 bp, Canis familiaris
cacgggcgagaagccgtacctgtgc

SEQ ID NO: 61112 - DNA, 25 bp, Canis familiaris
cagcgaggggtcttacgtactaggt

SEQ ID NO: 61113 - DNA, 25 bp, Canis familiaris
cacgaggggatccatgcacctatgt

SEQ ID NO: 61114 - DNA, 25 bp, Canis familiaris
cacgaggggagcgagctgctctctg

SEQ ID NO: 61115 - DNA, 25 bp, Canis familiaris
cacgacgtgcgggcacatgctactg

SEQ ID NO: 61116 - DNA, 25 bp, Canis familiaris
cacgagcagcagcgaccagtcgctg

SEQ ID NO: 61117 - DNA, 25 bp, Canis familiaris
cacgagccgcaggatgccttatgcg

SEQ ID NO: 61118 - DNA, 25 bp, Canis familiaris
cacgcctaggcaggcactgtgggca

SEQ ID NO: 61119 - DNA, 25 bp, Canis familiaris
caccacttggcagcggtagcctgta

SEQ ID NO: 61120 - DNA, 25 bp, Canis familiaris
caccctcattggtgtgtgtccgttt

SEQ ID NO: 61121 - DNA, 25 bp, Canis familiaris
caccttcaggtgacgttgtgacgat

SEQ ID NO: 61122 - DNA, 25 bp, Canis familiaris
cacgcttgagactatcttcttttga

SEQ ID NO: 61123 - DNA, 25 bp, Canis familiaris
cacgtttcaagactgactcgttaaa

SEQ ID NO: 61124 - DNA, 25 bp, Canis familiaris
cacgtttttcctcctattaatcaag

SEQ ID NO: 61125 - DNA, 25 bp, Canis familiaris
cacgtttttcctcctattaatcaag

SEQ ID NO: 61126 - DNA, 25 bp, Canis familiaris
cacgctttcttctaggtttacatac

SEQ ID NO: 61127 - DNA, 25 bp, Canis familiaris
cacgtatccccgagatttacaaagt

SEQ ID NO: 61128 - DNA, 25 bp, Canis familiaris
cacgttcccttcatatttcaacttt

SEQ ID NO: 61129 - DNA, 25 bp, Canis familiaris
caccctccttatctatttaattcct

SEQ ID NO: 61130 - DNA, 25 bp, Canis familiaris
caccctccttgtacctagtacattt

SEQ ID NO: 61131 - DNA, 25 bp, Canis familiaris
caccctcctttttgtatgtaccaag

SEQ ID NO: 61132 - DNA, 25 bp, Canis familiaris
caccctcctggctgggaaaacaaga

SEQ ID NO: 61133 - DNA, 25 bp, Canis familiaris
cagcccaccttgtttggaaataccg

SEQ ID NO: 61134 - DNA, 25 bp, Canis familiaris
cagtttccttgtctgtaaaatgggg

SEQ ID NO: 61135 - DNA, 25 bp, Canis familiaris
cagattttccgccctgggtaattgt

SEQ ID NO: 61136 - DNA, 25 bp, Canis familiaris
cagttccaggccccgaaggaaatgg

SEQ ID NO: 61137 - DNA, 25 bp, Canis familiaris
caggaccagacggggaaggtaagtg

SEQ ID NO: 61138 - DNA, 25 bp, Canis familiaris
cagcgagctcaacgggaaaaacatc

SEQ ID NO: 61139 - DNA, 25 bp, Canis familiaris
cacgagccgatgccgggacgagaag

SEQ ID NO: 61140 - DNA, 25 bp, Canis familiaris
cacgtgcccaccatggaggcagaga

SEQ ID NO: 61141 - DNA, 25 bp, Canis familiaris
cagctgacaccgtcactggacggat

SEQ ID NO: 61142 - DNA, 25 bp, Canis familiaris
cacgaggccagatctgcagacggct

SEQ ID NO: 61143 - DNA, 25 bp, Canis familiaris
cacgagctggcatcactgagaaggt

SEQ ID NO: 61144 - DNA, 25 bp, Canis familiaris
cacggggacacagcatcacaggtgc

SEQ ID NO: 61145 - DNA, 25 bp, Canis familiaris
cacgtgggaaatgcaacatgtggtg

SEQ ID NO: 61146 - DNA, 25 bp, Canis familiaris
cacgtgggacaaagaaggcacgctg

SEQ ID NO: 61147 - DNA, 25 bp, Canis familiaris
cagcgtgcgggagggctagccacgc

SEQ ID NO: 61148 - DNA, 25 bp, Canis familiaris
caccgtgggggacagccaagcggac

SEQ ID NO: 61149 - DNA, 25 bp, Canis familiaris
caccggggggagttctcggtgtgcg

SEQ ID NO: 61150 - DNA, 25 bp, Canis familiaris
caccgaaggccgagatccggtcggc

SEQ ID NO: 61151 - DNA, 25 bp, Canis familiaris
caccaaagccccagtgccaggggcc

SEQ ID NO: 61152 - DNA, 25 bp, Canis familiaris
caccttggccccagggacaggggct

SEQ ID NO: 61153 - DNA, 25 bp, Canis familiaris
gacacgggtccctgggacctgggtg

SEQ ID NO: 61154 - DNA, 25 bp, Canis familiaris
gaacgggcgcaagaagaacctgggg

SEQ ID NO: 61155 - DNA, 25 bp, Canis familiaris
caccgcctcccagaaaacggagcgg

SEQ ID NO: 61156 - DNA, 25 bp, Canis familiaris
caccccttctagaatagattcccag

SEQ ID NO: 61157 - DNA, 25 bp, Canis familiaris
caccgtccatatttaacttcccatg

SEQ ID NO: 61158 - DNA, 25 bp, Canis familiaris
cagccgtctacagagaacccaactg

SEQ ID NO: 61159 - DNA, 25 bp, Canis familiaris
cacgccacgcaagaggacaccaaat

SEQ ID NO: 61160 - DNA, 25 bp, Canis familiaris
cacccagcctatcaggacaggccaa

SEQ ID NO: 61161 - DNA, 25 bp, Canis familiaris
cacctacctggcgggacagaagcac

SEQ ID NO: 61162 - DNA, 25 bp, Canis familiaris
cacgtctctcgatcgtcacgaagag

SEQ ID NO: 61163 - DNA, 25 bp, Canis familiaris
cacgtccctgcatgaggcccacgag

SEQ ID NO: 61164 - DNA, 25 bp, Canis familiaris
caccctctatcatgggtccacaatc

SEQ ID NO: 61165 - DNA, 25 bp, Canis familiaris
cacgcccatgtctaggcgtcacgag

SEQ ID NO: 61166 - DNA, 25 bp, Canis familiaris
cacgcacaagctttgggttctgacc

SEQ ID NO: 61167 - DNA, 25 bp, Canis familiaris
cacgtcaacaattatcagctttacc

SEQ ID NO: 61168 - DNA, 25 bp, Canis familiaris
cacgcgcaacactagacgtctgtat

SEQ ID NO: 61169 - DNA, 25 bp, Canis familiaris
caccacgtcagcgatgaagttgtac

SEQ ID NO: 61170 - DNA, 25 bp, Canis familiaris
cacccgctcacagtgtggactgttc

SEQ ID NO: 61171 - DNA, 25 bp, Canis familiaris
cacctggccacaggtgagcctttcc

SEQ ID NO: 61172 - DNA, 25 bp, Canis familiaris
caccggacaacgagcactttgcttc

SEQ ID NO: 61173 - DNA, 25 bp, Canis familiaris
cacgtggaattttggtctcttgctt

SEQ ID NO: 61174 - DNA, 25 bp, Canis familiaris
cacgctgtggtttgatgatgcgctc

SEQ ID NO: 61175 - DNA, 25 bp, Canis familiaris
cacgctgtagtttgtctcgttcgta

SEQ ID NO: 61176 - DNA, 25 bp, Canis familiaris
cacgtgtagcgctgttagctgtagt

SEQ ID NO: 61177 - DNA, 25 bp, Canis familiaris
cacgaggcgagctgactggttgtgt

SEQ ID NO: 61178 - DNA, 25 bp, Canis familiaris
caccataggagctgacttttttttt

SEQ ID NO: 61179 - DNA, 25 bp, Canis familiaris
cagcagttagtgtcccttattttct

SEQ ID NO: 61180 - DNA, 25 bp, Canis familiaris
caccttaatgtctctgtttatttca

SEQ ID NO: 61181 - DNA, 25 bp, Canis familiaris
cacccgactgctgtagtcgttttca

SEQ ID NO: 61182 - DNA, 25 bp, Canis familiaris
cacccaggcgtccaagattttcttt

SEQ ID NO: 61183 - DNA, 25 bp, Canis familiaris
cacccaggcgtcccaatatagttga

SEQ ID NO: 61184 - DNA, 25 bp, Canis familiaris
cacccaggtgccccaaagaattaga

SEQ ID NO: 61185 - DNA, 25 bp, Canis familiaris
caccaacaggtccgccaaattcgga

SEQ ID NO: 61186 - DNA, 25 bp, Canis familiaris
gactataagcgaggaaaaatgtggg

SEQ ID NO: 61187 - DNA, 25 bp, Canis familiaris
cacgctaaccgtaatcaaccatggg

SEQ ID NO: 61188 - DNA, 25 bp, Canis familiaris
cacgaaacccgtacaaatcatgcaa

SEQ ID NO: 61189 - DNA, 25 bp, Canis familiaris
cacccaacagagctccttatgctgc

SEQ ID NO: 61190 - DNA, 25 bp, Canis familiaris
caccgaaagagagcgcctatctcat

SEQ ID NO: 61191 - DNA, 25 bp, Canis familiaris
caccgaaagagagcgcctatctcat

SEQ ID NO: 61192 - DNA, 25 bp, Canis familiaris
caccggaggagggagccttctccat

SEQ ID NO: 61193 - DNA, 25 bp, Canis familiaris
cacccacggagtgcgtcttgtggat

SEQ ID NO: 61194 - DNA, 25 bp, Canis familiaris
caccccgagcaggcctgtgctcggg

SEQ ID NO: 61195 - DNA, 25 bp, Canis familiaris
cacccctccgctgtgacatgcggag

SEQ ID NO: 61196 - DNA, 25 bp, Canis familiaris
caccggctccacaggagcagcgggc

SEQ ID NO: 61197 - DNA, 25 bp, Canis familiaris
caccgtgcttccggtgcagatggac

SEQ ID NO: 61198 - DNA, 25 bp, Canis familiaris
caccttttccagggactgtgcattt

SEQ ID NO: 61199 - DNA, 25 bp, Canis familiaris
cacctttaactggggcttgatacta

SEQ ID NO: 61200 - DNA, 25 bp, Canis familiaris
cacctgtttactctggcttgtttgc

SEQ ID NO: 61201 - DNA, 25 bp, Canis familiaris
cacctggaacttcttgctgttttcc

SEQ ID NO: 61202 - DNA, 25 bp, Canis familiaris
cacctgggaatcatttctgcttcta

SEQ ID NO: 61203 - DNA, 25 bp, Canis familiaris
caccgcaggtatctttcacaattca

SEQ ID NO: 61204 - DNA, 25 bp, Canis familiaris
cacgccaggcttcttgataagcttg

SEQ ID NO: 61205 - DNA, 25 bp, Canis familiaris
cacgatcagttttgcttgtaacact

SEQ ID NO: 61206 - DNA, 25 bp, Canis familiaris
cacgtcttcatttgcttccataaga

SEQ ID NO: 61207 - DNA, 25 bp, Canis familiaris
cacgtcttcatttgcttccataaga

SEQ ID NO: 61208 - DNA, 25 bp, Canis familiaris
cacgtcttcatttgcttccataaga

SEQ ID NO: 61209 - DNA, 25 bp, Canis familiaris
cacgtcgtcattggcttccataaga

SEQ ID NO: 61210 - DNA, 25 bp, Canis familiaris
cacgtcctctctgctaacagtaatc

SEQ ID NO: 61211 - DNA, 25 bp, Canis familiaris
cacgttgccctaatagaagtactca

SEQ ID NO: 61212 - DNA, 25 bp, Canis familiaris
cacgtatccttaaaaagcctctata

SEQ ID NO: 61213 - DNA, 25 bp, Canis familiaris
cacctacttgtaaattctccctgtt

SEQ ID NO: 61214 - DNA, 25 bp, Canis familiaris
cacgctcacatttatgaaatcccct

SEQ ID NO: 61215 - DNA, 25 bp, Canis familiaris
caccttatctatcacaatccacttg

SEQ ID NO: 61216 - DNA, 25 bp, Canis familiaris
cacctctctttccacagaaacgtga

SEQ ID NO: 61217 - DNA, 25 bp, Canis familiaris
cacccacattataccaagtattgga

SEQ ID NO: 61218 - DNA, 25 bp, Canis familiaris
cacgagcatcgtgggcaagagtatg

SEQ ID NO: 61219 - DNA, 25 bp, Canis familiaris
cacgcacatcgtggtgagctggatg

SEQ ID NO: 61220 - DNA, 25 bp, Canis familiaris
cacgacgctctcgtgagggctggag

SEQ ID NO: 61221 - DNA, 25 bp, Canis familiaris
cacgagtctggtgggggctggtgga

SEQ ID NO: 61222 - DNA, 25 bp, Canis familiaris
cacgacctgtcccttagtggtggga

SEQ ID NO: 61223 - DNA, 25 bp, Canis familiaris
cacgagccgtgctgcttatggcggc

SEQ ID NO: 61224 - DNA, 25 bp, Canis familiaris
cacgagcccagacctgtgtgggggc

SEQ ID NO: 61225 - DNA, 25 bp, Canis familiaris
cacgagggcgagaggcttggcggcc

SEQ ID NO: 61226 - DNA, 25 bp, Canis familiaris
caccgagtcggatgggatgtcaggc

SEQ ID NO: 61227 - DNA, 25 bp, Canis familiaris
caccgttcggcattcagtgtggggt

SEQ ID NO: 61228 - DNA, 25 bp, Canis familiaris
caccggctcttgctagatgtgcctg

SEQ ID NO: 61229 - DNA, 25 bp, Canis familiaris
caccggctattacgttccgtggtca

SEQ ID NO: 61230 - DNA, 25 bp, Canis familiaris
cacctggcttgcaaggcttgcctgg

SEQ ID NO: 61231 - DNA, 25 bp, Canis familiaris
cagcgtgctgctgctatttatcgtg

SEQ ID NO: 61232 - DNA, 25 bp, Canis familiaris
cagcatgttgctgaagattgatgag

SEQ ID NO: 61233 - DNA, 25 bp, Canis familiaris
cagcttggctaaaatgatatgtaaa

SEQ ID NO: 61234 - DNA, 25 bp, Canis familiaris
cacctgacaaatagtgtgtgctaaa

SEQ ID NO: 61235 - DNA, 25 bp, Canis familiaris
cacctgcatcaggactcttggcatc

SEQ ID NO: 61236 - DNA, 25 bp, Canis familiaris
cacgctcacctgttactgagctcgc

SEQ ID NO: 61237 - DNA, 25 bp, Canis familiaris
caccatccgttttcatgacctcctg

SEQ ID NO: 61238 - DNA, 25 bp, Canis familiaris
cacccacctttgtctgaagctagga

SEQ ID NO: 61239 - DNA, 25 bp, Canis familiaris
cacgccatcctgcgtctggacttgg

SEQ ID NO: 61240 - DNA, 25 bp, Canis familiaris
cacccatgcctgttctaggtttggg

SEQ ID NO: 61241 - DNA, 25 bp, Canis familiaris
caccctcctcgtgatgtgtttgttt

SEQ ID NO: 61242 - DNA, 25 bp, Canis familiaris
cacccaccacctggagcttaggggt

SEQ ID NO: 61243 - DNA, 25 bp, Canis familiaris
caccccagacctttctaaggcaagg

SEQ ID NO: 61244 - DNA, 25 bp, Canis familiaris
cagggcctgaccagtggaaggaatg

SEQ ID NO: 61245 - DNA, 25 bp, Canis familiaris
cagctgtaaacctgggaagactatg

SEQ ID NO: 61246 - DNA, 25 bp, Canis familiaris
cagcgttcctccggaggaagcctcg

SEQ ID NO: 61247 - DNA, 25 bp, Canis familiaris
cacgtctatcccatagtaagcaccc

SEQ ID NO: 61248 - DNA, 25 bp, Canis familiaris
cagagagtaccgctattgaaggccc

SEQ ID NO: 61249 - DNA, 25 bp, Canis familiaris
cagagggtcccctaaatagtccacg

SEQ ID NO: 61250 - DNA, 25 bp, Canis familiaris
cggtatcccgtttttcatgtcaccg

SEQ ID NO: 61251 - DNA, 25 bp, Canis familiaris
cacgttcccgtatttatcactgatc

SEQ ID NO: 61252 - DNA, 25 bp, Canis familiaris
cacgtatcgcgtgatggttcaggct

SEQ ID NO: 61253 - DNA, 25 bp, Canis familiaris
cacgaacacgctgtgtgctgtggcg

SEQ ID NO: 61254 - DNA, 25 bp, Canis familiaris
cacgcaccacgtgagatggcgggga

SEQ ID NO: 61255 - DNA, 25 bp, Canis familiaris
cacccagacgtgacaatcggttctg

SEQ ID NO: 61256 - DNA, 25 bp, Canis familiaris
caccgaacaggacctaagttctgta

SEQ ID NO: 61257 - DNA, 25 bp, Canis familiaris
cacccaacgagaccttggtccaggc

SEQ ID NO: 61258 - DNA, 25 bp, Canis familiaris
cacctcgcggaacatctcgttgagg

SEQ ID NO: 61259 - DNA, 25 bp, Canis familiaris
cacccttgtgaaacttccctgggag

SEQ ID NO: 61260 - DNA, 25 bp, Canis familiaris
cacccttaaaaccaccttgatggtg

SEQ ID NO: 61261 - DNA, 25 bp, Canis familiaris
cacccctcaaaacactctagagctc

SEQ ID NO: 61262 - DNA, 25 bp, Canis familiaris
cacccctaagggcattgctggagct

SEQ ID NO: 61263 - DNA, 25 bp, Canis familiaris
cacccccttagacagtcatggtctt

SEQ ID NO: 61264 - DNA, 25 bp, Canis familiaris
caccccgtaggcagagtctagtctg

SEQ ID NO: 61265 - DNA, 25 bp, Canis familiaris
cacgcccgttagggagaccagtaga

SEQ ID NO: 61266 - DNA, 25 bp, Canis familiaris
caccgggtttcggaaccagctgtgg

SEQ ID NO: 61267 - DNA, 25 bp, Canis familiaris
caccgcggttgagtgtacacctttg

SEQ ID NO: 61268 - DNA, 25 bp, Canis familiaris
cacctggtgactctgtcactacctg

SEQ ID NO: 61269 - DNA, 25 bp, Canis familiaris
caccgatgggctctgtcttgagttg

SEQ ID NO: 61270 - DNA, 25 bp, Canis familiaris
cacgcgtgtggttcttcacgacatt

SEQ ID NO: 61271 - DNA, 25 bp, Canis familiaris
cacgctgtttagtcatctccagagc

SEQ ID NO: 61272 - DNA, 25 bp, Canis familiaris
cacgctaattgattacgccagagta

SEQ ID NO: 61273 - DNA, 25 bp, Canis familiaris
cacgcataacatttcaagctagtcc

SEQ ID NO: 61274 - DNA, 25 bp, Canis familiaris
cacgctcccagagcaactcagacaa

SEQ ID NO: 61275 - DNA, 25 bp, Canis familiaris
cacctaccaaccaccagagacttgg

SEQ ID NO: 61276 - DNA, 25 bp, Canis familiaris
cacctacgggccagccattaactgt

SEQ ID NO: 61277 - DNA, 25 bp, Canis familiaris
cacgttcggtgctgggaccaatctg

SEQ ID NO: 61278 - DNA, 25 bp, Canis familiaris
cacgttcggaacttctacaagcctt

SEQ ID NO: 61279 - DNA, 25 bp, Canis familiaris
cagctttttagagttctacggtcct

SEQ ID NO: 61280 - DNA, 25 bp, Canis familiaris
cagcttttttactttattatgtggt

SEQ ID NO: 61281 - DNA, 25 bp, Canis familiaris
cacgatcctttcaacttttctgtag

SEQ ID NO: 61282 - DNA, 25 bp, Canis familiaris
cacgagcttttctcctttgttagta

SEQ ID NO: 61283 - DNA, 25 bp, Canis familiaris
cacccttcttcaagccttgttgtag

SEQ ID NO: 61284 - DNA, 25 bp, Canis familiaris
caccgtgtttgcacttttgataact

SEQ ID NO: 61285 - DNA, 25 bp, Canis familiaris
cagccggattttgttattgatatct

SEQ ID NO: 61286 - DNA, 25 bp, Canis familiaris
cacgcaggattattactcagttgta

SEQ ID NO: 61287 - DNA, 25 bp, Canis familiaris
cagccaggacctgagtctgtgttag

SEQ ID NO: 61288 - DNA, 25 bp, Canis familiaris
cacgaccactctttctttgtagatg

SEQ ID NO: 61289 - DNA, 25 bp, Canis familiaris
cacctcagacctttagctttcaatg

SEQ ID NO: 61290 - DNA, 25 bp, Canis familiaris
cacctacccaatgcagcatataaac

SEQ ID NO: 61291 - DNA, 25 bp, Canis familiaris
caccaacgtcaagccttggaaccga

SEQ ID NO: 61292 - DNA, 25 bp, Canis familiaris
caccaagcgtaggcacaccataacc

SEQ ID NO: 61293 - DNA, 25 bp, Canis familiaris
caccgagcttctgatccggaactgc

SEQ ID NO: 61294 - DNA, 25 bp, Canis familiaris
caccgacctcatgaccagctgaggc

SEQ ID NO: 61295 - DNA, 25 bp, Canis familiaris
cacgagaggtccaggagctcaggcc

SEQ ID NO: 61296 - DNA, 25 bp, Canis familiaris
cagccagggtggagaacgagtgcca

SEQ ID NO: 61297 - DNA, 25 bp, Canis familiaris
cagcacagggttgttcaaaggcaca

SEQ ID NO: 61298 - DNA, 25 bp, Canis familiaris
cagccacgttggattcaagaccaga

SEQ ID NO: 61299 - DNA, 25 bp, Canis familiaris
caccatcgttccagatcaaacctga

SEQ ID NO: 61300 - DNA, 25 bp, Canis familiaris
caccggtttcataatcactgtctta

SEQ ID NO: 61301 - DNA, 25 bp, Canis familiaris
caccggtgttgataaatgtcacaga

SEQ ID NO: 61302 - DNA, 25 bp, Canis familiaris
caccggcgggaccagaagtggcatg

SEQ ID NO: 61303 - DNA, 25 bp, Canis familiaris
caccgaggggactctcaatcacagg

SEQ ID NO: 61304 - DNA, 25 bp, Canis familiaris
caccatgggctaacagtctttcccg

SEQ ID NO: 61305 - DNA, 25 bp, Canis familiaris
cacctgtggacttgaacttacccct

SEQ ID NO: 61306 - DNA, 25 bp, Canis familiaris
cagcgtgtaacatcacgtaacccgc

SEQ ID NO: 61307 - DNA, 25 bp, Canis familiaris
caccatttacaaacgagacccttct

SEQ ID NO: 61308 - DNA, 25 bp, Canis familiaris
caccgccaagcaaagggaacctgtc

SEQ ID NO: 61309 - DNA, 25 bp, Canis familiaris
caccgccatccttagttgatacttt

SEQ ID NO: 61310 - DNA, 25 bp, Canis familiaris
tctccctggtcctgaactgtattga

SEQ ID NO: 61311 - DNA, 25 bp, Canis familiaris
cacccacagatctgcgtgttacagt

SEQ ID NO: 61312 - DNA, 25 bp, Canis familiaris
cacccacacatctctggtattacct

SEQ ID NO: 61313 - DNA, 25 bp, Canis familiaris
caccgaggcatcccattgatttaca

SEQ ID NO: 61314 - DNA, 25 bp, Canis familiaris
cacccagagcacctgcagtgttttt

SEQ ID NO: 61315 - DNA, 25 bp, Canis familiaris
cacccaatgctaccactgttaatct

SEQ ID NO: 61316 - DNA, 25 bp, Canis familiaris
cacccgatctacacgtttatcggca

SEQ ID NO: 61317 - DNA, 25 bp, Canis familiaris
caccaagaccacacgttcgatgctg

SEQ ID NO: 61318 - DNA, 25 bp, Canis familiaris
cacccagaaccccgttctgagcatt

SEQ ID NO: 61319 - DNA, 25 bp, Canis familiaris
cacccacataccgagaggattagca

SEQ ID NO: 61320 - DNA, 25 bp, Canis familiaris
cacccctacgatggggcctgagcac

SEQ ID NO: 61321 - DNA, 25 bp, Canis familiaris
cacgcatcttcatgaagggcgcgac

SEQ ID NO: 61322 - DNA, 25 bp, Canis familiaris
cacgcagctgcctgaagaagcacaa

SEQ ID NO: 61323 - DNA, 25 bp, Canis familiaris
cacgcagctgtctgaagaagccaca

SEQ ID NO: 61324 - DNA, 25 bp, Canis familiaris
cacgcacgttcgctcaagagcatcg

SEQ ID NO: 61325 - DNA, 25 bp, Canis familiaris
caccctcagtagcatcaggcacatg

SEQ ID NO: 61326 - DNA, 25 bp, Canis familiaris
cacgcaccagttcaacttcatcaag

SEQ ID NO: 61327 - DNA, 25 bp, Canis familiaris
caccccagtttagtcttcaaacttg

SEQ ID NO: 61328 - DNA, 25 bp, Canis familiaris
cagcctccgcttctatttataacgg

SEQ ID NO: 61329 - DNA, 25 bp, Canis familiaris
cacctggctttccttctttcaatca

SEQ ID NO: 61330 - DNA, 25 bp, Canis familiaris
cacctgtactgggctttttcataca

SEQ ID NO: 61331 - DNA, 25 bp, Canis familiaris
caccctgactaggccttcaataaac

SEQ ID NO: 61332 - DNA, 25 bp, Canis familiaris
cacccatgccaactcctattaaagt

SEQ ID NO: 61333 - DNA, 25 bp, Canis familiaris
cacccagctttgtcctttgagggca

SEQ ID NO: 61334 - DNA, 25 bp, Canis familiaris
caccggctgggaccagttatgtggc

SEQ ID NO: 61335 - DNA, 25 bp, Canis familiaris
cacctggctgtgccttaattgtggg

SEQ ID NO: 61336 - DNA, 25 bp, Canis familiaris
cacccagcttgccagtaagtctagg

SEQ ID NO: 61337 - DNA, 25 bp, Canis familiaris
cacccatgctcattcagtgcagagt

SEQ ID NO: 61338 - DNA, 25 bp, Canis familiaris
cacccatgctcatgaggaagagggg

SEQ ID NO: 61339 - DNA, 25 bp, Canis familiaris
cacccatgctcatgaacccaggttg

SEQ ID NO: 61340 - DNA, 25 bp, Canis familiaris
cacccagcgtgggagccaagtgtgg

SEQ ID NO: 61341 - DNA, 25 bp, Canis familiaris
caccctatctgtgtggccagtgtgg

SEQ ID NO: 61342 - DNA, 25 bp, Canis familiaris
caccccagcgccatagcaaggaagt

SEQ ID NO: 61343 - DNA, 25 bp, Canis familiaris
cacccacagcccattaaatgtgacc

SEQ ID NO: 61344 - DNA, 25 bp, Canis familiaris
cacccacctagtcatcaacatgtac

SEQ ID NO: 61345 - DNA, 25 bp, Canis familiaris
cacccacccacatataccatgtatt

SEQ ID NO: 61346 - DNA, 25 bp, Canis familiaris
cacccacccacatataccatgtatt

SEQ ID NO: 61347 - DNA, 25 bp, Canis familiaris
cacccacccacatataccatgtatt

SEQ ID NO: 61348 - DNA, 25 bp, Canis familiaris
cacgccccccaggatagtatgtaaa

SEQ ID NO: 61349 - DNA, 25 bp, Canis familiaris
caccccccaaggaatggagggatca

SEQ ID NO: 61350 - DNA, 25 bp, Canis familiaris
caccctcgcttacgctggggggtga

SEQ ID NO: 61351 - DNA, 25 bp, Canis familiaris
caccccgcctggcggggcggatggc

SEQ ID NO: 61352 - DNA, 25 bp, Canis familiaris
cacccggacgccagggaggtgagtt

SEQ ID NO: 61353 - DNA, 25 bp, Canis familiaris
caccgggacctccaggagacgatgg

SEQ ID NO: 61354 - DNA, 25 bp, Canis familiaris
cacgctcagcaagctctgggagacg

SEQ ID NO: 61355 - DNA, 25 bp, Canis familiaris
cacctacagcagcctgaggtgcccg

SEQ ID NO: 61356 - DNA, 25 bp, Canis familiaris
cacctgacacggacaggaccctgga

SEQ ID NO: 61357 - DNA, 25 bp, Canis familiaris
cacctgacacggacaggaccctgga

SEQ ID NO: 61358 - DNA, 25 bp, Canis familiaris
catcctacacggaccgggtcatgta

SEQ ID NO: 61359 - DNA, 25 bp, Canis familiaris
cacctagagcctgaggaggtcctca

SEQ ID NO: 61360 - DNA, 25 bp, Canis familiaris
caccgggcctggggagaggcccacg

SEQ ID NO: 61361 - DNA, 25 bp, Canis familiaris
cacctggaggcccaagaaggcccaa

SEQ ID NO: 61362 - DNA, 25 bp, Canis familiaris
cacctgtgcacagcagccaaatggc

SEQ ID NO: 61363 - DNA, 25 bp, Canis familiaris
cacctgtccgagtgcacgatgcaca

SEQ ID NO: 61364 - DNA, 25 bp, Canis familiaris
cccgcccaggttgaagccaaggaag

SEQ ID NO: 61365 - DNA, 25 bp, Canis familiaris
cccgcccaggttgaagccaaggaag

SEQ ID NO: 61366 - DNA, 25 bp, Canis familiaris
cacccctcagtatttacccaagaga

SEQ ID NO: 61367 - DNA, 25 bp, Canis familiaris
caccccgatgttgtaatccaatggt

SEQ ID NO: 61368 - DNA, 25 bp, Canis familiaris
caccccacgttcttaatcacgtggt

SEQ ID NO: 61369 - DNA, 25 bp, Canis familiaris
cacccccagtctttaatccgtggtg

SEQ ID NO: 61370 - DNA, 25 bp, Canis familiaris
cagccatcctacggattaaccgggt

SEQ ID NO: 61371 - DNA, 25 bp, Canis familiaris
caccatcccaaccactaacttgggg

SEQ ID NO: 61372 - DNA, 25 bp, Canis familiaris
cacccccacaagtcacaggtcgggg

SEQ ID NO: 61373 - DNA, 25 bp, Canis familiaris
cacccccacataggtaggctcagat

SEQ ID NO: 61374 - DNA, 25 bp, Canis familiaris
cacgacccatgatccatcagaggga

SEQ ID NO: 61375 - DNA, 25 bp, Canis familiaris
cacgcactcggtccctaaagagttt

SEQ ID NO: 61376 - DNA, 25 bp, Canis familiaris
catgccctttgggcctaaagcctct

SEQ ID NO: 61377 - DNA, 25 bp, Canis familiaris
caccaggttggcgcctgaatgcctt

SEQ ID NO: 61378 - DNA, 25 bp, Canis familiaris
caccaggaggaccaccgaacttatg

SEQ ID NO: 61379 - DNA, 25 bp, Canis familiaris
caccccagaacttctagaagttaca

SEQ ID NO: 61380 - DNA, 25 bp, Canis familiaris
cagccccagacctctgtaattttat

SEQ ID NO: 61381 - DNA, 25 bp, Canis familiaris
cacccagacacctcatgtatacttt

SEQ ID NO: 61382 - DNA, 25 bp, Canis familiaris
cacccaggccactgtgtaagtcctg

SEQ ID NO: 61383 - DNA, 25 bp, Canis familiaris
cacccagggcaaccttacagagcct

SEQ ID NO: 61384 - DNA, 25 bp, Canis familiaris
cacccagggaaggcagacgagcact

SEQ ID NO: 61385 - DNA, 25 bp, Canis familiaris
caccctgcgtaagctgctacacaat

SEQ ID NO: 61386 - DNA, 25 bp, Canis familiaris
caccactctacattccctagaaata

SEQ ID NO: 61387 - DNA, 25 bp, Canis familiaris
cacgacacgaccgcgcgtgatatat

SEQ ID NO: 61388 - DNA, 25 bp, Canis familiaris
cacgaaggagcagatcgtggagatg

SEQ ID NO: 61389 - DNA, 25 bp, Canis familiaris
caccaactaaggtctgtggcaggct

SEQ ID NO: 61390 - DNA, 25 bp, Canis familiaris
cacccacaaaagtctgtctcagctc

SEQ ID NO: 61391 - DNA, 25 bp, Canis familiaris
cacccctagaagtctcagtaccaga

SEQ ID NO: 61392 - DNA, 25 bp, Canis familiaris
cacgcaggtcaaaatctggttccag

SEQ ID NO: 61393 - DNA, 25 bp, Canis familiaris
cacctgagtaagatgtggttcaagg

SEQ ID NO: 61394 - DNA, 25 bp, Canis familiaris
caccgaaaagttggggaggcaggat

SEQ ID NO: 61395 - DNA, 25 bp, Canis familiaris
caccaagaacaaggtgggactggga

SEQ ID NO: 61396 - DNA, 25 bp, Canis familiaris
cacccgcagtcagctgctgagggct

SEQ ID NO: 61397 - DNA, 25 bp, Canis familiaris
cacgcttcattcacactgaggcata

SEQ ID NO: 61398 - DNA, 25 bp, Canis familiaris
cacgcttttgctccaggatgtgtga

SEQ ID NO: 61399 - DNA, 25 bp, Canis familiaris
cacgctggtgtccacagtgtgagga

SEQ ID NO: 61400 - DNA, 25 bp, Canis familiaris
cacgctgagtggccatgcatcatgg

SEQ ID NO: 61401 - DNA, 25 bp, Canis familiaris
cacgcgatgttgactgcacaggtaa

SEQ ID NO: 61402 - DNA, 25 bp, Canis familiaris
cacgcgcaggtgacggccttagatc

SEQ ID NO: 61403 - DNA, 25 bp, Canis familiaris
cacccagtggactcctctggattac

SEQ ID NO: 61404 - DNA, 25 bp, Canis familiaris
cacctgctgggtctcccaggaatca

SEQ ID NO: 61405 - DNA, 25 bp, Canis familiaris
cacctgttggctctactgggaaaaa

SEQ ID NO: 61406 - DNA, 25 bp, Canis familiaris
cacctacggcatctactgagtggcc

SEQ ID NO: 61407 - DNA, 25 bp, Canis familiaris
cacgctcattttctactgagtccgg

SEQ ID NO: 61408 - DNA, 25 bp, Canis familiaris
cacgccatttgaaagttcttcccgg

SEQ ID NO: 61409 - DNA, 25 bp, Canis familiaris
ccctagtaaaagctctgaccgccga

SEQ ID NO: 61410 - DNA, 25 bp, Canis familiaris
caccgttaaaatcctggatcccctg

SEQ ID NO: 61411 - DNA, 25 bp, Canis familiaris
caccagggaagaactctgggacccg

SEQ ID NO: 61412 - DNA, 25 bp, Canis familiaris
caccggagtagagatgctgtcccgc

SEQ ID NO: 61413 - DNA, 25 bp, Canis familiaris
cacccagagtcagaagtctggcagg

SEQ ID NO: 61414 - DNA, 25 bp, Canis familiaris
cacccaaggcattttcactgctggc

SEQ ID NO: 61415 - DNA, 25 bp, Canis familiaris
caccccgagatagtccagctggttt

SEQ ID NO: 61416 - DNA, 25 bp, Canis familiaris
caccctctgcagaagccaaggttct

SEQ ID NO: 61417 - DNA, 25 bp, Canis familiaris
caccctctgcagaagccaaggttct

SEQ ID NO: 61418 - DNA, 25 bp, Canis familiaris
cacctgttgctcacgaagttcgcat

SEQ ID NO: 61419 - DNA, 25 bp, Canis familiaris
caccttacgcccgaaggttgcttca

SEQ ID NO: 61420 - DNA, 25 bp, Canis familiaris
cacctctaccctgtaatgattggga

SEQ ID NO: 61421 - DNA, 25 bp, Canis familiaris
cagccttacccggaaatacttgtgg

SEQ ID NO: 61422 - DNA, 25 bp, Canis familiaris
cacccttgccgggactatactttgg

SEQ ID NO: 61423 - DNA, 25 bp, Canis familiaris
caccctagagggtcactttcaagtg

SEQ ID NO: 61424 - DNA, 25 bp, Canis familiaris
caccctggggaactttgccaaggct

SEQ ID NO: 61425 - DNA, 25 bp, Canis familiaris
cacgccagagtgtggtttctcacgt

SEQ ID NO: 61426 - DNA, 25 bp, Canis familiaris
cacctgaggctctggtttcctggtg

SEQ ID NO: 61427 - DNA, 25 bp, Canis familiaris
caccgaagctcttagcttcctcggg

SEQ ID NO: 61428 - DNA, 25 bp, Canis familiaris
caccttagctgtccatttcctggtg

SEQ ID NO: 61429 - DNA, 25 bp, Canis familiaris
caccttatctggctgtacacgagta

SEQ ID NO: 61430 - DNA, 25 bp, Canis familiaris
cacctttggaggttgacaccatgtg

SEQ ID NO: 61431 - DNA, 25 bp, Canis familiaris
caccttcaaaaatgatgagcaaatg

SEQ ID NO: 61432 - DNA, 25 bp, Canis familiaris
caccttccaaaatgatgagccaatg

SEQ ID NO: 61433 - DNA, 25 bp, Canis familiaris
caccattccttcaaggtgggaaggg

SEQ ID NO: 61434 - DNA, 25 bp, Canis familiaris
cagcctcaccccacttggaaaggtg

SEQ ID NO: 61435 - DNA, 25 bp, Canis familiaris
caccttccccagacttctactgggg

SEQ ID NO: 61436 - DNA, 25 bp, Canis familiaris
caccccctcacaatcatttgttagg

SEQ ID NO: 61437 - DNA, 25 bp, Canis familiaris
caccccgtccgatttgggtctgatg

SEQ ID NO: 61438 - DNA, 25 bp, Canis familiaris
cagccgccttctagttgggggctag

SEQ ID NO: 61439 - DNA, 25 bp, Canis familiaris
cacctactctgtgtctggggagcat

SEQ ID NO: 61440 - DNA, 25 bp, Canis familiaris
caccttttgcatgttccgtgacata

SEQ ID NO: 61441 - DNA, 25 bp, Canis familiaris
cagcccttttggatcctgtaaatgt

SEQ ID NO: 61442 - DNA, 25 bp, Canis familiaris
cacctcttggggcctccataaaatg

SEQ ID NO: 61443 - DNA, 25 bp, Canis familiaris
caccgtcttgggcccgagaagacat

SEQ ID NO: 61444 - DNA, 25 bp, Canis familiaris
cacctgtcctggtatcctgtaggaa

SEQ ID NO: 61445 - DNA, 25 bp, Canis familiaris
cacctggccatgaaatccctgtaga

SEQ ID NO: 61446 - DNA, 25 bp, Canis familiaris
cacctggcgctgttaggccggaatt

SEQ ID NO: 61447 - DNA, 25 bp, Canis familiaris
caccagggtctacgtccgagagtgt

SEQ ID NO: 61448 - DNA, 25 bp, Canis familiaris
caccgaggtgctgtcttcgagagat

SEQ ID NO: 61449 - DNA, 25 bp, Canis familiaris
caccaagttgcatattatccaaaga

SEQ ID NO: 61450 - DNA, 25 bp, Canis familiaris
caccaaatatgatgtccaccgagac

SEQ ID NO: 61451 - DNA, 25 bp, Canis familiaris
caccataaattaatcctcacggcgc

SEQ ID NO: 61452 - DNA, 25 bp, Canis familiaris
cacccgagattgagcaataacaggt

SEQ ID NO: 61453 - DNA, 25 bp, Canis familiaris
cacccgagattgagcaataacaggt

SEQ ID NO: 61454 - DNA, 25 bp, Canis familiaris
cccactgaatggcatgaatgttttt

SEQ ID NO: 61455 - DNA, 25 bp, Canis familiaris
caccctcacaggccaggatggcatt

SEQ ID NO: 61456 - DNA, 25 bp, Canis familiaris
caccctcatgacatcatagatgaca

SEQ ID NO: 61457 - DNA, 25 bp, Canis familiaris
caccgaatacttcagcatgcacacg

SEQ ID NO: 61458 - DNA, 25 bp, Canis familiaris
caccccaacttcaagctctaggaga

SEQ ID NO: 61459 - DNA, 25 bp, Canis familiaris
caccctcagactctgcgggagtgga

SEQ ID NO: 61460 - DNA, 25 bp, Canis familiaris
cacccccctactcagaggtgtgacg

SEQ ID NO: 61461 - DNA, 25 bp, Canis familiaris
caccgctccctagtgtggtgggatg

SEQ ID NO: 61462 - DNA, 25 bp, Canis familiaris
cacccctcactcttgggttggatgc

SEQ ID NO: 61463 - DNA, 25 bp, Canis familiaris
ctacacccagccgacggaaggacgt

SEQ ID NO: 61464 - DNA, 25 bp, Canis familiaris
ctcaccccaagctcgggaaacgtgc

SEQ ID NO: 61465 - DNA, 25 bp, Canis familiaris
cacccccacagcttcgggataaacg

SEQ ID NO: 61466 - DNA, 25 bp, Canis familiaris
cacccaccacgtttgaggttatagg

SEQ ID NO: 61467 - DNA, 25 bp, Canis familiaris
catcccccacagactagagtttagg

SEQ ID NO: 61468 - DNA, 25 bp, Canis familiaris
cacccaaagcctgagcagttcttgc

SEQ ID NO: 61469 - DNA, 25 bp, Canis familiaris
cacccaaggccagcgagaacagcga

SEQ ID NO: 61470 - DNA, 25 bp, Canis familiaris
cacccagatgccgccagagaaaggg

SEQ ID NO: 61471 - DNA, 25 bp, Canis familiaris
caccgcagaagcgccacaggaacac

SEQ ID NO: 61472 - DNA, 25 bp, Canis familiaris
caccctgaatgagagccgggacccc

SEQ ID NO: 61473 - DNA, 25 bp, Canis familiaris
cacccagaagactgtggatggcccc

SEQ ID NO: 61474 - DNA, 25 bp, Canis familiaris
cacccgcaagagagtgcgtttcgcc

SEQ ID NO: 61475 - DNA, 25 bp, Canis familiaris
caccaagaaaccaggttatccctcg

SEQ ID NO: 61476 - DNA, 25 bp, Canis familiaris
caccaaaatacctgttcaactcacc

SEQ ID NO: 61477 - DNA, 25 bp, Canis familiaris
cacccaaatatctcagagtgaacca

SEQ ID NO: 61478 - DNA, 25 bp, Canis familiaris
cacgccaccaacagcgagcgaattc

SEQ ID NO: 61479 - DNA, 25 bp, Canis familiaris
cagcgaagccaacacgtgctcaaac

SEQ ID NO: 61480 - DNA, 25 bp, Canis familiaris
cagctggacgaagtagccttcccac

SEQ ID NO: 61481 - DNA, 25 bp, Canis familiaris
cacctacagacgaagcgctgtgccc

SEQ ID NO: 61482 - DNA, 25 bp, Canis familiaris
cacctcctgaaaacggctcaaaaca

SEQ ID NO: 61483 - DNA, 25 bp, Canis familiaris
cacccatctggatctctggtcaaaa

SEQ ID NO: 61484 - DNA, 25 bp, Canis familiaris
caccctccagaggcttcgatgagaa

SEQ ID NO: 61485 - DNA, 25 bp, Canis familiaris
caccctacagggaactgctggaagc

SEQ ID NO: 61486 - DNA, 25 bp, Canis familiaris
caccctcaagatctgctcttggaac

SEQ ID NO: 61487 - DNA, 25 bp, Canis familiaris
caccttgaaatgttgctcttgagtt

SEQ ID NO: 61488 - DNA, 25 bp, Canis familiaris
caccttaattgggcctgccaatatt

SEQ ID NO: 61489 - DNA, 25 bp, Canis familiaris
cagccttcgattgcacggctaccat

SEQ ID NO: 61490 - DNA, 25 bp, Canis familiaris
cacctactgtttcaggctgcacaac

SEQ ID NO: 61491 - DNA, 25 bp, Canis familiaris
caccccgcttaaaggcgcacattat

SEQ ID NO: 61492 - DNA, 25 bp, Canis familiaris
cacccccaagatacggagacatcct

SEQ ID NO: 61493 - DNA, 25 bp, Canis familiaris
cacccttcttggacagccaaatcct

SEQ ID NO: 61494 - DNA, 25 bp, Canis familiaris
caccttctcgtagagctaacatcag

SEQ ID NO: 61495 - DNA, 25 bp, Canis familiaris
caccatcaccgtagggtacctgact

SEQ ID NO: 61496 - DNA, 25 bp, Canis familiaris
caccatcccctcggagtccgaggac

SEQ ID NO: 61497 - DNA, 25 bp, Canis familiaris
caccagccccttggagtttgggcac

SEQ ID NO: 61498 - DNA, 25 bp, Canis familiaris
caccagagaccttccagaatttgga

SEQ ID NO: 61499 - DNA, 25 bp, Canis familiaris
caccgagagctcttcacgaatatca

SEQ ID NO: 61500 - DNA, 25 bp, Canis familiaris
caccgcagcaaacacaacaacaaca

SEQ ID NO: 61501 - DNA, 25 bp, Canis familiaris
caccgccaccattaaataacaccat

SEQ ID NO: 61502 - DNA, 25 bp, Canis familiaris
caccccactgaataattttctgata

SEQ ID NO: 61503 - DNA, 25 bp, Canis familiaris
cacctccactagcgaaagtctctta

SEQ ID NO: 61504 - DNA, 25 bp, Canis familiaris
cacctcccacgggaatggagctcgc

SEQ ID NO: 61505 - DNA, 25 bp, Canis familiaris
cacctcccaccaggatgcaggattg

SEQ ID NO: 61506 - DNA, 25 bp, Canis familiaris
caccacctcaccaaatgaggaaacc

SEQ ID NO: 61507 - DNA, 25 bp, Canis familiaris
caccagtggcccaccagtagaacca

SEQ ID NO: 61508 - DNA, 25 bp, Canis familiaris
caccgtgtcccacaagtaaatgcca

SEQ ID NO: 61509 - DNA, 25 bp, Canis familiaris
cacccttcctcgtaagagctaaaca

SEQ ID NO: 61510 - DNA, 25 bp, Canis familiaris
cacccttccctggcacaaggataag

SEQ ID NO: 61511 - DNA, 25 bp, Canis familiaris
cagcctccttgctggctggaggtaa

SEQ ID NO: 61512 - DNA, 25 bp, Canis familiaris
caccacctttcggcgtaattcaagt

SEQ ID NO: 61513 - DNA, 25 bp, Canis familiaris
caccacttattctctgtctttaatg

SEQ ID NO: 61514 - DNA, 25 bp, Canis familiaris
caccgtaaaccacgtgtcctatcat

SEQ ID NO: 61515 - DNA, 25 bp, Canis familiaris
caccgaattatccagggtctcaatt

SEQ ID NO: 61516 - DNA, 25 bp, Canis familiaris
cccgtaatttggtgccatcaagtac

SEQ ID NO: 61517 - DNA, 25 bp, Canis familiaris
cacctgtaattcagaaccctgagta

SEQ ID NO: 61518 - DNA, 25 bp, Canis familiaris
cacctctagattcgtgactccttgg

SEQ ID NO: 61519 - DNA, 25 bp, Canis familiaris
cacccaggatcaactacctctgtgt

SEQ ID NO: 61520 - DNA, 25 bp, Canis familiaris
cagcaccggaacatacatgcctgcg

SEQ ID NO: 61521 - DNA, 25 bp, Canis familiaris
cacccatggagggtactgtccgcaa

SEQ ID NO: 61522 - DNA, 25 bp, Canis familiaris
caccctgacgatgtccagtactgag

SEQ ID NO: 61523 - DNA, 25 bp, Canis familiaris
caccactcacctggtctaggggaat

SEQ ID NO: 61524 - DNA, 25 bp, Canis familiaris
caccgtacacggatcgagagccact

SEQ ID NO: 61525 - DNA, 25 bp, Canis familiaris
cgggtaatcaggttcgaggtagtcg

SEQ ID NO: 61526 - DNA, 25 bp, Canis familiaris
cagtcgtaaagtggtgtaggaagtc

SEQ ID NO: 61527 - DNA, 25 bp, Canis familiaris
cacctgttaagcggtgttggaactc

SEQ ID NO: 61528 - DNA, 25 bp, Canis familiaris
caccttgctactccagggtgagaaa

SEQ ID NO: 61529 - DNA, 25 bp, Canis familiaris
caccgctctcctcaacttgagaagc

SEQ ID NO: 61530 - DNA, 25 bp, Canis familiaris
caccactaaccctctctgagaggct

SEQ ID NO: 61531 - DNA, 25 bp, Canis familiaris
caccctgacaggccttaccagaggg

SEQ ID NO: 61532 - DNA, 25 bp, Canis familiaris
caccctgaacatggtgtccccaggg

SEQ ID NO: 61533 - DNA, 25 bp, Canis familiaris
caccctgaggccgaggccacatagg

SEQ ID NO: 61534 - DNA, 25 bp, Canis familiaris
caccctgcaccacgaggcaaaggag

SEQ ID NO: 61535 - DNA, 25 bp, Canis familiaris
cacccagtctcatgatggagaggga

SEQ ID NO: 61536 - DNA, 25 bp, Canis familiaris
cacccgtgcacaactggaggagaat

SEQ ID NO: 61537 - DNA, 25 bp, Canis familiaris
cacccaggcatcccgagagagaaaa

SEQ ID NO: 61538 - DNA, 25 bp, Canis familiaris
cacccaggcatgtacctgagaacgc

SEQ ID NO: 61539 - DNA, 25 bp, Canis familiaris
cacccaccatgttcttgaacaatca

SEQ ID NO: 61540 - DNA, 25 bp, Canis familiaris
caccctctctgtcccagataaataa

SEQ ID NO: 61541 - DNA, 25 bp, Canis familiaris
caccctcacgctctctgagaaaaag

SEQ ID NO: 61542 - DNA, 25 bp, Canis familiaris
caccctgctcgctagactagcacac

SEQ ID NO: 61543 - DNA, 25 bp, Canis familiaris
caccgagctcaggagccatcagcaa

SEQ ID NO: 61544 - DNA, 25 bp, Canis familiaris
caccggagaggagaccaaccctggt

SEQ ID NO: 61545 - DNA, 25 bp, Canis familiaris
caccttggaggcagcatccagctcc

SEQ ID NO: 61546 - DNA, 25 bp, Canis familiaris
caccctgaagtcaggccgtccaggg

SEQ ID NO: 61547 - DNA, 25 bp, Canis familiaris
cacctccactgtgggtgtctgacca

SEQ ID NO: 61548 - DNA, 25 bp, Canis familiaris
cacctggcaggtgggagatgcccaa

SEQ ID NO: 61549 - DNA, 25 bp, Canis familiaris
cacctgagtggtgaaagctcccatc

SEQ ID NO: 61550 - DNA, 25 bp, Canis familiaris
caccatgcacttaaaaaccgttcaa

SEQ ID NO: 61551 - DNA, 25 bp, Canis familiaris
cacctgccactcaataaaccgtgtc

SEQ ID NO: 61552 - DNA, 25 bp, Canis familiaris
caccataacctaataaactgagtat

SEQ ID NO: 61553 - DNA, 25 bp, Canis familiaris
cacctaacctcggccaggaagatac

SEQ ID NO: 61554 - DNA, 25 bp, Canis familiaris
cacctggccacttcaccaggaagat

SEQ ID NO: 61555 - DNA, 25 bp, Canis familiaris
caccggcccaacgtcagattggatg

SEQ ID NO: 61556 - DNA, 25 bp, Canis familiaris
caccggggactacagcattggctgg

SEQ ID NO: 61557 - DNA, 25 bp, Canis familiaris
caccgtgggatctacacgcacttgg

SEQ ID NO: 61558 - DNA, 25 bp, Canis familiaris
caccgtgaagtttaccagtctatac

SEQ ID NO: 61559 - DNA, 25 bp, Canis familiaris
cagccccaagttctcagagtctgat

SEQ ID NO: 61560 - DNA, 25 bp, Canis familiaris
cacctccaaatctttctaagccatg

SEQ ID NO: 61561 - DNA, 25 bp, Canis familiaris
caccacctaagcatcctgaagcaga

SEQ ID NO: 61562 - DNA, 25 bp, Canis familiaris
caccccactcacagcaatggacaga

SEQ ID NO: 61563 - DNA, 25 bp, Canis familiaris
cagccaaactacaccttgatctgaa

SEQ ID NO: 61564 - DNA, 25 bp, Canis familiaris
caccaaccaactgcacggcatggat

SEQ ID NO: 61565 - DNA, 25 bp, Canis familiaris
caccacagtaacaccagcactttga

SEQ ID NO: 61566 - DNA, 25 bp, Canis familiaris
cacctcagtttcctctagacttgga

SEQ ID NO: 61567 - DNA, 25 bp, Canis familiaris
cacccgttacaggctaggctgtgat

SEQ ID NO: 61568 - DNA, 25 bp, Canis familiaris
cacccttctgacccataaggcagct

SEQ ID NO: 61569 - DNA, 25 bp, Canis familiaris
cacctctttacgtatatgatgtggc

SEQ ID NO: 61570 - DNA, 25 bp, Canis familiaris
cacctctttacgtatatgatgtggc

SEQ ID NO: 61571 - DNA, 25 bp, Canis familiaris
cagccatttttttaattggatctcg

SEQ ID NO: 61572 - DNA, 25 bp, Canis familiaris
cagcctttttactttgcagaaccac

SEQ ID NO: 61573 - DNA, 25 bp, Canis familiaris
caccattttttcttcctgtgtggac

SEQ ID NO: 61574 - DNA, 25 bp, Canis familiaris
caccatctttttctcatctgggatg

SEQ ID NO: 61575 - DNA, 25 bp, Canis familiaris
caccatcctcttacgatacgggggt

SEQ ID NO: 61576 - DNA, 25 bp, Canis familiaris
cacctgcctctatcgtgagttgggg

SEQ ID NO: 61577 - DNA, 25 bp, Canis familiaris
caccgcctgatacttgggtcgggga

SEQ ID NO: 61578 - DNA, 25 bp, Canis familiaris
cacccctgaatttgtggctccagag

SEQ ID NO: 61579 - DNA, 25 bp, Canis familiaris
cacccctggccaaggtcatccatga

SEQ ID NO: 61580 - DNA, 25 bp, Canis familiaris
cagcgcctcggagaggcctcagtat

SEQ ID NO: 61581 - DNA, 25 bp, Canis familiaris
cagcccaggggtgtcaatctatgta

SEQ ID NO: 61582 - DNA, 25 bp, Canis familiaris
cacctcaggaggttccaacacagtc

SEQ ID NO: 61583 - DNA, 25 bp, Canis familiaris
caccataagaagcctacatagaagt

SEQ ID NO: 61584 - DNA, 25 bp, Canis familiaris
caccagtacaaggccaagaggaatt

SEQ ID NO: 61585 - DNA, 25 bp, Canis familiaris
caccaggacgaggccatgtcaagtt

SEQ ID NO: 61586 - DNA, 25 bp, Canis familiaris
cacctggagctgacgcggaaacttc

SEQ ID NO: 61587 - DNA, 25 bp, Canis familiaris
cacctgtatcttggtatagaactga

SEQ ID NO: 61588 - DNA, 25 bp, Canis familiaris
caccttgtttggaaataccgagcta

SEQ ID NO: 61589 - DNA, 25 bp, Canis familiaris
caccttttggagtaccactggatta

SEQ ID NO: 61590 - DNA, 25 bp, Canis familiaris
cacctttcggcgtaattcaagtcta

SEQ ID NO: 61591 - DNA, 25 bp, Canis familiaris
cagccctttgtttctttcagagtta

SEQ ID NO: 61592 - DNA, 25 bp, Canis familiaris
caccctgagttttccattctgtggt

SEQ ID NO: 61593 - DNA, 25 bp, Canis familiaris
caccggagattcttccttcattgtc

SEQ ID NO: 61594 - DNA, 25 bp, Canis familiaris
cagccaaagtgttgtcctctgttct

SEQ ID NO: 61595 - DNA, 25 bp, Canis familiaris
caccaggtggtctcctctgacttca

SEQ ID NO: 61596 - DNA, 25 bp, Canis familiaris
caccaaggagattttttggccctat

SEQ ID NO: 61597 - DNA, 25 bp, Canis familiaris
cacctattcgtatttctttgttttg

SEQ ID NO: 61598 - DNA, 25 bp, Canis familiaris
cacctatttatatttttgaaaactg

SEQ ID NO: 61599 - DNA, 25 bp, Canis familiaris
caccaactcagttcttattaaaacg

SEQ ID NO: 61600 - DNA, 25 bp, Canis familiaris
cacctactagttgtttgttgcatcc

SEQ ID NO: 61601 - DNA, 25 bp, Canis familiaris
caccatactttctttttgactgttc

SEQ ID NO: 61602 - DNA, 25 bp, Canis familiaris
cacctattttctttccaatcttatt

SEQ ID NO: 61603 - DNA, 25 bp, Canis familiaris
caccctatgtttattgcagtattat

SEQ ID NO: 61604 - DNA, 25 bp, Canis familiaris
caccccatgcgcgttaacagtaata

SEQ ID NO: 61605 - DNA, 25 bp, Canis familiaris
caccctctcctttaatgcatatgca

SEQ ID NO: 61606 - DNA, 25 bp, Canis familiaris
cacccctggtcttgatgcagaagag

SEQ ID NO: 61607 - DNA, 25 bp, Canis familiaris
caccctgcagggaccgcagacagag

SEQ ID NO: 61608 - DNA, 25 bp, Canis familiaris
caccctgagcagcacccagaagaag

SEQ ID NO: 61609 - DNA, 25 bp, Canis familiaris
caccctgacagggaccagcagaaca

SEQ ID NO: 61610 - DNA, 25 bp, Canis familiaris
caccccagcaaggacactgagcaag

SEQ ID NO: 61611 - DNA, 25 bp, Canis familiaris
caccgcccaggccaatggcaaaggc

SEQ ID NO: 61612 - DNA, 25 bp, Canis familiaris
cacccccagaggttgagcctgagag

SEQ ID NO: 61613 - DNA, 25 bp, Canis familiaris
cagtcacccgagggtcatccgaatt

SEQ ID NO: 61614 - DNA, 25 bp, Canis familiaris
cagtccccacgtttattcagagttg

SEQ ID NO: 61615 - DNA, 25 bp, Canis familiaris
cagcccggacggtgattgggtagcc

SEQ ID NO: 61616 - DNA, 25 bp, Canis familiaris
cagcggtggtagcggtggtggtggt

SEQ ID NO: 61617 - DNA, 25 bp, Canis familiaris
cagcgcctgtggcggagggtctttt

SEQ ID NO: 61618 - DNA, 25 bp, Canis familiaris
cacccgtgcatactgccaggggttg

SEQ ID NO: 61619 - DNA, 25 bp, Canis familiaris
cacctgcctgcttcctagaggtgaa

SEQ ID NO: 61620 - DNA, 25 bp, Canis familiaris
cacccctgccaaagagtggtgagaa

SEQ ID NO: 61621 - DNA, 25 bp, Canis familiaris
cagccctttctcagagccaatgatg

SEQ ID NO: 61622 - DNA, 25 bp, Canis familiaris
cacccggctctcaagaggtagctgc

SEQ ID NO: 61623 - DNA, 25 bp, Canis familiaris
caccctggctgacaaggacggcgag

SEQ ID NO: 61624 - DNA, 25 bp, Canis familiaris
cacccgcctggttctctggcgggag

SEQ ID NO: 61625 - DNA, 25 bp, Canis familiaris
cacccctctggagctcgagaggtcg

SEQ ID NO: 61626 - DNA, 25 bp, Canis familiaris
caccccgtgggacttgagcacgtaa

SEQ ID NO: 61627 - DNA, 25 bp, Canis familiaris
caccgcaggtgtagagaaggcactt

SEQ ID NO: 61628 - DNA, 25 bp, Canis familiaris
caccacggcttgtgaagacacatct

SEQ ID NO: 61629 - DNA, 25 bp, Canis familiaris
caccacggaatattacccaacagta

SEQ ID NO: 61630 - DNA, 25 bp, Canis familiaris
caccctgagactccttcaaaacagt

SEQ ID NO: 61631 - DNA, 25 bp, Canis familiaris
caccttgagagggctaaaaccacat

SEQ ID NO: 61632 - DNA, 25 bp, Canis familiaris
caccctggtggggacgactgacagt

SEQ ID NO: 61633 - DNA, 25 bp, Canis familiaris
cagccctagggggaaactggcagcc

SEQ ID NO: 61634 - DNA, 25 bp, Canis familiaris
cacctctgactttgcaaacctatca

SEQ ID NO: 61635 - DNA, 25 bp, Canis familiaris
caccatctactttaacacgcaatct

SEQ ID NO: 61636 - DNA, 25 bp, Canis familiaris
caccgctaagtattacccacagaca

SEQ ID NO: 61637 - DNA, 25 bp, Canis familiaris
cacctctgaaccatgcaggccaaaa

SEQ ID NO: 61638 - DNA, 25 bp, Canis familiaris
caccctgacctgctgcagttcagag

SEQ ID NO: 61639 - DNA, 25 bp, Canis familiaris
caccgtagccatctactctgagcag

SEQ ID NO: 61640 - DNA, 25 bp, Canis familiaris
caccgatgagcttgccttcaatgaa

SEQ ID NO: 61641 - DNA, 25 bp, Canis familiaris
caccttatgccctatgtcttgcaaa

SEQ ID NO: 61642 - DNA, 25 bp, Canis familiaris
caccttttctcctcatgcagataag

SEQ ID NO: 61643 - DNA, 25 bp, Canis familiaris
caccatgtgtttgtttgcagtcagg

SEQ ID NO: 61644 - DNA, 25 bp, Canis familiaris
caccatcggtcacctttgtgtaatc

SEQ ID NO: 61645 - DNA, 25 bp, Canis familiaris
cacctcaggccaagtttggtgaacc

SEQ ID NO: 61646 - DNA, 25 bp, Canis familiaris
caccctggctgaaggctgtgagctg

SEQ ID NO: 61647 - DNA, 25 bp, Canis familiaris
cacctggcacaatagcgtgatgctt

SEQ ID NO: 61648 - DNA, 25 bp, Canis familiaris
catctcatgggcacaaccgagattg

SEQ ID NO: 61649 - DNA, 25 bp, Canis familiaris
caccattgcctcaaacacggcaatg

SEQ ID NO: 61650 - DNA, 25 bp, Canis familiaris
cagcgatgtcctgacgcaaaagtgg

SEQ ID NO: 61651 - DNA, 25 bp, Canis familiaris
cagagtggccgctccagtaatagag

SEQ ID NO: 61652 - DNA, 25 bp, Canis familiaris
cagagttcccagtattggcctgaag

SEQ ID NO: 61653 - DNA, 25 bp, Canis familiaris
cagcgtgtccttgtcgtgttaagta

SEQ ID NO: 61654 - DNA, 25 bp, Canis familiaris
cagcgtccttgtgacagtttgtcag

SEQ ID NO: 61655 - DNA, 25 bp, Canis familiaris
cagcaaactactgtcatttatgaag

SEQ ID NO: 61656 - DNA, 25 bp, Canis familiaris
cagaccaaactgcattttgggagtc

SEQ ID NO: 61657 - DNA, 25 bp, Canis familiaris
gagtccaggactataattcggggca

SEQ ID NO: 61658 - DNA, 25 bp, Canis familiaris
gagtcccccttaacaatttgaagat

SEQ ID NO: 61659 - DNA, 25 bp, Canis familiaris
caccccaccttaatatccttgaaat

SEQ ID NO: 61660 - DNA, 25 bp, Canis familiaris
cagccctcctttatcggtatggaat

SEQ ID NO: 61661 - DNA, 25 bp, Canis familiaris
cagcaccccgacatgtcggtgacga

SEQ ID NO: 61662 - DNA, 25 bp, Canis familiaris
caccacccggaagtctgattgactg

SEQ ID NO: 61663 - DNA, 25 bp, Canis familiaris
caccccacccaagtttgggctgtca

SEQ ID NO: 61664 - DNA, 25 bp, Canis familiaris
caccccaccacatttcttggaggtg

SEQ ID NO: 61665 - DNA, 25 bp, Canis familiaris
caccccaccacatttcttggaggtg

SEQ ID NO: 61666 - DNA, 25 bp, Canis familiaris
caccccacctttggtcagaatcagt

SEQ ID NO: 61667 - DNA, 25 bp, Canis familiaris
cacccgcacctctttaagtatgcag

SEQ ID NO: 61668 - DNA, 25 bp, Canis familiaris
cagccccacatctgttatcttacag

SEQ ID NO: 61669 - DNA, 25 bp, Canis familiaris
cagcctcccgagtttacttctggag

SEQ ID NO: 61670 - DNA, 25 bp, Canis familiaris
caccacctgtggtcttacggttgaa

SEQ ID NO: 61671 - DNA, 25 bp, Canis familiaris
caccacctggctttgaacgagtttc

SEQ ID NO: 61672 - DNA, 25 bp, Canis familiaris
cacccctgagtctgttaagtcttct

SEQ ID NO: 61673 - DNA, 25 bp, Canis familiaris
cccccatttcaacaagagtacctat

SEQ ID NO: 61674 - DNA, 25 bp, Canis familiaris
cagccccaataaccgacgagtacgg

SEQ ID NO: 61675 - DNA, 25 bp, Canis familiaris
cagcgcctcgtaagcaaacggtgga

SEQ ID NO: 61676 - DNA, 25 bp, Canis familiaris
cacccctgtttccaaggctgtggaa

SEQ ID NO: 61677 - DNA, 25 bp, Canis familiaris
cacccctggggccacaggtgaggga

SEQ ID NO: 61678 - DNA, 25 bp, Canis familiaris
caccgcctggagagagagaggaggg

SEQ ID NO: 61679 - DNA, 25 bp, Canis familiaris
cacctgcctgaaatcttgccgaagg

SEQ ID NO: 61680 - DNA, 25 bp, Canis familiaris
cacctggctggcatgccttggaagg

SEQ ID NO: 61681 - DNA, 25 bp, Canis familiaris
cacctggatggcatctgctttcagc

SEQ ID NO: 61682 - DNA, 25 bp, Canis familiaris
cacctggctggctcattcaatagag

SEQ ID NO: 61683 - DNA, 25 bp, Canis familiaris
caccatgtgtttctgtgccatatat

SEQ ID NO: 61684 - DNA, 25 bp, Canis familiaris
caccatggtggtcagattgagtatg

SEQ ID NO: 61685 - DNA, 25 bp, Canis familiaris
cacctggtgcttaagcctggatagc

SEQ ID NO: 61686 - DNA, 25 bp, Canis familiaris
cacctagtctgaatagcactccatc

SEQ ID NO: 61687 - DNA, 25 bp, Canis familiaris
caccatagccgattcaactccagaa

SEQ ID NO: 61688 - DNA, 25 bp, Canis familiaris
caccaagggcaaaggctacaaaagg

SEQ ID NO: 61689 - DNA, 25 bp, Canis familiaris
caccacaggatcaaatgcggacgca

SEQ ID NO: 61690 - DNA, 25 bp, Canis familiaris
cacctcaaattgatgttcagctgca

SEQ ID NO: 61691 - DNA, 25 bp, Canis familiaris
caccatctttgtgtgtattgcgccg

SEQ ID NO: 61692 - DNA, 25 bp, Canis familiaris
cacctgattcttttcaaatgacacg

SEQ ID NO: 61693 - DNA, 25 bp, Canis familiaris
cagctggatttttctccatagtact

SEQ ID NO: 61694 - DNA, 25 bp, Canis familiaris
cacctttgtatcttccatacttact

SEQ ID NO: 61695 - DNA, 25 bp, Canis familiaris
caccattatgtatttaattctccaa

SEQ ID NO: 61696 - DNA, 25 bp, Canis familiaris
caccacgattcaagtaattcccctc

SEQ ID NO: 61697 - DNA, 25 bp, Canis familiaris
caccggtctcaaggaatcaccgtct

SEQ ID NO: 61698 - DNA, 25 bp, Canis familiaris
caccgagttcaagaacacgcgcacc

SEQ ID NO: 61699 - DNA, 25 bp, Canis familiaris
cacctagaagaagctgaccggcgcc

SEQ ID NO: 61700 - DNA, 25 bp, Canis familiaris
cacctgagaagaagaagcccacacc

SEQ ID NO: 61701 - DNA, 25 bp, Canis familiaris
cacctggtgagttgagcccacagga

SEQ ID NO: 61702 - DNA, 25 bp, Canis familiaris
caccaggtaccaggccaagaggaat

SEQ ID NO: 61703 - DNA, 25 bp, Canis familiaris
caccgtccacaaggatccgggaaca

SEQ ID NO: 61704 - DNA, 25 bp, Canis familiaris
caccccagaccagatccagggagca

SEQ ID NO: 61705 - DNA, 25 bp, Canis familiaris
ctcgacggattagtaggacggacaa

SEQ ID NO: 61706 - DNA, 25 bp, Canis familiaris
ctcgaaggagtctaaggggtggcag

SEQ ID NO: 61707 - DNA, 25 bp, Canis familiaris
caccgaggaggcttgggggtgctgg

SEQ ID NO: 61708 - DNA, 25 bp, Canis familiaris
caccgaagggccaaggagggaggag

SEQ ID NO: 61709 - DNA, 25 bp, Canis familiaris
cacctaaaggcccagctgagctggg

SEQ ID NO: 61710 - DNA, 25 bp, Canis familiaris
cacctacaaacaccctggctgaagg

SEQ ID NO: 61711 - DNA, 25 bp, Canis familiaris
cagcctcgtcaaacccgggaagctg

SEQ ID NO: 61712 - DNA, 25 bp, Canis familiaris
ctgcctcgggaaccaagtgcgaccg

SEQ ID NO: 61713 - DNA, 25 bp, Canis familiaris
cacctttgagaacatcgacgacgcc

SEQ ID NO: 61714 - DNA, 25 bp, Canis familiaris
caccatgttggtggggcggtaccct

SEQ ID NO: 61715 - DNA, 25 bp, Canis familiaris
cacctgttctcatgggtcagttctc

SEQ ID NO: 61716 - DNA, 25 bp, Canis familiaris
cacctttctattctgtttctctgaa

SEQ ID NO: 61717 - DNA, 25 bp, Canis familiaris
cacctctcactttgcgtgttaacga

SEQ ID NO: 61718 - DNA, 25 bp, Canis familiaris
cacccctctttcatgtactaaaaca

SEQ ID NO: 61719 - DNA, 25 bp, Canis familiaris
caccccaggctccagtgtgaaaaaa

SEQ ID NO: 61720 - DNA, 25 bp, Canis familiaris
caccccaagcaccatatggaaataa

SEQ ID NO: 61721 - DNA, 25 bp, Canis familiaris
cacctccaggcctacaggaagcaat

SEQ ID NO: 61722 - DNA, 25 bp, Canis familiaris
cacctgccatgaccgtcaagcaagc

SEQ ID NO: 61723 - DNA, 25 bp, Canis familiaris
cacctttgagcatgcccacaacatg

SEQ ID NO: 61724 - DNA, 25 bp, Canis familiaris
caccgtgtggcagctctacgaatgg

SEQ ID NO: 61725 - DNA, 25 bp, Canis familiaris
cacctctgtggggcttctgtggtga

SEQ ID NO: 61726 - DNA, 25 bp, Canis familiaris
cacctctgtgtggcttcaatggcgg

SEQ ID NO: 61727 - DNA, 25 bp, Canis familiaris
caccttgggcctacaagtctgtcta

SEQ ID NO: 61728 - DNA, 25 bp, Canis familiaris
cacctgggcggctcagatggttaag

SEQ ID NO: 61729 - DNA, 25 bp, Canis familiaris
cacctgggctggaacagcaaccgag

SEQ ID NO: 61730 - DNA, 25 bp, Canis familiaris
cacctgggcaggtacacaacgggtc

SEQ ID NO: 61731 - DNA, 25 bp, Canis familiaris
cacctcgtcaggcacgaagctgggg

SEQ ID NO: 61732 - DNA, 25 bp, Canis familiaris
cacctgcattccggataggcagccc

SEQ ID NO: 61733 - DNA, 25 bp, Canis familiaris
cacctatccacaggcaagcgtgccc

SEQ ID NO: 61734 - DNA, 25 bp, Canis familiaris
cacctagcacacagaatgttgcggc

SEQ ID NO: 61735 - DNA, 25 bp, Canis familiaris
cacctgagccacaacgagatccggc

SEQ ID NO: 61736 - DNA, 25 bp, Canis familiaris
caccatcatgttcacggtcgtggct

SEQ ID NO: 61737 - DNA, 25 bp, Canis familiaris
cacctctgtctctgagcctagggtg

SEQ ID NO: 61738 - DNA, 25 bp, Canis familiaris
caccatctttggaacacgaagtgtg

SEQ ID NO: 61739 - DNA, 25 bp, Canis familiaris
caccttcctgggtgctggagtctgg

SEQ ID NO: 61740 - DNA, 25 bp, Canis familiaris
cacctgtgccaggtttggccagttc

SEQ ID NO: 61741 - DNA, 25 bp, Canis familiaris
caccgctcgcagcttatgatgcgca

SEQ ID NO: 61742 - DNA, 25 bp, Canis familiaris
caccccagtgttcatagcagcaatg

SEQ ID NO: 61743 - DNA, 25 bp, Canis familiaris
caccatcaagctgctgaatgaaaat

SEQ ID NO: 61744 - DNA, 25 bp, Canis familiaris
cagccaatatgtccaaatatcagag

SEQ ID NO: 61745 - DNA, 25 bp, Canis familiaris
cacctacatgatcgcacacatcaca

SEQ ID NO: 61746 - DNA, 25 bp, Canis familiaris
cacctcatcttcgacagtgcacaaa

SEQ ID NO: 61747 - DNA, 25 bp, Canis familiaris
caccgacatgcccaaggctcagaag

SEQ ID NO: 61748 - DNA, 25 bp, Canis familiaris
caccacaagcaccaacctataacgg

SEQ ID NO: 61749 - DNA, 25 bp, Canis familiaris
cagcctcaagaatcccttaaccatg

SEQ ID NO: 61750 - DNA, 25 bp, Canis familiaris
cgcaacagtaaatccttacaccttc

SEQ ID NO: 61751 - DNA, 25 bp, Canis familiaris
ccgacaggattatacttactcagct

SEQ ID NO: 61752 - DNA, 25 bp, Canis familiaris
caccatgggatttcccttactcgct

SEQ ID NO: 61753 - DNA, 25 bp, Canis familiaris
cagccagggcttacctgtacactga

SEQ ID NO: 61754 - DNA, 25 bp, Canis familiaris
caccagaggcagagcctggccttgt

SEQ ID NO: 61755 - DNA, 25 bp, Canis familiaris
cacctggagcagagcctggctcaga

SEQ ID NO: 61756 - DNA, 25 bp, Canis familiaris
caccgtgcggcggcggatgatgatg

SEQ ID NO: 61757 - DNA, 25 bp, Canis familiaris
caccgttgtgctatggagagtacta

SEQ ID NO: 61758 - DNA, 25 bp, Canis familiaris
caccatttattgagagcaatgtctt

SEQ ID NO: 61759 - DNA, 25 bp, Canis familiaris
caccttcaactttgaccatgccttg

SEQ ID NO: 61760 - DNA, 25 bp, Canis familiaris
caccttcacctttagcttcttgaaa

SEQ ID NO: 61761 - DNA, 25 bp, Canis familiaris
cagccttgatacattagcccttaaa

SEQ ID NO: 61762 - DNA, 25 bp, Canis familiaris
cacctgatcatatgttcctcgcgtg

SEQ ID NO: 61763 - DNA, 25 bp, Canis familiaris
caccatcctctgcattgacttgggc

SEQ ID NO: 61764 - DNA, 25 bp, Canis familiaris
cacctgcccatgtcagtgatcatcg

SEQ ID NO: 61765 - DNA, 25 bp, Canis familiaris
cagctgtgcgccaagcaggcgctcg

SEQ ID NO: 61766 - DNA, 25 bp, Canis familiaris
cagctggtgcgaaaatcgctaagca

SEQ ID NO: 61767 - DNA, 25 bp, Canis familiaris
cagctggtagcaattttatgaaagt

SEQ ID NO: 61768 - DNA, 25 bp, Canis familiaris
cagctttacagttttgtgagaatat

SEQ ID NO: 61769 - DNA, 25 bp, Canis familiaris
cagctttaccatctcgatgcctata

SEQ ID NO: 61770 - DNA, 25 bp, Canis familiaris
cacctcttccattggggcacataaa

SEQ ID NO: 61771 - DNA, 25 bp, Canis familiaris
cagccacctcccttgaggacaaata

SEQ ID NO: 61772 - DNA, 25 bp, Canis familiaris
cagtttcccctcgggaagcaagagg

SEQ ID NO: 61773 - DNA, 25 bp, Canis familiaris
cagctgttccccggggtagtagttg

SEQ ID NO: 61774 - DNA, 25 bp, Canis familiaris
cagcgtcacccctggggaggtttga

SEQ ID NO: 61775 - DNA, 25 bp, Canis familiaris
cagctccgcccacaggggggtgggc

SEQ ID NO: 61776 - DNA, 25 bp, Canis familiaris
cagtggcccctgtggggaacagttc

SEQ ID NO: 61777 - DNA, 25 bp, Canis familiaris
cacctgcccctgtggggacatgagg

SEQ ID NO: 61778 - DNA, 25 bp, Canis familiaris
cacctgcctcacagaggatgggagg

SEQ ID NO: 61779 - DNA, 25 bp, Canis familiaris
cacctgatctccctgaggatctgta

SEQ ID NO: 61780 - DNA, 25 bp, Canis familiaris
caccagactccacttggactacatt

SEQ ID NO: 61781 - DNA, 25 bp, Canis familiaris
caccaggtccatgtgaggtcgctgt

SEQ ID NO: 61782 - DNA, 25 bp, Canis familiaris
caccggtacatcaagggcatcgtga

SEQ ID NO: 61783 - DNA, 25 bp, Canis familiaris
cacctgtataataacgacacgtgct

SEQ ID NO: 61784 - DNA, 25 bp, Canis familiaris
cacctgtgcaaagcctgggctggct

SEQ ID NO: 61785 - DNA, 25 bp, Canis familiaris
cacctgtcggacgcaggtgctgctc

SEQ ID NO: 61786 - DNA, 25 bp, Canis familiaris
caccgtgcggattggagaggaggcc

SEQ ID NO: 61787 - DNA, 25 bp, Canis familiaris
caccggctggatttgctccaggggc

SEQ ID NO: 61788 - DNA, 25 bp, Canis familiaris
caccgacgaatattacaacgcggca

SEQ ID NO: 61789 - DNA, 25 bp, Canis familiaris
caccgacaggaacgacttccggagg

SEQ ID NO: 61790 - DNA, 25 bp, Canis familiaris
cagccggcgggaggaataccgtggt

SEQ ID NO: 61791 - DNA, 25 bp, Canis familiaris
caccggggctgtggaggcccgggtg

SEQ ID NO: 61792 - DNA, 25 bp, Canis familiaris
cagtcggggagatgggcacccgggc

SEQ ID NO: 61793 - DNA, 25 bp, Canis familiaris
gcagacgttaaagaaacccggcagt

SEQ ID NO: 61794 - DNA, 25 bp, Canis familiaris
cagatcgtattggaaaaaccaagag

SEQ ID NO: 61795 - DNA, 25 bp, Canis familiaris
caccagtgtgtgtacagaaacggga

SEQ ID NO: 61796 - DNA, 25 bp, Canis familiaris
caccagtgggcccagagacggagga

SEQ ID NO: 61797 - DNA, 25 bp, Canis familiaris
caccataggctggcggcagatcttg

SEQ ID NO: 61798 - DNA, 25 bp, Canis familiaris
cacctcggctcattgatggcattgt

SEQ ID NO: 61799 - DNA, 25 bp, Canis familiaris
caccatcgccgactgtggacagatc

SEQ ID NO: 61800 - DNA, 25 bp, Canis familiaris
caccatcgccgactgtggacagatc

SEQ ID NO: 61801 - DNA, 25 bp, Canis familiaris
caccaatgccgaggtgctgcgtgtc

SEQ ID NO: 61802 - DNA, 25 bp, Canis familiaris
cagctgcaatacccggtgtttcttg

SEQ ID NO: 61803 - DNA, 25 bp, Canis familiaris
cagctaaagcgaggcctgcttcgtc

SEQ ID NO: 61804 - DNA, 25 bp, Canis familiaris
caccaaaaccacccagatcgaggac

SEQ ID NO: 61805 - DNA, 25 bp, Canis familiaris
cagccaaacccatcctgttggtagc

SEQ ID NO: 61806 - DNA, 25 bp, Canis familiaris
caccttaccacatcctggttgatac

SEQ ID NO: 61807 - DNA, 25 bp, Canis familiaris
cacctttctctcagtctgtttgtaa

SEQ ID NO: 61808 - DNA, 25 bp, Canis familiaris
caccacccaatcaagtcctttcttg

SEQ ID NO: 61809 - DNA, 25 bp, Canis familiaris
caccaccatctttagtgttttgcta

SEQ ID NO: 61810 - DNA, 25 bp, Canis familiaris
caccattctttactgttatatatta

SEQ ID NO: 61811 - DNA, 25 bp, Canis familiaris
caccatttgggctagtttctgtata

SEQ ID NO: 61812 - DNA, 25 bp, Canis familiaris
cacctgtctccctattattttatac

SEQ ID NO: 61813 - DNA, 25 bp, Canis familiaris
cacctgtcaccaggatcttctttga

SEQ ID NO: 61814 - DNA, 25 bp, Canis familiaris
caccattgccactgattttattaat

SEQ ID NO: 61815 - DNA, 25 bp, Canis familiaris
caccttcctcatgcttctaagtaat

SEQ ID NO: 61816 - DNA, 25 bp, Canis familiaris
cacctcacctgacattcaaatttta

SEQ ID NO: 61817 - DNA, 25 bp, Canis familiaris
cagcctgcccttctcataagggtta

SEQ ID NO: 61818 - DNA, 25 bp, Canis familiaris
cacctgccctatcctatagagttta

SEQ ID NO: 61819 - DNA, 25 bp, Canis familiaris
cacctcatgcctgaccaaagtttag

SEQ ID NO: 61820 - DNA, 25 bp, Canis familiaris
cagcccccctcaacaaagaattaat

SEQ ID NO: 61821 - DNA, 25 bp, Canis familiaris
cagctgcaagcgccctaaaaaaaaa

SEQ ID NO: 61822 - DNA, 25 bp, Canis familiaris
cagtaagaggacaataaatacgggg

SEQ ID NO: 61823 - DNA, 25 bp, Canis familiaris
caggacaacccctgaaacgaggccg

SEQ ID NO: 61824 - DNA, 25 bp, Canis familiaris
cagcgaagtccccagtgaaaagcgg

SEQ ID NO: 61825 - DNA, 25 bp, Canis familiaris
cagcccagtcacggtgtctaaacat

SEQ ID NO: 61826 - DNA, 25 bp, Canis familiaris
cagcgccatatcagggtccgaaagc

SEQ ID NO: 61827 - DNA, 25 bp, Canis familiaris
caccacaactggccaacctgataaa

SEQ ID NO: 61828 - DNA, 25 bp, Canis familiaris
cagcgcgcaagagggcagaccgata

SEQ ID NO: 61829 - DNA, 25 bp, Canis familiaris
cagctccaaagtcctgaccatgttg

SEQ ID NO: 61830 - DNA, 25 bp, Canis familiaris
cagctaaaatacttgtcaccttggt

SEQ ID NO: 61831 - DNA, 25 bp, Canis familiaris
catgccaataaatgtatgaacttag

SEQ ID NO: 61832 - DNA, 25 bp, Canis familiaris
caccaatcacaatctcaagaattcg

SEQ ID NO: 61833 - DNA, 25 bp, Canis familiaris
caccaatcatccctcatctggaatg

SEQ ID NO: 61834 - DNA, 25 bp, Canis familiaris
caccatatcattgtcattatactgg

SEQ ID NO: 61835 - DNA, 25 bp, Canis familiaris
caccatgtcattactcttgatgaga

SEQ ID NO: 61836 - DNA, 25 bp, Canis familiaris
caccatgtctattctcaagatccac

SEQ ID NO: 61837 - DNA, 25 bp, Canis familiaris
cagctctcctacttgaagatcctaa

SEQ ID NO: 61838 - DNA, 25 bp, Canis familiaris
cagcgtccaaacaatgtgtcccatc

SEQ ID NO: 61839 - DNA, 25 bp, Canis familiaris
cagcgctcaaaactcggtgatcata

SEQ ID NO: 61840 - DNA, 25 bp, Canis familiaris
cagctgattccatgtctgggatgac

SEQ ID NO: 61841 - DNA, 25 bp, Canis familiaris
cagcagctactttgtcgagtggatc

SEQ ID NO: 61842 - DNA, 25 bp, Canis familiaris
cagcatgcaacaggtgtcggtcttg

SEQ ID NO: 61843 - DNA, 25 bp, Canis familiaris
caccaggctggttcaggtgcttggg

SEQ ID NO: 61844 - DNA, 25 bp, Canis familiaris
cagccatgccctctaaatgctagag

SEQ ID NO: 61845 - DNA, 25 bp, Canis familiaris
cacctccatcacctcatatatttag

SEQ ID NO: 61846 - DNA, 25 bp, Canis familiaris
caccatccatgaccttttgtcttgg

SEQ ID NO: 61847 - DNA, 25 bp, Canis familiaris
caccagtcacagcctttgaatcttc

SEQ ID NO: 61848 - DNA, 25 bp, Canis familiaris
caccttgacactagttgaaccatcc

SEQ ID NO: 61849 - DNA, 25 bp, Canis familiaris
cacctgttagttttagcatccattc

SEQ ID NO: 61850 - DNA, 25 bp, Canis familiaris
cacctctagaggccttataccattc

SEQ ID NO: 61851 - DNA, 25 bp, Canis familiaris
caccttagacgcctcttgagcaatt

SEQ ID NO: 61852 - DNA, 25 bp, Canis familiaris
cacctctttctgcccatagaagttt

SEQ ID NO: 61853 - DNA, 25 bp, Canis familiaris
cacctccatcttcccaatatagtat

SEQ ID NO: 61854 - DNA, 25 bp, Canis familiaris
cagccccactcaccataaataattg

SEQ ID NO: 61855 - DNA, 25 bp, Canis familiaris
caccatccgtcaccagagaaaacag

SEQ ID NO: 61856 - DNA, 25 bp, Canis familiaris
caccattccccttgaagagttcagc

SEQ ID NO: 61857 - DNA, 25 bp, Canis familiaris
caccttcaggccagggcatgattca

SEQ ID NO: 61858 - DNA, 25 bp, Canis familiaris
caccttcgattcagtggcaaagcac

SEQ ID NO: 61859 - DNA, 25 bp, Canis familiaris
caccaccagcttttgtggaccagcc

SEQ ID NO: 61860 - DNA, 25 bp, Canis familiaris
caccatcgctgtccttgaggagtct

SEQ ID NO: 61861 - DNA, 25 bp, Canis familiaris
cagctgcaaggtactctggtgagtc

SEQ ID NO: 61862 - DNA, 25 bp, Canis familiaris
caccagatggaagctgtggatgggg

SEQ ID NO: 61863 - DNA, 25 bp, Canis familiaris
caccagatggaagctgtggatgggg

SEQ ID NO: 61864 - DNA, 25 bp, Canis familiaris
caccagagctacgcttgtcatgcgc

SEQ ID NO: 61865 - DNA, 25 bp, Canis familiaris
cagccatgagtatgctcagcttcag

SEQ ID NO: 61866 - DNA, 25 bp, Canis familiaris
cagctgctgggtgtccattgccata

SEQ ID NO: 61867 - DNA, 25 bp, Canis familiaris
cagctgctcgacatgtcctacgagc

SEQ ID NO: 61868 - DNA, 25 bp, Canis familiaris
cagctgcattgtcctcgaaactagc

SEQ ID NO: 61869 - DNA, 25 bp, Canis familiaris
cagctgctggatattgaagattgcg

SEQ ID NO: 61870 - DNA, 25 bp, Canis familiaris
cacctggacctccatagctgtggag

SEQ ID NO: 61871 - DNA, 25 bp, Canis familiaris
cacctgcagactgctcttctttgaa

SEQ ID NO: 61872 - DNA, 25 bp, Canis familiaris
cagcctgaactgttaatgatgttaa

SEQ ID NO: 61873 - DNA, 25 bp, Canis familiaris
cagcccaagtccaaatgtttacagg

SEQ ID NO: 61874 - DNA, 25 bp, Canis familiaris
cagcgccagagtgctgacgccttac

SEQ ID NO: 61875 - DNA, 25 bp, Canis familiaris
caccaagctgctactgacgaggctg

SEQ ID NO: 61876 - DNA, 25 bp, Canis familiaris
cagccatagcttagtcatcagagat

SEQ ID NO: 61877 - DNA, 25 bp, Canis familiaris
cagctgttcctggtgctagagtaag

SEQ ID NO: 61878 - DNA, 25 bp, Canis familiaris
cacctacctgcttcagggtcaagcc

SEQ ID NO: 61879 - DNA, 25 bp, Canis familiaris
cacctcggcctcgagcggagaatgc

SEQ ID NO: 61880 - DNA, 25 bp, Canis familiaris
cacctgggcccacaggagagagaga

SEQ ID NO: 61881 - DNA, 25 bp, Canis familiaris
caccttggccctctgacaagaaaaa

SEQ ID NO: 61882 - DNA, 25 bp, Canis familiaris
caccttggcctcttggacaagccat

SEQ ID NO: 61883 - DNA, 25 bp, Canis familiaris
cagccttggcctcatcaaaagacaa

SEQ ID NO: 61884 - DNA, 25 bp, Canis familiaris
cagacgtggcctcttaagaccagca

SEQ ID NO: 61885 - DNA, 25 bp, Canis familiaris
cagtcgggcccggaaaaggctcagg

SEQ ID NO: 61886 - DNA, 25 bp, Canis familiaris
cacctgggaccagaagccatggctc

SEQ ID NO: 61887 - DNA, 25 bp, Canis familiaris
cacctgggccaatgatagtctcctc

SEQ ID NO: 61888 - DNA, 25 bp, Canis familiaris
caccttggccagaagttgtcctgcc

SEQ ID NO: 61889 - DNA, 25 bp, Canis familiaris
caccaatgcctagaactgctcgtgc

SEQ ID NO: 61890 - DNA, 25 bp, Canis familiaris
caccagacacggaaacgccgggagt

SEQ ID NO: 61891 - DNA, 25 bp, Canis familiaris
caccaaatggcggatgacgccggtg

SEQ ID NO: 61892 - DNA, 25 bp, Canis familiaris
caccaacaggtcgtgtggacgcgtg

SEQ ID NO: 61893 - DNA, 25 bp, Canis familiaris
caccaaatggtctctggagcagcca

SEQ ID NO: 61894 - DNA, 25 bp, Canis familiaris
cagccaacagctgaatctggtggga

SEQ ID NO: 61895 - DNA, 25 bp, Canis familiaris
cagccaccgggaatcacgggagcgc

SEQ ID NO: 61896 - DNA, 25 bp, Canis familiaris
caccaacgggacggagcgggtgcgg

SEQ ID NO: 61897 - DNA, 25 bp, Canis familiaris
caccaacgggacggagcgggtgcgg

SEQ ID NO: 61898 - DNA, 25 bp, Canis familiaris
caccaacgggacggagcgggtgcgg

SEQ ID NO: 61899 - DNA, 25 bp, Canis familiaris
caccaacgggacggagcgggtgcgg

SEQ ID NO: 61900 - DNA, 25 bp, Canis familiaris
caccaacgggacggagcgggtgcgg

SEQ ID NO: 61901 - DNA, 25 bp, Canis familiaris
caccaacgggacggagcgggtgcgg

SEQ ID NO: 61902 - DNA, 25 bp, Canis familiaris
caccaacgggacggagcgggtgcgg

SEQ ID NO: 61903 - DNA, 25 bp, Canis familiaris
caccaacgggacggagcgggtgcgg

SEQ ID NO: 61904 - DNA, 25 bp, Canis familiaris
caccaacgggacggagcgggtgcgg

SEQ ID NO: 61905 - DNA, 25 bp, Canis familiaris
caccaacgggacggagcgggtgcgg

SEQ ID NO: 61906 - DNA, 25 bp, Canis familiaris
caccaacgggacggagcgggtgcgg

SEQ ID NO: 61907 - DNA, 25 bp, Canis familiaris
caccaacgggacggagcgggtgcgg

SEQ ID NO: 61908 - DNA, 25 bp, Canis familiaris
caccaactgggacgacatggagaaa

SEQ ID NO: 61909 - DNA, 25 bp, Canis familiaris
caccatgaagtgcagcccaggagcc

SEQ ID NO: 61910 - DNA, 25 bp, Canis familiaris
cacctgagaggtgtctatgcatcaa

SEQ ID NO: 61911 - DNA, 25 bp, Canis familiaris
cagccggcagggcggcgtacagtat

SEQ ID NO: 61912 - DNA, 25 bp, Canis familiaris
cagccgacggggaaggtccagttgg

SEQ ID NO: 61913 - DNA, 25 bp, Canis familiaris
cagccttgggagctggttccagttg

SEQ ID NO: 61914 - DNA, 25 bp, Canis familiaris
caccttggggagctggtcactttgt

SEQ ID NO: 61915 - DNA, 25 bp, Canis familiaris
caccacggggagctgtttgaatctt

SEQ ID NO: 61916 - DNA, 25 bp, Canis familiaris
caccacgtgtgggaacttgtttctg

SEQ ID NO: 61917 - DNA, 25 bp, Canis familiaris
cccacttggcaatccttttgccggg

SEQ ID NO: 61918 - DNA, 25 bp, Canis familiaris
caccagttacaattcaattatagcc

SEQ ID NO: 61919 - DNA, 25 bp, Canis familiaris
cagacctctagttttatttgtgcct

SEQ ID NO: 61920 - DNA, 25 bp, Canis familiaris
cagcggccaatggtattcatttgtc

SEQ ID NO: 61921 - DNA, 25 bp, Canis familiaris
cagcgggggcagatttgtgttcatg

SEQ ID NO: 61922 - DNA, 25 bp, Canis familiaris
cagcgtgataggtgtttctcttctt

SEQ ID NO: 61923 - DNA, 25 bp, Canis familiaris
cagccagtggctttttttcttattt

SEQ ID NO: 61924 - DNA, 25 bp, Canis familiaris
cagccagacacttgattatctttgc

SEQ ID NO: 61925 - DNA, 25 bp, Canis familiaris
caccaatcagtgttctgtctctgcc

SEQ ID NO: 61926 - DNA, 25 bp, Canis familiaris
caccacatcattctttccataggaa

SEQ ID NO: 61927 - DNA, 25 bp, Canis familiaris
caccatgcctctattgaccaagttt

SEQ ID NO: 61928 - DNA, 25 bp, Canis familiaris
caccatcctctattatcacactatg

SEQ ID NO: 61929 - DNA, 25 bp, Canis familiaris
caccttgctgtcttcacagctttgg

SEQ ID NO: 61930 - DNA, 25 bp, Canis familiaris
cacctctgtggcatcaacttcacag

SEQ ID NO: 61931 - DNA, 25 bp, Canis familiaris
cagcctagggtacaatacacaacac

SEQ ID NO: 61932 - DNA, 25 bp, Canis familiaris
cacctaggtgccctcatgatacaag

SEQ ID NO: 61933 - DNA, 25 bp, Canis familiaris
caccattgttccctcaaagataccc

SEQ ID NO: 61934 - DNA, 25 bp, Canis familiaris
cacctcgtcatcctgtcaaatatag

SEQ ID NO: 61935 - DNA, 25 bp, Canis familiaris
cacctgctatgtgtggcaaatgaag

SEQ ID NO: 61936 - DNA, 25 bp, Canis familiaris
cacctgctcgggcgagaagcggagg

SEQ ID NO: 61937 - DNA, 25 bp, Canis familiaris
cagccgatcgggtcaggcaagtccg

SEQ ID NO: 61938 - DNA, 25 bp, Canis familiaris
cagcctatactgtccagtctaaccc

SEQ ID NO: 61939 - DNA, 25 bp, Canis familiaris
cagccgctaatctgttctaactctc

SEQ ID NO: 61940 - DNA, 25 bp, Canis familiaris
cagctagctttaaacttaacctcca

SEQ ID NO: 61941 - DNA, 25 bp, Canis familiaris
cagagactttaaccttaccttgact

SEQ ID NO: 61942 - DNA, 25 bp, Canis familiaris
cagaacttatttccggaattgcaga

SEQ ID NO: 61943 - DNA, 25 bp, Canis familiaris
cagcaatttccccgggcaagctgaa

SEQ ID NO: 61944 - DNA, 25 bp, Canis familiaris
cagccttgtgtgcctgggtatagct

SEQ ID NO: 61945 - DNA, 25 bp, Canis familiaris
caccttcatttgctggcgtgagctg

SEQ ID NO: 61946 - DNA, 25 bp, Canis familiaris
cacctgcctcttctggtgatgcaga

SEQ ID NO: 61947 - DNA, 25 bp, Canis familiaris
cacctgctggctagcgaggttcatg

SEQ ID NO: 61948 - DNA, 25 bp, Canis familiaris
cacctgaggctccgtgggtatgtgg

SEQ ID NO: 61949 - DNA, 25 bp, Canis familiaris
cacctcagcgcttgtggtgggcagg

SEQ ID NO: 61950 - DNA, 25 bp, Canis familiaris
cagctcgcaagtttggcgcgtgagg

SEQ ID NO: 61951 - DNA, 25 bp, Canis familiaris
cagctcacaaggtgtgtcctggtgc

SEQ ID NO: 61952 - DNA, 25 bp, Canis familiaris
caccagcaaacagggggctctgcac

SEQ ID NO: 61953 - DNA, 25 bp, Canis familiaris
cagcccacaaccagggctgctcggc

SEQ ID NO: 61954 - DNA, 25 bp, Canis familiaris
cagccccaaaaaaggaggcggctct

SEQ ID NO: 61955 - DNA, 25 bp, Canis familiaris
cacctcgaaactcctggaggcctgc

SEQ ID NO: 61956 - DNA, 25 bp, Canis familiaris
caccattggcaatgagcggttccgc

SEQ ID NO: 61957 - DNA, 25 bp, Canis familiaris
caccatcttccaggagcgagacccc

SEQ ID NO: 61958 - DNA, 25 bp, Canis familiaris
caccattgatattggggaggccccc

SEQ ID NO: 61959 - DNA, 25 bp, Canis familiaris
cacctgctgctaagggtgcggcggc

SEQ ID NO: 61960 - DNA, 25 bp, Canis familiaris
cacctgctctgttgaggtctggtac

SEQ ID NO: 61961 - DNA, 25 bp, Canis familiaris
cacctctctgttagtccatgattaa

SEQ ID NO: 61962 - DNA, 25 bp, Canis familiaris
cacctcctgtctaatccattgaaaa

SEQ ID NO: 61963 - DNA, 25 bp, Canis familiaris
caccttcttctgcacttggaaagca

SEQ ID NO: 61964 - DNA, 25 bp, Canis familiaris
cacctttatttgtttgctgaaaatg

SEQ ID NO: 61965 - DNA, 25 bp, Canis familiaris
caccttccagagctttgccaaatat

SEQ ID NO: 61966 - DNA, 25 bp, Canis familiaris
caccatcccagaggacttccaagag

SEQ ID NO: 61967 - DNA, 25 bp, Canis familiaris
caccatcaccagacaccttgaaaga

SEQ ID NO: 61968 - DNA, 25 bp, Canis familiaris
cacctactgcagacacaactacggg

SEQ ID NO: 61969 - DNA, 25 bp, Canis familiaris
cacctactgcagacacaactacggg

SEQ ID NO: 61970 - DNA, 25 bp, Canis familiaris
cacctactgcagacacaactacggg

SEQ ID NO: 61971 - DNA, 25 bp, Canis familiaris
cacctactgcagacacaactacggg

SEQ ID NO: 61972 - DNA, 25 bp, Canis familiaris
cacctcccaaaacctgcagctggag

SEQ ID NO: 61973 - DNA, 25 bp, Canis familiaris
cagcctcaccaacagaccagaagag

SEQ ID NO: 61974 - DNA, 25 bp, Canis familiaris
cagcagccagcctctttaaggagat

SEQ ID NO: 61975 - DNA, 25 bp, Canis familiaris
cagcactgatactctttccgtatgt

SEQ ID NO: 61976 - DNA, 25 bp, Canis familiaris
cagctctccaaagtcttccagataa

SEQ ID NO: 61977 - DNA, 25 bp, Canis familiaris
cagctcccaatagcgtattattaaa

SEQ ID NO: 61978 - DNA, 25 bp, Canis familiaris
cagctcccaatagcgctatattaaa

SEQ ID NO: 61979 - DNA, 25 bp, Canis familiaris
cagcaccacaaaccctatactatta

SEQ ID NO: 61980 - DNA, 25 bp, Canis familiaris
caccactaaagccctgtttcattat

SEQ ID NO: 61981 - DNA, 25 bp, Canis familiaris
cagccctaaccacttttcagaatat

SEQ ID NO: 61982 - DNA, 25 bp, Canis familiaris
cagcttcccaccattagtcagagaa

SEQ ID NO: 61983 - DNA, 25 bp, Canis familiaris
cagctttccacctggctgcatatag

SEQ ID NO: 61984 - DNA, 25 bp, Canis familiaris
cagcttctaacgtgggttatgtggg

SEQ ID NO: 61985 - DNA, 25 bp, Canis familiaris
cacctcctcacgtgggtgtgggggg

SEQ ID NO: 61986 - DNA, 25 bp, Canis familiaris
caccatcccaggtcagtcgggggga

SEQ ID NO: 61987 - DNA, 25 bp, Canis familiaris
caccaccacaggtccaggaggggtg

SEQ ID NO: 61988 - DNA, 25 bp, Canis familiaris
caccatgccctggactcaggaggct

SEQ ID NO: 61989 - DNA, 25 bp, Canis familiaris
caccatctggcagaccgtcagagat

SEQ ID NO: 61990 - DNA, 25 bp, Canis familiaris
caccatctgccactacatcgtggag

SEQ ID NO: 61991 - DNA, 25 bp, Canis familiaris
caccatctgctccaatcatgtagac

SEQ ID NO: 61992 - DNA, 25 bp, Canis familiaris
cacctcatcatccttcaaaacatag

SEQ ID NO: 61993 - DNA, 25 bp, Canis familiaris
caccttcactgtggcccagaatgag

SEQ ID NO: 61994 - DNA, 25 bp, Canis familiaris
caccatgtccgtggagctcgaggag

SEQ ID NO: 61995 - DNA, 25 bp, Canis familiaris
caccatgggcagtcccagggtgcag

SEQ ID NO: 61996 - DNA, 25 bp, Canis familiaris
cagcctgctggacaacgggctgcga

SEQ ID NO: 61997 - DNA, 25 bp, Canis familiaris
caccttgcgcagcgtcaggatcacg

SEQ ID NO: 61998 - DNA, 25 bp, Canis familiaris
caccttccagcagatgtggatcagc

SEQ ID NO: 61999 - DNA, 25 bp, Canis familiaris
caccttccagcatatgctaaactat

SEQ ID NO: 62000 - DNA, 25 bp, Canis familiaris
cacctactcactttgctatagccat

SEQ ID NO: 62001 - DNA, 25 bp, Canis familiaris
cacctacatttatgcaacagcctca

SEQ ID NO: 62002 - DNA, 25 bp, Canis familiaris
cacctcagattcagaaaagccatgg

SEQ ID NO: 62003 - DNA, 25 bp, Canis familiaris
caccacttgctcttgaaaatccggg

SEQ ID NO: 62004 - DNA, 25 bp, Canis familiaris
caccagcttctgtgtagaattgcag

SEQ ID NO: 62005 - DNA, 25 bp, Canis familiaris
caccaattcatgtgccatattctac

SEQ ID NO: 62006 - DNA, 25 bp, Canis familiaris
caccacccatgatccatctgtgtag

SEQ ID NO: 62007 - DNA, 25 bp, Canis familiaris
caccacccatgatccatctgtgtag

SEQ ID NO: 62008 - DNA, 25 bp, Canis familiaris
caccaccctgattccaggctggaga

SEQ ID NO: 62009 - DNA, 25 bp, Canis familiaris
caccagccccaggctgcagagggga

SEQ ID NO: 62010 - DNA, 25 bp, Canis familiaris
caccattcgccgccagaatgaggga

SEQ ID NO: 62011 - DNA, 25 bp, Canis familiaris
caccttgacctggcagcgtgatggg

SEQ ID NO: 62012 - DNA, 25 bp, Canis familiaris
caccatatacacaccctgatttttg

SEQ ID NO: 62013 - DNA, 25 bp, Canis familiaris
cagcatttacaacccctgaagtgct

SEQ ID NO: 62014 - DNA, 25 bp, Canis familiaris
caggtacgaacagccgaaatgtgac

SEQ ID NO: 62015 - DNA, 25 bp, Canis familiaris
ccgaccgaaagcccattcaagtgtc

SEQ ID NO: 62016 - DNA, 25 bp, Canis familiaris
cagccagggagatcctgggcggcat

SEQ ID NO: 62017 - DNA, 25 bp, Canis familiaris
cagcctctgattgactctggggact

SEQ ID NO: 62018 - DNA, 25 bp, Canis familiaris
caccttgatctaatcctgggctaat

SEQ ID NO: 62019 - DNA, 25 bp, Canis familiaris
caccagctgattttccggagttatt

SEQ ID NO: 62020 - DNA, 25 bp, Canis familiaris
caccacataagatacggagtacatc

SEQ ID NO: 62021 - DNA, 25 bp, Canis familiaris
caccacaagagacacgagtctgagt

SEQ ID NO: 62022 - DNA, 25 bp, Canis familiaris
caccattcaaggaccgagtcgcagc

SEQ ID NO: 62023 - DNA, 25 bp, Canis familiaris
caccttccagaacgcagaggcgcca

SEQ ID NO: 62024 - DNA, 25 bp, Canis familiaris
catctatcccaattttaggcccact

SEQ ID NO: 62025 - DNA, 25 bp, Canis familiaris
cgcttagcaaattattcgtcctatc

SEQ ID NO: 62026 - DNA, 25 bp, Canis familiaris
catttacaaattatcattagcagag

SEQ ID NO: 62027 - DNA, 25 bp, Canis familiaris
cagaataatacatttgtcattactg

SEQ ID NO: 62028 - DNA, 25 bp, Canis familiaris
cacctaatatcatcgctactatgct

SEQ ID NO: 62029 - DNA, 25 bp, Canis familiaris
cagctgcttaacactgtcacttcat

SEQ ID NO: 62030 - DNA, 25 bp, Canis familiaris
caccttccatattatgtgcctttgc

SEQ ID NO: 62031 - DNA, 25 bp, Canis familiaris
caccttctacaatgagctgcgtgtg

SEQ ID NO: 62032 - DNA, 25 bp, Canis familiaris
caccttctacaatgagctgcgtgtg

SEQ ID NO: 62033 - DNA, 25 bp, Canis familiaris
caccttcatgccaatcaagcctgat

SEQ ID NO: 62034 - DNA, 25 bp, Canis familiaris
caccataatgcagacaccctattgc

SEQ ID NO: 62035 - DNA, 25 bp, Canis familiaris
caccaaggaggacctcactgagatc

SEQ ID NO: 62036 - DNA, 25 bp, Canis familiaris
caccagagtgtgagtctccgagtcg

SEQ ID NO: 62037 - DNA, 25 bp, Canis familiaris
caccagttggcaagatccacgcctc

SEQ ID NO: 62038 - DNA, 25 bp, Canis familiaris
caccaccatgtgagtggcagccgcc

SEQ ID NO: 62039 - DNA, 25 bp, Canis familiaris
caccagcctgggctagaggtcctgg

SEQ ID NO: 62040 - DNA, 25 bp, Canis familiaris
caccacagtggaggcaggtggcccg

SEQ ID NO: 62041 - DNA, 25 bp, Canis familiaris
caccaagatcattcacggtgcccac

SEQ ID NO: 62042 - DNA, 25 bp, Canis familiaris
caccaattaactggggccaacctgg

SEQ ID NO: 62043 - DNA, 25 bp, Canis familiaris
caccagagttagggttccaacccag

SEQ ID NO: 62044 - DNA, 25 bp, Canis familiaris
caccagagtttgagtctcccgagtc

SEQ ID NO: 62045 - DNA, 25 bp, Canis familiaris
caccaatgttttacagtttcagagt

SEQ ID NO: 62046 - DNA, 25 bp, Canis familiaris
caccacacatttgtatgcttctcag

SEQ ID NO: 62047 - DNA, 25 bp, Canis familiaris
caccacgcttatctagcacgtacgt

SEQ ID NO: 62048 - DNA, 25 bp, Canis familiaris
caccagcctcttagttgcatctgta

SEQ ID NO: 62049 - DNA, 25 bp, Canis familiaris
caccacactctactgttagctttgt

SEQ ID NO: 62050 - DNA, 25 bp, Canis familiaris
cagcctaactatgggacagctttat

SEQ ID NO: 62051 - DNA, 25 bp, Canis familiaris
cagcctcgcggtggaacagctgttt

SEQ ID NO: 62052 - DNA, 25 bp, Canis familiaris
cagcccactgttgtatacgcttatt

SEQ ID NO: 62053 - DNA, 25 bp, Canis familiaris
cataccatcgtacctaaccattatt

SEQ ID NO: 62054 - DNA, 25 bp, Canis familiaris
cataccttatagttaacccgtctgt

SEQ ID NO: 62055 - DNA, 25 bp, Canis familiaris
cagaacttgtggttacaccttttgc

SEQ ID NO: 62056 - DNA, 25 bp, Canis familiaris
cagaatcgggggagaggcctttcca

SEQ ID NO: 62057 - DNA, 25 bp, Canis familiaris
cagaacgggattgtcaaccgtccgg

SEQ ID NO: 62058 - DNA, 25 bp, Canis familiaris
cagtaagggtgggtaagccagagcc

SEQ ID NO: 62059 - DNA, 25 bp, Canis familiaris
cgcaagaagggggccaagctgacgc

SEQ ID NO: 62060 - DNA, 25 bp, Canis familiaris
cgcaagaagggggccaagctgacgc

SEQ ID NO: 62061 - DNA, 25 bp, Canis familiaris
cagccaaatggggacccaggccatc

SEQ ID NO: 62062 - DNA, 25 bp, Canis familiaris
caccaactcggtgatacagcctctt

SEQ ID NO: 62063 - DNA, 25 bp, Canis familiaris
caccaacacggtggttgaccgtgcc

SEQ ID NO: 62064 - DNA, 25 bp, Canis familiaris
caccacacctggggagtgacccatc

SEQ ID NO: 62065 - DNA, 25 bp, Canis familiaris
caccatccatcgaccaggtggagcc

SEQ ID NO: 62066 - DNA, 25 bp, Canis familiaris
caccatcagcaccccaagctgaaat

SEQ ID NO: 62067 - DNA, 25 bp, Canis familiaris
caccaaacgccgtgctgcatgagat

SEQ ID NO: 62068 - DNA, 25 bp, Canis familiaris
caccatacctcaagtcgtgctgtgt

SEQ ID NO: 62069 - DNA, 25 bp, Canis familiaris
caccaagtctgcaatgttgtgggtt

SEQ ID NO: 62070 - DNA, 25 bp, Canis familiaris
caccagttctcttgggtggcactca

SEQ ID NO: 62071 - DNA, 25 bp, Canis familiaris
caccaggatccatgagctgtgccac

SEQ ID NO: 62072 - DNA, 25 bp, Canis familiaris
cagccagtcagtgcagtgctgtccc

SEQ ID NO: 62073 - DNA, 25 bp, Canis familiaris
cagctgtgttggagctgctgtggcc

SEQ ID NO: 62074 - DNA, 25 bp, Canis familiaris
cagccgcattggtagcagcaggtga

SEQ ID NO: 62075 - DNA, 25 bp, Canis familiaris
cagcatcctctgttagcgctgcaat

SEQ ID NO: 62076 - DNA, 25 bp, Canis familiaris
cagcagctacatttacacatctagc

SEQ ID NO: 62077 - DNA, 25 bp, Canis familiaris
cagccacacatagtacccataggga

SEQ ID NO: 62078 - DNA, 25 bp, Canis familiaris
cagcctgcagctggattacgcaaca

SEQ ID NO: 62079 - DNA, 25 bp, Canis familiaris
cagcctggatcctgcatagcaagca

SEQ ID NO: 62080 - DNA, 25 bp, Canis familiaris
cagcctgtggtccgtgagcaatggc

SEQ ID NO: 62081 - DNA, 25 bp, Canis familiaris
caccagggctgccatttgcagtggc

SEQ ID NO: 62082 - DNA, 25 bp, Canis familiaris
caccatggccagctcggcagtggtg

SEQ ID NO: 62083 - DNA, 25 bp, Canis familiaris
tacgcatgactacattacaacgggc

SEQ ID NO: 62084 - DNA, 25 bp, Canis familiaris
caccaacggctactacaacgtgcgc

SEQ ID NO: 62085 - DNA, 25 bp, Canis familiaris
caccaatagacttgctcaacacggg

SEQ ID NO: 62086 - DNA, 25 bp, Canis familiaris
caccaagatacagatcatcaactgg

SEQ ID NO: 62087 - DNA, 25 bp, Canis familiaris
cagccacaaacccaccatggctggc

SEQ ID NO: 62088 - DNA, 25 bp, Canis familiaris
cagcccagacacagttctgggcccc

SEQ ID NO: 62089 - DNA, 25 bp, Canis familiaris
cagctcaaacagaaggtcatgaccc

SEQ ID NO: 62090 - DNA, 25 bp, Canis familiaris
cagccgacaagatcttctactcgca

SEQ ID NO: 62091 - DNA, 25 bp, Canis familiaris
cagccaggaagtatccgagccggcc

SEQ ID NO: 62092 - DNA, 25 bp, Canis familiaris
caccagcggggcatccgagtgtgag

SEQ ID NO: 62093 - DNA, 25 bp, Canis familiaris
caccactgggagcctcaggagggat

SEQ ID NO: 62094 - DNA, 25 bp, Canis familiaris
caccatcctgaacctggagcgggat

SEQ ID NO: 62095 - DNA, 25 bp, Canis familiaris
caccatcaagcccctggacagaaat

SEQ ID NO: 62096 - DNA, 25 bp, Canis familiaris
caccaccaccctgtgatcaaatatt

SEQ ID NO: 62097 - DNA, 25 bp, Canis familiaris
caccatccccgggctatcatagaga

SEQ ID NO: 62098 - DNA, 25 bp, Canis familiaris
caccatgcacccgtggatacataat

SEQ ID NO: 62099 - DNA, 25 bp, Canis familiaris
caccatcctccagttgaacctgaag

SEQ ID NO: 62100 - DNA, 25 bp, Canis familiaris
caccaccaaccttaagccatgtagc

SEQ ID NO: 62101 - DNA, 25 bp, Canis familiaris
caccactccagcactaagcaagggc

SEQ ID NO: 62102 - DNA, 25 bp, Canis familiaris
caccagccccagcagaacaagaggg

SEQ ID NO: 62103 - DNA, 25 bp, Canis familiaris
caccagagcccgcaacaagggccgg

SEQ ID NO: 62104 - DNA, 25 bp, Canis familiaris
caccaagcacggccaacgaggtgca

SEQ ID NO: 62105 - DNA, 25 bp, Canis familiaris
caccacaagggccgacgaggtgtac

SEQ ID NO: 62106 - DNA, 25 bp, Canis familiaris
caccacaagggttgtccttcttact

SEQ ID NO: 62107 - DNA, 25 bp, Canis familiaris
caccactgtggggtttttctaccat

SEQ ID NO: 62108 - DNA, 25 bp, Canis familiaris
caccaggtgaatgtcgttcttacca

SEQ ID NO: 62109 - DNA, 25 bp, Canis familiaris
cagccaagtttgcacttgtcttccc

SEQ ID NO: 62110 - DNA, 25 bp, Canis familiaris
cagccaggttaatgcatgttctttc

SEQ ID NO: 62111 - DNA, 25 bp, Canis familiaris
cagctagagttccagggtgtctcct

SEQ ID NO: 62112 - DNA, 25 bp, Canis familiaris
cagcagaaaacctgtttctccctct

SEQ ID NO: 62113 - DNA, 25 bp, Canis familiaris
cagcagtaaccctagaattgtctcc

SEQ ID NO: 62114 - DNA, 25 bp, Canis familiaris
cagcccccagcctgaatatgtgaac

SEQ ID NO: 62115 - DNA, 25 bp, Canis familiaris
cagcacccttgcattgtcaattaga

SEQ ID NO: 62116 - DNA, 25 bp, Canis familiaris
cagcacatttatcctttcggtaaaa

SEQ ID NO: 62117 - DNA, 25 bp, Canis familiaris
cagcctttagcggtccttttagaga

SEQ ID NO: 62118 - DNA, 25 bp, Canis familiaris
caccatttcacacccactaggatag

SEQ ID NO: 62119 - DNA, 25 bp, Canis familiaris
caccttccaagtccatcattagtca

SEQ ID NO: 62120 - DNA, 25 bp, Canis familiaris
caccttgtcatgtaccatcaataaa

SEQ ID NO: 62121 - DNA, 25 bp, Canis familiaris
cagccatttttaccacgatagcaga

SEQ ID NO: 62122 - DNA, 25 bp, Canis familiaris
caccatcctgatcttcgctgtggtg

SEQ ID NO: 62123 - DNA, 25 bp, Canis familiaris
caccactcttcaggtagctcatggg

SEQ ID NO: 62124 - DNA, 25 bp, Canis familiaris
cagcctctgccttggtactagggca

SEQ ID NO: 62125 - DNA, 25 bp, Canis familiaris
cagcctcggctactgacttatttga

SEQ ID NO: 62126 - DNA, 25 bp, Canis familiaris
cagcctcagacctgagtttctgttg

SEQ ID NO: 62127 - DNA, 25 bp, Canis familiaris
cagcccataccttcgttcattgaag

SEQ ID NO: 62128 - DNA, 25 bp, Canis familiaris
cagccactacacatcactgtcattt

SEQ ID NO: 62129 - DNA, 25 bp, Canis familiaris
cagccagtaccaagcatcatttatt

SEQ ID NO: 62130 - DNA, 25 bp, Canis familiaris
cagccagtttcagcatgtaaatata

SEQ ID NO: 62131 - DNA, 25 bp, Canis familiaris
caccagtatcctttgcttaatatta

SEQ ID NO: 62132 - DNA, 25 bp, Canis familiaris
caccaactcttacgcttgacgatgt

SEQ ID NO: 62133 - DNA, 25 bp, Canis familiaris
caccaacgctttcaaacgatttttg

SEQ ID NO: 62134 - DNA, 25 bp, Canis familiaris
caccaaccctgtcaagaggacactc

SEQ ID NO: 62135 - DNA, 25 bp, Canis familiaris
cagtcaaggccgagaatgggaagct

SEQ ID NO: 62136 - DNA, 25 bp, Canis familiaris
caccaacatccgagaagaaagagca

SEQ ID NO: 62137 - DNA, 25 bp, Canis familiaris
caccaacaccgggaagcttggcacc

SEQ ID NO: 62138 - DNA, 25 bp, Canis familiaris
cagccaagatccggaaagttgactg

SEQ ID NO: 62139 - DNA, 25 bp, Canis familiaris
cagtcatttccagccaacctgaata

SEQ ID NO: 62140 - DNA, 25 bp, Canis familiaris
cccagttcctgtgcaaccgaagatg

SEQ ID NO: 62141 - DNA, 25 bp, Canis familiaris
caccaggtccgggagaccgtactgg

SEQ ID NO: 62142 - DNA, 25 bp, Canis familiaris
cagcccgttagggagacaagtagat

SEQ ID NO: 62143 - DNA, 25 bp, Canis familiaris
cagcgccgttggagaccttgtagag

SEQ ID NO: 62144 - DNA, 25 bp, Canis familiaris
cagcccagtttgagccgttggacat

SEQ ID NO: 62145 - DNA, 25 bp, Canis familiaris
cagctcgattttcagccgttgggag

SEQ ID NO: 62146 - DNA, 25 bp, Canis familiaris
cagcctgttttgtaggagtctgctc

SEQ ID NO: 62147 - DNA, 25 bp, Canis familiaris
cagcacgttttgggaagggtctgat

SEQ ID NO: 62148 - DNA, 25 bp, Canis familiaris
cagcgcactttctgtaggaccttga

SEQ ID NO: 62149 - DNA, 25 bp, Canis familiaris
cagaatctacactgtcacgtcctga

SEQ ID NO: 62150 - DNA, 25 bp, Canis familiaris
gcaaaacaggctctagcgttcgaac

SEQ ID NO: 62151 - DNA, 25 bp, Canis familiaris
cagcaacacaaggggaatggtcaga

SEQ ID NO: 62152 - DNA, 25 bp, Canis familiaris
cagcccataggcagagcaagtccga

SEQ ID NO: 62153 - DNA, 25 bp, Canis familiaris
cagccactgagccaggctcaaggcc

SEQ ID NO: 62154 - DNA, 25 bp, Canis familiaris
cagccccaaggactgcagggctcgc

SEQ ID NO: 62155 - DNA, 25 bp, Canis familiaris
cagcggcccattacttgggctgctg

SEQ ID NO: 62156 - DNA, 25 bp, Canis familiaris
cagccgtacattgccatcgattggg

SEQ ID NO: 62157 - DNA, 25 bp, Canis familiaris
cagcggtttagagctgccttcaggc

SEQ ID NO: 62158 - DNA, 25 bp, Canis familiaris
cagcacgtttacacaggtgtcagaa

SEQ ID NO: 62159 - DNA, 25 bp, Canis familiaris
cagcacgtcattacctactggtcaa

SEQ ID NO: 62160 - DNA, 25 bp, Canis familiaris
cagccacttaactgacttgagccac

SEQ ID NO: 62161 - DNA, 25 bp, Canis familiaris
cagctactgacagagtatcctgacc

SEQ ID NO: 62162 - DNA, 25 bp, Canis familiaris
cagcttctggaggttctccagccgg

SEQ ID NO: 62163 - DNA, 25 bp, Canis familiaris
caccagtgatgagtttctgctccgc

SEQ ID NO: 62164 - DNA, 25 bp, Canis familiaris
cagctactgcttctgatgctgctcc

SEQ ID NO: 62165 - DNA, 25 bp, Canis familiaris
cagccacgctggcagtgctggatgc

SEQ ID NO: 62166 - DNA, 25 bp, Canis familiaris
cagcctagctggccattctgggaaa

SEQ ID NO: 62167 - DNA, 25 bp, Canis familiaris
cagccatagcgtccactgggaaaaa

SEQ ID NO: 62168 - DNA, 25 bp, Canis familiaris
cagccatcggcaacacttgccaagc

SEQ ID NO: 62169 - DNA, 25 bp, Canis familiaris
cagcctggccagaatttccacatgt

SEQ ID NO: 62170 - DNA, 25 bp, Canis familiaris
caccaggcacagtttgaccaatatc

SEQ ID NO: 62171 - DNA, 25 bp, Canis familiaris
caccaatcgagctactatccattaa

SEQ ID NO: 62172 - DNA, 25 bp, Canis familiaris
cagccaatgtactaccacgcaagaa

SEQ ID NO: 62173 - DNA, 25 bp, Canis familiaris
caccaagtccatagctgcacgaacg

SEQ ID NO: 62174 - DNA, 25 bp, Canis familiaris
caccaagaactgcctgaccaacggc

SEQ ID NO: 62175 - DNA, 25 bp, Canis familiaris
cagactaggaccctaccagattgag

SEQ ID NO: 62176 - DNA, 25 bp, Canis familiaris
cagacactgaacaggcccagttcac

SEQ ID NO: 62177 - DNA, 25 bp, Canis familiaris
cagagatcgaaatgggcacgactat

SEQ ID NO: 62178 - DNA, 25 bp, Canis familiaris
cagcgatcgaagtacaggaccaccg

SEQ ID NO: 62179 - DNA, 25 bp, Canis familiaris
cagctgctcagatcgccagcagagc

SEQ ID NO: 62180 - DNA, 25 bp, Canis familiaris
cagcctgcgaagccacatgcaatga

SEQ ID NO: 62181 - DNA, 25 bp, Canis familiaris
cagcctcaagatcatcagcaatgcc

SEQ ID NO: 62182 - DNA, 25 bp, Canis familiaris
cagcttgacatgcctgatcaaagac

SEQ ID NO: 62183 - DNA, 25 bp, Canis familiaris
cagcatgtttgccatccaaggcctt

SEQ ID NO: 62184 - DNA, 25 bp, Canis familiaris
cagaatatgctgccatcaactccat

SEQ ID NO: 62185 - DNA, 25 bp, Canis familiaris
cagcctatgccctaggctgcacaca

SEQ ID NO: 62186 - DNA, 25 bp, Canis familiaris
cagcgctatcggcggccagaaagtc

SEQ ID NO: 62187 - DNA, 25 bp, Canis familiaris
cagcctgtctgacaggccgtcctgg

SEQ ID NO: 62188 - DNA, 25 bp, Canis familiaris
cagcctttaaaaccagctgctcccc

SEQ ID NO: 62189 - DNA, 25 bp, Canis familiaris
cagcaacttagttaacacctccatc

SEQ ID NO: 62190 - DNA, 25 bp, Canis familiaris
cagcgtctaagtggagacccagttc

SEQ ID NO: 62191 - DNA, 25 bp, Canis familiaris
cagcgtcatcatactgtgctacctc

SEQ ID NO: 62192 - DNA, 25 bp, Canis familiaris
cagctgcctcagagctgtagccact

SEQ ID NO: 62193 - DNA, 25 bp, Canis familiaris
cagcgaatcgtggcatgtacaaggt

SEQ ID NO: 62194 - DNA, 25 bp, Canis familiaris
caccaacttccacacagagcagatg

SEQ ID NO: 62195 - DNA, 25 bp, Canis familiaris
caccagcagcgtgggcaacgacatt

SEQ ID NO: 62196 - DNA, 25 bp, Canis familiaris
caccacggctgggaatcggactaaa

SEQ ID NO: 62197 - DNA, 25 bp, Canis familiaris
cagccagcgtcaaggaagcggccga

SEQ ID NO: 62198 - DNA, 25 bp, Canis familiaris
cagccatctgtaggcgacactgcct

SEQ ID NO: 62199 - DNA, 25 bp, Canis familiaris
caccacttccagcacaatgtatttg

SEQ ID NO: 62200 - DNA, 25 bp, Canis familiaris
cagcccctctatcacatatgatatc

SEQ ID NO: 62201 - DNA, 25 bp, Canis familiaris
cagcccttctttgacatgatacacc

SEQ ID NO: 62202 - DNA, 25 bp, Canis familiaris
cagccacgtggaacctagaagaccc

SEQ ID NO: 62203 - DNA, 25 bp, Canis familiaris
cagccacgtttttctggaggagcac

SEQ ID NO: 62204 - DNA, 25 bp, Canis familiaris
cagcgacttctcctgaggaggttcc

SEQ ID NO: 62205 - DNA, 25 bp, Canis familiaris
caggaattttctgggggttggctct

SEQ ID NO: 62206 - DNA, 25 bp, Canis familiaris
cagaagatttttggtggggatgggg

SEQ ID NO: 62207 - DNA, 25 bp, Canis familiaris
cagcaagcagcttttggtcctggtc

SEQ ID NO: 62208 - DNA, 25 bp, Canis familiaris
cagctaccgaggggacctgtgtgag

SEQ ID NO: 62209 - DNA, 25 bp, Canis familiaris
cagctaccgggacatacgctgcgag

SEQ ID NO: 62210 - DNA, 25 bp, Canis familiaris
cagcgacacggaaacatcctcgcct

SEQ ID NO: 62211 - DNA, 25 bp, Canis familiaris
cagcagacacttggaactccttcac

SEQ ID NO: 62212 - DNA, 25 bp, Canis familiaris
cagcaaacatgagtgcatcctccct

SEQ ID NO: 62213 - DNA, 25 bp, Canis familiaris
cagccatgacatgtgatcagtgcaa

SEQ ID NO: 62214 - DNA, 25 bp, Canis familiaris
caccagatcactcatcaggccatgg

SEQ ID NO: 62215 - DNA, 25 bp, Canis familiaris
caccagacactgaacaggcccagtt

SEQ ID NO: 62216 - DNA, 25 bp, Canis familiaris
caccagagcctgtcaaagccaattt

SEQ ID NO: 62217 - DNA, 25 bp, Canis familiaris
cagctatggccattaggcctattta

SEQ ID NO: 62218 - DNA, 25 bp, Canis familiaris
cagtatcccatattgctaacatctt

SEQ ID NO: 62219 - DNA, 25 bp, Canis familiaris
cagctgtcccatgagccatgtattg

SEQ ID NO: 62220 - DNA, 25 bp, Canis familiaris
cagcgtcaccagggagcatgtgttg

SEQ ID NO: 62221 - DNA, 25 bp, Canis familiaris
cagctgcgaccagggacctaggtat

SEQ ID NO: 62222 - DNA, 25 bp, Canis familiaris
cagctgctggtgtggactatcaagt

SEQ ID NO: 62223 - DNA, 25 bp, Canis familiaris
cagcgctggtttggactcgaacata

SEQ ID NO: 62224 - DNA, 25 bp, Canis familiaris
cagcctattgtgtgactcttgatct

SEQ ID NO: 62225 - DNA, 25 bp, Canis familiaris
caccaagcgtgtcatccagtacttt

SEQ ID NO: 62226 - DNA, 25 bp, Canis familiaris
ctcgaactgagtctcttggacttta

SEQ ID NO: 62227 - DNA, 25 bp, Canis familiaris
catggaaatgagcagtcttactttt

SEQ ID NO: 62228 - DNA, 25 bp, Canis familiaris
cagcttccttgagttttctagtttc

SEQ ID NO: 62229 - DNA, 25 bp, Canis familiaris
cagccacctgaaatttttgaatctt

SEQ ID NO: 62230 - DNA, 25 bp, Canis familiaris
cagccttcgatctttgtaatttcta

SEQ ID NO: 62231 - DNA, 25 bp, Canis familiaris
cagccattggttcttcgatattcta

SEQ ID NO: 62232 - DNA, 25 bp, Canis familiaris
cagctctttgtcctttcggattata

SEQ ID NO: 62233 - DNA, 25 bp, Canis familiaris
cagcctcacttccttttgagatgac

SEQ ID NO: 62234 - DNA, 25 bp, Canis familiaris
cagcgtatatgctctctcttggaga

SEQ ID NO: 62235 - DNA, 25 bp, Canis familiaris
cagcgtgaaggagccacggaggccc

SEQ ID NO: 62236 - DNA, 25 bp, Canis familiaris
cagcctcgaggagcccagagggaga

SEQ ID NO: 62237 - DNA, 25 bp, Canis familiaris
cagccccagcaagagcacaagagga

SEQ ID NO: 62238 - DNA, 25 bp, Canis familiaris
caccaccagcaagacagcggtcgtg

SEQ ID NO: 62239 - DNA, 25 bp, Canis familiaris
caccacacgcacttatcaggaacgc

SEQ ID NO: 62240 - DNA, 25 bp, Canis familiaris
caccagcccaggcacagagacacag

SEQ ID NO: 62241 - DNA, 25 bp, Canis familiaris
cagccacccagtcggcagaaatcac

SEQ ID NO: 62242 - DNA, 25 bp, Canis familiaris
cagccagcccagagacgattgtagg

SEQ ID NO: 62243 - DNA, 25 bp, Canis familiaris
caccagccgcagcgggatctcaggt

SEQ ID NO: 62244 - DNA, 25 bp, Canis familiaris
catcggcttccggggagatccgtag

SEQ ID NO: 62245 - DNA, 25 bp, Canis familiaris
cagcggctacctggagaggatcctg

SEQ ID NO: 62246 - DNA, 25 bp, Canis familiaris
cagcaggctaccggacggcaggtta

SEQ ID NO: 62247 - DNA, 25 bp, Canis familiaris
cagccttagccaggacgaggtgaaa

SEQ ID NO: 62248 - DNA, 25 bp, Canis familiaris
cagcctttgccaatcgtgggtgaaa

SEQ ID NO: 62249 - DNA, 25 bp, Canis familiaris
caccacttgctctgcttggcagagg

SEQ ID NO: 62250 - DNA, 25 bp, Canis familiaris
caccacgctgtcttctaggtgctgg

SEQ ID NO: 62251 - DNA, 25 bp, Canis familiaris
cagccccgtcagaaagcgatcatgg

SEQ ID NO: 62252 - DNA, 25 bp, Canis familiaris
cagccgcagcaaggtaatcggggtg

SEQ ID NO: 62253 - DNA, 25 bp, Canis familiaris
caccactgaaggtcgctcggatggt

SEQ ID NO: 62254 - DNA, 25 bp, Canis familiaris
cagccacttaggggccatggaggtg

SEQ ID NO: 62255 - DNA, 25 bp, Canis familiaris
caccactttggcttttggagcttta

SEQ ID NO: 62256 - DNA, 25 bp, Canis familiaris
caccactttgtgtttatgtatcctt

SEQ ID NO: 62257 - DNA, 25 bp, Canis familiaris
caccacttttaaatcccatcacatt

SEQ ID NO: 62258 - DNA, 25 bp, Canis familiaris
cagcctgcttttttgtacaaacttg

SEQ ID NO: 62259 - DNA, 25 bp, Canis familiaris
cagctttcatttctaagcaaacctg

SEQ ID NO: 62260 - DNA, 25 bp, Canis familiaris
cagtcccttggccaaaaagacctgt

SEQ ID NO: 62261 - DNA, 25 bp, Canis familiaris
cagccccagggccttgaacagggct

SEQ ID NO: 62262 - DNA, 25 bp, Canis familiaris
cagccttctcggggctgaaggggcc

SEQ ID NO: 62263 - DNA, 25 bp, Canis familiaris
cagccatttctaccacgatagcaga

SEQ ID NO: 62264 - DNA, 25 bp, Canis familiaris
cagccagctgtccgacaacaacagc

SEQ ID NO: 62265 - DNA, 25 bp, Canis familiaris
cagccacttcagcagaggctccaag

SEQ ID NO: 62266 - DNA, 25 bp, Canis familiaris
cagccaatatcaggtggatccccgc

SEQ ID NO: 62267 - DNA, 25 bp, Canis familiaris
cagccatgtagtctggatcccagag

SEQ ID NO: 62268 - DNA, 25 bp, Canis familiaris
cagccagatggctgtggtctctgaa

SEQ ID NO: 62269 - DNA, 25 bp, Canis familiaris
cagccacaggcacatttcttgactt

SEQ ID NO: 62270 - DNA, 25 bp, Canis familiaris
cagccaaggcctaactatgctgcca

SEQ ID NO: 62271 - DNA, 25 bp, Canis familiaris
cagccaagtgttctgctgtggccag

SEQ ID NO: 62272 - DNA, 25 bp, Canis familiaris
cagctcttgtgatcttcttggacag

SEQ ID NO: 62273 - DNA, 25 bp, Canis familiaris
cagcctcgagattcgtccgagagca

SEQ ID NO: 62274 - DNA, 25 bp, Canis familiaris
cagctgccttgtttaccgagctgat

SEQ ID NO: 62275 - DNA, 25 bp, Canis familiaris
cagcctgcctgtgtaggcgagctaa

SEQ ID NO: 62276 - DNA, 25 bp, Canis familiaris
cagccagcctctttaaggagatgtg

SEQ ID NO: 62277 - DNA, 25 bp, Canis familiaris
cagccagctcccttaggaatgacag

SEQ ID NO: 62278 - DNA, 25 bp, Canis familiaris
cagcttgccgcaactgggaagaatg

SEQ ID NO: 62279 - DNA, 25 bp, Canis familiaris
cagcagtcacccatgccaaagagta

SEQ ID NO: 62280 - DNA, 25 bp, Canis familiaris
cagagtcccctcttcatgggaaagg

SEQ ID NO: 62281 - DNA, 25 bp, Canis familiaris
cagagtcccctcttcatgggaaagg

SEQ ID NO: 62282 - DNA, 25 bp, Canis familiaris
cagcggccttccttctgttgaaggc

SEQ ID NO: 62283 - DNA, 25 bp, Canis familiaris
cagcttgacttagcatttctagagg

SEQ ID NO: 62284 - DNA, 25 bp, Canis familiaris
cagcacagatgttagacttttaggg

SEQ ID NO: 62285 - DNA, 25 bp, Canis familiaris
cagcaactggtttattttcatgggg

SEQ ID NO: 62286 - DNA, 25 bp, Canis familiaris
cagcaccagtggtggtttaggtagt

SEQ ID NO: 62287 - DNA, 25 bp, Canis familiaris
cagcccaatggctttgtttccatta

SEQ ID NO: 62288 - DNA, 25 bp, Canis familiaris
cagcccataaatatgttttcgtgta

SEQ ID NO: 62289 - DNA, 25 bp, Canis familiaris
cagcccagaatacctgtgtgtgtcg

SEQ ID NO: 62290 - DNA, 25 bp, Canis familiaris
cagcctacagatgactcgtgcttcg

SEQ ID NO: 62291 - DNA, 25 bp, Canis familiaris
cagccacctgcagacttgtctgacg

SEQ ID NO: 62292 - DNA, 25 bp, Canis familiaris
caccacccagaacttgtgtgacctt

SEQ ID NO: 62293 - DNA, 25 bp, Canis familiaris
caccacccagcaagattatgtcgat

SEQ ID NO: 62294 - DNA, 25 bp, Canis familiaris
caccacccgaagagatgaatgaata

SEQ ID NO: 62295 - DNA, 25 bp, Canis familiaris
cagccccagccaaggttgaagcaaa

SEQ ID NO: 62296 - DNA, 25 bp, Canis familiaris
cagcttccaccagggtatcaacgat

SEQ ID NO: 62297 - DNA, 25 bp, Canis familiaris
cagcttcttcaggcggtagctgatt

SEQ ID NO: 62298 - DNA, 25 bp, Canis familiaris
cagccacctgatgcatttactttag

SEQ ID NO: 62299 - DNA, 25 bp, Canis familiaris
cagcccagctgtggttttctgtttg

SEQ ID NO: 62300 - DNA, 25 bp, Canis familiaris
cagcctcgctgtgattgttgttttt

SEQ ID NO: 62301 - DNA, 25 bp, Canis familiaris
cagcttcagcttccaaaataatttc

SEQ ID NO: 62302 - DNA, 25 bp, Canis familiaris
cagcctcgcctgtcaaggaaagtac

SEQ ID NO: 62303 - DNA, 25 bp, Canis familiaris
cagccaagcccaggggacaaggccg

SEQ ID NO: 62304 - DNA, 25 bp, Canis familiaris
cagccacaccaaaggcgagcagggc

SEQ ID NO: 62305 - DNA, 25 bp, Canis familiaris
cagccacccctgaccagagtgggtg

SEQ ID NO: 62306 - DNA, 25 bp, Canis familiaris
cagccccaccgaggaagaggaggag

SEQ ID NO: 62307 - DNA, 25 bp, Canis familiaris
cagccgccaccgtgggaaggtgaag

SEQ ID NO: 62308 - DNA, 25 bp, Canis familiaris
cagccgccctggggaatgaagggat

SEQ ID NO: 62309 - DNA, 25 bp, Canis familiaris
cagccagcagcagggggtgtagcag

SEQ ID NO: 62310 - DNA, 25 bp, Canis familiaris
catccggcatggaggcctatgcagg

SEQ ID NO: 62311 - DNA, 25 bp, Canis familiaris
cagccagtgctgagggcctaattga

SEQ ID NO: 62312 - DNA, 25 bp, Canis familiaris
cagcacgttcatttggcctagtata

SEQ ID NO: 62313 - DNA, 25 bp, Canis familiaris
cagcacggccaattacctgggctgg

SEQ ID NO: 62314 - DNA, 25 bp, Canis familiaris
cagccagagccaggaatcctcttgc

SEQ ID NO: 62315 - DNA, 25 bp, Canis familiaris
cagccagagccgcagatgacaaggc

SEQ ID NO: 62316 - DNA, 25 bp, Canis familiaris
cagcgagagcttccaggagcacacg

SEQ ID NO: 62317 - DNA, 25 bp, Canis familiaris
cagcgacagctttcaggcaacgcgc

SEQ ID NO: 62318 - DNA, 25 bp, Canis familiaris
cagctcacctttgtgctgaagctgc

SEQ ID NO: 62319 - DNA, 25 bp, Canis familiaris
cagctattctgttttgtgatctcgc

SEQ ID NO: 62320 - DNA, 25 bp, Canis familiaris
cagcttgctgcactttttatatgcc

SEQ ID NO: 62321 - DNA, 25 bp, Canis familiaris
cagcgtggatttttcagcaagccct

SEQ ID NO: 62322 - DNA, 25 bp, Canis familiaris
cagcgttatatttccacaagttcca

SEQ ID NO: 62323 - DNA, 25 bp, Canis familiaris
cgcacagtttttcacacatttcccg

SEQ ID NO: 62324 - DNA, 25 bp, Canis familiaris
cagccatgctttcggaataatcttc

SEQ ID NO: 62325 - DNA, 25 bp, Canis familiaris
cagctcgtgggggtcagaacttcga

SEQ ID NO: 62326 - DNA, 25 bp, Canis familiaris
cagccggaggaacagtgacccacat

SEQ ID NO: 62327 - DNA, 25 bp, Canis familiaris
cagccggaagaactatgaccctcag

SEQ ID NO: 62328 - DNA, 25 bp, Canis familiaris
cagcctgaaagactaggaccctcag

SEQ ID NO: 62329 - DNA, 25 bp, Canis familiaris
cagccagggagcacagggctctttc

SEQ ID NO: 62330 - DNA, 25 bp, Canis familiaris
cagcaagggacaacaaagctcagtg

SEQ ID NO: 62331 - DNA, 25 bp, Canis familiaris
cagcgggaacaggccacagctggga

SEQ ID NO: 62332 - DNA, 25 bp, Canis familiaris
cagcgtcaagaacttcatcctggcg

SEQ ID NO: 62333 - DNA, 25 bp, Canis familiaris
cagcgtcagcagaaatccttcctgt

SEQ ID NO: 62334 - DNA, 25 bp, Canis familiaris
cagccatgtacgtagccatccaggc

SEQ ID NO: 62335 - DNA, 25 bp, Canis familiaris
cagccatgtatgtggccatccaggc

SEQ ID NO: 62336 - DNA, 25 bp, Canis familiaris
cagctcattctggagaggaacaggc

SEQ ID NO: 62337 - DNA, 25 bp, Canis familiaris
cagctccctgccagtgacagggctt

SEQ ID NO: 62338 - DNA, 25 bp, Canis familiaris
cagccgctctggggtacaggatgac

SEQ ID NO: 62339 - DNA, 25 bp, Canis familiaris
cagatcgcctggagaacgccaatcg

SEQ ID NO: 62340 - DNA, 25 bp, Canis familiaris
cagaagtctggcaggacgccaaccc

SEQ ID NO: 62341 - DNA, 25 bp, Canis familiaris
cagcaagctcccagagacgacttct

SEQ ID NO: 62342 - DNA, 25 bp, Canis familiaris
cagctcgttccatagcagtgactcc

SEQ ID NO: 62343 - DNA, 25 bp, Canis familiaris
cagcccaactgctaccagtaacact

SEQ ID NO: 62344 - DNA, 25 bp, Canis familiaris
caccacaatctctctcataaataca

SEQ ID NO: 62345 - DNA, 25 bp, Canis familiaris
cagccaaccatctttcaaaataaga

SEQ ID NO: 62346 - DNA, 25 bp, Canis familiaris
cagctgcgtccctttgcataaataa

SEQ ID NO: 62347 - DNA, 25 bp, Canis familiaris
cagctgcttcaccaaccatagaatg

SEQ ID NO: 62348 - DNA, 25 bp, Canis familiaris
cagcgtttgcagtcaccaaggatga

SEQ ID NO: 62349 - DNA, 25 bp, Canis familiaris
cagccattggctgcaccaagtgcca

SEQ ID NO: 62350 - DNA, 25 bp, Canis familiaris
cagctcgagattgcccaaggacaaa

SEQ ID NO: 62351 - DNA, 25 bp, Canis familiaris
cagcaccttccccactaggaagatc

SEQ ID NO: 62352 - DNA, 25 bp, Canis familiaris
cagccctcacaggtgacacggaatg

SEQ ID NO: 62353 - DNA, 25 bp, Canis familiaris
cagccagtgaaggtgccagcgtagc

SEQ ID NO: 62354 - DNA, 25 bp, Canis familiaris
cagatcagtagggggcaggtttaaa

SEQ ID NO: 62355 - DNA, 25 bp, Canis familiaris
cagaaggatcagtggaagttttaag

SEQ ID NO: 62356 - DNA, 25 bp, Canis familiaris
cagcaaggactgtggagactcgttt

SEQ ID NO: 62357 - DNA, 25 bp, Canis familiaris
cagcaaggtcgtgccaacgtgggga

SEQ ID NO: 62358 - DNA, 25 bp, Canis familiaris
cagccaggtcctggccaatggtctg

SEQ ID NO: 62359 - DNA, 25 bp, Canis familiaris
cagccagtgcccgaggccaggaagg

SEQ ID NO: 62360 - DNA, 25 bp, Canis familiaris
cagccagtgcccaggtagctggagg

SEQ ID NO: 62361 - DNA, 25 bp, Canis familiaris
caccaacaccacgggagatgcgagg

SEQ ID NO: 62362 - DNA, 25 bp, Canis familiaris
caccaagtgcaccctggaaggcacc

SEQ ID NO: 62363 - DNA, 25 bp, Canis familiaris
cagcattagtgcattgggaaggaac

SEQ ID NO: 62364 - DNA, 25 bp, Canis familiaris
cagcagcacgttttgggaagggtct

SEQ ID NO: 62365 - DNA, 25 bp, Canis familiaris
cagccacagcctctgaggcgacggt

SEQ ID NO: 62366 - DNA, 25 bp, Canis familiaris
caccaaccatgggagtgcctcagaa

SEQ ID NO: 62367 - DNA, 25 bp, Canis familiaris
cagccccgcagggatgggccaaagc

SEQ ID NO: 62368 - DNA, 25 bp, Canis familiaris
cagccccagcgaggattggctgccc

SEQ ID NO: 62369 - DNA, 25 bp, Canis familiaris
cagcataccagcagcagtttggccc

SEQ ID NO: 62370 - DNA, 25 bp, Canis familiaris
cagccagtcagcacgtttgtgccag

SEQ ID NO: 62371 - DNA, 25 bp, Canis familiaris
cagacaaactacttcttgagcatag

SEQ ID NO: 62372 - DNA, 25 bp, Canis familiaris
cagactatattactgtgctgataaa

SEQ ID NO: 62373 - DNA, 25 bp, Canis familiaris
cagtccagaccgttgctgctaaaaa

SEQ ID NO: 62374 - DNA, 25 bp, Canis familiaris
cagctccaacgtcatcctgaagaat

SEQ ID NO: 62375 - DNA, 25 bp, Canis familiaris
cagcgccagaggccaatccgaataa

SEQ ID NO: 62376 - DNA, 25 bp, Canis familiaris
cagcctcagggctaactgctggacc

SEQ ID NO: 62377 - DNA, 25 bp, Canis familiaris
cagcctagggttctgctgggtgctg

SEQ ID NO: 62378 - DNA, 25 bp, Canis familiaris
cagccaagcgttaccttagtgtggt

SEQ ID NO: 62379 - DNA, 25 bp, Canis familiaris
cagcggggttccttgtcagagctgg

SEQ ID NO: 62380 - DNA, 25 bp, Canis familiaris
cagcagtgggtgtccagtccaggac

SEQ ID NO: 62381 - DNA, 25 bp, Canis familiaris
cagctggaagtgttcactgccctgg

SEQ ID NO: 62382 - DNA, 25 bp, Canis familiaris
cagcacgttgccctcggagatgggc

SEQ ID NO: 62383 - DNA, 25 bp, Canis familiaris
cagcacgttgccctcggagatgggc

SEQ ID NO: 62384 - DNA, 25 bp, Canis familiaris
cagcggcatttggtcgggcagccgc

SEQ ID NO: 62385 - DNA, 25 bp, Canis familiaris
cagcctgctgtacttcgaaggccag

SEQ ID NO: 62386 - DNA, 25 bp, Canis familiaris
cagcacttgctattctggagaatgc

SEQ ID NO: 62387 - DNA, 25 bp, Canis familiaris
cagcatgtttaccatctggacagct

SEQ ID NO: 62388 - DNA, 25 bp, Canis familiaris
cagcgctgattaagttggcacacag

SEQ ID NO: 62389 - DNA, 25 bp, Canis familiaris
cagcgatcaatcggttgactgcaag

SEQ ID NO: 62390 - DNA, 25 bp, Canis familiaris
cagcgaccagtcgctggctggggtt

SEQ ID NO: 62391 - DNA, 25 bp, Canis familiaris
cagcgcaacagcagcctgcagctgg

SEQ ID NO: 62392 - DNA, 25 bp, Canis familiaris
cagcgatggcagttcctgacagaga

SEQ ID NO: 62393 - DNA, 25 bp, Canis familiaris
cagctgctttgattccatgccaagc

SEQ ID NO: 62394 - DNA, 25 bp, Canis familiaris
cagctgccattgcccagtgtagaat

SEQ ID NO: 62395 - DNA, 25 bp, Canis familiaris
cagcgtctccgggtgtagaatcaga

SEQ ID NO: 62396 - DNA, 25 bp, Canis familiaris
cagccacccgagattgagcaataac

SEQ ID NO: 62397 - DNA, 25 bp, Canis familiaris
cagccacccgagattgagcaataac

SEQ ID NO: 62398 - DNA, 25 bp, Canis familiaris
cagccccgcggcagcggaagaacag

SEQ ID NO: 62399 - DNA, 25 bp, Canis familiaris
cagcctgccaggcccaggaggaaat

SEQ ID NO: 62400 - DNA, 25 bp, Canis familiaris
cagctgccccgaggaggaggagcaa

SEQ ID NO: 62401 - DNA, 25 bp, Canis familiaris
cagcaccgaccagagcgaggacaag

SEQ ID NO: 62402 - DNA, 25 bp, Canis familiaris
cagcggcgaccgcagcggtggaagc

SEQ ID NO: 62403 - DNA, 25 bp, Canis familiaris
cagcctgtgaccgggaggggacagg

SEQ ID NO: 62404 - DNA, 25 bp, Canis familiaris
cagctctgtgcccttgtgggaatga

SEQ ID NO: 62405 - DNA, 25 bp, Canis familiaris
cagccttgccctttgagagtattgc

SEQ ID NO: 62406 - DNA, 25 bp, Canis familiaris
cagccttcctcgtggacatatatta

SEQ ID NO: 62407 - DNA, 25 bp, Canis familiaris
cagccttgtctctttgaatccatat

SEQ ID NO: 62408 - DNA, 25 bp, Canis familiaris
cagcctctggatattgacgccactg

SEQ ID NO: 62409 - DNA, 25 bp, Canis familiaris
cagcctggctgaattatccccaagt

SEQ ID NO: 62410 - DNA, 25 bp, Canis familiaris
cagacggagtatatcccagggtcca

SEQ ID NO: 62411 - DNA, 25 bp, Canis familiaris
cagcttgggtatagtcagggtgttt

SEQ ID NO: 62412 - DNA, 25 bp, Canis familiaris
cagctggagcagtggtagggggcct

SEQ ID NO: 62413 - DNA, 25 bp, Canis familiaris
cagcggtgcaaatccatgtggggcc

SEQ ID NO: 62414 - DNA, 25 bp, Canis familiaris
cagcgcggaaatttgtgtttggaca

SEQ ID NO: 62415 - DNA, 25 bp, Canis familiaris
cagccgcttcagaatggttttgcag

SEQ ID NO: 62416 - DNA, 25 bp, Canis familiaris
cagccagatgtccaacgtttacacc

SEQ ID NO: 62417 - DNA, 25 bp, Canis familiaris
cagccagatatgcaggcgtacccac

SEQ ID NO: 62418 - DNA, 25 bp, Canis familiaris
cagctggagagcagggtgcaccgac

SEQ ID NO: 62419 - DNA, 25 bp, Canis familiaris
cagcggaaccgagaaactgcaccca

SEQ ID NO: 62420 - DNA, 25 bp, Canis familiaris
cagagggacaaagagaatctcaagc

SEQ ID NO: 62421 - DNA, 25 bp, Canis familiaris
cagacggctgaaggggtgactagaa

SEQ ID NO: 62422 - DNA, 25 bp, Canis familiaris
cagtcggggaggcgtagctcaggac

SEQ ID NO: 62423 - DNA, 25 bp, Canis familiaris
cagcgcggagtccggggactcggag

SEQ ID NO: 62424 - DNA, 25 bp, Canis familiaris
cagcggggcatccgagtgtgagtcc

SEQ ID NO: 62425 - DNA, 25 bp, Canis familiaris
cagctggtcagcatggggtattcaa

SEQ ID NO: 62426 - DNA, 25 bp, Canis familiaris
cagctgtccagtgttggtgattcca

SEQ ID NO: 62427 - DNA, 25 bp, Canis familiaris
cagcgtgacggacttggtgttctag

SEQ ID NO: 62428 - DNA, 25 bp, Canis familiaris
cagcgtcctgtgctttgtttcacag

SEQ ID NO: 62429 - DNA, 25 bp, Canis familiaris
cagctcccagtggctttgtttatag

SEQ ID NO: 62430 - DNA, 25 bp, Canis familiaris
cagccactatgtttatttttgatca

SEQ ID NO: 62431 - DNA, 25 bp, Canis familiaris
cagctcctagtccttacttcagagc

SEQ ID NO: 62432 - DNA, 25 bp, Canis familiaris
cagctgcagctctggttaattcaag

SEQ ID NO: 62433 - DNA, 25 bp, Canis familiaris
cagcctgtcaacattcaatatgaag

SEQ ID NO: 62434 - DNA, 25 bp, Canis familiaris
cagcctgtcacagagtgctctctga

SEQ ID NO: 62435 - DNA, 25 bp, Canis familiaris
cagccttcatcttgggtttgatggt

SEQ ID NO: 62436 - DNA, 25 bp, Canis familiaris
cagcccgctttgcagtttgggctct

SEQ ID NO: 62437 - DNA, 25 bp, Canis familiaris
cagataccgtcgtagttccgaccat

SEQ ID NO: 62438 - DNA, 25 bp, Canis familiaris
cagaactcgtttgtgtccaatggcc

SEQ ID NO: 62439 - DNA, 25 bp, Canis familiaris
cagaaatcgatttcccccagtggaa

SEQ ID NO: 62440 - DNA, 25 bp, Canis familiaris
cagaagacgacgacccaaagtacac

SEQ ID NO: 62441 - DNA, 25 bp, Canis familiaris
cagccagaccaactaccagaactag

SEQ ID NO: 62442 - DNA, 25 bp, Canis familiaris
cagccattctactcctagatacata

SEQ ID NO: 62443 - DNA, 25 bp, Canis familiaris
cagccatttgacaccctttatgatg

SEQ ID NO: 62444 - DNA, 25 bp, Canis familiaris
catcctaatcacatgtcctttagtt

SEQ ID NO: 62445 - DNA, 25 bp, Canis familiaris
cagctctaataacttgcccactggt

SEQ ID NO: 62446 - DNA, 25 bp, Canis familiaris
cagcctcaaagacactgcatcagtg

SEQ ID NO: 62447 - DNA, 25 bp, Canis familiaris
cagcccagatgtccaacaacagatg

SEQ ID NO: 62448 - DNA, 25 bp, Canis familiaris
cagcctcaacccaatcaatcattgc

SEQ ID NO: 62449 - DNA, 25 bp, Canis familiaris
cagcgctcaccccaataaaagcaat

SEQ ID NO: 62450 - DNA, 25 bp, Canis familiaris
cagctgccagccgtcatataaaact

SEQ ID NO: 62451 - DNA, 25 bp, Canis familiaris
cagctgcccctttatagtatgacga

SEQ ID NO: 62452 - DNA, 25 bp, Canis familiaris
cagctgactcctaaactgatgaagg

SEQ ID NO: 62453 - DNA, 25 bp, Canis familiaris
cagctactcctacagtcaggcagga

SEQ ID NO: 62454 - DNA, 25 bp, Canis familiaris
cagctaccaccgagctcagagtaga

SEQ ID NO: 62455 - DNA, 25 bp, Canis familiaris
cagcacccactcataacagagctca

SEQ ID NO: 62456 - DNA, 25 bp, Canis familiaris
cagccgcacactatgagcaacatgc

SEQ ID NO: 62457 - DNA, 25 bp, Canis familiaris
cagcgccatgaagatggagactgtg

SEQ ID NO: 62458 - DNA, 25 bp, Canis familiaris
cagctgcctgaagaagcacaagtcc

SEQ ID NO: 62459 - DNA, 25 bp, Canis familiaris
cagcgcctcagattacaacagcagt

SEQ ID NO: 62460 - DNA, 25 bp, Canis familiaris
cagccctcagaaacacacaattcgg

SEQ ID NO: 62461 - DNA, 25 bp, Canis familiaris
cagtcagatcataattggcacaatt

SEQ ID NO: 62462 - DNA, 25 bp, Canis familiaris
cagccagtttattgctgcaactcag

SEQ ID NO: 62463 - DNA, 25 bp, Canis familiaris
cagaatgtattatgctcaacgaaat

SEQ ID NO: 62464 - DNA, 25 bp, Canis familiaris
cagcacttatgtgaccgacctcaat

SEQ ID NO: 62465 - DNA, 25 bp, Canis familiaris
cagcttcttgatcaaggcacctcac

SEQ ID NO: 62466 - DNA, 25 bp, Canis familiaris
cagctggtgctggtaagagcctcca

SEQ ID NO: 62467 - DNA, 25 bp, Canis familiaris
cagctatgaccacttaggcctatat

SEQ ID NO: 62468 - DNA, 25 bp, Canis familiaris
cagcttgcgcgacaatgtgcgtctt

SEQ ID NO: 62469 - DNA, 25 bp, Canis familiaris
cagcccagcatgagagagatgcgtt

SEQ ID NO: 62470 - DNA, 25 bp, Canis familiaris
cagcgccagctggagatcatgggca

SEQ ID NO: 62471 - DNA, 25 bp, Canis familiaris
cagcagcaggctgtgacagcagtgc

SEQ ID NO: 62472 - DNA, 25 bp, Canis familiaris
cagccatgctggcctgtgcacaagc

SEQ ID NO: 62473 - DNA, 25 bp, Canis familiaris
cagcctgctggagtccacagatctg

SEQ ID NO: 62474 - DNA, 25 bp, Canis familiaris
cagccatttggggcacatgcatctc

SEQ ID NO: 62475 - DNA, 25 bp, Canis familiaris
cagcctttgcagacagctatgctcc

SEQ ID NO: 62476 - DNA, 25 bp, Canis familiaris
cagcacgttcataatcttcaagcca

SEQ ID NO: 62477 - DNA, 25 bp, Canis familiaris
cagcctttgacttcttcacatgaaa

SEQ ID NO: 62478 - DNA, 25 bp, Canis familiaris
cagcacctgtgagtgctcctagcag

SEQ ID NO: 62479 - DNA, 25 bp, Canis familiaris
cagcagcctgcagctggattacgca

SEQ ID NO: 62480 - DNA, 25 bp, Canis familiaris
cagcgctctgcggctggaggaggac

SEQ ID NO: 62481 - DNA, 25 bp, Canis familiaris
cagcctctgctggtacacgaagatg

SEQ ID NO: 62482 - DNA, 25 bp, Canis familiaris
cagcccgtgctaacatgaaatgcat

SEQ ID NO: 62483 - DNA, 25 bp, Canis familiaris
cagcctccgtatatagcatcagaac

SEQ ID NO: 62484 - DNA, 25 bp, Canis familiaris
cagcctggccaacatggtgaaaccc

SEQ ID NO: 62485 - DNA, 25 bp, Canis familiaris
cagcctgggcgacagagcgagactc

SEQ ID NO: 62486 - DNA, 25 bp, Canis familiaris
caggcggtggactttggagaaccct

SEQ ID NO: 62487 - DNA, 25 bp, Canis familiaris
cagccggagtatctgggacaaccag

SEQ ID NO: 62488 - DNA, 25 bp, Canis familiaris
cagctggtggttctgaggccaagca

SEQ ID NO: 62489 - DNA, 25 bp, Canis familiaris
cagcgagtggttctggtggcactgg

SEQ ID NO: 62490 - DNA, 25 bp, Canis familiaris
cagctaaggactctgttctgcactg

SEQ ID NO: 62491 - DNA, 25 bp, Canis familiaris
cagccaggcgactaatcttgtcctc

SEQ ID NO: 62492 - DNA, 25 bp, Canis familiaris
cagccgcggtaattccagctccaat

SEQ ID NO: 62493 - DNA, 25 bp, Canis familiaris
cagcacgcattaacaatccctgcct

SEQ ID NO: 62494 - DNA, 25 bp, Canis familiaris
cagcagcaggtatcctctgcactgt

SEQ ID NO: 62495 - DNA, 25 bp, Canis familiaris
cagcttgagttattcccactgatgc

SEQ ID NO: 62496 - DNA, 25 bp, Canis familiaris
cagcttgggtgacctggcagctgcc

SEQ ID NO: 62497 - DNA, 25 bp, Canis familiaris
cagcagtcggttggagcgagcatcc

SEQ ID NO: 62498 - DNA, 25 bp, Canis familiaris
cagctgtggagccgctgacgatgtc

SEQ ID NO: 62499 - DNA, 25 bp, Canis familiaris
cagctgttgagccgatcactgtctg

SEQ ID NO: 62500 - DNA, 25 bp, Canis familiaris
cagccatatgagtgagccatgcttg

SEQ ID NO: 62501 - DNA, 25 bp, Canis familiaris
cagccattacatcacacatcttata

SEQ ID NO: 62502 - DNA, 25 bp, Canis familiaris
cagccctagatccaatcgcttgaat

SEQ ID NO: 62503 - DNA, 25 bp, Canis familiaris
cagccctgtttgcactgttggcatt

SEQ ID NO: 62504 - DNA, 25 bp, Canis familiaris
cagccttgttttccagagttcattt

SEQ ID NO: 62505 - DNA, 25 bp, Canis familiaris
cagctcctttgatccatcagtgttt

SEQ ID NO: 62506 - DNA, 25 bp, Canis familiaris
cagctccctctgtaagctgagctcc

SEQ ID NO: 62507 - DNA, 25 bp, Canis familiaris
cagctccctgctcaacagggaccct

SEQ ID NO: 62508 - DNA, 25 bp, Canis familiaris
cagcgggctcgcgcaaaggagccgc

SEQ ID NO: 62509 - DNA, 25 bp, Canis familiaris
cagcctggctcggcaagtagatggc

SEQ ID NO: 62510 - DNA, 25 bp, Canis familiaris
cagccggcgtggaatctgactgggg

SEQ ID NO: 62511 - DNA, 25 bp, Canis familiaris
cagccctcgaggatcgacatgtcac

SEQ ID NO: 62512 - DNA, 25 bp, Canis familiaris
cagccccgaggagttaggtacatca

SEQ ID NO: 62513 - DNA, 25 bp, Canis familiaris
cagtccccaggggacagttgccacc

SEQ ID NO: 62514 - DNA, 25 bp, Canis familiaris
caggacaccaaagacaactgcccac

SEQ ID NO: 62515 - DNA, 25 bp, Canis familiaris
caggacccaaagcttgagtccccag

SEQ ID NO: 62516 - DNA, 25 bp, Canis familiaris
cagccccgaagaggtggacctctcc

SEQ ID NO: 62517 - DNA, 25 bp, Canis familiaris
cagccgacggaaggacgtcgtcgcc

SEQ ID NO: 62518 - DNA, 25 bp, Canis familiaris
cagacggttccagaagccgtcctcc

SEQ ID NO: 62519 - DNA, 25 bp, Canis familiaris
cagacagaggttcctaaccgttcat

SEQ ID NO: 62520 - DNA, 25 bp, Canis familiaris
cagaaggtgttgctaggggcccaga

SEQ ID NO: 62521 - DNA, 25 bp, Canis familiaris
cagcacaggatgagcacggggtccc

SEQ ID NO: 62522 - DNA, 25 bp, Canis familiaris
cagccgcagcactccacggagtgcc

SEQ ID NO: 62523 - DNA, 25 bp, Canis familiaris
cagcccaactgtccatcaagaggtg

SEQ ID NO: 62524 - DNA, 25 bp, Canis familiaris
cagcgaaccgctggcatcaaggtgg

SEQ ID NO: 62525 - DNA, 25 bp, Canis familiaris
cagctggcccgtggcaagtgggggc

SEQ ID NO: 62526 - DNA, 25 bp, Canis familiaris
cagcatgatgctggcctgcgaagtg

SEQ ID NO: 62527 - DNA, 25 bp, Canis familiaris
cagctctgcatctgtctatctgctg

SEQ ID NO: 62528 - DNA, 25 bp, Canis familiaris
cagctgctcttaagcaagctgcggt

SEQ ID NO: 62529 - DNA, 25 bp, Canis familiaris
cagctgctttgctggcaggggcatg

SEQ ID NO: 62530 - DNA, 25 bp, Canis familiaris
cagctgctatctctgaggaggacgc

SEQ ID NO: 62531 - DNA, 25 bp, Canis familiaris
cagctggcagctctggctcagagag

SEQ ID NO: 62532 - DNA, 25 bp, Canis familiaris
cagctggccatcttggggcagagtg

SEQ ID NO: 62533 - DNA, 25 bp, Canis familiaris
cagctcctgccctgggcagcagatg

SEQ ID NO: 62534 - DNA, 25 bp, Canis familiaris
cagccctgtgcggaggggcaatttg

SEQ ID NO: 62535 - DNA, 25 bp, Canis familiaris
cagctcctgaggcaggggcggttgg

SEQ ID NO: 62536 - DNA, 25 bp, Canis familiaris
cagctgcagggatggggtgggtaga

SEQ ID NO: 62537 - DNA, 25 bp, Canis familiaris
cagctcagggcatgatcccagggtc

SEQ ID NO: 62538 - DNA, 25 bp, Canis familiaris
cagctcagggcatgatcccagggtc

SEQ ID NO: 62539 - DNA, 25 bp, Canis familiaris
cagcctgaggcataccagatccggc

SEQ ID NO: 62540 - DNA, 25 bp, Canis familiaris
cagcggtgtgggttctgatcccagg

SEQ ID NO: 62541 - DNA, 25 bp, Canis familiaris
cagcgggtggagcagtttgccaggg

SEQ ID NO: 62542 - DNA, 25 bp, Canis familiaris
cagccggtggagagaatgtgccccc

SEQ ID NO: 62543 - DNA, 25 bp, Canis familiaris
cagccggcgagcagtggattcagct

SEQ ID NO: 62544 - DNA, 25 bp, Canis familiaris
cagccgaggagcgggtgctgctgac

SEQ ID NO: 62545 - DNA, 25 bp, Canis familiaris
cagctgcagggggctgcaggcctgg

SEQ ID NO: 62546 - DNA, 25 bp, Canis familiaris
cagcgctgctggaggcaggcttcag

SEQ ID NO: 62547 - DNA, 25 bp, Canis familiaris
cagccgcttgacaatgcagatcttc

SEQ ID NO: 62548 - DNA, 25 bp, Canis familiaris
cagaacttgcacaatcatacgatta

SEQ ID NO: 62549 - DNA, 25 bp, Canis familiaris
cagcatatgctccagaatctacagt

SEQ ID NO: 62550 - DNA, 25 bp, Canis familiaris
cagctgagccagaatacatacactc

SEQ ID NO: 62551 - DNA, 25 bp, Canis familiaris
cagcaggcgcgcaaattacccactc

SEQ ID NO: 62552 - DNA, 25 bp, Canis familiaris
cagcagagagccaagtttctccttc

SEQ ID NO: 62553 - DNA, 25 bp, Canis familiaris
cagctattgcactagtcattttctt

SEQ ID NO: 62554 - DNA, 25 bp, Canis familiaris
cagctgcttacatgttcatctcttg

SEQ ID NO: 62555 - DNA, 25 bp, Canis familiaris
cagctgtcaaattgtctgattctag

SEQ ID NO: 62556 - DNA, 25 bp, Canis familiaris
cagcctgcaaagatctatcctcagt

SEQ ID NO: 62557 - DNA, 25 bp, Canis familiaris
cagcaagcagaactcactactctag

SEQ ID NO: 62558 - DNA, 25 bp, Canis familiaris
cagcaagccttattcatcgtctagc

SEQ ID NO: 62559 - DNA, 25 bp, Canis familiaris
cagaaactggcagtcaagttcagca

SEQ ID NO: 62560 - DNA, 25 bp, Canis familiaris
cagctttcaggctcaactctacagc

SEQ ID NO: 62561 - DNA, 25 bp, Canis familiaris
cagctttagtctagcaagtctcccc

SEQ ID NO: 62562 - DNA, 25 bp, Canis familiaris
cagctcaaggctgtgaagtcctccc

SEQ ID NO: 62563 - DNA, 25 bp, Canis familiaris
cagctcacggtggagaagacccccg

SEQ ID NO: 62564 - DNA, 25 bp, Canis familiaris
cagcgcacgttggagtaaacatcaa

SEQ ID NO: 62565 - DNA, 25 bp, Canis familiaris
cagctgctagttctgtcaaaaacat

SEQ ID NO: 62566 - DNA, 25 bp, Canis familiaris
cagctctctgggcgtgtgaagaaca

SEQ ID NO: 62567 - DNA, 25 bp, Canis familiaris
cagcctgtctggagctggacctagc

SEQ ID NO: 62568 - DNA, 25 bp, Canis familiaris
cagcccttgcgatcatggaaaatgc

SEQ ID NO: 62569 - DNA, 25 bp, Canis familiaris
cagccctgtgagagctcgagacaac

SEQ ID NO: 62570 - DNA, 25 bp, Canis familiaris
cagcttttaggggcatggcacacac

SEQ ID NO: 62571 - DNA, 25 bp, Canis familiaris
cagctaatttcaggccattgcccac

SEQ ID NO: 62572 - DNA, 25 bp, Canis familiaris
cagcaacatttgggccagctaaaca

SEQ ID NO: 62573 - DNA, 25 bp, Canis familiaris
cagcagcaccctgggcggaaaatga

SEQ ID NO: 62574 - DNA, 25 bp, Canis familiaris
cagatgctgccgtgggcgacaacat

SEQ ID NO: 62575 - DNA, 25 bp, Canis familiaris
cagctgcataactggatcgacaaca

SEQ ID NO: 62576 - DNA, 25 bp, Canis familiaris
cagcgcagacactgccttgtacagc

SEQ ID NO: 62577 - DNA, 25 bp, Canis familiaris
cagccgacccggctgtgagatggca

SEQ ID NO: 62578 - DNA, 25 bp, Canis familiaris
cagcaagaccctctgtgtggggggc

SEQ ID NO: 62579 - DNA, 25 bp, Canis familiaris
cagctgcaaccagcagtggcgggag

SEQ ID NO: 62580 - DNA, 25 bp, Canis familiaris
cagcccacagcacctgtgctgggga

SEQ ID NO: 62581 - DNA, 25 bp, Canis familiaris
cagccccaggcactgaggagggtgc

SEQ ID NO: 62582 - DNA, 25 bp, Canis familiaris
cagccccagccacacaggggctgct

SEQ ID NO: 62583 - DNA, 25 bp, Canis familiaris
cagctgcccaaacacggggatcgaa

SEQ ID NO: 62584 - DNA, 25 bp, Canis familiaris
cagtgcccaagagacgggtgggcta

SEQ ID NO: 62585 - DNA, 25 bp, Canis familiaris
cagctgctctaagcaacttcgggtg

SEQ ID NO: 62586 - DNA, 25 bp, Canis familiaris
cagctgcctgaaggagcacgtctcg

SEQ ID NO: 62587 - DNA, 25 bp, Canis familiaris
cagcgattgcaactggcctggccgc

SEQ ID NO: 62588 - DNA, 25 bp, Canis familiaris
cagcgatgtgtgtctggagggccgc

SEQ ID NO: 62589 - DNA, 25 bp, Canis familiaris
cagctgtggtgctgcaaactgcctg

SEQ ID NO: 62590 - DNA, 25 bp, Canis familiaris
cagcctggcttggaacctgccagaa

SEQ ID NO: 62591 - DNA, 25 bp, Canis familiaris
cagccccttagaccctgcgaagggg

SEQ ID NO: 62592 - DNA, 25 bp, Canis familiaris
cagcacccttataccacttgatggt

SEQ ID NO: 62593 - DNA, 25 bp, Canis familiaris
cagccctcttagacacactgggcga

SEQ ID NO: 62594 - DNA, 25 bp, Canis familiaris
cagccgctctctgaaacttgggaag

SEQ ID NO: 62595 - DNA, 25 bp, Canis familiaris
cagccgcctcgggttgatttaaaga

SEQ ID NO: 62596 - DNA, 25 bp, Canis familiaris
cagctctcactggaggttatttaaa

SEQ ID NO: 62597 - DNA, 25 bp, Canis familiaris
cagcttcatctgcagttctatgtga

SEQ ID NO: 62598 - DNA, 25 bp, Canis familiaris
cagctgtacccatttgcatgtgtgc

SEQ ID NO: 62599 - DNA, 25 bp, Canis familiaris
cagctgcagacgccgataggtgtgc

SEQ ID NO: 62600 - DNA, 25 bp, Canis familiaris
cagctgcagacccaggagcatgtga

SEQ ID NO: 62601 - DNA, 25 bp, Canis familiaris
cagctggagctggcagaagtcaacc

SEQ ID NO: 62602 - DNA, 25 bp, Canis familiaris
cagcgaggtgaagatgtccaccgag

SEQ ID NO: 62603 - DNA, 25 bp, Canis familiaris
cagcgaggaaagaagcaccagtcaa

SEQ ID NO: 62604 - DNA, 25 bp, Canis familiaris
ctcaaggtagtctatgcccttaaca

SEQ ID NO: 62605 - DNA, 25 bp, Canis familiaris
cagcaagtgaagtctactccttgag

SEQ ID NO: 62606 - DNA, 25 bp, Canis familiaris
cagcaagagcaactttttctgtcaa

SEQ ID NO: 62607 - DNA, 25 bp, Canis familiaris
cagagggccattctgtttaaacgtt

SEQ ID NO: 62608 - DNA, 25 bp, Canis familiaris
cagaaggccctcaagttactaacta

SEQ ID NO: 62609 - DNA, 25 bp, Canis familiaris
cagaagtccctgcatgtgtacatag

SEQ ID NO: 62610 - DNA, 25 bp, Canis familiaris
cagcaagccctgaccatggtggtca

SEQ ID NO: 62611 - DNA, 25 bp, Canis familiaris
cagcccttgctatctgttgctgtga

SEQ ID NO: 62612 - DNA, 25 bp, Canis familiaris
cagcacgctttttgtttgggaagaa

SEQ ID NO: 62613 - DNA, 25 bp, Canis familiaris
cagatgcgatttccgttttaacaga

SEQ ID NO: 62614 - DNA, 25 bp, Canis familiaris
cagaagatacccgtgaatttaagaa

SEQ ID NO: 62615 - DNA, 25 bp, Canis familiaris
cagttatcgacggtagagtccaaga

SEQ ID NO: 62616 - DNA, 25 bp, Canis familiaris
cagtcctcaaaggtggaacggagaa

SEQ ID NO: 62617 - DNA, 25 bp, Canis familiaris
cagccccgagcagggagaaggcaag

SEQ ID NO: 62618 - DNA, 25 bp, Canis familiaris
cagccgcctctcaggaggtgagaac

SEQ ID NO: 62619 - DNA, 25 bp, Canis familiaris
cagcccccacttcgaggggatgagc

SEQ ID NO: 62620 - DNA, 25 bp, Canis familiaris
cagcgcatccggaacgagcgggaga

SEQ ID NO: 62621 - DNA, 25 bp, Canis familiaris
cagcgcgcctggaacagggagggat

SEQ ID NO: 62622 - DNA, 25 bp, Canis familiaris
cagccccgcctgacaggatgagcgg

SEQ ID NO: 62623 - DNA, 25 bp, Canis familiaris
cagccccctcattggtgtgagctgg

SEQ ID NO: 62624 - DNA, 25 bp, Canis familiaris
cagccgctcctgaggtgtgagaggg

SEQ ID NO: 62625 - DNA, 25 bp, Canis familiaris
cagctcctggctctggttggaagag

SEQ ID NO: 62626 - DNA, 25 bp, Canis familiaris
cagctgcttgggcgagtgggtcagg

SEQ ID NO: 62627 - DNA, 25 bp, Canis familiaris
cagcgatgggtggctgtgtggggat

SEQ ID NO: 62628 - DNA, 25 bp, Canis familiaris
cagcgacagtgtctcatgtgcagga

SEQ ID NO: 62629 - DNA, 25 bp, Canis familiaris
cagcgtctgttgcagtggcaggcat

SEQ ID NO: 62630 - DNA, 25 bp, Canis familiaris
cagcgatggcttccagatggggctg

SEQ ID NO: 62631 - DNA, 25 bp, Canis familiaris
cagctggccttgaactgggcttggc

SEQ ID NO: 62632 - DNA, 25 bp, Canis familiaris
cagccccttgcaactagaggctctc

SEQ ID NO: 62633 - DNA, 25 bp, Canis familiaris
cagcccctggttggagggctactcc

SEQ ID NO: 62634 - DNA, 25 bp, Canis familiaris
cagaggttgtgtttagggtattcca

SEQ ID NO: 62635 - DNA, 25 bp, Canis familiaris
cagactttattacatgggttgtcca

SEQ ID NO: 62636 - DNA, 25 bp, Canis familiaris
cagcatttcaatcagtagggtttct

SEQ ID NO: 62637 - DNA, 25 bp, Canis familiaris
cagacttcaataaaacgtgcttttc

SEQ ID NO: 62638 - DNA, 25 bp, Canis familiaris
cagagccacctccaaaagctgttga

SEQ ID NO: 62639 - DNA, 25 bp, Canis familiaris
cagagccaccattacgaagccagac

SEQ ID NO: 62640 - DNA, 25 bp, Canis familiaris
cagaccaggatgcacgaaggagaga

SEQ ID NO: 62641 - DNA, 25 bp, Canis familiaris
cagccctggtggccatgagaggaag

SEQ ID NO: 62642 - DNA, 25 bp, Canis familiaris
cagccctggtgcatctaggtgttgt

SEQ ID NO: 62643 - DNA, 25 bp, Canis familiaris
cagcaatctgggttctgggtcttgg

SEQ ID NO: 62644 - DNA, 25 bp, Canis familiaris
cagcaatctgggtactcccaatggg

SEQ ID NO: 62645 - DNA, 25 bp, Canis familiaris
cagcatacggagaaggccccaaggc

SEQ ID NO: 62646 - DNA, 25 bp, Canis familiaris
cagctccgtgagagagagtgcacac

SEQ ID NO: 62647 - DNA, 25 bp, Canis familiaris
cagcttcgtgggcaagcgcagaggc

SEQ ID NO: 62648 - DNA, 25 bp, Canis familiaris
cagctgtgggccagacactggggct

SEQ ID NO: 62649 - DNA, 25 bp, Canis familiaris
cagcaatgtgggagccgggaggcat

SEQ ID NO: 62650 - DNA, 25 bp, Canis familiaris
cagcccatggagacgacgggcgcca

SEQ ID NO: 62651 - DNA, 25 bp, Canis familiaris
cagccctgtggaatgggggccctct

SEQ ID NO: 62652 - DNA, 25 bp, Canis familiaris
cagcggtgggataggcgcaggtctc

SEQ ID NO: 62653 - DNA, 25 bp, Canis familiaris
cagcgagtgcggtgatctcaggttc

SEQ ID NO: 62654 - DNA, 25 bp, Canis familiaris
cagcgagtcaagtgtgcgaggaacg

SEQ ID NO: 62655 - DNA, 25 bp, Canis familiaris
cagcgggcaagccatgtggggccct

SEQ ID NO: 62656 - DNA, 25 bp, Canis familiaris
cagcgtgagccagatctcggtgctc

SEQ ID NO: 62657 - DNA, 25 bp, Canis familiaris
cagcgacagcgaaagccgagtccga

SEQ ID NO: 62658 - DNA, 25 bp, Canis familiaris
cagctgtgacagaggccttgtccgg

SEQ ID NO: 62659 - DNA, 25 bp, Canis familiaris
cagctgtgaaagctgctcctgtccc

SEQ ID NO: 62660 - DNA, 25 bp, Canis familiaris
cagcgtcaagcgctgtgaagtcctc

SEQ ID NO: 62661 - DNA, 25 bp, Canis familiaris
cagcagcttttgctatgaactcccc

SEQ ID NO: 62662 - DNA, 25 bp, Canis familiaris
cagagttgacatctggaaccctgct

SEQ ID NO: 62663 - DNA, 25 bp, Canis familiaris
cagcgtggaggccgagaacgcctac

SEQ ID NO: 62664 - DNA, 25 bp, Canis familiaris
cagcggtaactaagacccactactc

SEQ ID NO: 62665 - DNA, 25 bp, Canis familiaris
cagggtcaggtcaccctgacggtgc

SEQ ID NO: 62666 - DNA, 25 bp, Canis familiaris
caggggatgtccccacctaatgagg

SEQ ID NO: 62667 - DNA, 25 bp, Canis familiaris
cagctgggaaccaccatctacaagg

SEQ ID NO: 62668 - DNA, 25 bp, Canis familiaris
cagctgggagggtgcgctccagcaa

SEQ ID NO: 62669 - DNA, 25 bp, Canis familiaris
cagctggtggtggagaccatccgca

SEQ ID NO: 62670 - DNA, 25 bp, Canis familiaris
cagcacagggtgggtccacactgca

SEQ ID NO: 62671 - DNA, 25 bp, Canis familiaris
catccggctgttagttttgtcactt

SEQ ID NO: 62672 - DNA, 25 bp, Canis familiaris
cagcgggctggttttgagtgtccct

SEQ ID NO: 62673 - DNA, 25 bp, Canis familiaris
cagcagtgaaggatttgacccccct

SEQ ID NO: 62674 - DNA, 25 bp, Canis familiaris
cagcagaatctggttttgtccccac

SEQ ID NO: 62675 - DNA, 25 bp, Canis familiaris
cagagaactcttctggaacccttac

SEQ ID NO: 62676 - DNA, 25 bp, Canis familiaris
cagaaggctttctggagcttccgta

SEQ ID NO: 62677 - DNA, 25 bp, Canis familiaris
cagagatggtttccaggacttagga

SEQ ID NO: 62678 - DNA, 25 bp, Canis familiaris
cagaagacttgtctgtccctggagt

SEQ ID NO: 62679 - DNA, 25 bp, Canis familiaris
cagactccttagctatcctttgagt

SEQ ID NO: 62680 - DNA, 25 bp, Canis familiaris
cagagccctgtattgtgaactttga

SEQ ID NO: 62681 - DNA, 25 bp, Canis familiaris
cagcagctcctgcaggtgaatctgg

SEQ ID NO: 62682 - DNA, 25 bp, Canis familiaris
cagcagccggcgtggaatctgactg

SEQ ID NO: 62683 - DNA, 25 bp, Canis familiaris
cagcccaagagatcgataatgaccc

SEQ ID NO: 62684 - DNA, 25 bp, Canis familiaris
cagcccaaggattcccagagactcg

SEQ ID NO: 62685 - DNA, 25 bp, Canis familiaris
cagcacgaaaaaccagcagagcacc

SEQ ID NO: 62686 - DNA, 25 bp, Canis familiaris
cagaatgaattaagtgcagcaacac

SEQ ID NO: 62687 - DNA, 25 bp, Canis familiaris
cagaatggttacgatagcactcagc

SEQ ID NO: 62688 - DNA, 25 bp, Canis familiaris
cagcaagccctggagctagaccagc

SEQ ID NO: 62689 - DNA, 25 bp, Canis familiaris
cagcaaactctggtaatacccgggt

SEQ ID NO: 62690 - DNA, 25 bp, Canis familiaris
cagaaatggtggggaacccgagtgg

SEQ ID NO: 62691 - DNA, 25 bp, Canis familiaris
cagaaaagcaggcgtggaccggtcg

SEQ ID NO: 62692 - DNA, 25 bp, Canis familiaris
cagaaaagtggggagccacccccat

SEQ ID NO: 62693 - DNA, 25 bp, Canis familiaris
cagaaaggggggttctgcacacacc

SEQ ID NO: 62694 - DNA, 25 bp, Canis familiaris
cagaattgtcggagaaagttcaccc

SEQ ID NO: 62695 - DNA, 25 bp, Canis familiaris
cagaaggccaggtagaaaaccatcc

SEQ ID NO: 62696 - DNA, 25 bp, Canis familiaris
cagaaggccaggttgagaaccctgc

SEQ ID NO: 62697 - DNA, 25 bp, Canis familiaris
cagacgttctgagtatggacccctc

SEQ ID NO: 62698 - DNA, 25 bp, Canis familiaris
cagactgacctagttcgagggcatc

SEQ ID NO: 62699 - DNA, 25 bp, Canis familiaris
cagcactaccgcgcggaggtgatag

SEQ ID NO: 62700 - DNA, 25 bp, Canis familiaris
cagcatcacccctgggagtgttttg

SEQ ID NO: 62701 - DNA, 25 bp, Canis familiaris
cagcaaccttgctatctgggatgtt

SEQ ID NO: 62702 - DNA, 25 bp, Canis familiaris
cagacagcacttcatccgggatgtc

SEQ ID NO: 62703 - DNA, 25 bp, Canis familiaris
cagaagatgcttcggactgggaccc

SEQ ID NO: 62704 - DNA, 25 bp, Canis familiaris
cagacgtgttctgacagttccctga

SEQ ID NO: 62705 - DNA, 25 bp, Canis familiaris
cagactgtctgactgccaatgttcc

SEQ ID NO: 62706 - DNA, 25 bp, Canis familiaris
cagagctgctgcgaggactacgtgg

SEQ ID NO: 62707 - DNA, 25 bp, Canis familiaris
cagatgttcggttctacgatgggtc

SEQ ID NO: 62708 - DNA, 25 bp, Canis familiaris
cagacatacggtatacagagtggag

SEQ ID NO: 62709 - DNA, 25 bp, Canis familiaris
cagcaccctgagcattccgagggaa

SEQ ID NO: 62710 - DNA, 25 bp, Canis familiaris
cagcacccagctcaacgggttgaag

SEQ ID NO: 62711 - DNA, 25 bp, Canis familiaris
cagcactcgactcaaccttgaaaac

SEQ ID NO: 62712 - DNA, 25 bp, Canis familiaris
cagacttgtgtggccacgttggaaa

SEQ ID NO: 62713 - DNA, 25 bp, Canis familiaris
cagcgcctgagggctcaagtgtgga

SEQ ID NO: 62714 - DNA, 25 bp, Canis familiaris
cagcgcgtggacgtcaaggtggtga

SEQ ID NO: 62715 - DNA, 25 bp, Canis familiaris
cagctggttaatgataggtggaaaa

SEQ ID NO: 62716 - DNA, 25 bp, Canis familiaris
cagctggattacgcaacagtaaatc

SEQ ID NO: 62717 - DNA, 25 bp, Canis familiaris
cagcgagttcactacacaggaaaat

SEQ ID NO: 62718 - DNA, 25 bp, Canis familiaris
cagcggtgtcacagcacaagttctg

SEQ ID NO: 62719 - DNA, 25 bp, Canis familiaris
cagcgggagcagcagcagcaagatg

SEQ ID NO: 62720 - DNA, 25 bp, Canis familiaris
cagcggatggcacagctgcagctgc

SEQ ID NO: 62721 - DNA, 25 bp, Canis familiaris
cagcgggatcacagtgagctcccat

SEQ ID NO: 62722 - DNA, 25 bp, Canis familiaris
cagcgagaaggcagtcatccaccat

SEQ ID NO: 62723 - DNA, 25 bp, Canis familiaris
cagcatggtacgagtgctgccagcc

SEQ ID NO: 62724 - DNA, 25 bp, Canis familiaris
cagctggtactgacagctcccattc

SEQ ID NO: 62725 - DNA, 25 bp, Canis familiaris
cagctggtgccggatgtcaacatgg

SEQ ID NO: 62726 - DNA, 25 bp, Canis familiaris
cagctcacgccaggtaacacggggc

SEQ ID NO: 62727 - DNA, 25 bp, Canis familiaris
cagctccggctggaagtccgggtcg

SEQ ID NO: 62728 - DNA, 25 bp, Canis familiaris
cagcatcccccaaagattcaagtgt

SEQ ID NO: 62729 - DNA, 25 bp, Canis familiaris
cagaacagctccaggttctacgtgg

SEQ ID NO: 62730 - DNA, 25 bp, Canis familiaris
cagaacatcccctgcttaactgggt

SEQ ID NO: 62731 - DNA, 25 bp, Canis familiaris
cagcaacaccccatacatgaacagg

SEQ ID NO: 62732 - DNA, 25 bp, Canis familiaris
cagaccgacccaaactacaggagtt

SEQ ID NO: 62733 - DNA, 25 bp, Canis familiaris
cagagccccccttacacataggggt

SEQ ID NO: 62734 - DNA, 25 bp, Canis familiaris
cagaccgcggcctaataatgagtga

SEQ ID NO: 62735 - DNA, 25 bp, Canis familiaris
cagcaaccccactgacgatgatgtg

SEQ ID NO: 62736 - DNA, 25 bp, Canis familiaris
cagaactcagtagcacacggtagtg

SEQ ID NO: 62737 - DNA, 25 bp, Canis familiaris
cagtagatagtagacacgatacaga

SEQ ID NO: 62738 - DNA, 25 bp, Canis familiaris
cagcaacaagctttacaggcccagc

SEQ ID NO: 62739 - DNA, 25 bp, Canis familiaris
cagctcacacagactttcggattca

SEQ ID NO: 62740 - DNA, 25 bp, Canis familiaris
cagctcacctgagtcgatcttgttc

SEQ ID NO: 62741 - DNA, 25 bp, Canis familiaris
cagacaccggcgggcttttacttag

SEQ ID NO: 62742 - DNA, 25 bp, Canis familiaris
cagacccagcacgaggctgtatgaa

SEQ ID NO: 62743 - DNA, 25 bp, Canis familiaris
cagacgacagtcgagctggagagac

SEQ ID NO: 62744 - DNA, 25 bp, Canis familiaris
cagcacccagtctaggtgaggccca

SEQ ID NO: 62745 - DNA, 25 bp, Canis familiaris
cagcttcaaggctggtgaagtcctc

SEQ ID NO: 62746 - DNA, 25 bp, Canis familiaris
cagctgccctggcgggaagtttcag

SEQ ID NO: 62747 - DNA, 25 bp, Canis familiaris
cagcttcctggaaagttacttctcg

SEQ ID NO: 62748 - DNA, 25 bp, Canis familiaris
cagttcctgaggcagcctagtcggc

SEQ ID NO: 62749 - DNA, 25 bp, Canis familiaris
cagtctaaaggaacctgtgtcggaa

SEQ ID NO: 62750 - DNA, 25 bp, Canis familiaris
cagctctttaggtctccttggagga

SEQ ID NO: 62751 - DNA, 25 bp, Canis familiaris
cagcatttccggtttctgtgggagg

SEQ ID NO: 62752 - DNA, 25 bp, Canis familiaris
cagcattattctttccacagtggta

SEQ ID NO: 62753 - DNA, 25 bp, Canis familiaris
cagcttctcttctctacagatacat

SEQ ID NO: 62754 - DNA, 25 bp, Canis familiaris
cagcttctcggcttcatcgaaaatg

SEQ ID NO: 62755 - DNA, 25 bp, Canis familiaris
cagctacctgccttcactgaaatat

SEQ ID NO: 62756 - DNA, 25 bp, Canis familiaris
cagctacctcacttcatttgggtct

SEQ ID NO: 62757 - DNA, 25 bp, Canis familiaris
cagcttcttcgccaaaggggatcat

SEQ ID NO: 62758 - DNA, 25 bp, Canis familiaris
cagcgtctgccgctaacggagagcc

SEQ ID NO: 62759 - DNA, 25 bp, Canis familiaris
cagctttgccgaataccgttgacca

SEQ ID NO: 62760 - DNA, 25 bp, Canis familiaris
cagctctgtgcccatgaactttaag

SEQ ID NO: 62761 - DNA, 25 bp, Canis familiaris
cagacgtcccagaacttcataactt

SEQ ID NO: 62762 - DNA, 25 bp, Canis familiaris
cataagtctgcctggcgtcattacc

SEQ ID NO: 62763 - DNA, 25 bp, Canis familiaris
cagaagtcatccggtggtgcttcca

SEQ ID NO: 62764 - DNA, 25 bp, Canis familiaris
cagacagttacgcagctatttcaca

SEQ ID NO: 62765 - DNA, 25 bp, Canis familiaris
cagcacagtgatcccttgttttaca

SEQ ID NO: 62766 - DNA, 25 bp, Canis familiaris
cagctacgtgtactggtatcttagg

SEQ ID NO: 62767 - DNA, 25 bp, Canis familiaris
cagctacagccatttggtttatagg

SEQ ID NO: 62768 - DNA, 25 bp, Canis familiaris
cagctaagccatttctacttcactg

SEQ ID NO: 62769 - DNA, 25 bp, Canis familiaris
cagctaaggctgtgaactatcttgg

SEQ ID NO: 62770 - DNA, 25 bp, Canis familiaris
cagcaaaatccgcaaccttctgggg

SEQ ID NO: 62771 - DNA, 25 bp, Canis familiaris
cagaacaaccggtacgctggtgcgc

SEQ ID NO: 62772 - DNA, 25 bp, Canis familiaris
cagaagaaccgccgggtggtgctgg

SEQ ID NO: 62773 - DNA, 25 bp, Canis familiaris
cagaacaaccggcgtctgtttgagc

SEQ ID NO: 62774 - DNA, 25 bp, Canis familiaris
cagaaataccaccttgcctttaatg

SEQ ID NO: 62775 - DNA, 25 bp, Canis familiaris
cagtagaaccacagtccgttttcgc

SEQ ID NO: 62776 - DNA, 25 bp, Canis familiaris
cagaagggccagagtccctctttta

SEQ ID NO: 62777 - DNA, 25 bp, Canis familiaris
cagaaggggggcttccatgcttcta

SEQ ID NO: 62778 - DNA, 25 bp, Canis familiaris
cagaacaatggggccgccagctgga

SEQ ID NO: 62779 - DNA, 25 bp, Canis familiaris
cagaagcttgacgcaccaagcggaa

SEQ ID NO: 62780 - DNA, 25 bp, Canis familiaris
cagaagcttggcgaaccagtcgggc

SEQ ID NO: 62781 - DNA, 25 bp, Canis familiaris
cagaagtatttctccagcatggccg

SEQ ID NO: 62782 - DNA, 25 bp, Canis familiaris
cagcagcagctaattttcacgcgcc

SEQ ID NO: 62783 - DNA, 25 bp, Canis familiaris
cagacagtagctcttagccttgcct

SEQ ID NO: 62784 - DNA, 25 bp, Canis familiaris
cagaaatggttgacaaccttcctac

SEQ ID NO: 62785 - DNA, 25 bp, Canis familiaris
cagaatactttggcagcctcactcc

SEQ ID NO: 62786 - DNA, 25 bp, Canis familiaris
cagctaaagtgggtgcctcccacct

SEQ ID NO: 62787 - DNA, 25 bp, Canis familiaris
cagctaatagtgggtgcctccccac

SEQ ID NO: 62788 - DNA, 25 bp, Canis familiaris
cagctggaagatgggcgcaccctgt

SEQ ID NO: 62789 - DNA, 25 bp, Canis familiaris
cagcgtgagaatttcgtccgctccc

SEQ ID NO: 62790 - DNA, 25 bp, Canis familiaris
cagcagtgaacttgtcagccaatta

SEQ ID NO: 62791 - DNA, 25 bp, Canis familiaris
cagcaggagcagctgtcaggcactg

SEQ ID NO: 62792 - DNA, 25 bp, Canis familiaris
cagacagaatgccatcctggcctgt

SEQ ID NO: 62793 - DNA, 25 bp, Canis familiaris
cagagagtctgattcctagctgctg

SEQ ID NO: 62794 - DNA, 25 bp, Canis familiaris
cagaagctctgcttcttgacttccc

SEQ ID NO: 62795 - DNA, 25 bp, Canis familiaris
cagaagtatctcaactctctatccc

SEQ ID NO: 62796 - DNA, 25 bp, Canis familiaris
cagctttgagaatctcctcatccgc

SEQ ID NO: 62797 - DNA, 25 bp, Canis familiaris
cagctttggagtttgcgctttgcaa

SEQ ID NO: 62798 - DNA, 25 bp, Canis familiaris
cagcatttggggatgctcttccttc

SEQ ID NO: 62799 - DNA, 25 bp, Canis familiaris
cagacttggcttgtgaattcttgac

SEQ ID NO: 62800 - DNA, 25 bp, Canis familiaris
cagttctggtgtttgacctttacct

SEQ ID NO: 62801 - DNA, 25 bp, Canis familiaris
cagaaagggtcttgagcccataccc

SEQ ID NO: 62802 - DNA, 25 bp, Canis familiaris
cagaaagggtcttgagcccataccc

SEQ ID NO: 62803 - DNA, 25 bp, Canis familiaris
cagaaagggtcttgagcccataccc

SEQ ID NO: 62804 - DNA, 25 bp, Canis familiaris
cagaaagggtcttgagcccataccc

SEQ ID NO: 62805 - DNA, 25 bp, Canis familiaris
cagaaagggtcttgagcccataccc

SEQ ID NO: 62806 - DNA, 25 bp, Canis familiaris
cagaaagggtcttgagcccataccc

SEQ ID NO: 62807 - DNA, 25 bp, Canis familiaris
cagaaagggtcttgagcccataccc

SEQ ID NO: 62808 - DNA, 25 bp, Canis familiaris
cagaaagggtcttgagcccataccc

SEQ ID NO: 62809 - DNA, 25 bp, Canis familiaris
cagaaagggtcttgagcccataccc

SEQ ID NO: 62810 - DNA, 25 bp, Canis familiaris
cagaaagggtcttgagcccataccc

SEQ ID NO: 62811 - DNA, 25 bp, Canis familiaris
cagaaagggccgtagatcttcccga

SEQ ID NO: 62812 - DNA, 25 bp, Canis familiaris
cagagaaggaaggaagtccaacgga

SEQ ID NO: 62813 - DNA, 25 bp, Canis familiaris
cagacagacaaaggccactccagac

SEQ ID NO: 62814 - DNA, 25 bp, Canis familiaris
cagactgaaccaactctacctgtaa

SEQ ID NO: 62815 - DNA, 25 bp, Canis familiaris
cagcatctgatcaaaagcattacct

SEQ ID NO: 62816 - DNA, 25 bp, Canis familiaris
cagcttgcatctgaagacatcagcc

SEQ ID NO: 62817 - DNA, 25 bp, Canis familiaris
cagctttgctggtttatctcctgta

SEQ ID NO: 62818 - DNA, 25 bp, Canis familiaris
cagctttgtgtacggatcctcatga

SEQ ID NO: 62819 - DNA, 25 bp, Canis familiaris
cagcttcatcgggagttcctcagag

SEQ ID NO: 62820 - DNA, 25 bp, Canis familiaris
cagcttcatgaggaggttctcaaca

SEQ ID NO: 62821 - DNA, 25 bp, Canis familiaris
cagctctgctgagtagtgtgctccc

SEQ ID NO: 62822 - DNA, 25 bp, Canis familiaris
cagctttcagctgtgagtctcactc

SEQ ID NO: 62823 - DNA, 25 bp, Canis familiaris
cagcttctgtcatttatgttcctcc

SEQ ID NO: 62824 - DNA, 25 bp, Canis familiaris
cagcttctgtaaccagttaccccac

SEQ ID NO: 62825 - DNA, 25 bp, Canis familiaris
cagcatcctgtttcacgtctgatgg

SEQ ID NO: 62826 - DNA, 25 bp, Canis familiaris
cagcatcctgtacagtatctgtgct

SEQ ID NO: 62827 - DNA, 25 bp, Canis familiaris
cagcaagctggggctgtcacttctg

SEQ ID NO: 62828 - DNA, 25 bp, Canis familiaris
cagaatatctatccatggctttcat

SEQ ID NO: 62829 - DNA, 25 bp, Canis familiaris
cagcaattttcattagattgtcaga

SEQ ID NO: 62830 - DNA, 25 bp, Canis familiaris
cagagttgtctttatatgtgaatta

SEQ ID NO: 62831 - DNA, 25 bp, Canis familiaris
cagacacgattataatgcgagcatt

SEQ ID NO: 62832 - DNA, 25 bp, Canis familiaris
cagaacgtccagtcaactcagctgc

SEQ ID NO: 62833 - DNA, 25 bp, Canis familiaris
cagaatccccttgagatcagtgctc

SEQ ID NO: 62834 - DNA, 25 bp, Canis familiaris
cagaaccccactgaagcagagctcc

SEQ ID NO: 62835 - DNA, 25 bp, Canis familiaris
cagaagcctcttttaatctatccct

SEQ ID NO: 62836 - DNA, 25 bp, Canis familiaris
cagaatcccgatttctatctcggcc

SEQ ID NO: 62837 - DNA, 25 bp, Canis familiaris
cagaatagcgtttcctttgggaccg

SEQ ID NO: 62838 - DNA, 25 bp, Canis familiaris
cagaaagttgtaactgttgggccag

SEQ ID NO: 62839 - DNA, 25 bp, Canis familiaris
cagaaagctgttttggttgtttaga

SEQ ID NO: 62840 - DNA, 25 bp, Canis familiaris
cagaagtgtctttagggtggttatc

SEQ ID NO: 62841 - DNA, 25 bp, Canis familiaris
cagaaggtttgtggtgggactactc

SEQ ID NO: 62842 - DNA, 25 bp, Canis familiaris
caggacggtagtgtgcagtttatta

SEQ ID NO: 62843 - DNA, 25 bp, Canis familiaris
cagaaccggaggatgaagtggaaga

SEQ ID NO: 62844 - DNA, 25 bp, Canis familiaris
cgataacgaacgagactctggcatg

SEQ ID NO: 62845 - DNA, 25 bp, Canis familiaris
cagaagaagaccgacagcacctaca

SEQ ID NO: 62846 - DNA, 25 bp, Canis familiaris
cagaagaaacctgatcccttgccag

SEQ ID NO: 62847 - DNA, 25 bp, Canis familiaris
cagaataaaactctccagggcggag

SEQ ID NO: 62848 - DNA, 25 bp, Canis familiaris
cagaagaagagaggccccaggggga

SEQ ID NO: 62849 - DNA, 25 bp, Canis familiaris
tatctaataaaatcggcacccagcc

SEQ ID NO: 62850 - DNA, 25 bp, Canis familiaris
cagaaagacgaaaagccatcagtgc

SEQ ID NO: 62851 - DNA, 25 bp, Canis familiaris
cagcaaatacagaagggccggtgaa

SEQ ID NO: 62852 - DNA, 25 bp, Canis familiaris
cagaattcggaagaccttgtaacgg

SEQ ID NO: 62853 - DNA, 25 bp, Canis familiaris
cagaatcactgggagaacttttaaa

SEQ ID NO: 62854 - DNA, 25 bp, Canis familiaris
cagcagcaccttcacagttgtttaa

SEQ ID NO: 62855 - DNA, 25 bp, Canis familiaris
caggcccataggaccttttctagag

SEQ ID NO: 62856 - DNA, 25 bp, Canis familiaris
cagactccttccaacattttttatg

SEQ ID NO: 62857 - DNA, 25 bp, Canis familiaris
cagagctcgaatcctcatctttaat

SEQ ID NO: 62858 - DNA, 25 bp, Canis familiaris
cagagcgtccattcagcattttaat

SEQ ID NO: 62859 - DNA, 25 bp, Canis familiaris
cagtttccctgctaggttaattcta

SEQ ID NO: 62860 - DNA, 25 bp, Canis familiaris
cagctttccgtgttttgtacttgta

SEQ ID NO: 62861 - DNA, 25 bp, Canis familiaris
cagctttaaggatttattccctttg

SEQ ID NO: 62862 - DNA, 25 bp, Canis familiaris
tcgttaccagagatttaccccttgg

SEQ ID NO: 62863 - DNA, 25 bp, Canis familiaris
cagtctactatggttttatcctgca

SEQ ID NO: 62864 - DNA, 25 bp, Canis familiaris
cagctttctctcatctttgaatctc

SEQ ID NO: 62865 - DNA, 25 bp, Canis familiaris
cagctcctctgcacttattcaagtg

SEQ ID NO: 62866 - DNA, 25 bp, Canis familiaris
cagtgccttcaagctgctacaactt

SEQ ID NO: 62867 - DNA, 25 bp, Canis familiaris
cagctgcgttacgggcttgttttgg

SEQ ID NO: 62868 - DNA, 25 bp, Canis familiaris
cagtctgcttaggggtggggttggg

SEQ ID NO: 62869 - DNA, 25 bp, Canis familiaris
cagcttcagctctggtggtgtggtg

SEQ ID NO: 62870 - DNA, 25 bp, Canis familiaris
cagcattactcattcctgggacagg

SEQ ID NO: 62871 - DNA, 25 bp, Canis familiaris
cagctgctgccaaacctgagggctg

SEQ ID NO: 62872 - DNA, 25 bp, Canis familiaris
cagcatggccaggagcgccatggcc

SEQ ID NO: 62873 - DNA, 25 bp, Canis familiaris
cagctgcccaggaaggcagcacggg

SEQ ID NO: 62874 - DNA, 25 bp, Canis familiaris
cagctgccgcggaaccgcgggacgg

SEQ ID NO: 62875 - DNA, 25 bp, Canis familiaris
cagctgccacgcaaagcacgctgaa

SEQ ID NO: 62876 - DNA, 25 bp, Canis familiaris
cagcatggcacacacacaactgcag

SEQ ID NO: 62877 - DNA, 25 bp, Canis familiaris
cagctgcccaacagcaggctgagaa

SEQ ID NO: 62878 - DNA, 25 bp, Canis familiaris
cagcatgaccaacttgaggctcaga

SEQ ID NO: 62879 - DNA, 25 bp, Canis familiaris
cagcatgatgccgaggtggacgcca

SEQ ID NO: 62880 - DNA, 25 bp, Canis familiaris
cagatggccgggggggaccaggcca

SEQ ID NO: 62881 - DNA, 25 bp, Canis familiaris
catagtgcaccgggaggtgacccct

SEQ ID NO: 62882 - DNA, 25 bp, Canis familiaris
cagaggcacccactgatggagactc

SEQ ID NO: 62883 - DNA, 25 bp, Canis familiaris
cagaccttgccatttggaaacaaac

SEQ ID NO: 62884 - DNA, 25 bp, Canis familiaris
cagaccttgccatttggaaacaaac

SEQ ID NO: 62885 - DNA, 25 bp, Canis familiaris
cagaccttgccatttggaaacaaac

SEQ ID NO: 62886 - DNA, 25 bp, Canis familiaris
cagacacctcagcttggtctcaaaa

SEQ ID NO: 62887 - DNA, 25 bp, Canis familiaris
cagaagccttcagtgtggcctcaag

SEQ ID NO: 62888 - DNA, 25 bp, Canis familiaris
cagagccctccaggaggcgctaacc

SEQ ID NO: 62889 - DNA, 25 bp, Canis familiaris
cagaacgcgcaaggacggctgaggc

SEQ ID NO: 62890 - DNA, 25 bp, Canis familiaris
cagagccacagaaggaccgtgaggc

SEQ ID NO: 62891 - DNA, 25 bp, Canis familiaris
cagctaccagatgggcccagaagat

SEQ ID NO: 62892 - DNA, 25 bp, Canis familiaris
cagctcaacagctgttctcaacagc

SEQ ID NO: 62893 - DNA, 25 bp, Canis familiaris
cagcagcaacagcaaattcaccaat

SEQ ID NO: 62894 - DNA, 25 bp, Canis familiaris
cagcagaccagggcaagcaaccaac

SEQ ID NO: 62895 - DNA, 25 bp, Canis familiaris
caggaccaatccaagaaaacccaag

SEQ ID NO: 62896 - DNA, 25 bp, Canis familiaris
cagaggccaatccgaataaacgtct

SEQ ID NO: 62897 - DNA, 25 bp, Canis familiaris
cagagggccatcctgtataaacgtc

SEQ ID NO: 62898 - DNA, 25 bp, Canis familiaris
cggctgtccttctgtacagaggtgg

SEQ ID NO: 62899 - DNA, 25 bp, Canis familiaris
cagacttccttttgcccagagaagg

SEQ ID NO: 62900 - DNA, 25 bp, Canis familiaris
cagactttctgaactcccaaggttt

SEQ ID NO: 62901 - DNA, 25 bp, Canis familiaris
cagcacattcctgttccacaaggat

SEQ ID NO: 62902 - DNA, 25 bp, Canis familiaris
cagcaataccagggtgccctgcggc

SEQ ID NO: 62903 - DNA, 25 bp, Canis familiaris
cagcttgaggaggggctgctctctg

SEQ ID NO: 62904 - DNA, 25 bp, Canis familiaris
cagcatcacaggtgctggctgcttt

SEQ ID NO: 62905 - DNA, 25 bp, Canis familiaris
cagctctcagggcatgtcttttgca

SEQ ID NO: 62906 - DNA, 25 bp, Canis familiaris
cagtcatcagggttgcctaatatac

SEQ ID NO: 62907 - DNA, 25 bp, Canis familiaris
cagctacgtggtgtccagtgtacgc

SEQ ID NO: 62908 - DNA, 25 bp, Canis familiaris
cagctttgatggtggccttggacgc

SEQ ID NO: 62909 - DNA, 25 bp, Canis familiaris
cagcattgggaagggcccgtgacgc

SEQ ID NO: 62910 - DNA, 25 bp, Canis familiaris
cagcttcggatcaggctccggagtg

SEQ ID NO: 62911 - DNA, 25 bp, Canis familiaris
cagcttggcttcacagctcaggtga

SEQ ID NO: 62912 - DNA, 25 bp, Canis familiaris
cagctcttctacctcagctgaggtg

SEQ ID NO: 62913 - DNA, 25 bp, Canis familiaris
cagctcaacctgctgcagctggagg

SEQ ID NO: 62914 - DNA, 25 bp, Canis familiaris
cagctctcatcctgtggctggagga

SEQ ID NO: 62915 - DNA, 25 bp, Canis familiaris
cagctgccaccaagtgtagccagag

SEQ ID NO: 62916 - DNA, 25 bp, Canis familiaris
cagcatgccgacagtgtcctcggct

SEQ ID NO: 62917 - DNA, 25 bp, Canis familiaris
cagcatgccccagggcatggccggc

SEQ ID NO: 62918 - DNA, 25 bp, Canis familiaris
cagcaggcttgctgagctggcggga

SEQ ID NO: 62919 - DNA, 25 bp, Canis familiaris
cagcaggctgtgtgggtttcaattc

SEQ ID NO: 62920 - DNA, 25 bp, Canis familiaris
cagcatggtgtgtctgcgttttctt

SEQ ID NO: 62921 - DNA, 25 bp, Canis familiaris
cagcagggttctgctttttagggcc

SEQ ID NO: 62922 - DNA, 25 bp, Canis familiaris
cagcacggttctggcttgttggtgt

SEQ ID NO: 62923 - DNA, 25 bp, Canis familiaris
cagactggaagcccttgtacgcttt

SEQ ID NO: 62924 - DNA, 25 bp, Canis familiaris
caggctgccaacttatttaccattt

SEQ ID NO: 62925 - DNA, 25 bp, Canis familiaris
cagacccataaatttgtaactttgc

SEQ ID NO: 62926 - DNA, 25 bp, Canis familiaris
cagtaccaaaaatgtcctgcctgtt

SEQ ID NO: 62927 - DNA, 25 bp, Canis familiaris
cagtttcagaaaatagttggtggtt

SEQ ID NO: 62928 - DNA, 25 bp, Canis familiaris
cagctttcagaagtgctgagttggc

SEQ ID NO: 62929 - DNA, 25 bp, Canis familiaris
cagcttccagagctgctacttcgct

SEQ ID NO: 62930 - DNA, 25 bp, Canis familiaris
cagcttccagggtcatggctacagt

SEQ ID NO: 62931 - DNA, 25 bp, Canis familiaris
cagcttgagcagcagcttggtgaag

SEQ ID NO: 62932 - DNA, 25 bp, Canis familiaris
cagcttgcaatccgcggtgatgaag

SEQ ID NO: 62933 - DNA, 25 bp, Canis familiaris
cagcttgtcatccctgatgggcaag

SEQ ID NO: 62934 - DNA, 25 bp, Canis familiaris
cagctcgtctggccatcagagccag

SEQ ID NO: 62935 - DNA, 25 bp, Canis familiaris
cagctctgcctgagatcaagccagc

SEQ ID NO: 62936 - DNA, 25 bp, Canis familiaris
cagctctgccctggattggtagctt

SEQ ID NO: 62937 - DNA, 25 bp, Canis familiaris
cagctttcctgggaagagcctgctt

SEQ ID NO: 62938 - DNA, 25 bp, Canis familiaris
cagacttcctgaccagcgagggtct

SEQ ID NO: 62939 - DNA, 25 bp, Canis familiaris
cagtatacctatctgcaggcgtgat

SEQ ID NO: 62940 - DNA, 25 bp, Canis familiaris
cagcaaaccagttggcagtgccctg

SEQ ID NO: 62941 - DNA, 25 bp, Canis familiaris
cagaaagccttcgagcgggccattg

SEQ ID NO: 62942 - DNA, 25 bp, Canis familiaris
cagaggcgccctggcgaggaacttg

SEQ ID NO: 62943 - DNA, 25 bp, Canis familiaris
cagaggctcctctggggaagccaag

SEQ ID NO: 62944 - DNA, 25 bp, Canis familiaris
cagaggtccagagcgaaaagccctg

SEQ ID NO: 62945 - DNA, 25 bp, Canis familiaris
cagcacgttgctgtcgattaagacc

SEQ ID NO: 62946 - DNA, 25 bp, Canis familiaris
cagcagccctgtgactttaggcacc

SEQ ID NO: 62947 - DNA, 25 bp, Canis familiaris
cagcacctctttagtgcctaagccc

SEQ ID NO: 62948 - DNA, 25 bp, Canis familiaris
cagcagtcgtatagttgccggaccc

SEQ ID NO: 62949 - DNA, 25 bp, Canis familiaris
cagcaggtggagatccctgtgtctc

SEQ ID NO: 62950 - DNA, 25 bp, Canis familiaris
cagaagggcattgctcttggtgctc

SEQ ID NO: 62951 - DNA, 25 bp, Canis familiaris
cagcagaggtgcattctcaggaccc

SEQ ID NO: 62952 - DNA, 25 bp, Canis familiaris
cagcaggagcagatccggctgaccg

SEQ ID NO: 62953 - DNA, 25 bp, Canis familiaris
cagcaggcctgaaccagaaaccagc

SEQ ID NO: 62954 - DNA, 25 bp, Canis familiaris
gcatagcccttagcagtaacggcgt

SEQ ID NO: 62955 - DNA, 25 bp, Canis familiaris
gaagcccgggccattgccatcgctg

SEQ ID NO: 62956 - DNA, 25 bp, Canis familiaris
cagaccaagttgccatgtgtcaccc

SEQ ID NO: 62957 - DNA, 25 bp, Canis familiaris
cagcatctctggctttgtgagaccc

SEQ ID NO: 62958 - DNA, 25 bp, Canis familiaris
caggattggaggattagaaccccgg

SEQ ID NO: 62959 - DNA, 25 bp, Canis familiaris
cagagagccgggctacagtttcccg

SEQ ID NO: 62960 - DNA, 25 bp, Canis familiaris
cagcaagggtggcaaggtcctcact

SEQ ID NO: 62961 - DNA, 25 bp, Canis familiaris
cagcagggggcgcaagatgactgtc

SEQ ID NO: 62962 - DNA, 25 bp, Canis familiaris
cagagggagggctggaccatctcca

SEQ ID NO: 62963 - DNA, 25 bp, Canis familiaris
cagagggagggctggaccatctcca

SEQ ID NO: 62964 - DNA, 25 bp, Canis familiaris
cagagggagggctggaccatctcca

SEQ ID NO: 62965 - DNA, 25 bp, Canis familiaris
cagaggagggtcaggatgcccccat

SEQ ID NO: 62966 - DNA, 25 bp, Canis familiaris
cagaagcaggccccggggcctgccc

SEQ ID NO: 62967 - DNA, 25 bp, Canis familiaris
cagaaggagatcacggcgtctggcc

SEQ ID NO: 62968 - DNA, 25 bp, Canis familiaris
cagaaggagatcactgccctggcac

SEQ ID NO: 62969 - DNA, 25 bp, Canis familiaris
cagcaaggcagtgtctgtgccctgc

SEQ ID NO: 62970 - DNA, 25 bp, Canis familiaris
cagcacagaggtttgggcacagcgg

SEQ ID NO: 62971 - DNA, 25 bp, Canis familiaris
cagaagaggctgtgcgagcttgcag

SEQ ID NO: 62972 - DNA, 25 bp, Canis familiaris
cagcaagcaggagtacgatgagtcc

SEQ ID NO: 62973 - DNA, 25 bp, Canis familiaris
cagcaagaaggatcagacccccgga

SEQ ID NO: 62974 - DNA, 25 bp, Canis familiaris
cagagaacggatacaaatcctgcca

SEQ ID NO: 62975 - DNA, 25 bp, Canis familiaris
cagagacctggatcagatcccagcc

SEQ ID NO: 62976 - DNA, 25 bp, Canis familiaris
cagacctctcgtccgatgaaagctg

SEQ ID NO: 62977 - DNA, 25 bp, Canis familiaris
cagcagtgttttctgctgcaaagtc

SEQ ID NO: 62978 - DNA, 25 bp, Canis familiaris
cagcagtgtgtttgaggacccagtg

SEQ ID NO: 62979 - DNA, 25 bp, Canis familiaris
cagcagagactgcgagaggccctgg

SEQ ID NO: 62980 - DNA, 25 bp, Canis familiaris
cagcagcagtctcagacagcctact

SEQ ID NO: 62981 - DNA, 25 bp, Canis familiaris
cagcacgtcatgcaagcaggccaga

SEQ ID NO: 62982 - DNA, 25 bp, Canis familiaris
cagcagctacagcggatggcacagc

SEQ ID NO: 62983 - DNA, 25 bp, Canis familiaris
cagcagcaagcactctgggtgaaat

SEQ ID NO: 62984 - DNA, 25 bp, Canis familiaris
cagcaaggacatccggatgaaaaag

SEQ ID NO: 62985 - DNA, 25 bp, Canis familiaris
cagcaaggacactgagcaagagagg

SEQ ID NO: 62986 - DNA, 25 bp, Canis familiaris
cagcattatgacccaagcactggga

SEQ ID NO: 62987 - DNA, 25 bp, Canis familiaris
cagctatcaactcgcgccctggaag

SEQ ID NO: 62988 - DNA, 25 bp, Canis familiaris
cagcttcagattcccttcaggaaac

SEQ ID NO: 62989 - DNA, 25 bp, Canis familiaris
catgttcgaccgctctgaggtctac

SEQ ID NO: 62990 - DNA, 25 bp, Canis familiaris
cagtaagcccgttctgggtttcttg

SEQ ID NO: 62991 - DNA, 25 bp, Canis familiaris
cagaaaggccgtgtggagtgcccct

SEQ ID NO: 62992 - DNA, 25 bp, Canis familiaris
cagaaaagcctgtggaacttccgcc

SEQ ID NO: 62993 - DNA, 25 bp, Canis familiaris
cagaataaccttctgacctttcctt

SEQ ID NO: 62994 - DNA, 25 bp, Canis familiaris
cagaaaacctagggaccctctctgc

SEQ ID NO: 62995 - DNA, 25 bp, Canis familiaris
cagcagagaacctagggacgcttcc

SEQ ID NO: 62996 - DNA, 25 bp, Canis familiaris
cagcaggggcctctgaaagcattcc

SEQ ID NO: 62997 - DNA, 25 bp, Canis familiaris
cagcaggtggctgtcgagacgtcta

SEQ ID NO: 62998 - DNA, 25 bp, Canis familiaris
cagagtgctgacgccttactggcaa

SEQ ID NO: 62999 - DNA, 25 bp, Canis familiaris
cagaatcgaccccttagggagaggc

SEQ ID NO: 63000 - DNA, 25 bp, Canis familiaris
cagatactaacccttggtggacgga

SEQ ID NO: 63001 - DNA, 25 bp, Canis familiaris
cagaatagagtctggggggagggtc

SEQ ID NO: 63002 - DNA, 25 bp, Canis familiaris
cagagacggctggtgagggaggagg

SEQ ID NO: 63003 - DNA, 25 bp, Canis familiaris
cagcagtgccgtctcaaggagggtc

SEQ ID NO: 63004 - DNA, 25 bp, Canis familiaris
cagcagcaaaatcccaagcgcaggc

SEQ ID NO: 63005 - DNA, 25 bp, Canis familiaris
cagcactcaaacccagaggacctac

SEQ ID NO: 63006 - DNA, 25 bp, Canis familiaris
cagcacaagaaccctgaggatcctg

SEQ ID NO: 63007 - DNA, 25 bp, Canis familiaris
cagacatagacaccaggaggaccac

SEQ ID NO: 63008 - DNA, 25 bp, Canis familiaris
cagcacgagacgcaggagctggcct

SEQ ID NO: 63009 - DNA, 25 bp, Canis familiaris
cagacgtacagccagacgtcctctg

SEQ ID NO: 63010 - DNA, 25 bp, Canis familiaris
cagactggagataggcacgggctta

SEQ ID NO: 63011 - DNA, 25 bp, Canis familiaris
cagacatgagtgcagcgataggagc

SEQ ID NO: 63012 - DNA, 25 bp, Canis familiaris
cagaagagtgcagctgacccatcgg

SEQ ID NO: 63013 - DNA, 25 bp, Canis familiaris
cagaggcagatgacgctgatcccac

SEQ ID NO: 63014 - DNA, 25 bp, Canis familiaris
cagcagagagctgggctctctccca

SEQ ID NO: 63015 - DNA, 25 bp, Canis familiaris
cagcagaaggggtctgccgggtcgc

SEQ ID NO: 63016 - DNA, 25 bp, Canis familiaris
cagagaaggggtcttggtggggcca

SEQ ID NO: 63017 - DNA, 25 bp, Canis familiaris
caggggttcggattctcgggagagg

SEQ ID NO: 63018 - DNA, 25 bp, Canis familiaris
cagaggagtggggaacctgggcggt

SEQ ID NO: 63019 - DNA, 25 bp, Canis familiaris
cagcaggaggtcggcctttgctgga

SEQ ID NO: 63020 - DNA, 25 bp, Canis familiaris
cagcatcccagcttgagatgaactc

SEQ ID NO: 63021 - DNA, 25 bp, Canis familiaris
cagcataccagcgggcaagacatct

SEQ ID NO: 63022 - DNA, 25 bp, Canis familiaris
cagcagagcctcgggcaggtgagct

SEQ ID NO: 63023 - DNA, 25 bp, Canis familiaris
cagactgtctcagtgctgggggtgc

SEQ ID NO: 63024 - DNA, 25 bp, Canis familiaris
cagcatcgtcctgctgagtgggctc

SEQ ID NO: 63025 - DNA, 25 bp, Canis familiaris
cagcacatgcccactgagaggagtc

SEQ ID NO: 63026 - DNA, 25 bp, Canis familiaris
cagacatgcgcaatgagctggagga

SEQ ID NO: 63027 - DNA, 25 bp, Canis familiaris
cagcagatcctcaactgctgcacga

SEQ ID NO: 63028 - DNA, 25 bp, Canis familiaris
cagaacatcatccctgcatccactg

SEQ ID NO: 63029 - DNA, 25 bp, Canis familiaris
cagagagatatgcccctacaagcct

SEQ ID NO: 63030 - DNA, 25 bp, Canis familiaris
cagcaaggatgccacctacacatca

SEQ ID NO: 63031 - DNA, 25 bp, Canis familiaris
cagcagctggctgacactgacagac

SEQ ID NO: 63032 - DNA, 25 bp, Canis familiaris
cagcagctggtggccaggaacacga

SEQ ID NO: 63033 - DNA, 25 bp, Canis familiaris
cagcttcgtctggatggtaactaca

SEQ ID NO: 63034 - DNA, 25 bp, Canis familiaris
cagcttcctctgttgtgttggatca

SEQ ID NO: 63035 - DNA, 25 bp, Canis familiaris
cagcttcctcgtttctgtgagaaac

SEQ ID NO: 63036 - DNA, 25 bp, Canis familiaris
cagaaccacagtccctgggtacata

SEQ ID NO: 63037 - DNA, 25 bp, Canis familiaris
cagagcccaaggacggggtttcatt

SEQ ID NO: 63038 - DNA, 25 bp, Canis familiaris
cagaggtcacacccggggttggtga

SEQ ID NO: 63039 - DNA, 25 bp, Canis familiaris
cagaagtgggccggggtggggctga

SEQ ID NO: 63040 - DNA, 25 bp, Canis familiaris
cagaacgggctcgggcagaggccct

SEQ ID NO: 63041 - DNA, 25 bp, Canis familiaris
cagacctgggcctggaggcccgatc

SEQ ID NO: 63042 - DNA, 25 bp, Canis familiaris
cagacgtgggcctggacagtccagg

SEQ ID NO: 63043 - DNA, 25 bp, Canis familiaris
cagacttggcccaaggacattcccc

SEQ ID NO: 63044 - DNA, 25 bp, Canis familiaris
cagagctttgtacaggaattcccat

SEQ ID NO: 63045 - DNA, 25 bp, Canis familiaris
cagtatttgtaatgagaatgatttc

SEQ ID NO: 63046 - DNA, 25 bp, Canis familiaris
cagcattttgaattgggcacttatt

SEQ ID NO: 63047 - DNA, 25 bp, Canis familiaris
cagcatttggattttcctcttaaaa

SEQ ID NO: 63048 - DNA, 25 bp, Canis familiaris
cagcagcttgagttattcccactga

SEQ ID NO: 63049 - DNA, 25 bp, Canis familiaris
cagagcataggcttgtgccctcagt

SEQ ID NO: 63050 - DNA, 25 bp, Canis familiaris
cagcatggggcttggctccaagttc

SEQ ID NO: 63051 - DNA, 25 bp, Canis familiaris
cagcagggagccagtcgctatttga

SEQ ID NO: 63052 - DNA, 25 bp, Canis familiaris
cagcagggtgcagcgctggtttgga

SEQ ID NO: 63053 - DNA, 25 bp, Canis familiaris
cagcagccggagtcaaggcggtggc

SEQ ID NO: 63054 - DNA, 25 bp, Canis familiaris
cagcacctgcggacacagagctaat

SEQ ID NO: 63055 - DNA, 25 bp, Canis familiaris
cagcatcgctggcaccatttaacag

SEQ ID NO: 63056 - DNA, 25 bp, Canis familiaris
cagaggctgctgtacctgttgacaa

SEQ ID NO: 63057 - DNA, 25 bp, Canis familiaris
cagagaggcatggcccgaagaccat

SEQ ID NO: 63058 - DNA, 25 bp, Canis familiaris
cagagggaacctccagagaccagtt

SEQ ID NO: 63059 - DNA, 25 bp, Canis familiaris
cagagaggaggccccagggccacaa

SEQ ID NO: 63060 - DNA, 25 bp, Canis familiaris
cagacggagtgccagtcagggtcag

SEQ ID NO: 63061 - DNA, 25 bp, Canis familiaris
cagacaagatggcggcggcgtctgc

SEQ ID NO: 63062 - DNA, 25 bp, Canis familiaris
cagcttggacggggcatggcgtcac

SEQ ID NO: 63063 - DNA, 25 bp, Canis familiaris
cagcttggaaggcgtgtgcccacac

SEQ ID NO: 63064 - DNA, 25 bp, Canis familiaris
cagcaggaaacaccttggcaccaga

SEQ ID NO: 63065 - DNA, 25 bp, Canis familiaris
cagcagggagggccttggtcctgat

SEQ ID NO: 63066 - DNA, 25 bp, Canis familiaris
cagcaggaagtggtgttgtggcgga

SEQ ID NO: 63067 - DNA, 25 bp, Canis familiaris
cagcagctatagggtgggggctagg

SEQ ID NO: 63068 - DNA, 25 bp, Canis familiaris
cagactctacatgtaggatggtaac

SEQ ID NO: 63069 - DNA, 25 bp, Canis familiaris
cagactctgacctgggtgtggagcc

SEQ ID NO: 63070 - DNA, 25 bp, Canis familiaris
cagcatctctaagactgggttagcc

SEQ ID NO: 63071 - DNA, 25 bp, Canis familiaris
cagcactttctcatctgtggtgaag

SEQ ID NO: 63072 - DNA, 25 bp, Canis familiaris
cagcagctttctccgatgactgtga

SEQ ID NO: 63073 - DNA, 25 bp, Canis familiaris
cagacttgttccttgcactgaacct

SEQ ID NO: 63074 - DNA, 25 bp, Canis familiaris
cagaccgttcagagattaggcatct

SEQ ID NO: 63075 - DNA, 25 bp, Canis familiaris
cagacccgtcaggagatagggcatc

SEQ ID NO: 63076 - DNA, 25 bp, Canis familiaris
gaacgtcgtcgttgacaacgcccaa

SEQ ID NO: 63077 - DNA, 25 bp, Canis familiaris
cagaaattgtcttaagcaacagccc

SEQ ID NO: 63078 - DNA, 25 bp, Canis familiaris
cagaaatattttgacaagcctccaa

SEQ ID NO: 63079 - DNA, 25 bp, Canis familiaris
cagaaaaaatccacacacctgcgcc

SEQ ID NO: 63080 - DNA, 25 bp, Canis familiaris
cagtcaaaccagtttacacctctcc

SEQ ID NO: 63081 - DNA, 25 bp, Canis familiaris
cagaaaagcctcttcttatcctcag

SEQ ID NO: 63082 - DNA, 25 bp, Canis familiaris
cagaaacgactcactgtatccagtt

SEQ ID NO: 63083 - DNA, 25 bp, Canis familiaris
cagtatagttttctctattcgtttc

SEQ ID NO: 63084 - DNA, 25 bp, Canis familiaris
cgtcaaatttgtcttcgatgccgtc

SEQ ID NO: 63085 - DNA, 25 bp, Canis familiaris
cagtcatagcattttgctagcccat

SEQ ID NO: 63086 - DNA, 25 bp, Canis familiaris
cagcataagcatcatcgacactcct

SEQ ID NO: 63087 - DNA, 25 bp, Canis familiaris
cagcagaagcccagactcagctgcc

SEQ ID NO: 63088 - DNA, 25 bp, Canis familiaris
cagcagcaacctcaggctgcgtctc

SEQ ID NO: 63089 - DNA, 25 bp, Canis familiaris
cagagccagcctcgtaggcttcatg

SEQ ID NO: 63090 - DNA, 25 bp, Canis familiaris
cagcagccacctgggactgctaggt

SEQ ID NO: 63091 - DNA, 25 bp, Canis familiaris
cagcaaccacatggtggctcacaac

SEQ ID NO: 63092 - DNA, 25 bp, Canis familiaris
cagcagacccaggtactacgcagaa

SEQ ID NO: 63093 - DNA, 25 bp, Canis familiaris
cagaatcccatttcactgagccaga

SEQ ID NO: 63094 - DNA, 25 bp, Canis familiaris
cagactccacttggactacattggg

SEQ ID NO: 63095 - DNA, 25 bp, Canis familiaris
cagaccaacttcctcagcagagggg

SEQ ID NO: 63096 - DNA, 25 bp, Canis familiaris
cagacaaagactcggccaaggggcg

SEQ ID NO: 63097 - DNA, 25 bp, Canis familiaris
cagacacacaggagcccaaaatctg

SEQ ID NO: 63098 - DNA, 25 bp, Canis familiaris
cagcagccccagaaaccagaatagg

SEQ ID NO: 63099 - DNA, 25 bp, Canis familiaris
cagcacccaatgaactgccaaggac

SEQ ID NO: 63100 - DNA, 25 bp, Canis familiaris
cagaaggatcatcacccaactggct

SEQ ID NO: 63101 - DNA, 25 bp, Canis familiaris
cagaatcatacaaaccctcacaggt

SEQ ID NO: 63102 - DNA, 25 bp, Canis familiaris
cagaatcatgcagagtccagctccc

SEQ ID NO: 63103 - DNA, 25 bp, Canis familiaris
cagatagctgatggaccaggcctcc

SEQ ID NO: 63104 - DNA, 25 bp, Canis familiaris
cagatgggtgctatcagagcctctc

SEQ ID NO: 63105 - DNA, 25 bp, Canis familiaris
cagaagatgactatgctggcgtcat

SEQ ID NO: 63106 - DNA, 25 bp, Canis familiaris
cagcaagttcttcgatgatcccatg

SEQ ID NO: 63107 - DNA, 25 bp, Canis familiaris
cagcaaagtctggcgtgatcaacat

SEQ ID NO: 63108 - DNA, 25 bp, Canis familiaris
cagcaaagtctggcgagatgaacac

SEQ ID NO: 63109 - DNA, 25 bp, Canis familiaris
cagacaggttcccagatgatgccgc

SEQ ID NO: 63110 - DNA, 25 bp, Canis familiaris
cagaagctgactgccgagatgcctg

SEQ ID NO: 63111 - DNA, 25 bp, Canis familiaris
cagagcatctacaacctggaggccg

SEQ ID NO: 63112 - DNA, 25 bp, Canis familiaris
cagcagagcttcgccatgtgatgac

SEQ ID NO: 63113 - DNA, 25 bp, Canis familiaris
cagcaagctgtggcacactctgtac

SEQ ID NO: 63114 - DNA, 25 bp, Canis familiaris
cagcaggtgcatcgccagcatttcg

SEQ ID NO: 63115 - DNA, 25 bp, Canis familiaris
cagcagtggggcaagctgtccgagg

SEQ ID NO: 63116 - DNA, 25 bp, Canis familiaris
cagcaatgggcagggctgctccagg

SEQ ID NO: 63117 - DNA, 25 bp, Canis familiaris
cagcagtgctgccaagggtgacatg

SEQ ID NO: 63118 - DNA, 25 bp, Canis familiaris
cagactgcggaagggctgactgctc

SEQ ID NO: 63119 - DNA, 25 bp, Canis familiaris
cagactcttgtcttggctgactgat

SEQ ID NO: 63120 - DNA, 25 bp, Canis familiaris
cagactccatctgcgtgagagctgt

SEQ ID NO: 63121 - DNA, 25 bp, Canis familiaris
cagagccacagtgttcaacgtccta

SEQ ID NO: 63122 - DNA, 25 bp, Canis familiaris
cagacaccatgcagattcaaaccct

SEQ ID NO: 63123 - DNA, 25 bp, Canis familiaris
cagagctgccgctgagacaaggccc

SEQ ID NO: 63124 - DNA, 25 bp, Canis familiaris
cagagtcctgggattaagcctgcct

SEQ ID NO: 63125 - DNA, 25 bp, Canis familiaris
cagagacgttagattactgccccaa

SEQ ID NO: 63126 - DNA, 25 bp, Canis familiaris
cagaatgcgtaatttttgtccccag

SEQ ID NO: 63127 - DNA, 25 bp, Canis familiaris
cagaaggcgactattgtgtcacccc

SEQ ID NO: 63128 - DNA, 25 bp, Canis familiaris
cagaagggactgatcacttcctccc

SEQ ID NO: 63129 - DNA, 25 bp, Canis familiaris
cagtagagtacaaatgccagtcctt

SEQ ID NO: 63130 - DNA, 25 bp, Canis familiaris
cagaataggccatcatgccaccctt

SEQ ID NO: 63131 - DNA, 25 bp, Canis familiaris
cagaacaggcaaactccctgctgtc

SEQ ID NO: 63132 - DNA, 25 bp, Canis familiaris
cagaaatccatagtctgctcctctg

SEQ ID NO: 63133 - DNA, 25 bp, Canis familiaris
cagagcttctgcaaagcgctcctag

SEQ ID NO: 63134 - DNA, 25 bp, Canis familiaris
cagcacttatgtgactgacctcagt

SEQ ID NO: 63135 - DNA, 25 bp, Canis familiaris
cagagtgtagatgctatggcccctt

SEQ ID NO: 63136 - DNA, 25 bp, Canis familiaris
cagatgtgggcagcttgggtggctc

SEQ ID NO: 63137 - DNA, 25 bp, Canis familiaris
cagcagggacagctgtgcgagccgc

SEQ ID NO: 63138 - DNA, 25 bp, Canis familiaris
cagcaaggacagcttcgcagttctt

SEQ ID NO: 63139 - DNA, 25 bp, Canis familiaris
cagagattgacgctcaccttgttgc

SEQ ID NO: 63140 - DNA, 25 bp, Canis familiaris
caggagctttgcgctccttttcaaa

SEQ ID NO: 63141 - DNA, 25 bp, Canis familiaris
cagaactttgctgttatttttcctt

SEQ ID NO: 63142 - DNA, 25 bp, Canis familiaris
cagaactattgtatggatcttatcc

SEQ ID NO: 63143 - DNA, 25 bp, Canis familiaris
cagacctttgtattgtggttttttg

SEQ ID NO: 63144 - DNA, 25 bp, Canis familiaris
cagacctttgcatcagggaacttct

SEQ ID NO: 63145 - DNA, 25 bp, Canis familiaris
cagacaccagcaaacagggggctct

SEQ ID NO: 63146 - DNA, 25 bp, Canis familiaris
cagaggcctcatttagtgggagctt

SEQ ID NO: 63147 - DNA, 25 bp, Canis familiaris
cagcagtgcctctaacagcttggtg

SEQ ID NO: 63148 - DNA, 25 bp, Canis familiaris
cagcagaggctgtagacattgtggg

SEQ ID NO: 63149 - DNA, 25 bp, Canis familiaris
cagacgagctgagtgaccttgggca

SEQ ID NO: 63150 - DNA, 25 bp, Canis familiaris
cagaatggctgcagacctggggcat

SEQ ID NO: 63151 - DNA, 25 bp, Canis familiaris
cagttgccagaggtgcctggtccat

SEQ ID NO: 63152 - DNA, 25 bp, Canis familiaris
cagttccgagagatcatcgttctcc

SEQ ID NO: 63153 - DNA, 25 bp, Canis familiaris
cagtagccagagtggggttcctgcc

SEQ ID NO: 63154 - DNA, 25 bp, Canis familiaris
cagtatcacaggggtggggtcccgc

SEQ ID NO: 63155 - DNA, 25 bp, Canis familiaris
cagactccagaggagctgggacccc

SEQ ID NO: 63156 - DNA, 25 bp, Canis familiaris
cagactgataggaagtttcccccct

SEQ ID NO: 63157 - DNA, 25 bp, Canis familiaris
cagtgtaaggtccttatccccacaa

SEQ ID NO: 63158 - DNA, 25 bp, Canis familiaris
cagaaagatcgcgcttatccagccc

SEQ ID NO: 63159 - DNA, 25 bp, Canis familiaris
cagaacttgctggagctgtggcggc

SEQ ID NO: 63160 - DNA, 25 bp, Canis familiaris
cagcaaccagccaatgcctgtgggc

SEQ ID NO: 63161 - DNA, 25 bp, Canis familiaris
cagaaccaggatacgctgagggaga

SEQ ID NO: 63162 - DNA, 25 bp, Canis familiaris
cagagacctgtgtctcctgggagat

SEQ ID NO: 63163 - DNA, 25 bp, Canis familiaris
cagcaccctgtgtcgcagtggtgga

SEQ ID NO: 63164 - DNA, 25 bp, Canis familiaris
cagagctccggctgcagagtgatga

SEQ ID NO: 63165 - DNA, 25 bp, Canis familiaris
cagcaccatcaagctgctgaatgaa

SEQ ID NO: 63166 - DNA, 25 bp, Canis familiaris
cagcagccataagcatcaagtgtaa

SEQ ID NO: 63167 - DNA, 25 bp, Canis familiaris
cagcagccatagcatcaaagtgtaa

SEQ ID NO: 63168 - DNA, 25 bp, Canis familiaris
cagaccactgcagtgaaaggctaca

SEQ ID NO: 63169 - DNA, 25 bp, Canis familiaris
cagaccacatacaaatggcagctgt

SEQ ID NO: 63170 - DNA, 25 bp, Canis familiaris
cagacccataagtgccacttacaag

SEQ ID NO: 63171 - DNA, 25 bp, Canis familiaris
cagacccataagtgcaacttacaga

SEQ ID NO: 63172 - DNA, 25 bp, Canis familiaris
cagacctcaaaacactgttgtcaga

SEQ ID NO: 63173 - DNA, 25 bp, Canis familiaris
cagatccagcaagtaggaatgttgg

SEQ ID NO: 63174 - DNA, 25 bp, Canis familiaris
cagacgacgacatgggatttggctt

SEQ ID NO: 63175 - DNA, 25 bp, Canis familiaris
cagcagcgaccctattgtttttgtg

SEQ ID NO: 63176 - DNA, 25 bp, Canis familiaris
cagaagatgccctttgacgtgttgc

SEQ ID NO: 63177 - DNA, 25 bp, Canis familiaris
cagcacagagccaactggacttcct

SEQ ID NO: 63178 - DNA, 25 bp, Canis familiaris
cagcagctgacctgcaggacatttt

SEQ ID NO: 63179 - DNA, 25 bp, Canis familiaris
cagagtgggctctagaatatttata

SEQ ID NO: 63180 - DNA, 25 bp, Canis familiaris
cagcaaggagtggaaatttgtcccc

SEQ ID NO: 63181 - DNA, 25 bp, Canis familiaris
cagacaggtatgcgaaggttgcccc

SEQ ID NO: 63182 - DNA, 25 bp, Canis familiaris
cagaagtgtcctcagagttggcccc

SEQ ID NO: 63183 - DNA, 25 bp, Canis familiaris
cagaactggtctccagtgtgggccc

SEQ ID NO: 63184 - DNA, 25 bp, Canis familiaris
cagaagtgttagcctgtggcggccc

SEQ ID NO: 63185 - DNA, 25 bp, Canis familiaris
cagagcactttacagtgggcccagc

SEQ ID NO: 63186 - DNA, 25 bp, Canis familiaris
cagagactgtttaccgaagcccagc

SEQ ID NO: 63187 - DNA, 25 bp, Canis familiaris
cagagatctgctaactcaaaccccg

SEQ ID NO: 63188 - DNA, 25 bp, Canis familiaris
cagagatcggataccaatcctgcca

SEQ ID NO: 63189 - DNA, 25 bp, Canis familiaris
cagagtcagtgtagaactggtcata

SEQ ID NO: 63190 - DNA, 25 bp, Canis familiaris
cagaagagatttaatcagtgtgata

SEQ ID NO: 63191 - DNA, 25 bp, Canis familiaris
cagaagaatcttagaggaggctgat

SEQ ID NO: 63192 - DNA, 25 bp, Canis familiaris
cagaatacactccagacctgtgctg

SEQ ID NO: 63193 - DNA, 25 bp, Canis familiaris
cagagaaactcgacatcctgcggca

SEQ ID NO: 63194 - DNA, 25 bp, Canis familiaris
cagacaatacgcttcattctgcctc

SEQ ID NO: 63195 - DNA, 25 bp, Canis familiaris
cagaaagactgtttgctcccagcag

SEQ ID NO: 63196 - DNA, 25 bp, Canis familiaris
cagaaaagcttcttgatgcccctgc

SEQ ID NO: 63197 - DNA, 25 bp, Canis familiaris
cagaaaagccacagagcagcgccac

SEQ ID NO: 63198 - DNA, 25 bp, Canis familiaris
cagtaaagcaaaacagagccggagt

SEQ ID NO: 63199 - DNA, 25 bp, Canis familiaris
cagacagataaatacgagccggaaa

SEQ ID NO: 63200 - DNA, 25 bp, Canis familiaris
cagaaacaaacaaaagcaccaccaa

SEQ ID NO: 63201 - DNA, 25 bp, Canis familiaris
cagaaaaaccattaagccccagtgg

SEQ ID NO: 63202 - DNA, 25 bp, Canis familiaris
caggataaaccttaagcacccgtgg

SEQ ID NO: 63203 - DNA, 25 bp, Canis familiaris
cagagggtaccttggacaccctggt

SEQ ID NO: 63204 - DNA, 25 bp, Canis familiaris
cagagcgggtgccgggaacaactgg

SEQ ID NO: 63205 - DNA, 25 bp, Canis familiaris
cagcaagtacgccggtatcacaact

SEQ ID NO: 63206 - DNA, 25 bp, Canis familiaris
cagcaaattccatcgtgtgatcaag

SEQ ID NO: 63207 - DNA, 25 bp, Canis familiaris
cagcacacttcctgatttgtccagg

SEQ ID NO: 63208 - DNA, 25 bp, Canis familiaris
cagcaacttcaaggtttctgccagc

SEQ ID NO: 63209 - DNA, 25 bp, Canis familiaris
cagaatcattacacgcgtggcctgc

SEQ ID NO: 63210 - DNA, 25 bp, Canis familiaris
cagaccattgtcatccaggtccagc

SEQ ID NO: 63211 - DNA, 25 bp, Canis familiaris
cagaccattgtttctaataagcaga

SEQ ID NO: 63212 - DNA, 25 bp, Canis familiaris
cagaacactgtttttgctcaaagag

SEQ ID NO: 63213 - DNA, 25 bp, Canis familiaris
cagagccacttttggtccaagcagc

SEQ ID NO: 63214 - DNA, 25 bp, Canis familiaris
cagacacactctttgttgaacacac

SEQ ID NO: 63215 - DNA, 25 bp, Canis familiaris
cagacagccctgcggtgaatggagc

SEQ ID NO: 63216 - DNA, 25 bp, Canis familiaris
cagaaccctgctgggtgtgctgggc

SEQ ID NO: 63217 - DNA, 25 bp, Canis familiaris
cagaacatgctcctctgggatgctg

SEQ ID NO: 63218 - DNA, 25 bp, Canis familiaris
cagaatcacatgctctgctgactgg

SEQ ID NO: 63219 - DNA, 25 bp, Canis familiaris
cagaaacatggtcgtccgagcctgt

SEQ ID NO: 63220 - DNA, 25 bp, Canis familiaris
cagaaagaggccctccagggtgctc

SEQ ID NO: 63221 - DNA, 25 bp, Canis familiaris
cagagacggagacctctggggagcg

SEQ ID NO: 63222 - DNA, 25 bp, Canis familiaris
cagagactgaaggcccggtgggaga

SEQ ID NO: 63223 - DNA, 25 bp, Canis familiaris
cagagacgtaccggctgttgggtgg

SEQ ID NO: 63224 - DNA, 25 bp, Canis familiaris
catggacgtacggtttagcctgggt

SEQ ID NO: 63225 - DNA, 25 bp, Canis familiaris
cagtacgtactggtttctcctgagg

SEQ ID NO: 63226 - DNA, 25 bp, Canis familiaris
cagaagtataatctttgccagctgg

SEQ ID NO: 63227 - DNA, 25 bp, Canis familiaris
cagatggttaaacttctgcctttgg

SEQ ID NO: 63228 - DNA, 25 bp, Canis familiaris
cagatcctctagtatgacctgcctt

SEQ ID NO: 63229 - DNA, 25 bp, Canis familiaris
cagacacctatgtgtcctccatatc

SEQ ID NO: 63230 - DNA, 25 bp, Canis familiaris
cagagacttagattcccctgatacc

SEQ ID NO: 63231 - DNA, 25 bp, Canis familiaris
cagaatgttctaattcgccttcagc

SEQ ID NO: 63232 - DNA, 25 bp, Canis familiaris
cagaattgtctaataagcctggaga

SEQ ID NO: 63233 - DNA, 25 bp, Canis familiaris
cagaatctgttcaaatagtgcgtag

SEQ ID NO: 63234 - DNA, 25 bp, Canis familiaris
cagacactgttggagatacttggaa

SEQ ID NO: 63235 - DNA, 25 bp, Canis familiaris
cagtattgcttggagcattttgcag

SEQ ID NO: 63236 - DNA, 25 bp, Canis familiaris
cagtaatggatgagtgcttgctaga

SEQ ID NO: 63237 - DNA, 25 bp, Canis familiaris
cagaagatgggctgtgctctctgaa

SEQ ID NO: 63238 - DNA, 25 bp, Canis familiaris
cagacagacgaggggttgcagagtg

SEQ ID NO: 63239 - DNA, 25 bp, Canis familiaris
cagcaaacagggggctctgcacctg

SEQ ID NO: 63240 - DNA, 25 bp, Canis familiaris
cagaaggagtctaactctgcaccgt

SEQ ID NO: 63241 - DNA, 25 bp, Canis familiaris
cagaaggagctggagagcctggccg

SEQ ID NO: 63242 - DNA, 25 bp, Canis familiaris
cagaactggggaagcctgtgctcca

SEQ ID NO: 63243 - DNA, 25 bp, Canis familiaris
cagaagtggtggcttgtgtctcgtt

SEQ ID NO: 63244 - DNA, 25 bp, Canis familiaris
cagaagaacgggctgagctctcaga

SEQ ID NO: 63245 - DNA, 25 bp, Canis familiaris
cagaagacctcgacttggcttagac

SEQ ID NO: 63246 - DNA, 25 bp, Canis familiaris
cagtaggcttcgttttgagtgacac

SEQ ID NO: 63247 - DNA, 25 bp, Canis familiaris
cagaaggctcacgctggtagatgat

SEQ ID NO: 63248 - DNA, 25 bp, Canis familiaris
cagcaagatgcctctctggtggtga

SEQ ID NO: 63249 - DNA, 25 bp, Canis familiaris
cagcaatgctgtttcactggttatg

SEQ ID NO: 63250 - DNA, 25 bp, Canis familiaris
cagaagcttttcgttggtgcatgcc

SEQ ID NO: 63251 - DNA, 25 bp, Canis familiaris
cagaagaatttccgggtcacctcag

SEQ ID NO: 63252 - DNA, 25 bp, Canis familiaris
cagaaaattatttggagtccttgac

SEQ ID NO: 63253 - DNA, 25 bp, Canis familiaris
cagacttttatcacaagctccttga

SEQ ID NO: 63254 - DNA, 25 bp, Canis familiaris
cagactttttgccgagaactttgag

SEQ ID NO: 63255 - DNA, 25 bp, Canis familiaris
cagacctttcctgggaaggaatgag

SEQ ID NO: 63256 - DNA, 25 bp, Canis familiaris
cagacccgtccaggtgacaggaact

SEQ ID NO: 63257 - DNA, 25 bp, Canis familiaris
cgaaccgctttgagccaggaactgg

SEQ ID NO: 63258 - DNA, 25 bp, Canis familiaris
gcgaatccgtgtaaagtaatggacg

SEQ ID NO: 63259 - DNA, 25 bp, Canis familiaris
cagaaacgtgtcaaaatcgtggtcc

SEQ ID NO: 63260 - DNA, 25 bp, Canis familiaris
cagaagccggtgatggacgtggccc

SEQ ID NO: 63261 - DNA, 25 bp, Canis familiaris
cagcaaccggtggtggactcatggt

SEQ ID NO: 63262 - DNA, 25 bp, Canis familiaris
cagaccccgtggtgattcatggtta

SEQ ID NO: 63263 - DNA, 25 bp, Canis familiaris
cagacctccggccggattgtagtgc

SEQ ID NO: 63264 - DNA, 25 bp, Canis familiaris
cagaccagccggtggaggtcggtcg

SEQ ID NO: 63265 - DNA, 25 bp, Canis familiaris
cagaccgggcgtgggagggtggacg

SEQ ID NO: 63266 - DNA, 25 bp, Canis familiaris
cagagtcgggtgtgtgggggtaagg

SEQ ID NO: 63267 - DNA, 25 bp, Canis familiaris
cagagtcgggggttgggtgctatag

SEQ ID NO: 63268 - DNA, 25 bp, Canis familiaris
cagagtctgctttgggggcagctgt

SEQ ID NO: 63269 - DNA, 25 bp, Canis familiaris
cagagtccgattcgggccttgatcc

SEQ ID NO: 63270 - DNA, 25 bp, Canis familiaris
cagagcctagtcagatcgcgttatg

SEQ ID NO: 63271 - DNA, 25 bp, Canis familiaris
cagaccaagtctgcagcggattgtg

SEQ ID NO: 63272 - DNA, 25 bp, Canis familiaris
cagacgtatttggtgcttgatttga

SEQ ID NO: 63273 - DNA, 25 bp, Canis familiaris
caggcttcttctgagccttttacca

SEQ ID NO: 63274 - DNA, 25 bp, Canis familiaris
cagatttctttttcactttttcaag

SEQ ID NO: 63275 - DNA, 25 bp, Canis familiaris
cagaattcgttttagctttattctt

SEQ ID NO: 63276 - DNA, 25 bp, Canis familiaris
cagacttttttagcttcttgttcct

SEQ ID NO: 63277 - DNA, 25 bp, Canis familiaris
cagagttgtgaattcaaatctcgtg

SEQ ID NO: 63278 - DNA, 25 bp, Canis familiaris
cagactctgtaaccaactgcttaga

SEQ ID NO: 63279 - DNA, 25 bp, Canis familiaris
cagacctgaggaccaagcaggaaga

SEQ ID NO: 63280 - DNA, 25 bp, Canis familiaris
cagacaggaggaatgcatcagcgcg

SEQ ID NO: 63281 - DNA, 25 bp, Canis familiaris
cagaaggcgagccagcaggctgctg

SEQ ID NO: 63282 - DNA, 25 bp, Canis familiaris
cagcaagatggaggcgagcgccgtg

SEQ ID NO: 63283 - DNA, 25 bp, Canis familiaris
cagaaagtgaggtgctccgtgggcc

SEQ ID NO: 63284 - DNA, 25 bp, Canis familiaris
cagacggtactgttagccagggtcc

SEQ ID NO: 63285 - DNA, 25 bp, Canis familiaris
cagacggaccggaatgccagggttc

SEQ ID NO: 63286 - DNA, 25 bp, Canis familiaris
cagacagaggctgggcatcgggggt

SEQ ID NO: 63287 - DNA, 25 bp, Canis familiaris
cagacagcggcgctgatcgctgggg

SEQ ID NO: 63288 - DNA, 25 bp, Canis familiaris
cagacaagtcagaaaccatggaaac

SEQ ID NO: 63289 - DNA, 25 bp, Canis familiaris
cagatccaggaggtacggagaaccc

SEQ ID NO: 63290 - DNA, 25 bp, Canis familiaris
cagaggggactccaagggcaactcc

SEQ ID NO: 63291 - DNA, 25 bp, Canis familiaris
cagacgcggaccatcaaggagaccg

SEQ ID NO: 63292 - DNA, 25 bp, Canis familiaris
cagaccttagccacaacgagtcatg

SEQ ID NO: 63293 - DNA, 25 bp, Canis familiaris
cagacacttagccagccaactgagc

SEQ ID NO: 63294 - DNA, 25 bp, Canis familiaris
cagacatagtacgcccatggcagcc

SEQ ID NO: 63295 - DNA, 25 bp, Canis familiaris
cagagcaagtatgcaccctgtgacg

SEQ ID NO: 63296 - DNA, 25 bp, Canis familiaris
cagaaggtcatgacccacgtcagca

SEQ ID NO: 63297 - DNA, 25 bp, Canis familiaris
cagacggtcatcgtctagcgtggcc

SEQ ID NO: 63298 - DNA, 25 bp, Canis familiaris
cagacggagatcgccaaggtgcacg

SEQ ID NO: 63299 - DNA, 25 bp, Canis familiaris
cagaggtgcatctgccaaaggtccc

SEQ ID NO: 63300 - DNA, 25 bp, Canis familiaris
cagaaatgcagagccaaacgccgcc

SEQ ID NO: 63301 - DNA, 25 bp, Canis familiaris
cagagaagaagcacaagaccccacc

SEQ ID NO: 63302 - DNA, 25 bp, Canis familiaris
cagaggaaagctgcgaacccgtgtc

SEQ ID NO: 63303 - DNA, 25 bp, Canis familiaris
cagaggaaagctgcgaacccgtgtc

SEQ ID NO: 63304 - DNA, 25 bp, Canis familiaris
cagagaggaaaccgaaccgagtagg

SEQ ID NO: 63305 - DNA, 25 bp, Canis familiaris
cagagggaaacccatttccagaagg

SEQ ID NO: 63306 - DNA, 25 bp, Canis familiaris
catattgaggacaccaccccaaatg

SEQ ID NO: 63307 - DNA, 25 bp, Canis familiaris
cagagcggtggaaccccaccagaac

SEQ ID NO: 63308 - DNA, 25 bp, Canis familiaris
cagactgtggtgatgcaccgcaccg

SEQ ID NO: 63309 - DNA, 25 bp, Canis familiaris
cagacagaggtgctcacatttccca

SEQ ID NO: 63310 - DNA, 25 bp, Canis familiaris
cagaagagcttgtacctgttgcgcc

SEQ ID NO: 63311 - DNA, 25 bp, Canis familiaris
cagaaatcattatcctggccaccag

SEQ ID NO: 63312 - DNA, 25 bp, Canis familiaris
cagataaataccttggtgccaccaa

SEQ ID NO: 63313 - DNA, 25 bp, Canis familiaris
cagaacaatcaagaggtggcccagc

SEQ ID NO: 63314 - DNA, 25 bp, Canis familiaris
cagaaacacaaccggatgtcttgat

SEQ ID NO: 63315 - DNA, 25 bp, Canis familiaris
cagagaagcaccccagggctttgtg

SEQ ID NO: 63316 - DNA, 25 bp, Canis familiaris
cagaatggatccacggaccgtttgg

SEQ ID NO: 63317 - DNA, 25 bp, Canis familiaris
cagaagagatctatcaccccgttat

SEQ ID NO: 63318 - DNA, 25 bp, Canis familiaris
cagacaaatgtgatccctccttatc

SEQ ID NO: 63319 - DNA, 25 bp, Canis familiaris
cagaagccaagaccacttcctgttc

SEQ ID NO: 63320 - DNA, 25 bp, Canis familiaris
cagacaggaggactcctaccctgct

SEQ ID NO: 63321 - DNA, 25 bp, Canis familiaris
cagagagaaatcccctgaccaactt

SEQ ID NO: 63322 - DNA, 25 bp, Canis familiaris
cagaataatgaccgcctacacaccg

SEQ ID NO: 63323 - DNA, 25 bp, Canis familiaris
cagaatagagaccccattagccagc

SEQ ID NO: 63324 - DNA, 25 bp, Canis familiaris
cagactcggacgcagattagccagc

SEQ ID NO: 63325 - DNA, 25 bp, Canis familiaris
cagagcttggacccagaccatgtcc

SEQ ID NO: 63326 - DNA, 25 bp, Canis familiaris
cagacttcgcacgacagacatcagc

SEQ ID NO: 63327 - DNA, 25 bp, Canis familiaris
cagacatactgcaggcgaatcccct

SEQ ID NO: 63328 - DNA, 25 bp, Canis familiaris
cagaagagctcaagtcggaccggat

SEQ ID NO: 63329 - DNA, 25 bp, Canis familiaris
catgcaaatccaagtgggaccaaca

SEQ ID NO: 63330 - DNA, 25 bp, Canis familiaris
cagaaacagcaagtggcacacccca

SEQ ID NO: 63331 - DNA, 25 bp, Canis familiaris
cagaaacagaactgacctgctccgc

SEQ ID NO: 63332 - DNA, 25 bp, Canis familiaris
cagaataaaactctcttgctcctca

SEQ ID NO: 63333 - DNA, 25 bp, Canis familiaris
cagattaacaccattgattgctccg

SEQ ID NO: 63334 - DNA, 25 bp, Canis familiaris
cagatagacccgagtgaactgccgt

SEQ ID NO: 63335 - DNA, 25 bp, Canis familiaris
cagaagaccctgtgatcttccctgt

SEQ ID NO: 63336 - DNA, 25 bp, Canis familiaris
cagaggacccagtactttccagtcc

SEQ ID NO: 63337 - DNA, 25 bp, Canis familiaris
cagagaaccgcacactagtgcccag

SEQ ID NO: 63338 - DNA, 25 bp, Canis familiaris
cagaaactcgagggcaagggcgcgg

SEQ ID NO: 63339 - DNA, 25 bp, Canis familiaris
cagaaaccgggggcgagcatggcgg

SEQ ID NO: 63340 - DNA, 25 bp, Canis familiaris
cagaaacacagacaggggaggcctg

SEQ ID NO: 63341 - DNA, 25 bp, Canis familiaris
cagacccgcagggaggggaagagct

SEQ ID NO: 63342 - DNA, 25 bp, Canis familiaris
cagaccccagctgggtggtcaggtg

SEQ ID NO: 63343 - DNA, 25 bp, Canis familiaris
cagacaacaagtcggctgttcctgg

SEQ ID NO: 63344 - DNA, 25 bp, Canis familiaris
cagaaaccagttggccctggctact

SEQ ID NO: 63345 - DNA, 25 bp, Canis familiaris
cagaaagcgttgtgccgaggctgac

SEQ ID NO: 63346 - DNA, 25 bp, Canis familiaris
cagatacacggaggtgtcgggtgaa

SEQ ID NO: 63347 - DNA, 25 bp, Canis familiaris
cagtatcctggatatcgcgggtatc

SEQ ID NO: 63348 - DNA, 25 bp, Canis familiaris
caggtccgccacaattcgggaacaa

SEQ ID NO: 63349 - DNA, 25 bp, Canis familiaris
caggtccgccatattcgggaaagat

SEQ ID NO: 63350 - DNA, 25 bp, Canis familiaris
cagagcccggtaattgagtaaaact

SEQ ID NO: 63351 - DNA, 25 bp, Canis familiaris
cagaccaaactttttcacaaaccag

SEQ ID NO: 63352 - DNA, 25 bp, Canis familiaris
cagagccaaacctttacaacaacca

SEQ ID NO: 63353 - DNA, 25 bp, Canis familiaris
cagagcgaaagcatttgccaagaat

SEQ ID NO: 63354 - DNA, 25 bp, Canis familiaris
cagtttaagataattgcgctacaat

SEQ ID NO: 63355 - DNA, 25 bp, Canis familiaris
cagttatccaaagctgccatgaaag

SEQ ID NO: 63356 - DNA, 25 bp, Canis familiaris
cagttgcccaacactaaatctgcag

SEQ ID NO: 63357 - DNA, 25 bp, Canis familiaris
cagtcaccgccagagctaagactcc

SEQ ID NO: 63358 - DNA, 25 bp, Canis familiaris
cagaagacaccagagcagatgcaga

SEQ ID NO: 63359 - DNA, 25 bp, Canis familiaris
cagaagaaccagctgcaggccatgc

SEQ ID NO: 63360 - DNA, 25 bp, Canis familiaris
cagaagcaagcccaggctcgctatg

SEQ ID NO: 63361 - DNA, 25 bp, Canis familiaris
cagaggaaccgcaaccactatggac

SEQ ID NO: 63362 - DNA, 25 bp, Canis familiaris
cagaggaacttaacccagtggggtg

SEQ ID NO: 63363 - DNA, 25 bp, Canis familiaris
cagagggacctttagacacgggttg

SEQ ID NO: 63364 - DNA, 25 bp, Canis familiaris
cagacggatcggaatgccaacgggt

SEQ ID NO: 63365 - DNA, 25 bp, Canis familiaris
cagactggacggaagccaagggtcc

SEQ ID NO: 63366 - DNA, 25 bp, Canis familiaris
cagatcggacgtaagtctcagggtc

SEQ ID NO: 63367 - DNA, 25 bp, Canis familiaris
cagatctggaccagcctctgaaggt

SEQ ID NO: 63368 - DNA, 25 bp, Canis familiaris
cagatctgatgaccccctaatacag

SEQ ID NO: 63369 - DNA, 25 bp, Canis familiaris
cagatcctcagctccctgaaatatg

SEQ ID NO: 63370 - DNA, 25 bp, Canis familiaris
cagatccggctggcccagaaagaga

SEQ ID NO: 63371 - DNA, 25 bp, Canis familiaris
cagatctccatctcccaaaagaagt

SEQ ID NO: 63372 - DNA, 25 bp, Canis familiaris
cagatctcccattgcaggaattgga

SEQ ID NO: 63373 - DNA, 25 bp, Canis familiaris
cagaccccacaccagaagatgagaa

SEQ ID NO: 63374 - DNA, 25 bp, Canis familiaris
cagacaacccagccacaggaaggaa

SEQ ID NO: 63375 - DNA, 25 bp, Canis familiaris
cagtaacagccaccctggaggagaa

SEQ ID NO: 63376 - DNA, 25 bp, Canis familiaris
cagacatcaaacttgactgggaaga

SEQ ID NO: 63377 - DNA, 25 bp, Canis familiaris
cagacatcaatggcactcatctagt

SEQ ID NO: 63378 - DNA, 25 bp, Canis familiaris
cagaacaatgaccttctgcgtcgtc

SEQ ID NO: 63379 - DNA, 25 bp, Canis familiaris
cagaactatggtgttcctcgttgcc

SEQ ID NO: 63380 - DNA, 25 bp, Canis familiaris
cagaccttggtggttgtgtccttgt

SEQ ID NO: 63381 - DNA, 25 bp, Canis familiaris
cagaccaggatctgtcggtccctgg

SEQ ID NO: 63382 - DNA, 25 bp, Canis familiaris
cagaccaggatcttccgtcctggct

SEQ ID NO: 63383 - DNA, 25 bp, Canis familiaris
cagaccaggatcttccttcctggct

SEQ ID NO: 63384 - DNA, 25 bp, Canis familiaris
cagtgccaggtctttgttccttaaa

SEQ ID NO: 63385 - DNA, 25 bp, Canis familiaris
cagacggctgttgatgtttttagaa

SEQ ID NO: 63386 - DNA, 25 bp, Canis familiaris
cagatacctgaatagtttttgaacg

SEQ ID NO: 63387 - DNA, 25 bp, Canis familiaris
cagtccatcgaagagtccttggaac

SEQ ID NO: 63388 - DNA, 25 bp, Canis familiaris
cagtcacccaaggggccttgcgaaa

SEQ ID NO: 63389 - DNA, 25 bp, Canis familiaris
cagtcttcctagggtgtccggaaat

SEQ ID NO: 63390 - DNA, 25 bp, Canis familiaris
cagtcttacaggggcttctgggaaa

SEQ ID NO: 63391 - DNA, 25 bp, Canis familiaris
cagtcctacaccgttttttgacgat

SEQ ID NO: 63392 - DNA, 25 bp, Canis familiaris
cagaccccaatcttcttttcaggga

SEQ ID NO: 63393 - DNA, 25 bp, Canis familiaris
cagatccaccaaccaattttcaaaa

SEQ ID NO: 63394 - DNA, 25 bp, Canis familiaris
ctggcccccagtgttttataaactg

SEQ ID NO: 63395 - DNA, 25 bp, Canis familiaris
catccattccacctggttttataaa

SEQ ID NO: 63396 - DNA, 25 bp, Canis familiaris
cagtcactgtccaggcctgttaaaa

SEQ ID NO: 63397 - DNA, 25 bp, Canis familiaris
cagatttgccagagacctattcaga

SEQ ID NO: 63398 - DNA, 25 bp, Canis familiaris
cagactttcagaaatcttaaagcag

SEQ ID NO: 63399 - DNA, 25 bp, Canis familiaris
cagactctccaacttctgttcaatc

SEQ ID NO: 63400 - DNA, 25 bp, Canis familiaris
cagaactccaggctgttgtgtgatc

SEQ ID NO: 63401 - DNA, 25 bp, Canis familiaris
cagagatcctgcacttgttgggtca

SEQ ID NO: 63402 - DNA, 25 bp, Canis familiaris
cagaacctgatccttgttttcacat

SEQ ID NO: 63403 - DNA, 25 bp, Canis familiaris
cagaaatcatatgctacttgtttca

SEQ ID NO: 63404 - DNA, 25 bp, Canis familiaris
cagatctcacatagcaccgtctgat

SEQ ID NO: 63405 - DNA, 25 bp, Canis familiaris
cagacacagagacctggatcagatc

SEQ ID NO: 63406 - DNA, 25 bp, Canis familiaris
cagacacagagagcctggagtcaga

SEQ ID NO: 63407 - DNA, 25 bp, Canis familiaris
cagaagcagggcagctcctgtctgc

SEQ ID NO: 63408 - DNA, 25 bp, Canis familiaris
cagaacagggatggcacttggtgcg

SEQ ID NO: 63409 - DNA, 25 bp, Canis familiaris
cagaacatggtgacagaccgcctgg

SEQ ID NO: 63410 - DNA, 25 bp, Canis familiaris
cagaacatcctgacaagcctgtaca

SEQ ID NO: 63411 - DNA, 25 bp, Canis familiaris
cagaacatcacgtatcacctgcaag

SEQ ID NO: 63412 - DNA, 25 bp, Canis familiaris
cagacaccatcgtcagaaccttgga

SEQ ID NO: 63413 - DNA, 25 bp, Canis familiaris
cagagcaccacctgagtgcctgtta

SEQ ID NO: 63414 - DNA, 25 bp, Canis familiaris
cagactgccctcagaggggctctgg

SEQ ID NO: 63415 - DNA, 25 bp, Canis familiaris
cagactggcccttgagggcagcctg

SEQ ID NO: 63416 - DNA, 25 bp, Canis familiaris
cagaggggcgatagtgaggcacttg

SEQ ID NO: 63417 - DNA, 25 bp, Canis familiaris
cagagtgagcggcaggcgagcctgg

SEQ ID NO: 63418 - DNA, 25 bp, Canis familiaris
cagatgagccgacatactggcacgg

SEQ ID NO: 63419 - DNA, 25 bp, Canis familiaris
cagatatgccatttaactacagtga

SEQ ID NO: 63420 - DNA, 25 bp, Canis familiaris
cagacatgctgtttaatctccatac

SEQ ID NO: 63421 - DNA, 25 bp, Canis familiaris
cagaacatgaaatttctcccaccgc

SEQ ID NO: 63422 - DNA, 25 bp, Canis familiaris
cagacaagacagtgaactcccctgc

SEQ ID NO: 63423 - DNA, 25 bp, Canis familiaris
cagagcaagtttgagaccctccagg

SEQ ID NO: 63424 - DNA, 25 bp, Canis familiaris
cagagatatttgtggccacctctat

SEQ ID NO: 63425 - DNA, 25 bp, Canis familiaris
cagtatctatgttaggcccagctct

SEQ ID NO: 63426 - DNA, 25 bp, Canis familiaris
cagagtctagtctggcacttccttg

SEQ ID NO: 63427 - DNA, 25 bp, Canis familiaris
caggttaatttggtccccatctggt

SEQ ID NO: 63428 - DNA, 25 bp, Canis familiaris
cgcgggaatattctcccgacgtcct

SEQ ID NO: 63429 - DNA, 25 bp, Canis familiaris
ccgggagttccgattcgatctctcc

SEQ ID NO: 63430 - DNA, 25 bp, Canis familiaris
cagggaagctctccgactatttccc

SEQ ID NO: 63431 - DNA, 25 bp, Canis familiaris
cagagctaatcatcacacacttttt

SEQ ID NO: 63432 - DNA, 25 bp, Canis familiaris
cagagatgctctaacaccactgctt

SEQ ID NO: 63433 - DNA, 25 bp, Canis familiaris
cagacacttgattatctttgctatt

SEQ ID NO: 63434 - DNA, 25 bp, Canis familiaris
cagaacttcaagttgcctgcttctt

SEQ ID NO: 63435 - DNA, 25 bp, Canis familiaris
cagatattgtaatttccctttacgt

SEQ ID NO: 63436 - DNA, 25 bp, Canis familiaris
cagactggtagattttcccatttct

SEQ ID NO: 63437 - DNA, 25 bp, Canis familiaris
cagaccctacacgtgtttcatttgt

SEQ ID NO: 63438 - DNA, 25 bp, Canis familiaris
cagacatccgtgtcaattttttttt

SEQ ID NO: 63439 - DNA, 25 bp, Canis familiaris
cagacttgcagttgagacgtattgt

SEQ ID NO: 63440 - DNA, 25 bp, Canis familiaris
cagacattatcttggcagcgaatcc

SEQ ID NO: 63441 - DNA, 25 bp, Canis familiaris
cagacatatctggccaggcgaatcc

SEQ ID NO: 63442 - DNA, 25 bp, Canis familiaris
cagagcacatgcacgacaggacacc

SEQ ID NO: 63443 - DNA, 25 bp, Canis familiaris
cagagtgctctctgaaggatcacag

SEQ ID NO: 63444 - DNA, 25 bp, Canis familiaris
cagagatgcttcgaaaggcaaggag

SEQ ID NO: 63445 - DNA, 25 bp, Canis familiaris
cagagcattccggccaggaagagaa

SEQ ID NO: 63446 - DNA, 25 bp, Canis familiaris
cagagatacctggcctggtctggac

SEQ ID NO: 63447 - DNA, 25 bp, Canis familiaris
cagagagacctggccagaactggct

SEQ ID NO: 63448 - DNA, 25 bp, Canis familiaris
cagaaacccatctagagcactcctg

SEQ ID NO: 63449 - DNA, 25 bp, Canis familiaris
cagagctgaacgacagaacccctgc

SEQ ID NO: 63450 - DNA, 25 bp, Canis familiaris
cagagctgtggcacaaactcccacg

SEQ ID NO: 63451 - DNA, 25 bp, Canis familiaris
cagacggacagacagacatgcaaac

SEQ ID NO: 63452 - DNA, 25 bp, Canis familiaris
cagacggacagaaacacaaacacaa

SEQ ID NO: 63453 - DNA, 25 bp, Canis familiaris
cagaccaacaaagccaagcacgacg

SEQ ID NO: 63454 - DNA, 25 bp, Canis familiaris
cagacctcccaagcaagacctgggt

SEQ ID NO: 63455 - DNA, 25 bp, Canis familiaris
cagatcttcctccagtcaagacttg

SEQ ID NO: 63456 - DNA, 25 bp, Canis familiaris
cagttctcagtggagtacagccaag

SEQ ID NO: 63457 - DNA, 25 bp, Canis familiaris
cagagcttcgggagtccgaaggttc

SEQ ID NO: 63458 - DNA, 25 bp, Canis familiaris
cagacttcgtgggttgtcgtcaact

SEQ ID NO: 63459 - DNA, 25 bp, Canis familiaris
cagactgggtaggctgttctgtcct

SEQ ID NO: 63460 - DNA, 25 bp, Canis familiaris
cagactttctctggatgttgctcac

SEQ ID NO: 63461 - DNA, 25 bp, Canis familiaris
cagatatttgtctctttcaactcaa

SEQ ID NO: 63462 - DNA, 25 bp, Canis familiaris
cagtcattttcagatttcctaccac

SEQ ID NO: 63463 - DNA, 25 bp, Canis familiaris
cagtcctataccgatatctggctat

SEQ ID NO: 63464 - DNA, 25 bp, Canis familiaris
cagacctcaggccaggactgtgttt

SEQ ID NO: 63465 - DNA, 25 bp, Canis familiaris
cagagcctggtgcctggttttgtat

SEQ ID NO: 63466 - DNA, 25 bp, Canis familiaris
cagagcctggtgcctggttttgtat

SEQ ID NO: 63467 - DNA, 25 bp, Canis familiaris
cagagcccaatccgagtttcgatct

SEQ ID NO: 63468 - DNA, 25 bp, Canis familiaris
cagagtcctactcaggtggctgatt

SEQ ID NO: 63469 - DNA, 25 bp, Canis familiaris
cagagttccatccaactggagtgat

SEQ ID NO: 63470 - DNA, 25 bp, Canis familiaris
cagaccccatcacacctaatatgtc

SEQ ID NO: 63471 - DNA, 25 bp, Canis familiaris
cagactaccatatcccgatagagtc

SEQ ID NO: 63472 - DNA, 25 bp, Canis familiaris
cagatccaccacaccaaatgaagct

SEQ ID NO: 63473 - DNA, 25 bp, Canis familiaris
cagatacccattaaagagtgacccc

SEQ ID NO: 63474 - DNA, 25 bp, Canis familiaris
cagacccctgtatggtgtaccagac

SEQ ID NO: 63475 - DNA, 25 bp, Canis familiaris
cggcccctgtatttttacatctacg

SEQ ID NO: 63476 - DNA, 25 bp, Canis familiaris
cggtacttttactctcaaccatcga

SEQ ID NO: 63477 - DNA, 25 bp, Canis familiaris
ctggaacttcttgctgttttcctgg

SEQ ID NO: 63478 - DNA, 25 bp, Canis familiaris
cgaaggtttgctgcggttgacttgg

SEQ ID NO: 63479 - DNA, 25 bp, Canis familiaris
tcggggtttaccagtttcattcgag

SEQ ID NO: 63480 - DNA, 25 bp, Canis familiaris
cagggggttacctgatattacttct

SEQ ID NO: 63481 - DNA, 25 bp, Canis familiaris
cggagggttggataatggtggtttg

SEQ ID NO: 63482 - DNA, 25 bp, Canis familiaris
cagaggggaaaatactggtagtctt

SEQ ID NO: 63483 - DNA, 25 bp, Canis familiaris
cagatggggaactaaagtcgcctgt

SEQ ID NO: 63484 - DNA, 25 bp, Canis familiaris
cagaggaggaacttaagccccaagc

SEQ ID NO: 63485 - DNA, 25 bp, Canis familiaris
cttggaaaaccttggcgaccgagct

SEQ ID NO: 63486 - DNA, 25 bp, Canis familiaris
cagggaggaaccgggcagtgggact

SEQ ID NO: 63487 - DNA, 25 bp, Canis familiaris
cagagggcgtagaggccagggctcc

SEQ ID NO: 63488 - DNA, 25 bp, Canis familiaris
cagaggtgtcggagagccagggccg

SEQ ID NO: 63489 - DNA, 25 bp, Canis familiaris
cagagagtgagcccaaggccaggcc

SEQ ID NO: 63490 - DNA, 25 bp, Canis familiaris
cagaggatggagagcgcgctggacc

SEQ ID NO: 63491 - DNA, 25 bp, Canis familiaris
catagggtgagtaaccttgacccct

SEQ ID NO: 63492 - DNA, 25 bp, Canis familiaris
cagatgagggggagtttctcccttt

SEQ ID NO: 63493 - DNA, 25 bp, Canis familiaris
cagtagacaaggtctttcttctttt

SEQ ID NO: 63494 - DNA, 25 bp, Canis familiaris
caggaacatacttattttctcctta

SEQ ID NO: 63495 - DNA, 25 bp, Canis familiaris
cagataacaacttctttttccttga

SEQ ID NO: 63496 - DNA, 25 bp, Canis familiaris
cagacaacaatcaagcttttccagg

SEQ ID NO: 63497 - DNA, 25 bp, Canis familiaris
cagaaaccttacagatcatgcaagt

SEQ ID NO: 63498 - DNA, 25 bp, Canis familiaris
caggtcccttcactttagtagttag

SEQ ID NO: 63499 - DNA, 25 bp, Canis familiaris
cagttccctttttaggtcactgttg

SEQ ID NO: 63500 - DNA, 25 bp, Canis familiaris
cagttaccttttttcttaatgtcag

SEQ ID NO: 63501 - DNA, 25 bp, Canis familiaris
cagataatctctctttttttagaac

SEQ ID NO: 63502 - DNA, 25 bp, Canis familiaris
cagtttcccttttcttttggtgatg

SEQ ID NO: 63503 - DNA, 25 bp, Canis familiaris
cagtttctcaacttactactattta

SEQ ID NO: 63504 - DNA, 25 bp, Canis familiaris
cagttgttcatttctccaacctttg

SEQ ID NO: 63505 - DNA, 25 bp, Canis familiaris
gaatttttacctgatgaccaatggc

SEQ ID NO: 63506 - DNA, 25 bp, Canis familiaris
cattatttaacagtggtcccctggg

SEQ ID NO: 63507 - DNA, 25 bp, Canis familiaris
cagttactgaaaggagtctctcttg

SEQ ID NO: 63508 - DNA, 25 bp, Canis familiaris
cagatctacaagccacgggttttac

SEQ ID NO: 63509 - DNA, 25 bp, Canis familiaris
cagtcataatcccacagatggtaag

SEQ ID NO: 63510 - DNA, 25 bp, Canis familiaris
cagagctacagcctcacatgctggc

SEQ ID NO: 63511 - DNA, 25 bp, Canis familiaris
cagaccatgagcacagatcaagctt

SEQ ID NO: 63512 - DNA, 25 bp, Canis familiaris
cagttctgcagttccatcacagtgt

SEQ ID NO: 63513 - DNA, 25 bp, Canis familiaris
cagttctctgttcccaatgataacc

SEQ ID NO: 63514 - DNA, 25 bp, Canis familiaris
cagatagctcatgtgcccatatgca

SEQ ID NO: 63515 - DNA, 25 bp, Canis familiaris
cagtcagcatcacctgcctgataaa

SEQ ID NO: 63516 - DNA, 25 bp, Canis familiaris
cagacagcaccatgatcgacacaaa

SEQ ID NO: 63517 - DNA, 25 bp, Canis familiaris
cagagaccctgacgagatcatgcaa

SEQ ID NO: 63518 - DNA, 25 bp, Canis familiaris
cagagacacctacagacgaagcgct

SEQ ID NO: 63519 - DNA, 25 bp, Canis familiaris
cagacacctcaagaaggacggctgc

SEQ ID NO: 63520 - DNA, 25 bp, Canis familiaris
cagaccatccaagaaggacagcgca

SEQ ID NO: 63521 - DNA, 25 bp, Canis familiaris
cagatcctccgagtcaagggaccga

SEQ ID NO: 63522 - DNA, 25 bp, Canis familiaris
cagacccctgcccaaggggaagact

SEQ ID NO: 63523 - DNA, 25 bp, Canis familiaris
cagacctccgggtgcgggataggac

SEQ ID NO: 63524 - DNA, 25 bp, Canis familiaris
cagaccccatggtacccagaaagag

SEQ ID NO: 63525 - DNA, 25 bp, Canis familiaris
cagacatcccaaaacaccagacaaa

SEQ ID NO: 63526 - DNA, 25 bp, Canis familiaris
cagattctgcacaaacacccagcaa

SEQ ID NO: 63527 - DNA, 25 bp, Canis familiaris
cagacactgcaaaacccacaggctg

SEQ ID NO: 63528 - DNA, 25 bp, Canis familiaris
cagacactcagagggacaccggctg

SEQ ID NO: 63529 - DNA, 25 bp, Canis familiaris
cagatgactaggtgacctgctgcac

SEQ ID NO: 63530 - DNA, 25 bp, Canis familiaris
cagtgactcagttgactgctcctac

SEQ ID NO: 63531 - DNA, 25 bp, Canis familiaris
cagtatatggggccagctaccactc

SEQ ID NO: 63532 - DNA, 25 bp, Canis familiaris
cagagatgagtgctcacctaccacc

SEQ ID NO: 63533 - DNA, 25 bp, Canis familiaris
cagagatagctattgcccagacctc

SEQ ID NO: 63534 - DNA, 25 bp, Canis familiaris
cagagtgagcctggcctctgagttc

SEQ ID NO: 63535 - DNA, 25 bp, Canis familiaris
cagaggtggctggagctctgttctc

SEQ ID NO: 63536 - DNA, 25 bp, Canis familiaris
cagacgtgtgcccacaggttgtgtg

SEQ ID NO: 63537 - DNA, 25 bp, Canis familiaris
cagacctcgctcttcaggaagtggt

SEQ ID NO: 63538 - DNA, 25 bp, Canis familiaris
cagactttcctttgggagctgctgt

SEQ ID NO: 63539 - DNA, 25 bp, Canis familiaris
cagactttgccttttgtcaaggttg

SEQ ID NO: 63540 - DNA, 25 bp, Canis familiaris
cagactactcctcttgtgaagtgaa

SEQ ID NO: 63541 - DNA, 25 bp, Canis familiaris
cagagtaattctttgtggacagtga

SEQ ID NO: 63542 - DNA, 25 bp, Canis familiaris
cagagcaagttttgttgggcgaatt

SEQ ID NO: 63543 - DNA, 25 bp, Canis familiaris
cagtaatgtcttttgcattgggaaa

SEQ ID NO: 63544 - DNA, 25 bp, Canis familiaris
caggcaagattagctgctttagtaa

SEQ ID NO: 63545 - DNA, 25 bp, Canis familiaris
caggtgagatttcccttcaaaagcc

SEQ ID NO: 63546 - DNA, 25 bp, Canis familiaris
caggaagaatgatgccttagaaaga

SEQ ID NO: 63547 - DNA, 25 bp, Canis familiaris
cagtccaataaagtctttgaactgc

SEQ ID NO: 63548 - DNA, 25 bp, Canis familiaris
cagatcaaacctggagcttttacgc

SEQ ID NO: 63549 - DNA, 25 bp, Canis familiaris
cagatcaacaccgaggccgtggagc

SEQ ID NO: 63550 - DNA, 25 bp, Canis familiaris
cagacattcactcatggtcggggcc

SEQ ID NO: 63551 - DNA, 25 bp, Canis familiaris
cagagatctacggggtcaggaccac

SEQ ID NO: 63552 - DNA, 25 bp, Canis familiaris
cagagcttggcgggcttgaaacctc

SEQ ID NO: 63553 - DNA, 25 bp, Canis familiaris
cagaccaggcttggttgatggaccc

SEQ ID NO: 63554 - DNA, 25 bp, Canis familiaris
cagacctgagctccggatctgagag

SEQ ID NO: 63555 - DNA, 25 bp, Canis familiaris
cagacccagctgtgtgtgcaggagg

SEQ ID NO: 63556 - DNA, 25 bp, Canis familiaris
cagacaccatgcagaggtcgtgggg

SEQ ID NO: 63557 - DNA, 25 bp, Canis familiaris
cagagcccatctaaggcgttggtgg

SEQ ID NO: 63558 - DNA, 25 bp, Canis familiaris
cagaggctgctttgttgcgttttgt

SEQ ID NO: 63559 - DNA, 25 bp, Canis familiaris
cagagaccttgctctgctttttttt

SEQ ID NO: 63560 - DNA, 25 bp, Canis familiaris
cagacatccttctctatatctttgt

SEQ ID NO: 63561 - DNA, 25 bp, Canis familiaris
cagacccgtctgttaatgcacctgt

SEQ ID NO: 63562 - DNA, 25 bp, Canis familiaris
cagacgtcgtgatctcgacagcctg

SEQ ID NO: 63563 - DNA, 25 bp, Canis familiaris
cagacccgcaaattctgtctgcctg

SEQ ID NO: 63564 - DNA, 25 bp, Canis familiaris
cagagcatccagcgcaacatgtctg

SEQ ID NO: 63565 - DNA, 25 bp, Canis familiaris
cagatgtgccatccgcatagtgctt

SEQ ID NO: 63566 - DNA, 25 bp, Canis familiaris
cagagctgccatcttgggctgttga

SEQ ID NO: 63567 - DNA, 25 bp, Canis familiaris
cagagctgaagcaggtggcttacat

SEQ ID NO: 63568 - DNA, 25 bp, Canis familiaris
cagagatgaagctttctgcctacac

SEQ ID NO: 63569 - DNA, 25 bp, Canis familiaris
cagagaaaatgtggcacagcatacc

SEQ ID NO: 63570 - DNA, 25 bp, Canis familiaris
cagagaaacttccaagtcccatggg

SEQ ID NO: 63571 - DNA, 25 bp, Canis familiaris
cagacagtcactttaattccaggag

SEQ ID NO: 63572 - DNA, 25 bp, Canis familiaris
cagatagtactgaccaatcccaaca

SEQ ID NO: 63573 - DNA, 25 bp, Canis familiaris
cagtcactcctgataaactaaattt

SEQ ID NO: 63574 - DNA, 25 bp, Canis familiaris
cagtcgcccttgagcaatttttttg

SEQ ID NO: 63575 - DNA, 25 bp, Canis familiaris
cagtccccaggtaaaggcttatatt

SEQ ID NO: 63576 - DNA, 25 bp, Canis familiaris
cagacccctgggaagaacgtgattt

SEQ ID NO: 63577 - DNA, 25 bp, Canis familiaris
cagtagtccttgtttggactggttt

SEQ ID NO: 63578 - DNA, 25 bp, Canis familiaris
cagtaatttctataggcaccgcttt

SEQ ID NO: 63579 - DNA, 25 bp, Canis familiaris
cagagaacattcccaaggcacctct

SEQ ID NO: 63580 - DNA, 25 bp, Canis familiaris
cagagcccatggcgacaggacactt

SEQ ID NO: 63581 - DNA, 25 bp, Canis familiaris
cagagagcctggagtcagagaccca

SEQ ID NO: 63582 - DNA, 25 bp, Canis familiaris
cagagagcccaaggtcaagacgcaa

SEQ ID NO: 63583 - DNA, 25 bp, Canis familiaris
cagagaccgaggggagacagcgcac

SEQ ID NO: 63584 - DNA, 25 bp, Canis familiaris
cagaggccgggtggcagactggcca

SEQ ID NO: 63585 - DNA, 25 bp, Canis familiaris
cagagaccattgggggctgtggcca

SEQ ID NO: 63586 - DNA, 25 bp, Canis familiaris
cagagcccttcggaggggccatcat

SEQ ID NO: 63587 - DNA, 25 bp, Canis familiaris
cagacggttgctgtgggtgtcatca

SEQ ID NO: 63588 - DNA, 25 bp, Canis familiaris
cagacggttgctgtgggtgtcatca

SEQ ID NO: 63589 - DNA, 25 bp, Canis familiaris
cagagcaggtgtcttggctgggcat

SEQ ID NO: 63590 - DNA, 25 bp, Canis familiaris
cagagccagtgaattagctgtgggc

SEQ ID NO: 63591 - DNA, 25 bp, Canis familiaris
cagagtgggaacagcttgaggagtt

SEQ ID NO: 63592 - DNA, 25 bp, Canis familiaris
cagaggccggaaacttactggtgtg

SEQ ID NO: 63593 - DNA, 25 bp, Canis familiaris
cagagcccctggctcttttggtgtt

SEQ ID NO: 63594 - DNA, 25 bp, Canis familiaris
cagaccaactgactgctgttttgca

SEQ ID NO: 63595 - DNA, 25 bp, Canis familiaris
cagagctgagacgattgtgttattt

SEQ ID NO: 63596 - DNA, 25 bp, Canis familiaris
cagagctgggaggttttattttcca

SEQ ID NO: 63597 - DNA, 25 bp, Canis familiaris
cagttgaggaggttgtattttccct

SEQ ID NO: 63598 - DNA, 25 bp, Canis familiaris
catttgggaggctcttacttacctc

SEQ ID NO: 63599 - DNA, 25 bp, Canis familiaris
gctctgggtaacacaggactttcct

SEQ ID NO: 63600 - DNA, 25 bp, Canis familiaris
cagtggggctccactggactttctc

SEQ ID NO: 63601 - DNA, 25 bp, Canis familiaris
catagcggacctgtcggactttcgc

SEQ ID NO: 63602 - DNA, 25 bp, Canis familiaris
cagagggacctgtgggagccaaccc

SEQ ID NO: 63603 - DNA, 25 bp, Canis familiaris
cagagtaaagttagtgtggccccca

SEQ ID NO: 63604 - DNA, 25 bp, Canis familiaris
cagagtaaactctctgtcagtcccc

SEQ ID NO: 63605 - DNA, 25 bp, Canis familiaris
cagacttaatctcttctcaggtcca

SEQ ID NO: 63606 - DNA, 25 bp, Canis familiaris
cagactaaatcttttccctgcagcc

SEQ ID NO: 63607 - DNA, 25 bp, Canis familiaris
caggtagagtcttttcctctgaaaa

SEQ ID NO: 63608 - DNA, 25 bp, Canis familiaris
cagagagagtctctttccatcgtca

SEQ ID NO: 63609 - DNA, 25 bp, Canis familiaris
cagagcgtgttgcaggacaatccta

SEQ ID NO: 63610 - DNA, 25 bp, Canis familiaris
cagacgagaggctaggcagactcct

SEQ ID NO: 63611 - DNA, 25 bp, Canis familiaris
cagactgcagaggcgactcaagccc

SEQ ID NO: 63612 - DNA, 25 bp, Canis familiaris
cagactcacagcggattccagagcc

SEQ ID NO: 63613 - DNA, 25 bp, Canis familiaris
cagagacatcatcaaaccagaccca

SEQ ID NO: 63614 - DNA, 25 bp, Canis familiaris
cagaccatctggccaactgagacct

SEQ ID NO: 63615 - DNA, 25 bp, Canis familiaris
cagactttaccacctgaaacttgct

SEQ ID NO: 63616 - DNA, 25 bp, Canis familiaris
cagagctttactccttaacagattg

SEQ ID NO: 63617 - DNA, 25 bp, Canis familiaris
cagagcttttgaagttacacagttc

SEQ ID NO: 63618 - DNA, 25 bp, Canis familiaris
cagactttggatctttgcacttgcc

SEQ ID NO: 63619 - DNA, 25 bp, Canis familiaris
cagactttaacagtgggccaagccc

SEQ ID NO: 63620 - DNA, 25 bp, Canis familiaris
cagactctgggaggctgggccaggc

SEQ ID NO: 63621 - DNA, 25 bp, Canis familiaris
cagatgctcaaggagggggcgaagc

SEQ ID NO: 63622 - DNA, 25 bp, Canis familiaris
cagagcacagagtcggcgggagaag

SEQ ID NO: 63623 - DNA, 25 bp, Canis familiaris
cagagaagacatccgcaagggagag

SEQ ID NO: 63624 - DNA, 25 bp, Canis familiaris
cagagaagacagacggccagggaga

SEQ ID NO: 63625 - DNA, 25 bp, Canis familiaris
cagagagaggagaccccaagcgcta

SEQ ID NO: 63626 - DNA, 25 bp, Canis familiaris
cagagatggtagttcccagaggccc

SEQ ID NO: 63627 - DNA, 25 bp, Canis familiaris
cagttcttagttaccaatgtggccc

SEQ ID NO: 63628 - DNA, 25 bp, Canis familiaris
cagttttaacttctgagtgcctcct

SEQ ID NO: 63629 - DNA, 25 bp, Canis familiaris
cagttttaacacaggggctttctgg

SEQ ID NO: 63630 - DNA, 25 bp, Canis familiaris
cagtttttctacaagtgggatcctc

SEQ ID NO: 63631 - DNA, 25 bp, Canis familiaris
cagttttccttttgtgcactgtcct

SEQ ID NO: 63632 - DNA, 25 bp, Canis familiaris
cagtttagcttaatttgcctaagta

SEQ ID NO: 63633 - DNA, 25 bp, Canis familiaris
cagatgttagccaattttcctctcc

SEQ ID NO: 63634 - DNA, 25 bp, Canis familiaris
cagaggtagcctttggtggctctgc

SEQ ID NO: 63635 - DNA, 25 bp, Canis familiaris
cagaggctgagcatgtgggggtctc

SEQ ID NO: 63636 - DNA, 25 bp, Canis familiaris
cagacctacttgctgtgggtgctgc

SEQ ID NO: 63637 - DNA, 25 bp, Canis familiaris
cagtcttacacgcatttggtctcgt

SEQ ID NO: 63638 - DNA, 25 bp, Canis familiaris
cagtcactcaaccgactgggtcacc

SEQ ID NO: 63639 - DNA, 25 bp, Canis familiaris
cagacgaggagccggtggagtcccg

SEQ ID NO: 63640 - DNA, 25 bp, Canis familiaris
cagagccaggagctgcaggaggtcc

SEQ ID NO: 63641 - DNA, 25 bp, Canis familiaris
cagaggcggtgcgcatggaagctgc

SEQ ID NO: 63642 - DNA, 25 bp, Canis familiaris
cagagacgggcaccgagcatggctg

SEQ ID NO: 63643 - DNA, 25 bp, Canis familiaris
cagagacctgcgtgcgcagctgtgc

SEQ ID NO: 63644 - DNA, 25 bp, Canis familiaris
cagatacctgcctgcaagtggggac

SEQ ID NO: 63645 - DNA, 25 bp, Canis familiaris
cagacccacagctacaaggttggaa

SEQ ID NO: 63646 - DNA, 25 bp, Canis familiaris
cagacctacgaggcctggttgggcc

SEQ ID NO: 63647 - DNA, 25 bp, Canis familiaris
cagacctactgggcatctggtcctg

SEQ ID NO: 63648 - DNA, 25 bp, Canis familiaris
cagagactgggggactgtggcctgg

SEQ ID NO: 63649 - DNA, 25 bp, Canis familiaris
cagatgggaggtgaagctgagctct

SEQ ID NO: 63650 - DNA, 25 bp, Canis familiaris
cagatgtggatcagcaagcaggagt

SEQ ID NO: 63651 - DNA, 25 bp, Canis familiaris
cagatggtgtctggagggcgcatgc

SEQ ID NO: 63652 - DNA, 25 bp, Canis familiaris
cagagatggtgcggcatgcgctcga

SEQ ID NO: 63653 - DNA, 25 bp, Canis familiaris
cagagatgcgtgtgttgtctccttc

SEQ ID NO: 63654 - DNA, 25 bp, Canis familiaris
cagagaaggggtattcccgtcaggc

SEQ ID NO: 63655 - DNA, 25 bp, Canis familiaris
caggagaggggtctgccaaggtgca

SEQ ID NO: 63656 - DNA, 25 bp, Canis familiaris
cagaggattggggaccactagggat

SEQ ID NO: 63657 - DNA, 25 bp, Canis familiaris
cagagagaaggcagcagccccaggg

SEQ ID NO: 63658 - DNA, 25 bp, Canis familiaris
cagttcacacattcagtgctctctc

SEQ ID NO: 63659 - DNA, 25 bp, Canis familiaris
cagtcagcacatctgctgttcctct

SEQ ID NO: 63660 - DNA, 25 bp, Canis familiaris
cagatgagcaacttgctgcactccc

SEQ ID NO: 63661 - DNA, 25 bp, Canis familiaris
cagagagccacttgtgacttgtccc

SEQ ID NO: 63662 - DNA, 25 bp, Canis familiaris
cagaggccacaggtggggtgcccat

SEQ ID NO: 63663 - DNA, 25 bp, Canis familiaris
cagagcttactgaggggtgcaccaa

SEQ ID NO: 63664 - DNA, 25 bp, Canis familiaris
cagagccttctgaggacattccaag

SEQ ID NO: 63665 - DNA, 25 bp, Canis familiaris
cagagacctctgagcttctatcaca

SEQ ID NO: 63666 - DNA, 25 bp, Canis familiaris
caggaccctgggatcatgacctgag

SEQ ID NO: 63667 - DNA, 25 bp, Canis familiaris
caggttcctgggcaaaatcgagtag

SEQ ID NO: 63668 - DNA, 25 bp, Canis familiaris
cagattgtatcggggaacctccgta

SEQ ID NO: 63669 - DNA, 25 bp, Canis familiaris
cagttcttccagggaccaatcccta

SEQ ID NO: 63670 - DNA, 25 bp, Canis familiaris
cagttttcccatggaaatcagacag

SEQ ID NO: 63671 - DNA, 25 bp, Canis familiaris
cagttttggctacggcaatcccgag

SEQ ID NO: 63672 - DNA, 25 bp, Canis familiaris
cagttttgcgcatgacagcgtcacc

SEQ ID NO: 63673 - DNA, 25 bp, Canis familiaris
cagttccggaactgcatgatcacca

SEQ ID NO: 63674 - DNA, 25 bp, Canis familiaris
cagttctctggatcccaaagccaaa

SEQ ID NO: 63675 - DNA, 25 bp, Canis familiaris
cagttctcttgttcaaacccgaaat

SEQ ID NO: 63676 - DNA, 25 bp, Canis familiaris
cagttttctttctcaccttgaatat

SEQ ID NO: 63677 - DNA, 25 bp, Canis familiaris
cagatatttttgtttcctgtgtaaa

SEQ ID NO: 63678 - DNA, 25 bp, Canis familiaris
cagtatcctttgcttaatattaagt

SEQ ID NO: 63679 - DNA, 25 bp, Canis familiaris
cagtttcgttcagttaagtcgaact

SEQ ID NO: 63680 - DNA, 25 bp, Canis familiaris
cagtctatgcgtgcaggtcacgatc

SEQ ID NO: 63681 - DNA, 25 bp, Canis familiaris
cagtcaagcaaagagccacgtccgg

SEQ ID NO: 63682 - DNA, 25 bp, Canis familiaris
cagtcaaatcaagaggagagtccta

SEQ ID NO: 63683 - DNA, 25 bp, Canis familiaris
cagttaatccagaataatcgtccta

SEQ ID NO: 63684 - DNA, 25 bp, Canis familiaris
cagttgaggcacgtgaacctgtccg

SEQ ID NO: 63685 - DNA, 25 bp, Canis familiaris
cagagtaggagcctatcccttcttt

SEQ ID NO: 63686 - DNA, 25 bp, Canis familiaris
cagttaggtcaattccaccactctg

SEQ ID NO: 63687 - DNA, 25 bp, Canis familiaris
cagagtagggtccccactgactctg

SEQ ID NO: 63688 - DNA, 25 bp, Canis familiaris
cagagtgggtgtgtccacagccgtg

SEQ ID NO: 63689 - DNA, 25 bp, Canis familiaris
cagagaggagcctgtggacagccgg

SEQ ID NO: 63690 - DNA, 25 bp, Canis familiaris
cagagggtgaaggctgcgactgcgg

SEQ ID NO: 63691 - DNA, 25 bp, Canis familiaris
cagagcgggaaccggacgatgcgcg

SEQ ID NO: 63692 - DNA, 25 bp, Canis familiaris
cagaccgaagacctgggaactgggg

SEQ ID NO: 63693 - DNA, 25 bp, Canis familiaris
cagatccttggactggtggaaatgg

SEQ ID NO: 63694 - DNA, 25 bp, Canis familiaris
cagagcctttgcacaggtgccaagg

SEQ ID NO: 63695 - DNA, 25 bp, Canis familiaris
cagacctcttgccaccttggcaagg

SEQ ID NO: 63696 - DNA, 25 bp, Canis familiaris
cagtcctttgccaactgcggcaagt

SEQ ID NO: 63697 - DNA, 25 bp, Canis familiaris
cagtacctgccccacaagtgcaggc

SEQ ID NO: 63698 - DNA, 25 bp, Canis familiaris
cagtcaccaggtggcagcaaggcct

SEQ ID NO: 63699 - DNA, 25 bp, Canis familiaris
cagtccctgtgggtgaagtcctgca

SEQ ID NO: 63700 - DNA, 25 bp, Canis familiaris
cagtccctgggtacatagccccagc

SEQ ID NO: 63701 - DNA, 25 bp, Canis familiaris
cagtactcagggttgttccaccaga

SEQ ID NO: 63702 - DNA, 25 bp, Canis familiaris
cagagaataggcatcggacccgaga

SEQ ID NO: 63703 - DNA, 25 bp, Canis familiaris
cagagaaagccttttggcccaagaa

SEQ ID NO: 63704 - DNA, 25 bp, Canis familiaris
cagagagacacttcattctggccca

SEQ ID NO: 63705 - DNA, 25 bp, Canis familiaris
cagagattactcgattcgtgcccac

SEQ ID NO: 63706 - DNA, 25 bp, Canis familiaris
cagagggaagcgttcttgcccactg

SEQ ID NO: 63707 - DNA, 25 bp, Canis familiaris
cagagaagagaccggggccgcagct

SEQ ID NO: 63708 - DNA, 25 bp, Canis familiaris
cagagcctagaacagggcccagcac

SEQ ID NO: 63709 - DNA, 25 bp, Canis familiaris
cagaggttgatcttccggcaacagc

SEQ ID NO: 63710 - DNA, 25 bp, Canis familiaris
cagagtatctctttgacaagcacac

SEQ ID NO: 63711 - DNA, 25 bp, Canis familiaris
cagatgctttcatttacacagatat

SEQ ID NO: 63712 - DNA, 25 bp, Canis familiaris
cagatggtattcttcagactataga

SEQ ID NO: 63713 - DNA, 25 bp, Canis familiaris
cagaggacactcgcatatccaggtg

SEQ ID NO: 63714 - DNA, 25 bp, Canis familiaris
caggatgtccggcaaccaggaccaa

SEQ ID NO: 63715 - DNA, 25 bp, Canis familiaris
caggtgattcaacacccgcaactgc

SEQ ID NO: 63716 - DNA, 25 bp, Canis familiaris
cagtctgtctaaaaaccagcccgct

SEQ ID NO: 63717 - DNA, 25 bp, Canis familiaris
cagtttaagatccaacactaccttc

SEQ ID NO: 63718 - DNA, 25 bp, Canis familiaris
cattaaaactgcaaaacaatctgtt

SEQ ID NO: 63719 - DNA, 25 bp, Canis familiaris
cttgaaaacgccttgcaaacttgga

SEQ ID NO: 63720 - DNA, 25 bp, Canis familiaris
cagtaaaatcccctgtaattgtgta

SEQ ID NO: 63721 - DNA, 25 bp, Canis familiaris
cagtaaattaccgtgctgtcctggc

SEQ ID NO: 63722 - DNA, 25 bp, Canis familiaris
cagtaaattactgttcccaatgaaa

SEQ ID NO: 63723 - DNA, 25 bp, Canis familiaris
cagtatacttacttttgcctgtgta

SEQ ID NO: 63724 - DNA, 25 bp, Canis familiaris
cagtatacgtttatccctttgaaag

SEQ ID NO: 63725 - DNA, 25 bp, Canis familiaris
cagtaacgattctagtcctttcttt

SEQ ID NO: 63726 - DNA, 25 bp, Canis familiaris
cagatacctgtgaactgtcctttcc

SEQ ID NO: 63727 - DNA, 25 bp, Canis familiaris
cagagtcactgtaccattcttttcc

SEQ ID NO: 63728 - DNA, 25 bp, Canis familiaris
cagggccttacccttatggtgacct

SEQ ID NO: 63729 - DNA, 25 bp, Canis familiaris
cagtacctcatagtccttcgtgtac

SEQ ID NO: 63730 - DNA, 25 bp, Canis familiaris
cagtagttatagcccagacgttaat

SEQ ID NO: 63731 - DNA, 25 bp, Canis familiaris
cagatggcttactcaaacctattga

SEQ ID NO: 63732 - DNA, 25 bp, Canis familiaris
cagacctcttcacatagacctatta

SEQ ID NO: 63733 - DNA, 25 bp, Canis familiaris
cagacctcgtgctgacagcaccgct

SEQ ID NO: 63734 - DNA, 25 bp, Canis familiaris
catgacccgtgctggccacgggagc

SEQ ID NO: 63735 - DNA, 25 bp, Canis familiaris
cagagcaccggctgaccaagatgga

SEQ ID NO: 63736 - DNA, 25 bp, Canis familiaris
cagagcccggattccagacaatgga

SEQ ID NO: 63737 - DNA, 25 bp, Canis familiaris
cagagcctcacgttcagcaatagtg

SEQ ID NO: 63738 - DNA, 25 bp, Canis familiaris
catgtggccacatatcctgtagatg

SEQ ID NO: 63739 - DNA, 25 bp, Canis familiaris
cagaggcaacaaatgccctagcatg

SEQ ID NO: 63740 - DNA, 25 bp, Canis familiaris
cagaggcataccaatgccctagcta

SEQ ID NO: 63741 - DNA, 25 bp, Canis familiaris
cagaggctcatctttgcaggcaagc

SEQ ID NO: 63742 - DNA, 25 bp, Canis familiaris
cagaggctcatctttgcaggcaagc

SEQ ID NO: 63743 - DNA, 25 bp, Canis familiaris
cagaggcatataactgaggcgtgcc

SEQ ID NO: 63744 - DNA, 25 bp, Canis familiaris
cagagaacatcactctgggcccatc

SEQ ID NO: 63745 - DNA, 25 bp, Canis familiaris
cagagaacatcatctgggcccatct

SEQ ID NO: 63746 - DNA, 25 bp, Canis familiaris
cagagaacatcatctgggcccatct

SEQ ID NO: 63747 - DNA, 25 bp, Canis familiaris
cagagatcaaggctgaggctcctct

SEQ ID NO: 63748 - DNA, 25 bp, Canis familiaris
cagagagctagcagtgcttctcctc

SEQ ID NO: 63749 - DNA, 25 bp, Canis familiaris
cagatgcactgacacatgtacccac

SEQ ID NO: 63750 - DNA, 25 bp, Canis familiaris
cagatgcagctagcctttgcggcag

SEQ ID NO: 63751 - DNA, 25 bp, Canis familiaris
cagagctctgggacatgcttctggc

SEQ ID NO: 63752 - DNA, 25 bp, Canis familiaris
cagagtctgaggtcactgctgctgg

SEQ ID NO: 63753 - DNA, 25 bp, Canis familiaris
cagatggcatggttgcactcctgga

SEQ ID NO: 63754 - DNA, 25 bp, Canis familiaris
cagtgattggcagcagccttgatga

SEQ ID NO: 63755 - DNA, 25 bp, Canis familiaris
cagtgctgtagcacagactcggaag

SEQ ID NO: 63756 - DNA, 25 bp, Canis familiaris
cagatctgtcttcggaccaggtaga

SEQ ID NO: 63757 - DNA, 25 bp, Canis familiaris
cagatttctatccaggccagatcaa

SEQ ID NO: 63758 - DNA, 25 bp, Canis familiaris
cagagtcttctcttgtgagcagaaa

SEQ ID NO: 63759 - DNA, 25 bp, Canis familiaris
cagggcattctctgtacgaatttgt

SEQ ID NO: 63760 - DNA, 25 bp, Canis familiaris
caggtcattccgttcaagttcttgt

SEQ ID NO: 63761 - DNA, 25 bp, Canis familiaris
cagttccctcggcaagtgtttggat

SEQ ID NO: 63762 - DNA, 25 bp, Canis familiaris
cagtcatttttgcgggtgcttcttg

SEQ ID NO: 63763 - DNA, 25 bp, Canis familiaris
cagtttgctatttatggttgttttc

SEQ ID NO: 63764 - DNA, 25 bp, Canis familiaris
cagtttctgaaaagtgggttcccat

SEQ ID NO: 63765 - DNA, 25 bp, Canis familiaris
cagtttaatattttggcgccccctg

SEQ ID NO: 63766 - DNA, 25 bp, Canis familiaris
cagtttggattttcacggcagcgcc

SEQ ID NO: 63767 - DNA, 25 bp, Canis familiaris
cagtatctttttcccttgcatgggg

SEQ ID NO: 63768 - DNA, 25 bp, Canis familiaris
cagtgtcatttcataccctttggag

SEQ ID NO: 63769 - DNA, 25 bp, Canis familiaris
cagtaaatccttacaccttcgcaga

SEQ ID NO: 63770 - DNA, 25 bp, Canis familiaris
cagagaaatcctggccactgcttgt

SEQ ID NO: 63771 - DNA, 25 bp, Canis familiaris
cagttaatcctgaccacatctatag

SEQ ID NO: 63772 - DNA, 25 bp, Canis familiaris
cagtttatccgacaccacatatggt

SEQ ID NO: 63773 - DNA, 25 bp, Canis familiaris
cagttccacccacacctattggtgg

SEQ ID NO: 63774 - DNA, 25 bp, Canis familiaris
cagttctacccctgggatggtgtga

SEQ ID NO: 63775 - DNA, 25 bp, Canis familiaris
cagaggtacccctggagcgtgtgtt

SEQ ID NO: 63776 - DNA, 25 bp, Canis familiaris
cagagggatccagtcctgggcaggt

SEQ ID NO: 63777 - DNA, 25 bp, Canis familiaris
cagaggtgaaaggctattggcaggt

SEQ ID NO: 63778 - DNA, 25 bp, Canis familiaris
cagaggggaggcttcatgctcatga

SEQ ID NO: 63779 - DNA, 25 bp, Canis familiaris
cagagctggtgttggtgttcatggc

SEQ ID NO: 63780 - DNA, 25 bp, Canis familiaris
caggttgatggtgtggttaccgggg

SEQ ID NO: 63781 - DNA, 25 bp, Canis familiaris
cagtgctttggtaaggtcccttgga

SEQ ID NO: 63782 - DNA, 25 bp, Canis familiaris
cagatccttggaaagtcctcctgtc

SEQ ID NO: 63783 - DNA, 25 bp, Canis familiaris
cagatttcacgatcgtcgtcacgtc

SEQ ID NO: 63784 - DNA, 25 bp, Canis familiaris
cagattttcagagtgctttgggcag

SEQ ID NO: 63785 - DNA, 25 bp, Canis familiaris
cagagctttgcgaggttcgtgcagg

SEQ ID NO: 63786 - DNA, 25 bp, Canis familiaris
cagagcttgtcgatgttgtcgtgca

SEQ ID NO: 63787 - DNA, 25 bp, Canis familiaris
cagagctgttccagctgcggcctgc

SEQ ID NO: 63788 - DNA, 25 bp, Canis familiaris
cagatgtgtcctgagtgctgggcag

SEQ ID NO: 63789 - DNA, 25 bp, Canis familiaris
cagatgaccccttgagctgagtctg

SEQ ID NO: 63790 - DNA, 25 bp, Canis familiaris
cagattcacacagttgatgctcggt

SEQ ID NO: 63791 - DNA, 25 bp, Canis familiaris
cagtcttgctcagcgatggcagttc

SEQ ID NO: 63792 - DNA, 25 bp, Canis familiaris
cagatttctacaattgtgcgttgac

SEQ ID NO: 63793 - DNA, 25 bp, Canis familiaris
cagtttctccacaggcgtcataata

SEQ ID NO: 63794 - DNA, 25 bp, Canis familiaris
cagttttccaatggctttacagaac

SEQ ID NO: 63795 - DNA, 25 bp, Canis familiaris
cagtttgatgccctggttttcagcc

SEQ ID NO: 63796 - DNA, 25 bp, Canis familiaris
cagtttgatcgttacttgtcagccc

SEQ ID NO: 63797 - DNA, 25 bp, Canis familiaris
cagatgttgtcaccaaccatcggcc

SEQ ID NO: 63798 - DNA, 25 bp, Canis familiaris
cagagtctgtccccagacattgcac

SEQ ID NO: 63799 - DNA, 25 bp, Canis familiaris
cagattctggcagtctctgaattga

SEQ ID NO: 63800 - DNA, 25 bp, Canis familiaris
cagatctacagcgccagagtgctga

SEQ ID NO: 63801 - DNA, 25 bp, Canis familiaris
cagatcaccatgctccaagatgctg

SEQ ID NO: 63802 - DNA, 25 bp, Canis familiaris
cagatgcacaggcagaaagctgatg

SEQ ID NO: 63803 - DNA, 25 bp, Canis familiaris
cagtcacagccaagcaccatggagc

SEQ ID NO: 63804 - DNA, 25 bp, Canis familiaris
cagtgcagataaccccaggacaggc

SEQ ID NO: 63805 - DNA, 25 bp, Canis familiaris
cagggcaaaggggagaacacagaag

SEQ ID NO: 63806 - DNA, 25 bp, Canis familiaris
cagagaaacctgtgaagaagcaaaa

SEQ ID NO: 63807 - DNA, 25 bp, Canis familiaris
cagaggaacctgcgaaggacttcaa

SEQ ID NO: 63808 - DNA, 25 bp, Canis familiaris
cagggcaaccagcgctactaaaaga

SEQ ID NO: 63809 - DNA, 25 bp, Canis familiaris
cagggccaccaagttttaagattcg

SEQ ID NO: 63810 - DNA, 25 bp, Canis familiaris
cagaggacccaagtactttccagtc

SEQ ID NO: 63811 - DNA, 25 bp, Canis familiaris
cagaggacccaagtactttccagtc

SEQ ID NO: 63812 - DNA, 25 bp, Canis familiaris
cagaggacccaagtactttccagtc

SEQ ID NO: 63813 - DNA, 25 bp, Canis familiaris
cagaggacccaagtactttccagtc

SEQ ID NO: 63814 - DNA, 25 bp, Canis familiaris
cagaggacccaagtactttccagtc

SEQ ID NO: 63815 - DNA, 25 bp, Canis familiaris
cagaggacccaagtactttccagtc

SEQ ID NO: 63816 - DNA, 25 bp, Canis familiaris
cagaggacccaagtactttccagtc

SEQ ID NO: 63817 - DNA, 25 bp, Canis familiaris
cagaggacccaagtactttccagtc

SEQ ID NO: 63818 - DNA, 25 bp, Canis familiaris
cagaggacccaagtactttccagtc

SEQ ID NO: 63819 - DNA, 25 bp, Canis familiaris
cagaggacccaagtactttccagtc

SEQ ID NO: 63820 - DNA, 25 bp, Canis familiaris
cagaggtccaaaaggtttccacgct

SEQ ID NO: 63821 - DNA, 25 bp, Canis familiaris
cagagttgtaacagagtttccctcc

SEQ ID NO: 63822 - DNA, 25 bp, Canis familiaris
cagagttgctcaatccgatgtctcc

SEQ ID NO: 63823 - DNA, 25 bp, Canis familiaris
cagagttgtttgccttgttgcctat

SEQ ID NO: 63824 - DNA, 25 bp, Canis familiaris
cagagcttgttgtctttttcgctat

SEQ ID NO: 63825 - DNA, 25 bp, Canis familiaris
cagagggctttcattttcccatgct

SEQ ID NO: 63826 - DNA, 25 bp, Canis familiaris
cagagatgctttattatccccacac

SEQ ID NO: 63827 - DNA, 25 bp, Canis familiaris
cagagaattttgaatgcccactcaa

SEQ ID NO: 63828 - DNA, 25 bp, Canis familiaris
cagagacattttgacggcctaatcc

SEQ ID NO: 63829 - DNA, 25 bp, Canis familiaris
cagatacttgttcataggccaaatc

SEQ ID NO: 63830 - DNA, 25 bp, Canis familiaris
cagtacctgctatttctggtccaac

SEQ ID NO: 63831 - DNA, 25 bp, Canis familiaris
cagagcacccattttttgttcaagc

SEQ ID NO: 63832 - DNA, 25 bp, Canis familiaris
cagatgcaacctctgctttgttctt

SEQ ID NO: 63833 - DNA, 25 bp, Canis familiaris
cagagaagcctggttttgtccctgc

SEQ ID NO: 63834 - DNA, 25 bp, Canis familiaris
cagagagtctggtttgtttcctgcc

SEQ ID NO: 63835 - DNA, 25 bp, Canis familiaris
cagagagtctgcttctctgtttccc

SEQ ID NO: 63836 - DNA, 25 bp, Canis familiaris
cagtagcttctaactattcttgctc

SEQ ID NO: 63837 - DNA, 25 bp, Canis familiaris
cagtcagttagaacacttttcgcag

SEQ ID NO: 63838 - DNA, 25 bp, Canis familiaris
cagtcgtgaaacagttttgcgcatg

SEQ ID NO: 63839 - DNA, 25 bp, Canis familiaris
catggtagaatccggttttgccagt

SEQ ID NO: 63840 - DNA, 25 bp, Canis familiaris
caggtaggtgggtgttcccagtcgg

SEQ ID NO: 63841 - DNA, 25 bp, Canis familiaris
cagagtgaggggcagcactacccag

SEQ ID NO: 63842 - DNA, 25 bp, Canis familiaris
cagagagaggcggggagcccctcaa

SEQ ID NO: 63843 - DNA, 25 bp, Canis familiaris
cagagaaacggggtcatgcccagcc

SEQ ID NO: 63844 - DNA, 25 bp, Canis familiaris
caggaccttggggttcctgatgcct

SEQ ID NO: 63845 - DNA, 25 bp, Canis familiaris
cagggcttacctgtacactgacttg

SEQ ID NO: 63846 - DNA, 25 bp, Canis familiaris
cagggcttacctgtacactgacttg

SEQ ID NO: 63847 - DNA, 25 bp, Canis familiaris
cggcagttatttgaacggtcttact

SEQ ID NO: 63848 - DNA, 25 bp, Canis familiaris
caggcgtcccttgcaagggatctct

SEQ ID NO: 63849 - DNA, 25 bp, Canis familiaris
cagtcccagtcaactctagggctct

SEQ ID NO: 63850 - DNA, 25 bp, Canis familiaris
ctgcggacaggaactttgtgaattc

SEQ ID NO: 63851 - DNA, 25 bp, Canis familiaris
cagggattgtgctgcgtttaattca

SEQ ID NO: 63852 - DNA, 25 bp, Canis familiaris
cagtgacatttcagcagtttccctc

SEQ ID NO: 63853 - DNA, 25 bp, Canis familiaris
cagatccagtatcttgtttggcccc

SEQ ID NO: 63854 - DNA, 25 bp, Canis familiaris
cagtccccatgcctagtatagtaac

SEQ ID NO: 63855 - DNA, 25 bp, Canis familiaris
cagtctcattccctagtatttggat

SEQ ID NO: 63856 - DNA, 25 bp, Canis familiaris
cagttcttgcctttgtctttggatg

SEQ ID NO: 63857 - DNA, 25 bp, Canis familiaris
cagttgaatggttggcacttcgtgt

SEQ ID NO: 63858 - DNA, 25 bp, Canis familiaris
cagattgaagtgggaccttcttgcc

SEQ ID NO: 63859 - DNA, 25 bp, Canis familiaris
cagtcaaagacacaccgtttgccac

SEQ ID NO: 63860 - DNA, 25 bp, Canis familiaris
cagtagtggaattaccgggtccatt

SEQ ID NO: 63861 - DNA, 25 bp, Canis familiaris
cagagttggacactcccagggtagt

SEQ ID NO: 63862 - DNA, 25 bp, Canis familiaris
cagtttcccattctctgtgtgtaga

SEQ ID NO: 63863 - DNA, 25 bp, Canis familiaris
cagttctcccaatggtggcgtgatg

SEQ ID NO: 63864 - DNA, 25 bp, Canis familiaris
cagtagctcttatggtgtcgttgat

SEQ ID NO: 63865 - DNA, 25 bp, Canis familiaris
cagtttattcaaggttcgtgtttcg

SEQ ID NO: 63866 - DNA, 25 bp, Canis familiaris
cagatttataatacttccctgtttt

SEQ ID NO: 63867 - DNA, 25 bp, Canis familiaris
cagatatttgaagctgaccgtcttt

SEQ ID NO: 63868 - DNA, 25 bp, Canis familiaris
cagatcatctgtaaacgacccttcc

SEQ ID NO: 63869 - DNA, 25 bp, Canis familiaris
cagagttaggagtcgaccctagccc

SEQ ID NO: 63870 - DNA, 25 bp, Canis familiaris
caggtcgtgagttcaagccctacct

SEQ ID NO: 63871 - DNA, 25 bp, Canis familiaris
cagatgcaccagatgcacaagccct

SEQ ID NO: 63872 - DNA, 25 bp, Canis familiaris
cagtcctggggaacaccatgctgga

SEQ ID NO: 63873 - DNA, 25 bp, Canis familiaris
cagtcacatgttggatccccatgca

SEQ ID NO: 63874 - DNA, 25 bp, Canis familiaris
cagtccagttgcgacaggcactagt

SEQ ID NO: 63875 - DNA, 25 bp, Canis familiaris
cagtcagaggtgcagcagccttcgt

SEQ ID NO: 63876 - DNA, 25 bp, Canis familiaris
cagatgcagaggaggagccccgtga

SEQ ID NO: 63877 - DNA, 25 bp, Canis familiaris
cagagggagaggcagaccccatgca

SEQ ID NO: 63878 - DNA, 25 bp, Canis familiaris
cagtaggcaggagcagaccgccaca

SEQ ID NO: 63879 - DNA, 25 bp, Canis familiaris
cagtagcatgggggtgctccccagc

SEQ ID NO: 63880 - DNA, 25 bp, Canis familiaris
cagtacgggtaggtctgcttggcac

SEQ ID NO: 63881 - DNA, 25 bp, Canis familiaris
cagtcgaggtgttggtggatatggt

SEQ ID NO: 63882 - DNA, 25 bp, Canis familiaris
cagatgggggcttccggatttggcc

SEQ ID NO: 63883 - DNA, 25 bp, Canis familiaris
cagtgggttgtgtcctggtgtcaag

SEQ ID NO: 63884 - DNA, 25 bp, Canis familiaris
cagtccgttagatcgttgtgcaaag

SEQ ID NO: 63885 - DNA, 25 bp, Canis familiaris
cagttgcgaaactcctctgtaacag

SEQ ID NO: 63886 - DNA, 25 bp, Canis familiaris
cagttgcagtaatccgttgtagaaa

SEQ ID NO: 63887 - DNA, 25 bp, Canis familiaris
cagttactagtttctgacttgaata

SEQ ID NO: 63888 - DNA, 25 bp, Canis familiaris
cagttactcgagatgtgccttgcaa

SEQ ID NO: 63889 - DNA, 25 bp, Canis familiaris
cagttacttgcactggtaccagcag

SEQ ID NO: 63890 - DNA, 25 bp, Canis familiaris
cagtgaacttgcttgaaggccgagg

SEQ ID NO: 63891 - DNA, 25 bp, Canis familiaris
cagatgtgatttgtgaggcccagag

SEQ ID NO: 63892 - DNA, 25 bp, Canis familiaris
caggcatgttgtgagaataaatgag

SEQ ID NO: 63893 - DNA, 25 bp, Canis familiaris
cagtattttctacataatatggtaa

SEQ ID NO: 63894 - DNA, 25 bp, Canis familiaris
cagtacgtctcaacaattctaggtc

SEQ ID NO: 63895 - DNA, 25 bp, Canis familiaris
cagtaccatttatacctgttgtccc

SEQ ID NO: 63896 - DNA, 25 bp, Canis familiaris
cagtatcctttaaagcgctcttgcc

SEQ ID NO: 63897 - DNA, 25 bp, Canis familiaris
cagttgagtttggccgagctctgtg

SEQ ID NO: 63898 - DNA, 25 bp, Canis familiaris
cagttggagtgctggagactttgga

SEQ ID NO: 63899 - DNA, 25 bp, Canis familiaris
gagttggacgggtgtcctgtccaag

SEQ ID NO: 63900 - DNA, 25 bp, Canis familiaris
cagttagacgggctgacctgggggg

SEQ ID NO: 63901 - DNA, 25 bp, Canis familiaris
cagttagtggggctgcctggtgtgg

SEQ ID NO: 63902 - DNA, 25 bp, Canis familiaris
cagatgtaggggttctgccttgggg

SEQ ID NO: 63903 - DNA, 25 bp, Canis familiaris
cagagagatgggggtgcccttgggc

SEQ ID NO: 63904 - DNA, 25 bp, Canis familiaris
cagagggagagcaggcctcctgtgg

SEQ ID NO: 63905 - DNA, 25 bp, Canis familiaris
cagatggagaggcggctgcttgctt

SEQ ID NO: 63906 - DNA, 25 bp, Canis familiaris
cagagtgtggatcgctgggcttgtg

SEQ ID NO: 63907 - DNA, 25 bp, Canis familiaris
cagaggggctctggagtgcctggaa

SEQ ID NO: 63908 - DNA, 25 bp, Canis familiaris
cagaggggtggcaggctgctcagaa

SEQ ID NO: 63909 - DNA, 25 bp, Canis familiaris
cagggcaagtccaagttcccaactg

SEQ ID NO: 63910 - DNA, 25 bp, Canis familiaris
cgtcgaatttacgatcttccaagct

SEQ ID NO: 63911 - DNA, 25 bp, Canis familiaris
cagtcaagcaagtttgtttccaagt

SEQ ID NO: 63912 - DNA, 25 bp, Canis familiaris
cagtagtgaatatgttgtccgtaat

SEQ ID NO: 63913 - DNA, 25 bp, Canis familiaris
cagtagtacatttgatttttaattt

SEQ ID NO: 63914 - DNA, 25 bp, Canis familiaris
cagtggtaatttattttgagttcct

SEQ ID NO: 63915 - DNA, 25 bp, Canis familiaris
cagggtcaggttatattttttcttg

SEQ ID NO: 63916 - DNA, 25 bp, Canis familiaris
cagagggctggttcttgtttttgtc

SEQ ID NO: 63917 - DNA, 25 bp, Canis familiaris
cagatgcctgggactctttgttaag

SEQ ID NO: 63918 - DNA, 25 bp, Canis familiaris
cagatcgtgtgggtcatcctgtgtt

SEQ ID NO: 63919 - DNA, 25 bp, Canis familiaris
cagtcggtgggtcagtgtgttgggt

SEQ ID NO: 63920 - DNA, 25 bp, Canis familiaris
cagtgggtgaggcgaggttgaaagg

SEQ ID NO: 63921 - DNA, 25 bp, Canis familiaris
caggggtagatgagtggtttacacg

SEQ ID NO: 63922 - DNA, 25 bp, Canis familiaris
caggcctacaagtggagctactacc

SEQ ID NO: 63923 - DNA, 25 bp, Canis familiaris
caggcttaccaagccactaggtggc

SEQ ID NO: 63924 - DNA, 25 bp, Canis familiaris
caggtgtaccccacctgagggggca

SEQ ID NO: 63925 - DNA, 25 bp, Canis familiaris
catggaggacgtgtcccggagggga

SEQ ID NO: 63926 - DNA, 25 bp, Canis familiaris
catgaagggcgcgacccgcgaatat

SEQ ID NO: 63927 - DNA, 25 bp, Canis familiaris
cagatgggggcttccccgaattctg

SEQ ID NO: 63928 - DNA, 25 bp, Canis familiaris
cagtgggggtggtacggactactgg

SEQ ID NO: 63929 - DNA, 25 bp, Canis familiaris
cagttgggggctgacggcagcgagc

SEQ ID NO: 63930 - DNA, 25 bp, Canis familiaris
cagttgcggtggcgatgacgacgac

SEQ ID NO: 63931 - DNA, 25 bp, Canis familiaris
cagtcatgctgggtgccctgactga

SEQ ID NO: 63932 - DNA, 25 bp, Canis familiaris
cagtcactagcttgtcctgagcaga

SEQ ID NO: 63933 - DNA, 25 bp, Canis familiaris
cagatcctgcttctcctgaagatgt

SEQ ID NO: 63934 - DNA, 25 bp, Canis familiaris
cagatcctgtatatccgcagcatct

SEQ ID NO: 63935 - DNA, 25 bp, Canis familiaris
cagatcgagaacatccggagccctg

SEQ ID NO: 63936 - DNA, 25 bp, Canis familiaris
cagaggaggatagccaggtgcccag

SEQ ID NO: 63937 - DNA, 25 bp, Canis familiaris
cagaggagacaagcctgtgtcccct

SEQ ID NO: 63938 - DNA, 25 bp, Canis familiaris
caggatgagaacaccgtctccactt

SEQ ID NO: 63939 - DNA, 25 bp, Canis familiaris
cagtaggcaacttctgcattctcgc

SEQ ID NO: 63940 - DNA, 25 bp, Canis familiaris
cagaggaaactctgcattctcgctt

SEQ ID NO: 63941 - DNA, 25 bp, Canis familiaris
cagaggaaactctgcattctcgctt

SEQ ID NO: 63942 - DNA, 25 bp, Canis familiaris
cagaggaaactctgcattctcgctt

SEQ ID NO: 63943 - DNA, 25 bp, Canis familiaris
cagaggaaactctgcattctcgctt

SEQ ID NO: 63944 - DNA, 25 bp, Canis familiaris
cagaggaggacttcacatcacttgt

SEQ ID NO: 63945 - DNA, 25 bp, Canis familiaris
cagaggatgaagctgcccacttcta

SEQ ID NO: 63946 - DNA, 25 bp, Canis familiaris
cagatggtgtagctgcagctccacc

SEQ ID NO: 63947 - DNA, 25 bp, Canis familiaris
cagaggattgaagggcccatcccgc

SEQ ID NO: 63948 - DNA, 25 bp, Canis familiaris
cagatcagattgtgagccacctgcc

SEQ ID NO: 63949 - DNA, 25 bp, Canis familiaris
cagatgcagaactagaccaccgcca

SEQ ID NO: 63950 - DNA, 25 bp, Canis familiaris
cagatgcataacctactgagccacc

SEQ ID NO: 63951 - DNA, 25 bp, Canis familiaris
cagagtcaacttctgagtctccctc

SEQ ID NO: 63952 - DNA, 25 bp, Canis familiaris
caggtcaagggtggcagtgtctttt

SEQ ID NO: 63953 - DNA, 25 bp, Canis familiaris
cagagtgcagcatggccggttttat

SEQ ID NO: 63954 - DNA, 25 bp, Canis familiaris
cagatgttcatctgccgtgtcttgt

SEQ ID NO: 63955 - DNA, 25 bp, Canis familiaris
cagatgaggcattctccttgtcttg

SEQ ID NO: 63956 - DNA, 25 bp, Canis familiaris
cagatgctgtatttgccttctttac

SEQ ID NO: 63957 - DNA, 25 bp, Canis familiaris
cagtctcttagaccttttctactac

SEQ ID NO: 63958 - DNA, 25 bp, Canis familiaris
cagatccttcagatccttttctttc

SEQ ID NO: 63959 - DNA, 25 bp, Canis familiaris
cagattttccatgttgttttgttca

SEQ ID NO: 63960 - DNA, 25 bp, Canis familiaris
cagtggttcagggtggtctttgttc

SEQ ID NO: 63961 - DNA, 25 bp, Canis familiaris
caggtgccctggctaattgtattta

SEQ ID NO: 63962 - DNA, 25 bp, Canis familiaris
cagaggcccatggggatacgaatct

SEQ ID NO: 63963 - DNA, 25 bp, Canis familiaris
cagatggcgctaggcgtgtacgttg

SEQ ID NO: 63964 - DNA, 25 bp, Canis familiaris
cagaggctgccaggggccatagtgt

SEQ ID NO: 63965 - DNA, 25 bp, Canis familiaris
cagatctgagcgcttggccaagtat

SEQ ID NO: 63966 - DNA, 25 bp, Canis familiaris
cagatgctggcactgtatggctaca

SEQ ID NO: 63967 - DNA, 25 bp, Canis familiaris
cagattgtcctgtcatagctattga

SEQ ID NO: 63968 - DNA, 25 bp, Canis familiaris
cagatttcactgttcagttcccttt

SEQ ID NO: 63969 - DNA, 25 bp, Canis familiaris
cagattacactactatttctgactt

SEQ ID NO: 63970 - DNA, 25 bp, Canis familiaris
cagatacacacaaggacatttgcac

SEQ ID NO: 63971 - DNA, 25 bp, Canis familiaris
cagatgaccccgtacatgttgagct

SEQ ID NO: 63972 - DNA, 25 bp, Canis familiaris
cagaggacccagtcagagtcagcgc

SEQ ID NO: 63973 - DNA, 25 bp, Canis familiaris
cagaggtcctgccaagagcatctgc

SEQ ID NO: 63974 - DNA, 25 bp, Canis familiaris
cagaggtgccagcaacatcctcttc

SEQ ID NO: 63975 - DNA, 25 bp, Canis familiaris
cagaggcagcagccaaatcatccta

SEQ ID NO: 63976 - DNA, 25 bp, Canis familiaris
cagagggaccattactgcgcaatcc

SEQ ID NO: 63977 - DNA, 25 bp, Canis familiaris
cagaggataccataccggaggcctg

SEQ ID NO: 63978 - DNA, 25 bp, Canis familiaris
cagagggccggagccgagatggcct

SEQ ID NO: 63979 - DNA, 25 bp, Canis familiaris
cagaggacgaggacctggggggctt

SEQ ID NO: 63980 - DNA, 25 bp, Canis familiaris
cagaggacagagtctgctttggggg

SEQ ID NO: 63981 - DNA, 25 bp, Canis familiaris
cagaggacatggtgcggcttcgaga

SEQ ID NO: 63982 - DNA, 25 bp, Canis familiaris
caggatacgacccgagcttcggaag

SEQ ID NO: 63983 - DNA, 25 bp, Canis familiaris
cagtttctttgcagacctcaggaag

SEQ ID NO: 63984 - DNA, 25 bp, Canis familiaris
cagattgttttgggcactttgtgca

SEQ ID NO: 63985 - DNA, 25 bp, Canis familiaris
cagatgtgtttgaggcctggcggct

SEQ ID NO: 63986 - DNA, 25 bp, Canis familiaris
cagaggcttttgttgcacagaaggt

SEQ ID NO: 63987 - DNA, 25 bp, Canis familiaris
caggctccagcttgttacgtggatt

SEQ ID NO: 63988 - DNA, 25 bp, Canis familiaris
cagatgcccctgtatttgagatgtt

SEQ ID NO: 63989 - DNA, 25 bp, Canis familiaris
caggccccgagcaggaatttggtgt

SEQ ID NO: 63990 - DNA, 25 bp, Canis familiaris
cagggaccccaagatttcagtgagt

SEQ ID NO: 63991 - DNA, 25 bp, Canis familiaris
caggtgcagccccctaaataagtgg

SEQ ID NO: 63992 - DNA, 25 bp, Canis familiaris
cagttgtgcccaccttgatgtaagg

SEQ ID NO: 63993 - DNA, 25 bp, Canis familiaris
cagttgtgcccaccttgatgtaagg

SEQ ID NO: 63994 - DNA, 25 bp, Canis familiaris
cagtgagccccagatcgttaagtgg

SEQ ID NO: 63995 - DNA, 25 bp, Canis familiaris
cagttccgctcagtatctgtaaatg

SEQ ID NO: 63996 - DNA, 25 bp, Canis familiaris
cagtcttgcccagtaagctcagaag

SEQ ID NO: 63997 - DNA, 25 bp, Canis familiaris
cagttggaccagaaggcatctggag

SEQ ID NO: 63998 - DNA, 25 bp, Canis familiaris
cagttggacacgagactggggcccc

SEQ ID NO: 63999 - DNA, 25 bp, Canis familiaris
cagtggtaccttccactggggccag

SEQ ID NO: 64000 - DNA, 25 bp, Canis familiaris
cagggagatttacacgcgaggacac

SEQ ID NO: 64001 - DNA, 25 bp, Canis familiaris
catggcgcaattcttgggggggaca

SEQ ID NO: 64002 - DNA, 25 bp, Canis familiaris
cagtgccatgttcattgggggttga

SEQ ID NO: 64003 - DNA, 25 bp, Canis familiaris
cagatatctgttccattgtttttta

SEQ ID NO: 64004 - DNA, 25 bp, Canis familiaris
cagatattgtgtgtcgtgtgtatgt

SEQ ID NO: 64005 - DNA, 25 bp, Canis familiaris
cagtttgcagtgttccttgtaagat

SEQ ID NO: 64006 - DNA, 25 bp, Canis familiaris
cagtctctttgttccttggagaacc

SEQ ID NO: 64007 - DNA, 25 bp, Canis familiaris
cagttctcttattgggtgaaaacat

SEQ ID NO: 64008 - DNA, 25 bp, Canis familiaris
catgcctgcccctgggtaaaatcaa

SEQ ID NO: 64009 - DNA, 25 bp, Canis familiaris
cagtctgctcccttaaaaaaaatca

SEQ ID NO: 64010 - DNA, 25 bp, Canis familiaris
cagatcctgcccttgttattaaaaa

SEQ ID NO: 64011 - DNA, 25 bp, Canis familiaris
cagatgcgcctaccatttacagaaa

SEQ ID NO: 64012 - DNA, 25 bp, Canis familiaris
cagatcgccaaagtgggccagatat

SEQ ID NO: 64013 - DNA, 25 bp, Canis familiaris
cagatctacaacacctgccagtgac

SEQ ID NO: 64014 - DNA, 25 bp, Canis familiaris
cagatcttccacagcttggcataga

SEQ ID NO: 64015 - DNA, 25 bp, Canis familiaris
cagatccccagcatcttgtgaagaa

SEQ ID NO: 64016 - DNA, 25 bp, Canis familiaris
cagatatccatgcctgttttacaga

SEQ ID NO: 64017 - DNA, 25 bp, Canis familiaris
cagatatcacgggactttccagaat

SEQ ID NO: 64018 - DNA, 25 bp, Canis familiaris
cagatacttggtggcttttcgaata

SEQ ID NO: 64019 - DNA, 25 bp, Canis familiaris
cagttctctggtatctttgctaata

SEQ ID NO: 64020 - DNA, 25 bp, Canis familiaris
cagatgtttgtgatttattctttca

SEQ ID NO: 64021 - DNA, 25 bp, Canis familiaris
cagatgttggatcctttgctcactg

SEQ ID NO: 64022 - DNA, 25 bp, Canis familiaris
cagatgtcagaacctgctcgtcatc

SEQ ID NO: 64023 - DNA, 25 bp, Canis familiaris
cagatctgcagacggctgttgtctc

SEQ ID NO: 64024 - DNA, 25 bp, Canis familiaris
cagattcttctggcgattgcatcct

SEQ ID NO: 64025 - DNA, 25 bp, Canis familiaris
cagattcccttggatccatgatctt

SEQ ID NO: 64026 - DNA, 25 bp, Canis familiaris
cagatgtctacaagagcccagcttc

SEQ ID NO: 64027 - DNA, 25 bp, Canis familiaris
cagtctctacaatgctgccagctta

SEQ ID NO: 64028 - DNA, 25 bp, Canis familiaris
cagtcctacaagtcgctggtggcag

SEQ ID NO: 64029 - DNA, 25 bp, Canis familiaris
cagttctaccagtctgtggttagtc

SEQ ID NO: 64030 - DNA, 25 bp, Canis familiaris
cagtcctcaccagttttatatagct

SEQ ID NO: 64031 - DNA, 25 bp, Canis familiaris
cagatttcaccagctttacatacaa

SEQ ID NO: 64032 - DNA, 25 bp, Canis familiaris
cagtttcccagtgcttctataaagt

SEQ ID NO: 64033 - DNA, 25 bp, Canis familiaris
catgtttgcccgttttcctaaaatg

SEQ ID NO: 64034 - DNA, 25 bp, Canis familiaris
cagtttacctgggtgtcccaacgtg

SEQ ID NO: 64035 - DNA, 25 bp, Canis familiaris
cagtttatctggggtgtcccaatct

SEQ ID NO: 64036 - DNA, 25 bp, Canis familiaris
cagatgtgtgtcacccagtaccaga

SEQ ID NO: 64037 - DNA, 25 bp, Canis familiaris
cagatgatcttcatatcttttcata

SEQ ID NO: 64038 - DNA, 25 bp, Canis familiaris
cagatgatgactattctgtcttcat

SEQ ID NO: 64039 - DNA, 25 bp, Canis familiaris
cagatgaatctttgttgtcttgttc

SEQ ID NO: 64040 - DNA, 25 bp, Canis familiaris
cgtaatcgtatattgtttattcgga

SEQ ID NO: 64041 - DNA, 25 bp, Canis familiaris
cagtgaattttgtgctttttcgggg

SEQ ID NO: 64042 - DNA, 25 bp, Canis familiaris
cagtacaattcctgtttttgctccg

SEQ ID NO: 64043 - DNA, 25 bp, Canis familiaris
cagtacaagacctatgggacttccc

SEQ ID NO: 64044 - DNA, 25 bp, Canis familiaris
cagtaagcaatccatcggaactacc

SEQ ID NO: 64045 - DNA, 25 bp, Canis familiaris
cagtaatgccagccattggttcttc

SEQ ID NO: 64046 - DNA, 25 bp, Canis familiaris
cagtacaccttgaagctgttcttgg

SEQ ID NO: 64047 - DNA, 25 bp, Canis familiaris
cagatctcatgtgtgaagcggcccg

SEQ ID NO: 64048 - DNA, 25 bp, Canis familiaris
cagataagccaggggcaggccacgg

SEQ ID NO: 64049 - DNA, 25 bp, Canis familiaris
cagataacacagaaccattcagatg

SEQ ID NO: 64050 - DNA, 25 bp, Canis familiaris
cagtacacagtgacccactcaattc

SEQ ID NO: 64051 - DNA, 25 bp, Canis familiaris
cagtcaccaagacctcctagtgtat

SEQ ID NO: 64052 - DNA, 25 bp, Canis familiaris
cataacacaaacctctcaagagttg

SEQ ID NO: 64053 - DNA, 25 bp, Canis familiaris
catgcaaacccccttggggtggcct

SEQ ID NO: 64054 - DNA, 25 bp, Canis familiaris
cagggaccttcgtgaggcgtggaat

SEQ ID NO: 64055 - DNA, 25 bp, Canis familiaris
cagaggcctctgtcaaaacctggga

SEQ ID NO: 64056 - DNA, 25 bp, Canis familiaris
cagaggcactctgaagtctcctagt

SEQ ID NO: 64057 - DNA, 25 bp, Canis familiaris
cagattgcctcagaatcctctctga

SEQ ID NO: 64058 - DNA, 25 bp, Canis familiaris
cagatgtctgataccaactcctctg

SEQ ID NO: 64059 - DNA, 25 bp, Canis familiaris
cagttcatgaagcaatctcccatcc

SEQ ID NO: 64060 - DNA, 25 bp, Canis familiaris
cagtattgaaccaattctacccgtc

SEQ ID NO: 64061 - DNA, 25 bp, Canis familiaris
cagtgatagcatttccaatccaccc

SEQ ID NO: 64062 - DNA, 25 bp, Canis familiaris
cgtcagatgtttgactgaacccccc

SEQ ID NO: 64063 - DNA, 25 bp, Canis familiaris
cagtgctattgaaatgactgtaccc

SEQ ID NO: 64064 - DNA, 25 bp, Canis familiaris
cagtctttgtaactcatcgaagccc

SEQ ID NO: 64065 - DNA, 25 bp, Canis familiaris
caggtttttaccagtagcacttagt

SEQ ID NO: 64066 - DNA, 25 bp, Canis familiaris
cagttggttttctcctaacttagct

SEQ ID NO: 64067 - DNA, 25 bp, Canis familiaris
cagttggtttctgccttaactctat

SEQ ID NO: 64068 - DNA, 25 bp, Canis familiaris
cagttgaacctcttgtctttatctc

SEQ ID NO: 64069 - DNA, 25 bp, Canis familiaris
cagttaatcctctacctggttttgt

SEQ ID NO: 64070 - DNA, 25 bp, Canis familiaris
cagttgtttcactccttgttatttt

SEQ ID NO: 64071 - DNA, 25 bp, Canis familiaris
cagtaaactcaatccttttcttctg

SEQ ID NO: 64072 - DNA, 25 bp, Canis familiaris
catgaaaaccaaaccaaactttctg

SEQ ID NO: 64073 - DNA, 25 bp, Canis familiaris
catcaaagggaaaccaatttattct

SEQ ID NO: 64074 - DNA, 25 bp, Canis familiaris
catgaaggaaacacacctcttattc

SEQ ID NO: 64075 - DNA, 25 bp, Canis familiaris
caggagggaacctctcatcagcttt

SEQ ID NO: 64076 - DNA, 25 bp, Canis familiaris
caggaggggaccattccagtccctg

SEQ ID NO: 64077 - DNA, 25 bp, Canis familiaris
caggtgggcaacccctgaagtgccc

SEQ ID NO: 64078 - DNA, 25 bp, Canis familiaris
catgggggtgacccctactacttgt

SEQ ID NO: 64079 - DNA, 25 bp, Canis familiaris
cagggaccattcccgtaaatttatg

SEQ ID NO: 64080 - DNA, 25 bp, Canis familiaris
cagggactccccgagaagtttcaat

SEQ ID NO: 64081 - DNA, 25 bp, Canis familiaris
ctgggaagcccagaggacctttatt

SEQ ID NO: 64082 - DNA, 25 bp, Canis familiaris
cagtgaaaccacttagaacctttga

SEQ ID NO: 64083 - DNA, 25 bp, Canis familiaris
catatggacccatctggaacctttg

SEQ ID NO: 64084 - DNA, 25 bp, Canis familiaris
cagtggactcctctggattactttc

SEQ ID NO: 64085 - DNA, 25 bp, Canis familiaris
cagtcggccccaatgaaatatcttt

SEQ ID NO: 64086 - DNA, 25 bp, Canis familiaris
catggaggccctctaaagcctttaa

SEQ ID NO: 64087 - DNA, 25 bp, Canis familiaris
cagtgtcgacttcaacaagcctttc

SEQ ID NO: 64088 - DNA, 25 bp, Canis familiaris
cagtgtcgacttcaacaagcctttc

SEQ ID NO: 64089 - DNA, 25 bp, Canis familiaris
cagtgtcgacttcaacaagcctttc

SEQ ID NO: 64090 - DNA, 25 bp, Canis familiaris
cagtgtcgacttcaacaagcctttc

SEQ ID NO: 64091 - DNA, 25 bp, Canis familiaris
cagttgtgcacttttacaagccgca

SEQ ID NO: 64092 - DNA, 25 bp, Canis familiaris
cagttcatggcgttcgaggagctcc

SEQ ID NO: 64093 - DNA, 25 bp, Canis familiaris
cagtccatgggggcctgaggctcct

SEQ ID NO: 64094 - DNA, 25 bp, Canis familiaris
cagttcatggtgcagaatgggttga

SEQ ID NO: 64095 - DNA, 25 bp, Canis familiaris
cagttctggggtatctgggtggctt

SEQ ID NO: 64096 - DNA, 25 bp, Canis familiaris
cagttgtgaggtctttggggcctgt

SEQ ID NO: 64097 - DNA, 25 bp, Canis familiaris
cagttatggttcctttggtcgctcg

SEQ ID NO: 64098 - DNA, 25 bp, Canis familiaris
cagttttttcagtttgggctctcag

SEQ ID NO: 64099 - DNA, 25 bp, Canis familiaris
cagatttttccagttttgtccgtgt

SEQ ID NO: 64100 - DNA, 25 bp, Canis familiaris
cagtcttttctgattgacgctccgg

SEQ ID NO: 64101 - DNA, 25 bp, Canis familiaris
cagatctttactcagattcctccat

SEQ ID NO: 64102 - DNA, 25 bp, Canis familiaris
cagtcttgggcaagtcatctctctg

SEQ ID NO: 64103 - DNA, 25 bp, Canis familiaris
cagttgtggacagtgactctcctct

SEQ ID NO: 64104 - DNA, 25 bp, Canis familiaris
cagtctatagtgtctgcctttctct

SEQ ID NO: 64105 - DNA, 25 bp, Canis familiaris
cagatctcaagatttccctatccaa

SEQ ID NO: 64106 - DNA, 25 bp, Canis familiaris
cagatctcagctacattcaactatg

SEQ ID NO: 64107 - DNA, 25 bp, Canis familiaris
cagttcagttctgcacagccagtat

SEQ ID NO: 64108 - DNA, 25 bp, Canis familiaris
cagataggcgttgcacacgcagtga

SEQ ID NO: 64109 - DNA, 25 bp, Canis familiaris
cagtagtgcactacccctgtgcaca

SEQ ID NO: 64110 - DNA, 25 bp, Canis familiaris
cagttggttaacccaggcaagcggt

SEQ ID NO: 64111 - DNA, 25 bp, Canis familiaris
cagttgaccaaccccaggaactggt

SEQ ID NO: 64112 - DNA, 25 bp, Canis familiaris
caggtaccagaacccggtagcttct

SEQ ID NO: 64113 - DNA, 25 bp, Canis familiaris
taggtagccttctgtcggtaggcct

SEQ ID NO: 64114 - DNA, 25 bp, Canis familiaris
caggtacctatcggtggttaccctg

SEQ ID NO: 64115 - DNA, 25 bp, Canis familiaris
caggtccttgtcggttttgttgttg

SEQ ID NO: 64116 - DNA, 25 bp, Canis familiaris
cagggttttctcattgtctttttgc

SEQ ID NO: 64117 - DNA, 25 bp, Canis familiaris
caggggttttgcacgtgctatttcc

SEQ ID NO: 64118 - DNA, 25 bp, Canis familiaris
caggggaagttcactgttaccagcc

SEQ ID NO: 64119 - DNA, 25 bp, Canis familiaris
cagtggggccttatttttcaagtgg

SEQ ID NO: 64120 - DNA, 25 bp, Canis familiaris
cagggtgcgactgaacgtgttcggg

SEQ ID NO: 64121 - DNA, 25 bp, Canis familiaris
caggggaactcgacgcgagatgtag

SEQ ID NO: 64122 - DNA, 25 bp, Canis familiaris
caggggaatcacagcagtaggaact

SEQ ID NO: 64123 - DNA, 25 bp, Canis familiaris
caggggaaccacagtagtcactggc

SEQ ID NO: 64124 - DNA, 25 bp, Canis familiaris
caggtttacacacggtttactgacg

SEQ ID NO: 64125 - DNA, 25 bp, Canis familiaris
caggattcggactgggtttcgaaga

SEQ ID NO: 64126 - DNA, 25 bp, Canis familiaris
caggtcttcgtctgggtgggaaagg

SEQ ID NO: 64127 - DNA, 25 bp, Canis familiaris
caggttagagaaagtggtgggcaaa

SEQ ID NO: 64128 - DNA, 25 bp, Canis familiaris
caggttatgaccactttaggcctat

SEQ ID NO: 64129 - DNA, 25 bp, Canis familiaris
cagggtagacattcccttaccctgt

SEQ ID NO: 64130 - DNA, 25 bp, Canis familiaris
cagtggggaatctgtttctccctct

SEQ ID NO: 64131 - DNA, 25 bp, Canis familiaris
cagtaaggtaaccattttcggctct

SEQ ID NO: 64132 - DNA, 25 bp, Canis familiaris
cagtacatttaacacacttcctttc

SEQ ID NO: 64133 - DNA, 25 bp, Canis familiaris
catgctacaaattaaactttacttt

SEQ ID NO: 64134 - DNA, 25 bp, Canis familiaris
cagtacaagatcgactactcccact

SEQ ID NO: 64135 - DNA, 25 bp, Canis familiaris
cagtagacgtctgtatatcctagat

SEQ ID NO: 64136 - DNA, 25 bp, Canis familiaris
catgttttgcacggtattccaagtc

SEQ ID NO: 64137 - DNA, 25 bp, Canis familiaris
cagtcttcatcagctggcattctgc

SEQ ID NO: 64138 - DNA, 25 bp, Canis familiaris
cagttactcttcctgatttgtagaa

SEQ ID NO: 64139 - DNA, 25 bp, Canis familiaris
cagtatatgatctcctttatttaaa

SEQ ID NO: 64140 - DNA, 25 bp, Canis familiaris
caggacactcctgtttcatttaaag

SEQ ID NO: 64141 - DNA, 25 bp, Canis familiaris
cagtgggtcctagttacatttgtaa

SEQ ID NO: 64142 - DNA, 25 bp, Canis familiaris
caggggttttcattgcactagtgcg

SEQ ID NO: 64143 - DNA, 25 bp, Canis familiaris
cagttttgtccttctcattagctgg

SEQ ID NO: 64144 - DNA, 25 bp, Canis familiaris
cagtttcttccagtgtgtctacttg

SEQ ID NO: 64145 - DNA, 25 bp, Canis familiaris
cagtttctgtttgggtctgtatcag

SEQ ID NO: 64146 - DNA, 25 bp, Canis familiaris
cagtattaacttgggtattctagac

SEQ ID NO: 64147 - DNA, 25 bp, Canis familiaris
cagtttacatatgcagagttaccaa

SEQ ID NO: 64148 - DNA, 25 bp, Canis familiaris
cagtctcccagtgcactgttaacta

SEQ ID NO: 64149 - DNA, 25 bp, Canis familiaris
cagtcctaatggccacagattttct

SEQ ID NO: 64150 - DNA, 25 bp, Canis familiaris
cagtcctgactgtacaagattgttg

SEQ ID NO: 64151 - DNA, 25 bp, Canis familiaris
cagtctcccatttctcagatgtgaa

SEQ ID NO: 64152 - DNA, 25 bp, Canis familiaris
cagtcacttctcaatccaatctgat

SEQ ID NO: 64153 - DNA, 25 bp, Canis familiaris
cagtcagcttgacatgcctgatcaa

SEQ ID NO: 64154 - DNA, 25 bp, Canis familiaris
cagtgcagcttcatactcacacagc

SEQ ID NO: 64155 - DNA, 25 bp, Canis familiaris
cagtgcccatcgagatgcacgacca

SEQ ID NO: 64156 - DNA, 25 bp, Canis familiaris
cagtggcgtcggatcaagaacaaaa

SEQ ID NO: 64157 - DNA, 25 bp, Canis familiaris
cagtacgtcggcaatggaagaagac

SEQ ID NO: 64158 - DNA, 25 bp, Canis familiaris
cagtaattggagaaggaggcatgat

SEQ ID NO: 64159 - DNA, 25 bp, Canis familiaris
cagtaaatggggctgggctctggca

SEQ ID NO: 64160 - DNA, 25 bp, Canis familiaris
cagtacaaggggcagagtccgggtc

SEQ ID NO: 64161 - DNA, 25 bp, Canis familiaris
caggtccacgggcgtggggggtcag

SEQ ID NO: 64162 - DNA, 25 bp, Canis familiaris
cagttccccgcgcaagggggaggcg

SEQ ID NO: 64163 - DNA, 25 bp, Canis familiaris
cagatcacccggcgcaagtgggaag

SEQ ID NO: 64164 - DNA, 25 bp, Canis familiaris
cagtcagcagccgagctagacgtcg

SEQ ID NO: 64165 - DNA, 25 bp, Canis familiaris
cagttggcacatactagccgacagc

SEQ ID NO: 64166 - DNA, 25 bp, Canis familiaris
cagtcggagactcatctcgacggga

SEQ ID NO: 64167 - DNA, 25 bp, Canis familiaris
cagtcggcaggaaatcacgctccgg

SEQ ID NO: 64168 - DNA, 25 bp, Canis familiaris
cagttctaggtattcacctgggaga

SEQ ID NO: 64169 - DNA, 25 bp, Canis familiaris
cagattcaaggctttccctggggaa

SEQ ID NO: 64170 - DNA, 25 bp, Canis familiaris
cagttcagggcatgacgccagggtc

SEQ ID NO: 64171 - DNA, 25 bp, Canis familiaris
cagattcaggtgactcagctccacg

SEQ ID NO: 64172 - DNA, 25 bp, Canis familiaris
cagattggagggtctgcttcctgct

SEQ ID NO: 64173 - DNA, 25 bp, Canis familiaris
cagatcagtgggtatctgcttctcc

SEQ ID NO: 64174 - DNA, 25 bp, Canis familiaris
cagatagtagggactgtttcggact

SEQ ID NO: 64175 - DNA, 25 bp, Canis familiaris
cagtcgtcagcgggctttagggtta

SEQ ID NO: 64176 - DNA, 25 bp, Canis familiaris
cagtctccccctcttgaggagggac

SEQ ID NO: 64177 - DNA, 25 bp, Canis familiaris
cagtcccacttccttgtggggggag

SEQ ID NO: 64178 - DNA, 25 bp, Canis familiaris
cagtcccatttaaatgtggggattg

SEQ ID NO: 64179 - DNA, 25 bp, Canis familiaris
cagtcccttgtttatggttggacaa

SEQ ID NO: 64180 - DNA, 25 bp, Canis familiaris
cagggcctctttgatgtgttgggtg

SEQ ID NO: 64181 - DNA, 25 bp, Canis familiaris
cagggacacgttttcgaggttggag

SEQ ID NO: 64182 - DNA, 25 bp, Canis familiaris
cagtaaacgatttgcttttggtggg

SEQ ID NO: 64183 - DNA, 25 bp, Canis familiaris
caggaaacagtttgctagtggaccc

SEQ ID NO: 64184 - DNA, 25 bp, Canis familiaris
cagtgagaactgacccttcaggaca

SEQ ID NO: 64185 - DNA, 25 bp, Canis familiaris
cagttgccattcactttcagaacct

SEQ ID NO: 64186 - DNA, 25 bp, Canis familiaris
cagtcttcattgtactattcaaccc

SEQ ID NO: 64187 - DNA, 25 bp, Canis familiaris
cagatttctctgtgctgactggaca

SEQ ID NO: 64188 - DNA, 25 bp, Canis familiaris
cagttgctcctgtgctagatagtag

SEQ ID NO: 64189 - DNA, 25 bp, Canis familiaris
cagttgccactgtggtgtgaggcca

SEQ ID NO: 64190 - DNA, 25 bp, Canis familiaris
caggaggacgaacagtctggccggg

SEQ ID NO: 64191 - DNA, 25 bp, Canis familiaris
cagatagaggcctctaggctggccc

SEQ ID NO: 64192 - DNA, 25 bp, Canis familiaris
cagtagcaggccttcagacagcgag

SEQ ID NO: 64193 - DNA, 25 bp, Canis familiaris
cagtaagcagcagctctgagccaga

SEQ ID NO: 64194 - DNA, 25 bp, Canis familiaris
cagataacctgatctaccaagtggc

SEQ ID NO: 64195 - DNA, 25 bp, Canis familiaris
cagtggccactgtgggccaactggc

SEQ ID NO: 64196 - DNA, 25 bp, Canis familiaris
cagtagccacgggtccacaatgtgg

SEQ ID NO: 64197 - DNA, 25 bp, Canis familiaris
cagtaggcagtgcttctcaggtctg

SEQ ID NO: 64198 - DNA, 25 bp, Canis familiaris
cagtaggcttgtattagtgctttaa

SEQ ID NO: 64199 - DNA, 25 bp, Canis familiaris
cagtaggcttgtattagtgctttaa

SEQ ID NO: 64200 - DNA, 25 bp, Canis familiaris
cagtaggcttgtattagtgctttaa

SEQ ID NO: 64201 - DNA, 25 bp, Canis familiaris
cagttgtgccttattgttccattta

SEQ ID NO: 64202 - DNA, 25 bp, Canis familiaris
cagtgtctcctaatattttcccctg

SEQ ID NO: 64203 - DNA, 25 bp, Canis familiaris
cagtccctgtttgtttcccagggtg

SEQ ID NO: 64204 - DNA, 25 bp, Canis familiaris
cagtaccttttgttttcttcattag

SEQ ID NO: 64205 - DNA, 25 bp, Canis familiaris
cagtccacgtttttgtttctcaata

SEQ ID NO: 64206 - DNA, 25 bp, Canis familiaris
cagtgaccggttttgttgcactcgt

SEQ ID NO: 64207 - DNA, 25 bp, Canis familiaris
cagtgccttgttcattgttcacctg

SEQ ID NO: 64208 - DNA, 25 bp, Canis familiaris
cagtaattgttccaattctcctcgc

SEQ ID NO: 64209 - DNA, 25 bp, Canis familiaris
cagtaatagttaccattctccctgc

SEQ ID NO: 64210 - DNA, 25 bp, Canis familiaris
cagtattattgtcctcatttgccac

SEQ ID NO: 64211 - DNA, 25 bp, Canis familiaris
cagtatttattgtttttcacctcct

SEQ ID NO: 64212 - DNA, 25 bp, Canis familiaris
caggaactttgtgaattccctccca

SEQ ID NO: 64213 - DNA, 25 bp, Canis familiaris
caggaccctgacttaatacccatac

SEQ ID NO: 64214 - DNA, 25 bp, Canis familiaris
catggagccgtgttgtcaaaccctc

SEQ ID NO: 64215 - DNA, 25 bp, Canis familiaris
caggaaggtgccaatataaccaatg

SEQ ID NO: 64216 - DNA, 25 bp, Canis familiaris
cagtgaatacccgattggcaccaga

SEQ ID NO: 64217 - DNA, 25 bp, Canis familiaris
cagtgctaacgtggtaggcctctga

SEQ ID NO: 64218 - DNA, 25 bp, Canis familiaris
cagttacacacaggaagtgcctctg

SEQ ID NO: 64219 - DNA, 25 bp, Canis familiaris
cagtgaaacactgggacgcctgcac

SEQ ID NO: 64220 - DNA, 25 bp, Canis familiaris
cagtgagtacactatgctggcaccc

SEQ ID NO: 64221 - DNA, 25 bp, Canis familiaris
cagtgacaccacttgtagacaacca

SEQ ID NO: 64222 - DNA, 25 bp, Canis familiaris
cagtaccagagcgtgaggacaggaa

SEQ ID NO: 64223 - DNA, 25 bp, Canis familiaris
cagtgccctggcttgtggcaaggga

SEQ ID NO: 64224 - DNA, 25 bp, Canis familiaris
cagtgccggatcgtggtgcagaaga

SEQ ID NO: 64225 - DNA, 25 bp, Canis familiaris
cagtgactgtgagcggtgctgacct

SEQ ID NO: 64226 - DNA, 25 bp, Canis familiaris
cagtcagcatgtccagcagagtgtg

SEQ ID NO: 64227 - DNA, 25 bp, Canis familiaris
cagtcagggctagggatgtgcggta

SEQ ID NO: 64228 - DNA, 25 bp, Canis familiaris
cagtaggtgtctgcagtggggctca

SEQ ID NO: 64229 - DNA, 25 bp, Canis familiaris
caggctggtgttgccatcggaagac

SEQ ID NO: 64230 - DNA, 25 bp, Canis familiaris
caggagccgttgcgatctgaagagg

SEQ ID NO: 64231 - DNA, 25 bp, Canis familiaris
cagtgccccattctatcatcaatgg

SEQ ID NO: 64232 - DNA, 25 bp, Canis familiaris
cagtgccccattctatcatcaatgg

SEQ ID NO: 64233 - DNA, 25 bp, Canis familiaris
caggccacccatctatgaatttact

SEQ ID NO: 64234 - DNA, 25 bp, Canis familiaris
caggatggccctctagaattgtccc

SEQ ID NO: 64235 - DNA, 25 bp, Canis familiaris
cagggtcaggtgaggaacctccctc

SEQ ID NO: 64236 - DNA, 25 bp, Canis familiaris
caggtcgggaggcaataacccccat

SEQ ID NO: 64237 - DNA, 25 bp, Canis familiaris
cagggggaaggtgcaccttctccct

SEQ ID NO: 64238 - DNA, 25 bp, Canis familiaris
caggagggaacttccacactttcca

SEQ ID NO: 64239 - DNA, 25 bp, Canis familiaris
cagggatgggtttcccactaccctg

SEQ ID NO: 64240 - DNA, 25 bp, Canis familiaris
cagggtacgtgatcccctaagggca

SEQ ID NO: 64241 - DNA, 25 bp, Canis familiaris
cagtggtacgatgtctccatctacg

SEQ ID NO: 64242 - DNA, 25 bp, Canis familiaris
cagtgtgtacagttacgccagttcc

SEQ ID NO: 64243 - DNA, 25 bp, Canis familiaris
cagtattacatcgagcatcccgtgt

SEQ ID NO: 64244 - DNA, 25 bp, Canis familiaris
cagttgtagatgatctgccctgcgg

SEQ ID NO: 64245 - DNA, 25 bp, Canis familiaris
cagttgaagatgctgcgtcctctgc

SEQ ID NO: 64246 - DNA, 25 bp, Canis familiaris
cagtggaggcagctggtcactggca

SEQ ID NO: 64247 - DNA, 25 bp, Canis familiaris
cagtcgggagtactgtcctccatgg

SEQ ID NO: 64248 - DNA, 25 bp, Canis familiaris
cagtcagggcagtccttcattctgc

SEQ ID NO: 64249 - DNA, 25 bp, Canis familiaris
cagtcaggtgggtttcactgctgcc

SEQ ID NO: 64250 - DNA, 25 bp, Canis familiaris
cagtcgagagcttgttgtctacgcc

SEQ ID NO: 64251 - DNA, 25 bp, Canis familiaris
cagtccaggaaatgctctatctcag

SEQ ID NO: 64252 - DNA, 25 bp, Canis familiaris
cagtccgtggaggagttcaccaggg

SEQ ID NO: 64253 - DNA, 25 bp, Canis familiaris
cagtccgtgaggaagctccgtgagg

SEQ ID NO: 64254 - DNA, 25 bp, Canis familiaris
catggccggctggaacttccaagga

SEQ ID NO: 64255 - DNA, 25 bp, Canis familiaris
caggctcgggggttgccgagaagcc

SEQ ID NO: 64256 - DNA, 25 bp, Canis familiaris
cagttccgaggtttccaaggggcag

SEQ ID NO: 64257 - DNA, 25 bp, Canis familiaris
caggtccgagaacccctgaagggag

SEQ ID NO: 64258 - DNA, 25 bp, Canis familiaris
catgttcctagcagccttggaatgg

SEQ ID NO: 64259 - DNA, 25 bp, Canis familiaris
cagttgcaccagggccagtggagta

SEQ ID NO: 64260 - DNA, 25 bp, Canis familiaris
cagttcctggcaggcacagtggaca

SEQ ID NO: 64261 - DNA, 25 bp, Canis familiaris
cagttgcctggcagagcagtggtct

SEQ ID NO: 64262 - DNA, 25 bp, Canis familiaris
cagttgcagtccaaggttgtggctg

SEQ ID NO: 64263 - DNA, 25 bp, Canis familiaris
cagttgctgtccagcttctagtgca

SEQ ID NO: 64264 - DNA, 25 bp, Canis familiaris
cagtagtgccaacgtgtcacactgc

SEQ ID NO: 64265 - DNA, 25 bp, Canis familiaris
cagtattcccatgtgttactgccca

SEQ ID NO: 64266 - DNA, 25 bp, Canis familiaris
cagtttctacatgtcttctggtcct

SEQ ID NO: 64267 - DNA, 25 bp, Canis familiaris
cagttcattactcaattctgtttct

SEQ ID NO: 64268 - DNA, 25 bp, Canis familiaris
catgttcctgcccaataaagtttca

SEQ ID NO: 64269 - DNA, 25 bp, Canis familiaris
cagtcatgtctgcttaaaagtgttc

SEQ ID NO: 64270 - DNA, 25 bp, Canis familiaris
cagtctgtcagctttattaatgttg

SEQ ID NO: 64271 - DNA, 25 bp, Canis familiaris
cttggtcctagtttactttgcggag

SEQ ID NO: 64272 - DNA, 25 bp, Canis familiaris
cttggtccaaggttacttcagctca

SEQ ID NO: 64273 - DNA, 25 bp, Canis familiaris
cagggtcctaggatgagttccacat

SEQ ID NO: 64274 - DNA, 25 bp, Canis familiaris
cagggtccggtggtggtgagccctg

SEQ ID NO: 64275 - DNA, 25 bp, Canis familiaris
cggttccactgttttgattccgcgg

SEQ ID NO: 64276 - DNA, 25 bp, Canis familiaris
cagtttccacggttcttaactgcgg

SEQ ID NO: 64277 - DNA, 25 bp, Canis familiaris
cagggcacccggtatcatttaccgg

SEQ ID NO: 64278 - DNA, 25 bp, Canis familiaris
caggaaaggcggttacttctcctca

SEQ ID NO: 64279 - DNA, 25 bp, Canis familiaris
caggaaaaccctaacttctccagag

SEQ ID NO: 64280 - DNA, 25 bp, Canis familiaris
cagtaaaacccattgacctgcacct

SEQ ID NO: 64281 - DNA, 25 bp, Canis familiaris
cagtcacaaaatccaaatgcccctc

SEQ ID NO: 64282 - DNA, 25 bp, Canis familiaris
cagtacctacagccaagctgcagcc

SEQ ID NO: 64283 - DNA, 25 bp, Canis familiaris
cagtacctggtgaaagctgtggcca

SEQ ID NO: 64284 - DNA, 25 bp, Canis familiaris
caggacgtgcagaaaccgtcccaag

SEQ ID NO: 64285 - DNA, 25 bp, Canis familiaris
cagggcttaagtccaggatcccaag

SEQ ID NO: 64286 - DNA, 25 bp, Canis familiaris
cagtgatgtctgagcccaggatgcc

SEQ ID NO: 64287 - DNA, 25 bp, Canis familiaris
cagtatttggaccatcagggcctcc

SEQ ID NO: 64288 - DNA, 25 bp, Canis familiaris
cagtgctttggaaatctgcggatct

SEQ ID NO: 64289 - DNA, 25 bp, Canis familiaris
cagtttgtgggagtgctcggctggt

SEQ ID NO: 64290 - DNA, 25 bp, Canis familiaris
cagtatgatgtgtgtgccatctgcc

SEQ ID NO: 64291 - DNA, 25 bp, Canis familiaris
cagtatccagattgtcagccatgcc

SEQ ID NO: 64292 - DNA, 25 bp, Canis familiaris
cagtgaagaatatttgccagccctc

SEQ ID NO: 64293 - DNA, 25 bp, Canis familiaris
caggaagtcagttgtgtcccagttc

SEQ ID NO: 64294 - DNA, 25 bp, Canis familiaris
caggtaagcgtctgactctagattt

SEQ ID NO: 64295 - DNA, 25 bp, Canis familiaris
cagggcaaggtcatacttcagcagg

SEQ ID NO: 64296 - DNA, 25 bp, Canis familiaris
caggtcagggttggttgtggccgaa

SEQ ID NO: 64297 - DNA, 25 bp, Canis familiaris
cagtgctagaggttctgggtccctg

SEQ ID NO: 64298 - DNA, 25 bp, Canis familiaris
cagtgtcagggattctttccttctg

SEQ ID NO: 64299 - DNA, 25 bp, Canis familiaris
cagtgatagatatatatgcttccat

SEQ ID NO: 64300 - DNA, 25 bp, Canis familiaris
cagtgttcatgacatctgctgctgc

SEQ ID NO: 64301 - DNA, 25 bp, Canis familiaris
caggttgcggctttctgtgggaagg

SEQ ID NO: 64302 - DNA, 25 bp, Canis familiaris
caggttccatgttttgattccgggg

SEQ ID NO: 64303 - DNA, 25 bp, Canis familiaris
caggttccatgttttgattccgggg

SEQ ID NO: 64304 - DNA, 25 bp, Canis familiaris
caggttccatgttttgattccgggg

SEQ ID NO: 64305 - DNA, 25 bp, Canis familiaris
catgtttcttgatgtagaaccgtgg

SEQ ID NO: 64306 - DNA, 25 bp, Canis familiaris
caggctttagtacataaccctccct

SEQ ID NO: 64307 - DNA, 25 bp, Canis familiaris
caggtcttaatgttatccaactcca

SEQ ID NO: 64308 - DNA, 25 bp, Canis familiaris
cagtcctggagactctaccaactcc

SEQ ID NO: 64309 - DNA, 25 bp, Canis familiaris
cagtctctgagaccgacaaaaccac

SEQ ID NO: 64310 - DNA, 25 bp, Canis familiaris
cagtcgtgcaccggccaaagactga

SEQ ID NO: 64311 - DNA, 25 bp, Canis familiaris
cagtatgttccctctgagaagctga

SEQ ID NO: 64312 - DNA, 25 bp, Canis familiaris
cagttttcgctctggtgaatgcatg

SEQ ID NO: 64313 - DNA, 25 bp, Canis familiaris
cagttctatactgttatgctatgtg

SEQ ID NO: 64314 - DNA, 25 bp, Canis familiaris
cagtttatggtgcagaatggattga

SEQ ID NO: 64315 - DNA, 25 bp, Canis familiaris
cagggttggtgcagacacgattata

SEQ ID NO: 64316 - DNA, 25 bp, Canis familiaris
cagttctttcttgaccgatttacaa

SEQ ID NO: 64317 - DNA, 25 bp, Canis familiaris
cagtttttcctgcactattttaata

SEQ ID NO: 64318 - DNA, 25 bp, Canis familiaris
cagtttgctgtcctggacttctgtt

SEQ ID NO: 64319 - DNA, 25 bp, Canis familiaris
cagttctttcgggacatggatgatg

SEQ ID NO: 64320 - DNA, 25 bp, Canis familiaris
cagtcccttcaacacaggatggacc

SEQ ID NO: 64321 - DNA, 25 bp, Canis familiaris
cagtcatccaccatccaaggggaga

SEQ ID NO: 64322 - DNA, 25 bp, Canis familiaris
caggagacccacgcaacgagaagaa

SEQ ID NO: 64323 - DNA, 25 bp, Canis familiaris
cagggggccagtacaccaacctgca

SEQ ID NO: 64324 - DNA, 25 bp, Canis familiaris
cagggggccagtacaccaacctgca

SEQ ID NO: 64325 - DNA, 25 bp, Canis familiaris
caggacggggtatctgaaccaattg

SEQ ID NO: 64326 - DNA, 25 bp, Canis familiaris
cagggggtggtttcaggtgccattt

SEQ ID NO: 64327 - DNA, 25 bp, Canis familiaris
cagggggtaggtaagctgacgcttg

SEQ ID NO: 64328 - DNA, 25 bp, Canis familiaris
cagggcctggaactaacgcccagtg

SEQ ID NO: 64329 - DNA, 25 bp, Canis familiaris
caggggagaggaccaaggaccgtga

SEQ ID NO: 64330 - DNA, 25 bp, Canis familiaris
cagggcgtggttctggagacgcggg

SEQ ID NO: 64331 - DNA, 25 bp, Canis familiaris
cagtaggatggccttggggacgcag

SEQ ID NO: 64332 - DNA, 25 bp, Canis familiaris
cagtagacatagccattagtgacac

SEQ ID NO: 64333 - DNA, 25 bp, Canis familiaris
cagtatccatatattcctgcacata

SEQ ID NO: 64334 - DNA, 25 bp, Canis familiaris
cagtacttgatgacattcctggcaa

SEQ ID NO: 64335 - DNA, 25 bp, Canis familiaris
cagtcacctctgccattctaggcag

SEQ ID NO: 64336 - DNA, 25 bp, Canis familiaris
cagtccaagcaggcagtgtaagcaa

SEQ ID NO: 64337 - DNA, 25 bp, Canis familiaris
cagtctacacaggatggccatacat

SEQ ID NO: 64338 - DNA, 25 bp, Canis familiaris
cagttactgcagcttgcctggaacc

SEQ ID NO: 64339 - DNA, 25 bp, Canis familiaris
cagtattcactggttgctgacgaca

SEQ ID NO: 64340 - DNA, 25 bp, Canis familiaris
cagtttctgttcttgtgacaacaca

SEQ ID NO: 64341 - DNA, 25 bp, Canis familiaris
cagttatttctcttgtgcacaggga

SEQ ID NO: 64342 - DNA, 25 bp, Canis familiaris
cagttagtcaacttgcaccagagcg

SEQ ID NO: 64343 - DNA, 25 bp, Canis familiaris
cagtttgacaaagcctcgagagtac

SEQ ID NO: 64344 - DNA, 25 bp, Canis familiaris
cagtgggtcggagcctatggattaa

SEQ ID NO: 64345 - DNA, 25 bp, Canis familiaris
caggggaaggcagccctggatccga

SEQ ID NO: 64346 - DNA, 25 bp, Canis familiaris
cagtttgaaagaaggcccgtcccag

SEQ ID NO: 64347 - DNA, 25 bp, Canis familiaris
caggttggacagtggtcccaccagg

SEQ ID NO: 64348 - DNA, 25 bp, Canis familiaris
catgtttgagaccttcaacacccca

SEQ ID NO: 64349 - DNA, 25 bp, Canis familiaris
cagtcttgtgacttgtgcaggcagt

SEQ ID NO: 64350 - DNA, 25 bp, Canis familiaris
cagtctgttacaatgatgcccaaat

SEQ ID NO: 64351 - DNA, 25 bp, Canis familiaris
caggctgacatctctgttgccaaat

SEQ ID NO: 64352 - DNA, 25 bp, Canis familiaris
caggctgacctgtgctaaaagcatc

SEQ ID NO: 64353 - DNA, 25 bp, Canis familiaris
cagtgtgactttggctccaactgca

SEQ ID NO: 64354 - DNA, 25 bp, Canis familiaris
cagtctgtcttctgcactacagtga

SEQ ID NO: 64355 - DNA, 25 bp, Canis familiaris
cagtgctgtctggcggcaccaccat

SEQ ID NO: 64356 - DNA, 25 bp, Canis familiaris
cagtggatctgccggaatacctttg

SEQ ID NO: 64357 - DNA, 25 bp, Canis familiaris
ctaggagcggccaactagcagcttg

SEQ ID NO: 64358 - DNA, 25 bp, Canis familiaris
cagggagggccaagtcagcagtagt

SEQ ID NO: 64359 - DNA, 25 bp, Canis familiaris
cagtgccactgtgtaccaggctgag

SEQ ID NO: 64360 - DNA, 25 bp, Canis familiaris
cagtgtcagttttactgtcccagtc

SEQ ID NO: 64361 - DNA, 25 bp, Canis familiaris
cagtttgtttatccattcacctgct

SEQ ID NO: 64362 - DNA, 25 bp, Canis familiaris
cagttattttcctatatccttgctc

SEQ ID NO: 64363 - DNA, 25 bp, Canis familiaris
cagtgaattttcatttctttccttt

SEQ ID NO: 64364 - DNA, 25 bp, Canis familiaris
caggtatggttactttattttgctt

SEQ ID NO: 64365 - DNA, 25 bp, Canis familiaris
cagggacgtgtatcttttctctgcc

SEQ ID NO: 64366 - DNA, 25 bp, Canis familiaris
cagtgcggtttgtggtgttgttggc

SEQ ID NO: 64367 - DNA, 25 bp, Canis familiaris
cagggcgttctgaggtctgtttacc

SEQ ID NO: 64368 - DNA, 25 bp, Canis familiaris
caggggcttctgggaaagtttatgc

SEQ ID NO: 64369 - DNA, 25 bp, Canis familiaris
caggacggccttaacactgtttctg

SEQ ID NO: 64370 - DNA, 25 bp, Canis familiaris
cggaagaccttgtaacggttcagca

SEQ ID NO: 64371 - DNA, 25 bp, Canis familiaris
caggaaagccttgaatgcattttaa

SEQ ID NO: 64372 - DNA, 25 bp, Canis familiaris
ctggtttccttctatcgagtactaa

SEQ ID NO: 64373 - DNA, 25 bp, Canis familiaris
cagtgttgtcctaagtctactagtt

SEQ ID NO: 64374 - DNA, 25 bp, Canis familiaris
cagggatccctcaaaccctgagtta

SEQ ID NO: 64375 - DNA, 25 bp, Canis familiaris
cagtggtcaccaaaaagtctacatt

SEQ ID NO: 64376 - DNA, 25 bp, Canis familiaris
cagtcgacactatggagttgctcct

SEQ ID NO: 64377 - DNA, 25 bp, Canis familiaris
catgactaactgtgtaagtgcttat

SEQ ID NO: 64378 - DNA, 25 bp, Canis familiaris
cagtctgatactgttacctgcttca

SEQ ID NO: 64379 - DNA, 25 bp, Canis familiaris
cagtgtggactggtgttttgttcgg

SEQ ID NO: 64380 - DNA, 25 bp, Canis familiaris
cagtgtctgaaaggtaattgtttgc

SEQ ID NO: 64381 - DNA, 25 bp, Canis familiaris
cagtgattgatatggagcctttcat

SEQ ID NO: 64382 - DNA, 25 bp, Canis familiaris
caggttactaagccctttgcaatgg

SEQ ID NO: 64383 - DNA, 25 bp, Canis familiaris
cagggcctctaattccacttaaaga

SEQ ID NO: 64384 - DNA, 25 bp, Canis familiaris
cagggacctaaatgcctatccacga

SEQ ID NO: 64385 - DNA, 25 bp, Canis familiaris
cagtgaacctggggatgcctatcac

SEQ ID NO: 64386 - DNA, 25 bp, Canis familiaris
cagtgaaactgcgaatggctcatta

SEQ ID NO: 64387 - DNA, 25 bp, Canis familiaris
cagtgaaaccgttgacttgccgact

SEQ ID NO: 64388 - DNA, 25 bp, Canis familiaris
cagtagaatctccttatcttgctcc

SEQ ID NO: 64389 - DNA, 25 bp, Canis familiaris
caggaaaatcgtgtcctgccgcatc

SEQ ID NO: 64390 - DNA, 25 bp, Canis familiaris
caggaaaacagggtgccagtggtcc

SEQ ID NO: 64391 - DNA, 25 bp, Canis familiaris
cagggatgaaagcttctcgtgggcc

SEQ ID NO: 64392 - DNA, 25 bp, Canis familiaris
caggaagccaaccttgctgttcagt

SEQ ID NO: 64393 - DNA, 25 bp, Canis familiaris
caggtagccaatggtggcggcaagt

SEQ ID NO: 64394 - DNA, 25 bp, Canis familiaris
caggttctcgtggttccgatgagtg

SEQ ID NO: 64395 - DNA, 25 bp, Canis familiaris
caggctttaggcatgaccacggaga

SEQ ID NO: 64396 - DNA, 25 bp, Canis familiaris
caggctttaggcattaccatctaag

SEQ ID NO: 64397 - DNA, 25 bp, Canis familiaris
cagtgttgtctggtggtaccaccat

SEQ ID NO: 64398 - DNA, 25 bp, Canis familiaris
caggctttctcgagaagcaccaaat

SEQ ID NO: 64399 - DNA, 25 bp, Canis familiaris
cagtcttacttttgtagttttatat

SEQ ID NO: 64400 - DNA, 25 bp, Canis familiaris
cagtagttttcgttagtctcatttt

SEQ ID NO: 64401 - DNA, 25 bp, Canis familiaris
cagtctttttcttatcttctatttc

SEQ ID NO: 64402 - DNA, 25 bp, Canis familiaris
cagtcttttttccataatgtttcct

SEQ ID NO: 64403 - DNA, 25 bp, Canis familiaris
caggctacttttgaagcgattcttt

SEQ ID NO: 64404 - DNA, 25 bp, Canis familiaris
caggctagcagttttgttggaccta

SEQ ID NO: 64405 - DNA, 25 bp, Canis familiaris
cagtgtcagattgatcttggagatc

SEQ ID NO: 64406 - DNA, 25 bp, Canis familiaris
cagtgtattctcagccatgacatgt

SEQ ID NO: 64407 - DNA, 25 bp, Canis familiaris
cagtgaattctttcctagcatttga

SEQ ID NO: 64408 - DNA, 25 bp, Canis familiaris
caggattatacttactcagctgtta

SEQ ID NO: 64409 - DNA, 25 bp, Canis familiaris
caggttcaggcctctagttcatact

SEQ ID NO: 64410 - DNA, 25 bp, Canis familiaris
cagtgtcaaccctttactacacaat

SEQ ID NO: 64411 - DNA, 25 bp, Canis familiaris
catgttcctagcctgtaactaccta

SEQ ID NO: 64412 - DNA, 25 bp, Canis familiaris
cagtctgcaccgcgaaacaagcttg

SEQ ID NO: 64413 - DNA, 25 bp, Canis familiaris
cagtgtccacccagaatcaggttgg

SEQ ID NO: 64414 - DNA, 25 bp, Canis familiaris
cagtcttactgcctggaccaggctt

SEQ ID NO: 64415 - DNA, 25 bp, Canis familiaris
caggcggacggccgattcaggatgt

SEQ ID NO: 64416 - DNA, 25 bp, Canis familiaris
cagtccggggcgctgcatagagtgc

SEQ ID NO: 64417 - DNA, 25 bp, Canis familiaris
catgtcggggtggctatatcggctc

SEQ ID NO: 64418 - DNA, 25 bp, Canis familiaris
catggccgagttcctcaaggtcaag

SEQ ID NO: 64419 - DNA, 25 bp, Canis familiaris
caggccaagaatcacaaactccgga

SEQ ID NO: 64420 - DNA, 25 bp, Canis familiaris
catccccaggtatcaaactcggttg

SEQ ID NO: 64421 - DNA, 25 bp, Canis familiaris
catcctccctgtgagaagtcacggg

SEQ ID NO: 64422 - DNA, 25 bp, Canis familiaris
cagtgctcgccagaagtatgtccgg

SEQ ID NO: 64423 - DNA, 25 bp, Canis familiaris
cagtgctcgccagaagtatgtccgg

SEQ ID NO: 64424 - DNA, 25 bp, Canis familiaris
cagtgctcggcagtcatactggggc

SEQ ID NO: 64425 - DNA, 25 bp, Canis familiaris
cagtctgcagctgtctggatgggtc

SEQ ID NO: 64426 - DNA, 25 bp, Canis familiaris
cagtgatcactgcttgtcgggatgc

SEQ ID NO: 64427 - DNA, 25 bp, Canis familiaris
cagtagactccatgtctgggatgac

SEQ ID NO: 64428 - DNA, 25 bp, Canis familiaris
caggctaagccatgtcttggtcaac

SEQ ID NO: 64429 - DNA, 25 bp, Canis familiaris
cagggacgaccgtctggttcaatca

SEQ ID NO: 64430 - DNA, 25 bp, Canis familiaris
cagggtcaacactcagggtcattac

SEQ ID NO: 64431 - DNA, 25 bp, Canis familiaris
cagtgtgtagacggaaaggctcaaa

SEQ ID NO: 64432 - DNA, 25 bp, Canis familiaris
caggttcatacccgagtggctaaga

SEQ ID NO: 64433 - DNA, 25 bp, Canis familiaris
caggttctccagcgtgattcgacgc

SEQ ID NO: 64434 - DNA, 25 bp, Canis familiaris
caggtttcactgcttcattaggaca

SEQ ID NO: 64435 - DNA, 25 bp, Canis familiaris
cagtgttccagatgtatcttagcta

SEQ ID NO: 64436 - DNA, 25 bp, Canis familiaris
cagtgatttagcactgccttcagcc

SEQ ID NO: 64437 - DNA, 25 bp, Canis familiaris
cgtactgaacccggcattcagctca

SEQ ID NO: 64438 - DNA, 25 bp, Canis familiaris
cagtactggcacctccgagtatgcc

SEQ ID NO: 64439 - DNA, 25 bp, Canis familiaris
cagtcaccacacctctggatgtggc

SEQ ID NO: 64440 - DNA, 25 bp, Canis familiaris
cagtgccgtagcctctaatgtgaga

SEQ ID NO: 64441 - DNA, 25 bp, Canis familiaris
cagtctcactaccctcagaaggaag

SEQ ID NO: 64442 - DNA, 25 bp, Canis familiaris
cagtctctctatggcccaggagatg

SEQ ID NO: 64443 - DNA, 25 bp, Canis familiaris
caggtccaaggcgcggagatcagct

SEQ ID NO: 64444 - DNA, 25 bp, Canis familiaris
cagggaaggcgccctggtacactgg

SEQ ID NO: 64445 - DNA, 25 bp, Canis familiaris
cagggcaaccgggtttgcacttggg

SEQ ID NO: 64446 - DNA, 25 bp, Canis familiaris
cagggcaacccgggcagcccgggtg

SEQ ID NO: 64447 - DNA, 25 bp, Canis familiaris
cagggagggaatgtgtgccggggtt

SEQ ID NO: 64448 - DNA, 25 bp, Canis familiaris
cagggaggggctgaggcctggtgtc

SEQ ID NO: 64449 - DNA, 25 bp, Canis familiaris
caggtggacggagatggccaaatcc

SEQ ID NO: 64450 - DNA, 25 bp, Canis familiaris
catggccaacttcttagccgaacca

SEQ ID NO: 64451 - DNA, 25 bp, Canis familiaris
cagtgagaaattcttggcccgtcca

SEQ ID NO: 64452 - DNA, 25 bp, Canis familiaris
cagtacaaattgcacttcaccttcc

SEQ ID NO: 64453 - DNA, 25 bp, Canis familiaris
cagtgtgaaaaggacctcaccccag

SEQ ID NO: 64454 - DNA, 25 bp, Canis familiaris
cagtgaagtatagcacctgcccaaa

SEQ ID NO: 64455 - DNA, 25 bp, Canis familiaris
cagtcaaaagacaacgtggcacaga

SEQ ID NO: 64456 - DNA, 25 bp, Canis familiaris
catgactacattacaacgggccagg

SEQ ID NO: 64457 - DNA, 25 bp, Canis familiaris
catactgagctgtgccacggtctag

SEQ ID NO: 64458 - DNA, 25 bp, Canis familiaris
catgattgaggcagtcctgttaaaa

SEQ ID NO: 64459 - DNA, 25 bp, Canis familiaris
cagtctatactactagctgttaata

SEQ ID NO: 64460 - DNA, 25 bp, Canis familiaris
cagtgtcaactcatatgttctaaga

SEQ ID NO: 64461 - DNA, 25 bp, Canis familiaris
cagtgtccagcccattgttgaatag

SEQ ID NO: 64462 - DNA, 25 bp, Canis familiaris
cagtgttgcgctccatttgattaga

SEQ ID NO: 64463 - DNA, 25 bp, Canis familiaris
cagtgggcatgtgctttgtgtaaag

SEQ ID NO: 64464 - DNA, 25 bp, Canis familiaris
cagggcactgtttattgtagagaca

SEQ ID NO: 64465 - DNA, 25 bp, Canis familiaris
cagtagatttttttgtagtgaacat

SEQ ID NO: 64466 - DNA, 25 bp, Canis familiaris
cagtagattatctttctgttggaga

SEQ ID NO: 64467 - DNA, 25 bp, Canis familiaris
cagtagcttatattttgttcatgac

SEQ ID NO: 64468 - DNA, 25 bp, Canis familiaris
cagtagcctctactgtcttacatcc

SEQ ID NO: 64469 - DNA, 25 bp, Canis familiaris
cagtctcccatttgtttgaatctca

SEQ ID NO: 64470 - DNA, 25 bp, Canis familiaris
cagtgtccaattttgctggcaatct

SEQ ID NO: 64471 - DNA, 25 bp, Canis familiaris
cagtgaccaccttttggagacctgc

SEQ ID NO: 64472 - DNA, 25 bp, Canis familiaris
caggtcatcaccattggcaatgagc

SEQ ID NO: 64473 - DNA, 25 bp, Canis familiaris
cagtgtgatgcacctgtgggttgcc

SEQ ID NO: 64474 - DNA, 25 bp, Canis familiaris
cagtctgtgcacttggatcagtccc

SEQ ID NO: 64475 - DNA, 25 bp, Canis familiaris
cagtctgcgatccagctgacaattt

SEQ ID NO: 64476 - DNA, 25 bp, Canis familiaris
cagtgctgctgttcctgatgagatc

SEQ ID NO: 64477 - DNA, 25 bp, Canis familiaris
cagtgcccttcagtgagagaccttt

SEQ ID NO: 64478 - DNA, 25 bp, Canis familiaris
cagtctacagacctgaagaccccct

SEQ ID NO: 64479 - DNA, 25 bp, Canis familiaris
cagtgcgaggacgtgacaggccagt

SEQ ID NO: 64480 - DNA, 25 bp, Canis familiaris
cagtcagagaccatgatcacccgtc

SEQ ID NO: 64481 - DNA, 25 bp, Canis familiaris
cagtgaagatgcctcagtcaccatc

SEQ ID NO: 64482 - DNA, 25 bp, Canis familiaris
cagtaagtgcgggtcataagcttgc

SEQ ID NO: 64483 - DNA, 25 bp, Canis familiaris
cagtaagtggcctctcagtgttgct

SEQ ID NO: 64484 - DNA, 25 bp, Canis familiaris
caggaagggtctctcaagtctctgc

SEQ ID NO: 64485 - DNA, 25 bp, Canis familiaris
catgggccgaggcaccaagttctga

SEQ ID NO: 64486 - DNA, 25 bp, Canis familiaris
cagggcttagggccaagaggtctca

SEQ ID NO: 64487 - DNA, 25 bp, Canis familiaris
caggtctacgatctccagaggtgta

SEQ ID NO: 64488 - DNA, 25 bp, Canis familiaris
cagtgttagcgtgcccaggagtaaa

SEQ ID NO: 64489 - DNA, 25 bp, Canis familiaris
cagtgtgctgcgttacgtcagggta

SEQ ID NO: 64490 - DNA, 25 bp, Canis familiaris
cagtgccatgcgttcgctgaaaggc

SEQ ID NO: 64491 - DNA, 25 bp, Canis familiaris
cagtccagtatttgtttgcagcgcc

SEQ ID NO: 64492 - DNA, 25 bp, Canis familiaris
cagtccttcatgatgagttcatcgc

SEQ ID NO: 64493 - DNA, 25 bp, Canis familiaris
caggcccatagcatggggcttggct

SEQ ID NO: 64494 - DNA, 25 bp, Canis familiaris
cagggtcaatgcttttagttgccat

SEQ ID NO: 64495 - DNA, 25 bp, Canis familiaris
cagggctgcaacttctatttgtgtt

SEQ ID NO: 64496 - DNA, 25 bp, Canis familiaris
cagtggctggattggaacttttaat

SEQ ID NO: 64497 - DNA, 25 bp, Canis familiaris
cagggtggcagatacttgatttaca

SEQ ID NO: 64498 - DNA, 25 bp, Canis familiaris
caggttggaaaggtcgtttgcactc

SEQ ID NO: 64499 - DNA, 25 bp, Canis familiaris
cagggggccagggccagtggacact

SEQ ID NO: 64500 - DNA, 25 bp, Canis familiaris
cagggttgccctggcacaggtgaat

SEQ ID NO: 64501 - DNA, 25 bp, Canis familiaris
caggtcttccgaagccatgggtacc

SEQ ID NO: 64502 - DNA, 25 bp, Canis familiaris
caggttgtcctgagctgcaagttaa

SEQ ID NO: 64503 - DNA, 25 bp, Canis familiaris
cagtgttttctgctgcaaagtctgc

SEQ ID NO: 64504 - DNA, 25 bp, Canis familiaris
cagtgtaaactgctcagtcagtgct

SEQ ID NO: 64505 - DNA, 25 bp, Canis familiaris
cagtgtaaccgccattactgctggg

SEQ ID NO: 64506 - DNA, 25 bp, Canis familiaris
cagtctaaccgttgatcacctggct

SEQ ID NO: 64507 - DNA, 25 bp, Canis familiaris
cagtctaaccgttgatcacctggct

SEQ ID NO: 64508 - DNA, 25 bp, Canis familiaris
cagtgttgaaggagtcacctggctc

SEQ ID NO: 64509 - DNA, 25 bp, Canis familiaris
cagtgccgaaggacaggcaccttgc

SEQ ID NO: 64510 - DNA, 25 bp, Canis familiaris
cagtgcctgacacacagatgcctgt

SEQ ID NO: 64511 - DNA, 25 bp, Canis familiaris
cagtgcctgacacacagatgcctgt

SEQ ID NO: 64512 - DNA, 25 bp, Canis familiaris
cagtgccatgaagatggagactgtg

SEQ ID NO: 64513 - DNA, 25 bp, Canis familiaris
cagtcatcaacagcatgggcagcag

SEQ ID NO: 64514 - DNA, 25 bp, Canis familiaris
cagtctcacagtgctgggcagggtg

SEQ ID NO: 64515 - DNA, 25 bp, Canis familiaris
cagtgctgacagtaggggaagctgg

SEQ ID NO: 64516 - DNA, 25 bp, Canis familiaris
cagtggaagaacaaagcagcagcga

SEQ ID NO: 64517 - DNA, 25 bp, Canis familiaris
caggagaagaactgcatggcccgac

SEQ ID NO: 64518 - DNA, 25 bp, Canis familiaris
cagtgaagaggctgccaacggccac

SEQ ID NO: 64519 - DNA, 25 bp, Canis familiaris
cagtgtcagtggtggctacttgtca

SEQ ID NO: 64520 - DNA, 25 bp, Canis familiaris
cagtgtggatggcgagtccttgtcc

SEQ ID NO: 64521 - DNA, 25 bp, Canis familiaris
cagtggagtgatggggtgccttttg

SEQ ID NO: 64522 - DNA, 25 bp, Canis familiaris
cagtggcgctggagggtatttgatg

SEQ ID NO: 64523 - DNA, 25 bp, Canis familiaris
cagtgggggcagtgcagtctttgag

SEQ ID NO: 64524 - DNA, 25 bp, Canis familiaris
cagtggagaaaccgctcttttgggg

SEQ ID NO: 64525 - DNA, 25 bp, Canis familiaris
cagtggagcttaaacccttctgggg

SEQ ID NO: 64526 - DNA, 25 bp, Canis familiaris
cagtgaacttgtcagccaattaagt

SEQ ID NO: 64527 - DNA, 25 bp, Canis familiaris
cagtcaagcttttcactccactgaa

SEQ ID NO: 64528 - DNA, 25 bp, Canis familiaris
cagtcaagcttcacaaggcctgacc

SEQ ID NO: 64529 - DNA, 25 bp, Canis familiaris
catgcataacttgaaagagccatgc

SEQ ID NO: 64530 - DNA, 25 bp, Canis familiaris
cagtgtctctctgaaacctggcaaa

SEQ ID NO: 64531 - DNA, 25 bp, Canis familiaris
cagtgtaccccagagcagatgtcaa

SEQ ID NO: 64532 - DNA, 25 bp, Canis familiaris
caggaagcccttggcactgatagaa

SEQ ID NO: 64533 - DNA, 25 bp, Canis familiaris
cagggagccttatacgatcgatcga

SEQ ID NO: 64534 - DNA, 25 bp, Canis familiaris
cagtgggctttgtcaacgccttgtt

SEQ ID NO: 64535 - DNA, 25 bp, Canis familiaris
caggagggtatgccgcataccttga

SEQ ID NO: 64536 - DNA, 25 bp, Canis familiaris
cagtgggaaactgcacaccttgggt

SEQ ID NO: 64537 - DNA, 25 bp, Canis familiaris
cagtgggacaaagcaaccctacacg

SEQ ID NO: 64538 - DNA, 25 bp, Canis familiaris
cagtggtgaaaatatctcccgaaga

SEQ ID NO: 64539 - DNA, 25 bp, Canis familiaris
caggttgttctttcttcctggaagc

SEQ ID NO: 64540 - DNA, 25 bp, Canis familiaris
cagtgtttcctttttaagtgtggct

SEQ ID NO: 64541 - DNA, 25 bp, Canis familiaris
caggattcccatgttgtcctttgtg

SEQ ID NO: 64542 - DNA, 25 bp, Canis familiaris
caggatccgctctatggttactttg

SEQ ID NO: 64543 - DNA, 25 bp, Canis familiaris
caggaccctggtgttactgtttcac

SEQ ID NO: 64544 - DNA, 25 bp, Canis familiaris
cagggccagcagctgttgccctgtc

SEQ ID NO: 64545 - DNA, 25 bp, Canis familiaris
cagtggtagtctgatagctccttct

SEQ ID NO: 64546 - DNA, 25 bp, Canis familiaris
cagggttgtgagactgagctcctac

SEQ ID NO: 64547 - DNA, 25 bp, Canis familiaris
caggggcagtgacagcttcctaagg

SEQ ID NO: 64548 - DNA, 25 bp, Canis familiaris
cagtgggcagttctgccttccaaag

SEQ ID NO: 64549 - DNA, 25 bp, Canis familiaris
cagtctggagtatttcctgtcacaa

SEQ ID NO: 64550 - DNA, 25 bp, Canis familiaris
cagtcttgactatgttcatctcact

SEQ ID NO: 64551 - DNA, 25 bp, Canis familiaris
cagtctgtctatcatgttcatctcc

SEQ ID NO: 64552 - DNA, 25 bp, Canis familiaris
cagtcttcatgtctgttctgttcag

SEQ ID NO: 64553 - DNA, 25 bp, Canis familiaris
cagtcagcctgttcatattgtgtta

SEQ ID NO: 64554 - DNA, 25 bp, Canis familiaris
cagtcccgtgaaattgttgtctttt

SEQ ID NO: 64555 - DNA, 25 bp, Canis familiaris
ctactccggaacttgggggttgctg

SEQ ID NO: 64556 - DNA, 25 bp, Canis familiaris
ctacttctgtgatcttggggggttt

SEQ ID NO: 64557 - DNA, 25 bp, Canis familiaris
catccttttgagggggctgggggtg

SEQ ID NO: 64558 - DNA, 25 bp, Canis familiaris
cagtgttagtagggggcggggagag

SEQ ID NO: 64559 - DNA, 25 bp, Canis familiaris
cagtgcgttaagggagggggccagg

SEQ ID NO: 64560 - DNA, 25 bp, Canis familiaris
cagggttgaagagtgggggccaagg

SEQ ID NO: 64561 - DNA, 25 bp, Canis familiaris
caggtttggcagtgaaggagctaaa

SEQ ID NO: 64562 - DNA, 25 bp, Canis familiaris
caggtgcctgggtggaggagttggt

SEQ ID NO: 64563 - DNA, 25 bp, Canis familiaris
cagggccgtgtggacggagggggca

SEQ ID NO: 64564 - DNA, 25 bp, Canis familiaris
caggggacatggggggaggagggca

SEQ ID NO: 64565 - DNA, 25 bp, Canis familiaris
caggggcctgggagccagggttggg

SEQ ID NO: 64566 - DNA, 25 bp, Canis familiaris
cagggggctgaggttagagggaagg

SEQ ID NO: 64567 - DNA, 25 bp, Canis familiaris
caggtgtggctggtcatgaaaggga

SEQ ID NO: 64568 - DNA, 25 bp, Canis familiaris
caggtgcgtcttctgtggaatggac

SEQ ID NO: 64569 - DNA, 25 bp, Canis familiaris
cagtggttctacgattgcggcaggc

SEQ ID NO: 64570 - DNA, 25 bp, Canis familiaris
cagtggttatgaggtgtgcaggggg

SEQ ID NO: 64571 - DNA, 25 bp, Canis familiaris
cagtgcttttggggggtgctgaggc

SEQ ID NO: 64572 - DNA, 25 bp, Canis familiaris
cagtcttctgttaggggatgggggc

SEQ ID NO: 64573 - DNA, 25 bp, Canis familiaris
cagtcttctgtttgaggttcggggt

SEQ ID NO: 64574 - DNA, 25 bp, Canis familiaris
cagtgtgaattataggcccttgggt

SEQ ID NO: 64575 - DNA, 25 bp, Canis familiaris
cagtggaaggtgtggtcctcagggt

SEQ ID NO: 64576 - DNA, 25 bp, Canis familiaris
cagggagtggtgtggtcagctgtct

SEQ ID NO: 64577 - DNA, 25 bp, Canis familiaris
cagggaggccagtgtgttgtgttac

SEQ ID NO: 64578 - DNA, 25 bp, Canis familiaris
cagggggcgcagtgtttagcctttg

SEQ ID NO: 64579 - DNA, 25 bp, Canis familiaris
caggggagtgattggttctacgttt

SEQ ID NO: 64580 - DNA, 25 bp, Canis familiaris
cagtgggagagtagggtcccctcct

SEQ ID NO: 64581 - DNA, 25 bp, Canis familiaris
caggtaagactaggggccccacctg

SEQ ID NO: 64582 - DNA, 25 bp, Canis familiaris
caggttagcaaaccagaccgtccct

SEQ ID NO: 64583 - DNA, 25 bp, Canis familiaris
cagggggaaaccaacatcctcctgc

SEQ ID NO: 64584 - DNA, 25 bp, Canis familiaris
cagtgagggaaagcattcccccccg

SEQ ID NO: 64585 - DNA, 25 bp, Canis familiaris
cagtggttacaaagctgtccccatc

SEQ ID NO: 64586 - DNA, 25 bp, Canis familiaris
caggggctaagcagtgccccctgtc

SEQ ID NO: 64587 - DNA, 25 bp, Canis familiaris
cagtgggtaagagcacccgactgct

SEQ ID NO: 64588 - DNA, 25 bp, Canis familiaris
cagggttaagacaacgccagcagcc

SEQ ID NO: 64589 - DNA, 25 bp, Canis familiaris
cagggaaaagtcaaggcccctctct

SEQ ID NO: 64590 - DNA, 25 bp, Canis familiaris
catggtagaaactgaacccctgcct

SEQ ID NO: 64591 - DNA, 25 bp, Canis familiaris
catggtaacaacaataatccctttt

SEQ ID NO: 64592 - DNA, 25 bp, Canis familiaris
caggtaataccttgtgatcccttta

SEQ ID NO: 64593 - DNA, 25 bp, Canis familiaris
caggaaggactcttttccctgtgtc

SEQ ID NO: 64594 - DNA, 25 bp, Canis familiaris
caggacgagtctgttctgtcacttg

SEQ ID NO: 64595 - DNA, 25 bp, Canis familiaris
caggagcggaggtatctcttacact

SEQ ID NO: 64596 - DNA, 25 bp, Canis familiaris
cagtgagggagtgtcctcttctgct

SEQ ID NO: 64597 - DNA, 25 bp, Canis familiaris
cagtggtagagtgtctgactttggc

SEQ ID NO: 64598 - DNA, 25 bp, Canis familiaris
cagtggttgagtgactgactgcctt

SEQ ID NO: 64599 - DNA, 25 bp, Canis familiaris
cagtgcagatcttgttagacacatg

SEQ ID NO: 64600 - DNA, 25 bp, Canis familiaris
cagtcgcctcattccgacatgatgc

SEQ ID NO: 64601 - DNA, 25 bp, Canis familiaris
cagtcctcaattcctgactggctct

SEQ ID NO: 64602 - DNA, 25 bp, Canis familiaris
cagtgcctccctggagacttgttta

SEQ ID NO: 64603 - DNA, 25 bp, Canis familiaris
cagtgctcgcatgtgcgggttgttg

SEQ ID NO: 64604 - DNA, 25 bp, Canis familiaris
cagtctgagcatgtgtacctatcat

SEQ ID NO: 64605 - DNA, 25 bp, Canis familiaris
cagtgtggcattctacatcttcacc

SEQ ID NO: 64606 - DNA, 25 bp, Canis familiaris
cagtggagactgtgactcttcttgt

SEQ ID NO: 64607 - DNA, 25 bp, Canis familiaris
cagtgtattctgtgcattttcttaa

SEQ ID NO: 64608 - DNA, 25 bp, Canis familiaris
cagtgttcactggcagtttgttttt

SEQ ID NO: 64609 - DNA, 25 bp, Canis familiaris
cagggtcctggacattgtttttttg

SEQ ID NO: 64610 - DNA, 25 bp, Canis familiaris
cagtggtccaaacagtcttcctgtc

SEQ ID NO: 64611 - DNA, 25 bp, Canis familiaris
cagggtttaagtatcttccatgctt

SEQ ID NO: 64612 - DNA, 25 bp, Canis familiaris
cagtgtctttaagatctctcctgct

SEQ ID NO: 64613 - DNA, 25 bp, Canis familiaris
cagggctgggaaacaatctcatctt

SEQ ID NO: 64614 - DNA, 25 bp, Canis familiaris
cagggcagggaaaccacactttctg

SEQ ID NO: 64615 - DNA, 25 bp, Canis familiaris
cagggcaaggatgacccttcctcta

SEQ ID NO: 64616 - DNA, 25 bp, Canis familiaris
cagggagagttcaactcctggccct

SEQ ID NO: 64617 - DNA, 25 bp, Canis familiaris
cagggaggactcaaactcttccact

SEQ ID NO: 64618 - DNA, 25 bp, Canis familiaris
cagggacgacacacaatgtttggcc

SEQ ID NO: 64619 - DNA, 25 bp, Canis familiaris
caggaactgtcccacaatttactgc

SEQ ID NO: 64620 - DNA, 25 bp, Canis familiaris
caggaacgacggcctttattctgga

SEQ ID NO: 64621 - DNA, 25 bp, Canis familiaris
caggacactttttgacttattctgg

SEQ ID NO: 64622 - DNA, 25 bp, Canis familiaris
cagtccctgttgtaactggtccttg

SEQ ID NO: 64623 - DNA, 25 bp, Canis familiaris
caggccttccgaaaatgcgcggctt

SEQ ID NO: 64624 - DNA, 25 bp, Canis familiaris
caggcacttctgtaagcgaacggct

SEQ ID NO: 64625 - DNA, 25 bp, Canis familiaris
caggccctctagagaacatggtccc

SEQ ID NO: 64626 - DNA, 25 bp, Canis familiaris
caggccccgaaggaaatggtcaggc

SEQ ID NO: 64627 - DNA, 25 bp, Canis familiaris
caggtcccaggggagaggggccgag

SEQ ID NO: 64628 - DNA, 25 bp, Canis familiaris
cggtcccctgacaatgagtccgtaa

SEQ ID NO: 64629 - DNA, 25 bp, Canis familiaris
cagtgtccagctggccattgagatc

SEQ ID NO: 64630 - DNA, 25 bp, Canis familiaris
cagtgcttctggtgctggtgatcag

SEQ ID NO: 64631 - DNA, 25 bp, Canis familiaris
cagtgctgtgggtctgctgttatgg

SEQ ID NO: 64632 - DNA, 25 bp, Canis familiaris
cagtgctgtgggtctgctgttatgg

SEQ ID NO: 64633 - DNA, 25 bp, Canis familiaris
cagtctgtgggctgccatgttgatg

SEQ ID NO: 64634 - DNA, 25 bp, Canis familiaris
cagtgaggcgtcaggctgtcgatgt

SEQ ID NO: 64635 - DNA, 25 bp, Canis familiaris
cagtgaggcgtcaggctgtcgatgt

SEQ ID NO: 64636 - DNA, 25 bp, Canis familiaris
cagtcgggctctggatgtgatccgc

SEQ ID NO: 64637 - DNA, 25 bp, Canis familiaris
cagtctgggccttggtttagctgcc

SEQ ID NO: 64638 - DNA, 25 bp, Canis familiaris
cagtgtggggctttatctctgacag

SEQ ID NO: 64639 - DNA, 25 bp, Canis familiaris
cagtcgtgcggattaatattgaaga

SEQ ID NO: 64640 - DNA, 25 bp, Canis familiaris
cagggctgggaatataatggtgaac

SEQ ID NO: 64641 - DNA, 25 bp, Canis familiaris
caggactttggttatgttggatgaa

SEQ ID NO: 64642 - DNA, 25 bp, Canis familiaris
caggactttggttatgttggatgaa

SEQ ID NO: 64643 - DNA, 25 bp, Canis familiaris
cagtgactttgacttctgctcttaa

SEQ ID NO: 64644 - DNA, 25 bp, Canis familiaris
cagtgaccctgaaatctctgtcaga

SEQ ID NO: 64645 - DNA, 25 bp, Canis familiaris
cagtcccgcagaacacatggcaaaa

SEQ ID NO: 64646 - DNA, 25 bp, Canis familiaris
cagtcccacaacactgccaaaatct

SEQ ID NO: 64647 - DNA, 25 bp, Canis familiaris
caggccccaacttttcagaagacta

SEQ ID NO: 64648 - DNA, 25 bp, Canis familiaris
catacccctactgtacaaaagacct

SEQ ID NO: 64649 - DNA, 25 bp, Canis familiaris
catacccctgttgtacgcaaaggct

SEQ ID NO: 64650 - DNA, 25 bp, Canis familiaris
ctaccaaattgtgatgccgtaagac

SEQ ID NO: 64651 - DNA, 25 bp, Canis familiaris
ctaccaaaatagcacttataaagca

SEQ ID NO: 64652 - DNA, 25 bp, Canis familiaris
ttacccaggtcgctactttgaaaag

SEQ ID NO: 64653 - DNA, 25 bp, Canis familiaris
catacccggactttacttctaatga

SEQ ID NO: 64654 - DNA, 25 bp, Canis familiaris
catccctcgggctttaagtctgaat

SEQ ID NO: 64655 - DNA, 25 bp, Canis familiaris
ctcccttgggctctatcgggaatgg

SEQ ID NO: 64656 - DNA, 25 bp, Canis familiaris
catcccctgggcctgggggacagat

SEQ ID NO: 64657 - DNA, 25 bp, Canis familiaris
cagtcgccggaattcgcggtacaga

SEQ ID NO: 64658 - DNA, 25 bp, Canis familiaris
catgaaccggatgtctcggcattaa

SEQ ID NO: 64659 - DNA, 25 bp, Canis familiaris
catgatccgggaggtgtgcggcttc

SEQ ID NO: 64660 - DNA, 25 bp, Canis familiaris
cagtgccaagtgacgtggcgggccc

SEQ ID NO: 64661 - DNA, 25 bp, Canis familiaris
cagtgcagcgggattggttggcggc

SEQ ID NO: 64662 - DNA, 25 bp, Canis familiaris
caggtctgggtgatggtcttgggtt

SEQ ID NO: 64663 - DNA, 25 bp, Canis familiaris
cagtgtcgggagctgccatcactgg

SEQ ID NO: 64664 - DNA, 25 bp, Canis familiaris
cagtggcggaacttgcaatcctcag

SEQ ID NO: 64665 - DNA, 25 bp, Canis familiaris
caggacgagaaccatcctcagtcac

SEQ ID NO: 64666 - DNA, 25 bp, Canis familiaris
cagtgtctgcagcaggcatctccag

SEQ ID NO: 64667 - DNA, 25 bp, Canis familiaris
cagtggtgcagcacacttcctgatt

SEQ ID NO: 64668 - DNA, 25 bp, Canis familiaris
catgtggtcgcaccacttttgcaca

SEQ ID NO: 64669 - DNA, 25 bp, Canis familiaris
cagtggggcagccttcttagcataa

SEQ ID NO: 64670 - DNA, 25 bp, Canis familiaris
cagggatggcacatctcgtcgatga

SEQ ID NO: 64671 - DNA, 25 bp, Canis familiaris
cagggtggccaaatggatgcctcga

SEQ ID NO: 64672 - DNA, 25 bp, Canis familiaris
cagtggaggcttatgatccccagac

SEQ ID NO: 64673 - DNA, 25 bp, Canis familiaris
caggaaagctgcgattgtccccaga

SEQ ID NO: 64674 - DNA, 25 bp, Canis familiaris
caggggactccatgagctaccatag

SEQ ID NO: 64675 - DNA, 25 bp, Canis familiaris
catgggttgttctggctgaccaaga

SEQ ID NO: 64676 - DNA, 25 bp, Canis familiaris
caggtttggtgcttggagaccaccc

SEQ ID NO: 64677 - DNA, 25 bp, Canis familiaris
caggctttatgtgatggaactccag

SEQ ID NO: 64678 - DNA, 25 bp, Canis familiaris
caggctaatttgaaggttatctagg

SEQ ID NO: 64679 - DNA, 25 bp, Canis familiaris
caggtaccctgaaggctgttttgga

SEQ ID NO: 64680 - DNA, 25 bp, Canis familiaris
cagtgtactccaacaggtttcctta

SEQ ID NO: 64681 - DNA, 25 bp, Canis familiaris
cagtgtccccacgagtggaatccat

SEQ ID NO: 64682 - DNA, 25 bp, Canis familiaris
cagtgaccgtcagagcaggaagccc

SEQ ID NO: 64683 - DNA, 25 bp, Canis familiaris
cagtgaccgaggccgggacagtgct

SEQ ID NO: 64684 - DNA, 25 bp, Canis familiaris
cagtgaaccctgtgttgagctctgc

SEQ ID NO: 64685 - DNA, 25 bp, Canis familiaris
cagtgcgcagccggagtggggagcg

SEQ ID NO: 64686 - DNA, 25 bp, Canis familiaris
cagtgaagcccgagggcgacggcag

SEQ ID NO: 64687 - DNA, 25 bp, Canis familiaris
catgtagaccccttgaagaggggag

SEQ ID NO: 64688 - DNA, 25 bp, Canis familiaris
catgccaacccctgaatgattttca

SEQ ID NO: 64689 - DNA, 25 bp, Canis familiaris
catccacctgacacaactagtttgc

SEQ ID NO: 64690 - DNA, 25 bp, Canis familiaris
catccccagaaactacgttttccag

SEQ ID NO: 64691 - DNA, 25 bp, Canis familiaris
catccagaagaatgggtttttccca

SEQ ID NO: 64692 - DNA, 25 bp, Canis familiaris
catgaagtccaatgggagtttccca

SEQ ID NO: 64693 - DNA, 25 bp, Canis familiaris
cagggttcccacttgatgtttgccc

SEQ ID NO: 64694 - DNA, 25 bp, Canis familiaris
cagggatgtgacgactgttgtctgg

SEQ ID NO: 64695 - DNA, 25 bp, Canis familiaris
cagtggtgctgataacttgcctgtc

SEQ ID NO: 64696 - DNA, 25 bp, Canis familiaris
cagtgctgtggggagacctgatctg

SEQ ID NO: 64697 - DNA, 25 bp, Canis familiaris
cagtgtatgggggaccattcctcgc

SEQ ID NO: 64698 - DNA, 25 bp, Canis familiaris
cagtgattttgtcacgttcgctcgg

SEQ ID NO: 64699 - DNA, 25 bp, Canis familiaris
cagtgtattttccacattgcctgcc

SEQ ID NO: 64700 - DNA, 25 bp, Canis familiaris
catgtctaacttccactgtagctgc

SEQ ID NO: 64701 - DNA, 25 bp, Canis familiaris
cagtgctagcacagacaggatgaca

SEQ ID NO: 64702 - DNA, 25 bp, Canis familiaris
cagtgcttggcaagaagctctgcta

SEQ ID NO: 64703 - DNA, 25 bp, Canis familiaris
cagtgttgtggcaaagctcttagaa

SEQ ID NO: 64704 - DNA, 25 bp, Canis familiaris
catgtcttttgcatagcctaaaatc

SEQ ID NO: 64705 - DNA, 25 bp, Canis familiaris
cagtgcttttattcccaaaacctag

SEQ ID NO: 64706 - DNA, 25 bp, Canis familiaris
caggtgcttctcacccaaatatctc

SEQ ID NO: 64707 - DNA, 25 bp, Canis familiaris
caggttgtgtgcacaccgttgtgct

SEQ ID NO: 64708 - DNA, 25 bp, Canis familiaris
cagtgttgtagcagcctctttgttt

SEQ ID NO: 64709 - DNA, 25 bp, Canis familiaris
caggttgtacgtactttgtttgtgt

SEQ ID NO: 64710 - DNA, 25 bp, Canis familiaris
caggctggtaagcactttctctgtt

SEQ ID NO: 64711 - DNA, 25 bp, Canis familiaris
caggagggatgggcctttcttgaat

SEQ ID NO: 64712 - DNA, 25 bp, Canis familiaris
cagggggagggcaatccctgtcacc

SEQ ID NO: 64713 - DNA, 25 bp, Canis familiaris
caggagggagggggccctcattcct

SEQ ID NO: 64714 - DNA, 25 bp, Canis familiaris
caggggtatggagacccctggcctt

SEQ ID NO: 64715 - DNA, 25 bp, Canis familiaris
cagggaagaggagagcccctgccct

SEQ ID NO: 64716 - DNA, 25 bp, Canis familiaris
cagggaaagagggacacccctgcct

SEQ ID NO: 64717 - DNA, 25 bp, Canis familiaris
cagggcagaaggtggcatccccttt

SEQ ID NO: 64718 - DNA, 25 bp, Canis familiaris
cagggcaatctttttgcatagcctt

SEQ ID NO: 64719 - DNA, 25 bp, Canis familiaris
cagggaatgccgtctacagaccctt

SEQ ID NO: 64720 - DNA, 25 bp, Canis familiaris
cagtgtatatccccaataaccttct

SEQ ID NO: 64721 - DNA, 25 bp, Canis familiaris
cagggataccccaataccctttgtg

SEQ ID NO: 64722 - DNA, 25 bp, Canis familiaris
cagggtactgcttcaatacacacct

SEQ ID NO: 64723 - DNA, 25 bp, Canis familiaris
cagggtgccttggccaacatagctg

SEQ ID NO: 64724 - DNA, 25 bp, Canis familiaris
cagtgtgggccagaccactgcagtg

SEQ ID NO: 64725 - DNA, 25 bp, Canis familiaris
cagtgctgggctaggagccgagcct

SEQ ID NO: 64726 - DNA, 25 bp, Canis familiaris
caggattcgctgagtctgtagcctc

SEQ ID NO: 64727 - DNA, 25 bp, Canis familiaris
cagggtcctgcgattaagtcttgtc

SEQ ID NO: 64728 - DNA, 25 bp, Canis familiaris
cagggtcctgggatcaagtccctgc

SEQ ID NO: 64729 - DNA, 25 bp, Canis familiaris
cagggtcctgggatcaagtccctgc

SEQ ID NO: 64730 - DNA, 25 bp, Canis familiaris
caggtgttcttccaataagtccggc

SEQ ID NO: 64731 - DNA, 25 bp, Canis familiaris
cagggcttgttcatcttggtgcccg

SEQ ID NO: 64732 - DNA, 25 bp, Canis familiaris
caggtctgtgatgcccttagatgtc

SEQ ID NO: 64733 - DNA, 25 bp, Canis familiaris
caggtctgtgatgcccttagatgtc

SEQ ID NO: 64734 - DNA, 25 bp, Canis familiaris
caggtctgtgatgcccttagatgtc

SEQ ID NO: 64735 - DNA, 25 bp, Canis familiaris
caggtctgagattcatgacttgagc

SEQ ID NO: 64736 - DNA, 25 bp, Canis familiaris
caggtggacttggacttgagggaga

SEQ ID NO: 64737 - DNA, 25 bp, Canis familiaris
caggtggttatattttagtctcaga

SEQ ID NO: 64738 - DNA, 25 bp, Canis familiaris
caggggtcatattgtttgcccacaa

SEQ ID NO: 64739 - DNA, 25 bp, Canis familiaris
cagtgtttcactgctattaccagca

SEQ ID NO: 64740 - DNA, 25 bp, Canis familiaris
cagtgtgttcactgaattatcttga

SEQ ID NO: 64741 - DNA, 25 bp, Canis familiaris
cagtgttagctctagaatcttgtct

SEQ ID NO: 64742 - DNA, 25 bp, Canis familiaris
cagtggttcatctatgactctgtga

SEQ ID NO: 64743 - DNA, 25 bp, Canis familiaris
cagtgggtctttgccttgatcaaga

SEQ ID NO: 64744 - DNA, 25 bp, Canis familiaris
cagtgtatgttttctgccattgtaa

SEQ ID NO: 64745 - DNA, 25 bp, Canis familiaris
cagtgaagttgtgcatcccttggac

SEQ ID NO: 64746 - DNA, 25 bp, Canis familiaris
cagtgatgagtttctgctccgcatg

SEQ ID NO: 64747 - DNA, 25 bp, Canis familiaris
cagtgatcaggatctgcttcgctgc

SEQ ID NO: 64748 - DNA, 25 bp, Canis familiaris
cagtgatgaggactccagctgggct

SEQ ID NO: 64749 - DNA, 25 bp, Canis familiaris
cagggcatataacagctgcaggtga

SEQ ID NO: 64750 - DNA, 25 bp, Canis familiaris
cagggcagagaacacacgggcaggg

SEQ ID NO: 64751 - DNA, 25 bp, Canis familiaris
caggaagatgtagaccgggacggtg

SEQ ID NO: 64752 - DNA, 25 bp, Canis familiaris
cagggtggctacccggggaatggtg

SEQ ID NO: 64753 - DNA, 25 bp, Canis familiaris
cagggtcccaggtgtgtggcatatg

SEQ ID NO: 64754 - DNA, 25 bp, Canis familiaris
caggtttccattctggatctgcttg

SEQ ID NO: 64755 - DNA, 25 bp, Canis familiaris
catgagtaacaatttagtgtccttg

SEQ ID NO: 64756 - DNA, 25 bp, Canis familiaris
caggtggacaatttactgtcctaat

SEQ ID NO: 64757 - DNA, 25 bp, Canis familiaris
cagggaacatattgattggtcttaa

SEQ ID NO: 64758 - DNA, 25 bp, Canis familiaris
caggggaatttgtaggctctgctct

SEQ ID NO: 64759 - DNA, 25 bp, Canis familiaris
caggaggacctgttgcgagtgtgtt

SEQ ID NO: 64760 - DNA, 25 bp, Canis familiaris
cagggtagcctctgagggtctctct

SEQ ID NO: 64761 - DNA, 25 bp, Canis familiaris
caggactcaacatcggggatccctg

SEQ ID NO: 64762 - DNA, 25 bp, Canis familiaris
catggattaccagcgggttccttgg

SEQ ID NO: 64763 - DNA, 25 bp, Canis familiaris
caggaggaccaccgaacttatgctt

SEQ ID NO: 64764 - DNA, 25 bp, Canis familiaris
caggaacacccacggagaagacttc

SEQ ID NO: 64765 - DNA, 25 bp, Canis familiaris
caggaagaagccaggaaaaccatta

SEQ ID NO: 64766 - DNA, 25 bp, Canis familiaris
caggtcaaagacagcgctcaaaact

SEQ ID NO: 64767 - DNA, 25 bp, Canis familiaris
caggaaaagactccgcgaaacaccg

SEQ ID NO: 64768 - DNA, 25 bp, Canis familiaris
caggaaggagcccctggaaaccctg

SEQ ID NO: 64769 - DNA, 25 bp, Canis familiaris
caggaaggacccctcagtgaaaccg

SEQ ID NO: 64770 - DNA, 25 bp, Canis familiaris
caggacgtgtccttcaagtcacaac

SEQ ID NO: 64771 - DNA, 25 bp, Canis familiaris
caggaggttccaacacagtctgaca

SEQ ID NO: 64772 - DNA, 25 bp, Canis familiaris
cagggagttccatatacctctctcc

SEQ ID NO: 64773 - DNA, 25 bp, Canis familiaris
cagggcgtgatcctgaaatcccgtc

SEQ ID NO: 64774 - DNA, 25 bp, Canis familiaris
cagggtgtgatcctggagacccagg

SEQ ID NO: 64775 - DNA, 25 bp, Canis familiaris
cagtgtggctacctagtgagcacca

SEQ ID NO: 64776 - DNA, 25 bp, Canis familiaris
cagtgtgtctacttggatggataca

SEQ ID NO: 64777 - DNA, 25 bp, Canis familiaris
cagtgttctcacaatttggttaatt

SEQ ID NO: 64778 - DNA, 25 bp, Canis familiaris
caggtgctttcttttgttttaatct

SEQ ID NO: 64779 - DNA, 25 bp, Canis familiaris
cagtgggttctttcatggttttatt

SEQ ID NO: 64780 - DNA, 25 bp, Canis familiaris
cagggttctctgtaatggtattgta

SEQ ID NO: 64781 - DNA, 25 bp, Canis familiaris
catgggtttctctaaattgaccaga

SEQ ID NO: 64782 - DNA, 25 bp, Canis familiaris
caggaagttctcctggacgacctgc

SEQ ID NO: 64783 - DNA, 25 bp, Canis familiaris
caggaatcttcttcggaccatcctg

SEQ ID NO: 64784 - DNA, 25 bp, Canis familiaris
caggaaagtttccagaactgccagc

SEQ ID NO: 64785 - DNA, 25 bp, Canis familiaris
caggtacaattccaagaggagacac

SEQ ID NO: 64786 - DNA, 25 bp, Canis familiaris
caggtcctcaaactcagcgtaacca

SEQ ID NO: 64787 - DNA, 25 bp, Canis familiaris
caggggctgaaacgacttcacacca

SEQ ID NO: 64788 - DNA, 25 bp, Canis familiaris
cagggtgggaacgagtctgtgtcca

SEQ ID NO: 64789 - DNA, 25 bp, Canis familiaris
caggcatgaccgtcatccagtgggt

SEQ ID NO: 64790 - DNA, 25 bp, Canis familiaris
cagtgagcagctcccaccagggagc

SEQ ID NO: 64791 - DNA, 25 bp, Canis familiaris
cagtgaggcagagtaccggcagcag

SEQ ID NO: 64792 - DNA, 25 bp, Canis familiaris
caggggcgatatactcaatgcagag

SEQ ID NO: 64793 - DNA, 25 bp, Canis familiaris
cagggcccatgaactgggagctgcc

SEQ ID NO: 64794 - DNA, 25 bp, Canis familiaris
cagtggaccacaggatggggcctct

SEQ ID NO: 64795 - DNA, 25 bp, Canis familiaris
cagtgggcccagcagagggcgacac

SEQ ID NO: 64796 - DNA, 25 bp, Canis familiaris
cagggtggagcgcacaggcgaggac

SEQ ID NO: 64797 - DNA, 25 bp, Canis familiaris
cagggctgggagtggggcaggcccc

SEQ ID NO: 64798 - DNA, 25 bp, Canis familiaris
cagggctagggacgggggaggcagc

SEQ ID NO: 64799 - DNA, 25 bp, Canis familiaris
cagggcgggagaactggtggtggcg

SEQ ID NO: 64800 - DNA, 25 bp, Canis familiaris
caggccaggtccactgagggtggcg

SEQ ID NO: 64801 - DNA, 25 bp, Canis familiaris
cagggacgtgccataaggtggaggt

SEQ ID NO: 64802 - DNA, 25 bp, Canis familiaris
caggatgactgcccttacagactag

SEQ ID NO: 64803 - DNA, 25 bp, Canis familiaris
cagggacatgctgctggccaataag

SEQ ID NO: 64804 - DNA, 25 bp, Canis familiaris
cagggaaccaagcctcatggatgag

SEQ ID NO: 64805 - DNA, 25 bp, Canis familiaris
caggggatgagcagccctgttcagc

SEQ ID NO: 64806 - DNA, 25 bp, Canis familiaris
cagggagaagctggaccctgtcccc

SEQ ID NO: 64807 - DNA, 25 bp, Canis familiaris
cagggcagaagagctccctgacccg

SEQ ID NO: 64808 - DNA, 25 bp, Canis familiaris
cagggcgtggagaccaccaagccct

SEQ ID NO: 64809 - DNA, 25 bp, Canis familiaris
ctagggggatgggcccaaggtctct

SEQ ID NO: 64810 - DNA, 25 bp, Canis familiaris
ctaggggtgacgcttagcgctggtc

SEQ ID NO: 64811 - DNA, 25 bp, Canis familiaris
cagggcggatgaccttaacgctgcg

SEQ ID NO: 64812 - DNA, 25 bp, Canis familiaris
cagtggtggaggtctctaacccagc

SEQ ID NO: 64813 - DNA, 25 bp, Canis familiaris
cagtgggcatgggagcctcaactcc

SEQ ID NO: 64814 - DNA, 25 bp, Canis familiaris
cagtggcagcggcaagagcatgaac

SEQ ID NO: 64815 - DNA, 25 bp, Canis familiaris
caggccagatgtcagaagctacacc

SEQ ID NO: 64816 - DNA, 25 bp, Canis familiaris
cagggagtgctgcaaagctgcccga

SEQ ID NO: 64817 - DNA, 25 bp, Canis familiaris
cagtggcttcgttagggcattcaga

SEQ ID NO: 64818 - DNA, 25 bp, Canis familiaris
cagggcttcgattccggtagaggga

SEQ ID NO: 64819 - DNA, 25 bp, Canis familiaris
cagggttctgattcccgagaaggga

SEQ ID NO: 64820 - DNA, 25 bp, Canis familiaris
cagtggttctgattccggagaggga

SEQ ID NO: 64821 - DNA, 25 bp, Canis familiaris
cagggttcgattccgagatggagcc

SEQ ID NO: 64822 - DNA, 25 bp, Canis familiaris
cagggcgggattccagctgtggaaa

SEQ ID NO: 64823 - DNA, 25 bp, Canis familiaris
caggtgtattgtacgagcattgaaa

SEQ ID NO: 64824 - DNA, 25 bp, Canis familiaris
cagtgtctgattcagggatctgact

SEQ ID NO: 64825 - DNA, 25 bp, Canis familiaris
cagtgtattcatcagggttctccag

SEQ ID NO: 64826 - DNA, 25 bp, Canis familiaris
cagtgttcctgaagctgctgtgtcc

SEQ ID NO: 64827 - DNA, 25 bp, Canis familiaris
caggttcatcgagggtgtggcagct

SEQ ID NO: 64828 - DNA, 25 bp, Canis familiaris
caggttgaggaacggttggtacttg

SEQ ID NO: 64829 - DNA, 25 bp, Canis familiaris
cagggagcaggcagggtagggggtg

SEQ ID NO: 64830 - DNA, 25 bp, Canis familiaris
cagggcagaggctggaggggcgtgt

SEQ ID NO: 64831 - DNA, 25 bp, Canis familiaris
cagtgggaccttcgaggacggtgtg

SEQ ID NO: 64832 - DNA, 25 bp, Canis familiaris
catggggaaatccagacccaagtgg

SEQ ID NO: 64833 - DNA, 25 bp, Canis familiaris
catgggccagaaggactcctacgtg

SEQ ID NO: 64834 - DNA, 25 bp, Canis familiaris
caggagcacgtaaaccaccactgac

SEQ ID NO: 64835 - DNA, 25 bp, Canis familiaris
caggtgcacgtgtggacgtcctgac

SEQ ID NO: 64836 - DNA, 25 bp, Canis familiaris
cagtggcacgagttgtgggtctgcg

SEQ ID NO: 64837 - DNA, 25 bp, Canis familiaris
cagtggcacttgggtgtagctctgt

SEQ ID NO: 64838 - DNA, 25 bp, Canis familiaris
cagggcatgtcttttgcatagccta

SEQ ID NO: 64839 - DNA, 25 bp, Canis familiaris
cagtggtggctacttgtcacttatt

SEQ ID NO: 64840 - DNA, 25 bp, Canis familiaris
cagggtgagtgacgttccggagtcg

SEQ ID NO: 64841 - DNA, 25 bp, Canis familiaris
cagggccagacaccttaggaagggg

SEQ ID NO: 64842 - DNA, 25 bp, Canis familiaris
cagggccgagggttgggaagatgtg

SEQ ID NO: 64843 - DNA, 25 bp, Canis familiaris
cagggcagggggaagaggaagagag

SEQ ID NO: 64844 - DNA, 25 bp, Canis familiaris
catggaccgggtcaaccaaggcccg

SEQ ID NO: 64845 - DNA, 25 bp, Canis familiaris
caggcacggggagagaccagggccc

SEQ ID NO: 64846 - DNA, 25 bp, Canis familiaris
cagggggcgagaagaacccgtgctc

SEQ ID NO: 64847 - DNA, 25 bp, Canis familiaris
caggtggagggaagccaccctgctc

SEQ ID NO: 64848 - DNA, 25 bp, Canis familiaris
caggggcagggccctatgacctgcc

SEQ ID NO: 64849 - DNA, 25 bp, Canis familiaris
caggggctgaggccccagtgagcag

SEQ ID NO: 64850 - DNA, 25 bp, Canis familiaris
caggggtgttggggagtggcagtcc

SEQ ID NO: 64851 - DNA, 25 bp, Canis familiaris
cagggtggttaggcagtggacgccc

SEQ ID NO: 64852 - DNA, 25 bp, Canis familiaris
caggagggtgttccgttacagctct

SEQ ID NO: 64853 - DNA, 25 bp, Canis familiaris
caggggtgtagattgggtccagctt

SEQ ID NO: 64854 - DNA, 25 bp, Canis familiaris
cagggcatcagggagtgggctccgc

SEQ ID NO: 64855 - DNA, 25 bp, Canis familiaris
caggggcatccaagcatgggcccga

SEQ ID NO: 64856 - DNA, 25 bp, Canis familiaris
cagtggagcatcctgcgcaggactc

SEQ ID NO: 64857 - DNA, 25 bp, Canis familiaris
catgctggactgacatgctggctgc

SEQ ID NO: 64858 - DNA, 25 bp, Canis familiaris
cagtggcattgaatccagctctcca

SEQ ID NO: 64859 - DNA, 25 bp, Canis familiaris
cagtggcttcacagtgctgaccatt

SEQ ID NO: 64860 - DNA, 25 bp, Canis familiaris
cagtggtgacagggctgctggccct

SEQ ID NO: 64861 - DNA, 25 bp, Canis familiaris
cagtggcagtgggtctgggacctct

SEQ ID NO: 64862 - DNA, 25 bp, Canis familiaris
cagtggcttgtacttggagacctca

SEQ ID NO: 64863 - DNA, 25 bp, Canis familiaris
caggggatgtcacttgagcagggcc

SEQ ID NO: 64864 - DNA, 25 bp, Canis familiaris
caggggatgtcacttgagcagggcc

SEQ ID NO: 64865 - DNA, 25 bp, Canis familiaris
caggggcttcagcctggaggagctc

SEQ ID NO: 64866 - DNA, 25 bp, Canis familiaris
caggggcttcagcctggaggagctc

SEQ ID NO: 64867 - DNA, 25 bp, Canis familiaris
caggtggttctgacttaggactcta

SEQ ID NO: 64868 - DNA, 25 bp, Canis familiaris
cagggtggggtccatcagaactctg

SEQ ID NO: 64869 - DNA, 25 bp, Canis familiaris
caggagttactctgatagacagtta

SEQ ID NO: 64870 - DNA, 25 bp, Canis familiaris
cagtggtaactgtttcatcaagtaa

SEQ ID NO: 64871 - DNA, 25 bp, Canis familiaris
cagtgtgtcctttctgttaagtaag

SEQ ID NO: 64872 - DNA, 25 bp, Canis familiaris
cagggtcactattctaggcaatgaa

SEQ ID NO: 64873 - DNA, 25 bp, Canis familiaris
cagggtcatcctgctggtaatggca

SEQ ID NO: 64874 - DNA, 25 bp, Canis familiaris
cagggcactcctgggaactaaccct

SEQ ID NO: 64875 - DNA, 25 bp, Canis familiaris
caggtcctcctggcagaactgaagc

SEQ ID NO: 64876 - DNA, 25 bp, Canis familiaris
cagggcctcctgtatgaagcagcca

SEQ ID NO: 64877 - DNA, 25 bp, Canis familiaris
cagggggcctgccaagaaccaaaat

SEQ ID NO: 64878 - DNA, 25 bp, Canis familiaris
cagggcagctgctgccacaggacca

SEQ ID NO: 64879 - DNA, 25 bp, Canis familiaris
cagtggtgatgctcattcccaccat

SEQ ID NO: 64880 - DNA, 25 bp, Canis familiaris
cagtgtggagcagtacaccaccctg

SEQ ID NO: 64881 - DNA, 25 bp, Canis familiaris
catggagtgtacaacccacctgtgt

SEQ ID NO: 64882 - DNA, 25 bp, Canis familiaris
cagggctgtaactatggcccagtgc

SEQ ID NO: 64883 - DNA, 25 bp, Canis familiaris
cagggtgctaattgtggtcggccac

SEQ ID NO: 64884 - DNA, 25 bp, Canis familiaris
cagtggctgagattggggttggtgg

SEQ ID NO: 64885 - DNA, 25 bp, Canis familiaris
caggggagagtggtttctgctgggg

SEQ ID NO: 64886 - DNA, 25 bp, Canis familiaris
caggaggtggtggactccttctggc

SEQ ID NO: 64887 - DNA, 25 bp, Canis familiaris
cagggcctcgatgatcatccgggcc

SEQ ID NO: 64888 - DNA, 25 bp, Canis familiaris
caggagcagtcgtctatgttagggg

SEQ ID NO: 64889 - DNA, 25 bp, Canis familiaris
caggaacccttactatggtgggtcg

SEQ ID NO: 64890 - DNA, 25 bp, Canis familiaris
caggaccccactgtctgggtggggg

SEQ ID NO: 64891 - DNA, 25 bp, Canis familiaris
caggacccagcccagctgggggagg

SEQ ID NO: 64892 - DNA, 25 bp, Canis familiaris
caggcactcccagagtggccaagga

SEQ ID NO: 64893 - DNA, 25 bp, Canis familiaris
caggcctcttggggtcccaaagaga

SEQ ID NO: 64894 - DNA, 25 bp, Canis familiaris
caggccatccgggaagcccgggagc

SEQ ID NO: 64895 - DNA, 25 bp, Canis familiaris
caggtgaaggtgtgcacgcgggggc

SEQ ID NO: 64896 - DNA, 25 bp, Canis familiaris
caggggcaggcctcctggaggccgg

SEQ ID NO: 64897 - DNA, 25 bp, Canis familiaris
caggggcgacgcgcctagaggaagg

SEQ ID NO: 64898 - DNA, 25 bp, Canis familiaris
cagggcaggagggccggaagggcag

SEQ ID NO: 64899 - DNA, 25 bp, Canis familiaris
caggagccgaggggggatggggcct

SEQ ID NO: 64900 - DNA, 25 bp, Canis familiaris
caggacctgagtgggggatcgggag

SEQ ID NO: 64901 - DNA, 25 bp, Canis familiaris
caggacttcgtggtgtggatgcgca

SEQ ID NO: 64902 - DNA, 25 bp, Canis familiaris
caggagcacatcgatctggggatca

SEQ ID NO: 64903 - DNA, 25 bp, Canis familiaris
caggagcacatcgatctggggatca

SEQ ID NO: 64904 - DNA, 25 bp, Canis familiaris
caggagcacatcgatctggggatca

SEQ ID NO: 64905 - DNA, 25 bp, Canis familiaris
cagggcactgcagtgtggtggctct

SEQ ID NO: 64906 - DNA, 25 bp, Canis familiaris
cagggcctgcagctgggacagctga

SEQ ID NO: 64907 - DNA, 25 bp, Canis familiaris
cagtggcatctgtgtctgaacctgc

SEQ ID NO: 64908 - DNA, 25 bp, Canis familiaris
cagtggcatctgggttcaaatctta

SEQ ID NO: 64909 - DNA, 25 bp, Canis familiaris
cagtggcctgggctgcaatgtgctg

SEQ ID NO: 64910 - DNA, 25 bp, Canis familiaris
cagggcatgctggagcgagactgag

SEQ ID NO: 64911 - DNA, 25 bp, Canis familiaris
cagtggctgctgaggcagcggcggc

SEQ ID NO: 64912 - DNA, 25 bp, Canis familiaris
caggtgtgctgggagccagaggccc

SEQ ID NO: 64913 - DNA, 25 bp, Canis familiaris
caggggccggatcagcatggcaacc

SEQ ID NO: 64914 - DNA, 25 bp, Canis familiaris
cagggaacaggggatcatggatgac

SEQ ID NO: 64915 - DNA, 25 bp, Canis familiaris
catgggcacaaccgagattggaacc

SEQ ID NO: 64916 - DNA, 25 bp, Canis familiaris
cagggaatcctgtatatagtgaata

SEQ ID NO: 64917 - DNA, 25 bp, Canis familiaris
caggagaaccctaatacatttccct

SEQ ID NO: 64918 - DNA, 25 bp, Canis familiaris
caggaagaccccaacagctaatcca

SEQ ID NO: 64919 - DNA, 25 bp, Canis familiaris
cagggcgccactgcataacaaatcc

SEQ ID NO: 64920 - DNA, 25 bp, Canis familiaris
caggcacttactgaacacacacaca

SEQ ID NO: 64921 - DNA, 25 bp, Canis familiaris
catggaaaagtgtaaatcaccaaag

SEQ ID NO: 64922 - DNA, 25 bp, Canis familiaris
caggaacgtgagtgattccctccag

SEQ ID NO: 64923 - DNA, 25 bp, Canis familiaris
caggaacggaggtctccaagccacg

SEQ ID NO: 64924 - DNA, 25 bp, Canis familiaris
caggaacgggcgtgtgagcaccggt

SEQ ID NO: 64925 - DNA, 25 bp, Canis familiaris
caggagaccgggagtgagcacatgc

SEQ ID NO: 64926 - DNA, 25 bp, Canis familiaris
caggttccagggacggatggctgaa

SEQ ID NO: 64927 - DNA, 25 bp, Canis familiaris
caggtttctggaggctctgcaggcc

SEQ ID NO: 64928 - DNA, 25 bp, Canis familiaris
cagggattttgtggctcatcagctg

SEQ ID NO: 64929 - DNA, 25 bp, Canis familiaris
caggtgcacagatttctgcctcacc

SEQ ID NO: 64930 - DNA, 25 bp, Canis familiaris
cagggcagagatattctccaccacc

SEQ ID NO: 64931 - DNA, 25 bp, Canis familiaris
cagggagaagtttcccatcagccgc

SEQ ID NO: 64932 - DNA, 25 bp, Canis familiaris
caggaaaatgctaatccccaggttc

SEQ ID NO: 64933 - DNA, 25 bp, Canis familiaris
caggatacggtatttactcagagta

SEQ ID NO: 64934 - DNA, 25 bp, Canis familiaris
caggagggtgcccaatttcactgcc

SEQ ID NO: 64935 - DNA, 25 bp, Canis familiaris
caggatatggtccatcctgtttccc

SEQ ID NO: 64936 - DNA, 25 bp, Canis familiaris
caggatgaatgtgtccttcccctgc

SEQ ID NO: 64937 - DNA, 25 bp, Canis familiaris
caggatgaagcagtcctctgacctc

SEQ ID NO: 64938 - DNA, 25 bp, Canis familiaris
caggatgaaagccgcactgctgacc

SEQ ID NO: 64939 - DNA, 25 bp, Canis familiaris
caggatgctgggccgatgtgcagcc

SEQ ID NO: 64940 - DNA, 25 bp, Canis familiaris
caggagctggagccagaggccgggt

SEQ ID NO: 64941 - DNA, 25 bp, Canis familiaris
cagggtggggctggagccggtgatg

SEQ ID NO: 64942 - DNA, 25 bp, Canis familiaris
cagggtcttgttagagcctcttgtg

SEQ ID NO: 64943 - DNA, 25 bp, Canis familiaris
catggggctttcacagaacttgctg

SEQ ID NO: 64944 - DNA, 25 bp, Canis familiaris
caggtggggctcactcaacacctgc

SEQ ID NO: 64945 - DNA, 25 bp, Canis familiaris
cagggatgggccaaagcagacctcc

SEQ ID NO: 64946 - DNA, 25 bp, Canis familiaris
cagggaccagcagaacagaggcgcg

SEQ ID NO: 64947 - DNA, 25 bp, Canis familiaris
caggggacagcagaggaagaccatg

SEQ ID NO: 64948 - DNA, 25 bp, Canis familiaris
cagggagacccgccaaaacacatga

SEQ ID NO: 64949 - DNA, 25 bp, Canis familiaris
cagggcagatgcacaggcagaaagc

SEQ ID NO: 64950 - DNA, 25 bp, Canis familiaris
caggtgcagtcagagtggctacagc

SEQ ID NO: 64951 - DNA, 25 bp, Canis familiaris
cagggccatgaccaatgtgcattcc

SEQ ID NO: 64952 - DNA, 25 bp, Canis familiaris
cagggctctgcagccagtgcagaaa

SEQ ID NO: 64953 - DNA, 25 bp, Canis familiaris
caggcgcgcggtctggcagtaaaaa

SEQ ID NO: 64954 - DNA, 25 bp, Canis familiaris
caggctctccgttgttgatgaaaaa

SEQ ID NO: 64955 - DNA, 25 bp, Canis familiaris
caggccttctgctcgatgaaaacaa

SEQ ID NO: 64956 - DNA, 25 bp, Canis familiaris
caggtctcccctggagctataaaat

SEQ ID NO: 64957 - DNA, 25 bp, Canis familiaris
caggactcccacggactagaggatt

SEQ ID NO: 64958 - DNA, 25 bp, Canis familiaris
caggctccccactgagcagggagac

SEQ ID NO: 64959 - DNA, 25 bp, Canis familiaris
caggctccctgctcaaggggaagcc

SEQ ID NO: 64960 - DNA, 25 bp, Canis familiaris
caggatgccctcaccagggatggaa

SEQ ID NO: 64961 - DNA, 25 bp, Canis familiaris
caggaaccattacagggctgactga

SEQ ID NO: 64962 - DNA, 25 bp, Canis familiaris
cagggatcccttcaggagacgctga

SEQ ID NO: 64963 - DNA, 25 bp, Canis familiaris
caggaagccctttgagggccgcgtg

SEQ ID NO: 64964 - DNA, 25 bp, Canis familiaris
caggacgggctgataggccccagtg

SEQ ID NO: 64965 - DNA, 25 bp, Canis familiaris
caggacggtcggaggaccactgtcg

SEQ ID NO: 64966 - DNA, 25 bp, Canis familiaris
cagggcgtggggaggaggacgtggg

SEQ ID NO: 64967 - DNA, 25 bp, Canis familiaris
caggggtgtgggtgatgggatcgtg

SEQ ID NO: 64968 - DNA, 25 bp, Canis familiaris
cagggtgctgggattggggagcgtg

SEQ ID NO: 64969 - DNA, 25 bp, Canis familiaris
cagggattgggttggggtcactggg

SEQ ID NO: 64970 - DNA, 25 bp, Canis familiaris
cagggactgggttgggagacggtgg

SEQ ID NO: 64971 - DNA, 25 bp, Canis familiaris
caggtgttgagggtgggcgacggat

SEQ ID NO: 64972 - DNA, 25 bp, Canis familiaris
caggtcttggatctggggatgctgc

SEQ ID NO: 64973 - DNA, 25 bp, Canis familiaris
caggccttggagctcagagggtcac

SEQ ID NO: 64974 - DNA, 25 bp, Canis familiaris
catggcttctggtggtagagaggac

SEQ ID NO: 64975 - DNA, 25 bp, Canis familiaris
catcctcacacgtggtatgagggtc

SEQ ID NO: 64976 - DNA, 25 bp, Canis familiaris
caggtcactggaggtcctggggtct

SEQ ID NO: 64977 - DNA, 25 bp, Canis familiaris
cagggcacagtagtgtcatgggagg

SEQ ID NO: 64978 - DNA, 25 bp, Canis familiaris
cagggaacttcttgcatctgcctgg

SEQ ID NO: 64979 - DNA, 25 bp, Canis familiaris
cagggagagttgctgtcgagcggca

SEQ ID NO: 64980 - DNA, 25 bp, Canis familiaris
caggtgaaaatcctgtccgtgccca

SEQ ID NO: 64981 - DNA, 25 bp, Canis familiaris
caggtggaaatcctgcagcgcgtca

SEQ ID NO: 64982 - DNA, 25 bp, Canis familiaris
caggtggagacgatgcaccctgcat

SEQ ID NO: 64983 - DNA, 25 bp, Canis familiaris
caggtggagacgatgcaccctgcat

SEQ ID NO: 64984 - DNA, 25 bp, Canis familiaris
caggtggagacgatgcaccctgcat

SEQ ID NO: 64985 - DNA, 25 bp, Canis familiaris
caggtggagacgatgcaccctgcat

SEQ ID NO: 64986 - DNA, 25 bp, Canis familiaris
caggtggagacgatgcaccctgcat

SEQ ID NO: 64987 - DNA, 25 bp, Canis familiaris
caggtggagacgatgcaccctgcat

SEQ ID NO: 64988 - DNA, 25 bp, Canis familiaris
caggtggagacgatgcaccctgcat

SEQ ID NO: 64989 - DNA, 25 bp, Canis familiaris
caggtggagacgatgcaccctgcat

SEQ ID NO: 64990 - DNA, 25 bp, Canis familiaris
caggtggagacgatgcaccctgcat

SEQ ID NO: 64991 - DNA, 25 bp, Canis familiaris
caggtggagacgatgcatccctgca

SEQ ID NO: 64992 - DNA, 25 bp, Canis familiaris
caggtgtgagcacggtgctggcctc

SEQ ID NO: 64993 - DNA, 25 bp, Canis familiaris
cagggtggctgggagcaactgcctc

SEQ ID NO: 64994 - DNA, 25 bp, Canis familiaris
cagggtctctgggatcaagcccttg

SEQ ID NO: 64995 - DNA, 25 bp, Canis familiaris
cagggtcctgagatcaagcctcatg

SEQ ID NO: 64996 - DNA, 25 bp, Canis familiaris
cagggagcccgatgcaagacttgat

SEQ ID NO: 64997 - DNA, 25 bp, Canis familiaris
cagggactgcctaaaaggtagaact

SEQ ID NO: 64998 - DNA, 25 bp, Canis familiaris
caggcgcccctgaaaataataaaat

SEQ ID NO: 64999 - DNA, 25 bp, Canis familiaris
caggtgtccctgtaagataaaataa

SEQ ID NO: 65000 - DNA, 25 bp, Canis familiaris
caggtgtcccgaataataaaatctt

SEQ ID NO: 65001 - DNA, 25 bp, Canis familiaris
caggtatccctaattgttcaccctt

SEQ ID NO: 65002 - DNA, 25 bp, Canis familiaris
cagggatccctaattattgattttg

SEQ ID NO: 65003 - DNA, 25 bp, Canis familiaris
catggggccctaactattttgtgca

SEQ ID NO: 65004 - DNA, 25 bp, Canis familiaris
cagggtgacctaaagctttgtgaag

SEQ ID NO: 65005 - DNA, 25 bp, Canis familiaris
caggggtgcttcaacgtattggtag

SEQ ID NO: 65006 - DNA, 25 bp, Canis familiaris
caggggctgttcagtgtcatcatct

SEQ ID NO: 65007 - DNA, 25 bp, Canis familiaris
cagggaggtgtctgttgctgctccc

SEQ ID NO: 65008 - DNA, 25 bp, Canis familiaris
cagggagactttggctactgtcccc

SEQ ID NO: 65009 - DNA, 25 bp, Canis familiaris
caggtagagcggtcccagatgtacc

SEQ ID NO: 65010 - DNA, 25 bp, Canis familiaris
catggtcatgaggtgtaacaagtac

SEQ ID NO: 65011 - DNA, 25 bp, Canis familiaris
caggactgaactatacacatgtact

SEQ ID NO: 65012 - DNA, 25 bp, Canis familiaris
cagggtatactctttacgatacttg

SEQ ID NO: 65013 - DNA, 25 bp, Canis familiaris
catgtggttccttagatccgtactg

SEQ ID NO: 65014 - DNA, 25 bp, Canis familiaris
catgtttgccatccaaggccttact

SEQ ID NO: 65015 - DNA, 25 bp, Canis familiaris
catgttagcctgtttgtaccaactt

SEQ ID NO: 65016 - DNA, 25 bp, Canis familiaris
caggggccatagtgtcactcaacct

SEQ ID NO: 65017 - DNA, 25 bp, Canis familiaris
cagggtgcctacggtgctaaacact

SEQ ID NO: 65018 - DNA, 25 bp, Canis familiaris
caggggaccacagtttagtgtcact

SEQ ID NO: 65019 - DNA, 25 bp, Canis familiaris
caggggaacactgtcatccctgaca

SEQ ID NO: 65020 - DNA, 25 bp, Canis familiaris
caggggaaaatggcctccttgtgct

SEQ ID NO: 65021 - DNA, 25 bp, Canis familiaris
cagggacaaagtgccatcctgctgg

SEQ ID NO: 65022 - DNA, 25 bp, Canis familiaris
cagggacgaagtccctttctcagcc

SEQ ID NO: 65023 - DNA, 25 bp, Canis familiaris
cagggatcgccaggcgttttctgag

SEQ ID NO: 65024 - DNA, 25 bp, Canis familiaris
cagggacgcccagtggtgatttgtg

SEQ ID NO: 65025 - DNA, 25 bp, Canis familiaris
cagggatctccccatagtttggtct

SEQ ID NO: 65026 - DNA, 25 bp, Canis familiaris
cagggatcctctgtatgtttgctgc

SEQ ID NO: 65027 - DNA, 25 bp, Canis familiaris
cagggacactgagttctggtgggcg

SEQ ID NO: 65028 - DNA, 25 bp, Canis familiaris
catgggaagggtgctgtctgggtac

SEQ ID NO: 65029 - DNA, 25 bp, Canis familiaris
caggctaggggtgtgtctgtgtgtg

SEQ ID NO: 65030 - DNA, 25 bp, Canis familiaris
caggaatggttgtgtgccgtgcagg

SEQ ID NO: 65031 - DNA, 25 bp, Canis familiaris
cagggaggtgatcctggcctggagg

SEQ ID NO: 65032 - DNA, 25 bp, Canis familiaris
cagggttgccatcctgtacgaggag

SEQ ID NO: 65033 - DNA, 25 bp, Canis familiaris
cagggtagccactagccacaggtgg

SEQ ID NO: 65034 - DNA, 25 bp, Canis familiaris
caggggatgccctgaaactgctacg

SEQ ID NO: 65035 - DNA, 25 bp, Canis familiaris
caggtggtctcctgtgacttcaaca

SEQ ID NO: 65036 - DNA, 25 bp, Canis familiaris
caggttgtctcctgcgacttcaaca

SEQ ID NO: 65037 - DNA, 25 bp, Canis familiaris
caggtcttctgttgaaacttgccca

SEQ ID NO: 65038 - DNA, 25 bp, Canis familiaris
cagggtttttggaactgctcactca

SEQ ID NO: 65039 - DNA, 25 bp, Canis familiaris
caggtgttttttcattgctcagtcc

SEQ ID NO: 65040 - DNA, 25 bp, Canis familiaris
caggttttaaactttgccatgatcg

SEQ ID NO: 65041 - DNA, 25 bp, Canis familiaris
caggctttcttctaaagtgctttcc

SEQ ID NO: 65042 - DNA, 25 bp, Canis familiaris
caggtagcttttgaggtgccttcct

SEQ ID NO: 65043 - DNA, 25 bp, Canis familiaris
catggtagagttgctaggaagttac

SEQ ID NO: 65044 - DNA, 25 bp, Canis familiaris
caggtgcacgtcatccaggatagtt

SEQ ID NO: 65045 - DNA, 25 bp, Canis familiaris
cagggacgtgcaataaggtggagtt

SEQ ID NO: 65046 - DNA, 25 bp, Canis familiaris
catggttctggaaagggtgaatgtt

SEQ ID NO: 65047 - DNA, 25 bp, Canis familiaris
caggtgcatctggaaaggggacatt

SEQ ID NO: 65048 - DNA, 25 bp, Canis familiaris
catgttgttcccaggcactgactat

SEQ ID NO: 65049 - DNA, 25 bp, Canis familiaris
catgattggtcggttcactctacct

SEQ ID NO: 65050 - DNA, 25 bp, Canis familiaris
catgtcggacatgtacgtccacctg

SEQ ID NO: 65051 - DNA, 25 bp, Canis familiaris
caggggaagctgtgagtcccactgc

SEQ ID NO: 65052 - DNA, 25 bp, Canis familiaris
cagggtgttggttgactcacctctc

SEQ ID NO: 65053 - DNA, 25 bp, Canis familiaris
caggagctgacaggcttatctcccc

SEQ ID NO: 65054 - DNA, 25 bp, Canis familiaris
caggtcgtcacgctagtgctgagtg

SEQ ID NO: 65055 - DNA, 25 bp, Canis familiaris
catgcattggaaggcctagactggg

SEQ ID NO: 65056 - DNA, 25 bp, Canis familiaris
catgcgggaagttcgagatcttgag

SEQ ID NO: 65057 - DNA, 25 bp, Canis familiaris
catgccgaacggggagagtctggga

SEQ ID NO: 65058 - DNA, 25 bp, Canis familiaris
caggcaccacgggaaatttggtata

SEQ ID NO: 65059 - DNA, 25 bp, Canis familiaris
caggcccctctcaagaagttggttg

SEQ ID NO: 65060 - DNA, 25 bp, Canis familiaris
caggcatccctaacactagtttttc

SEQ ID NO: 65061 - DNA, 25 bp, Canis familiaris
caggaccgctattcagtggcttttg

SEQ ID NO: 65062 - DNA, 25 bp, Canis familiaris
caggacccaatatggacttcttgcc

SEQ ID NO: 65063 - DNA, 25 bp, Canis familiaris
caggtgcccaaattgctgtctgttc

SEQ ID NO: 65064 - DNA, 25 bp, Canis familiaris
caggtgccccagtattgttttgaat

SEQ ID NO: 65065 - DNA, 25 bp, Canis familiaris
caggcgccccaacagtggatatgat

SEQ ID NO: 65066 - DNA, 25 bp, Canis familiaris
caggctcaagacgcaaggtgtagaa

SEQ ID NO: 65067 - DNA, 25 bp, Canis familiaris
caggccacaggccaaaggcaataaa

SEQ ID NO: 65068 - DNA, 25 bp, Canis familiaris
caggcctcagagcaacaacagtggg

SEQ ID NO: 65069 - DNA, 25 bp, Canis familiaris
cagggtagatgccattccagggagg

SEQ ID NO: 65070 - DNA, 25 bp, Canis familiaris
cagggtctatcctgccaggtgatgg

SEQ ID NO: 65071 - DNA, 25 bp, Canis familiaris
caggggctccctggagcagtgtggg

SEQ ID NO: 65072 - DNA, 25 bp, Canis familiaris
caggggacacagcatcacaggtgcg

SEQ ID NO: 65073 - DNA, 25 bp, Canis familiaris
caggtggacagcctgtcacagagtg

SEQ ID NO: 65074 - DNA, 25 bp, Canis familiaris
caggatggccagagctcctgaggcc

SEQ ID NO: 65075 - DNA, 25 bp, Canis familiaris
caggggctcgacagagctggtgcct

SEQ ID NO: 65076 - DNA, 25 bp, Canis familiaris
caggatgaccggaggccgatgtcgg

SEQ ID NO: 65077 - DNA, 25 bp, Canis familiaris
caggatgcaccttggctgactttgt

SEQ ID NO: 65078 - DNA, 25 bp, Canis familiaris
caggtcacgtggggacagctgtgtc

SEQ ID NO: 65079 - DNA, 25 bp, Canis familiaris
caggtcacaggcggagattgggtct

SEQ ID NO: 65080 - DNA, 25 bp, Canis familiaris
caggtccagggctgaggcaggtgtc

SEQ ID NO: 65081 - DNA, 25 bp, Canis familiaris
caggcccaaggctgtggtggcattt

SEQ ID NO: 65082 - DNA, 25 bp, Canis familiaris
caggttcaaggcactggtcgctgtg

SEQ ID NO: 65083 - DNA, 25 bp, Canis familiaris
cagggtcaagcctgggtgcagctgg

SEQ ID NO: 65084 - DNA, 25 bp, Canis familiaris
cagggtatgagcctggggtcctggg

SEQ ID NO: 65085 - DNA, 25 bp, Canis familiaris
cagggtgaagtgcagaggctccggg

SEQ ID NO: 65086 - DNA, 25 bp, Canis familiaris
caggagtgaaggcctaggcccgtcc

SEQ ID NO: 65087 - DNA, 25 bp, Canis familiaris
caggggcaggaacttggccctggcc

SEQ ID NO: 65088 - DNA, 25 bp, Canis familiaris
caggggatggggtgggcctgacaca

SEQ ID NO: 65089 - DNA, 25 bp, Canis familiaris
caggaaaggggctggggtctgccac

SEQ ID NO: 65090 - DNA, 25 bp, Canis familiaris
caggaaagtggtgtggtcctcgccc

SEQ ID NO: 65091 - DNA, 25 bp, Canis familiaris
caggtgaacgggttgagctcgccgc

SEQ ID NO: 65092 - DNA, 25 bp, Canis familiaris
catgcggagaccggactatccgacc

SEQ ID NO: 65093 - DNA, 25 bp, Canis familiaris
catgcagggaacctgacgtgggact

SEQ ID NO: 65094 - DNA, 25 bp, Canis familiaris
catgcagatggctccaacgtggctt

SEQ ID NO: 65095 - DNA, 25 bp, Canis familiaris
catgaatgtggtggccttgtggcta

SEQ ID NO: 65096 - DNA, 25 bp, Canis familiaris
caggtgaggcctcctatatgtgttc

SEQ ID NO: 65097 - DNA, 25 bp, Canis familiaris
caggttggccataagactgtggact

SEQ ID NO: 65098 - DNA, 25 bp, Canis familiaris
caggtggtggcacatttgctgcaga

SEQ ID NO: 65099 - DNA, 25 bp, Canis familiaris
caggctgagatgccagaaggatcca

SEQ ID NO: 65100 - DNA, 25 bp, Canis familiaris
caggtcatgatgccagggtcctagg

SEQ ID NO: 65101 - DNA, 25 bp, Canis familiaris
cagggtgatgctggactgtgcctgg

SEQ ID NO: 65102 - DNA, 25 bp, Canis familiaris
caggggaggctaggtcatgctgggc

SEQ ID NO: 65103 - DNA, 25 bp, Canis familiaris
caggcggagattgggtctggggcac

SEQ ID NO: 65104 - DNA, 25 bp, Canis familiaris
caggggaatagggattgggagaggg

SEQ ID NO: 65105 - DNA, 25 bp, Canis familiaris
caggggctaaaggatgtgggagaga

SEQ ID NO: 65106 - DNA, 25 bp, Canis familiaris
catggggtaatgttctgcgaggaaa

SEQ ID NO: 65107 - DNA, 25 bp, Canis familiaris
caggtggacatttttgcagagaaca

SEQ ID NO: 65108 - DNA, 25 bp, Canis familiaris
caggtgtgagccttttcagcaaccc

SEQ ID NO: 65109 - DNA, 25 bp, Canis familiaris
caggtgtgagccttttcagcaaccc

SEQ ID NO: 65110 - DNA, 25 bp, Canis familiaris
caggtgtgagccttttcagcaaccc

SEQ ID NO: 65111 - DNA, 25 bp, Canis familiaris
cagggtgagtcctttcagcatgaca

SEQ ID NO: 65112 - DNA, 25 bp, Canis familiaris
cagggtgcactggagtccacaactg

SEQ ID NO: 65113 - DNA, 25 bp, Canis familiaris
catggagtcattgatccaccacttc

SEQ ID NO: 65114 - DNA, 25 bp, Canis familiaris
cagggtcatgagatcgagccctgcc

SEQ ID NO: 65115 - DNA, 25 bp, Canis familiaris
caggcgctctggatggaacctgctt

SEQ ID NO: 65116 - DNA, 25 bp, Canis familiaris
catggcattgccagtgaacaccctt

SEQ ID NO: 65117 - DNA, 25 bp, Canis familiaris
ctagcaacagtctgaaattccttca

SEQ ID NO: 65118 - DNA, 25 bp, Canis familiaris
catagcaaagtcatgaaacatcccg

SEQ ID NO: 65119 - DNA, 25 bp, Canis familiaris
cattgagaagtttgccaaccccttt

SEQ ID NO: 65120 - DNA, 25 bp, Canis familiaris
cttataatttagccagggtttctat

SEQ ID NO: 65121 - DNA, 25 bp, Canis familiaris
ctgcgacaattttcctaggtttaat

SEQ ID NO: 65122 - DNA, 25 bp, Canis familiaris
catccaaggccttactaagacttaa

SEQ ID NO: 65123 - DNA, 25 bp, Canis familiaris
catgctgaagttctgaccaaagctg

SEQ ID NO: 65124 - DNA, 25 bp, Canis familiaris
catgtgggcttcaatgtcaagacgt

SEQ ID NO: 65125 - DNA, 25 bp, Canis familiaris
caggcaacttactccagagcgtgtt

SEQ ID NO: 65126 - DNA, 25 bp, Canis familiaris
caggcttcctactccaaagctgaga

SEQ ID NO: 65127 - DNA, 25 bp, Canis familiaris
caggccttctacaacacgggggccg

SEQ ID NO: 65128 - DNA, 25 bp, Canis familiaris
caggcatctctcactcagaagggtg

SEQ ID NO: 65129 - DNA, 25 bp, Canis familiaris
caggcgctccaggtagggctgcgcc

SEQ ID NO: 65130 - DNA, 25 bp, Canis familiaris
caggcgctccaggtagggctgcgcc

SEQ ID NO: 65131 - DNA, 25 bp, Canis familiaris
caggccctcgctcaggatgggcaaa

SEQ ID NO: 65132 - DNA, 25 bp, Canis familiaris
caggaccctcagcagaatctggaaa

SEQ ID NO: 65133 - DNA, 25 bp, Canis familiaris
caggagctcccgtgaattgtgtgat

SEQ ID NO: 65134 - DNA, 25 bp, Canis familiaris
caggagctcccagtcaatgttttgc

SEQ ID NO: 65135 - DNA, 25 bp, Canis familiaris
caggattgtcaatcaagttcttgat

SEQ ID NO: 65136 - DNA, 25 bp, Canis familiaris
caggtctggatatctacgaaggata

SEQ ID NO: 65137 - DNA, 25 bp, Canis familiaris
caggttggacaagatctgacagtga

SEQ ID NO: 65138 - DNA, 25 bp, Canis familiaris
caggggacaacagcatgcaacaggt

SEQ ID NO: 65139 - DNA, 25 bp, Canis familiaris
caggggatcatgacttcatctccag

SEQ ID NO: 65140 - DNA, 25 bp, Canis familiaris
caggaggacagagtttgcattgatg

SEQ ID NO: 65141 - DNA, 25 bp, Canis familiaris
caggacgacgcaggcatgtacatct

SEQ ID NO: 65142 - DNA, 25 bp, Canis familiaris
caggacaaagctgccaacatcttgg

SEQ ID NO: 65143 - DNA, 25 bp, Canis familiaris
caggacaattcacaacaatctcgga

SEQ ID NO: 65144 - DNA, 25 bp, Canis familiaris
catccacaattgctccatcaacgag

SEQ ID NO: 65145 - DNA, 25 bp, Canis familiaris
ccccgacggtggtgacggaggcagc

SEQ ID NO: 65146 - DNA, 25 bp, Canis familiaris
ccgggaaagggctgactggggcagg

SEQ ID NO: 65147 - DNA, 25 bp, Canis familiaris
caggggaaaggcccaggctggggcg

SEQ ID NO: 65148 - DNA, 25 bp, Canis familiaris
caggggagcgagcggtggtgggatg

SEQ ID NO: 65149 - DNA, 25 bp, Canis familiaris
caggatggaccaaagggggcaggat

SEQ ID NO: 65150 - DNA, 25 bp, Canis familiaris
caggggcaccaaggtgctgggcagg

SEQ ID NO: 65151 - DNA, 25 bp, Canis familiaris
caggggagctccagtgctggacact

SEQ ID NO: 65152 - DNA, 25 bp, Canis familiaris
caggatcgcagcgcaggtgcaggac

SEQ ID NO: 65153 - DNA, 25 bp, Canis familiaris
caggtctgcggcagggaagcacgcc

SEQ ID NO: 65154 - DNA, 25 bp, Canis familiaris
caggggggactgggagcagacacca

SEQ ID NO: 65155 - DNA, 25 bp, Canis familiaris
caggacagggacaacaggccacacc

SEQ ID NO: 65156 - DNA, 25 bp, Canis familiaris
catgagaaggggagcactccccccc

SEQ ID NO: 65157 - DNA, 25 bp, Canis familiaris
catgaaagtcagcatttgcctcccc

SEQ ID NO: 65158 - DNA, 25 bp, Canis familiaris
catggaagaatattttggcctcgcc

SEQ ID NO: 65159 - DNA, 25 bp, Canis familiaris
ctgcaagaaagctttttcctacgtt

SEQ ID NO: 65160 - DNA, 25 bp, Canis familiaris
cttaccgatggttattgccttcgtc

SEQ ID NO: 65161 - DNA, 25 bp, Canis familiaris
catgtcccaacgagaggctcttcag

SEQ ID NO: 65162 - DNA, 25 bp, Canis familiaris
ctattggcaacgagcggttccgatg

SEQ ID NO: 65163 - DNA, 25 bp, Canis familiaris
cttggacttcgaagcacgttgcacg

SEQ ID NO: 65164 - DNA, 25 bp, Canis familiaris
cttgtactttaagcgttccctgaag

SEQ ID NO: 65165 - DNA, 25 bp, Canis familiaris
cttagcgtttgaaggcgtctcccta

SEQ ID NO: 65166 - DNA, 25 bp, Canis familiaris
ctaacgtttcaatggtatccttctg

SEQ ID NO: 65167 - DNA, 25 bp, Canis familiaris
catgactcctttacaaggtctcccc

SEQ ID NO: 65168 - DNA, 25 bp, Canis familiaris
catgactcctttacaaggtctcccc

SEQ ID NO: 65169 - DNA, 25 bp, Canis familiaris
catgactcctttacaaggtctcccc

SEQ ID NO: 65170 - DNA, 25 bp, Canis familiaris
catgtcaggcgttaaactgtcagtc

SEQ ID NO: 65171 - DNA, 25 bp, Canis familiaris
catgtcaggcgttaaactgtcagtc

SEQ ID NO: 65172 - DNA, 25 bp, Canis familiaris
caggaggctttggcatactgtccag

SEQ ID NO: 65173 - DNA, 25 bp, Canis familiaris
caggagggtgcaagctactcccagg

SEQ ID NO: 65174 - DNA, 25 bp, Canis familiaris
caggaggtgacaaccatcctcccag

SEQ ID NO: 65175 - DNA, 25 bp, Canis familiaris
caggagggtaccaaactgtccacca

SEQ ID NO: 65176 - DNA, 25 bp, Canis familiaris
caggaggagagcacaaaccccacga

SEQ ID NO: 65177 - DNA, 25 bp, Canis familiaris
caggagggagctgaagaactgcaga

SEQ ID NO: 65178 - DNA, 25 bp, Canis familiaris
caggtgtgtacaaaaaagcggctgg

SEQ ID NO: 65179 - DNA, 25 bp, Canis familiaris
caggcgtggccaagactgaagccgg

SEQ ID NO: 65180 - DNA, 25 bp, Canis familiaris
catctgctgcatccgcagctttgga

SEQ ID NO: 65181 - DNA, 25 bp, Canis familiaris
catctggccctggtttgaacggctg

SEQ ID NO: 65182 - DNA, 25 bp, Canis familiaris
catctggccctggtttgaacggctg

SEQ ID NO: 65183 - DNA, 25 bp, Canis familiaris
cattgacctttgaggccacggtgct

SEQ ID NO: 65184 - DNA, 25 bp, Canis familiaris
caggatttggtttggccctgggctt

SEQ ID NO: 65185 - DNA, 25 bp, Canis familiaris
caggatgttggtcctgtgcctggga

SEQ ID NO: 65186 - DNA, 25 bp, Canis familiaris
caggtgttgataactgtggtcgaca

SEQ ID NO: 65187 - DNA, 25 bp, Canis familiaris
caggttatgatcattgtgtctgaac

SEQ ID NO: 65188 - DNA, 25 bp, Canis familiaris
caggtgtgaatctttttctccagcc

SEQ ID NO: 65189 - DNA, 25 bp, Canis familiaris
catgggatcaattttctttaacttg

SEQ ID NO: 65190 - DNA, 25 bp, Canis familiaris
caggagctcagtatggctctttccc

SEQ ID NO: 65191 - DNA, 25 bp, Canis familiaris
caggatgctggtaggcttcattgcc

SEQ ID NO: 65192 - DNA, 25 bp, Canis familiaris
caggtgcaggtcagcacgttgctgt

SEQ ID NO: 65193 - DNA, 25 bp, Canis familiaris
caggtcatagtgcgccagttgctgg

SEQ ID NO: 65194 - DNA, 25 bp, Canis familiaris
caggtaatggaaccagcacgcggcc

SEQ ID NO: 65195 - DNA, 25 bp, Canis familiaris
caggaaatcgacggcatggggggcg

SEQ ID NO: 65196 - DNA, 25 bp, Canis familiaris
caggaacaaacccatgaccggcggg

SEQ ID NO: 65197 - DNA, 25 bp, Canis familiaris
caggataaagagggcatcccgcctg

SEQ ID NO: 65198 - DNA, 25 bp, Canis familiaris
catgttgacgaaggcagactccccg

SEQ ID NO: 65199 - DNA, 25 bp, Canis familiaris
caggtggaggaggagagccggccag

SEQ ID NO: 65200 - DNA, 25 bp, Canis familiaris
caggtgagggacgtggagctggccg

SEQ ID NO: 65201 - DNA, 25 bp, Canis familiaris
caggtgagggcagtgtgtgcgggct

SEQ ID NO: 65202 - DNA, 25 bp, Canis familiaris
caggtgcggctgcctgtggaaggac

SEQ ID NO: 65203 - DNA, 25 bp, Canis familiaris
caggtgcggctgctgtggaaggacc

SEQ ID NO: 65204 - DNA, 25 bp, Canis familiaris
caggtgcggctgctgtggaaggacc

SEQ ID NO: 65205 - DNA, 25 bp, Canis familiaris
caggtgcggctgctgtggaaggacc

SEQ ID NO: 65206 - DNA, 25 bp, Canis familiaris
caggtgcggctgctgtggaaggacc

SEQ ID NO: 65207 - DNA, 25 bp, Canis familiaris
caggcttggatccgcatatgaagag

SEQ ID NO: 65208 - DNA, 25 bp, Canis familiaris
catggcctaacactttgaagagaga

SEQ ID NO: 65209 - DNA, 25 bp, Canis familiaris
catgaactatatccgtaacctggat

SEQ ID NO: 65210 - DNA, 25 bp, Canis familiaris
catcctttgatctgtaaccggttac

SEQ ID NO: 65211 - DNA, 25 bp, Canis familiaris
catacgtctgactgaggacgggtta

SEQ ID NO: 65212 - DNA, 25 bp, Canis familiaris
catcacgtgtcacggggaccgggga

SEQ ID NO: 65213 - DNA, 25 bp, Canis familiaris
catcatgggaagaggggccggcgca

SEQ ID NO: 65214 - DNA, 25 bp, Canis familiaris
catgacggggaatgggactcggccc

SEQ ID NO: 65215 - DNA, 25 bp, Canis familiaris
catgaaagaaaatgtttccagtgcc

SEQ ID NO: 65216 - DNA, 25 bp, Canis familiaris
cgagaagaaaagcttgccgggcaaa

SEQ ID NO: 65217 - DNA, 25 bp, Canis familiaris
caggattgaaaggacttccagggaa

SEQ ID NO: 65218 - DNA, 25 bp, Canis familiaris
caggattaccggacttccgggactg

SEQ ID NO: 65219 - DNA, 25 bp, Canis familiaris
caggaataaatggttttctcgggct

SEQ ID NO: 65220 - DNA, 25 bp, Canis familiaris
caggacataagaggttcattcgtgc

SEQ ID NO: 65221 - DNA, 25 bp, Canis familiaris
caggcccaagaatctcattggatgc

SEQ ID NO: 65222 - DNA, 25 bp, Canis familiaris
caggcctgaaaccctatgcctgcac

SEQ ID NO: 65223 - DNA, 25 bp, Canis familiaris
caggcaaagaaccaggacctcctca

SEQ ID NO: 65224 - DNA, 25 bp, Canis familiaris
caggcaaggaccggagacatctccc

SEQ ID NO: 65225 - DNA, 25 bp, Canis familiaris
caggagcaggaaccaggactcccct

SEQ ID NO: 65226 - DNA, 25 bp, Canis familiaris
caggatattaagacacccggccctg

SEQ ID NO: 65227 - DNA, 25 bp, Canis familiaris
caggattgagaagcggcgggccgag

SEQ ID NO: 65228 - DNA, 25 bp, Canis familiaris
catggttggtactgagctgggccca

SEQ ID NO: 65229 - DNA, 25 bp, Canis familiaris
caggttgttgaatgtctgtggaaca

SEQ ID NO: 65230 - DNA, 25 bp, Canis familiaris
catactttatggtgtctctggaatc

SEQ ID NO: 65231 - DNA, 25 bp, Canis familiaris
catgattgttaggtcttctcgtttg

SEQ ID NO: 65232 - DNA, 25 bp, Canis familiaris
caggagcttctgattcttggtcttg

SEQ ID NO: 65233 - DNA, 25 bp, Canis familiaris
caggaattctaactttcttcttgga

SEQ ID NO: 65234 - DNA, 25 bp, Canis familiaris
caggaacatcaaccatttcttctgt

SEQ ID NO: 65235 - DNA, 25 bp, Canis familiaris
caggaatctgagatctcgacttttc

SEQ ID NO: 65236 - DNA, 25 bp, Canis familiaris
caggatgtcaggactgccgactgtt

SEQ ID NO: 65237 - DNA, 25 bp, Canis familiaris
caggattcaagttcaccactgctcc

SEQ ID NO: 65238 - DNA, 25 bp, Canis familiaris
caggaacagaggtgccatgcagccc

SEQ ID NO: 65239 - DNA, 25 bp, Canis familiaris
caggaccaattgcgtctgatgtctc

SEQ ID NO: 65240 - DNA, 25 bp, Canis familiaris
caggatcttcttgagttctgcttcc

SEQ ID NO: 65241 - DNA, 25 bp, Canis familiaris
caggctcttcctgagtttgatggga

SEQ ID NO: 65242 - DNA, 25 bp, Canis familiaris
caggtgactcctggatgtatagtaa

SEQ ID NO: 65243 - DNA, 25 bp, Canis familiaris
caggtgcacatcgcgacaatcgaca

SEQ ID NO: 65244 - DNA, 25 bp, Canis familiaris
caggatgacagcgggtcactcacag

SEQ ID NO: 65245 - DNA, 25 bp, Canis familiaris
caggtcactgtaggcttctgccaga

SEQ ID NO: 65246 - DNA, 25 bp, Canis familiaris
caggtgcactggtacttgcagctgc

SEQ ID NO: 65247 - DNA, 25 bp, Canis familiaris
caggtgatctgttgactctctgtct

SEQ ID NO: 65248 - DNA, 25 bp, Canis familiaris
caggtgcgttatctcagcttcttca

SEQ ID NO: 65249 - DNA, 25 bp, Canis familiaris
caggtggatctatttcatgtttttg

SEQ ID NO: 65250 - DNA, 25 bp, Canis familiaris
caggtcttctgattctcagtttctg

SEQ ID NO: 65251 - DNA, 25 bp, Canis familiaris
catgggattcgatcccgagtctcca

SEQ ID NO: 65252 - DNA, 25 bp, Canis familiaris
caggagttcgagtcctggagcttcc

SEQ ID NO: 65253 - DNA, 25 bp, Canis familiaris
caggatttaagcagctggaccccga

SEQ ID NO: 65254 - DNA, 25 bp, Canis familiaris
caggttgtgtggtcgcatggacccc

SEQ ID NO: 65255 - DNA, 25 bp, Canis familiaris
caggtcgtggcctagaggacccact

SEQ ID NO: 65256 - DNA, 25 bp, Canis familiaris
caggtggtcactggagcaagtcccc

SEQ ID NO: 65257 - DNA, 25 bp, Canis familiaris
caggctcagtgcacgagctttctcc

SEQ ID NO: 65258 - DNA, 25 bp, Canis familiaris
caggatgcgggagggttctgccctg

SEQ ID NO: 65259 - DNA, 25 bp, Canis familiaris
caggacgggaggatctttccgacgt

SEQ ID NO: 65260 - DNA, 25 bp, Canis familiaris
caggcacacgctgaattttgtccca

SEQ ID NO: 65261 - DNA, 25 bp, Canis familiaris
caggccaccaactacaatggtcaca

SEQ ID NO: 65262 - DNA, 25 bp, Canis familiaris
caggccccagcaaacaaacagaatg

SEQ ID NO: 65263 - DNA, 25 bp, Canis familiaris
caggctccagcctcaaaacagttga

SEQ ID NO: 65264 - DNA, 25 bp, Canis familiaris
caggccctccaggcaaaaacttgag

SEQ ID NO: 65265 - DNA, 25 bp, Canis familiaris
catggccctgaaggaaagtttccaa

SEQ ID NO: 65266 - DNA, 25 bp, Canis familiaris
caggctcctggaagaagagtcctct

SEQ ID NO: 65267 - DNA, 25 bp, Canis familiaris
caggtccagctgcgacaggaactta

SEQ ID NO: 65268 - DNA, 25 bp, Canis familiaris
caggtctcatccagcatcaggacat

SEQ ID NO: 65269 - DNA, 25 bp, Canis familiaris
caggtcgcagcctgtgggactactg

SEQ ID NO: 65270 - DNA, 25 bp, Canis familiaris
caggtcagcacgttgctgtcgatta

SEQ ID NO: 65271 - DNA, 25 bp, Canis familiaris
caggtgccacgatcattgctgtcat

SEQ ID NO: 65272 - DNA, 25 bp, Canis familiaris
caggatcgacgcgcttctgtatggg

SEQ ID NO: 65273 - DNA, 25 bp, Canis familiaris
caggacagagtcgggtgtgtggggg

SEQ ID NO: 65274 - DNA, 25 bp, Canis familiaris
caggatcaggcccgagtgtctgggg

SEQ ID NO: 65275 - DNA, 25 bp, Canis familiaris
catggatccgcctgttgttgtgggc

SEQ ID NO: 65276 - DNA, 25 bp, Canis familiaris
catggatgcccctgatctatttagg

SEQ ID NO: 65277 - DNA, 25 bp, Canis familiaris
catggacccgctaacaattctcagg

SEQ ID NO: 65278 - DNA, 25 bp, Canis familiaris
catggagaaccaaaccttcctggag

SEQ ID NO: 65279 - DNA, 25 bp, Canis familiaris
caggcaagagaagaccttttgtgag

SEQ ID NO: 65280 - DNA, 25 bp, Canis familiaris
caggcaattccactcaacttttgag

SEQ ID NO: 65281 - DNA, 25 bp, Canis familiaris
catgaaactggaataagcgctttga

SEQ ID NO: 65282 - DNA, 25 bp, Canis familiaris
caggaagctcgacatcagccctgaa

SEQ ID NO: 65283 - DNA, 25 bp, Canis familiaris
caggttgtcaaggcacaggcactgg

SEQ ID NO: 65284 - DNA, 25 bp, Canis familiaris
catgttaccaaggacatgactctgg

SEQ ID NO: 65285 - DNA, 25 bp, Canis familiaris
catagcccccaggaataaatggttt

SEQ ID NO: 65286 - DNA, 25 bp, Canis familiaris
catagtaggtgctgaataaatattt

SEQ ID NO: 65287 - DNA, 25 bp, Canis familiaris
cataaatttcttcatcgacattttc

SEQ ID NO: 65288 - DNA, 25 bp, Canis familiaris
ctaacaggtctacacgtccaattcc

SEQ ID NO: 65289 - DNA, 25 bp, Canis familiaris
tctaccaatacctgatcgtccggtc

SEQ ID NO: 65290 - DNA, 25 bp, Canis familiaris
catggccaaaccggatcagtgcctt

SEQ ID NO: 65291 - DNA, 25 bp, Canis familiaris
catgagaaaaacggcacaggccttc

SEQ ID NO: 65292 - DNA, 25 bp, Canis familiaris
catgtggaagtagctgccgtgggcc

SEQ ID NO: 65293 - DNA, 25 bp, Canis familiaris
catcagaaagatgcccctttggacg

SEQ ID NO: 65294 - DNA, 25 bp, Canis familiaris
catgcaaaaggaggccctgttccct

SEQ ID NO: 65295 - DNA, 25 bp, Canis familiaris
caggagcaaggagccggtggccctg

SEQ ID NO: 65296 - DNA, 25 bp, Canis familiaris
caggcagccaggtagttggtgcgcc

SEQ ID NO: 65297 - DNA, 25 bp, Canis familiaris
caggagcagggcgagatcggtgcct

SEQ ID NO: 65298 - DNA, 25 bp, Canis familiaris
caggaagcggacctgggggctgagt

SEQ ID NO: 65299 - DNA, 25 bp, Canis familiaris
caggagggtagacggtgcaggcaga

SEQ ID NO: 65300 - DNA, 25 bp, Canis familiaris
caggactggctcaaggggaagcagt

SEQ ID NO: 65301 - DNA, 25 bp, Canis familiaris
caggactggctttcagggaagcagt

SEQ ID NO: 65302 - DNA, 25 bp, Canis familiaris
caggcagttgatttagaggaccagt

SEQ ID NO: 65303 - DNA, 25 bp, Canis familiaris
caggatttcaattgaggaaccactt

SEQ ID NO: 65304 - DNA, 25 bp, Canis familiaris
caggttcatgacagatggccaccat

SEQ ID NO: 65305 - DNA, 25 bp, Canis familiaris
caggagatggccactgccgcatcct

SEQ ID NO: 65306 - DNA, 25 bp, Canis familiaris
caggagatggccactgccgcatcct

SEQ ID NO: 65307 - DNA, 25 bp, Canis familiaris
caggatgaggcttgtctgccttcag

SEQ ID NO: 65308 - DNA, 25 bp, Canis familiaris
caggtactcttgactgcagtgtagg

SEQ ID NO: 65309 - DNA, 25 bp, Canis familiaris
caggaactccatatgcggcctgtgg

SEQ ID NO: 65310 - DNA, 25 bp, Canis familiaris
caggttccctgtgggagcctgatgc

SEQ ID NO: 65311 - DNA, 25 bp, Canis familiaris
caggatctacatggtggctacacta

SEQ ID NO: 65312 - DNA, 25 bp, Canis familiaris
caggacatgatcttgggttcctata

SEQ ID NO: 65313 - DNA, 25 bp, Canis familiaris
catggaggtgcacgaggacttcttc

SEQ ID NO: 65314 - DNA, 25 bp, Canis familiaris
catggagctggatgcagggcttcat

SEQ ID NO: 65315 - DNA, 25 bp, Canis familiaris
caggactcgattccgggatcatgcc

SEQ ID NO: 65316 - DNA, 25 bp, Canis familiaris
caggacctttcctggcatttggggc

SEQ ID NO: 65317 - DNA, 25 bp, Canis familiaris
caggtcctgattctgggattctggg

SEQ ID NO: 65318 - DNA, 25 bp, Canis familiaris
caggtagtgatctcagggccctggg

SEQ ID NO: 65319 - DNA, 25 bp, Canis familiaris
caggctgaagtaccagggcctctgc

SEQ ID NO: 65320 - DNA, 25 bp, Canis familiaris
caggccaagtcacagatgccatttg

SEQ ID NO: 65321 - DNA, 25 bp, Canis familiaris
caggcaacgagcccagtgccaagtg

SEQ ID NO: 65322 - DNA, 25 bp, Canis familiaris
caggaaccacgacatccatacatgg

SEQ ID NO: 65323 - DNA, 25 bp, Canis familiaris
caggaacaactgccggtgatactgg

SEQ ID NO: 65324 - DNA, 25 bp, Canis familiaris
caggcccaacgtagagctgtgccgc

SEQ ID NO: 65325 - DNA, 25 bp, Canis familiaris
caggcccacctcatggtggactcag

SEQ ID NO: 65326 - DNA, 25 bp, Canis familiaris
catgaggagccccagggaggcctag

SEQ ID NO: 65327 - DNA, 25 bp, Canis familiaris
caggatggggtgcgggagcagtagc

SEQ ID NO: 65328 - DNA, 25 bp, Canis familiaris
caggcgcgggtgagaaggcgtgccc

SEQ ID NO: 65329 - DNA, 25 bp, Canis familiaris
catcggggggaggagagggtccctg

SEQ ID NO: 65330 - DNA, 25 bp, Canis familiaris
ctccagtccaagaaagacgggccct

SEQ ID NO: 65331 - DNA, 25 bp, Canis familiaris
catccttacgcataaacgggctacg

SEQ ID NO: 65332 - DNA, 25 bp, Canis familiaris
cataaaatccatcgaaatgggccta

SEQ ID NO: 65333 - DNA, 25 bp, Canis familiaris
catcaagaattcaaacccggcactc

SEQ ID NO: 65334 - DNA, 25 bp, Canis familiaris
catggcgatttaactcctctggaag

SEQ ID NO: 65335 - DNA, 25 bp, Canis familiaris
caggcgagtgtacatcctctggatc

SEQ ID NO: 65336 - DNA, 25 bp, Canis familiaris
caggtacttgagtatccttccatcc

SEQ ID NO: 65337 - DNA, 25 bp, Canis familiaris
caggcccttgaggaggccttgcacc

SEQ ID NO: 65338 - DNA, 25 bp, Canis familiaris
caggcgacgtgtgcacgtcattccc

SEQ ID NO: 65339 - DNA, 25 bp, Canis familiaris
caggcagcccttgcagggaacgaca

SEQ ID NO: 65340 - DNA, 25 bp, Canis familiaris
caggccccctgggggcacctgaaga

SEQ ID NO: 65341 - DNA, 25 bp, Canis familiaris
catggacaccctgggggcccaggag

SEQ ID NO: 65342 - DNA, 25 bp, Canis familiaris
caggatcacttctcggccaaaggag

SEQ ID NO: 65343 - DNA, 25 bp, Canis familiaris
caggatccttccaggcgagaacggt

SEQ ID NO: 65344 - DNA, 25 bp, Canis familiaris
ctcaacctgtaccggcggaacacgt

SEQ ID NO: 65345 - DNA, 25 bp, Canis familiaris
cttgtccaggaccccggaatcctgg

SEQ ID NO: 65346 - DNA, 25 bp, Canis familiaris
catctgttaaaccctccagaaggga

SEQ ID NO: 65347 - DNA, 25 bp, Canis familiaris
catcgtcggaaacccctgaagtttg

SEQ ID NO: 65348 - DNA, 25 bp, Canis familiaris
catcccgtaccacctgagtaagatg

SEQ ID NO: 65349 - DNA, 25 bp, Canis familiaris
catctacgtgatgcccgaatatcgg

SEQ ID NO: 65350 - DNA, 25 bp, Canis familiaris
catgtacgcgaggcctctattttgc

SEQ ID NO: 65351 - DNA, 25 bp, Canis familiaris
catcaacgcacccctacataattgc

SEQ ID NO: 65352 - DNA, 25 bp, Canis familiaris
catgaggcgacaggtcttcaaattg

SEQ ID NO: 65353 - DNA, 25 bp, Canis familiaris
catggtcgacggactcatgacaccg

SEQ ID NO: 65354 - DNA, 25 bp, Canis familiaris
caggctccagcagatctgaaccagc

SEQ ID NO: 65355 - DNA, 25 bp, Canis familiaris
catggccgacatgttgagaccgcag

SEQ ID NO: 65356 - DNA, 25 bp, Canis familiaris
caggacacacatgcttgacacaggt

SEQ ID NO: 65357 - DNA, 25 bp, Canis familiaris
caggtcaagctggacgtcagacgtc

SEQ ID NO: 65358 - DNA, 25 bp, Canis familiaris
caggctacgtcgggatcaaggccca

SEQ ID NO: 65359 - DNA, 25 bp, Canis familiaris
caggacacagggcagatgcacaggc

SEQ ID NO: 65360 - DNA, 25 bp, Canis familiaris
caggagcatatgtctcacacacaca

SEQ ID NO: 65361 - DNA, 25 bp, Canis familiaris
catggtcagcaataccaccaaccgt

SEQ ID NO: 65362 - DNA, 25 bp, Canis familiaris
catggtggtagattcctcctacacg

SEQ ID NO: 65363 - DNA, 25 bp, Canis familiaris
catggaggtggcggagcccaacagc

SEQ ID NO: 65364 - DNA, 25 bp, Canis familiaris
caggatgtgaggggcctccatggcc

SEQ ID NO: 65365 - DNA, 25 bp, Canis familiaris
caggatggcagctagaacccagacc

SEQ ID NO: 65366 - DNA, 25 bp, Canis familiaris
caggttgcttaattatgccagaagg

SEQ ID NO: 65367 - DNA, 25 bp, Canis familiaris
taggttataaatgatcggaagtgga

SEQ ID NO: 65368 - DNA, 25 bp, Canis familiaris
tagtagttatttatgggtagtggga

SEQ ID NO: 65369 - DNA, 25 bp, Canis familiaris
caggctttctttttgggtattggag

SEQ ID NO: 65370 - DNA, 25 bp, Canis familiaris
caggcgtttttaggtgtctcttttg

SEQ ID NO: 65371 - DNA, 25 bp, Canis familiaris
caggcctgttttatggtttgttttg

SEQ ID NO: 65372 - DNA, 25 bp, Canis familiaris
catgcggtttagtttgtgtgttttt

SEQ ID NO: 65373 - DNA, 25 bp, Canis familiaris
caggacttgcattttttgactttct

SEQ ID NO: 65374 - DNA, 25 bp, Canis familiaris
catgtgtcgtttctcttacttgtaa

SEQ ID NO: 65375 - DNA, 25 bp, Canis familiaris
catggctcctattttactcactagt

SEQ ID NO: 65376 - DNA, 25 bp, Canis familiaris
caggccctgttgatagtagccaaaa

SEQ ID NO: 65377 - DNA, 25 bp, Canis familiaris
caggaccttgcttatatgatagccg

SEQ ID NO: 65378 - DNA, 25 bp, Canis familiaris
caggcacctctgatgtcagatccgg

SEQ ID NO: 65379 - DNA, 25 bp, Canis familiaris
catggacttctgagccatctgtcgt

SEQ ID NO: 65380 - DNA, 25 bp, Canis familiaris
caggccattcaaagagcaggtcgtt

SEQ ID NO: 65381 - DNA, 25 bp, Canis familiaris
caggccatttattagcaggtgcgcg

SEQ ID NO: 65382 - DNA, 25 bp, Canis familiaris
catggctcattaaaatcgctcgggg

SEQ ID NO: 65383 - DNA, 25 bp, Canis familiaris
catggatctgtaataacggcaggga

SEQ ID NO: 65384 - DNA, 25 bp, Canis familiaris
caggagcgttgagcacggctctggc

SEQ ID NO: 65385 - DNA, 25 bp, Canis familiaris
caggatctgggagcgagagcctgcc

SEQ ID NO: 65386 - DNA, 25 bp, Canis familiaris
caggagctgcggtacagcgtggcgc

SEQ ID NO: 65387 - DNA, 25 bp, Canis familiaris
caggagtggagagctctgtgctaga

SEQ ID NO: 65388 - DNA, 25 bp, Canis familiaris
caggcagggggcacgggaaggagtt

SEQ ID NO: 65389 - DNA, 25 bp, Canis familiaris
caggctgggccctgaggggagtggt

SEQ ID NO: 65390 - DNA, 25 bp, Canis familiaris
caggacgggttgtgggtgctgtggt

SEQ ID NO: 65391 - DNA, 25 bp, Canis familiaris
catgggcggagggtcgaggggtggt

SEQ ID NO: 65392 - DNA, 25 bp, Canis familiaris
caggagcttcgggcactgagggccc

SEQ ID NO: 65393 - DNA, 25 bp, Canis familiaris
caggagcctggagacagcagcagca

SEQ ID NO: 65394 - DNA, 25 bp, Canis familiaris
caggagctgcgcaagctgaagcggc

SEQ ID NO: 65395 - DNA, 25 bp, Canis familiaris
caggctgctcatgcacgattcgagc

SEQ ID NO: 65396 - DNA, 25 bp, Canis familiaris
caggcgtgcagatggatcacccttg

SEQ ID NO: 65397 - DNA, 25 bp, Canis familiaris
caggttgagcaagttctactctgtg

SEQ ID NO: 65398 - DNA, 25 bp, Canis familiaris
caggttgactcaaatgccaccttct

SEQ ID NO: 65399 - DNA, 25 bp, Canis familiaris
caggatcaactaactgtaccccttg

SEQ ID NO: 65400 - DNA, 25 bp, Canis familiaris
caggaaaccaaggtggccctattgc

SEQ ID NO: 65401 - DNA, 25 bp, Canis familiaris
caggaagaccagggtgcagcccgtg

SEQ ID NO: 65402 - DNA, 25 bp, Canis familiaris
catataaacacgtggatcccgggtt

SEQ ID NO: 65403 - DNA, 25 bp, Canis familiaris
catatactaccctgaaatacccgtc

SEQ ID NO: 65404 - DNA, 25 bp, Canis familiaris
catgatactcatgccacgagtctca

SEQ ID NO: 65405 - DNA, 25 bp, Canis familiaris
caggactgcatcctcagtgatgtct

SEQ ID NO: 65406 - DNA, 25 bp, Canis familiaris
caggagtgcctggcaggagcctggg

SEQ ID NO: 65407 - DNA, 25 bp, Canis familiaris
caggaggccaggacagagcctgcgg

SEQ ID NO: 65408 - DNA, 25 bp, Canis familiaris
caggcaagcctgcagagagccctgc

SEQ ID NO: 65409 - DNA, 25 bp, Canis familiaris
caggaagctgctgaggagccgctga

SEQ ID NO: 65410 - DNA, 25 bp, Canis familiaris
catggcaaattccatggcaccgtca

SEQ ID NO: 65411 - DNA, 25 bp, Canis familiaris
catgcacaagtaggagcccggcacg

SEQ ID NO: 65412 - DNA, 25 bp, Canis familiaris
catcagaatctgtcggccaaaagcg

SEQ ID NO: 65413 - DNA, 25 bp, Canis familiaris
catcagaatctgtcggccaaaagcg

SEQ ID NO: 65414 - DNA, 25 bp, Canis familiaris
ctcggtcgatctggcatacgatagc

SEQ ID NO: 65415 - DNA, 25 bp, Canis familiaris
catctagctcaacccaatggtaaat

SEQ ID NO: 65416 - DNA, 25 bp, Canis familiaris
catccctacagtgcagtcgtgtata

SEQ ID NO: 65417 - DNA, 25 bp, Canis familiaris
catccatctactaaaattttttcca

SEQ ID NO: 65418 - DNA, 25 bp, Canis familiaris
catgccagttctcaaagtcgttctc

SEQ ID NO: 65419 - DNA, 25 bp, Canis familiaris
catccagtttttaagtccattaaga

SEQ ID NO: 65420 - DNA, 25 bp, Canis familiaris
catggaattttctacagtctatata

SEQ ID NO: 65421 - DNA, 25 bp, Canis familiaris
catcgactctttcacatgcttatgc

SEQ ID NO: 65422 - DNA, 25 bp, Canis familiaris
caggagtcatttccacagatgactg

SEQ ID NO: 65423 - DNA, 25 bp, Canis familiaris
catgtgtggcatttcagaagagatt

SEQ ID NO: 65424 - DNA, 25 bp, Canis familiaris
catgtgatcactttgcaggcagctt

SEQ ID NO: 65425 - DNA, 25 bp, Canis familiaris
caggaactactcggcacttttcctt

SEQ ID NO: 65426 - DNA, 25 bp, Canis familiaris
catggggtaatcggagtttacacct

SEQ ID NO: 65427 - DNA, 25 bp, Canis familiaris
catcgggtacaatagtcccaacctg

SEQ ID NO: 65428 - DNA, 25 bp, Canis familiaris
cattggagtaaactcgtcacccacg

SEQ ID NO: 65429 - DNA, 25 bp, Canis familiaris
catggggctggaactcgtgaccccg

SEQ ID NO: 65430 - DNA, 25 bp, Canis familiaris
catggggcttgatcttaggaccctg

SEQ ID NO: 65431 - DNA, 25 bp, Canis familiaris
caggaggcattagctctgacgtcac

SEQ ID NO: 65432 - DNA, 25 bp, Canis familiaris
caggaagctgatgccgtagtgccac

SEQ ID NO: 65433 - DNA, 25 bp, Canis familiaris
caggatgagcttctcgtgggcatcc

SEQ ID NO: 65434 - DNA, 25 bp, Canis familiaris
caggatgatcagtccggggcgctgc

SEQ ID NO: 65435 - DNA, 25 bp, Canis familiaris
caggagacatggggctgggcgtgcc

SEQ ID NO: 65436 - DNA, 25 bp, Canis familiaris
caggagccagaggggaccgtgtggg

SEQ ID NO: 65437 - DNA, 25 bp, Canis familiaris
caggcctagcggatgggggtgggga

SEQ ID NO: 65438 - DNA, 25 bp, Canis familiaris
caggctccaccgggtggggtgcatg

SEQ ID NO: 65439 - DNA, 25 bp, Canis familiaris
caggcccacgggaacagagtgtcag

SEQ ID NO: 65440 - DNA, 25 bp, Canis familiaris
caggacctgctgggaccagggtgct

SEQ ID NO: 65441 - DNA, 25 bp, Canis familiaris
caggagtctgcgtttccaagagatg

SEQ ID NO: 65442 - DNA, 25 bp, Canis familiaris
catggagctccgaaccagcaagaga

SEQ ID NO: 65443 - DNA, 25 bp, Canis familiaris
caggacctagggccagcagtgataa

SEQ ID NO: 65444 - DNA, 25 bp, Canis familiaris
caggactcaggctgccaggtcatag

SEQ ID NO: 65445 - DNA, 25 bp, Canis familiaris
caggacatgcaggaggcgcggtgga

SEQ ID NO: 65446 - DNA, 25 bp, Canis familiaris
caggagccgcaagcggtgctgggtt

SEQ ID NO: 65447 - DNA, 25 bp, Canis familiaris
caggctgggaaacggccgagggtgc

SEQ ID NO: 65448 - DNA, 25 bp, Canis familiaris
catgccgggaaactggtcgcggatt

SEQ ID NO: 65449 - DNA, 25 bp, Canis familiaris
catccaggggaactcccacgggaag

SEQ ID NO: 65450 - DNA, 25 bp, Canis familiaris
caggcagaggagatgtcgaccgagc

SEQ ID NO: 65451 - DNA, 25 bp, Canis familiaris
catgtgaaggagtcgtctccacctc

SEQ ID NO: 65452 - DNA, 25 bp, Canis familiaris
catgtattgggtcacacacacacac

SEQ ID NO: 65453 - DNA, 25 bp, Canis familiaris
catggaagaagtcagtcctaccctt

SEQ ID NO: 65454 - DNA, 25 bp, Canis familiaris
catggaaggggcgaggcccctcgct

SEQ ID NO: 65455 - DNA, 25 bp, Canis familiaris
caggatgtggggaggcccctgcatt

SEQ ID NO: 65456 - DNA, 25 bp, Canis familiaris
caggactggtggagttcttctgcta

SEQ ID NO: 65457 - DNA, 25 bp, Canis familiaris
caggaggttggtctgatctctctgg

SEQ ID NO: 65458 - DNA, 25 bp, Canis familiaris
caggctttgtggagctcagcctctg

SEQ ID NO: 65459 - DNA, 25 bp, Canis familiaris
caggccatatgtttactcagactta

SEQ ID NO: 65460 - DNA, 25 bp, Canis familiaris
catgtccaaggattggccgcttgtc

SEQ ID NO: 65461 - DNA, 25 bp, Canis familiaris
cattgtaaggtttgaggtagccact

SEQ ID NO: 65462 - DNA, 25 bp, Canis familiaris
catgctgtacggaggaggctgagtc

SEQ ID NO: 65463 - DNA, 25 bp, Canis familiaris
catgttgattggaggccctacgcag

SEQ ID NO: 65464 - DNA, 25 bp, Canis familiaris
catgttgcttaccgcaccattccgg

SEQ ID NO: 65465 - DNA, 25 bp, Canis familiaris
catgcttattccatgactgcttgcc

SEQ ID NO: 65466 - DNA, 25 bp, Canis familiaris
caggctttctgtagatgtgcttgaa

SEQ ID NO: 65467 - DNA, 25 bp, Canis familiaris
caggcctgtcttgggctgaagcatc

SEQ ID NO: 65468 - DNA, 25 bp, Canis familiaris
caggcgctgatgaccccggacaccg

SEQ ID NO: 65469 - DNA, 25 bp, Canis familiaris
catgttccagtccctgggaccgagt

SEQ ID NO: 65470 - DNA, 25 bp, Canis familiaris
catgttccagaccgtgaagaccctg

SEQ ID NO: 65471 - DNA, 25 bp, Canis familiaris
catgtaccagaacaggtgtcctgct

SEQ ID NO: 65472 - DNA, 25 bp, Canis familiaris
catgtacctggacaacagctccgtt

SEQ ID NO: 65473 - DNA, 25 bp, Canis familiaris
cataatcagcatcacggacagtccg

SEQ ID NO: 65474 - DNA, 25 bp, Canis familiaris
caggacagcagcgacggctgcggcc

SEQ ID NO: 65475 - DNA, 25 bp, Canis familiaris
caggacagcacatttgctgccagcc

SEQ ID NO: 65476 - DNA, 25 bp, Canis familiaris
caggcactcaatatagccagcaagt

SEQ ID NO: 65477 - DNA, 25 bp, Canis familiaris
caggcagtgctatttagtcactagt

SEQ ID NO: 65478 - DNA, 25 bp, Canis familiaris
caggcagtgcaggtgtttacggggg

SEQ ID NO: 65479 - DNA, 25 bp, Canis familiaris
caggcaacagcacgtttacacaggt

SEQ ID NO: 65480 - DNA, 25 bp, Canis familiaris
caggccatcctgctattactgaggt

SEQ ID NO: 65481 - DNA, 25 bp, Canis familiaris
catggccatacactaataaggggat

SEQ ID NO: 65482 - DNA, 25 bp, Canis familiaris
catggcctacatcggggagggagcc

SEQ ID NO: 65483 - DNA, 25 bp, Canis familiaris
caggcacgaggcggctggaaggacg

SEQ ID NO: 65484 - DNA, 25 bp, Canis familiaris
caggcactagtgggcggcagagagc

SEQ ID NO: 65485 - DNA, 25 bp, Canis familiaris
catggacataggtagtggccccgta

SEQ ID NO: 65486 - DNA, 25 bp, Canis familiaris
caggagcgcagggctgtggtccctg

SEQ ID NO: 65487 - DNA, 25 bp, Canis familiaris
caggcaggaggtcgggacgtcatcg

SEQ ID NO: 65488 - DNA, 25 bp, Canis familiaris
caggagatgggctgggggctgcatc

SEQ ID NO: 65489 - DNA, 25 bp, Canis familiaris
caggaaggtgcgaacggcgcttgcg

SEQ ID NO: 65490 - DNA, 25 bp, Canis familiaris
caggaagggtggtcgtgtgatcgcc

SEQ ID NO: 65491 - DNA, 25 bp, Canis familiaris
caggaagtttggttgtggacactcg

SEQ ID NO: 65492 - DNA, 25 bp, Canis familiaris
caggcacagaatgggtatgggacac

SEQ ID NO: 65493 - DNA, 25 bp, Canis familiaris
caggacagaactcctatgccagacc

SEQ ID NO: 65494 - DNA, 25 bp, Canis familiaris
catatgaatgcatatgcttacctga

SEQ ID NO: 65495 - DNA, 25 bp, Canis familiaris
catgagtatgctcagcttcagaaga

SEQ ID NO: 65496 - DNA, 25 bp, Canis familiaris
catggctgatcatagctcacacgaa

SEQ ID NO: 65497 - DNA, 25 bp, Canis familiaris
catggctgataacccatcctgggat

SEQ ID NO: 65498 - DNA, 25 bp, Canis familiaris
caggctgtaagtcctgtgggtcagg

SEQ ID NO: 65499 - DNA, 25 bp, Canis familiaris
caggcgtcccatctgggaggagctg

SEQ ID NO: 65500 - DNA, 25 bp, Canis familiaris
catggcttcctatgtggttgctgac

SEQ ID NO: 65501 - DNA, 25 bp, Canis familiaris
catggcttccatctggggtggacac

SEQ ID NO: 65502 - DNA, 25 bp, Canis familiaris
caggctgcgcctatggcaggaggag

SEQ ID NO: 65503 - DNA, 25 bp, Canis familiaris
catgactcgttctgtaggagagatt

SEQ ID NO: 65504 - DNA, 25 bp, Canis familiaris
catcgtcgttgctattgccgggaat

SEQ ID NO: 65505 - DNA, 25 bp, Canis familiaris
catcctcggtgtttgtaggaacttc

SEQ ID NO: 65506 - DNA, 25 bp, Canis familiaris
caggccgggttctgagtacacagtc

SEQ ID NO: 65507 - DNA, 25 bp, Canis familiaris
caggcacggagaccagcggtctaaa

SEQ ID NO: 65508 - DNA, 25 bp, Canis familiaris
caggcatcggagggacccctcaaag

SEQ ID NO: 65509 - DNA, 25 bp, Canis familiaris
caggctctgggtgcatcttaataaa

SEQ ID NO: 65510 - DNA, 25 bp, Canis familiaris
caggcttacgtgttcattgaatagt

SEQ ID NO: 65511 - DNA, 25 bp, Canis familiaris
catggttatgccactgattaattgc

SEQ ID NO: 65512 - DNA, 25 bp, Canis familiaris
ctcagcttagccaggtggaaatcct

SEQ ID NO: 65513 - DNA, 25 bp, Canis familiaris
catacttacctggcaggggagatac

SEQ ID NO: 65514 - DNA, 25 bp, Canis familiaris
caggagcttcctgcgggagcagatg

SEQ ID NO: 65515 - DNA, 25 bp, Canis familiaris
caggagcttgccggacagtggctga

SEQ ID NO: 65516 - DNA, 25 bp, Canis familiaris
caggagcttgaagcactcggctgca

SEQ ID NO: 65517 - DNA, 25 bp, Canis familiaris
caggagcctgaactgacatccactc

SEQ ID NO: 65518 - DNA, 25 bp, Canis familiaris
caggagcagctgatagcaccctgcg

SEQ ID NO: 65519 - DNA, 25 bp, Canis familiaris
catgtgcatgcacagtatccacccg

SEQ ID NO: 65520 - DNA, 25 bp, Canis familiaris
caggcacgccagaaggatgccgcag

SEQ ID NO: 65521 - DNA, 25 bp, Canis familiaris
caggctgtgccaatcaggagcccag

SEQ ID NO: 65522 - DNA, 25 bp, Canis familiaris
caggctgtagcactggaggccacgc

SEQ ID NO: 65523 - DNA, 25 bp, Canis familiaris
caggcatgtgtgctggtgcccatgc

SEQ ID NO: 65524 - DNA, 25 bp, Canis familiaris
caggctgagtggtgtccagcagctc

SEQ ID NO: 65525 - DNA, 25 bp, Canis familiaris
caggaagcatcctgtccagcattgc

SEQ ID NO: 65526 - DNA, 25 bp, Canis familiaris
catggacagcatcttcgtatcaatc

SEQ ID NO: 65527 - DNA, 25 bp, Canis familiaris
caggaagctacttcagtgtggaaga

SEQ ID NO: 65528 - DNA, 25 bp, Canis familiaris
caggacagaccttcgtggtgcagga

SEQ ID NO: 65529 - DNA, 25 bp, Canis familiaris
caggactgactcctgtggggcagct

SEQ ID NO: 65530 - DNA, 25 bp, Canis familiaris
caggagctcctgcaggaagctgacc

SEQ ID NO: 65531 - DNA, 25 bp, Canis familiaris
caggacatcctggagatccacttcc

SEQ ID NO: 65532 - DNA, 25 bp, Canis familiaris
caggccatgctaggcacattgcact

SEQ ID NO: 65533 - DNA, 25 bp, Canis familiaris
catgcacgattcgagcacgtcagcg

SEQ ID NO: 65534 - DNA, 25 bp, Canis familiaris
catcaacagcatgggcagcagcctg

SEQ ID NO: 65535 - DNA, 25 bp, Canis familiaris
caggcccagcagcagagcctggacc

SEQ ID NO: 65536 - DNA, 25 bp, Canis familiaris
caggcacagagacacagcactggtt

SEQ ID NO: 65537 - DNA, 25 bp, Canis familiaris
caggcacagtggacacccagttcat

SEQ ID NO: 65538 - DNA, 25 bp, Canis familiaris
caggaagtagacatggcagattgct

SEQ ID NO: 65539 - DNA, 25 bp, Canis familiaris
caggacctggagactcgcaatgctg

SEQ ID NO: 65540 - DNA, 25 bp, Canis familiaris
caggacactctagcaggacactggt

SEQ ID NO: 65541 - DNA, 25 bp, Canis familiaris
caggccctctcagcagctatagggt

SEQ ID NO: 65542 - DNA, 25 bp, Canis familiaris
caggccatcttagcagctcagagac

SEQ ID NO: 65543 - DNA, 25 bp, Canis familiaris
caggccctatgggcagcagcagcag

SEQ ID NO: 65544 - DNA, 25 bp, Canis familiaris
caggcagcctcgagagcagctgcag

SEQ ID NO: 65545 - DNA, 25 bp, Canis familiaris
caggcacagcccatgtgcatgcata

SEQ ID NO: 65546 - DNA, 25 bp, Canis familiaris
catccaagcccagtgtgccattata

SEQ ID NO: 65547 - DNA, 25 bp, Canis familiaris
catccaggctgtgctgtccctgtat

SEQ ID NO: 65548 - DNA, 25 bp, Canis familiaris
catcaggcttgagctctactgggtc

SEQ ID NO: 65549 - DNA, 25 bp, Canis familiaris
catcaggctctacactcagtgtgga

SEQ ID NO: 65550 - DNA, 25 bp, Canis familiaris
catcaggtatacagtcaggtgcccc

SEQ ID NO: 65551 - DNA, 25 bp, Canis familiaris
catgatggtcttgcggatcttccac

SEQ ID NO: 65552 - DNA, 25 bp, Canis familiaris
catgtggtagtcagctgtatctccc

SEQ ID NO: 65553 - DNA, 25 bp, Canis familiaris
catggtccaggcatgaattccaccc

SEQ ID NO: 65554 - DNA, 25 bp, Canis familiaris
caggcgccaggcagacattggcaaa

SEQ ID NO: 65555 - DNA, 25 bp, Canis familiaris
caggcctacctgcacattccagaca

SEQ ID NO: 65556 - DNA, 25 bp, Canis familiaris
caggcctacctgttactatagcatc

SEQ ID NO: 65557 - DNA, 25 bp, Canis familiaris
caggcccaccggtcaatgtgaattg

SEQ ID NO: 65558 - DNA, 25 bp, Canis familiaris
caggcctaatccgtaatggagactg

SEQ ID NO: 65559 - DNA, 25 bp, Canis familiaris
caggctttagtattaatgtgagaca

SEQ ID NO: 65560 - DNA, 25 bp, Canis familiaris
cttgcttcttccttctagtagtaag

SEQ ID NO: 65561 - DNA, 25 bp, Canis familiaris
catttttccccctcaagacagaaag

SEQ ID NO: 65562 - DNA, 25 bp, Canis familiaris
cattatttcgggtgtcagactagca

SEQ ID NO: 65563 - DNA, 25 bp, Canis familiaris
cttgtacctgggtgtctggatggac

SEQ ID NO: 65564 - DNA, 25 bp, Canis familiaris
catggttccggttcttcggatgaga

SEQ ID NO: 65565 - DNA, 25 bp, Canis familiaris
catggtgttcaggcgtttcgtggag

SEQ ID NO: 65566 - DNA, 25 bp, Canis familiaris
caggctgattacttgttatctggga

SEQ ID NO: 65567 - DNA, 25 bp, Canis familiaris
catgtcatgagtaaggctttttgtg

SEQ ID NO: 65568 - DNA, 25 bp, Canis familiaris
catgggagtgtagctgcttctcttg

SEQ ID NO: 65569 - DNA, 25 bp, Canis familiaris
caggaaaggattagcttctctctag

SEQ ID NO: 65570 - DNA, 25 bp, Canis familiaris
catggaaatgagttcatctcgtacc

SEQ ID NO: 65571 - DNA, 25 bp, Canis familiaris
catggagacgttcatcttgtcgctc

SEQ ID NO: 65572 - DNA, 25 bp, Canis familiaris
caggaaggtgccgtgtttcagtctg

SEQ ID NO: 65573 - DNA, 25 bp, Canis familiaris
caggctgatggttttgttgttgttg

SEQ ID NO: 65574 - DNA, 25 bp, Canis familiaris
catgtgtggtgcttttggacggttg

SEQ ID NO: 65575 - DNA, 25 bp, Canis familiaris
caggctgaggcaccgtgtagggtct

SEQ ID NO: 65576 - DNA, 25 bp, Canis familiaris
caggctggcacaggcctgcaagggc

SEQ ID NO: 65577 - DNA, 25 bp, Canis familiaris
catggcccacatggcctccaaggag

SEQ ID NO: 65578 - DNA, 25 bp, Canis familiaris
catggcctacatggcctccaaggag

SEQ ID NO: 65579 - DNA, 25 bp, Canis familiaris
catgtgttactgcccaacaccgaag

SEQ ID NO: 65580 - DNA, 25 bp, Canis familiaris
catcgttccagatcaaacctgacgg

SEQ ID NO: 65581 - DNA, 25 bp, Canis familiaris
catcgatgtctatcaaagccagcgg

SEQ ID NO: 65582 - DNA, 25 bp, Canis familiaris
caggctgtgctatccctgtacgcct

SEQ ID NO: 65583 - DNA, 25 bp, Canis familiaris
caggcattgctggacccgaagtcca

SEQ ID NO: 65584 - DNA, 25 bp, Canis familiaris
caggcattgctggaggatacaaacc

SEQ ID NO: 65585 - DNA, 25 bp, Canis familiaris
caggcattgctgacaggatgcagaa

SEQ ID NO: 65586 - DNA, 25 bp, Canis familiaris
caggctttccaggtgcaaggtgaca

SEQ ID NO: 65587 - DNA, 25 bp, Canis familiaris
caggctttgcgacagagcagctgga

SEQ ID NO: 65588 - DNA, 25 bp, Canis familiaris
caggctatctgcacaaggccaagcg

SEQ ID NO: 65589 - DNA, 25 bp, Canis familiaris
caggcttacccaatgtcacactgcc

SEQ ID NO: 65590 - DNA, 25 bp, Canis familiaris
catggcccacactaagtcacaaagc

SEQ ID NO: 65591 - DNA, 25 bp, Canis familiaris
catggcccatggaaaccaatacacc

SEQ ID NO: 65592 - DNA, 25 bp, Canis familiaris
catggaccgcgaagtgcgcaaatca

SEQ ID NO: 65593 - DNA, 25 bp, Canis familiaris
caggccgcgtgaagaggaagaatgc

SEQ ID NO: 65594 - DNA, 25 bp, Canis familiaris
catgcgcccgtgcagaggaattgcc

SEQ ID NO: 65595 - DNA, 25 bp, Canis familiaris
caggctccctgcaaggagactgatg

SEQ ID NO: 65596 - DNA, 25 bp, Canis familiaris
caggctccctgaggggactcatatc

SEQ ID NO: 65597 - DNA, 25 bp, Canis familiaris
catggtcctgcgtgactattcagat

SEQ ID NO: 65598 - DNA, 25 bp, Canis familiaris
cttgattgtgcttccacgattgtgc

SEQ ID NO: 65599 - DNA, 25 bp, Canis familiaris
catgtaagatgtttccagtttgggc

SEQ ID NO: 65600 - DNA, 25 bp, Canis familiaris
caggaaatgctctatctcagccttg

SEQ ID NO: 65601 - DNA, 25 bp, Canis familiaris
caggaaatgcttcctggccttcacg

SEQ ID NO: 65602 - DNA, 25 bp, Canis familiaris
caggaactttgtgggccttaccagc

SEQ ID NO: 65603 - DNA, 25 bp, Canis familiaris
caggaacttctttttgtctaacact

SEQ ID NO: 65604 - DNA, 25 bp, Canis familiaris
catctaccgttttattttaactcat

SEQ ID NO: 65605 - DNA, 25 bp, Canis familiaris
catgcatttggtatcttttaagttt

SEQ ID NO: 65606 - DNA, 25 bp, Canis familiaris
catgcataaatgtagtttgtcttaa

SEQ ID NO: 65607 - DNA, 25 bp, Canis familiaris
catgcaaattaccattagatcagct

SEQ ID NO: 65608 - DNA, 25 bp, Canis familiaris
catcgcaagtttcgtggatggcttg

SEQ ID NO: 65609 - DNA, 25 bp, Canis familiaris
ctccgtggattcagggccttgggaa

SEQ ID NO: 65610 - DNA, 25 bp, Canis familiaris
ctctccggattgagggggcttgtca

SEQ ID NO: 65611 - DNA, 25 bp, Canis familiaris
cttcaaggtgggaagggagattcac

SEQ ID NO: 65612 - DNA, 25 bp, Canis familiaris
ctaataggaggacttggaggttcaa

SEQ ID NO: 65613 - DNA, 25 bp, Canis familiaris
catctaccggagactgttgggttaa

SEQ ID NO: 65614 - DNA, 25 bp, Canis familiaris
catgttcagggatcgccaggcgttt

SEQ ID NO: 65615 - DNA, 25 bp, Canis familiaris
catgattcaggatctgctcgggcac

SEQ ID NO: 65616 - DNA, 25 bp, Canis familiaris
catgtgtgaagttcgtggcgcagca

SEQ ID NO: 65617 - DNA, 25 bp, Canis familiaris
caggctgagactgaggctgcgacgc

SEQ ID NO: 65618 - DNA, 25 bp, Canis familiaris
caggctgccacggaggaggcaagca

SEQ ID NO: 65619 - DNA, 25 bp, Canis familiaris
caggcctacagctacacggagagcg

SEQ ID NO: 65620 - DNA, 25 bp, Canis familiaris
caggcccagcagtccaatgaggaag

SEQ ID NO: 65621 - DNA, 25 bp, Canis familiaris
caggccagccagtacctgagagtag

SEQ ID NO: 65622 - DNA, 25 bp, Canis familiaris
caggcagagcccagcactgagaggg

SEQ ID NO: 65623 - DNA, 25 bp, Canis familiaris
catggcaccgtcaaggctgagaacg

SEQ ID NO: 65624 - DNA, 25 bp, Canis familiaris
catggcgccagctaaacggaagcta

SEQ ID NO: 65625 - DNA, 25 bp, Canis familiaris
catgggcccaaaggcaggcaaagac

SEQ ID NO: 65626 - DNA, 25 bp, Canis familiaris
catggacctcctgtgcagtggaaaa

SEQ ID NO: 65627 - DNA, 25 bp, Canis familiaris
catggtttctcccacagtggaggaa

SEQ ID NO: 65628 - DNA, 25 bp, Canis familiaris
catggtggaccccaaggacatcgac

SEQ ID NO: 65629 - DNA, 25 bp, Canis familiaris
catggagggccaggggtcctccact

SEQ ID NO: 65630 - DNA, 25 bp, Canis familiaris
catgagcagtgactcggggctcctt

SEQ ID NO: 65631 - DNA, 25 bp, Canis familiaris
catggggcctgggagatgctcacaa

SEQ ID NO: 65632 - DNA, 25 bp, Canis familiaris
catggggccctggagctgcaaaatc

SEQ ID NO: 65633 - DNA, 25 bp, Canis familiaris
catgggaccatgacacaccaaacat

SEQ ID NO: 65634 - DNA, 25 bp, Canis familiaris
catgggacagcacacacactacctg

SEQ ID NO: 65635 - DNA, 25 bp, Canis familiaris
catgggagccatgataaatatttga

SEQ ID NO: 65636 - DNA, 25 bp, Canis familiaris
catgggtccaattctagtctcttga

SEQ ID NO: 65637 - DNA, 25 bp, Canis familiaris
catgggtcaatcactagtcacactt

SEQ ID NO: 65638 - DNA, 25 bp, Canis familiaris
catgggtaatccgtgatcacaccaa

SEQ ID NO: 65639 - DNA, 25 bp, Canis familiaris
catggtatgcaattactgatctgtc

SEQ ID NO: 65640 - DNA, 25 bp, Canis familiaris
caggcatatgcatatcctgctactg

SEQ ID NO: 65641 - DNA, 25 bp, Canis familiaris
catgtgcgtgcatttcttcgatgtg

SEQ ID NO: 65642 - DNA, 25 bp, Canis familiaris
caggcgatgtgctttatggcaggcg

SEQ ID NO: 65643 - DNA, 25 bp, Canis familiaris
caggcgctgagcctctgagacatgt

SEQ ID NO: 65644 - DNA, 25 bp, Canis familiaris
catggcgccgcgacatatatgtgat

SEQ ID NO: 65645 - DNA, 25 bp, Canis familiaris
caggcaggtgctggcattgttgctg

SEQ ID NO: 65646 - DNA, 25 bp, Canis familiaris
caggcacgagctgtgctgctgactg

SEQ ID NO: 65647 - DNA, 25 bp, Canis familiaris
caggcagtggtgtagctcagctgtg

SEQ ID NO: 65648 - DNA, 25 bp, Canis familiaris
catggctctggctaggcaccagtgg

SEQ ID NO: 65649 - DNA, 25 bp, Canis familiaris
catgcatgccaggctgggcgcaagg

SEQ ID NO: 65650 - DNA, 25 bp, Canis familiaris
catgctcctgcaggtgcagctggca

SEQ ID NO: 65651 - DNA, 25 bp, Canis familiaris
catgcatgctgggcgcaatctgcgc

SEQ ID NO: 65652 - DNA, 25 bp, Canis familiaris
catgatgatgaccgcctgtgatctc

SEQ ID NO: 65653 - DNA, 25 bp, Canis familiaris
catgatgtcctgcattggatccgct

SEQ ID NO: 65654 - DNA, 25 bp, Canis familiaris
caggctgctgctgcagtttacgtag

SEQ ID NO: 65655 - DNA, 25 bp, Canis familiaris
caggcgtgcttctctgtcaagagaa

SEQ ID NO: 65656 - DNA, 25 bp, Canis familiaris
caggcagtgttccgttgaagcagaa

SEQ ID NO: 65657 - DNA, 25 bp, Canis familiaris
caggcagtgttcatccagcagagcc

SEQ ID NO: 65658 - DNA, 25 bp, Canis familiaris
catggcagtatcatgtgcccagccc

SEQ ID NO: 65659 - DNA, 25 bp, Canis familiaris
cgctcactcatcatgatggtaacta

SEQ ID NO: 65660 - DNA, 25 bp, Canis familiaris
catgctaggcacattgcactaatta

SEQ ID NO: 65661 - DNA, 25 bp, Canis familiaris
catgcttggcacagttcttaaatag

SEQ ID NO: 65662 - DNA, 25 bp, Canis familiaris
catccgaccaatgtctgtaaagtgc

SEQ ID NO: 65663 - DNA, 25 bp, Canis familiaris
cattaagtccttactgataggggca

SEQ ID NO: 65664 - DNA, 25 bp, Canis familiaris
catctaggccctcacgttggcctat

SEQ ID NO: 65665 - DNA, 25 bp, Canis familiaris
catccaccacctctatggtgacctg

SEQ ID NO: 65666 - DNA, 25 bp, Canis familiaris
catcatcacagattctcgagcaggt

SEQ ID NO: 65667 - DNA, 25 bp, Canis familiaris
catcccaagctttccaggtgtgaat

SEQ ID NO: 65668 - DNA, 25 bp, Canis familiaris
catgcacgcactgtattccagggaa

SEQ ID NO: 65669 - DNA, 25 bp, Canis familiaris
catgggcacatgggagtcttggcga

SEQ ID NO: 65670 - DNA, 25 bp, Canis familiaris
catggagccagcgtcaactacgatg

SEQ ID NO: 65671 - DNA, 25 bp, Canis familiaris
catggagccagcgtcaactacgatg

SEQ ID NO: 65672 - DNA, 25 bp, Canis familiaris
catggagccagcgtcaactacgatg

SEQ ID NO: 65673 - DNA, 25 bp, Canis familiaris
catggagccagcgtcaactacgatg

SEQ ID NO: 65674 - DNA, 25 bp, Canis familiaris
catggtctctgtgcaactacttaat

SEQ ID NO: 65675 - DNA, 25 bp, Canis familiaris
catggtttgctgacccaacttagaa

SEQ ID NO: 65676 - DNA, 25 bp, Canis familiaris
catggctttctctcaattcttagat

SEQ ID NO: 65677 - DNA, 25 bp, Canis familiaris
catggttgtccgtccagtctaaatc

SEQ ID NO: 65678 - DNA, 25 bp, Canis familiaris
catggattcttccaccagttggagt

SEQ ID NO: 65679 - DNA, 25 bp, Canis familiaris
catgagttctccaacaccttcggct

SEQ ID NO: 65680 - DNA, 25 bp, Canis familiaris
catggtagcttcaacaaccatctcg

SEQ ID NO: 65681 - DNA, 25 bp, Canis familiaris
catggcgagtcagacatccgcccac

SEQ ID NO: 65682 - DNA, 25 bp, Canis familiaris
caggctgagcgagtacttggcgccg

SEQ ID NO: 65683 - DNA, 25 bp, Canis familiaris
catggctgacacgttcttggaacac

SEQ ID NO: 65684 - DNA, 25 bp, Canis familiaris
catggtgccaccacaggatcaacac

SEQ ID NO: 65685 - DNA, 25 bp, Canis familiaris
caggctgcctccacaggatggagca

SEQ ID NO: 65686 - DNA, 25 bp, Canis familiaris
catgtcgtctacactgctgggagat

SEQ ID NO: 65687 - DNA, 25 bp, Canis familiaris
catgataaccagacctgctgtcgag

SEQ ID NO: 65688 - DNA, 25 bp, Canis familiaris
catgtacccaggcattgctgacagg

SEQ ID NO: 65689 - DNA, 25 bp, Canis familiaris
catgtttccagataagcttgcccta

SEQ ID NO: 65690 - DNA, 25 bp, Canis familiaris
catggttctctgttaggcgtgcacc

SEQ ID NO: 65691 - DNA, 25 bp, Canis familiaris
catggtggacatcctaactgtgccc

SEQ ID NO: 65692 - DNA, 25 bp, Canis familiaris
caggctggatgctctccagaggcaa

SEQ ID NO: 65693 - DNA, 25 bp, Canis familiaris
caggccgtgcacggtgcaggtgcaa

SEQ ID NO: 65694 - DNA, 25 bp, Canis familiaris
caggctgtgacagcagtgcagcagt

SEQ ID NO: 65695 - DNA, 25 bp, Canis familiaris
caggctgtcacaggcaagcgagcac

SEQ ID NO: 65696 - DNA, 25 bp, Canis familiaris
caggcaggcacactgcagggacacg

SEQ ID NO: 65697 - DNA, 25 bp, Canis familiaris
catggcaggccatgctaggcacatt

SEQ ID NO: 65698 - DNA, 25 bp, Canis familiaris
caggcaggcctaggatgaggatctt

SEQ ID NO: 65699 - DNA, 25 bp, Canis familiaris
caggcactgcctacagattggctta

SEQ ID NO: 65700 - DNA, 25 bp, Canis familiaris
caggcgtccttcaaagtctgttttt

SEQ ID NO: 65701 - DNA, 25 bp, Canis familiaris
catggttcctaccacatttcttttt

SEQ ID NO: 65702 - DNA, 25 bp, Canis familiaris
catggctcccataagatttttttaa

SEQ ID NO: 65703 - DNA, 25 bp, Canis familiaris
caggcaccactacatttgtgtttta

SEQ ID NO: 65704 - DNA, 25 bp, Canis familiaris
caggcatcacaaggtgtgtgtgtgt

SEQ ID NO: 65705 - DNA, 25 bp, Canis familiaris
caggctccagaggtgtgggtgttga

SEQ ID NO: 65706 - DNA, 25 bp, Canis familiaris
catgacctcagggttctgggatgga

SEQ ID NO: 65707 - DNA, 25 bp, Canis familiaris
caggcctgcagggaatttggggatg

SEQ ID NO: 65708 - DNA, 25 bp, Canis familiaris
catgtcctgtccggagttgggtgtg

SEQ ID NO: 65709 - DNA, 25 bp, Canis familiaris
catgtccctctgttggcaggggtgg

SEQ ID NO: 65710 - DNA, 25 bp, Canis familiaris
catggatttctgggtcactggggag

SEQ ID NO: 65711 - DNA, 25 bp, Canis familiaris
caggctgactgtgctgtcctgattg

SEQ ID NO: 65712 - DNA, 25 bp, Canis familiaris
caggctactcatgatgcttctgcag

SEQ ID NO: 65713 - DNA, 25 bp, Canis familiaris
caggcagactcagctggactagatg

SEQ ID NO: 65714 - DNA, 25 bp, Canis familiaris
catggagacgagtagggccgctgca

SEQ ID NO: 65715 - DNA, 25 bp, Canis familiaris
catggaagccattcggttcctgtag

SEQ ID NO: 65716 - DNA, 25 bp, Canis familiaris
catgggagcgcttccgtaacatgga

SEQ ID NO: 65717 - DNA, 25 bp, Canis familiaris
catggctcagcaggaccgaattcag

SEQ ID NO: 65718 - DNA, 25 bp, Canis familiaris
catggctcagacccaggcagttagt

SEQ ID NO: 65719 - DNA, 25 bp, Canis familiaris
catggcaaaaaacctgttcagtcag

SEQ ID NO: 65720 - DNA, 25 bp, Canis familiaris
catggccctataacctggctactag

SEQ ID NO: 65721 - DNA, 25 bp, Canis familiaris
caggcctgctgaagtcagggtcctg

SEQ ID NO: 65722 - DNA, 25 bp, Canis familiaris
caggcctgggtgtctggagtttgtg

SEQ ID NO: 65723 - DNA, 25 bp, Canis familiaris
caggcagtgtgctgttggtttcagt

SEQ ID NO: 65724 - DNA, 25 bp, Canis familiaris
caggcagtggtgctggtggttgcag

SEQ ID NO: 65725 - DNA, 25 bp, Canis familiaris
caggctgggcgagtcagctggtgtc

SEQ ID NO: 65726 - DNA, 25 bp, Canis familiaris
caggcatgtacatctgcctgggcgc

SEQ ID NO: 65727 - DNA, 25 bp, Canis familiaris
catggctgaccaactgactgaggag

SEQ ID NO: 65728 - DNA, 25 bp, Canis familiaris
catgttccagcaaccactggtaccc

SEQ ID NO: 65729 - DNA, 25 bp, Canis familiaris
catggtcgaaacgtttgtcacggag

SEQ ID NO: 65730 - DNA, 25 bp, Canis familiaris
catcgtgctgaatctgtcttccagg

SEQ ID NO: 65731 - DNA, 25 bp, Canis familiaris
catggatgtcaatctgtttatctct

SEQ ID NO: 65732 - DNA, 25 bp, Canis familiaris
catgaatgtcaatcttttatctctt

SEQ ID NO: 65733 - DNA, 25 bp, Canis familiaris
cataagtagctctctggtagccttg

SEQ ID NO: 65734 - DNA, 25 bp, Canis familiaris
cataagccgtcatctggaatgcctc

SEQ ID NO: 65735 - DNA, 25 bp, Canis familiaris
catgaacagccctcgaggatcgaca

SEQ ID NO: 65736 - DNA, 25 bp, Canis familiaris
catggacacccagagatgttagaga

SEQ ID NO: 65737 - DNA, 25 bp, Canis familiaris
catggctcccacggagcgttcagaa

SEQ ID NO: 65738 - DNA, 25 bp, Canis familiaris
caggcctcacagggagttcactggt

SEQ ID NO: 65739 - DNA, 25 bp, Canis familiaris
caggcgtccacaaatgattcttggt

SEQ ID NO: 65740 - DNA, 25 bp, Canis familiaris
catccctaccatctggtcttggtag

SEQ ID NO: 65741 - DNA, 25 bp, Canis familiaris
catccatcttgttccggttgatagt

SEQ ID NO: 65742 - DNA, 25 bp, Canis familiaris
catcaaccttacaggtgctccagct

SEQ ID NO: 65743 - DNA, 25 bp, Canis familiaris
cataggcttgaattaaggcaacagc

SEQ ID NO: 65744 - DNA, 25 bp, Canis familiaris
catagaattgaagccaggagaactc

SEQ ID NO: 65745 - DNA, 25 bp, Canis familiaris
catacatatcgatacgcatgtggag

SEQ ID NO: 65746 - DNA, 25 bp, Canis familiaris
catggctaaatgagcacagtgcaga

SEQ ID NO: 65747 - DNA, 25 bp, Canis familiaris
catgagccaaaggcagccgctcaac

SEQ ID NO: 65748 - DNA, 25 bp, Canis familiaris
catgatgtaggggcagctggctcag

SEQ ID NO: 65749 - DNA, 25 bp, Canis familiaris
catcgcggtggccagtgagatcatg

SEQ ID NO: 65750 - DNA, 25 bp, Canis familiaris
catccgacagcccagtggcttgact

SEQ ID NO: 65751 - DNA, 25 bp, Canis familiaris
catgggatagcccatatgtgcccct

SEQ ID NO: 65752 - DNA, 25 bp, Canis familiaris
catgggcacagagattggcgtccgc

SEQ ID NO: 65753 - DNA, 25 bp, Canis familiaris
catgcgtgtcagtgatgggcctcgc

SEQ ID NO: 65754 - DNA, 25 bp, Canis familiaris
catggctactgttgcagaggcctcc

SEQ ID NO: 65755 - DNA, 25 bp, Canis familiaris
catgaaaagttggcagcccctctct

SEQ ID NO: 65756 - DNA, 25 bp, Canis familiaris
catgaaaagtatggaatccctatgg

SEQ ID NO: 65757 - DNA, 25 bp, Canis familiaris
catgaagtggctttccaccctgatg

SEQ ID NO: 65758 - DNA, 25 bp, Canis familiaris
catgaacagcctttgccaatcgtgg

SEQ ID NO: 65759 - DNA, 25 bp, Canis familiaris
catgaacagcctttgccaatcgtgg

SEQ ID NO: 65760 - DNA, 25 bp, Canis familiaris
catcaacggctcagcccataggcag

SEQ ID NO: 65761 - DNA, 25 bp, Canis familiaris
ctcacacggctctgaacaagggttt

SEQ ID NO: 65762 - DNA, 25 bp, Canis familiaris
ctcaccaacgctttcaaacgatttt

SEQ ID NO: 65763 - DNA, 25 bp, Canis familiaris
cataccaccgttttcatccggtttg

SEQ ID NO: 65764 - DNA, 25 bp, Canis familiaris
catgttatccgtatccaccagatgt

SEQ ID NO: 65765 - DNA, 25 bp, Canis familiaris
catgttatctttcctcctgaaggtg

SEQ ID NO: 65766 - DNA, 25 bp, Canis familiaris
catgttcatctcttgccaaataagg

SEQ ID NO: 65767 - DNA, 25 bp, Canis familiaris
catgttccatcttgaagtgttatgt

SEQ ID NO: 65768 - DNA, 25 bp, Canis familiaris
caggcgactttggagctgttggtgc

SEQ ID NO: 65769 - DNA, 25 bp, Canis familiaris
catggaactttgaggcttgtgtgaa

SEQ ID NO: 65770 - DNA, 25 bp, Canis familiaris
catggactcttaggaaattggctga

SEQ ID NO: 65771 - DNA, 25 bp, Canis familiaris
catggtcttttccagaatctgttca

SEQ ID NO: 65772 - DNA, 25 bp, Canis familiaris
catgtgcctttcccatggatttaag

SEQ ID NO: 65773 - DNA, 25 bp, Canis familiaris
caggctgatgaaaatcatggtttaa

SEQ ID NO: 65774 - DNA, 25 bp, Canis familiaris
caggctgatgagaaatcatggtgtt

SEQ ID NO: 65775 - DNA, 25 bp, Canis familiaris
caggctggagagcactggtgtctgg

SEQ ID NO: 65776 - DNA, 25 bp, Canis familiaris
catggtggaaggcccctgacatggt

SEQ ID NO: 65777 - DNA, 25 bp, Canis familiaris
catggtggcaggttccccatattat

SEQ ID NO: 65778 - DNA, 25 bp, Canis familiaris
catggaacagggtctctctcatagt

SEQ ID NO: 65779 - DNA, 25 bp, Canis familiaris
catggaaagcatcactgtctatcag

SEQ ID NO: 65780 - DNA, 25 bp, Canis familiaris
catggacaatgcctacttctgtgag

SEQ ID NO: 65781 - DNA, 25 bp, Canis familiaris
catgatgccaacctcttacgtgcgc

SEQ ID NO: 65782 - DNA, 25 bp, Canis familiaris
catgatcatccaattttcacgccga

SEQ ID NO: 65783 - DNA, 25 bp, Canis familiaris
catggcctgcagattggcctcacgt

SEQ ID NO: 65784 - DNA, 25 bp, Canis familiaris
caggcctgcatgaatgtggccccct

SEQ ID NO: 65785 - DNA, 25 bp, Canis familiaris
caggcgaggaattgcgacctctccg

SEQ ID NO: 65786 - DNA, 25 bp, Canis familiaris
caggcgaagagacggttccacagcg

SEQ ID NO: 65787 - DNA, 25 bp, Canis familiaris
cattgccagaggtggttcctagtgc

SEQ ID NO: 65788 - DNA, 25 bp, Canis familiaris
catgtgggaggccaggtgtcctcac

SEQ ID NO: 65789 - DNA, 25 bp, Canis familiaris
catgtcaagaacccattgtgcccaa

SEQ ID NO: 65790 - DNA, 25 bp, Canis familiaris
catggacacgagccgtgtgcagccc

SEQ ID NO: 65791 - DNA, 25 bp, Canis familiaris
caggcctggcagtgtgagagcaccg

SEQ ID NO: 65792 - DNA, 25 bp, Canis familiaris
caggcgctggtgcagcagggcgccg

SEQ ID NO: 65793 - DNA, 25 bp, Canis familiaris
caggccgagatgctgcagatggacc

SEQ ID NO: 65794 - DNA, 25 bp, Canis familiaris
catgaccagaagcttgacgcaccaa

SEQ ID NO: 65795 - DNA, 25 bp, Canis familiaris
catgaccagaagcttgacgcaccaa

SEQ ID NO: 65796 - DNA, 25 bp, Canis familiaris
cattccaacaagagggcccaaccat

SEQ ID NO: 65797 - DNA, 25 bp, Canis familiaris
cttccaagacatatcgtccaccacg

SEQ ID NO: 65798 - DNA, 25 bp, Canis familiaris
cttaaaccttagctccagtcctgag

SEQ ID NO: 65799 - DNA, 25 bp, Canis familiaris
cttccaaacttgtgttcttgcctgg

SEQ ID NO: 65800 - DNA, 25 bp, Canis familiaris
cttctttcgtttgtatcattccttc

SEQ ID NO: 65801 - DNA, 25 bp, Canis familiaris
cttctttcgtttgtatcattccttc

SEQ ID NO: 65802 - DNA, 25 bp, Canis familiaris
ctaggttagtttgttgattcgtgat

SEQ ID NO: 65803 - DNA, 25 bp, Canis familiaris
catactttaaaaccttgcattcgtg

SEQ ID NO: 65804 - DNA, 25 bp, Canis familiaris
catgttttaaagacctttgcctgtc

SEQ ID NO: 65805 - DNA, 25 bp, Canis familiaris
catgtgtttaaatttgttcttcgac

SEQ ID NO: 65806 - DNA, 25 bp, Canis familiaris
catgtctgcttaaaagtgttcttta

SEQ ID NO: 65807 - DNA, 25 bp, Canis familiaris
catgattctcttatggtgtttcagg

SEQ ID NO: 65808 - DNA, 25 bp, Canis familiaris
catgtttcttgcttgttttggctgc

SEQ ID NO: 65809 - DNA, 25 bp, Canis familiaris
catgttgtgttatcatatctccgcc

SEQ ID NO: 65810 - DNA, 25 bp, Canis familiaris
catggagttccagcatatcatcccc

SEQ ID NO: 65811 - DNA, 25 bp, Canis familiaris
catggaagccaagctaactcaccct

SEQ ID NO: 65812 - DNA, 25 bp, Canis familiaris
catggggcggcagccagagctgccc

SEQ ID NO: 65813 - DNA, 25 bp, Canis familiaris
catggcttgatggacaaagggctcc

SEQ ID NO: 65814 - DNA, 25 bp, Canis familiaris
catgtaggtcgtcagtgggctcacc

SEQ ID NO: 65815 - DNA, 25 bp, Canis familiaris
catggagttcgtctagcaggccaga

SEQ ID NO: 65816 - DNA, 25 bp, Canis familiaris
catggtgggcgtctacaacggcaag

SEQ ID NO: 65817 - DNA, 25 bp, Canis familiaris
caggctgggcctcaagacccagaga

SEQ ID NO: 65818 - DNA, 25 bp, Canis familiaris
catacttgtcctcaaactccaacaa

SEQ ID NO: 65819 - DNA, 25 bp, Canis familiaris
cataatctcttgggaaacggaacaa

SEQ ID NO: 65820 - DNA, 25 bp, Canis familiaris
catctaccttgggatcaaacggaaa

SEQ ID NO: 65821 - DNA, 25 bp, Canis familiaris
catctactgcttcttaaccgttgac

SEQ ID NO: 65822 - DNA, 25 bp, Canis familiaris
catccccttattacaaccggtgtga

SEQ ID NO: 65823 - DNA, 25 bp, Canis familiaris
caggcctcttatatcacctgggtgt

SEQ ID NO: 65824 - DNA, 25 bp, Canis familiaris
caggccttatagcgacctacagtat

SEQ ID NO: 65825 - DNA, 25 bp, Canis familiaris
caggccttaaaggctcctgactgct

SEQ ID NO: 65826 - DNA, 25 bp, Canis familiaris
caggcctgatagaagcgctctctgt

SEQ ID NO: 65827 - DNA, 25 bp, Canis familiaris
catgggcatcatttctgtgtttgtg

SEQ ID NO: 65828 - DNA, 25 bp, Canis familiaris
catgggcttcttgtttgattatgcc

SEQ ID NO: 65829 - DNA, 25 bp, Canis familiaris
catgtgacttttgccttcatgggcc

SEQ ID NO: 65830 - DNA, 25 bp, Canis familiaris
catgtgtctatttgccatctgtatg

SEQ ID NO: 65831 - DNA, 25 bp, Canis familiaris
catgtgtgtatgtctgccgtttgta

SEQ ID NO: 65832 - DNA, 25 bp, Canis familiaris
catgcttagagtggagcctactgaa

SEQ ID NO: 65833 - DNA, 25 bp, Canis familiaris
catgtcgaatggtcagcgctgatta

SEQ ID NO: 65834 - DNA, 25 bp, Canis familiaris
catgtcgatcttccatgcgtgtcaa

SEQ ID NO: 65835 - DNA, 25 bp, Canis familiaris
catgctgcatgaaaccggtctaact

SEQ ID NO: 65836 - DNA, 25 bp, Canis familiaris
tacctgggaaatctcagtccccttc

SEQ ID NO: 65837 - DNA, 25 bp, Canis familiaris
catggtgtgacaacagtggctgaga

SEQ ID NO: 65838 - DNA, 25 bp, Canis familiaris
catgggagatggaagagctgctgag

SEQ ID NO: 65839 - DNA, 25 bp, Canis familiaris
catggtgacgagaaggctgtgcctt

SEQ ID NO: 65840 - DNA, 25 bp, Canis familiaris
catggtgggcagcagggggtggcct

SEQ ID NO: 65841 - DNA, 25 bp, Canis familiaris
catgtttacagctgggtgtgactcc

SEQ ID NO: 65842 - DNA, 25 bp, Canis familiaris
catggcattagcttgtggagtttcc

SEQ ID NO: 65843 - DNA, 25 bp, Canis familiaris
catcgccattgctgcgggtgttccc

SEQ ID NO: 65844 - DNA, 25 bp, Canis familiaris
catgtgcgagtctggggacttctcc

SEQ ID NO: 65845 - DNA, 25 bp, Canis familiaris
catggcgctccatggtaggttctgc

SEQ ID NO: 65846 - DNA, 25 bp, Canis familiaris
caggcctgccaagatgctggagtcc

SEQ ID NO: 65847 - DNA, 25 bp, Canis familiaris
caggccaccgagcagatggagctgc

SEQ ID NO: 65848 - DNA, 25 bp, Canis familiaris
catgactaccactgcgatgggctgc

SEQ ID NO: 65849 - DNA, 25 bp, Canis familiaris
catgacacaccaaacatgggcctgc

SEQ ID NO: 65850 - DNA, 25 bp, Canis familiaris
catgcagaggtcccagcatgggccg

SEQ ID NO: 65851 - DNA, 25 bp, Canis familiaris
catcagggccactcaggttcagagg

SEQ ID NO: 65852 - DNA, 25 bp, Canis familiaris
catggaggacgtccagtcttctggg

SEQ ID NO: 65853 - DNA, 25 bp, Canis familiaris
gcataacagggtcactattctaggc

SEQ ID NO: 65854 - DNA, 25 bp, Canis familiaris
catggacaggagtggctttggagag

SEQ ID NO: 65855 - DNA, 25 bp, Canis familiaris
catgtacggagccgagattatcgca

SEQ ID NO: 65856 - DNA, 25 bp, Canis familiaris
catgtttagggttcatttctgcaaa

SEQ ID NO: 65857 - DNA, 25 bp, Canis familiaris
catgttttcatttcctttgcataaa

SEQ ID NO: 65858 - DNA, 25 bp, Canis familiaris
catggtcaacatttcctatattaaa

SEQ ID NO: 65859 - DNA, 25 bp, Canis familiaris
catggcccaactaactgatttaaag

SEQ ID NO: 65860 - DNA, 25 bp, Canis familiaris
catggccctgaactactgatgcctc

SEQ ID NO: 65861 - DNA, 25 bp, Canis familiaris
catcgccgtggacggcgagcctttg

SEQ ID NO: 65862 - DNA, 25 bp, Canis familiaris
catggtgggatgtggcagagcttgt

SEQ ID NO: 65863 - DNA, 25 bp, Canis familiaris
catggaggcctatgcaggactctgt

SEQ ID NO: 65864 - DNA, 25 bp, Canis familiaris
catggacatcttttgcacgtacgtg

SEQ ID NO: 65865 - DNA, 25 bp, Canis familiaris
catggactgtgtcacacacccagtg

SEQ ID NO: 65866 - DNA, 25 bp, Canis familiaris
catgagatttgtagagcctgcccag

SEQ ID NO: 65867 - DNA, 25 bp, Canis familiaris
catggctttgaaacccacactttac

SEQ ID NO: 65868 - DNA, 25 bp, Canis familiaris
catgttttgaagagccacacgctgg

SEQ ID NO: 65869 - DNA, 25 bp, Canis familiaris
catgtttatgaccaacccagctgtt

SEQ ID NO: 65870 - DNA, 25 bp, Canis familiaris
catgttctcaatgtacctttgttgt

SEQ ID NO: 65871 - DNA, 25 bp, Canis familiaris
catgttgtgattctttcttcttagt

SEQ ID NO: 65872 - DNA, 25 bp, Canis familiaris
catgtttatctacttagcagtttag

SEQ ID NO: 65873 - DNA, 25 bp, Canis familiaris
catggttgttacttgtgaggtctag

SEQ ID NO: 65874 - DNA, 25 bp, Canis familiaris
catggtggtggaggctggggtcaag

SEQ ID NO: 65875 - DNA, 25 bp, Canis familiaris
catgttggggaacttggcgtcgtga

SEQ ID NO: 65876 - DNA, 25 bp, Canis familiaris
catgtgttagggagtcaggacctga

SEQ ID NO: 65877 - DNA, 25 bp, Canis familiaris
catggactcgggcgtcaggatgcgc

SEQ ID NO: 65878 - DNA, 25 bp, Canis familiaris
catgggttgggcgtcattgtgtcgc

SEQ ID NO: 65879 - DNA, 25 bp, Canis familiaris
catcctgaatcccccagtgtggggt

SEQ ID NO: 65880 - DNA, 25 bp, Canis familiaris
catcctagacgccgacgtgtgtaga

SEQ ID NO: 65881 - DNA, 25 bp, Canis familiaris
catactaccagcccagactatgtca

SEQ ID NO: 65882 - DNA, 25 bp, Canis familiaris
catacataccaccacacttcaatgg

SEQ ID NO: 65883 - DNA, 25 bp, Canis familiaris
catccttcatcacacctgtgcaata

SEQ ID NO: 65884 - DNA, 25 bp, Canis familiaris
catctcattcaggccacttggacta

SEQ ID NO: 65885 - DNA, 25 bp, Canis familiaris
catgattacaggcacatctcaggct

SEQ ID NO: 65886 - DNA, 25 bp, Canis familiaris
catgtttagacatcactctgttaga

SEQ ID NO: 65887 - DNA, 25 bp, Canis familiaris
catgtttctgaaactcatttttgag

SEQ ID NO: 65888 - DNA, 25 bp, Canis familiaris
catgattcttataaccgtgcttctt

SEQ ID NO: 65889 - DNA, 25 bp, Canis familiaris
catgatattatctgaggtgggtctt

SEQ ID NO: 65890 - DNA, 25 bp, Canis familiaris
catgtgattatctgtctttggtccc

SEQ ID NO: 65891 - DNA, 25 bp, Canis familiaris
catggatgttttcacttggtccctg

SEQ ID NO: 65892 - DNA, 25 bp, Canis familiaris
catggagtttccaaactgggccctg

SEQ ID NO: 65893 - DNA, 25 bp, Canis familiaris
catccgtttccaatggtgggtccat

SEQ ID NO: 65894 - DNA, 25 bp, Canis familiaris
catacgtgtaccagagttctctcca

SEQ ID NO: 65895 - DNA, 25 bp, Canis familiaris
catccaggtccttgagcagtttgtc

SEQ ID NO: 65896 - DNA, 25 bp, Canis familiaris
catcactgcgtactggaagggcttc

SEQ ID NO: 65897 - DNA, 25 bp, Canis familiaris
catccacgggtggaaggaatccccg

SEQ ID NO: 65898 - DNA, 25 bp, Canis familiaris
catccacacgttactaggtaccctt

SEQ ID NO: 65899 - DNA, 25 bp, Canis familiaris
catcctacccacatagagagaccca

SEQ ID NO: 65900 - DNA, 25 bp, Canis familiaris
catccatttctcctaagaaaccttt

SEQ ID NO: 65901 - DNA, 25 bp, Canis familiaris
catcctatttcaactaaaaatttca

SEQ ID NO: 65902 - DNA, 25 bp, Canis familiaris
cattctctgtactggaaacctttgc

SEQ ID NO: 65903 - DNA, 25 bp, Canis familiaris
catgtccttcacccagaagaccatc

SEQ ID NO: 65904 - DNA, 25 bp, Canis familiaris
catggccttgtggccgtacatgcct

SEQ ID NO: 65905 - DNA, 25 bp, Canis familiaris
catggccattgggcctggtgagcct

SEQ ID NO: 65906 - DNA, 25 bp, Canis familiaris
catggctatttgggcattgtggagc

SEQ ID NO: 65907 - DNA, 25 bp, Canis familiaris
catggtgccactctgcatagggatg

SEQ ID NO: 65908 - DNA, 25 bp, Canis familiaris
catggtcctcatggtgcatataaat

SEQ ID NO: 65909 - DNA, 25 bp, Canis familiaris
catggtccagagcagctctccagtc

SEQ ID NO: 65910 - DNA, 25 bp, Canis familiaris
catggagctcgagatcttcttgtcc

SEQ ID NO: 65911 - DNA, 25 bp, Canis familiaris
catggagaccagctacactcagacc

SEQ ID NO: 65912 - DNA, 25 bp, Canis familiaris
catgggtgccaggtacagcggaggg

SEQ ID NO: 65913 - DNA, 25 bp, Canis familiaris
catggtggccaacagaggtgagatt

SEQ ID NO: 65914 - DNA, 25 bp, Canis familiaris
catggtccagcaaatagcagatcta

SEQ ID NO: 65915 - DNA, 25 bp, Canis familiaris
catcgtctacaagagcagcattgat

SEQ ID NO: 65916 - DNA, 25 bp, Canis familiaris
catcgacgacaagtacagccggcgg

SEQ ID NO: 65917 - DNA, 25 bp, Canis familiaris
catgaccgaagagacattttgggca

SEQ ID NO: 65918 - DNA, 25 bp, Canis familiaris
cattccgggcagaaccttgtggcgg

SEQ ID NO: 65919 - DNA, 25 bp, Canis familiaris
catcccggcagaaaccttgttgggg

SEQ ID NO: 65920 - DNA, 25 bp, Canis familiaris
catccacgggatgaacctatcacgg

SEQ ID NO: 65921 - DNA, 25 bp, Canis familiaris
catcttgcggttggacagcacgtcc

SEQ ID NO: 65922 - DNA, 25 bp, Canis familiaris
catctgtaccattggaccagcttcc

SEQ ID NO: 65923 - DNA, 25 bp, Canis familiaris
catcggaccagaggaagatcttcca

SEQ ID NO: 65924 - DNA, 25 bp, Canis familiaris
catcctagcctgaccagattttcca

SEQ ID NO: 65925 - DNA, 25 bp, Canis familiaris
catccaagttccagcatgcttgcct

SEQ ID NO: 65926 - DNA, 25 bp, Canis familiaris
ccttcaggtccaaatttcctccaag

SEQ ID NO: 65927 - DNA, 25 bp, Canis familiaris
ctcccaggttctgactttaccaggg

SEQ ID NO: 65928 - DNA, 25 bp, Canis familiaris
ctccgaacaattgaatcttatcggg

SEQ ID NO: 65929 - DNA, 25 bp, Canis familiaris
catacgattaaccccaactaatagg

SEQ ID NO: 65930 - DNA, 25 bp, Canis familiaris
cataggaataaccatctcgaatact

SEQ ID NO: 65931 - DNA, 25 bp, Canis familiaris
catgcaaaaaagccctcctgaactc

SEQ ID NO: 65932 - DNA, 25 bp, Canis familiaris
catccagaacaagcgcttctacctg

SEQ ID NO: 65933 - DNA, 25 bp, Canis familiaris
catgtacagacaacggcagttcccg

SEQ ID NO: 65934 - DNA, 25 bp, Canis familiaris
catctacaagcgcatggcaggctcc

SEQ ID NO: 65935 - DNA, 25 bp, Canis familiaris
catgctatcaagccaagtggttctt

SEQ ID NO: 65936 - DNA, 25 bp, Canis familiaris
catggatcacaccaggcatggtttt

SEQ ID NO: 65937 - DNA, 25 bp, Canis familiaris
catggtcatgaagtggctggtgcct

SEQ ID NO: 65938 - DNA, 25 bp, Canis familiaris
catggagatgaaggccgtgtgcgtg

SEQ ID NO: 65939 - DNA, 25 bp, Canis familiaris
catggacgagattccagtggcgcag

SEQ ID NO: 65940 - DNA, 25 bp, Canis familiaris
catggtcgtgaaatcaagccctgca

SEQ ID NO: 65941 - DNA, 25 bp, Canis familiaris
catgttctcagaatggaagccccat

SEQ ID NO: 65942 - DNA, 25 bp, Canis familiaris
cataactcagtctgggagcccttgg

SEQ ID NO: 65943 - DNA, 25 bp, Canis familiaris
catggagaaggctggggctcacttg

SEQ ID NO: 65944 - DNA, 25 bp, Canis familiaris
catgggagaggaaggccctccttgg

SEQ ID NO: 65945 - DNA, 25 bp, Canis familiaris
catgggataatgatagcccctatta

SEQ ID NO: 65946 - DNA, 25 bp, Canis familiaris
catgtggatgtccttatgacttcaa

SEQ ID NO: 65947 - DNA, 25 bp, Canis familiaris
catgatcgtgtcctttgagtctttg

SEQ ID NO: 65948 - DNA, 25 bp, Canis familiaris
catgtctattactttggatctcgat

SEQ ID NO: 65949 - DNA, 25 bp, Canis familiaris
catgtgcacattcctcgaggacacg

SEQ ID NO: 65950 - DNA, 25 bp, Canis familiaris
catggactgcccttggatggacagg

SEQ ID NO: 65951 - DNA, 25 bp, Canis familiaris
catgtactgccacaggacagacagc

SEQ ID NO: 65952 - DNA, 25 bp, Canis familiaris
catgaactgccagatgtccaacatc

SEQ ID NO: 65953 - DNA, 25 bp, Canis familiaris
catggtctacatgttccagtatgac

SEQ ID NO: 65954 - DNA, 25 bp, Canis familiaris
catgtcctactcggttcagttgagg

SEQ ID NO: 65955 - DNA, 25 bp, Canis familiaris
catgccttcagtgtgttctgtaaag

SEQ ID NO: 65956 - DNA, 25 bp, Canis familiaris
catggatggagtgtttggttcaaga

SEQ ID NO: 65957 - DNA, 25 bp, Canis familiaris
catgtagtggctgttctgctttaga

SEQ ID NO: 65958 - DNA, 25 bp, Canis familiaris
catggcaatcgctctgtctcttcta

SEQ ID NO: 65959 - DNA, 25 bp, Canis familiaris
catggaaccacgctgtccatgctat

SEQ ID NO: 65960 - DNA, 25 bp, Canis familiaris
catggaagtcacggggtcagcgcag

SEQ ID NO: 65961 - DNA, 25 bp, Canis familiaris
catgctgaattttggggtgagagag

SEQ ID NO: 65962 - DNA, 25 bp, Canis familiaris
catcgtcaccattgtgggcctgaag

SEQ ID NO: 65963 - DNA, 25 bp, Canis familiaris
catggaccacgtggggactgagcca

SEQ ID NO: 65964 - DNA, 25 bp, Canis familiaris
catggcaacaccaggtgactgcccc

SEQ ID NO: 65965 - DNA, 25 bp, Canis familiaris
catgggaaaggtggtgaacacccac

SEQ ID NO: 65966 - DNA, 25 bp, Canis familiaris
catgacactaagatgcttgtccccc

SEQ ID NO: 65967 - DNA, 25 bp, Canis familiaris
catcgcccaggaaattggtttcctt

SEQ ID NO: 65968 - DNA, 25 bp, Canis familiaris
catcccgagctgaatatcggggtca

SEQ ID NO: 65969 - DNA, 25 bp, Canis familiaris
catcccagacatcatcaaggtggcc

SEQ ID NO: 65970 - DNA, 25 bp, Canis familiaris
catgccaaacggtcacaagtatgcc

SEQ ID NO: 65971 - DNA, 25 bp, Canis familiaris
catccattaacgcacaacttcatct

SEQ ID NO: 65972 - DNA, 25 bp, Canis familiaris
catggcattttcggaccactgccac

SEQ ID NO: 65973 - DNA, 25 bp, Canis familiaris
catggcaagatgtgccaccacccag

SEQ ID NO: 65974 - DNA, 25 bp, Canis familiaris
catggagagagaaggctcccgcccc

SEQ ID NO: 65975 - DNA, 25 bp, Canis familiaris
catgggctaaatctggccagccccc

SEQ ID NO: 65976 - DNA, 25 bp, Canis familiaris
catccgagaaagcggctgactcctc

SEQ ID NO: 65977 - DNA, 25 bp, Canis familiaris
catccggaacggatcgttctcccat

SEQ ID NO: 65978 - DNA, 25 bp, Canis familiaris
catcgggaacctggtggacttcggc

SEQ ID NO: 65979 - DNA, 25 bp, Canis familiaris
catggggccatctggtggcactatc

SEQ ID NO: 65980 - DNA, 25 bp, Canis familiaris
catggtcacctcaggtggccacatc

SEQ ID NO: 65981 - DNA, 25 bp, Canis familiaris
catgtcctggctagggggacacacg

SEQ ID NO: 65982 - DNA, 25 bp, Canis familiaris
catgaccccgagagggtgcacacac

SEQ ID NO: 65983 - DNA, 25 bp, Canis familiaris
catgtaccgcggagccgctgtgaac

SEQ ID NO: 65984 - DNA, 25 bp, Canis familiaris
cattacgtaggcacgctgggcagag

SEQ ID NO: 65985 - DNA, 25 bp, Canis familiaris
catctacgaaccaaaccgcgaagtt

SEQ ID NO: 65986 - DNA, 25 bp, Canis familiaris
catctgagactcactaacccgaagc

SEQ ID NO: 65987 - DNA, 25 bp, Canis familiaris
catctaagtatcttacccctacact

SEQ ID NO: 65988 - DNA, 25 bp, Canis familiaris
catccaggggttgcgcccataaggg

SEQ ID NO: 65989 - DNA, 25 bp, Canis familiaris
catccaaggttggtgggccaggggt

SEQ ID NO: 65990 - DNA, 25 bp, Canis familiaris
catcccggctttttgtctgaggggt

SEQ ID NO: 65991 - DNA, 25 bp, Canis familiaris
catcggcggctttcaggagcaggtg

SEQ ID NO: 65992 - DNA, 25 bp, Canis familiaris
catcctggacctttgggaagctctg

SEQ ID NO: 65993 - DNA, 25 bp, Canis familiaris
catcctggtcccttgctaagccagg

SEQ ID NO: 65994 - DNA, 25 bp, Canis familiaris
catacaggactccatgctgaaaggc

SEQ ID NO: 65995 - DNA, 25 bp, Canis familiaris
catggtggactccatgcttcacacg

SEQ ID NO: 65996 - DNA, 25 bp, Canis familiaris
catgggatggtcggatctcacaggc

SEQ ID NO: 65997 - DNA, 25 bp, Canis familiaris
catgggatggtcggatctcacaggc

SEQ ID NO: 65998 - DNA, 25 bp, Canis familiaris
catggagatggccgcagctccagga

SEQ ID NO: 65999 - DNA, 25 bp, Canis familiaris
catgaatgagacacacccactgagc

SEQ ID NO: 66000 - DNA, 25 bp, Canis familiaris
catgttgtagcaaaccccgaagctg

SEQ ID NO: 66001 - DNA, 25 bp, Canis familiaris
catgttttgcatcagagcccagaat

SEQ ID NO: 66002 - DNA, 25 bp, Canis familiaris
catgttcttggaggccggcagatga

SEQ ID NO: 66003 - DNA, 25 bp, Canis familiaris
catgttcgaggagacccaggtgcca

SEQ ID NO: 66004 - DNA, 25 bp, Canis familiaris
catgtttgcaggtattccaagtctc

SEQ ID NO: 66005 - DNA, 25 bp, Canis familiaris
catctttgcaaagatccaggccacc

SEQ ID NO: 66006 - DNA, 25 bp, Canis familiaris
cttatgtaaagctttcagtccccgt

SEQ ID NO: 66007 - DNA, 25 bp, Canis familiaris
tctgtttacgactgtctttaccgga

SEQ ID NO: 66008 - DNA, 25 bp, Canis familiaris
cttttcactactctttttcgtatca

SEQ ID NO: 66009 - DNA, 25 bp, Canis familiaris
cttttaaactttgctatcttctctt

SEQ ID NO: 66010 - DNA, 25 bp, Canis familiaris
catgcttttaactttttattgccta

SEQ ID NO: 66011 - DNA, 25 bp, Canis familiaris
catgtcctggcaactttttttttga

SEQ ID NO: 66012 - DNA, 25 bp, Canis familiaris
catgtatcgtccacatttttttttt

SEQ ID NO: 66013 - DNA, 25 bp, Canis familiaris
catggacctcatgttcatctatttt

SEQ ID NO: 66014 - DNA, 25 bp, Canis familiaris
catggagcctgctttcttatagctt

SEQ ID NO: 66015 - DNA, 25 bp, Canis familiaris
catgtatcaccaatcctttatccat

SEQ ID NO: 66016 - DNA, 25 bp, Canis familiaris
catgtccatccaactcttgtacatc

SEQ ID NO: 66017 - DNA, 25 bp, Canis familiaris
catgtcgtcctcaagttccacatga

SEQ ID NO: 66018 - DNA, 25 bp, Canis familiaris
catgtctattctcaagatccacgcc

SEQ ID NO: 66019 - DNA, 25 bp, Canis familiaris
catgctctcctgggaagagtcaccc

SEQ ID NO: 66020 - DNA, 25 bp, Canis familiaris
catgtgtcgcagttggcagagtacg

SEQ ID NO: 66021 - DNA, 25 bp, Canis familiaris
catgtgccgatgttggagggtggga

SEQ ID NO: 66022 - DNA, 25 bp, Canis familiaris
catgggcgtgttcacgctgtgctgg

SEQ ID NO: 66023 - DNA, 25 bp, Canis familiaris
catggaggagtaccacaggcactgc

SEQ ID NO: 66024 - DNA, 25 bp, Canis familiaris
catgggctgggaccacagctccagc

SEQ ID NO: 66025 - DNA, 25 bp, Canis familiaris
catggtggggcatctcagtgccctg

SEQ ID NO: 66026 - DNA, 25 bp, Canis familiaris
catgggaggatatttctctggccag

SEQ ID NO: 66027 - DNA, 25 bp, Canis familiaris
cattggacgttcaaatggggagttt

SEQ ID NO: 66028 - DNA, 25 bp, Canis familiaris
catctggggtttctagtggcggttg

SEQ ID NO: 66029 - DNA, 25 bp, Canis familiaris
catccgggactttctgaggtggtga

SEQ ID NO: 66030 - DNA, 25 bp, Canis familiaris
catccggcccgtacgaggggccata

SEQ ID NO: 66031 - DNA, 25 bp, Canis familiaris
catagggctccctctggggagcctg

SEQ ID NO: 66032 - DNA, 25 bp, Canis familiaris
catgaggatgccgatatccgaggga

SEQ ID NO: 66033 - DNA, 25 bp, Canis familiaris
catgggtaccattgagccgagctga

SEQ ID NO: 66034 - DNA, 25 bp, Canis familiaris
catgggctactacgagacggtggcg

SEQ ID NO: 66035 - DNA, 25 bp, Canis familiaris
catgtgtgtgactggtgacctggtg

SEQ ID NO: 66036 - DNA, 25 bp, Canis familiaris
catgtatgtgtccattggccttggg

SEQ ID NO: 66037 - DNA, 25 bp, Canis familiaris
catgctgaggagctgtgtgcctttc

SEQ ID NO: 66038 - DNA, 25 bp, Canis familiaris
catggaggcagccaggctcgattcc

SEQ ID NO: 66039 - DNA, 25 bp, Canis familiaris
catgagatctcagaggcccattcct

SEQ ID NO: 66040 - DNA, 25 bp, Canis familiaris
catgacccgccgggcagcttccggg

SEQ ID NO: 66041 - DNA, 25 bp, Canis familiaris
catcaaccccgtggagttcaatccc

SEQ ID NO: 66042 - DNA, 25 bp, Canis familiaris
catcaacccctaaactacagtacca

SEQ ID NO: 66043 - DNA, 25 bp, Canis familiaris
catgaaacacctttttccattccct

SEQ ID NO: 66044 - DNA, 25 bp, Canis familiaris
catgaaacaactccttttcctggct

SEQ ID NO: 66045 - DNA, 25 bp, Canis familiaris
catggaggaacgcctgatttccagg

SEQ ID NO: 66046 - DNA, 25 bp, Canis familiaris
catggatggtcaccgtgacacccgg

SEQ ID NO: 66047 - DNA, 25 bp, Canis familiaris
catgaagtgtgacgtggacaagccg

SEQ ID NO: 66048 - DNA, 25 bp, Canis familiaris
catgaaggatgttgtgtacgagcac

SEQ ID NO: 66049 - DNA, 25 bp, Canis familiaris
catctaggatacttgccagcgagct

SEQ ID NO: 66050 - DNA, 25 bp, Canis familiaris
catgtacgtagccatccaggctgtg

SEQ ID NO: 66051 - DNA, 25 bp, Canis familiaris
catgaaggtggccgccagctgtgtg

SEQ ID NO: 66052 - DNA, 25 bp, Canis familiaris
catccagagaaccgcacactagtgc

SEQ ID NO: 66053 - DNA, 25 bp, Canis familiaris
catccagtcaaactccattacctac

SEQ ID NO: 66054 - DNA, 25 bp, Canis familiaris
catccgtaaggacctgtatgccaac

SEQ ID NO: 66055 - DNA, 25 bp, Canis familiaris
ccgcgtacgagtcaggtaatacact

SEQ ID NO: 66056 - DNA, 25 bp, Canis familiaris
gcaccgtcacgtttaatgtaatcct

SEQ ID NO: 66057 - DNA, 25 bp, Canis familiaris
catctcgtcggttttttaatcaaca

SEQ ID NO: 66058 - DNA, 25 bp, Canis familiaris
cattcaactagaggttttacttacg

SEQ ID NO: 66059 - DNA, 25 bp, Canis familiaris
catccaatattctctttatacttcc

SEQ ID NO: 66060 - DNA, 25 bp, Canis familiaris
catgcacatttttacacttaggctg

SEQ ID NO: 66061 - DNA, 25 bp, Canis familiaris
catgcacttagattaaatcacaggc

SEQ ID NO: 66062 - DNA, 25 bp, Canis familiaris
catggtcttatctacacacacgtgc

SEQ ID NO: 66063 - DNA, 25 bp, Canis familiaris
catgcaccttattaagccctgtctt

SEQ ID NO: 66064 - DNA, 25 bp, Canis familiaris
catgaggctgggtcaagttcttttt

SEQ ID NO: 66065 - DNA, 25 bp, Canis familiaris
catgggagggctcattctcgtgatc

SEQ ID NO: 66066 - DNA, 25 bp, Canis familiaris
catgggttgttggattcagccattt

SEQ ID NO: 66067 - DNA, 25 bp, Canis familiaris
catggttgttgtcattgcatgcctc

SEQ ID NO: 66068 - DNA, 25 bp, Canis familiaris
catggttgtccttttgtgtatctgt

SEQ ID NO: 66069 - DNA, 25 bp, Canis familiaris
catggtggctccatgtttgccatct

SEQ ID NO: 66070 - DNA, 25 bp, Canis familiaris
catgggtgtcatgtgtgtgtgagtc

SEQ ID NO: 66071 - DNA, 25 bp, Canis familiaris
catgggctttgccttggaagagcag

SEQ ID NO: 66072 - DNA, 25 bp, Canis familiaris
catggtgcctgccttggggaagcag

SEQ ID NO: 66073 - DNA, 25 bp, Canis familiaris
catgtagcctcgctggagggcatcg

SEQ ID NO: 66074 - DNA, 25 bp, Canis familiaris
catgagatcctgcgggaggcctatg

SEQ ID NO: 66075 - DNA, 25 bp, Canis familiaris
catgccatcctgcgtctggacctgg

SEQ ID NO: 66076 - DNA, 25 bp, Canis familiaris
catccacacatcatccggaggggga

SEQ ID NO: 66077 - DNA, 25 bp, Canis familiaris
catcgcccgccgggaaggtggcgag

SEQ ID NO: 66078 - DNA, 25 bp, Canis familiaris
catccacccggttgcaggggagttg

SEQ ID NO: 66079 - DNA, 25 bp, Canis familiaris
catccacccggttgcaggggagttg

SEQ ID NO: 66080 - DNA, 25 bp, Canis familiaris
catccacccggttgcaggggagttg

SEQ ID NO: 66081 - DNA, 25 bp, Canis familiaris
catccagccccgagcagggagaagg

SEQ ID NO: 66082 - DNA, 25 bp, Canis familiaris
catccagccacttaggggccatgga

SEQ ID NO: 66083 - DNA, 25 bp, Canis familiaris
catcgcgcagctcaaggtggtgcag

SEQ ID NO: 66084 - DNA, 25 bp, Canis familiaris
catcgcctcgctataggagtcacct

SEQ ID NO: 66085 - DNA, 25 bp, Canis familiaris
catgcgttcgctgaaaggcatcggt

SEQ ID NO: 66086 - DNA, 25 bp, Canis familiaris
ctggtttgcgaagaagacggagtgc

SEQ ID NO: 66087 - DNA, 25 bp, Canis familiaris
ctcttcgtggaagacgacgcggcca

SEQ ID NO: 66088 - DNA, 25 bp, Canis familiaris
ctcttagctgagtgtcccgcggggc

SEQ ID NO: 66089 - DNA, 25 bp, Canis familiaris
catgaaaatatgtgtccctgccaag

SEQ ID NO: 66090 - DNA, 25 bp, Canis familiaris
catgagaatatttacacacacacac

SEQ ID NO: 66091 - DNA, 25 bp, Canis familiaris
catgaggatccttaactgcccaggg

SEQ ID NO: 66092 - DNA, 25 bp, Canis familiaris
catgagtagatgttaacttccctga

SEQ ID NO: 66093 - DNA, 25 bp, Canis familiaris
catgttattgtattcagctttcctg

SEQ ID NO: 66094 - DNA, 25 bp, Canis familiaris
catgctgttcttttaacttttgtag

SEQ ID NO: 66095 - DNA, 25 bp, Canis familiaris
catgctgggtattttcaggttgtgt

SEQ ID NO: 66096 - DNA, 25 bp, Canis familiaris
catgctgggtattttgaagttgtgt

SEQ ID NO: 66097 - DNA, 25 bp, Canis familiaris
catgccctgattttatatacttgta

SEQ ID NO: 66098 - DNA, 25 bp, Canis familiaris
catgtccttctgtacttgatcttgt

SEQ ID NO: 66099 - DNA, 25 bp, Canis familiaris
catgctgccatttgtaatatgtttg

SEQ ID NO: 66100 - DNA, 25 bp, Canis familiaris
catgctgtataactgtaaaatctgt

SEQ ID NO: 66101 - DNA, 25 bp, Canis familiaris
catgcatggatctgttcccagactc

SEQ ID NO: 66102 - DNA, 25 bp, Canis familiaris
catgtggcactgcttatcacagccc

SEQ ID NO: 66103 - DNA, 25 bp, Canis familiaris
catgttgcactgtttgcatgcgccc

SEQ ID NO: 66104 - DNA, 25 bp, Canis familiaris
catgctcgcactcttgatggtgaga

SEQ ID NO: 66105 - DNA, 25 bp, Canis familiaris
catgcttgcctatttgctgtataca

SEQ ID NO: 66106 - DNA, 25 bp, Canis familiaris
catgctgagcgtggatcctgcttaa

SEQ ID NO: 66107 - DNA, 25 bp, Canis familiaris
catgctgttgtccatcgtggtagcg

SEQ ID NO: 66108 - DNA, 25 bp, Canis familiaris
catgctttgcccaaggagatggcct

SEQ ID NO: 66109 - DNA, 25 bp, Canis familiaris
catcctgtgcatcaaggacatggcc

SEQ ID NO: 66110 - DNA, 25 bp, Canis familiaris
catcctggatgggagaaatggtctc

SEQ ID NO: 66111 - DNA, 25 bp, Canis familiaris
catcctgaagacttgacaccttccc

SEQ ID NO: 66112 - DNA, 25 bp, Canis familiaris
catcgagaagtactacacgcgcctg

SEQ ID NO: 66113 - DNA, 25 bp, Canis familiaris
catgagggaaaatgccagcctggct

SEQ ID NO: 66114 - DNA, 25 bp, Canis familiaris
catgaaggcaactttgctacccgcc

SEQ ID NO: 66115 - DNA, 25 bp, Canis familiaris
catgaaggccatctactcgtccttc

SEQ ID NO: 66116 - DNA, 25 bp, Canis familiaris
catgagggttttttcttcctcctat

SEQ ID NO: 66117 - DNA, 25 bp, Canis familiaris
catgatggttttgaccttcgtttca

SEQ ID NO: 66118 - DNA, 25 bp, Canis familiaris
catctggttttggcacttttttgga

SEQ ID NO: 66119 - DNA, 25 bp, Canis familiaris
catgccgtttttaccgtatgtctgc

SEQ ID NO: 66120 - DNA, 25 bp, Canis familiaris
catcctttttgagactggcactcgc

SEQ ID NO: 66121 - DNA, 25 bp, Canis familiaris
catgctactttttaattggccctgt

SEQ ID NO: 66122 - DNA, 25 bp, Canis familiaris
catgtgtttgtttgcagtcaggtgc

SEQ ID NO: 66123 - DNA, 25 bp, Canis familiaris
catgtggttcattagatgccgcctg

SEQ ID NO: 66124 - DNA, 25 bp, Canis familiaris
catctagtgtatcatatggcccagt

SEQ ID NO: 66125 - DNA, 25 bp, Canis familiaris
catccagtgtctgatgaggacctgc

SEQ ID NO: 66126 - DNA, 25 bp, Canis familiaris
catcacgtggatgaaggaacgacca

SEQ ID NO: 66127 - DNA, 25 bp, Canis familiaris
catccaaatgatcagggcacacctc

SEQ ID NO: 66128 - DNA, 25 bp, Canis familiaris
catgcaaagcatagacgggagaccc

SEQ ID NO: 66129 - DNA, 25 bp, Canis familiaris
catgaatccaattgggcgtggcccc

SEQ ID NO: 66130 - DNA, 25 bp, Canis familiaris
catgtgggcaaagggcctgggctcc

SEQ ID NO: 66131 - DNA, 25 bp, Canis familiaris
catgggtgccaagccatgtgcgtcc

SEQ ID NO: 66132 - DNA, 25 bp, Canis familiaris
catgggtcctcagtccaagctgaga

SEQ ID NO: 66133 - DNA, 25 bp, Canis familiaris
catgatgatgtccctgaccaagctg

SEQ ID NO: 66134 - DNA, 25 bp, Canis familiaris
catgcagatctacagcgccagagtg

SEQ ID NO: 66135 - DNA, 25 bp, Canis familiaris
catccactacgacctcgtgggcaag

SEQ ID NO: 66136 - DNA, 25 bp, Canis familiaris
catctcgtacgacctggacggcgag

SEQ ID NO: 66137 - DNA, 25 bp, Canis familiaris
catctcttaacagctgggggccata

SEQ ID NO: 66138 - DNA, 25 bp, Canis familiaris
catcctgtcccatctggggactgca

SEQ ID NO: 66139 - DNA, 25 bp, Canis familiaris
catccttcctgaaattgggcacttt

SEQ ID NO: 66140 - DNA, 25 bp, Canis familiaris
catcctcttcatgtgacggggttcg

SEQ ID NO: 66141 - DNA, 25 bp, Canis familiaris
catccctgagtctgacggggatgct

SEQ ID NO: 66142 - DNA, 25 bp, Canis familiaris
catctcttggcctggtggggaaaca

SEQ ID NO: 66143 - DNA, 25 bp, Canis familiaris
catctccaggtcttctttggaaacc

SEQ ID NO: 66144 - DNA, 25 bp, Canis familiaris
catgtccatgtggttcaaaatgcaa

SEQ ID NO: 66145 - DNA, 25 bp, Canis familiaris
catgccctgctgttctgcagaagtg

SEQ ID NO: 66146 - DNA, 25 bp, Canis familiaris
catgacctgtgatgctgcagacacc

SEQ ID NO: 66147 - DNA, 25 bp, Canis familiaris
catcccatggtccatggcctcatcg

SEQ ID NO: 66148 - DNA, 25 bp, Canis familiaris
catgcatctttgttgtgtctctgac

SEQ ID NO: 66149 - DNA, 25 bp, Canis familiaris
catgagccctgtaggttctacgtcg

SEQ ID NO: 66150 - DNA, 25 bp, Canis familiaris
catcaggtcttgcgattccggacgc

SEQ ID NO: 66151 - DNA, 25 bp, Canis familiaris
ctcaggtaccagaacccggtagctt

SEQ ID NO: 66152 - DNA, 25 bp, Canis familiaris
catccgtaccaatgtctgcagttac

SEQ ID NO: 66153 - DNA, 25 bp, Canis familiaris
catccttcaccttgttctggttgat

SEQ ID NO: 66154 - DNA, 25 bp, Canis familiaris
catgcacatttcggcagttctgttc

SEQ ID NO: 66155 - DNA, 25 bp, Canis familiaris
catgaagtgtcaagctgattcccca

SEQ ID NO: 66156 - DNA, 25 bp, Canis familiaris
catgatgatggaacgccacacctcc

SEQ ID NO: 66157 - DNA, 25 bp, Canis familiaris
catgttgtgatgaccccacagcatc

SEQ ID NO: 66158 - DNA, 25 bp, Canis familiaris
catgagtgcgatggagcctcaccac

SEQ ID NO: 66159 - DNA, 25 bp, Canis familiaris
catgttcaggcttgcctgcaccact

SEQ ID NO: 66160 - DNA, 25 bp, Canis familiaris
catgttcgggatcgtctccattgaa

SEQ ID NO: 66161 - DNA, 25 bp, Canis familiaris
catgatgtcagggtgagttggccat

SEQ ID NO: 66162 - DNA, 25 bp, Canis familiaris
catgtgtcactggtggtctgggatg

SEQ ID NO: 66163 - DNA, 25 bp, Canis familiaris
catcgaacaggatatctcgaatgtt

SEQ ID NO: 66164 - DNA, 25 bp, Canis familiaris
catcgaagagcttttttcactgtat

SEQ ID NO: 66165 - DNA, 25 bp, Canis familiaris
catcgaaaacttccgaactgttgtt

SEQ ID NO: 66166 - DNA, 25 bp, Canis familiaris
catcgaagtcctgtctagtgctttg

SEQ ID NO: 66167 - DNA, 25 bp, Canis familiaris
catccaagtcctcatcaaggcagct

SEQ ID NO: 66168 - DNA, 25 bp, Canis familiaris
catgcgccgccggctaaacaagcat

SEQ ID NO: 66169 - DNA, 25 bp, Canis familiaris
catgcgtctgggtcaacccatgact

SEQ ID NO: 66170 - DNA, 25 bp, Canis familiaris
catgcgtgcatgttcacacacacac

SEQ ID NO: 66171 - DNA, 25 bp, Canis familiaris
catgctcatgtactgatgcaaacac

SEQ ID NO: 66172 - DNA, 25 bp, Canis familiaris
catcatcatcgtcgacagagacacc

SEQ ID NO: 66173 - DNA, 25 bp, Canis familiaris
catccccagcagacagagtccaggg

SEQ ID NO: 66174 - DNA, 25 bp, Canis familiaris
catgcccctgactactatctcaggg

SEQ ID NO: 66175 - DNA, 25 bp, Canis familiaris
catgaccttgtacctactcagagac

SEQ ID NO: 66176 - DNA, 25 bp, Canis familiaris
catgacaagtatttctagcccagcc

SEQ ID NO: 66177 - DNA, 25 bp, Canis familiaris
catgacaactgttgatctcgccatc

SEQ ID NO: 66178 - DNA, 25 bp, Canis familiaris
catgacaaagagttcttccacccac

SEQ ID NO: 66179 - DNA, 25 bp, Canis familiaris
catccgcaaagacctgtacgccaac

SEQ ID NO: 66180 - DNA, 25 bp, Canis familiaris
catccagaaaagccttcagcagccc

SEQ ID NO: 66181 - DNA, 25 bp, Canis familiaris
ctatgagcaacatgcagatctacag

SEQ ID NO: 66182 - DNA, 25 bp, Canis familiaris
catgcagacaccaggtctccaggtg

SEQ ID NO: 66183 - DNA, 25 bp, Canis familiaris
catgcagaacctcaatgaccgcctg

SEQ ID NO: 66184 - DNA, 25 bp, Canis familiaris
catcaggagcctaatccaagcccag

SEQ ID NO: 66185 - DNA, 25 bp, Canis familiaris
catcacaggcctcgtaaacttcaag

SEQ ID NO: 66186 - DNA, 25 bp, Canis familiaris
catccggaccagttacactgacaga

SEQ ID NO: 66187 - DNA, 25 bp, Canis familiaris
catcctctttcttgtaccatgaaca

SEQ ID NO: 66188 - DNA, 25 bp, Canis familiaris
catgcaccttagattaaatcaccac

SEQ ID NO: 66189 - DNA, 25 bp, Canis familiaris
catgtctcctctctatatataaccc

SEQ ID NO: 66190 - DNA, 25 bp, Canis familiaris
catgttccagtatgattctacccac

SEQ ID NO: 66191 - DNA, 25 bp, Canis familiaris
catgttccaatatgattccacccat

SEQ ID NO: 66192 - DNA, 25 bp, Canis familiaris
catgttccagtatgactccactcac

SEQ ID NO: 66193 - DNA, 25 bp, Canis familiaris
catgttctattattgacccagtcac

SEQ ID NO: 66194 - DNA, 25 bp, Canis familiaris
catgtacatatttatctctccttcc

SEQ ID NO: 66195 - DNA, 25 bp, Canis familiaris
catgtacattcatctgctcacgtga

SEQ ID NO: 66196 - DNA, 25 bp, Canis familiaris
catgtacgtcatcccattcagcatg

SEQ ID NO: 66197 - DNA, 25 bp, Canis familiaris
catgcaccgtcagccatttgctgag

SEQ ID NO: 66198 - DNA, 25 bp, Canis familiaris
catgtctcctcatcgttagtagact

SEQ ID NO: 66199 - DNA, 25 bp, Canis familiaris
catgtctcccactccaagaaaatta

SEQ ID NO: 66200 - DNA, 25 bp, Canis familiaris
catcctggtcactctaccaaacatt

SEQ ID NO: 66201 - DNA, 25 bp, Canis familiaris
catcgctgagtcctggaacgggcag

SEQ ID NO: 66202 - DNA, 25 bp, Canis familiaris
catcctggccttgtgaatgggagag

SEQ ID NO: 66203 - DNA, 25 bp, Canis familiaris
catcagtatgcctcttggcacgggg

SEQ ID NO: 66204 - DNA, 25 bp, Canis familiaris
catcgatatcctcattgtccgggag

SEQ ID NO: 66205 - DNA, 25 bp, Canis familiaris
catcagggcccaagtttcgtggggg

SEQ ID NO: 66206 - DNA, 25 bp, Canis familiaris
catgaggacagacggtttctgtggg

SEQ ID NO: 66207 - DNA, 25 bp, Canis familiaris
cataggaatgtgtgttttttgggaa

SEQ ID NO: 66208 - DNA, 25 bp, Canis familiaris
catcaggaatcgtgttggtagggaa

SEQ ID NO: 66209 - DNA, 25 bp, Canis familiaris
catgttgaaatgtgctctgtgtagg

SEQ ID NO: 66210 - DNA, 25 bp, Canis familiaris
catgctactgaggctccattttctc

SEQ ID NO: 66211 - DNA, 25 bp, Canis familiaris
catgtaatatagactgtgtatgttt

SEQ ID NO: 66212 - DNA, 25 bp, Canis familiaris
catgtttgcatagagatgtagccat

SEQ ID NO: 66213 - DNA, 25 bp, Canis familiaris
catgcttgatctgcggtgctaggag

SEQ ID NO: 66214 - DNA, 25 bp, Canis familiaris
catccgtggctcttgtctagaggct

SEQ ID NO: 66215 - DNA, 25 bp, Canis familiaris
catctggcttcctgtatggagcctg

SEQ ID NO: 66216 - DNA, 25 bp, Canis familiaris
catgaggcttcttgcttcttagccc

SEQ ID NO: 66217 - DNA, 25 bp, Canis familiaris
catgattgctacacccaatagcttc

SEQ ID NO: 66218 - DNA, 25 bp, Canis familiaris
catgagttacaagcaaactgctacg

SEQ ID NO: 66219 - DNA, 25 bp, Canis familiaris
catgagatttcacacaacctgccaa

SEQ ID NO: 66220 - DNA, 25 bp, Canis familiaris
catgatgttacacccatagcttctc

SEQ ID NO: 66221 - DNA, 25 bp, Canis familiaris
catgcattttcactagttggtatct

SEQ ID NO: 66222 - DNA, 25 bp, Canis familiaris
catgctcatgtggacgtttggtatc

SEQ ID NO: 66223 - DNA, 25 bp, Canis familiaris
catgttggctgctgctgttggaata

SEQ ID NO: 66224 - DNA, 25 bp, Canis familiaris
catgttagtctgctgttgggtggaa

SEQ ID NO: 66225 - DNA, 25 bp, Canis familiaris
catgtttgttggtgtgcagcggagg

SEQ ID NO: 66226 - DNA, 25 bp, Canis familiaris
catcgattgatttacggcgctaagg

SEQ ID NO: 66227 - DNA, 25 bp, Canis familiaris
catctgttgtactatcgttgttgca

SEQ ID NO: 66228 - DNA, 25 bp, Canis familiaris
catgcaggtacttatatgttttcaa

SEQ ID NO: 66229 - DNA, 25 bp, Canis familiaris
catgcacccctatatttatagcagc

SEQ ID NO: 66230 - DNA, 25 bp, Canis familiaris
catgccccctgatgttgataacagc

SEQ ID NO: 66231 - DNA, 25 bp, Canis familiaris
catccaccaggttttgataatggca

SEQ ID NO: 66232 - DNA, 25 bp, Canis familiaris
catcacccacgtcatcgatatatgg

SEQ ID NO: 66233 - DNA, 25 bp, Canis familiaris
catgccctcaccacagtagatcatg

SEQ ID NO: 66234 - DNA, 25 bp, Canis familiaris
catgatgccccagtaggtaccattg

SEQ ID NO: 66235 - DNA, 25 bp, Canis familiaris
catgacacctcgagactgtccagtg

SEQ ID NO: 66236 - DNA, 25 bp, Canis familiaris
catgatgactctggaacctctctgg

SEQ ID NO: 66237 - DNA, 25 bp, Canis familiaris
catgcagagcgagtaccgctcccga

SEQ ID NO: 66238 - DNA, 25 bp, Canis familiaris
catgaagcagctaagccagctcctc

SEQ ID NO: 66239 - DNA, 25 bp, Canis familiaris
catgccgcagattctgagactccct

SEQ ID NO: 66240 - DNA, 25 bp, Canis familiaris
catgccagagtccagtgagtctcct

SEQ ID NO: 66241 - DNA, 25 bp, Canis familiaris
catgcgcgaatgcatctcagtccac

SEQ ID NO: 66242 - DNA, 25 bp, Canis familiaris
catcgcaaatgcttctagatcgact

SEQ ID NO: 66243 - DNA, 25 bp, Canis familiaris
catctgatatgcatttagtctaaag

SEQ ID NO: 66244 - DNA, 25 bp, Canis familiaris
catccaatgcttagactgccttaaa

SEQ ID NO: 66245 - DNA, 25 bp, Canis familiaris
catcgaacttcgacactgacaagaa

SEQ ID NO: 66246 - DNA, 25 bp, Canis familiaris
catcgaagagtccttggaacaagca

SEQ ID NO: 66247 - DNA, 25 bp, Canis familiaris
catcgagagactgctcggtggctcc

SEQ ID NO: 66248 - DNA, 25 bp, Canis familiaris
catgacgcggattccggtggtgctc

SEQ ID NO: 66249 - DNA, 25 bp, Canis familiaris
catgatctgggggcccggagactca

SEQ ID NO: 66250 - DNA, 25 bp, Canis familiaris
catgatttgtgggtcctgggattgg

SEQ ID NO: 66251 - DNA, 25 bp, Canis familiaris
catctgggcggcgtatgtgggagtg

SEQ ID NO: 66252 - DNA, 25 bp, Canis familiaris
catcttctaggccaagaaggcgctg

SEQ ID NO: 66253 - DNA, 25 bp, Canis familiaris
catgtttgccttcatgggcagcctg

SEQ ID NO: 66254 - DNA, 25 bp, Canis familiaris
catgattatggtccggaggaccaga

SEQ ID NO: 66255 - DNA, 25 bp, Canis familiaris
catgcacgtggtcctggacgacgaa

SEQ ID NO: 66256 - DNA, 25 bp, Canis familiaris
catgcacgccctctagatggaagaa

SEQ ID NO: 66257 - DNA, 25 bp, Canis familiaris
catgccctgtccctcagggaggaag

SEQ ID NO: 66258 - DNA, 25 bp, Canis familiaris
catgcccgctggcccaggaagaaat

SEQ ID NO: 66259 - DNA, 25 bp, Canis familiaris
catcgcagagcccacacaggagaaa

SEQ ID NO: 66260 - DNA, 25 bp, Canis familiaris
catcacagacctcatcagcgagctg

SEQ ID NO: 66261 - DNA, 25 bp, Canis familiaris
catgacagctccagcagggagcatg

SEQ ID NO: 66262 - DNA, 25 bp, Canis familiaris
catgacagacacagagaggggcaga

SEQ ID NO: 66263 - DNA, 25 bp, Canis familiaris
catcaagttgcaagaggaggagaga

SEQ ID NO: 66264 - DNA, 25 bp, Canis familiaris
catcaagctctctgggaaatggcag

SEQ ID NO: 66265 - DNA, 25 bp, Canis familiaris
catcacgctcctcaatgaactgaag

SEQ ID NO: 66266 - DNA, 25 bp, Canis familiaris
catccgtccacgccaaatggatcgt

SEQ ID NO: 66267 - DNA, 25 bp, Canis familiaris
ctctcgtaccctgaaggttgctttt

SEQ ID NO: 66268 - DNA, 25 bp, Canis familiaris
ctggagtactccacagttttgcctt

SEQ ID NO: 66269 - DNA, 25 bp, Canis familiaris
catgaagtacccactgatgatatat

SEQ ID NO: 66270 - DNA, 25 bp, Canis familiaris
catgaagccctcgttgtttataacc

SEQ ID NO: 66271 - DNA, 25 bp, Canis familiaris
catcaaccaatcttttttacacgcc

SEQ ID NO: 66272 - DNA, 25 bp, Canis familiaris
catgaagacaatatatttatacccc

SEQ ID NO: 66273 - DNA, 25 bp, Canis familiaris
catgaagtcactgtagcctcaaaca

SEQ ID NO: 66274 - DNA, 25 bp, Canis familiaris
cataaatcctgcttcctgtcaaaaa

SEQ ID NO: 66275 - DNA, 25 bp, Canis familiaris
cataaatgtatgctttgctcagaga

SEQ ID NO: 66276 - DNA, 25 bp, Canis familiaris
catcagaggttgatcttccggcaac

SEQ ID NO: 66277 - DNA, 25 bp, Canis familiaris
catgcagtatttattgatagcccta

SEQ ID NO: 66278 - DNA, 25 bp, Canis familiaris
catcgttagtagactgtagtgtgct

SEQ ID NO: 66279 - DNA, 25 bp, Canis familiaris
catgccttcaaccagctggagagtg

SEQ ID NO: 66280 - DNA, 25 bp, Canis familiaris
catccttcagtgccatggggagctg

SEQ ID NO: 66281 - DNA, 25 bp, Canis familiaris
catccactggtgctgccaaggctgt

SEQ ID NO: 66282 - DNA, 25 bp, Canis familiaris
catgaccatcgtctacaagagcagc

SEQ ID NO: 66283 - DNA, 25 bp, Canis familiaris
catgcacccgtggatacataatcaa

SEQ ID NO: 66284 - DNA, 25 bp, Canis familiaris
catgaccacagtccatgccatcact

SEQ ID NO: 66285 - DNA, 25 bp, Canis familiaris
catgacagcatggtacagtacttga

SEQ ID NO: 66286 - DNA, 25 bp, Canis familiaris
catgcatgtgctgtaagttcctagg

SEQ ID NO: 66287 - DNA, 25 bp, Canis familiaris
catgctgcgctacagtggttctacg

SEQ ID NO: 66288 - DNA, 25 bp, Canis familiaris
catgctcaatacagtgactcccaag

SEQ ID NO: 66289 - DNA, 25 bp, Canis familiaris
catgcatcaatgccaatcatcctcc

SEQ ID NO: 66290 - DNA, 25 bp, Canis familiaris
catgatatgattcatctctaccctt

SEQ ID NO: 66291 - DNA, 25 bp, Canis familiaris
catgattcttcattatggacccctc

SEQ ID NO: 66292 - DNA, 25 bp, Canis familiaris
catgttcttcacaatgttctcctat

SEQ ID NO: 66293 - DNA, 25 bp, Canis familiaris
catgttcattcactgtcccaaataa

SEQ ID NO: 66294 - DNA, 25 bp, Canis familiaris
catgctcattgtcggccctaaagaa

SEQ ID NO: 66295 - DNA, 25 bp, Canis familiaris
catgctttctgtctctctaaagtaa

SEQ ID NO: 66296 - DNA, 25 bp, Canis familiaris
catgctttcatgttgctgcctagca

SEQ ID NO: 66297 - DNA, 25 bp, Canis familiaris
catgcaggctctttgctgcctgagc

SEQ ID NO: 66298 - DNA, 25 bp, Canis familiaris
catgcagagccatgtggcccagagc

SEQ ID NO: 66299 - DNA, 25 bp, Canis familiaris
catgcgggaactggctccaagaacg

SEQ ID NO: 66300 - DNA, 25 bp, Canis familiaris
catccccaacctggccatgaaagag

SEQ ID NO: 66301 - DNA, 25 bp, Canis familiaris
catcgccagaccgtccgaaataggc

SEQ ID NO: 66302 - DNA, 25 bp, Canis familiaris
catttaccctgaacgagccaaggtg

SEQ ID NO: 66303 - DNA, 25 bp, Canis familiaris
catctacaccctgagtggctgacat

SEQ ID NO: 66304 - DNA, 25 bp, Canis familiaris
catgctgcaatctgctgcaactggt

SEQ ID NO: 66305 - DNA, 25 bp, Canis familiaris
catgccaagcaagccactgctgtta

SEQ ID NO: 66306 - DNA, 25 bp, Canis familiaris
catgaccaccaaggacctgctgaag

SEQ ID NO: 66307 - DNA, 25 bp, Canis familiaris
catgaccacttcggcatcgtggagg

SEQ ID NO: 66308 - DNA, 25 bp, Canis familiaris
catgacaactttggcattgtggaag

SEQ ID NO: 66309 - DNA, 25 bp, Canis familiaris
catgacaactttggtatcgtggaag

SEQ ID NO: 66310 - DNA, 25 bp, Canis familiaris
catagattcttcatgtaagctggaa

SEQ ID NO: 66311 - DNA, 25 bp, Canis familiaris
catacattcatctgttgacactggg

SEQ ID NO: 66312 - DNA, 25 bp, Canis familiaris
cataaatcacctttgtagcccagtt

SEQ ID NO: 66313 - DNA, 25 bp, Canis familiaris
catgcaactcagcttctgtaaccag

SEQ ID NO: 66314 - DNA, 25 bp, Canis familiaris
catgatgactcactgtttgtacttt

SEQ ID NO: 66315 - DNA, 25 bp, Canis familiaris
catgcattcatgtctgtttctacta

SEQ ID NO: 66316 - DNA, 25 bp, Canis familiaris
catgcatattttaatatccatttgg

SEQ ID NO: 66317 - DNA, 25 bp, Canis familiaris
catgctaattccaaagccactttta

SEQ ID NO: 66318 - DNA, 25 bp, Canis familiaris
catttccctcaaggagcctgttttc

SEQ ID NO: 66319 - DNA, 25 bp, Canis familiaris
cttgccgaccaaaggcctggagacc

SEQ ID NO: 66320 - DNA, 25 bp, Canis familiaris
cttgacgcataatcaggagtcggag

SEQ ID NO: 66321 - DNA, 25 bp, Canis familiaris
catctagtacaatcaggagtctgca

SEQ ID NO: 66322 - DNA, 25 bp, Canis familiaris
catcgaaagcacatcatgggtcaga

SEQ ID NO: 66323 - DNA, 25 bp, Canis familiaris
catcgagaagctcgccgtggaagct

SEQ ID NO: 66324 - DNA, 25 bp, Canis familiaris
catccatcaagccccattggaacat

SEQ ID NO: 66325 - DNA, 25 bp, Canis familiaris
catccacaccacatcatattacaac

SEQ ID NO: 66326 - DNA, 25 bp, Canis familiaris
catcaaggccaagtttctacaggaa

SEQ ID NO: 66327 - DNA, 25 bp, Canis familiaris
catcaaggccaaagccctacgtgcc

SEQ ID NO: 66328 - DNA, 25 bp, Canis familiaris
catcgaggtcctaagcctgacccaa

SEQ ID NO: 66329 - DNA, 25 bp, Canis familiaris
catcgatgagtcccgagactgaacc

SEQ ID NO: 66330 - DNA, 25 bp, Canis familiaris
catcgtaatccccatcaagaaactt

SEQ ID NO: 66331 - DNA, 25 bp, Canis familiaris
catcgacttcctggacagagccata

SEQ ID NO: 66332 - DNA, 25 bp, Canis familiaris
catgcccttcctgggcagaaatcag

SEQ ID NO: 66333 - DNA, 25 bp, Canis familiaris
catcctgcagctgccgaggaagatc

SEQ ID NO: 66334 - DNA, 25 bp, Canis familiaris
catgcacggtcgagctgctgaatgt

SEQ ID NO: 66335 - DNA, 25 bp, Canis familiaris
catccggccagactgctgtgatggg

SEQ ID NO: 66336 - DNA, 25 bp, Canis familiaris
catccatgacaactttggcattgtg

SEQ ID NO: 66337 - DNA, 25 bp, Canis familiaris
catacagacaggtcgtggcctagag

SEQ ID NO: 66338 - DNA, 25 bp, Canis familiaris
ctacaggccgggagctttggggctg

SEQ ID NO: 66339 - DNA, 25 bp, Canis familiaris
cttcaaccggcgaattgcccttggt

SEQ ID NO: 66340 - DNA, 25 bp, Canis familiaris
cttcccactgggatcccctgggaag

SEQ ID NO: 66341 - DNA, 25 bp, Canis familiaris
cattcccctgggaggagttgtccac

SEQ ID NO: 66342 - DNA, 25 bp, Canis familiaris
catccagctccgcggcaggagcttt

SEQ ID NO: 66343 - DNA, 25 bp, Canis familiaris
catgcagcgccagtgggacgggctg

SEQ ID NO: 66344 - DNA, 25 bp, Canis familiaris
catgcagcgccagtgggacgggctg

SEQ ID NO: 66345 - DNA, 25 bp, Canis familiaris
catgcagcgccagtgggacgggctg

SEQ ID NO: 66346 - DNA, 25 bp, Canis familiaris
catcacctacggcaggaggctgggc

SEQ ID NO: 66347 - DNA, 25 bp, Canis familiaris
catccccctggtccagggctgggtg

SEQ ID NO: 66348 - DNA, 25 bp, Canis familiaris
catattcccgggccgtgggtgagga

SEQ ID NO: 66349 - DNA, 25 bp, Canis familiaris
catctgtccctgcagacagttgagg

SEQ ID NO: 66350 - DNA, 25 bp, Canis familiaris
catctgactccacgcatacttgaga

SEQ ID NO: 66351 - DNA, 25 bp, Canis familiaris
catgctgaagcccctgagtttgtgg

SEQ ID NO: 66352 - DNA, 25 bp, Canis familiaris
catgcggcgccgttgagggcgctgc

SEQ ID NO: 66353 - DNA, 25 bp, Canis familiaris
catgcagaggggtccggggtgaggg

SEQ ID NO: 66354 - DNA, 25 bp, Canis familiaris
catagggggcatccagggcgagaag

SEQ ID NO: 66355 - DNA, 25 bp, Canis familiaris
catactgggccctgggcgaggagct

SEQ ID NO: 66356 - DNA, 25 bp, Canis familiaris
cataatggacccagctgcttcgggg

SEQ ID NO: 66357 - DNA, 25 bp, Canis familiaris
catgaaggtagtctctggtctgggg

SEQ ID NO: 66358 - DNA, 25 bp, Canis familiaris
catagagcctagtccctgagggttg

SEQ ID NO: 66359 - DNA, 25 bp, Canis familiaris
catctacctaccctgaagtggcttg

SEQ ID NO: 66360 - DNA, 25 bp, Canis familiaris
catcccctggctgtaactgaggttg

SEQ ID NO: 66361 - DNA, 25 bp, Canis familiaris
catcctcctgggggttttattctgg

SEQ ID NO: 66362 - DNA, 25 bp, Canis familiaris
catccatgtcgggggtggtggcgtt

SEQ ID NO: 66363 - DNA, 25 bp, Canis familiaris
catcgtgggggacgctggtgtgcgt

SEQ ID NO: 66364 - DNA, 25 bp, Canis familiaris
catcctgcgtctggacctggctggc

SEQ ID NO: 66365 - DNA, 25 bp, Canis familiaris
catcctgcaagtgcacctggcagag

SEQ ID NO: 66366 - DNA, 25 bp, Canis familiaris
catcctcaagtggcaagggaagcat

SEQ ID NO: 66367 - DNA, 25 bp, Canis familiaris
catgcccaggagcccagggaagggg

SEQ ID NO: 66368 - DNA, 25 bp, Canis familiaris
catcgtgatggactccggtgacggg

SEQ ID NO: 66369 - DNA, 25 bp, Canis familiaris
catgcactgctggcacatcagggga

SEQ ID NO: 66370 - DNA, 25 bp, Canis familiaris
catgagctgtgccacactggctgta

SEQ ID NO: 66371 - DNA, 25 bp, Canis familiaris
catcctctgcagaaccagctgattg

SEQ ID NO: 66372 - DNA, 25 bp, Canis familiaris
catccgcacgaaggagcagatcgtg

SEQ ID NO: 66373 - DNA, 25 bp, Canis familiaris
catccctcaagagagaatgcatgga

SEQ ID NO: 66374 - DNA, 25 bp, Canis familiaris
catctgcctaacaagaactgggaaa

SEQ ID NO: 66375 - DNA, 25 bp, Canis familiaris
catcgttagcaccagcaacttcagt

SEQ ID NO: 66376 - DNA, 25 bp, Canis familiaris
catcggtaacctgtgcttgcatgtg

SEQ ID NO: 66377 - DNA, 25 bp, Canis familiaris
catcggtatacttcttgtgcattgt

SEQ ID NO: 66378 - DNA, 25 bp, Canis familiaris
catccagtactttgctgttattgcc

SEQ ID NO: 66379 - DNA, 25 bp, Canis familiaris
catccctgtctttatgttacaccga

SEQ ID NO: 66380 - DNA, 25 bp, Canis familiaris
catctagtttaattttcaccctgac

SEQ ID NO: 66381 - DNA, 25 bp, Canis familiaris
catccggttaggatgtcccaccacg

SEQ ID NO: 66382 - DNA, 25 bp, Canis familiaris
catctcccataaaaggtgacccgcc

SEQ ID NO: 66383 - DNA, 25 bp, Canis familiaris
catctagtctgcaaacaggtccccg

SEQ ID NO: 66384 - DNA, 25 bp, Canis familiaris
catctatgtgcaggagaaggatgat

SEQ ID NO: 66385 - DNA, 25 bp, Canis familiaris
catctcagatgggacaccggctgtc

SEQ ID NO: 66386 - DNA, 25 bp, Canis familiaris
catgcataggggtccgatggctgtc

SEQ ID NO: 66387 - DNA, 25 bp, Canis familiaris
catccaggaggtgcgcaagctcttc

SEQ ID NO: 66388 - DNA, 25 bp, Canis familiaris
catcgggatcgggggagtctgtcct

SEQ ID NO: 66389 - DNA, 25 bp, Canis familiaris
catctggagtctgctgggatccgtc

SEQ ID NO: 66390 - DNA, 25 bp, Canis familiaris
catgctggacttttcaggactactc

SEQ ID NO: 66391 - DNA, 25 bp, Canis familiaris
catgcgtgacttcgaaggcacgttc

SEQ ID NO: 66392 - DNA, 25 bp, Canis familiaris
catgcattgccattggaaagcctgt

SEQ ID NO: 66393 - DNA, 25 bp, Canis familiaris
cataagccagtgaaaatgccatgtg

SEQ ID NO: 66394 - DNA, 25 bp, Canis familiaris
catcaaagcccagattgcctgtgcc

SEQ ID NO: 66395 - DNA, 25 bp, Canis familiaris
catcagaagatgccctttgacgtgt

SEQ ID NO: 66396 - DNA, 25 bp, Canis familiaris
catcagatgttcggttctacgatgg

SEQ ID NO: 66397 - DNA, 25 bp, Canis familiaris
catcatagtggctgtgacgattgtg

SEQ ID NO: 66398 - DNA, 25 bp, Canis familiaris
catacgtggttgtcacacactggtg

SEQ ID NO: 66399 - DNA, 25 bp, Canis familiaris
catactgggcctacaacgtgttgtg

SEQ ID NO: 66400 - DNA, 25 bp, Canis familiaris
catacgagcctgaaaacttcttgtg

SEQ ID NO: 66401 - DNA, 25 bp, Canis familiaris
ctacctacgggacctgttcagtgat

SEQ ID NO: 66402 - DNA, 25 bp, Canis familiaris
catcatcctcactattgaccgtata

SEQ ID NO: 66403 - DNA, 25 bp, Canis familiaris
catgctccttcattctgttagtaga

SEQ ID NO: 66404 - DNA, 25 bp, Canis familiaris
catgcttcatctctcttttttgatg

SEQ ID NO: 66405 - DNA, 25 bp, Canis familiaris
catgctctcctttggtggttttgac

SEQ ID NO: 66406 - DNA, 25 bp, Canis familiaris
catccccttatgcattgttgcctaa

SEQ ID NO: 66407 - DNA, 25 bp, Canis familiaris
catgctacctttgtctgtgtttcaa

SEQ ID NO: 66408 - DNA, 25 bp, Canis familiaris
catgctatctattcagtccttgttt

SEQ ID NO: 66409 - DNA, 25 bp, Canis familiaris
catccacatgttcctcagtatttat

SEQ ID NO: 66410 - DNA, 25 bp, Canis familiaris
catgccacgagtctcagtggttgta

SEQ ID NO: 66411 - DNA, 25 bp, Canis familiaris
catgcaacaggtgtcggtcttgctg

SEQ ID NO: 66412 - DNA, 25 bp, Canis familiaris
catgaacggcttgtggctggtgcta

SEQ ID NO: 66413 - DNA, 25 bp, Canis familiaris
catcaactggtgtttggggctatgt

SEQ ID NO: 66414 - DNA, 25 bp, Canis familiaris
cataacgtgggttttggataggatc

SEQ ID NO: 66415 - DNA, 25 bp, Canis familiaris
catccacgtggaattttgcaatctt

SEQ ID NO: 66416 - DNA, 25 bp, Canis familiaris
catccaccagtgtatcagcattaac

SEQ ID NO: 66417 - DNA, 25 bp, Canis familiaris
cataactatttaatgcagcggcagc

SEQ ID NO: 66418 - DNA, 25 bp, Canis familiaris
catccctattgtacatgcatgcctc

SEQ ID NO: 66419 - DNA, 25 bp, Canis familiaris
catgcccacacagtcttgatgatcc

SEQ ID NO: 66420 - DNA, 25 bp, Canis familiaris
catgcccactcactgttgcatgagc

SEQ ID NO: 66421 - DNA, 25 bp, Canis familiaris
catgcagctcctgatgatccattct

SEQ ID NO: 66422 - DNA, 25 bp, Canis familiaris
catgcagccgcttcgtggagctgct

SEQ ID NO: 66423 - DNA, 25 bp, Canis familiaris
catagccatttagggacactaaagg

SEQ ID NO: 66424 - DNA, 25 bp, Canis familiaris
catcatcctataagggacagaataa

SEQ ID NO: 66425 - DNA, 25 bp, Canis familiaris
catgcctctataaaggatccctatt

SEQ ID NO: 66426 - DNA, 25 bp, Canis familiaris
catactcgtccagggtgccctaata

SEQ ID NO: 66427 - DNA, 25 bp, Canis familiaris
cataccagatccggcagttctaaaa

SEQ ID NO: 66428 - DNA, 25 bp, Canis familiaris
catcacaattgggcggattaacaca

SEQ ID NO: 66429 - DNA, 25 bp, Canis familiaris
catcactttggaatggctgaaatta

SEQ ID NO: 66430 - DNA, 25 bp, Canis familiaris
catcctggtggtggcagctgtgaca

SEQ ID NO: 66431 - DNA, 25 bp, Canis familiaris
catctccgctgttgacaatggcact

SEQ ID NO: 66432 - DNA, 25 bp, Canis familiaris
catgctgcacgtgatgacagtgccc

SEQ ID NO: 66433 - DNA, 25 bp, Canis familiaris
catgctgccgcaggatgatcagtcc

SEQ ID NO: 66434 - DNA, 25 bp, Canis familiaris
catctgcctggcatgtagtcagcaa

SEQ ID NO: 66435 - DNA, 25 bp, Canis familiaris
catgctgtctaaacttgtggcacaa

SEQ ID NO: 66436 - DNA, 25 bp, Canis familiaris
ctctgtaaaacggggacagtccctg

SEQ ID NO: 66437 - DNA, 25 bp, Canis familiaris
cttgctaaacctggcgtgaaaccgg

SEQ ID NO: 66438 - DNA, 25 bp, Canis familiaris
cttgctgtaacctcggtaaccaggg

SEQ ID NO: 66439 - DNA, 25 bp, Canis familiaris
cttttaatggcatcggttcagccga

SEQ ID NO: 66440 - DNA, 25 bp, Canis familiaris
cattttctaggatctgtttccgcaa

SEQ ID NO: 66441 - DNA, 25 bp, Canis familiaris
catctgtattaccaaccttttcaaa

SEQ ID NO: 66442 - DNA, 25 bp, Canis familiaris
catgctgctttcttaattcttttct

SEQ ID NO: 66443 - DNA, 25 bp, Canis familiaris
catgcctttcatgtattttttaaaa

SEQ ID NO: 66444 - DNA, 25 bp, Canis familiaris
catgcctcttctacttttttataat

SEQ ID NO: 66445 - DNA, 25 bp, Canis familiaris
catgcctctcccaagtttttattgt

SEQ ID NO: 66446 - DNA, 25 bp, Canis familiaris
catccactcccaacttcgtggtgga

SEQ ID NO: 66447 - DNA, 25 bp, Canis familiaris
catccaccccatcatcattgtgggt

SEQ ID NO: 66448 - DNA, 25 bp, Canis familiaris
catccccgcaaccaataatgcacag

SEQ ID NO: 66449 - DNA, 25 bp, Canis familiaris
catccatcccctgcaaactgcagag

SEQ ID NO: 66450 - DNA, 25 bp, Canis familiaris
catccgagcggtggcaaagcagcag

SEQ ID NO: 66451 - DNA, 25 bp, Canis familiaris
catcctgcacagcatcggcaagatc

SEQ ID NO: 66452 - DNA, 25 bp, Canis familiaris
catccagccagcctgctgagggaag

SEQ ID NO: 66453 - DNA, 25 bp, Canis familiaris
catctcaggcatccaggcatggcaa

SEQ ID NO: 66454 - DNA, 25 bp, Canis familiaris
catccgtgcatcgggtacaatagtc

SEQ ID NO: 66455 - DNA, 25 bp, Canis familiaris
catcctgccaccactgataaagcat

SEQ ID NO: 66456 - DNA, 25 bp, Canis familiaris
catccatctcatccttttaagcagt

SEQ ID NO: 66457 - DNA, 25 bp, Canis familiaris
catccatctccatctttacgatgtt

SEQ ID NO: 66458 - DNA, 25 bp, Canis familiaris
catcctcctatgattcttcggacgg

SEQ ID NO: 66459 - DNA, 25 bp, Canis familiaris
catcctgacctggttactctggtcc

SEQ ID NO: 66460 - DNA, 25 bp, Canis familiaris
catcctccttggagtcttcatgctc

SEQ ID NO: 66461 - DNA, 25 bp, Canis familiaris
catcccctgggacccagaagctctg

SEQ ID NO: 66462 - DNA, 25 bp, Canis familiaris
catcctttgaagccccagatcagat

SEQ ID NO: 66463 - DNA, 25 bp, Canis familiaris
catcctttgcattacacactgtcat

SEQ ID NO: 66464 - DNA, 25 bp, Canis familiaris
catcctcttgattgaccctttggat

SEQ ID NO: 66465 - DNA, 25 bp, Canis familiaris
catacgattatatctcaaatgtgaa

SEQ ID NO: 66466 - DNA, 25 bp, Canis familiaris
catacagtgttatattagtttcagg

SEQ ID NO: 66467 - DNA, 25 bp, Canis familiaris
catccagtttcacacataagtgcca

SEQ ID NO: 66468 - DNA, 25 bp, Canis familiaris
catcctttgtcattaatttgtctca

SEQ ID NO: 66469 - DNA, 25 bp, Canis familiaris
catccttagtccagcatgcttgtag

SEQ ID NO: 66470 - DNA, 25 bp, Canis familiaris
catccattaggccagcaatgcttgt

SEQ ID NO: 66471 - DNA, 25 bp, Canis familiaris
catgcctgtggacctgaagcttgtg

SEQ ID NO: 66472 - DNA, 25 bp, Canis familiaris
catcctgctgttccttagtgcaata

SEQ ID NO: 66473 - DNA, 25 bp, Canis familiaris
catgcgtgcattcccatcaagaaat

SEQ ID NO: 66474 - DNA, 25 bp, Canis familiaris
catcctgtctgccacatcagaacat

SEQ ID NO: 66475 - DNA, 25 bp, Canis familiaris
catgctctgtcccacacaaaagggt

SEQ ID NO: 66476 - DNA, 25 bp, Canis familiaris
catgctgtgtgctggacacctggag

SEQ ID NO: 66477 - DNA, 25 bp, Canis familiaris
catgcatgatgccgaggaccttgga

SEQ ID NO: 66478 - DNA, 25 bp, Canis familiaris
catgcatggggacagccgagggcac

SEQ ID NO: 66479 - DNA, 25 bp, Canis familiaris
catctgggccagagcacgaggactc

SEQ ID NO: 66480 - DNA, 25 bp, Canis familiaris
catctgtgtggcagggctaccactc

SEQ ID NO: 66481 - DNA, 25 bp, Canis familiaris
catttggtcaggggctcactagcag

SEQ ID NO: 66482 - DNA, 25 bp, Canis familiaris
catcctggctatgggttcctctcag

SEQ ID NO: 66483 - DNA, 25 bp, Canis familiaris
catctcaacattgggattgtgttac

SEQ ID NO: 66484 - DNA, 25 bp, Canis familiaris
catcgccactgctggtgttgtgtac

SEQ ID NO: 66485 - DNA, 25 bp, Canis familiaris
catccacagtgcgagtgcgtgtgtg

SEQ ID NO: 66486 - DNA, 25 bp, Canis familiaris
catccacatccagggcagtgagcag

SEQ ID NO: 66487 - DNA, 25 bp, Canis familiaris
catccaagaaggacagcgcagccac

SEQ ID NO: 66488 - DNA, 25 bp, Canis familiaris
catccaaggaaggcagcaggcgcgc

SEQ ID NO: 66489 - DNA, 25 bp, Canis familiaris
catttaggacagtcatagtctgcct

SEQ ID NO: 66490 - DNA, 25 bp, Canis familiaris
catcttgcggtggcacaagctctgc

SEQ ID NO: 66491 - DNA, 25 bp, Canis familiaris
catcttcttggtgaccttggttctc

SEQ ID NO: 66492 - DNA, 25 bp, Canis familiaris
catcttctgggaaccttacggattc

SEQ ID NO: 66493 - DNA, 25 bp, Canis familiaris
catcagtcggagactcatctcgacg

SEQ ID NO: 66494 - DNA, 25 bp, Canis familiaris
catcgacgtggaccacatcgagcgc

SEQ ID NO: 66495 - DNA, 25 bp, Canis familiaris
catgcgggattccctcattgacagc

SEQ ID NO: 66496 - DNA, 25 bp, Canis familiaris
catcacccagttctcattacagtaa

SEQ ID NO: 66497 - DNA, 25 bp, Canis familiaris
catccccgacttaatgatacttcaa

SEQ ID NO: 66498 - DNA, 25 bp, Canis familiaris
catcacccatggattcatgaatctc

SEQ ID NO: 66499 - DNA, 25 bp, Canis familiaris
catcgtcctggcactgcagagactg

SEQ ID NO: 66500 - DNA, 25 bp, Canis familiaris
catcctccgtgcactgtgatgtaga

SEQ ID NO: 66501 - DNA, 25 bp, Canis familiaris
catgcccgcgatgacatggaccaga

SEQ ID NO: 66502 - DNA, 25 bp, Canis familiaris
catccaccagatgatcagcgtcaag

SEQ ID NO: 66503 - DNA, 25 bp, Canis familiaris
catgccaccagttcacagtatcaga

SEQ ID NO: 66504 - DNA, 25 bp, Canis familiaris
catagtacagtattcagtgcacaga

SEQ ID NO: 66505 - DNA, 25 bp, Canis familiaris
catcagagaaaatgtggcacagcat

SEQ ID NO: 66506 - DNA, 25 bp, Canis familiaris
catgctggagcgagactgagccagc

SEQ ID NO: 66507 - DNA, 25 bp, Canis familiaris
catcagtcgcaatgattcagctcgc

SEQ ID NO: 66508 - DNA, 25 bp, Canis familiaris
catcggcagcaatcattcatccctg

SEQ ID NO: 66509 - DNA, 25 bp, Canis familiaris
catcgggacattgttcctctgcatg

SEQ ID NO: 66510 - DNA, 25 bp, Canis familiaris
catcgtcggacttttcccatgagag

SEQ ID NO: 66511 - DNA, 25 bp, Canis familiaris
catcctcgggtcctatgactatgga

SEQ ID NO: 66512 - DNA, 25 bp, Canis familiaris
cataattgggacccagacagattgg

SEQ ID NO: 66513 - DNA, 25 bp, Canis familiaris
catcattgtgggtgtaacaattgtg

SEQ ID NO: 66514 - DNA, 25 bp, Canis familiaris
cattttcggggttactcattgcctc

SEQ ID NO: 66515 - DNA, 25 bp, Canis familiaris
catcggtctgggcttcaagacgccc

SEQ ID NO: 66516 - DNA, 25 bp, Canis familiaris
catcggtctgggcttcaagacgccc

SEQ ID NO: 66517 - DNA, 25 bp, Canis familiaris
catctcgggggactggaagaccacc

SEQ ID NO: 66518 - DNA, 25 bp, Canis familiaris
catcggggttgggcagacccgacca

SEQ ID NO: 66519 - DNA, 25 bp, Canis familiaris
catccgggctgggcaaaccggaccg

SEQ ID NO: 66520 - DNA, 25 bp, Canis familiaris
cccaaatgtgggaaaactcgactgc

SEQ ID NO: 66521 - DNA, 25 bp, Canis familiaris
catccacacttggtaaatacttact

SEQ ID NO: 66522 - DNA, 25 bp, Canis familiaris
catctcacctgggataagtaattgg

SEQ ID NO: 66523 - DNA, 25 bp, Canis familiaris
catcaacactgggcatctttttctg

SEQ ID NO: 66524 - DNA, 25 bp, Canis familiaris
cataacacattatcctctttggcca

SEQ ID NO: 66525 - DNA, 25 bp, Canis familiaris
catacacctgaatcaacttcttgca

SEQ ID NO: 66526 - DNA, 25 bp, Canis familiaris
catacacacaacaccactcggtgat

SEQ ID NO: 66527 - DNA, 25 bp, Canis familiaris
cataacaaaccctttctggttgctg

SEQ ID NO: 66528 - DNA, 25 bp, Canis familiaris
catagccattacccttttgtttaca

SEQ ID NO: 66529 - DNA, 25 bp, Canis familiaris
catactttttttttagattccacat

SEQ ID NO: 66530 - DNA, 25 bp, Canis familiaris
catagatttgttaaggggtcagcca

SEQ ID NO: 66531 - DNA, 25 bp, Canis familiaris
catcgtttcctatagagtgatccca

SEQ ID NO: 66532 - DNA, 25 bp, Canis familiaris
ctagaattacttttggtatccccag

SEQ ID NO: 66533 - DNA, 25 bp, Canis familiaris
ctaatattgactacaaattaaccca

SEQ ID NO: 66534 - DNA, 25 bp, Canis familiaris
ctagagcatctggcttgacaatcta

SEQ ID NO: 66535 - DNA, 25 bp, Canis familiaris
cataagcacgtgggaaatgcaacat

SEQ ID NO: 66536 - DNA, 25 bp, Canis familiaris
catataccgtgtttaatgcccgagt

SEQ ID NO: 66537 - DNA, 25 bp, Canis familiaris
catcccacagttctaacacacagat

SEQ ID NO: 66538 - DNA, 25 bp, Canis familiaris
catcccagacttttaaacacagcac

SEQ ID NO: 66539 - DNA, 25 bp, Canis familiaris
catcggaactaccataaacacatac

SEQ ID NO: 66540 - DNA, 25 bp, Canis familiaris
cattcgcaatgccaggaaacacctt

SEQ ID NO: 66541 - DNA, 25 bp, Canis familiaris
catccacattgacgagatcaaccaa

SEQ ID NO: 66542 - DNA, 25 bp, Canis familiaris
catccacatcaagggccaggcgaag

SEQ ID NO: 66543 - DNA, 25 bp, Canis familiaris
catccacaatggcgctgacgagaag

SEQ ID NO: 66544 - DNA, 25 bp, Canis familiaris
catcaccatcttccaggagcgagac

SEQ ID NO: 66545 - DNA, 25 bp, Canis familiaris
catcaccatcttccaggagcgagat

SEQ ID NO: 66546 - DNA, 25 bp, Canis familiaris
catacctctctctgatcagcaagag

SEQ ID NO: 66547 - DNA, 25 bp, Canis familiaris
catcctcctcctaatccagagatgt

SEQ ID NO: 66548 - DNA, 25 bp, Canis familiaris
catccatcctacattcatctgtgat

SEQ ID NO: 66549 - DNA, 25 bp, Canis familiaris
catccattccacatacactgggcac

SEQ ID NO: 66550 - DNA, 25 bp, Canis familiaris
catctcttgccaaataagggcctgc

SEQ ID NO: 66551 - DNA, 25 bp, Canis familiaris
catcctctgcccaaataggcggctt

SEQ ID NO: 66552 - DNA, 25 bp, Canis familiaris
catcactttgcaggaaaccaagctt

SEQ ID NO: 66553 - DNA, 25 bp, Canis familiaris
catcaacagtgcagaacactccccc

SEQ ID NO: 66554 - DNA, 25 bp, Canis familiaris
catcaaagaacttaactccctcgga

SEQ ID NO: 66555 - DNA, 25 bp, Canis familiaris
catcaatggaaatcccatcaccatc

SEQ ID NO: 66556 - DNA, 25 bp, Canis familiaris
catcaatggaaatcccatcaccatc

SEQ ID NO: 66557 - DNA, 25 bp, Canis familiaris
catcaacgggaagtccatctccatc

SEQ ID NO: 66558 - DNA, 25 bp, Canis familiaris
catcaacgggaagcccatcaccatc

SEQ ID NO: 66559 - DNA, 25 bp, Canis familiaris
catcaccggtgatggaccaatctgc

SEQ ID NO: 66560 - DNA, 25 bp, Canis familiaris
catctccaggagggaacctctcatc

SEQ ID NO: 66561 - DNA, 25 bp, Canis familiaris
catctccactgcacgaagtctcgtg

SEQ ID NO: 66562 - DNA, 25 bp, Canis familiaris
catctctcaccaacaaattctattc

SEQ ID NO: 66563 - DNA, 25 bp, Canis familiaris
catctgcatcaccccagaagtgtta

SEQ ID NO: 66564 - DNA, 25 bp, Canis familiaris
catctcatatttccatgaagctttg

SEQ ID NO: 66565 - DNA, 25 bp, Canis familiaris
catccatatatgttctttgcctttt

SEQ ID NO: 66566 - DNA, 25 bp, Canis familiaris
catccgacactgtcttttctttcgg

SEQ ID NO: 66567 - DNA, 25 bp, Canis familiaris
catccggctgtgttttttcttaagc

SEQ ID NO: 66568 - DNA, 25 bp, Canis familiaris
catctgggttggttcctacttaagg

SEQ ID NO: 66569 - DNA, 25 bp, Canis familiaris
ttccgtcttgggcacaaccaactgg

SEQ ID NO: 66570 - DNA, 25 bp, Canis familiaris
cccagactaggaccctaccagattg

SEQ ID NO: 66571 - DNA, 25 bp, Canis familiaris
ctaagccaaggctctattccagttg

SEQ ID NO: 66572 - DNA, 25 bp, Canis familiaris
ccgtgcccggaaatttcgcagtatc

SEQ ID NO: 66573 - DNA, 25 bp, Canis familiaris
catcgtgcaccgcaagtgcttctag

SEQ ID NO: 66574 - DNA, 25 bp, Canis familiaris
catcgatgcctccagggtgtcggag

SEQ ID NO: 66575 - DNA, 25 bp, Canis familiaris
catcagcgcgcaagagggcagaccg

SEQ ID NO: 66576 - DNA, 25 bp, Canis familiaris
catcacggacagtccgtgtctctgc

SEQ ID NO: 66577 - DNA, 25 bp, Canis familiaris
catcaaggacatggccgggctgctg

SEQ ID NO: 66578 - DNA, 25 bp, Canis familiaris
catccggatcacggcaatgcggctg

SEQ ID NO: 66579 - DNA, 25 bp, Canis familiaris
catatctggccaggcgaatcccgtt

SEQ ID NO: 66580 - DNA, 25 bp, Canis familiaris
catcattccccagaaaccttttttg

SEQ ID NO: 66581 - DNA, 25 bp, Canis familiaris
catcgcccaccattaagacttatta

SEQ ID NO: 66582 - DNA, 25 bp, Canis familiaris
catccatcgaaatgaagatcttctt

SEQ ID NO: 66583 - DNA, 25 bp, Canis familiaris
catcgcacaaatatggaatccattt

SEQ ID NO: 66584 - DNA, 25 bp, Canis familiaris
agtggtattgggaacgctgcacccc

SEQ ID NO: 66585 - DNA, 25 bp, Canis familiaris
catccagctctctattatacatctc

SEQ ID NO: 66586 - DNA, 25 bp, Canis familiaris
catgccatgtttttatatcattctc

SEQ ID NO: 66587 - DNA, 25 bp, Canis familiaris
catcgagttgttctacacctgcaga

SEQ ID NO: 66588 - DNA, 25 bp, Canis familiaris
catccgtgtgttccgggcctgcacg

SEQ ID NO: 66589 - DNA, 25 bp, Canis familiaris
catccgtcatgcttcggagcagcac

SEQ ID NO: 66590 - DNA, 25 bp, Canis familiaris
catccaatgctcctttgagccagcg

SEQ ID NO: 66591 - DNA, 25 bp, Canis familiaris
catccctgctcagttctgagacctg

SEQ ID NO: 66592 - DNA, 25 bp, Canis familiaris
catccagcatctttgggacacctga

SEQ ID NO: 66593 - DNA, 25 bp, Canis familiaris
catccatgcctcttttggacattaa

SEQ ID NO: 66594 - DNA, 25 bp, Canis familiaris
catctggtctcactttaaattcaca

SEQ ID NO: 66595 - DNA, 25 bp, Canis familiaris
catctgagggagcttcacttggaca

SEQ ID NO: 66596 - DNA, 25 bp, Canis familiaris
catagagctggacctcatctcttgg

SEQ ID NO: 66597 - DNA, 25 bp, Canis familiaris
catcggtgccacgcatcttcatgaa

SEQ ID NO: 66598 - DNA, 25 bp, Canis familiaris
catcgtgtgatcaaggacttcatga

SEQ ID NO: 66599 - DNA, 25 bp, Canis familiaris
catcgctggctatgtgtttagagac

SEQ ID NO: 66600 - DNA, 25 bp, Canis familiaris
catcgctggctatgttgtttatgag

SEQ ID NO: 66601 - DNA, 25 bp, Canis familiaris
catcctgactagactcgtttcacag

SEQ ID NO: 66602 - DNA, 25 bp, Canis familiaris
catcctacattcatctgtgatcacc

SEQ ID NO: 66603 - DNA, 25 bp, Canis familiaris
catcgagatcaagttcgtgtacctg

SEQ ID NO: 66604 - DNA, 25 bp, Canis familiaris
catcacactacagttgtttcctctc

SEQ ID NO: 66605 - DNA, 25 bp, Canis familiaris
catccactcatgtcttatttctatc

SEQ ID NO: 66606 - DNA, 25 bp, Canis familiaris
catccctgatacaaatttcctgcaa

SEQ ID NO: 66607 - DNA, 25 bp, Canis familiaris
catccttcaaaatatagcacagcag

SEQ ID NO: 66608 - DNA, 25 bp, Canis familiaris
catcctcccagccaaatcagaatga

SEQ ID NO: 66609 - DNA, 25 bp, Canis familiaris
catcgctgtccacaaccagacattg

SEQ ID NO: 66610 - DNA, 25 bp, Canis familiaris
catagtgtcactcaacctcatttgc

SEQ ID NO: 66611 - DNA, 25 bp, Canis familiaris
cataagcaaatccatgacctcccag

SEQ ID NO: 66612 - DNA, 25 bp, Canis familiaris
cataaacgatgccgaccggcgatgc

SEQ ID NO: 66613 - DNA, 25 bp, Canis familiaris
cataatttccgcaatcccagcgtgc

SEQ ID NO: 66614 - DNA, 25 bp, Canis familiaris
catcctttcccagttgagcaggtct

SEQ ID NO: 66615 - DNA, 25 bp, Canis familiaris
catcctttaccagctgagtttctaa

SEQ ID NO: 66616 - DNA, 25 bp, Canis familiaris
catctgctgtgtactcatgttactc

SEQ ID NO: 66617 - DNA, 25 bp, Canis familiaris
catcgcttgctaaattttccaaaaa

SEQ ID NO: 66618 - DNA, 25 bp, Canis familiaris
catcctctctctcatttataataaa

SEQ ID NO: 66619 - DNA, 25 bp, Canis familiaris
catcccctgctctagtttgaattac

SEQ ID NO: 66620 - DNA, 25 bp, Canis familiaris
catccccactcaattttaactatcc

SEQ ID NO: 66621 - DNA, 25 bp, Canis familiaris
catccaccctttctctatgaatagc

SEQ ID NO: 66622 - DNA, 25 bp, Canis familiaris
catcaaccttgtactcctgtgaaag

SEQ ID NO: 66623 - DNA, 25 bp, Canis familiaris
ctcgtcctgttttcctgtataaagt

SEQ ID NO: 66624 - DNA, 25 bp, Canis familiaris
catctgtgcgtgtgttgccattgaa

SEQ ID NO: 66625 - DNA, 25 bp, Canis familiaris
catcttcgtatcaatcccatagcaa

SEQ ID NO: 66626 - DNA, 25 bp, Canis familiaris
catttaggattcaccaccaaccctg

SEQ ID NO: 66627 - DNA, 25 bp, Canis familiaris
cattattgcgtacaccttcaagccg

SEQ ID NO: 66628 - DNA, 25 bp, Canis familiaris
catcctgggctacaacctcaagaag

SEQ ID NO: 66629 - DNA, 25 bp, Canis familiaris
catcctgggctacactgagcaccag

SEQ ID NO: 66630 - DNA, 25 bp, Canis familiaris
catcctgggctacactgaggaccag

SEQ ID NO: 66631 - DNA, 25 bp, Canis familiaris
catcctgggctacactgaggaccag

SEQ ID NO: 66632 - DNA, 25 bp, Canis familiaris
catcttgggctacactgaggaccag

SEQ ID NO: 66633 - DNA, 25 bp, Canis familiaris
catcgtgggctcggacatgcaggag

SEQ ID NO: 66634 - DNA, 25 bp, Canis familiaris
catcgggctcccggtgcatggagcc

SEQ ID NO: 66635 - DNA, 25 bp, Canis familiaris
catctgggttcggactgctggaccc

SEQ ID NO: 66636 - DNA, 25 bp, Canis familiaris
ctgctgggcccggagtcgggcccca

SEQ ID NO: 66637 - DNA, 25 bp, Canis familiaris
catatagacccggagcacaaggccc

SEQ ID NO: 66638 - DNA, 25 bp, Canis familiaris
cataatatacgccccacactgaggc

SEQ ID NO: 66639 - DNA, 25 bp, Canis familiaris
catctatttggcctctccaatgacc

SEQ ID NO: 66640 - DNA, 25 bp, Canis familiaris
catcttttgggctaccaggacaggc

SEQ ID NO: 66641 - DNA, 25 bp, Canis familiaris
catctcctaggacctcctgggagtg

SEQ ID NO: 66642 - DNA, 25 bp, Canis familiaris
catttctgggagaagcctgggaata

SEQ ID NO: 66643 - DNA, 25 bp, Canis familiaris
cttgtcttatggagactgtaaactg

SEQ ID NO: 66644 - DNA, 25 bp, Canis familiaris
cttgttttgcacagacgtgggcctg

SEQ ID NO: 66645 - DNA, 25 bp, Canis familiaris
cttgtttaccacactatggacccag

SEQ ID NO: 66646 - DNA, 25 bp, Canis familiaris
cttgttcctcccattgtgaacctag

SEQ ID NO: 66647 - DNA, 25 bp, Canis familiaris
cttcttacccaacttctaagtgctc

SEQ ID NO: 66648 - DNA, 25 bp, Canis familiaris
ctttctacccatgttcttagttact

SEQ ID NO: 66649 - DNA, 25 bp, Canis familiaris
catatttcccttattttgatttaat

SEQ ID NO: 66650 - DNA, 25 bp, Canis familiaris
cataccttccttcttgttttatagt

SEQ ID NO: 66651 - DNA, 25 bp, Canis familiaris
cataactccttcttttgtctttgat

SEQ ID NO: 66652 - DNA, 25 bp, Canis familiaris
cattacccatttattgcctttcggc

SEQ ID NO: 66653 - DNA, 25 bp, Canis familiaris
catcatcgcgccaaattttgcgctc

SEQ ID NO: 66654 - DNA, 25 bp, Canis familiaris
catcctgcatccaatgtttgtatgt

SEQ ID NO: 66655 - DNA, 25 bp, Canis familiaris
catccgctccattattttatctttg

SEQ ID NO: 66656 - DNA, 25 bp, Canis familiaris
catccattcctatatttcatctcaa

SEQ ID NO: 66657 - DNA, 25 bp, Canis familiaris
catccctcatctggaatgttctctc

SEQ ID NO: 66658 - DNA, 25 bp, Canis familiaris
catcagctcttgcctgaagtgtcct

SEQ ID NO: 66659 - DNA, 25 bp, Canis familiaris
catctgcctgagcgatgagctgccg

SEQ ID NO: 66660 - DNA, 25 bp, Canis familiaris
catctgcgatgggcatggactccac

SEQ ID NO: 66661 - DNA, 25 bp, Canis familiaris
catctggatggccaaacccacatgc

SEQ ID NO: 66662 - DNA, 25 bp, Canis familiaris
catataagagcgaatgccacccatg

SEQ ID NO: 66663 - DNA, 25 bp, Canis familiaris
catactgtcagcgaatcccttcagg

SEQ ID NO: 66664 - DNA, 25 bp, Canis familiaris
catagcgacatgaacatctctctgt

SEQ ID NO: 66665 - DNA, 25 bp, Canis familiaris
catctggtctgttgccattctgtga

SEQ ID NO: 66666 - DNA, 25 bp, Canis familiaris
catccgagtgtttcgtgcgtgcaca

SEQ ID NO: 66667 - DNA, 25 bp, Canis familiaris
catcgtgcgtgtttcgtgagttaca

SEQ ID NO: 66668 - DNA, 25 bp, Canis familiaris
catcggccccacagtgggctacatc

SEQ ID NO: 66669 - DNA, 25 bp, Canis familiaris
catcggccccacagtgggctacatc

SEQ ID NO: 66670 - DNA, 25 bp, Canis familiaris
catcacagccccagggaggtaccag

SEQ ID NO: 66671 - DNA, 25 bp, Canis familiaris
catcgaccacctgaacgaggaccag

SEQ ID NO: 66672 - DNA, 25 bp, Canis familiaris
catataccacgtgatgacgaggatg

SEQ ID NO: 66673 - DNA, 25 bp, Canis familiaris
catacaccacataagatacggagta

SEQ ID NO: 66674 - DNA, 25 bp, Canis familiaris
catacacttctaactagttgatgtt

SEQ ID NO: 66675 - DNA, 25 bp, Canis familiaris
catcactctatcgtgtcacacttga

SEQ ID NO: 66676 - DNA, 25 bp, Canis familiaris
catcagtctgcaactgctgcaagtt

SEQ ID NO: 66677 - DNA, 25 bp, Canis familiaris
catacctgcatagtgcagccctctg

SEQ ID NO: 66678 - DNA, 25 bp, Canis familiaris
catcatcttcaaggcggcctatggg

SEQ ID NO: 66679 - DNA, 25 bp, Canis familiaris
catcacttaccaggagcctcaggga

SEQ ID NO: 66680 - DNA, 25 bp, Canis familiaris
catctatccacctggttcagcagtg

SEQ ID NO: 66681 - DNA, 25 bp, Canis familiaris
cataacaagctctatctgtctccgt

SEQ ID NO: 66682 - DNA, 25 bp, Canis familiaris
catagaaggcccttgtgtccgtttt

SEQ ID NO: 66683 - DNA, 25 bp, Canis familiaris
catataaactggttttccgcatttt

SEQ ID NO: 66684 - DNA, 25 bp, Canis familiaris
cataagatacggagtacatcctctt

SEQ ID NO: 66685 - DNA, 25 bp, Canis familiaris
cataaatccaggtgtttgcctcctc

SEQ ID NO: 66686 - DNA, 25 bp, Canis familiaris
cataaggatcggttgctctagccca

SEQ ID NO: 66687 - DNA, 25 bp, Canis familiaris
cataaatgactagtggcctacccag

SEQ ID NO: 66688 - DNA, 25 bp, Canis familiaris
catacactcctcgtgaggctggatc

SEQ ID NO: 66689 - DNA, 25 bp, Canis familiaris
catacatgccctgtgctcagtgtta

SEQ ID NO: 66690 - DNA, 25 bp, Canis familiaris
catcaccacgctgctcacagtggta

SEQ ID NO: 66691 - DNA, 25 bp, Canis familiaris
catcacaggcgcggctcctgtggaa

SEQ ID NO: 66692 - DNA, 25 bp, Canis familiaris
catcagcgggatgttcgtgttcctc

SEQ ID NO: 66693 - DNA, 25 bp, Canis familiaris
catcgctgggggtggtgtgatcccg

SEQ ID NO: 66694 - DNA, 25 bp, Canis familiaris
catcctggctgggttagtttcatag

SEQ ID NO: 66695 - DNA, 25 bp, Canis familiaris
catcccctggctgtgtatttatata

SEQ ID NO: 66696 - DNA, 25 bp, Canis familiaris
catcccgccagtttggtttcattgt

SEQ ID NO: 66697 - DNA, 25 bp, Canis familiaris
catcccatccagctgagaatttttt

SEQ ID NO: 66698 - DNA, 25 bp, Canis familiaris
catccccatctccttgatatatttt

SEQ ID NO: 66699 - DNA, 25 bp, Canis familiaris
catcccacgctaactacatatatat

SEQ ID NO: 66700 - DNA, 25 bp, Canis familiaris
catcatctacctggcgctacaattg

SEQ ID NO: 66701 - DNA, 25 bp, Canis familiaris
catcctcaaaatcctcatgccattg

SEQ ID NO: 66702 - DNA, 25 bp, Canis familiaris
catcctcttggatcagtgctattga

SEQ ID NO: 66703 - DNA, 25 bp, Canis familiaris
catcccagggaaatgttagctgaaa

SEQ ID NO: 66704 - DNA, 25 bp, Canis familiaris
catagacatggttaagtttcttaga

SEQ ID NO: 66705 - DNA, 25 bp, Canis familiaris
cataattggtgatatgccccctgga

SEQ ID NO: 66706 - DNA, 25 bp, Canis familiaris
cttagggcttttgcccctgaatggc

SEQ ID NO: 66707 - DNA, 25 bp, Canis familiaris
cattcaagtgtcttttccccaaata

SEQ ID NO: 66708 - DNA, 25 bp, Canis familiaris
catacacagttctttttatccttta

SEQ ID NO: 66709 - DNA, 25 bp, Canis familiaris
catacaccttagagcaatatctttt

SEQ ID NO: 66710 - DNA, 25 bp, Canis familiaris
catagcagcctttggtggaaatcct

SEQ ID NO: 66711 - DNA, 25 bp, Canis familiaris
catcggctgcattgtggtggataat

SEQ ID NO: 66712 - DNA, 25 bp, Canis familiaris
catctgtctctgttggtctgaactg

SEQ ID NO: 66713 - DNA, 25 bp, Canis familiaris
catcctcatctgtttcatcgacaag

SEQ ID NO: 66714 - DNA, 25 bp, Canis familiaris
catcccatgctgtttcattacgtgc

SEQ ID NO: 66715 - DNA, 25 bp, Canis familiaris
catcgccacccttcaatacgtggtg

SEQ ID NO: 66716 - DNA, 25 bp, Canis familiaris
catcccacctctgaggacctggaga

SEQ ID NO: 66717 - DNA, 25 bp, Canis familiaris
catcgcctgccttcaaggaaccagg

SEQ ID NO: 66718 - DNA, 25 bp, Canis familiaris
catcccagccccagggagtcagggg

SEQ ID NO: 66719 - DNA, 25 bp, Canis familiaris
catcccaccccgggggctaaagatg

SEQ ID NO: 66720 - DNA, 25 bp, Canis familiaris
catcctgacccccagggggtgaccg

SEQ ID NO: 66721 - DNA, 25 bp, Canis familiaris
catctcgagcccagggcgggattcc

SEQ ID NO: 66722 - DNA, 25 bp, Canis familiaris
catctcacccaccgtggggcaatct

SEQ ID NO: 66723 - DNA, 25 bp, Canis familiaris
catctccacagacgttgtgggcccc

SEQ ID NO: 66724 - DNA, 25 bp, Canis familiaris
cttcccgaagtgggcggctgcgggg

SEQ ID NO: 66725 - DNA, 25 bp, Canis familiaris
cttggagcggaagcgggccgaggtg

SEQ ID NO: 66726 - DNA, 25 bp, Canis familiaris
cttggagcggaagcgggccgaggtg

SEQ ID NO: 66727 - DNA, 25 bp, Canis familiaris
cataaagcaggaaacccccgaggtg

SEQ ID NO: 66728 - DNA, 25 bp, Canis familiaris
catagtacttattaccacctaaaat

SEQ ID NO: 66729 - DNA, 25 bp, Canis familiaris
cttgtcctaataactcccgggaatg

SEQ ID NO: 66730 - DNA, 25 bp, Canis familiaris
ctaccttaatatctccccaaaatgt

SEQ ID NO: 66731 - DNA, 25 bp, Canis familiaris
cttaggtaattcccctccagaattg

SEQ ID NO: 66732 - DNA, 25 bp, Canis familiaris
catttcccttttcttccagaataag

SEQ ID NO: 66733 - DNA, 25 bp, Canis familiaris
catttggccttcacccttaggaaga

SEQ ID NO: 66734 - DNA, 25 bp, Canis familiaris
catttggtcttctagtatattaaag

SEQ ID NO: 66735 - DNA, 25 bp, Canis familiaris
catctcggctttgagactttataac

SEQ ID NO: 66736 - DNA, 25 bp, Canis familiaris
catctcttttgtcaggttattagtg

SEQ ID NO: 66737 - DNA, 25 bp, Canis familiaris
catcacgttttaaagtcacttaaga

SEQ ID NO: 66738 - DNA, 25 bp, Canis familiaris
catactctaccttccagtacttaaa

SEQ ID NO: 66739 - DNA, 25 bp, Canis familiaris
catactctgaccgctctatatttag

SEQ ID NO: 66740 - DNA, 25 bp, Canis familiaris
catacgtcaactgtcagatgatttg

SEQ ID NO: 66741 - DNA, 25 bp, Canis familiaris
catctggtcagaatgtctagaattt

SEQ ID NO: 66742 - DNA, 25 bp, Canis familiaris
catctggacgcacgatcttcgattt

SEQ ID NO: 66743 - DNA, 25 bp, Canis familiaris
catctggagccaggtctgtctatgt

SEQ ID NO: 66744 - DNA, 25 bp, Canis familiaris
catctggagccaggtctgtctatgt

SEQ ID NO: 66745 - DNA, 25 bp, Canis familiaris
catctggagccaggtctgtctatgt

SEQ ID NO: 66746 - DNA, 25 bp, Canis familiaris
catctggagccaggtctgtctatgt

SEQ ID NO: 66747 - DNA, 25 bp, Canis familiaris
catcatgggctggaactgcatcggc

SEQ ID NO: 66748 - DNA, 25 bp, Canis familiaris
catagtggctgtgacgattgtgatc

SEQ ID NO: 66749 - DNA, 25 bp, Canis familiaris
catcgtgccgtcgggattctttgtc

SEQ ID NO: 66750 - DNA, 25 bp, Canis familiaris
catcgaacgtgagaattcagtcttc

SEQ ID NO: 66751 - DNA, 25 bp, Canis familiaris
catcgaacgatgtaacacacacctt

SEQ ID NO: 66752 - DNA, 25 bp, Canis familiaris
catacatacagacacgcaaacctcc

SEQ ID NO: 66753 - DNA, 25 bp, Canis familiaris
cataaccagtaattagcccactccc

SEQ ID NO: 66754 - DNA, 25 bp, Canis familiaris
cataatcttttatttgttccctcct

SEQ ID NO: 66755 - DNA, 25 bp, Canis familiaris
catattcaattttcaggttttccct

SEQ ID NO: 66756 - DNA, 25 bp, Canis familiaris
catctacttctttcgtttgtatcat

SEQ ID NO: 66757 - DNA, 25 bp, Canis familiaris
catcttcttctcttgtggttgttag

SEQ ID NO: 66758 - DNA, 25 bp, Canis familiaris
catcttctttgcttccagggattgg

SEQ ID NO: 66759 - DNA, 25 bp, Canis familiaris
catctattttttcaggggttgtggg

SEQ ID NO: 66760 - DNA, 25 bp, Canis familiaris
cattttgtttgtagggaggggtcag

SEQ ID NO: 66761 - DNA, 25 bp, Canis familiaris
catttttgttaatggccaaggccaa

SEQ ID NO: 66762 - DNA, 25 bp, Canis familiaris
catttggttctagaccctagctcca

SEQ ID NO: 66763 - DNA, 25 bp, Canis familiaris
catactttttgagcaggcactgagc

SEQ ID NO: 66764 - DNA, 25 bp, Canis familiaris
catcacttcaacaacgcaaccagag

SEQ ID NO: 66765 - DNA, 25 bp, Canis familiaris
catcgtataatgaaggccaccgctg

SEQ ID NO: 66766 - DNA, 25 bp, Canis familiaris
catataagttgcaagggatccctga

SEQ ID NO: 66767 - DNA, 25 bp, Canis familiaris
cataacggtgagcctggatgccagc

SEQ ID NO: 66768 - DNA, 25 bp, Canis familiaris
catacaggttgacggcctgcgtgct

SEQ ID NO: 66769 - DNA, 25 bp, Canis familiaris
catcgaggcggacgatgaccggctc

SEQ ID NO: 66770 - DNA, 25 bp, Canis familiaris
catcgaagcctggatgcagacctcc

SEQ ID NO: 66771 - DNA, 25 bp, Canis familiaris
catagagccctgctgcagatactgt

SEQ ID NO: 66772 - DNA, 25 bp, Canis familiaris
catcgtgcgctaacgcgtgcacatg

SEQ ID NO: 66773 - DNA, 25 bp, Canis familiaris
catcgtgattatggctctgcgcctg

SEQ ID NO: 66774 - DNA, 25 bp, Canis familiaris
catatgtgcttgtgcatgctctgtc

SEQ ID NO: 66775 - DNA, 25 bp, Canis familiaris
catcagttgctgtccagcttctagt

SEQ ID NO: 66776 - DNA, 25 bp, Canis familiaris
catagctttcattacattgtcagtt

SEQ ID NO: 66777 - DNA, 25 bp, Canis familiaris
catactttctttttgactgttcttc

SEQ ID NO: 66778 - DNA, 25 bp, Canis familiaris
cataatttattcttctccttttggg

SEQ ID NO: 66779 - DNA, 25 bp, Canis familiaris
cataccttataaaccctgatcttag

SEQ ID NO: 66780 - DNA, 25 bp, Canis familiaris
ctacttgaaagtatcaggattacag

SEQ ID NO: 66781 - DNA, 25 bp, Canis familiaris
ctaccggaagctgtctggaaggcga

SEQ ID NO: 66782 - DNA, 25 bp, Canis familiaris
catacccaccgtaatcctgaagacg

SEQ ID NO: 66783 - DNA, 25 bp, Canis familiaris
catacccctagtgtccatgaggtcg

SEQ ID NO: 66784 - DNA, 25 bp, Canis familiaris
catatcccgatagagtccaaccttg

SEQ ID NO: 66785 - DNA, 25 bp, Canis familiaris
catcccgagtcagagtcacaatcct

SEQ ID NO: 66786 - DNA, 25 bp, Canis familiaris
catcccctggtgagtctcaatccag

SEQ ID NO: 66787 - DNA, 25 bp, Canis familiaris
catccccgaggtggttcaagttggt

SEQ ID NO: 66788 - DNA, 25 bp, Canis familiaris
catcccctatgtggacccaagtggg

SEQ ID NO: 66789 - DNA, 25 bp, Canis familiaris
catcaccttctcgtaccaattgggt

SEQ ID NO: 66790 - DNA, 25 bp, Canis familiaris
catcccttctcgtagcaattgttgg

SEQ ID NO: 66791 - DNA, 25 bp, Canis familiaris
catccctgtctttgtttcatgttgg

SEQ ID NO: 66792 - DNA, 25 bp, Canis familiaris
catccctgtctttgtttcatgttgg

SEQ ID NO: 66793 - DNA, 25 bp, Canis familiaris
catccctgtctttgtttcatgttgg

SEQ ID NO: 66794 - DNA, 25 bp, Canis familiaris
cattttgttaggtattctgttgggg

SEQ ID NO: 66795 - DNA, 25 bp, Canis familiaris
catcttttgtcattgccatttcttg

SEQ ID NO: 66796 - DNA, 25 bp, Canis familiaris
cattttgctgtatcgactggtgtca

SEQ ID NO: 66797 - DNA, 25 bp, Canis familiaris
cattcgggctgatcatgattttgta

SEQ ID NO: 66798 - DNA, 25 bp, Canis familiaris
catctccctggatcatggtattgaa

SEQ ID NO: 66799 - DNA, 25 bp, Canis familiaris
catctccctgtgtttgtggactggt

SEQ ID NO: 66800 - DNA, 25 bp, Canis familiaris
catctccaggctttcctggagctgg

SEQ ID NO: 66801 - DNA, 25 bp, Canis familiaris
catcttaacaaaactggagggtctg

SEQ ID NO: 66802 - DNA, 25 bp, Canis familiaris
catctacaacgagtactgtgggcct

SEQ ID NO: 66803 - DNA, 25 bp, Canis familiaris
catctataaccagtacgtacgcttc

SEQ ID NO: 66804 - DNA, 25 bp, Canis familiaris
catcaatgaccccttcattgacctc

SEQ ID NO: 66805 - DNA, 25 bp, Canis familiaris
catctatgaatccttttgtgagcag

SEQ ID NO: 66806 - DNA, 25 bp, Canis familiaris
catctgggcatccgggaggcaagag

SEQ ID NO: 66807 - DNA, 25 bp, Canis familiaris
catctgccgaggagggccaatgaga

SEQ ID NO: 66808 - DNA, 25 bp, Canis familiaris
catcccaggggcaagcctcattgga

SEQ ID NO: 66809 - DNA, 25 bp, Canis familiaris
catcccgtggcgaacaacaagggag

SEQ ID NO: 66810 - DNA, 25 bp, Canis familiaris
catctccgtccagatcaaacctgga

SEQ ID NO: 66811 - DNA, 25 bp, Canis familiaris
catcccttcccataacaagtgcagg

SEQ ID NO: 66812 - DNA, 25 bp, Canis familiaris
catcccttgcaaccaacatagggag

SEQ ID NO: 66813 - DNA, 25 bp, Canis familiaris
catttccaccccaacatagagtagt

SEQ ID NO: 66814 - DNA, 25 bp, Canis familiaris
cataattcactgatctatcaacagt

SEQ ID NO: 66815 - DNA, 25 bp, Canis familiaris
catacattctgtggattcattagca

SEQ ID NO: 66816 - DNA, 25 bp, Canis familiaris
catagcatttggttcttctaccgaa

SEQ ID NO: 66817 - DNA, 25 bp, Canis familiaris
catcttttgatgtttatctatccga

SEQ ID NO: 66818 - DNA, 25 bp, Canis familiaris
catctgaggattcatgtcccaccga

SEQ ID NO: 66819 - DNA, 25 bp, Canis familiaris
catcatgggactctgcatcatctcc

SEQ ID NO: 66820 - DNA, 25 bp, Canis familiaris
catcagaaactgtcacatctctccc

SEQ ID NO: 66821 - DNA, 25 bp, Canis familiaris
catcagaaactgtcacatctctccc

SEQ ID NO: 66822 - DNA, 25 bp, Canis familiaris
catcagaaactgtcacatctctccc

SEQ ID NO: 66823 - DNA, 25 bp, Canis familiaris
catcagaaactgtcacatctctccc

SEQ ID NO: 66824 - DNA, 25 bp, Canis familiaris
catctgaagacatcagccacattac

SEQ ID NO: 66825 - DNA, 25 bp, Canis familiaris
catctgatcatgacaaaccaccgtt

SEQ ID NO: 66826 - DNA, 25 bp, Canis familiaris
catcaattctaatctcacctggtac

SEQ ID NO: 66827 - DNA, 25 bp, Canis familiaris
catcaatccttttccaacagttcac

SEQ ID NO: 66828 - DNA, 25 bp, Canis familiaris
catctcaactttctccaaattctgc

SEQ ID NO: 66829 - DNA, 25 bp, Canis familiaris
cataccagccatatacccaagactg

SEQ ID NO: 66830 - DNA, 25 bp, Canis familiaris
gcatacggcactatactctaactta

SEQ ID NO: 66831 - DNA, 25 bp, Canis familiaris
catacttctctaatactgctatccc

SEQ ID NO: 66832 - DNA, 25 bp, Canis familiaris
catacagattatggtacttacccct

SEQ ID NO: 66833 - DNA, 25 bp, Canis familiaris
catctaacttagtactcattcccct

SEQ ID NO: 66834 - DNA, 25 bp, Canis familiaris
catctgaaattttgtttgtacgtgt

SEQ ID NO: 66835 - DNA, 25 bp, Canis familiaris
catctaaatcctccttatcgacgga

SEQ ID NO: 66836 - DNA, 25 bp, Canis familiaris
catctctaaccacgcctactaagcg

SEQ ID NO: 66837 - DNA, 25 bp, Canis familiaris
cattttgcctcaccctagaagttgg

SEQ ID NO: 66838 - DNA, 25 bp, Canis familiaris
catctgggtctcatctgaaaaactg

SEQ ID NO: 66839 - DNA, 25 bp, Canis familiaris
catctgggtctcatccactatgtgt

SEQ ID NO: 66840 - DNA, 25 bp, Canis familiaris
catttgctttctccaaatatgggga

SEQ ID NO: 66841 - DNA, 25 bp, Canis familiaris
catctctgccccacaagaataggaa

SEQ ID NO: 66842 - DNA, 25 bp, Canis familiaris
catcgctccactgaaacacaacata

SEQ ID NO: 66843 - DNA, 25 bp, Canis familiaris
catctgtgccaaaacctccagaaga

SEQ ID NO: 66844 - DNA, 25 bp, Canis familiaris
catctctcgcatctacttggcaaag

SEQ ID NO: 66845 - DNA, 25 bp, Canis familiaris
catctccagaggaccttcatcacaa

SEQ ID NO: 66846 - DNA, 25 bp, Canis familiaris
catctccagaccagttacacacagg

SEQ ID NO: 66847 - DNA, 25 bp, Canis familiaris
catctaagactcagccttgacaaga

SEQ ID NO: 66848 - DNA, 25 bp, Canis familiaris
catcagaaactgtcacatctctccc

SEQ ID NO: 66849 - DNA, 25 bp, Canis familiaris
catcaacattctggcgagttcgaca

SEQ ID NO: 66850 - DNA, 25 bp, Canis familiaris
catttcttctcggagtctgcgtaga

SEQ ID NO: 66851 - DNA, 25 bp, Canis familiaris
catatttcttcgccactcaggaagt

SEQ ID NO: 66852 - DNA, 25 bp, Canis familiaris
catctctctttccctctagagaaat

SEQ ID NO: 66853 - DNA, 25 bp, Canis familiaris
catctactttgccccatgtggaaat

SEQ ID NO: 66854 - DNA, 25 bp, Canis familiaris
cattcagtttactcctgagaaaatg

SEQ ID NO: 66855 - DNA, 25 bp, Canis familiaris
cattcagctttgacccaaatgccga

SEQ ID NO: 66856 - DNA, 25 bp, Canis familiaris
catactgcctatcttatatagccca

SEQ ID NO: 66857 - DNA, 25 bp, Canis familiaris
catacgaccattagaatttccacat

SEQ ID NO: 66858 - DNA, 25 bp, Canis familiaris
cattctgaacatgctctagttccct

SEQ ID NO: 66859 - DNA, 25 bp, Canis familiaris
catactgtaaaagttgcattccctt

SEQ ID NO: 66860 - DNA, 25 bp, Canis familiaris
catagcgtcacatagccaggaccct

SEQ ID NO: 66861 - DNA, 25 bp, Canis familiaris
catcagtgccaagccacaggatcac

SEQ ID NO: 66862 - DNA, 25 bp, Canis familiaris
catcttgccctggagcaaggatatc

SEQ ID NO: 66863 - DNA, 25 bp, Canis familiaris
catctggctcctggcacggagcctg

SEQ ID NO: 66864 - DNA, 25 bp, Canis familiaris
catctagccactgatgggcagtcag

SEQ ID NO: 66865 - DNA, 25 bp, Canis familiaris
catcgagcacggcatcgtcaccaac

SEQ ID NO: 66866 - DNA, 25 bp, Canis familiaris
catcgagaacatccactacctcaac

SEQ ID NO: 66867 - DNA, 25 bp, Canis familiaris
catcaaaaaatgccaacctccacct

SEQ ID NO: 66868 - DNA, 25 bp, Canis familiaris
catcaacaaacaaaaaggcaacctc

SEQ ID NO: 66869 - DNA, 25 bp, Canis familiaris
catacacatgcacacaaaaccaacc

SEQ ID NO: 66870 - DNA, 25 bp, Canis familiaris
catacgcatgactacattacaacgg

SEQ ID NO: 66871 - DNA, 25 bp, Canis familiaris
catcacctacatcctaaacagctgt

SEQ ID NO: 66872 - DNA, 25 bp, Canis familiaris
catcatgcccagtcctggagactct

SEQ ID NO: 66873 - DNA, 25 bp, Canis familiaris
catcagcacggagctgggcatccgg

SEQ ID NO: 66874 - DNA, 25 bp, Canis familiaris
catctacatcgaccgagtgctctgc

SEQ ID NO: 66875 - DNA, 25 bp, Canis familiaris
catagctgcacgaacggtgcctgcg

SEQ ID NO: 66876 - DNA, 25 bp, Canis familiaris
catagaccggactgtcctgggcatc

SEQ ID NO: 66877 - DNA, 25 bp, Canis familiaris
catacccggattttccagggatcac

SEQ ID NO: 66878 - DNA, 25 bp, Canis familiaris
cataccccagtgttaccctgagata

SEQ ID NO: 66879 - DNA, 25 bp, Canis familiaris
catacccctgtgtagatgtgttagc

SEQ ID NO: 66880 - DNA, 25 bp, Canis familiaris
catcaccctcatttcagtctaatag

SEQ ID NO: 66881 - DNA, 25 bp, Canis familiaris
catctgccctttaagcctcaacaga

SEQ ID NO: 66882 - DNA, 25 bp, Canis familiaris
catctccctctaaggcttctataac

SEQ ID NO: 66883 - DNA, 25 bp, Canis familiaris
cataccctcatctagcctatttaat

SEQ ID NO: 66884 - DNA, 25 bp, Canis familiaris
catctccatactcagctctttaaga

SEQ ID NO: 66885 - DNA, 25 bp, Canis familiaris
catctgaagaactacatgcttttaa

SEQ ID NO: 66886 - DNA, 25 bp, Canis familiaris
cattacaggcacaggtatttgaaat

SEQ ID NO: 66887 - DNA, 25 bp, Canis familiaris
catattaggcgcagataaaagaatt

SEQ ID NO: 66888 - DNA, 25 bp, Canis familiaris
catatattggccctgctaaaataga

SEQ ID NO: 66889 - DNA, 25 bp, Canis familiaris
cttggcggcctttgaaaaggaacag

SEQ ID NO: 66890 - DNA, 25 bp, Canis familiaris
catttgcttgaaaagacaaaggacc

SEQ ID NO: 66891 - DNA, 25 bp, Canis familiaris
catcttctgtaataatcgatgggaa

SEQ ID NO: 66892 - DNA, 25 bp, Canis familiaris
catctgtttagcaagaacctgtgga

SEQ ID NO: 66893 - DNA, 25 bp, Canis familiaris
catagcttccatgagaacagcaggg

SEQ ID NO: 66894 - DNA, 25 bp, Canis familiaris
catagcccagcagatgatgccagaa

SEQ ID NO: 66895 - DNA, 25 bp, Canis familiaris
catagacatcaaggtggcagcaggg

SEQ ID NO: 66896 - DNA, 25 bp, Canis familiaris
catctccatcaagttgcaagaggag

SEQ ID NO: 66897 - DNA, 25 bp, Canis familiaris
catcatgactcgttctgtaggagag

SEQ ID NO: 66898 - DNA, 25 bp, Canis familiaris
catctactctgatctatgaggcagg

SEQ ID NO: 66899 - DNA, 25 bp, Canis familiaris
catctactctgagcaggacacgggc

SEQ ID NO: 66900 - DNA, 25 bp, Canis familiaris
catcaatcatcgcccgagaaccgag

SEQ ID NO: 66901 - DNA, 25 bp, Canis familiaris
catcatcgtcgacagagacacccag

SEQ ID NO: 66902 - DNA, 25 bp, Canis familiaris
catctctgctctacctagaagtctc

SEQ ID NO: 66903 - DNA, 25 bp, Canis familiaris
catctctcccccaagaagtcagaga

SEQ ID NO: 66904 - DNA, 25 bp, Canis familiaris
catctcccttctgagagctgtcagg

SEQ ID NO: 66905 - DNA, 25 bp, Canis familiaris
catctccggtcccgaggatagtgtt

SEQ ID NO: 66906 - DNA, 25 bp, Canis familiaris
catacccagtcctggaggaatggtt

SEQ ID NO: 66907 - DNA, 25 bp, Canis familiaris
catagcgtttcctgtgtgaattgtt

SEQ ID NO: 66908 - DNA, 25 bp, Canis familiaris
cataggggaacccgtggttgtctcg

SEQ ID NO: 66909 - DNA, 25 bp, Canis familiaris
cttgggagaactgagcgtccgtcgg

SEQ ID NO: 66910 - DNA, 25 bp, Canis familiaris
ctgcctgaagaagcacaagtccggc

SEQ ID NO: 66911 - DNA, 25 bp, Canis familiaris
cattcaggaccagccagattccagg

SEQ ID NO: 66912 - DNA, 25 bp, Canis familiaris
catcaagaaagagccgccagccgga

SEQ ID NO: 66913 - DNA, 25 bp, Canis familiaris
catagagaacacacctgcacagaca

SEQ ID NO: 66914 - DNA, 25 bp, Canis familiaris
catacatgtaaatctccgcgacaga

SEQ ID NO: 66915 - DNA, 25 bp, Canis familiaris
catacatttatatgctcccgcaacc

SEQ ID NO: 66916 - DNA, 25 bp, Canis familiaris
catagctatttgagctccactttcc

SEQ ID NO: 66917 - DNA, 25 bp, Canis familiaris
catagagtgataatggctgccatgc

SEQ ID NO: 66918 - DNA, 25 bp, Canis familiaris
catcaagtatcatgcagcgtctgcc

SEQ ID NO: 66919 - DNA, 25 bp, Canis familiaris
catctgcatttgtgtctgtctgctc

SEQ ID NO: 66920 - DNA, 25 bp, Canis familiaris
catcatctcatttgtattgctgttc

SEQ ID NO: 66921 - DNA, 25 bp, Canis familiaris
catcatctgtcagtgctcttttctc

SEQ ID NO: 66922 - DNA, 25 bp, Canis familiaris
catctttcagtgccaatttctcgtt

SEQ ID NO: 66923 - DNA, 25 bp, Canis familiaris
cattctcatcagtcgcaatgattca

SEQ ID NO: 66924 - DNA, 25 bp, Canis familiaris
catctctgccaggccagtatctgta

SEQ ID NO: 66925 - DNA, 25 bp, Canis familiaris
catcatgcacggagggctctgtact

SEQ ID NO: 66926 - DNA, 25 bp, Canis familiaris
catctgcctcagagaagtgcttatt

SEQ ID NO: 66927 - DNA, 25 bp, Canis familiaris
catcacctcagaagccacatgctgt

SEQ ID NO: 66928 - DNA, 25 bp, Canis familiaris
catctcttagaaccacactgactct

SEQ ID NO: 66929 - DNA, 25 bp, Canis familiaris
catctttactgcactcactatcaat

SEQ ID NO: 66930 - DNA, 25 bp, Canis familiaris
catctgttacagctcattcttgaaa

SEQ ID NO: 66931 - DNA, 25 bp, Canis familiaris
catctgattcagggtactctataaa

SEQ ID NO: 66932 - DNA, 25 bp, Canis familiaris
catctgcttcatgtgttttcaagaa

SEQ ID NO: 66933 - DNA, 25 bp, Canis familiaris
catctatttctctatctttaagcaa

SEQ ID NO: 66934 - DNA, 25 bp, Canis familiaris
catagtcgtgcatatttcaaagctt

SEQ ID NO: 66935 - DNA, 25 bp, Canis familiaris
catagtgctgctcatcgtatcagaa

SEQ ID NO: 66936 - DNA, 25 bp, Canis familiaris
cataagccatctttgtatcaatgat

SEQ ID NO: 66937 - DNA, 25 bp, Canis familiaris
catcatgtgctcattatgtgccaag

SEQ ID NO: 66938 - DNA, 25 bp, Canis familiaris
cattttttcattggccaaggcaacc

SEQ ID NO: 66939 - DNA, 25 bp, Canis familiaris
catacttaccttcccagagataact

SEQ ID NO: 66940 - DNA, 25 bp, Canis familiaris
cattatacccttcccaagaaattga

SEQ ID NO: 66941 - DNA, 25 bp, Canis familiaris
cattatacccttccgagcattaaat

SEQ ID NO: 66942 - DNA, 25 bp, Canis familiaris
catatacacacaccccggatatggc

SEQ ID NO: 66943 - DNA, 25 bp, Canis familiaris
catattgctcaacctcatcgattta

SEQ ID NO: 66944 - DNA, 25 bp, Canis familiaris
cataatgcagacaccctattgctac

SEQ ID NO: 66945 - DNA, 25 bp, Canis familiaris
cattatgacaccgatccttatgccc

SEQ ID NO: 66946 - DNA, 25 bp, Canis familiaris
catcaatgacacagtcctctggcgg

SEQ ID NO: 66947 - DNA, 25 bp, Canis familiaris
catcactgaccaagtcatcctggat

SEQ ID NO: 66948 - DNA, 25 bp, Canis familiaris
catagcatttcttctcatgcctggt

SEQ ID NO: 66949 - DNA, 25 bp, Canis familiaris
catagagtatcatgccacctgtgaa

SEQ ID NO: 66950 - DNA, 25 bp, Canis familiaris
catacagtagattccatccattcac

SEQ ID NO: 66951 - DNA, 25 bp, Canis familiaris
cataagtgcctgtgactcattcctg

SEQ ID NO: 66952 - DNA, 25 bp, Canis familiaris
cataagtgcctgtgactcattcctg

SEQ ID NO: 66953 - DNA, 25 bp, Canis familiaris
catcaaagccagtggtaccagtaag

SEQ ID NO: 66954 - DNA, 25 bp, Canis familiaris
catcaacagccgtgaccactttaga

SEQ ID NO: 66955 - DNA, 25 bp, Canis familiaris
ctctagccctgagactccttttaaa

SEQ ID NO: 66956 - DNA, 25 bp, Canis familiaris
cttgagacctaaattcctttccact

SEQ ID NO: 66957 - DNA, 25 bp, Canis familiaris
cttgagacctaaattcctttccact

SEQ ID NO: 66958 - DNA, 25 bp, Canis familiaris
cattgaaccaaaacctcattccaag

SEQ ID NO: 66959 - DNA, 25 bp, Canis familiaris
cttcgaaatgtcacccttccagaaa

SEQ ID NO: 66960 - DNA, 25 bp, Canis familiaris
catctctaagattttcccaaccgaa

SEQ ID NO: 66961 - DNA, 25 bp, Canis familiaris
cttgtaacggttcagcaacccaaag

SEQ ID NO: 66962 - DNA, 25 bp, Canis familiaris
ctttcaacgaaacaacacatcccaa

SEQ ID NO: 66963 - DNA, 25 bp, Canis familiaris
catctacatacgcaactacacacat

SEQ ID NO: 66964 - DNA, 25 bp, Canis familiaris
catcttctgcctcaactataaacca

SEQ ID NO: 66965 - DNA, 25 bp, Canis familiaris
catcttcgacagtgcacaaaaacgc

SEQ ID NO: 66966 - DNA, 25 bp, Canis familiaris
catttcagagtgtgccaaaaccatg

SEQ ID NO: 66967 - DNA, 25 bp, Canis familiaris
catctatgagaagcggcggaagccg

SEQ ID NO: 66968 - DNA, 25 bp, Canis familiaris
catttgaagacccacgtgatacccg

SEQ ID NO: 66969 - DNA, 25 bp, Canis familiaris
cattcgacggtcgggtagaccggcg

SEQ ID NO: 66970 - DNA, 25 bp, Canis familiaris
cttcggccgcttgggaaacaggagt

SEQ ID NO: 66971 - DNA, 25 bp, Canis familiaris
catctctggcctgctggacaagata

SEQ ID NO: 66972 - DNA, 25 bp, Canis familiaris
catctccagcctgctgcgtaagtgc

SEQ ID NO: 66973 - DNA, 25 bp, Canis familiaris
catcatcatcggggtgcgcaagggc

SEQ ID NO: 66974 - DNA, 25 bp, Canis familiaris
catcacgctgtggtttgatgatgcg

SEQ ID NO: 66975 - DNA, 25 bp, Canis familiaris
catcactgtggggccatgtgcactg

SEQ ID NO: 66976 - DNA, 25 bp, Canis familiaris
catcaatgtgggggtgctgctgtat

SEQ ID NO: 66977 - DNA, 25 bp, Canis familiaris
catacagtcatgcggtctcttgctt

SEQ ID NO: 66978 - DNA, 25 bp, Canis familiaris
cattcagttcaacatctgcctttgg

SEQ ID NO: 66979 - DNA, 25 bp, Canis familiaris
catttccacactcattcacgttgtg

SEQ ID NO: 66980 - DNA, 25 bp, Canis familiaris
catctactcaccccctggggtgttc

SEQ ID NO: 66981 - DNA, 25 bp, Canis familiaris
catctactatagctttgggtgttga

SEQ ID NO: 66982 - DNA, 25 bp, Canis familiaris
cattatctttgccagttggagtgct

SEQ ID NO: 66983 - DNA, 25 bp, Canis familiaris
catatcctttactcttggtgctgca

SEQ ID NO: 66984 - DNA, 25 bp, Canis familiaris
catactcttctaccgtgtttgcggc

SEQ ID NO: 66985 - DNA, 25 bp, Canis familiaris
cattttgctcgagcggcttctgagt

SEQ ID NO: 66986 - DNA, 25 bp, Canis familiaris
catttaccggagggttctgtgactg

SEQ ID NO: 66987 - DNA, 25 bp, Canis familiaris
cattacctcggacatgtcatggtga

SEQ ID NO: 66988 - DNA, 25 bp, Canis familiaris
cattaatccgtttatgtgatgtgta

SEQ ID NO: 66989 - DNA, 25 bp, Canis familiaris
cattaatccgtttatgtgatgtgta

SEQ ID NO: 66990 - DNA, 25 bp, Canis familiaris
catctttctctgactgtagttggct

SEQ ID NO: 66991 - DNA, 25 bp, Canis familiaris
catttggcatctgttggtctgggat

SEQ ID NO: 66992 - DNA, 25 bp, Canis familiaris
catctcggtctcattgggtcggagg

SEQ ID NO: 66993 - DNA, 25 bp, Canis familiaris
catcttgggctttgggggcagcgtg

SEQ ID NO: 66994 - DNA, 25 bp, Canis familiaris
catttcgatcctcgtcaggtgcagg

SEQ ID NO: 66995 - DNA, 25 bp, Canis familiaris
catttggacctgggggtgcggtcgc

SEQ ID NO: 66996 - DNA, 25 bp, Canis familiaris
cattggtgataccgggggctttcca

SEQ ID NO: 66997 - DNA, 25 bp, Canis familiaris
catcttggtactactagatgtcttt

SEQ ID NO: 66998 - DNA, 25 bp, Canis familiaris
catcttcccactatagatcctttag

SEQ ID NO: 66999 - DNA, 25 bp, Canis familiaris
ctttcctgggttctcctattgcagg

SEQ ID NO: 67000 - DNA, 25 bp, Canis familiaris
cttgtacttgccaccttttgtatga

SEQ ID NO: 67001 - DNA, 25 bp, Canis familiaris
cttgaacttgcgcttgatctttgag

SEQ ID NO: 67002 - DNA, 25 bp, Canis familiaris
catttactatcgcttagtctgtgcc

SEQ ID NO: 67003 - DNA, 25 bp, Canis familiaris
catttagtttggagagcaagcccaa

SEQ ID NO: 67004 - DNA, 25 bp, Canis familiaris
catcttcaaaatggggactccttaa

SEQ ID NO: 67005 - DNA, 25 bp, Canis familiaris
cataatcaggagtcggagaccctct

SEQ ID NO: 67006 - DNA, 25 bp, Canis familiaris
ctcagaagtgactcgtatactctct

SEQ ID NO: 67007 - DNA, 25 bp, Canis familiaris
catcagtagtacattgtatttttac

SEQ ID NO: 67008 - DNA, 25 bp, Canis familiaris
catcagctgatggacatttgtgttg

SEQ ID NO: 67009 - DNA, 25 bp, Canis familiaris
catcactatcatgacgtgtgtgtgt

SEQ ID NO: 67010 - DNA, 25 bp, Canis familiaris
catcatctagcatcacagtggtata

SEQ ID NO: 67011 - DNA, 25 bp, Canis familiaris
catcatcttgaatggatgggccaat

SEQ ID NO: 67012 - DNA, 25 bp, Canis familiaris
catcatggtaaccacgggcctaaca

SEQ ID NO: 67013 - DNA, 25 bp, Canis familiaris
catatggatacccactggactccaa

SEQ ID NO: 67014 - DNA, 25 bp, Canis familiaris
catcagatgaatactcctcgactcc

SEQ ID NO: 67015 - DNA, 25 bp, Canis familiaris
cataagagaactccttgcactcgcc

SEQ ID NO: 67016 - DNA, 25 bp, Canis familiaris
cataaatggagggcagtgacattgc

SEQ ID NO: 67017 - DNA, 25 bp, Canis familiaris
cataagcttgcgttgattaagtccc

SEQ ID NO: 67018 - DNA, 25 bp, Canis familiaris
cattagctgtggttgtaaagtcccc

SEQ ID NO: 67019 - DNA, 25 bp, Canis familiaris
cataggcgtgtgtgttttgccaccc

SEQ ID NO: 67020 - DNA, 25 bp, Canis familiaris
cattccagttatttgtgttacaccc

SEQ ID NO: 67021 - DNA, 25 bp, Canis familiaris
catctttctctcattgtgattccac

SEQ ID NO: 67022 - DNA, 25 bp, Canis familiaris
catcttgtcgcgagctgctgatacg

SEQ ID NO: 67023 - DNA, 25 bp, Canis familiaris
catctagaccaagctgcagcatccc

SEQ ID NO: 67024 - DNA, 25 bp, Canis familiaris
catcttccaggagcgagaccccact

SEQ ID NO: 67025 - DNA, 25 bp, Canis familiaris
catcttccaggagcgagatccctcc

SEQ ID NO: 67026 - DNA, 25 bp, Canis familiaris
cttgaccagcggtgtgcacaccttc

SEQ ID NO: 67027 - DNA, 25 bp, Canis familiaris
cattgaacatggcattgttaccaac

SEQ ID NO: 67028 - DNA, 25 bp, Canis familiaris
ctcagaatatttataaatcccaccc

SEQ ID NO: 67029 - DNA, 25 bp, Canis familiaris
cttgaatttcttgagcctactaccc

SEQ ID NO: 67030 - DNA, 25 bp, Canis familiaris
cttgttagacttgggcaccattccc

SEQ ID NO: 67031 - DNA, 25 bp, Canis familiaris
catttctagtccacagccacagtgc

SEQ ID NO: 67032 - DNA, 25 bp, Canis familiaris
catattgtacccaccacattgtagc

SEQ ID NO: 67033 - DNA, 25 bp, Canis familiaris
cataggaacccttccacaagactga

SEQ ID NO: 67034 - DNA, 25 bp, Canis familiaris
cataggaccacttttgccactatgg

SEQ ID NO: 67035 - DNA, 25 bp, Canis familiaris
catcagggccaggggaaatttctgg

SEQ ID NO: 67036 - DNA, 25 bp, Canis familiaris
cattgggaggggcaagttcttggtt

SEQ ID NO: 67037 - DNA, 25 bp, Canis familiaris
cattcgaagggggactttccgcttg

SEQ ID NO: 67038 - DNA, 25 bp, Canis familiaris
catacgatcggagccactctttggt

SEQ ID NO: 67039 - DNA, 25 bp, Canis familiaris
catatccacccagctttgttctgga

SEQ ID NO: 67040 - DNA, 25 bp, Canis familiaris
catcttccaccagcttctggacatg

SEQ ID NO: 67041 - DNA, 25 bp, Canis familiaris
catcttccctgagtctccaggaggc

SEQ ID NO: 67042 - DNA, 25 bp, Canis familiaris
cattacagcctgttttcacgtctgc

SEQ ID NO: 67043 - DNA, 25 bp, Canis familiaris
catagaccttgggattccctctgcg

SEQ ID NO: 67044 - DNA, 25 bp, Canis familiaris
cataccaaaggttttgctcctgcgc

SEQ ID NO: 67045 - DNA, 25 bp, Canis familiaris
cataacttgagtctcttgccttgcc

SEQ ID NO: 67046 - DNA, 25 bp, Canis familiaris
catctagcagtcagttcttgttttc

SEQ ID NO: 67047 - DNA, 25 bp, Canis familiaris
catatagcagtgtgtattttttcct

SEQ ID NO: 67048 - DNA, 25 bp, Canis familiaris
cataaggtcttttctctgttgattt

SEQ ID NO: 67049 - DNA, 25 bp, Canis familiaris
catacttgtcattgttcctttgttt

SEQ ID NO: 67050 - DNA, 25 bp, Canis familiaris
catactgtccttttccttttataat

SEQ ID NO: 67051 - DNA, 25 bp, Canis familiaris
catacctgacttttctggttttact

SEQ ID NO: 67052 - DNA, 25 bp, Canis familiaris
ctacctgccggtttggaatctaatc

SEQ ID NO: 67053 - DNA, 25 bp, Canis familiaris
cattcctgggttttggaacaagcca

SEQ ID NO: 67054 - DNA, 25 bp, Canis familiaris
catcacccgagccttttaaaagact

SEQ ID NO: 67055 - DNA, 25 bp, Canis familiaris
catacctcatgaccattttgaacaa

SEQ ID NO: 67056 - DNA, 25 bp, Canis familiaris
catacctagctgtttgtggattcaa

SEQ ID NO: 67057 - DNA, 25 bp, Canis familiaris
catcagctcttgccagtcatgggag

SEQ ID NO: 67058 - DNA, 25 bp, Canis familiaris
catagctatgaggagttggaagaga

SEQ ID NO: 67059 - DNA, 25 bp, Canis familiaris
catagctctagccgttcgattaacc

SEQ ID NO: 67060 - DNA, 25 bp, Canis familiaris
catagccgacagggtgacttaccct

SEQ ID NO: 67061 - DNA, 25 bp, Canis familiaris
catagccattagtgacactatagac

SEQ ID NO: 67062 - DNA, 25 bp, Canis familiaris
catagagtttgctgacaccatcaag

SEQ ID NO: 67063 - DNA, 25 bp, Canis familiaris
cataatgtcctctggagccatccat

SEQ ID NO: 67064 - DNA, 25 bp, Canis familiaris
cataatcgagctcagaggcctcgcc

SEQ ID NO: 67065 - DNA, 25 bp, Canis familiaris
cataccgatgtccaggaccacacac

SEQ ID NO: 67066 - DNA, 25 bp, Canis familiaris
catatccaggccctggtccaacagc

SEQ ID NO: 67067 - DNA, 25 bp, Canis familiaris
cataccagtgccaatactgcgaata

SEQ ID NO: 67068 - DNA, 25 bp, Canis familiaris
catcactcgatggcttacttgactt

SEQ ID NO: 67069 - DNA, 25 bp, Canis familiaris
catctatggatgggtacttgagttg

SEQ ID NO: 67070 - DNA, 25 bp, Canis familiaris
cattatggatccctacataagcgtt

SEQ ID NO: 67071 - DNA, 25 bp, Canis familiaris
catttggaatcctgctcgtggtcat

SEQ ID NO: 67072 - DNA, 25 bp, Canis familiaris
catctttagtgttctgtcgctgttc

SEQ ID NO: 67073 - DNA, 25 bp, Canis familiaris
catctttctgtaattttgctgtggt

SEQ ID NO: 67074 - DNA, 25 bp, Canis familiaris
catctttctcttgcctgagtgggaa

SEQ ID NO: 67075 - DNA, 25 bp, Canis familiaris
catttctgtcttgccggtctaacag

SEQ ID NO: 67076 - DNA, 25 bp, Canis familiaris
catcttctagtaccctggttcattc

SEQ ID NO: 67077 - DNA, 25 bp, Canis familiaris
cattcctagtaaccaggttcctggg

SEQ ID NO: 67078 - DNA, 25 bp, Canis familiaris
catcttttaagacccttctctcggg

SEQ ID NO: 67079 - DNA, 25 bp, Canis familiaris
catattttatgacccctacttgcag

SEQ ID NO: 67080 - DNA, 25 bp, Canis familiaris
catttgttgcagtaccagatccatc

SEQ ID NO: 67081 - DNA, 25 bp, Canis familiaris
catcttatatcaggtcctgacccag

SEQ ID NO: 67082 - DNA, 25 bp, Canis familiaris
catcttttcggtgcttcttaattca

SEQ ID NO: 67083 - DNA, 25 bp, Canis familiaris
catctttgccaacacttgttatttc

SEQ ID NO: 67084 - DNA, 25 bp, Canis familiaris
catcttctccaattattttttaaca

SEQ ID NO: 67085 - DNA, 25 bp, Canis familiaris
catcttcctcctgtcattttgaaat

SEQ ID NO: 67086 - DNA, 25 bp, Canis familiaris
catattctccccgtactgattaaaa

SEQ ID NO: 67087 - DNA, 25 bp, Canis familiaris
cattgtgctggcccgtaagggacaa

SEQ ID NO: 67088 - DNA, 25 bp, Canis familiaris
catttagggacactaaaggacagtt

SEQ ID NO: 67089 - DNA, 25 bp, Canis familiaris
catttccggtctccaagagaaaaat

SEQ ID NO: 67090 - DNA, 25 bp, Canis familiaris
catttacagctgtctgaaggaagaa

SEQ ID NO: 67091 - DNA, 25 bp, Canis familiaris
catcttgccccacgaggccaaaatg

SEQ ID NO: 67092 - DNA, 25 bp, Canis familiaris
catcattgatgccccaggacacaga

SEQ ID NO: 67093 - DNA, 25 bp, Canis familiaris
catcttgatcctggcggtagcgatt

SEQ ID NO: 67094 - DNA, 25 bp, Canis familiaris
catcttgtcctacctgaatgcaact

SEQ ID NO: 67095 - DNA, 25 bp, Canis familiaris
catcattctgcccagtctactgaag

SEQ ID NO: 67096 - DNA, 25 bp, Canis familiaris
catcttcagccacttctttggagac

SEQ ID NO: 67097 - DNA, 25 bp, Canis familiaris
catcattgtctcctgtggttgggac

SEQ ID NO: 67098 - DNA, 25 bp, Canis familiaris
catttgtctttattgttgctaactt

SEQ ID NO: 67099 - DNA, 25 bp, Canis familiaris
catttgccctgtgctttaaccttat

SEQ ID NO: 67100 - DNA, 25 bp, Canis familiaris
catttcctcactgttcagaacacct

SEQ ID NO: 67101 - DNA, 25 bp, Canis familiaris
catcttcctcctggtcatgaacaat

SEQ ID NO: 67102 - DNA, 25 bp, Canis familiaris
catcttcctgctggagtcctatatt

SEQ ID NO: 67103 - DNA, 25 bp, Canis familiaris
catatatgactgcacgtcacttagt

SEQ ID NO: 67104 - DNA, 25 bp, Canis familiaris
cataaggctggaacatatctttgtc

SEQ ID NO: 67105 - DNA, 25 bp, Canis familiaris
catacgttggcaaacttcttgaata

SEQ ID NO: 67106 - DNA, 25 bp, Canis familiaris
catacgttggcaaacattcttaaat

SEQ ID NO: 67107 - DNA, 25 bp, Canis familiaris
catttttggcatgtattcctttttt

SEQ ID NO: 67108 - DNA, 25 bp, Canis familiaris
cattttggggccatgcccaatcctg

SEQ ID NO: 67109 - DNA, 25 bp, Canis familiaris
catttttgagggagcttccacttgg

SEQ ID NO: 67110 - DNA, 25 bp, Canis familiaris
catttttcaggttgggtatactttg

SEQ ID NO: 67111 - DNA, 25 bp, Canis familiaris
catttttacctgcagaagaactttg

SEQ ID NO: 67112 - DNA, 25 bp, Canis familiaris
cattttctacctcaagtgaagcctt

SEQ ID NO: 67113 - DNA, 25 bp, Canis familiaris
cattttttccatctactgtggcttt

SEQ ID NO: 67114 - DNA, 25 bp, Canis familiaris
catttcttcgttccgtaatggctta

SEQ ID NO: 67115 - DNA, 25 bp, Canis familiaris
cattttggtgtactcctagataatc

SEQ ID NO: 67116 - DNA, 25 bp, Canis familiaris
gaatttgggtgaccactgtaaccca

SEQ ID NO: 67117 - DNA, 25 bp, Canis familiaris
gaattggaagtccccagaacacctc

SEQ ID NO: 67118 - DNA, 25 bp, Canis familiaris
gaataggaagtcccgaactcctcac

SEQ ID NO: 67119 - DNA, 25 bp, Canis familiaris
catttggttggcccgaattgcctcc

SEQ ID NO: 67120 - DNA, 25 bp, Canis familiaris
catcttgtgttgggactcttccctc

SEQ ID NO: 67121 - DNA, 25 bp, Canis familiaris
catcttgttttggcattcttctcct

SEQ ID NO: 67122 - DNA, 25 bp, Canis familiaris
catcacctctgtttcaattttttcc

SEQ ID NO: 67123 - DNA, 25 bp, Canis familiaris
catcagccttgtttcagtttgcaga

SEQ ID NO: 67124 - DNA, 25 bp, Canis familiaris
cataccatatggggcagctacacag

SEQ ID NO: 67125 - DNA, 25 bp, Canis familiaris
catagctccgtggacatgaaccgcc

SEQ ID NO: 67126 - DNA, 25 bp, Canis familiaris
cataccataggctaaaggcggcact

SEQ ID NO: 67127 - DNA, 25 bp, Canis familiaris
catttgcagtggcaaagtggagatt

SEQ ID NO: 67128 - DNA, 25 bp, Canis familiaris
catttgcgctccaacaagatgaaag

SEQ ID NO: 67129 - DNA, 25 bp, Canis familiaris
cattcatgctgtcccacaaatagtt

SEQ ID NO: 67130 - DNA, 25 bp, Canis familiaris
catatcatcttgcccacctaaaaat

SEQ ID NO: 67131 - DNA, 25 bp, Canis familiaris
cattcttgtgtccccattagaccaa

SEQ ID NO: 67132 - DNA, 25 bp, Canis familiaris
catcatttgggcccaatttgccgct

SEQ ID NO: 67133 - DNA, 25 bp, Canis familiaris
catcagggttgcctaatatacctgt

SEQ ID NO: 67134 - DNA, 25 bp, Canis familiaris
catcagtggctctgtaagaacccag

SEQ ID NO: 67135 - DNA, 25 bp, Canis familiaris
catcagctcctccctaaagagtata

SEQ ID NO: 67136 - DNA, 25 bp, Canis familiaris
catcatcctcttcctcaacaagaag

SEQ ID NO: 67137 - DNA, 25 bp, Canis familiaris
catcaccatatttccccagaggact

SEQ ID NO: 67138 - DNA, 25 bp, Canis familiaris
cataccatttgtgccctgggcgatg

SEQ ID NO: 67139 - DNA, 25 bp, Canis familiaris
catcaccctttggctggcaggggtg

SEQ ID NO: 67140 - DNA, 25 bp, Canis familiaris
catacccaagggatgtgctggagtg

SEQ ID NO: 67141 - DNA, 25 bp, Canis familiaris
cataccacaatgggtgatgtcagtc

SEQ ID NO: 67142 - DNA, 25 bp, Canis familiaris
cataaacgatgccgactggcgatgc

SEQ ID NO: 67143 - DNA, 25 bp, Canis familiaris
catatcaacggcctggggcagctca

SEQ ID NO: 67144 - DNA, 25 bp, Canis familiaris
catcatcagcgcgcaagagggcaga

SEQ ID NO: 67145 - DNA, 25 bp, Canis familiaris
catcatctcctgtcaaagagccaag

SEQ ID NO: 67146 - DNA, 25 bp, Canis familiaris
catcatccttcaaaatatagcacag

SEQ ID NO: 67147 - DNA, 25 bp, Canis familiaris
catcatcctatcattcattccataa

SEQ ID NO: 67148 - DNA, 25 bp, Canis familiaris
ctacacgtagtttctccaacagggg

SEQ ID NO: 67149 - DNA, 25 bp, Canis familiaris
ctacacgggttctgtacaggctggg

SEQ ID NO: 67150 - DNA, 25 bp, Canis familiaris
cttcttggaaactttacttgtggtg

SEQ ID NO: 67151 - DNA, 25 bp, Canis familiaris
cttctgggaaccttacggattctgg

SEQ ID NO: 67152 - DNA, 25 bp, Canis familiaris
cttggtggagacattagccagtgtt

SEQ ID NO: 67153 - DNA, 25 bp, Canis familiaris
cattggaggtggctttccatcttcc

SEQ ID NO: 67154 - DNA, 25 bp, Canis familiaris
cattttgaagggaataggcacctcc

SEQ ID NO: 67155 - DNA, 25 bp, Canis familiaris
catttcctagagtggggagcctccc

SEQ ID NO: 67156 - DNA, 25 bp, Canis familiaris
cgttccaaggccctgggcagtgacc

SEQ ID NO: 67157 - DNA, 25 bp, Canis familiaris
cttggaccggcgcaagacggaccag

SEQ ID NO: 67158 - DNA, 25 bp, Canis familiaris
cttctcggggctgaaggggcccgat

SEQ ID NO: 67159 - DNA, 25 bp, Canis familiaris
cttccaagggccataggcgacccag

SEQ ID NO: 67160 - DNA, 25 bp, Canis familiaris
cttaaggggcccaggcatgtgccag

SEQ ID NO: 67161 - DNA, 25 bp, Canis familiaris
cattaatgtggccaccatggtggtc

SEQ ID NO: 67162 - DNA, 25 bp, Canis familiaris
catcagaagtaccccggtgggctgc

SEQ ID NO: 67163 - DNA, 25 bp, Canis familiaris
cataaaagacacccgtgctcttctc

SEQ ID NO: 67164 - DNA, 25 bp, Canis familiaris
catagaaaagcacacctctctctgt

SEQ ID NO: 67165 - DNA, 25 bp, Canis familiaris
catatagaagaccaacctttatctg

SEQ ID NO: 67166 - DNA, 25 bp, Canis familiaris
catatataaattgtcttgctgtttt

SEQ ID NO: 67167 - DNA, 25 bp, Canis familiaris
catattataaatctttttcttctca

SEQ ID NO: 67168 - DNA, 25 bp, Canis familiaris
catttcattgttctctgttatattt

SEQ ID NO: 67169 - DNA, 25 bp, Canis familiaris
catttcttgtctatggagtgtaatt

SEQ ID NO: 67170 - DNA, 25 bp, Canis familiaris
catatatcttgattactgtcagtaa

SEQ ID NO: 67171 - DNA, 25 bp, Canis familiaris
catacatcagtattcatcttcgaaa

SEQ ID NO: 67172 - DNA, 25 bp, Canis familiaris
cataacatgccaacccctgaatgat

SEQ ID NO: 67173 - DNA, 25 bp, Canis familiaris
catacagcttgtgccacgtgacgaa

SEQ ID NO: 67174 - DNA, 25 bp, Canis familiaris
catagagaatgtgaccggaccggat

SEQ ID NO: 67175 - DNA, 25 bp, Canis familiaris
catagaaatcaatttataaccggat

SEQ ID NO: 67176 - DNA, 25 bp, Canis familiaris
cattaactcacatttatacagccga

SEQ ID NO: 67177 - DNA, 25 bp, Canis familiaris
cttaacctactttttgctgcagacc

SEQ ID NO: 67178 - DNA, 25 bp, Canis familiaris
cttaaaggactcacaacgcccatgc

SEQ ID NO: 67179 - DNA, 25 bp, Canis familiaris
cattaacaggacaccaacacccaac

SEQ ID NO: 67180 - DNA, 25 bp, Canis familiaris
cattaccaggaacccatggacgccc

SEQ ID NO: 67181 - DNA, 25 bp, Canis familiaris
cattctccatgacacctcgagactg

SEQ ID NO: 67182 - DNA, 25 bp, Canis familiaris
cattctagctgcatgacctcaagga

SEQ ID NO: 67183 - DNA, 25 bp, Canis familiaris
catttccatagggcaccagcgtgac

SEQ ID NO: 67184 - DNA, 25 bp, Canis familiaris
cattctgtcaagacagcccgcttgc

SEQ ID NO: 67185 - DNA, 25 bp, Canis familiaris
catttgtcgagccctaagattcacc

SEQ ID NO: 67186 - DNA, 25 bp, Canis familiaris
catttgttgactcccaacataatca

SEQ ID NO: 67187 - DNA, 25 bp, Canis familiaris
cattatgtcattcgtccaacttgaa

SEQ ID NO: 67188 - DNA, 25 bp, Canis familiaris
catattctattctgtcaagtactga

SEQ ID NO: 67189 - DNA, 25 bp, Canis familiaris
catactctgttcactagttactgcg

SEQ ID NO: 67190 - DNA, 25 bp, Canis familiaris
catagctttccatgctagtctaccc

SEQ ID NO: 67191 - DNA, 25 bp, Canis familiaris
catatgcttgtctcaaagattaagc

SEQ ID NO: 67192 - DNA, 25 bp, Canis familiaris
catagctcattataatagataccag

SEQ ID NO: 67193 - DNA, 25 bp, Canis familiaris
cataccatatacttctccataacag

SEQ ID NO: 67194 - DNA, 25 bp, Canis familiaris
catagccaaacttcctagacacacc

SEQ ID NO: 67195 - DNA, 25 bp, Canis familiaris
catatgagctactttgcctatacca

SEQ ID NO: 67196 - DNA, 25 bp, Canis familiaris
catagagcattcctgttgcgttctc

SEQ ID NO: 67197 - DNA, 25 bp, Canis familiaris
cataggcatctgcaaggtcttctcc

SEQ ID NO: 67198 - DNA, 25 bp, Canis familiaris
cataccatccagaaggacgtccact

SEQ ID NO: 67199 - DNA, 25 bp, Canis familiaris
cattcaactcagagggagcccctca

SEQ ID NO: 67200 - DNA, 25 bp, Canis familiaris
cattcaccacagaggtactacctta

SEQ ID NO: 67201 - DNA, 25 bp, Canis familiaris
cattatctctaaaaacctatcccta

SEQ ID NO: 67202 - DNA, 25 bp, Canis familiaris
cattattttctatactttgccagtt

SEQ ID NO: 67203 - DNA, 25 bp, Canis familiaris
cttgattggacttaaccctctatta

SEQ ID NO: 67204 - DNA, 25 bp, Canis familiaris
cttgtgacttcttgaacctcttttc

SEQ ID NO: 67205 - DNA, 25 bp, Canis familiaris
cttgggttattgaaccatccttagt

SEQ ID NO: 67206 - DNA, 25 bp, Canis familiaris
cttgggtttttccacacaattggat

SEQ ID NO: 67207 - DNA, 25 bp, Canis familiaris
gttgaggtgtgtcacggaaccgttg

SEQ ID NO: 67208 - DNA, 25 bp, Canis familiaris
cttggagtagtggactgggaccagt

SEQ ID NO: 67209 - DNA, 25 bp, Canis familiaris
cttgggtaatgttcctggccaggga

SEQ ID NO: 67210 - DNA, 25 bp, Canis familiaris
cttggaccagtgtgtctggccagag

SEQ ID NO: 67211 - DNA, 25 bp, Canis familiaris
cattaaccagggctctgcccaaggc

SEQ ID NO: 67212 - DNA, 25 bp, Canis familiaris
cttgaaccggggtctccaagatcac

SEQ ID NO: 67213 - DNA, 25 bp, Canis familiaris
catagacaccaggaggaccaccgaa

SEQ ID NO: 67214 - DNA, 25 bp, Canis familiaris
catagacatccggaagctcctgcag

SEQ ID NO: 67215 - DNA, 25 bp, Canis familiaris
catatgataccccggtgcctgggta

SEQ ID NO: 67216 - DNA, 25 bp, Canis familiaris
catagagactcccagttcagctgtc

SEQ ID NO: 67217 - DNA, 25 bp, Canis familiaris
catatgtggtcttcgttcatcgtgc

SEQ ID NO: 67218 - DNA, 25 bp, Canis familiaris
catttgtctgttcgttcacggtttt

SEQ ID NO: 67219 - DNA, 25 bp, Canis familiaris
catttctttatatttccgtttgtgt

SEQ ID NO: 67220 - DNA, 25 bp, Canis familiaris
catactggttcatgtttcctttgtt

SEQ ID NO: 67221 - DNA, 25 bp, Canis familiaris
catagcactttcagtattccttctc

SEQ ID NO: 67222 - DNA, 25 bp, Canis familiaris
cataggttgatgcgtcaggtcctcc

SEQ ID NO: 67223 - DNA, 25 bp, Canis familiaris
catacctgtgtggagtcagcttccc

SEQ ID NO: 67224 - DNA, 25 bp, Canis familiaris
catacagtggttttactttgcccgg

SEQ ID NO: 67225 - DNA, 25 bp, Canis familiaris
catacagtggttttactttgcccgg

SEQ ID NO: 67226 - DNA, 25 bp, Canis familiaris
catacgtggcttgcttgtattcctc

SEQ ID NO: 67227 - DNA, 25 bp, Canis familiaris
catttgggcttggcattggcactca

SEQ ID NO: 67228 - DNA, 25 bp, Canis familiaris
catttgctgatgctgctgtggaacc

SEQ ID NO: 67229 - DNA, 25 bp, Canis familiaris
cattcgggacatatggatacgccct

SEQ ID NO: 67230 - DNA, 25 bp, Canis familiaris
cattcagggactaggtctccagctc

SEQ ID NO: 67231 - DNA, 25 bp, Canis familiaris
cattcagagatccttgtttgcacag

SEQ ID NO: 67232 - DNA, 25 bp, Canis familiaris
catttgactcgtggtttcagctcag

SEQ ID NO: 67233 - DNA, 25 bp, Canis familiaris
cattagactcctgatgatcatctta

SEQ ID NO: 67234 - DNA, 25 bp, Canis familiaris
cattagcggtcttagtcatcctagc

SEQ ID NO: 67235 - DNA, 25 bp, Canis familiaris
cattgcagcggcatttggtcgggca

SEQ ID NO: 67236 - DNA, 25 bp, Canis familiaris
cattgcagaactttggccttttgaa

SEQ ID NO: 67237 - DNA, 25 bp, Canis familiaris
cattgcagatactaacccttggtgg

SEQ ID NO: 67238 - DNA, 25 bp, Canis familiaris
cattcctttatgggccttactggct

SEQ ID NO: 67239 - DNA, 25 bp, Canis familiaris
catttggaaatgtggctaactagat

SEQ ID NO: 67240 - DNA, 25 bp, Canis familiaris
cgtttgaatcttacgtcagaccgat

SEQ ID NO: 67241 - DNA, 25 bp, Canis familiaris
ctttgtaactcatcgaagcccagct

SEQ ID NO: 67242 - DNA, 25 bp, Canis familiaris
cattaaacctaagtaccccatgcct

SEQ ID NO: 67243 - DNA, 25 bp, Canis familiaris
cttaacatcagtatttaccccctct

SEQ ID NO: 67244 - DNA, 25 bp, Canis familiaris
catatcatggatttttttcccccct

SEQ ID NO: 67245 - DNA, 25 bp, Canis familiaris
catttgaaagattgttaccagccca

SEQ ID NO: 67246 - DNA, 25 bp, Canis familiaris
cattgtacaggagggtatgccgcat

SEQ ID NO: 67247 - DNA, 25 bp, Canis familiaris
cattctccacgaggcgacaacacag

SEQ ID NO: 67248 - DNA, 25 bp, Canis familiaris
catttgccacgggctacatctttga

SEQ ID NO: 67249 - DNA, 25 bp, Canis familiaris
catttgacagcacctgataacttgg

SEQ ID NO: 67250 - DNA, 25 bp, Canis familiaris
catttgaggcgcggggccaggtgga

SEQ ID NO: 67251 - DNA, 25 bp, Canis familiaris
catttttcagggcaagcagcttgga

SEQ ID NO: 67252 - DNA, 25 bp, Canis familiaris
catttcctcattccacaaacttgga

SEQ ID NO: 67253 - DNA, 25 bp, Canis familiaris
catttcctaccccaattcttatgaa

SEQ ID NO: 67254 - DNA, 25 bp, Canis familiaris
cttggaccacctgagaccttataca

SEQ ID NO: 67255 - DNA, 25 bp, Canis familiaris
cttgttttcccagggtcttcaacag

SEQ ID NO: 67256 - DNA, 25 bp, Canis familiaris
cattttttcgcctattactgtaacg

SEQ ID NO: 67257 - DNA, 25 bp, Canis familiaris
cattttctacccaagaacatttcac

SEQ ID NO: 67258 - DNA, 25 bp, Canis familiaris
cattgtcactaactctagaaccccc

SEQ ID NO: 67259 - DNA, 25 bp, Canis familiaris
catatggcactgaattcttaaccta

SEQ ID NO: 67260 - DNA, 25 bp, Canis familiaris
cataccctttatttaacaatccttg

SEQ ID NO: 67261 - DNA, 25 bp, Canis familiaris
ctttccttcttctgggaaccttgat

SEQ ID NO: 67262 - DNA, 25 bp, Canis familiaris
catttgcacgttttcgggcaacctt

SEQ ID NO: 67263 - DNA, 25 bp, Canis familiaris
catatctcggttatacgccaactct

SEQ ID NO: 67264 - DNA, 25 bp, Canis familiaris
cttacaggtctgacaccctaatgcc

SEQ ID NO: 67265 - DNA, 25 bp, Canis familiaris
cattcgacgttgacccgaaatgcct

SEQ ID NO: 67266 - DNA, 25 bp, Canis familiaris
catttcctgttgaccaccattagtc

SEQ ID NO: 67267 - DNA, 25 bp, Canis familiaris
catttgctccaagccaggcactatg

SEQ ID NO: 67268 - DNA, 25 bp, Canis familiaris
catttgccaaatcggcggcagctcc

SEQ ID NO: 67269 - DNA, 25 bp, Canis familiaris
cattggctggaacgactggatcatc

SEQ ID NO: 67270 - DNA, 25 bp, Canis familiaris
cattaccgaagcccttatcactaag

SEQ ID NO: 67271 - DNA, 25 bp, Canis familiaris
cataatcccaacacatagaattgaa

SEQ ID NO: 67272 - DNA, 25 bp, Canis familiaris
cattaccccagctgcatgaaaaaaa

SEQ ID NO: 67273 - DNA, 25 bp, Canis familiaris
cattacccgctgggctggagaacat

SEQ ID NO: 67274 - DNA, 25 bp, Canis familiaris
cttgagggcctgggccagagccagc

SEQ ID NO: 67275 - DNA, 25 bp, Canis familiaris
cttggagtcctgggatcgagttctg

SEQ ID NO: 67276 - DNA, 25 bp, Canis familiaris
ctagtgtatcatatggcccagttac

SEQ ID NO: 67277 - DNA, 25 bp, Canis familiaris
ctagtctatgctggggccacaggat

SEQ ID NO: 67278 - DNA, 25 bp, Canis familiaris
cttgtgctgtgggaggccagggtgt

SEQ ID NO: 67279 - DNA, 25 bp, Canis familiaris
catttctgggaagccagggcctcca

SEQ ID NO: 67280 - DNA, 25 bp, Canis familiaris
catttctagagggcccgaggcttct

SEQ ID NO: 67281 - DNA, 25 bp, Canis familiaris
cataggtaaggcttcctgggccttc

SEQ ID NO: 67282 - DNA, 25 bp, Canis familiaris
catagtggaatgccaccacggcacc

SEQ ID NO: 67283 - DNA, 25 bp, Canis familiaris
cataggtaacgtcactggcagcaac

SEQ ID NO: 67284 - DNA, 25 bp, Canis familiaris
cttggtgtgcagctgaactgggccg

SEQ ID NO: 67285 - DNA, 25 bp, Canis familiaris
cttgggtcgcaatacatgtactaca

SEQ ID NO: 67286 - DNA, 25 bp, Canis familiaris
ctttgggccccaatagtattccagt

SEQ ID NO: 67287 - DNA, 25 bp, Canis familiaris
cttgttgtccccatgttttagatgt

SEQ ID NO: 67288 - DNA, 25 bp, Canis familiaris
cattttgtcatctgagagttcttaa

SEQ ID NO: 67289 - DNA, 25 bp, Canis familiaris
cattattgccctttagaacttaaat

SEQ ID NO: 67290 - DNA, 25 bp, Canis familiaris
cattattcctctgtaacccattaga

SEQ ID NO: 67291 - DNA, 25 bp, Canis familiaris
cattattcctctttaatcccattat

SEQ ID NO: 67292 - DNA, 25 bp, Canis familiaris
catttgtcctatgtggtttctccat

SEQ ID NO: 67293 - DNA, 25 bp, Canis familiaris
catttctcctgtttgttcattctag

SEQ ID NO: 67294 - DNA, 25 bp, Canis familiaris
cattttcttctctatggacattcca

SEQ ID NO: 67295 - DNA, 25 bp, Canis familiaris
cattaactgtcccagtgacctcatc

SEQ ID NO: 67296 - DNA, 25 bp, Canis familiaris
catttgagcttgccaaggccactcg

SEQ ID NO: 67297 - DNA, 25 bp, Canis familiaris
catttgtgcaggccagaggcacccg

SEQ ID NO: 67298 - DNA, 25 bp, Canis familiaris
catatggtagctccaatccatgccc

SEQ ID NO: 67299 - DNA, 25 bp, Canis familiaris
cataggatgattcatctcctcccgc

SEQ ID NO: 67300 - DNA, 25 bp, Canis familiaris
catactcagatacatgcatgcacac

SEQ ID NO: 67301 - DNA, 25 bp, Canis familiaris
catacgagtcgctttgacactttgt

SEQ ID NO: 67302 - DNA, 25 bp, Canis familiaris
catacattctggatatacagtcttt

SEQ ID NO: 67303 - DNA, 25 bp, Canis familiaris
cattttcattatccattcgtctgtt

SEQ ID NO: 67304 - DNA, 25 bp, Canis familiaris
catttaattttgatcctgctctctc

SEQ ID NO: 67305 - DNA, 25 bp, Canis familiaris
catttttcttttccagtttctcaag

SEQ ID NO: 67306 - DNA, 25 bp, Canis familiaris
cattttgcttctatcccattgttaa

SEQ ID NO: 67307 - DNA, 25 bp, Canis familiaris
cattttgcctgttttcctgttcaaa

SEQ ID NO: 67308 - DNA, 25 bp, Canis familiaris
cattcccctattgttttccataata

SEQ ID NO: 67309 - DNA, 25 bp, Canis familiaris
cattactccctttttttggcattgt

SEQ ID NO: 67310 - DNA, 25 bp, Canis familiaris
cataaagccgtttattcttccttgt

SEQ ID NO: 67311 - DNA, 25 bp, Canis familiaris
catacacacacacttttttactttt

SEQ ID NO: 67312 - DNA, 25 bp, Canis familiaris
catacacacacgtcactttttcttt

SEQ ID NO: 67313 - DNA, 25 bp, Canis familiaris
catacacacctggctttccttcttt

SEQ ID NO: 67314 - DNA, 25 bp, Canis familiaris
cattactggatgccgtttcttcctt

SEQ ID NO: 67315 - DNA, 25 bp, Canis familiaris
catttgcttcatccattcttttaca

SEQ ID NO: 67316 - DNA, 25 bp, Canis familiaris
cattgtttccaccatgcacttaaaa

SEQ ID NO: 67317 - DNA, 25 bp, Canis familiaris
cttattatcacacaccttaaaacac

SEQ ID NO: 67318 - DNA, 25 bp, Canis familiaris
cttatccccaggtgactaaacagcc

SEQ ID NO: 67319 - DNA, 25 bp, Canis familiaris
cattctcggtagcttgtctaaaaga

SEQ ID NO: 67320 - DNA, 25 bp, Canis familiaris
gttgtcggaagggttccaccaagca

SEQ ID NO: 67321 - DNA, 25 bp, Canis familiaris
cttgggagcaagatttcccccagca

SEQ ID NO: 67322 - DNA, 25 bp, Canis familiaris
ctatgggaccaaccttgtccaccag

SEQ ID NO: 67323 - DNA, 25 bp, Canis familiaris
catagggagaggcccttgtccttgc

SEQ ID NO: 67324 - DNA, 25 bp, Canis familiaris
catatgttgaaggccctagcctccc

SEQ ID NO: 67325 - DNA, 25 bp, Canis familiaris
catttagaagtggcctctactccaa

SEQ ID NO: 67326 - DNA, 25 bp, Canis familiaris
cattaagaagcctgctgctcaaccc

SEQ ID NO: 67327 - DNA, 25 bp, Canis familiaris
cataaagaccagccctgtacacctg

SEQ ID NO: 67328 - DNA, 25 bp, Canis familiaris
cataaaagcagttcctgtctccctt

SEQ ID NO: 67329 - DNA, 25 bp, Canis familiaris
cataaagagcagacccttccaaaaa

SEQ ID NO: 67330 - DNA, 25 bp, Canis familiaris
tcaaaatggggactccttaacaaat

SEQ ID NO: 67331 - DNA, 25 bp, Canis familiaris
catagttggggactcctttgcccta

SEQ ID NO: 67332 - DNA, 25 bp, Canis familiaris
catttggaggtttgcgctttgtctg

SEQ ID NO: 67333 - DNA, 25 bp, Canis familiaris
cttctgaaggtcacctgcctttgag

SEQ ID NO: 67334 - DNA, 25 bp, Canis familiaris
cttgggcaagtcacttcacctgtga

SEQ ID NO: 67335 - DNA, 25 bp, Canis familiaris
cttcctagaggcagtacagactatt

SEQ ID NO: 67336 - DNA, 25 bp, Canis familiaris
cttcccagtgtctgaaaggtaattg

SEQ ID NO: 67337 - DNA, 25 bp, Canis familiaris
cattccacagttgtaaatgctagtt

SEQ ID NO: 67338 - DNA, 25 bp, Canis familiaris
cattccaccttgggaacaccgggtg

SEQ ID NO: 67339 - DNA, 25 bp, Canis familiaris
gattccaccaatataaattcccggt

SEQ ID NO: 67340 - DNA, 25 bp, Canis familiaris
catttctcagaaactaaaataccgg

SEQ ID NO: 67341 - DNA, 25 bp, Canis familiaris
catttgcacaacactttaaaaaggc

SEQ ID NO: 67342 - DNA, 25 bp, Canis familiaris
cattggaaaccattttgaacacaag

SEQ ID NO: 67343 - DNA, 25 bp, Canis familiaris
catttgggcccaatttgccgctaac

SEQ ID NO: 67344 - DNA, 25 bp, Canis familiaris
cattgtgggttcttcgtgcccaaga

SEQ ID NO: 67345 - DNA, 25 bp, Canis familiaris
catttgccgtcatttctgggagaag

SEQ ID NO: 67346 - DNA, 25 bp, Canis familiaris
catttgctttcatttccaaccataa

SEQ ID NO: 67347 - DNA, 25 bp, Canis familiaris
cattgttttagctccaatccaagca

SEQ ID NO: 67348 - DNA, 25 bp, Canis familiaris
cattgtcttaaggtcacagttctcc

SEQ ID NO: 67349 - DNA, 25 bp, Canis familiaris
catttggctgtaggtcctgttcctg

SEQ ID NO: 67350 - DNA, 25 bp, Canis familiaris
cattaaggtaagttcttcttcttct

SEQ ID NO: 67351 - DNA, 25 bp, Canis familiaris
cattaagacttggtcctttgcctcc

SEQ ID NO: 67352 - DNA, 25 bp, Canis familiaris
cattcaagccttcattctcttgcac

SEQ ID NO: 67353 - DNA, 25 bp, Canis familiaris
cattcaacttgccgcaatgccttac

SEQ ID NO: 67354 - DNA, 25 bp, Canis familiaris
catatcaatcttcccaagtctggaa

SEQ ID NO: 67355 - DNA, 25 bp, Canis familiaris
cattcttccccatagtctgaaaggt

SEQ ID NO: 67356 - DNA, 25 bp, Canis familiaris
cattttctaccatcggggcagggat

SEQ ID NO: 67357 - DNA, 25 bp, Canis familiaris
catttcccccctaaggtggggcatg

SEQ ID NO: 67358 - DNA, 25 bp, Canis familiaris
cttgctagggccctgggggtaggtg

SEQ ID NO: 67359 - DNA, 25 bp, Canis familiaris
cttgtacgccaatgggcggtaggcg

SEQ ID NO: 67360 - DNA, 25 bp, Canis familiaris
cattcttccgaatggggttgtacgg

SEQ ID NO: 67361 - DNA, 25 bp, Canis familiaris
catacttcaagttcagggacgtcat

SEQ ID NO: 67362 - DNA, 25 bp, Canis familiaris
catacctgccttttggaactggacc

SEQ ID NO: 67363 - DNA, 25 bp, Canis familiaris
catactccactgttgtgtagactgg

SEQ ID NO: 67364 - DNA, 25 bp, Canis familiaris
catataccagcgatgacgagacgcg

SEQ ID NO: 67365 - DNA, 25 bp, Canis familiaris
catatctccaggagactcaccccag

SEQ ID NO: 67366 - DNA, 25 bp, Canis familiaris
catagctgcccattagaaacccaag

SEQ ID NO: 67367 - DNA, 25 bp, Canis familiaris
ctaggcgtagtattaacccgaggcg

SEQ ID NO: 67368 - DNA, 25 bp, Canis familiaris
ctatgttgtagttggggcccagaga

SEQ ID NO: 67369 - DNA, 25 bp, Canis familiaris
cttgtgctgatacatagcggcctca

SEQ ID NO: 67370 - DNA, 25 bp, Canis familiaris
cattgtcatgtacatggcccccaaa

SEQ ID NO: 67371 - DNA, 25 bp, Canis familiaris
catttcatagcataccccttcataa

SEQ ID NO: 67372 - DNA, 25 bp, Canis familiaris
catttcgacaaaccagcactgtaat

SEQ ID NO: 67373 - DNA, 25 bp, Canis familiaris
catttcagaaatcaagcctgtcaca

SEQ ID NO: 67374 - DNA, 25 bp, Canis familiaris
cattccaaatatgagatgcattgtt

SEQ ID NO: 67375 - DNA, 25 bp, Canis familiaris
caccccatgcatcacagatttactt

SEQ ID NO: 67376 - DNA, 25 bp, Canis familiaris
cattcctagttattttccctatgaa

SEQ ID NO: 67377 - DNA, 25 bp, Canis familiaris
cattcctaattttgtatctgaccaa

SEQ ID NO: 67378 - DNA, 25 bp, Canis familiaris
cttcgtgacattccaatttgactcc

SEQ ID NO: 67379 - DNA, 25 bp, Canis familiaris
cttgggtattgattttagagtcgca

SEQ ID NO: 67380 - DNA, 25 bp, Canis familiaris
ctctggggtgggtgtagatggcgcc

SEQ ID NO: 67381 - DNA, 25 bp, Canis familiaris
cttggccgtgggtcagcaagggtcc

SEQ ID NO: 67382 - DNA, 25 bp, Canis familiaris
cttgagtcgtcttagaaagtggtac

SEQ ID NO: 67383 - DNA, 25 bp, Canis familiaris
cattaggccctaattaaggtgaaca

SEQ ID NO: 67384 - DNA, 25 bp, Canis familiaris
cattaggccagcaatgcttgtagtg

SEQ ID NO: 67385 - DNA, 25 bp, Canis familiaris
catttggcctgtcctatgcaagata

SEQ ID NO: 67386 - DNA, 25 bp, Canis familiaris
cattgatggttgttccagcagcaga

SEQ ID NO: 67387 - DNA, 25 bp, Canis familiaris
cattaggtgatgtccgggtcctttc

SEQ ID NO: 67388 - DNA, 25 bp, Canis familiaris
cattatcctgataccgagaccgaat

SEQ ID NO: 67389 - DNA, 25 bp, Canis familiaris
catataccagcatcacataaccata

SEQ ID NO: 67390 - DNA, 25 bp, Canis familiaris
catttatcagatcaaaaccaacccg

SEQ ID NO: 67391 - DNA, 25 bp, Canis familiaris
cattaatcagattcaaaacccgacc

SEQ ID NO: 67392 - DNA, 25 bp, Canis familiaris
cattccacgtacagatagtccgacc

SEQ ID NO: 67393 - DNA, 25 bp, Canis familiaris
catttactgtgagcttttgcctgcc

SEQ ID NO: 67394 - DNA, 25 bp, Canis familiaris
catatttcagttgttggcgctcttc

SEQ ID NO: 67395 - DNA, 25 bp, Canis familiaris
cattgctgtagggctttcggtttcc

SEQ ID NO: 67396 - DNA, 25 bp, Canis familiaris
cttcgtggggctactccgaagtccg

SEQ ID NO: 67397 - DNA, 25 bp, Canis familiaris
cattaggggttgatcgggagacggt

SEQ ID NO: 67398 - DNA, 25 bp, Canis familiaris
cattgggggttggagctgggaaagc

SEQ ID NO: 67399 - DNA, 25 bp, Canis familiaris
cttgtagggggccagcttgaacaga

SEQ ID NO: 67400 - DNA, 25 bp, Canis familiaris
catttggtcgggcagccgcacacta

SEQ ID NO: 67401 - DNA, 25 bp, Canis familiaris
cattcttgttctgaagctgccacac

SEQ ID NO: 67402 - DNA, 25 bp, Canis familiaris
cattttcattatccagattcacaca

SEQ ID NO: 67403 - DNA, 25 bp, Canis familiaris
catatttcttgaatggcccacatca

SEQ ID NO: 67404 - DNA, 25 bp, Canis familiaris
catatagttagcatggtgcccagaa

SEQ ID NO: 67405 - DNA, 25 bp, Canis familiaris
catatatgtgcgtggaatgcccagc

SEQ ID NO: 67406 - DNA, 25 bp, Canis familiaris
cattcatgttgtaagagtcccagga

SEQ ID NO: 67407 - DNA, 25 bp, Canis familiaris
cattatgtgttgagagcccttgccc

SEQ ID NO: 67408 - DNA, 25 bp, Canis familiaris
cattaatgctggaggcccaccaact

SEQ ID NO: 67409 - DNA, 25 bp, Canis familiaris
cattaattgcgttgcgctcactgcc

SEQ ID NO: 67410 - DNA, 25 bp, Canis familiaris
cattccactgtctagcagtcaggcc

SEQ ID NO: 67411 - DNA, 25 bp, Canis familiaris
cattgtactgacaacctcagctggc

SEQ ID NO: 67412 - DNA, 25 bp, Canis familiaris
catttcaatgacatcttctctggcc

SEQ ID NO: 67413 - DNA, 25 bp, Canis familiaris
catattattgtgctcttctctggcc

SEQ ID NO: 67414 - DNA, 25 bp, Canis familiaris
catagtatgtttatttgctagcata

SEQ ID NO: 67415 - DNA, 25 bp, Canis familiaris
catttatttttctttcatgtgcata

SEQ ID NO: 67416 - DNA, 25 bp, Canis familiaris
cattattctttgtacattttcatta

SEQ ID NO: 67417 - DNA, 25 bp, Canis familiaris
cattttttcatgtgcttatttatca

SEQ ID NO: 67418 - DNA, 25 bp, Canis familiaris
cattttgcagaattcgttttttgaa

SEQ ID NO: 67419 - DNA, 25 bp, Canis familiaris
cattggggagacgtgcttttttgga

SEQ ID NO: 67420 - DNA, 25 bp, Canis familiaris
cattggacggatgtgagggtttggc

SEQ ID NO: 67421 - DNA, 25 bp, Canis familiaris
cattccacgaatgtgaccggtctct

SEQ ID NO: 67422 - DNA, 25 bp, Canis familiaris
cattccacgaaaggtctctttccca

SEQ ID NO: 67423 - DNA, 25 bp, Canis familiaris
cattaaagttctggtctctttccaa

SEQ ID NO: 67424 - DNA, 25 bp, Canis familiaris
catataacttgtcctgcactgcatt

SEQ ID NO: 67425 - DNA, 25 bp, Canis familiaris
catttcacgtgtccgcctaacggaa

SEQ ID NO: 67426 - DNA, 25 bp, Canis familiaris
cgttcacttggggcccgaaggtgag

SEQ ID NO: 67427 - DNA, 25 bp, Canis familiaris
ctttgacgggggccgggcagaagag

SEQ ID NO: 67428 - DNA, 25 bp, Canis familiaris
cattctactggggaccctggagaaa

SEQ ID NO: 67429 - DNA, 25 bp, Canis familiaris
cattaaaggaaactgcacattgcaa

SEQ ID NO: 67430 - DNA, 25 bp, Canis familiaris
cattcgtaaaacctctcacgaagga

SEQ ID NO: 67431 - DNA, 25 bp, Canis familiaris
cattcgtcaaatacagttcactcta

SEQ ID NO: 67432 - DNA, 25 bp, Canis familiaris
cttggacaaatggagctctactcat

SEQ ID NO: 67433 - DNA, 25 bp, Canis familiaris
cttgggaaatgtgctttctctgccc

SEQ ID NO: 67434 - DNA, 25 bp, Canis familiaris
cattggggattgacggtttgctacc

SEQ ID NO: 67435 - DNA, 25 bp, Canis familiaris
cttaggccgctgggactttgatacc

SEQ ID NO: 67436 - DNA, 25 bp, Canis familiaris
catatcggctcgcaaatctttgata

SEQ ID NO: 67437 - DNA, 25 bp, Canis familiaris
cattcggatcagcacatctgttatg

SEQ ID NO: 67438 - DNA, 25 bp, Canis familiaris
cattcgtattgcgccgctagaggtg

SEQ ID NO: 67439 - DNA, 25 bp, Canis familiaris
cttcgtgtaccctgtatcagggtgg

SEQ ID NO: 67440 - DNA, 25 bp, Canis familiaris
cattcttgaacaccatttatcgccg

SEQ ID NO: 67441 - DNA, 25 bp, Canis familiaris
catatttaacatctctcttggctct

SEQ ID NO: 67442 - DNA, 25 bp, Canis familiaris
catatattaacttttttctctgttt

SEQ ID NO: 67443 - DNA, 25 bp, Canis familiaris
cattaaatcagttatggttcctttg

SEQ ID NO: 67444 - DNA, 25 bp, Canis familiaris
cattaggccatttaggtgacactat

SEQ ID NO: 67445 - DNA, 25 bp, Canis familiaris
cattcgggcgattgggctccaaatt

SEQ ID NO: 67446 - DNA, 25 bp, Canis familiaris
ctcacgggtgaatgatctccaggaa

SEQ ID NO: 67447 - DNA, 25 bp, Canis familiaris
ctaccggtgaaaagtgacccaatga

SEQ ID NO: 67448 - DNA, 25 bp, Canis familiaris
catatctacctacaattgacccaaa

SEQ ID NO: 67449 - DNA, 25 bp, Canis familiaris
catttagcccagaagaggacccagg

SEQ ID NO: 67450 - DNA, 25 bp, Canis familiaris
cataccaaacaaaagaaggccaggg

SEQ ID NO: 67451 - DNA, 25 bp, Canis familiaris
cattgttaccaaaataacgccaact

SEQ ID NO: 67452 - DNA, 25 bp, Canis familiaris
cattgttacttacacaacccgacca

SEQ ID NO: 67453 - DNA, 25 bp, Canis familiaris
cattttccatctaatacaaccccac

SEQ ID NO: 67454 - DNA, 25 bp, Canis familiaris
catatttttcttgtaagccctggac

SEQ ID NO: 67455 - DNA, 25 bp, Canis familiaris
cattttttgcccatttcagccatgg

SEQ ID NO: 67456 - DNA, 25 bp, Canis familiaris
catttggtgtccatcatgttccctg

SEQ ID NO: 67457 - DNA, 25 bp, Canis familiaris
catttttctgtttatttccctgtcg

SEQ ID NO: 67458 - DNA, 25 bp, Canis familiaris
cattgacttggtattcttcctcttc

SEQ ID NO: 67459 - DNA, 25 bp, Canis familiaris
catagttagcatttttcttcctcca

SEQ ID NO: 67460 - DNA, 25 bp, Canis familiaris
catatgactaattttccctgcctga

SEQ ID NO: 67461 - DNA, 25 bp, Canis familiaris
cattaataagaaatcagccgtagct

SEQ ID NO: 67462 - DNA, 25 bp, Canis familiaris
cattgaaataaaaccacctgccctt

SEQ ID NO: 67463 - DNA, 25 bp, Canis familiaris
catttattaaaagtcagcctcccca

SEQ ID NO: 67464 - DNA, 25 bp, Canis familiaris
catttttgaacatttacctgcccat

SEQ ID NO: 67465 - DNA, 25 bp, Canis familiaris
catttgtcatgttcacttacctgct

SEQ ID NO: 67466 - DNA, 25 bp, Canis familiaris
cattttcattatgtctcacgcttcc

SEQ ID NO: 67467 - DNA, 25 bp, Canis familiaris
catttcctattttcgcattttcaat

SEQ ID NO: 67468 - DNA, 25 bp, Canis familiaris
cattggccctttaaggtttacatag

SEQ ID NO: 67469 - DNA, 25 bp, Canis familiaris
cattgtccccaaattatttaagtag

SEQ ID NO: 67470 - DNA, 25 bp, Canis familiaris
cattccaaataaaattctctttcta

SEQ ID NO: 67471 - DNA, 25 bp, Canis familiaris
catttcaaaagatacttctcctcca

SEQ ID NO: 67472 - DNA, 25 bp, Canis familiaris
catttcatcctaaaactttcttcct

SEQ ID NO: 67473 - DNA, 25 bp, Canis familiaris
catttacactatatttttccttctt

SEQ ID NO: 67474 - DNA, 25 bp, Canis familiaris
cattgaaaccaacctactttcttgc

SEQ ID NO: 67475 - DNA, 25 bp, Canis familiaris
cattgtacccaacctgttatttgga

SEQ ID NO: 67476 - DNA, 25 bp, Canis familiaris
cttgtggtgcacagattatctaatt

SEQ ID NO: 67477 - DNA, 25 bp, Canis familiaris
cattgtggtcacatttctgctggtg

SEQ ID NO: 67478 - DNA, 25 bp, Canis familiaris
cattggggtttatctctgtggcccg

SEQ ID NO: 67479 - DNA, 25 bp, Canis familiaris
cattcgagcctttcaaccatgggcc

SEQ ID NO: 67480 - DNA, 25 bp, Canis familiaris
catatgctccctttcaacacaggaa

SEQ ID NO: 67481 - DNA, 25 bp, Canis familiaris
catttgcctatctatgaacaagaat

SEQ ID NO: 67482 - DNA, 25 bp, Canis familiaris
cattgtccattctgtatatagctag

SEQ ID NO: 67483 - DNA, 25 bp, Canis familiaris
cattgaatcttgagtgatgtcagct

SEQ ID NO: 67484 - DNA, 25 bp, Canis familiaris
cattgtagcatgactcgctctgtgc

SEQ ID NO: 67485 - DNA, 25 bp, Canis familiaris
cattgatacagtccagtcccacaag

SEQ ID NO: 67486 - DNA, 25 bp, Canis familiaris
catatttccatgaagctttgacata

SEQ ID NO: 67487 - DNA, 25 bp, Canis familiaris
catttatctctccacgtatgcatct

SEQ ID NO: 67488 - DNA, 25 bp, Canis familiaris
catttattctctggcaggcaggcta

SEQ ID NO: 67489 - DNA, 25 bp, Canis familiaris
cattcttcctctggagggaagggtg

SEQ ID NO: 67490 - DNA, 25 bp, Canis familiaris
cattccttcaaggtgggaagggaga

SEQ ID NO: 67491 - DNA, 25 bp, Canis familiaris
cattcagcttcaaggctggtgaagt

SEQ ID NO: 67492 - DNA, 25 bp, Canis familiaris
cattagctgttcctctgtctgaaat

SEQ ID NO: 67493 - DNA, 25 bp, Canis familiaris
cttggctgttccctcagcagaagga

SEQ ID NO: 67494 - DNA, 25 bp, Canis familiaris
cttgggtgggcttcacgaaccacct

SEQ ID NO: 67495 - DNA, 25 bp, Canis familiaris
catatggagtcgttttaaacctcgt

SEQ ID NO: 67496 - DNA, 25 bp, Canis familiaris
cattgggacatgttgttccaccctt

SEQ ID NO: 67497 - DNA, 25 bp, Canis familiaris
cattcattgacattgtctctccatg

SEQ ID NO: 67498 - DNA, 25 bp, Canis familiaris
catatgctttcaagttcatgcctga

SEQ ID NO: 67499 - DNA, 25 bp, Canis familiaris
catatccccagactctgcacagata

SEQ ID NO: 67500 - DNA, 25 bp, Canis familiaris
cattctggcgagttcgacagaacaa

SEQ ID NO: 67501 - DNA, 25 bp, Canis familiaris
cattcgtccaacttgaaaacaaagg

SEQ ID NO: 67502 - DNA, 25 bp, Canis familiaris
cttggcctcttcttgggtacaaagg

SEQ ID NO: 67503 - DNA, 25 bp, Canis familiaris
cattggtccgtggggctgtaaccag

SEQ ID NO: 67504 - DNA, 25 bp, Canis familiaris
cttggaacatgtgtccctaacctgt

SEQ ID NO: 67505 - DNA, 25 bp, Canis familiaris
catagggtcaagcaacccaaccttt

SEQ ID NO: 67506 - DNA, 25 bp, Canis familiaris
catagggaagcacaggcaccaaccg

SEQ ID NO: 67507 - DNA, 25 bp, Canis familiaris
catatggggacatcggcccaagccc

SEQ ID NO: 67508 - DNA, 25 bp, Canis familiaris
cattggggctaaacccacaggccac

SEQ ID NO: 67509 - DNA, 25 bp, Canis familiaris
cattcgtggctgacatacagtccgt

SEQ ID NO: 67510 - DNA, 25 bp, Canis familiaris
catatccgggacacagatgcctttc

SEQ ID NO: 67511 - DNA, 25 bp, Canis familiaris
catatccggacacaggatgccgttc

SEQ ID NO: 67512 - DNA, 25 bp, Canis familiaris
cattcctttcagccatcgtcctttc

SEQ ID NO: 67513 - DNA, 25 bp, Canis familiaris
ctatcaaacttgcattccactatat

SEQ ID NO: 67514 - DNA, 25 bp, Canis familiaris
cattcagacaaccaacccagtaata

SEQ ID NO: 67515 - DNA, 25 bp, Canis familiaris
cattccataaggtcattccagttta

SEQ ID NO: 67516 - DNA, 25 bp, Canis familiaris
catttcccaggatatctcactttaa

SEQ ID NO: 67517 - DNA, 25 bp, Canis familiaris
catttcccgtgagcacccatgggaa

SEQ ID NO: 67518 - DNA, 25 bp, Canis familiaris
cattccctcgggaacgacaggaaca

SEQ ID NO: 67519 - DNA, 25 bp, Canis familiaris
catatccctttaatgcctccaggaa

SEQ ID NO: 67520 - DNA, 25 bp, Canis familiaris
cattcaccattctagatgccatttg

SEQ ID NO: 67521 - DNA, 25 bp, Canis familiaris
catatgctctcgaaagatccttttg

SEQ ID NO: 67522 - DNA, 25 bp, Canis familiaris
cattgtctgcactggctctttaatg

SEQ ID NO: 67523 - DNA, 25 bp, Canis familiaris
cattggcactaagcgctttgacagt

SEQ ID NO: 67524 - DNA, 25 bp, Canis familiaris
catatagctctcagggctgctttca

SEQ ID NO: 67525 - DNA, 25 bp, Canis familiaris
catatagtattgtggctgttaagca

SEQ ID NO: 67526 - DNA, 25 bp, Canis familiaris
cattaatatctgttgcctgaaaaga

SEQ ID NO: 67527 - DNA, 25 bp, Canis familiaris
catatgaagtgctgtcagacaaaca

SEQ ID NO: 67528 - DNA, 25 bp, Canis familiaris
cttgacatctagctcaacccaatgg

SEQ ID NO: 67529 - DNA, 25 bp, Canis familiaris
cttgacatttcaaaggctgccttgg

SEQ ID NO: 67530 - DNA, 25 bp, Canis familiaris
cattaaggacatggcgggcctgctg

SEQ ID NO: 67531 - DNA, 25 bp, Canis familiaris
cattgagacgctggagcagggcccg

SEQ ID NO: 67532 - DNA, 25 bp, Canis familiaris
cttgtcctgtcgccagtagaatctg

SEQ ID NO: 67533 - DNA, 25 bp, Canis familiaris
cattgctcgttggctagctaaatag

SEQ ID NO: 67534 - DNA, 25 bp, Canis familiaris
cattacatttctgactttgaatagg

SEQ ID NO: 67535 - DNA, 25 bp, Canis familiaris
catataaggtctgcctctgcgtgaa

SEQ ID NO: 67536 - DNA, 25 bp, Canis familiaris
cattagggcattttctcgtgtgaat

SEQ ID NO: 67537 - DNA, 25 bp, Canis familiaris
cttggcaggactacattccagtgaa

SEQ ID NO: 67538 - DNA, 25 bp, Canis familiaris
cattcagcaatgactaattcaacta

SEQ ID NO: 67539 - DNA, 25 bp, Canis familiaris
cattgccgatgagaaccagaccacc

SEQ ID NO: 67540 - DNA, 25 bp, Canis familiaris
cattcgctgccagcaattagcgcca

SEQ ID NO: 67541 - DNA, 25 bp, Canis familiaris
cattcctcacaccaacgtgggataa

SEQ ID NO: 67542 - DNA, 25 bp, Canis familiaris
cattcctgcccttaagccaaagaaa

SEQ ID NO: 67543 - DNA, 25 bp, Canis familiaris
cattcactgcttcagggctctaatc

SEQ ID NO: 67544 - DNA, 25 bp, Canis familiaris
cttggccatgtctagggctctaagt

SEQ ID NO: 67545 - DNA, 25 bp, Canis familiaris
cttcatcctggctgggttagtttca

SEQ ID NO: 67546 - DNA, 25 bp, Canis familiaris
catttctgggcctgtgtgtgtgttt

SEQ ID NO: 67547 - DNA, 25 bp, Canis familiaris
catttgtgggactcctttggttgcc

SEQ ID NO: 67548 - DNA, 25 bp, Canis familiaris
catttgtggagacccctgttagatt

SEQ ID NO: 67549 - DNA, 25 bp, Canis familiaris
catttgtggagacccgttcatcggg

SEQ ID NO: 67550 - DNA, 25 bp, Canis familiaris
cattcgatatgctaaccgttctcag

SEQ ID NO: 67551 - DNA, 25 bp, Canis familiaris
cggcagcatatgcagcccgtgctaa

SEQ ID NO: 67552 - DNA, 25 bp, Canis familiaris
cattgctgatgactcagccctgctt

SEQ ID NO: 67553 - DNA, 25 bp, Canis familiaris
cttggatcaattacctcttctactg

SEQ ID NO: 67554 - DNA, 25 bp, Canis familiaris
catttacctgtcatgtctcctacag

SEQ ID NO: 67555 - DNA, 25 bp, Canis familiaris
cattctgatagttcttgtctcctac

SEQ ID NO: 67556 - DNA, 25 bp, Canis familiaris
cattagattctagttggctccttta

SEQ ID NO: 67557 - DNA, 25 bp, Canis familiaris
cattcatgatgttacttgtgctggc

SEQ ID NO: 67558 - DNA, 25 bp, Canis familiaris
catttcatattgtctctttgagcat

SEQ ID NO: 67559 - DNA, 25 bp, Canis familiaris
catttgcaaggccctttggcatctc

SEQ ID NO: 67560 - DNA, 25 bp, Canis familiaris
catttgcaagcccctgcattacttg

SEQ ID NO: 67561 - DNA, 25 bp, Canis familiaris
cattccaatggcctccattccaatg

SEQ ID NO: 67562 - DNA, 25 bp, Canis familiaris
catatcccagctctgccatttattg

SEQ ID NO: 67563 - DNA, 25 bp, Canis familiaris
cattcggagtgcggtcatttgattc

SEQ ID NO: 67564 - DNA, 25 bp, Canis familiaris
cattctgggggacattgctgatgac

SEQ ID NO: 67565 - DNA, 25 bp, Canis familiaris
cattgtggatgggacacctcttggc

SEQ ID NO: 67566 - DNA, 25 bp, Canis familiaris
cttggtatgagagcctgccttgacg

SEQ ID NO: 67567 - DNA, 25 bp, Canis familiaris
cattgttgcaagaccctcctaacaa

SEQ ID NO: 67568 - DNA, 25 bp, Canis familiaris
catttcccaatgcccctggaataat

SEQ ID NO: 67569 - DNA, 25 bp, Canis familiaris
catttccttctggaccaccaataat

SEQ ID NO: 67570 - DNA, 25 bp, Canis familiaris
catatcacttttgcaacatcataaa

SEQ ID NO: 67571 - DNA, 25 bp, Canis familiaris
catatcgttctttccttgatagaga

SEQ ID NO: 67572 - DNA, 25 bp, Canis familiaris
catttttgctttcttgataggagat

SEQ ID NO: 67573 - DNA, 25 bp, Canis familiaris
catttttgtttgttattctctgccc

SEQ ID NO: 67574 - DNA, 25 bp, Canis familiaris
catatatcctctttttattgctttg

SEQ ID NO: 67575 - DNA, 25 bp, Canis familiaris
catatttcacatttttcaggttggg

SEQ ID NO: 67576 - DNA, 25 bp, Canis familiaris
cattttctctgcttttcagatatcg

SEQ ID NO: 67577 - DNA, 25 bp, Canis familiaris
catttgtatccaaggtgctgaatct

SEQ ID NO: 67578 - DNA, 25 bp, Canis familiaris
catttgtatacttgtgtgtgtctct

SEQ ID NO: 67579 - DNA, 25 bp, Canis familiaris
cattttaatttggctgtgagtcaca

SEQ ID NO: 67580 - DNA, 25 bp, Canis familiaris
catattatgatgcttcctggagttc

SEQ ID NO: 67581 - DNA, 25 bp, Canis familiaris
catattcatttgtatccaaggtgct

SEQ ID NO: 67582 - DNA, 25 bp, Canis familiaris
catattcatttgtatccaaggtgct

SEQ ID NO: 67583 - DNA, 25 bp, Canis familiaris
catttatctagttccaagctctctc

SEQ ID NO: 67584 - DNA, 25 bp, Canis familiaris
catttatcgaaatcataccattatt

SEQ ID NO: 67585 - DNA, 25 bp, Canis familiaris
cttgtactgggatcaagccatgatt

SEQ ID NO: 67586 - DNA, 25 bp, Canis familiaris
cattgtctcggcaggcagagctttt

SEQ ID NO: 67587 - DNA, 25 bp, Canis familiaris
cattgacaaggcgggccagctcacg

SEQ ID NO: 67588 - DNA, 25 bp, Canis familiaris
cattacagaagcggtccattccgta

SEQ ID NO: 67589 - DNA, 25 bp, Canis familiaris
catatactgatactgctgtgccacc

SEQ ID NO: 67590 - DNA, 25 bp, Canis familiaris
cattcagctgctgggtgtccattgc

SEQ ID NO: 67591 - DNA, 25 bp, Canis familiaris
cattgcactccggatgtgctgaccc

SEQ ID NO: 67592 - DNA, 25 bp, Canis familiaris
cattactcctgaatgactccactgt

SEQ ID NO: 67593 - DNA, 25 bp, Canis familiaris
cattcctctattaacacacctgatc

SEQ ID NO: 67594 - DNA, 25 bp, Canis familiaris
cattgcctttagaaaccttggtcgt

SEQ ID NO: 67595 - DNA, 25 bp, Canis familiaris
cattcaccttacagtctctttgttt

SEQ ID NO: 67596 - DNA, 25 bp, Canis familiaris
cattaccttaatcgttttgcatcat

SEQ ID NO: 67597 - DNA, 25 bp, Canis familiaris
cattcagatttcaccagctttacat

SEQ ID NO: 67598 - DNA, 25 bp, Canis familiaris
cattatgaatgtgcctctatctcta

SEQ ID NO: 67599 - DNA, 25 bp, Canis familiaris
cattcagagtgctgggtttctacga

SEQ ID NO: 67600 - DNA, 25 bp, Canis familiaris
cattcggggcagagttttcatcaga

SEQ ID NO: 67601 - DNA, 25 bp, Canis familiaris
cttggtaagaagctaggtatgcaga

SEQ ID NO: 67602 - DNA, 25 bp, Canis familiaris
cttgtctcaaagattaagccatgca

SEQ ID NO: 67603 - DNA, 25 bp, Canis familiaris
cttatctagaatataacaccgcttc

SEQ ID NO: 67604 - DNA, 25 bp, Canis familiaris
cattctgggaaataacctcgcagtc

SEQ ID NO: 67605 - DNA, 25 bp, Canis familiaris
cattctatggctcaaacacctcggc

SEQ ID NO: 67606 - DNA, 25 bp, Canis familiaris
cattctgacccaaaagtccacgctc

SEQ ID NO: 67607 - DNA, 25 bp, Canis familiaris
cttctactaaagcatgtcaatctct

SEQ ID NO: 67608 - DNA, 25 bp, Canis familiaris
cttcctgggaatcattagaccttta

SEQ ID NO: 67609 - DNA, 25 bp, Canis familiaris
cattccgggtttaaacacactatat

SEQ ID NO: 67610 - DNA, 25 bp, Canis familiaris
cttcctttgtctctaaaactttgca

SEQ ID NO: 67611 - DNA, 25 bp, Canis familiaris
ctactcgtccttcaaggatgacgtg

SEQ ID NO: 67612 - DNA, 25 bp, Canis familiaris
ctactacaacttcttcaggaatgtt

SEQ ID NO: 67613 - DNA, 25 bp, Canis familiaris
catttaaactctcagtcagtgctat

SEQ ID NO: 67614 - DNA, 25 bp, Canis familiaris
catttgactacccagatgccgttat

SEQ ID NO: 67615 - DNA, 25 bp, Canis familiaris
cattggactcatggtgggcggtgtt

SEQ ID NO: 67616 - DNA, 25 bp, Canis familiaris
cttggagctcgagatcacgctttct

SEQ ID NO: 67617 - DNA, 25 bp, Canis familiaris
cttgggcacagacgttcacgttttc

SEQ ID NO: 67618 - DNA, 25 bp, Canis familiaris
cttgttcaagggttccggcatttct

SEQ ID NO: 67619 - DNA, 25 bp, Canis familiaris
cttgcttcagggatgtccagatcgg

SEQ ID NO: 67620 - DNA, 25 bp, Canis familiaris
cattgctccagacctttgaatttct

SEQ ID NO: 67621 - DNA, 25 bp, Canis familiaris
cattcatccggcttttagttcatcc

SEQ ID NO: 67622 - DNA, 25 bp, Canis familiaris
cattatgttgccttcttgttttctc

SEQ ID NO: 67623 - DNA, 25 bp, Canis familiaris
catttggctcatttctctttttgtt

SEQ ID NO: 67624 - DNA, 25 bp, Canis familiaris
catttgcgtgttttctttctggttg

SEQ ID NO: 67625 - DNA, 25 bp, Canis familiaris
cattatccctttactttgctgtttt

SEQ ID NO: 67626 - DNA, 25 bp, Canis familiaris
ctatcaaccatttacctgagttggt

SEQ ID NO: 67627 - DNA, 25 bp, Canis familiaris
cattcagtcctttcaactctttgag

SEQ ID NO: 67628 - DNA, 25 bp, Canis familiaris
cattggttcttcgatattctaagat

SEQ ID NO: 67629 - DNA, 25 bp, Canis familiaris
cttgttactgtgatagtttagaaat

SEQ ID NO: 67630 - DNA, 25 bp, Canis familiaris
cattgctttcgtgtaaattatgtaa

SEQ ID NO: 67631 - DNA, 25 bp, Canis familiaris
cgcatgttccgtgtaaggcgcgtcg

SEQ ID NO: 67632 - DNA, 25 bp, Canis familiaris
cattcttctcgggagaagggccctg

SEQ ID NO: 67633 - DNA, 25 bp, Canis familiaris
cttgatgttccggaaggcggcctca

SEQ ID NO: 67634 - DNA, 25 bp, Canis familiaris
cattgggatgccggagggctacacc

SEQ ID NO: 67635 - DNA, 25 bp, Canis familiaris
cattgggctccccataggaaacctg

SEQ ID NO: 67636 - DNA, 25 bp, Canis familiaris
cttggtcctccactggagactttag

SEQ ID NO: 67637 - DNA, 25 bp, Canis familiaris
ctttccttccgtgaactcttgaggt

SEQ ID NO: 67638 - DNA, 25 bp, Canis familiaris
catttccttctctgtattctttaag

SEQ ID NO: 67639 - DNA, 25 bp, Canis familiaris
cattactcaattctgtttctatata

SEQ ID NO: 67640 - DNA, 25 bp, Canis familiaris
cattcactctaatctttgttcacaa

SEQ ID NO: 67641 - DNA, 25 bp, Canis familiaris
cattcttcatttatttgtcaacaaa

SEQ ID NO: 67642 - DNA, 25 bp, Canis familiaris
cattgttaatttgttctcataaata

SEQ ID NO: 67643 - DNA, 25 bp, Canis familiaris
cattgtaaagaatatacccagtatg

SEQ ID NO: 67644 - DNA, 25 bp, Canis familiaris
cttgtacaccgatcatgaactcgtt

SEQ ID NO: 67645 - DNA, 25 bp, Canis familiaris
catttcacacccactaggatagctt

SEQ ID NO: 67646 - DNA, 25 bp, Canis familiaris
catttcagactctatggcatatgta

SEQ ID NO: 67647 - DNA, 25 bp, Canis familiaris
catttagaacattgtgctgaaacat

SEQ ID NO: 67648 - DNA, 25 bp, Canis familiaris
catttatgcaacagcctcaaaatag

SEQ ID NO: 67649 - DNA, 25 bp, Canis familiaris
cattttcacaatgggctttcaatag

SEQ ID NO: 67650 - DNA, 25 bp, Canis familiaris
catttgccaagaatgttttcattaa

SEQ ID NO: 67651 - DNA, 25 bp, Canis familiaris
catttgaggcagttatctttctata

SEQ ID NO: 67652 - DNA, 25 bp, Canis familiaris
cattagagagctttgtgtttcagtt

SEQ ID NO: 67653 - DNA, 25 bp, Canis familiaris
cattagagagcctttgttgttcatt

SEQ ID NO: 67654 - DNA, 25 bp, Canis familiaris
cattggaggacccatgttcttcaat

SEQ ID NO: 67655 - DNA, 25 bp, Canis familiaris
cttggagaacccattcattcttccc

SEQ ID NO: 67656 - DNA, 25 bp, Canis familiaris
tttcgaaacggtttcagtgcccctg

SEQ ID NO: 67657 - DNA, 25 bp, Canis familiaris
cttaacgacggtttgtctccacact

SEQ ID NO: 67658 - DNA, 25 bp, Canis familiaris
cttgagaacctagtttgtcccagcc

SEQ ID NO: 67659 - DNA, 25 bp, Canis familiaris
cttgtgttccagccttgtgacctgg

SEQ ID NO: 67660 - DNA, 25 bp, Canis familiaris
cttggcctcaaggctctggagctgt

SEQ ID NO: 67661 - DNA, 25 bp, Canis familiaris
catttcaccaaggagcgctgactgt

SEQ ID NO: 67662 - DNA, 25 bp, Canis familiaris
catttcccatcagcagcaggtgtct

SEQ ID NO: 67663 - DNA, 25 bp, Canis familiaris
catttctcaccacagtggtcttgac

SEQ ID NO: 67664 - DNA, 25 bp, Canis familiaris
cattactctcttcagtgaccctgaa

SEQ ID NO: 67665 - DNA, 25 bp, Canis familiaris
cattgacgtctggaactcaccgaga

SEQ ID NO: 67666 - DNA, 25 bp, Canis familiaris
cattgaagattgccattgaaccaga

SEQ ID NO: 67667 - DNA, 25 bp, Canis familiaris
cattatctgttccttgcaatcaatg

SEQ ID NO: 67668 - DNA, 25 bp, Canis familiaris
cttgatctaatcctgggctaatgaa

SEQ ID NO: 67669 - DNA, 25 bp, Canis familiaris
cttgctcaaatcttagtctccaaat

SEQ ID NO: 67670 - DNA, 25 bp, Canis familiaris
cttgtaagccactgtcctctaatat

SEQ ID NO: 67671 - DNA, 25 bp, Canis familiaris
cttggaagtccatcactcctaaacc

SEQ ID NO: 67672 - DNA, 25 bp, Canis familiaris
cttggtctactatccccataagatc

SEQ ID NO: 67673 - DNA, 25 bp, Canis familiaris
cttgtttgattatgccccaatggaa

SEQ ID NO: 67674 - DNA, 25 bp, Canis familiaris
cttgtttggcccctcaatcaataaa

SEQ ID NO: 67675 - DNA, 25 bp, Canis familiaris
cttgtaggggccatagaccatacat

SEQ ID NO: 67676 - DNA, 25 bp, Canis familiaris
cttggaaggaccaagacatgcctac

SEQ ID NO: 67677 - DNA, 25 bp, Canis familiaris
cttggacaccaccaggattgggccg

SEQ ID NO: 67678 - DNA, 25 bp, Canis familiaris
cttgacgcaccaagcggaactgcgc

SEQ ID NO: 67679 - DNA, 25 bp, Canis familiaris
cattgaccccaacggcaaaggctgg

SEQ ID NO: 67680 - DNA, 25 bp, Canis familiaris
cattcccccaaacaatacagcaggt

SEQ ID NO: 67681 - DNA, 25 bp, Canis familiaris
ctaacccggcaatgaatacagccag

SEQ ID NO: 67682 - DNA, 25 bp, Canis familiaris
cttcctaatggactagattccagcc

SEQ ID NO: 67683 - DNA, 25 bp, Canis familiaris
cttgactaatgtgccacttctggcc

SEQ ID NO: 67684 - DNA, 25 bp, Canis familiaris
cattgctctcaatgacaactttgtc

SEQ ID NO: 67685 - DNA, 25 bp, Canis familiaris
cttgctccaagttaacttttcaagg

SEQ ID NO: 67686 - DNA, 25 bp, Canis familiaris
cattgcctcatcttctaacttgatg

SEQ ID NO: 67687 - DNA, 25 bp, Canis familiaris
cattgcctttgttcacctaagcata

SEQ ID NO: 67688 - DNA, 25 bp, Canis familiaris
cattgcctttttttctaccaactgt

SEQ ID NO: 67689 - DNA, 25 bp, Canis familiaris
cattcctgttttgctccgaagtatt

SEQ ID NO: 67690 - DNA, 25 bp, Canis familiaris
cttcctaagccttccgcgaagtatt

SEQ ID NO: 67691 - DNA, 25 bp, Canis familiaris
cttcctaagtctttctgggagaaca

SEQ ID NO: 67692 - DNA, 25 bp, Canis familiaris
cattctcacagcctcttttgggaag

SEQ ID NO: 67693 - DNA, 25 bp, Canis familiaris
cattgcccatccttttggaagtaga

SEQ ID NO: 67694 - DNA, 25 bp, Canis familiaris
cattcccagctgtgttggcatcgga

SEQ ID NO: 67695 - DNA, 25 bp, Canis familiaris
cattgcccggcaagtggctgacgag

SEQ ID NO: 67696 - DNA, 25 bp, Canis familiaris
cattgtctctccatggacataggag

SEQ ID NO: 67697 - DNA, 25 bp, Canis familiaris
ctatgctgggcagctggccttgaac

SEQ ID NO: 67698 - DNA, 25 bp, Canis familiaris
cattttgatgcagctgtgccctcat

SEQ ID NO: 67699 - DNA, 25 bp, Canis familiaris
cattactgagaacttgctccctggc

SEQ ID NO: 67700 - DNA, 25 bp, Canis familiaris
cattgatttggacagctcaccagcc

SEQ ID NO: 67701 - DNA, 25 bp, Canis familiaris
cttgtcttagcacgagataatacat

SEQ ID NO: 67702 - DNA, 25 bp, Canis familiaris
cttgtcatcaacgggaagtccatct

SEQ ID NO: 67703 - DNA, 25 bp, Canis familiaris
cattcttcacgtgggatatttactc

SEQ ID NO: 67704 - DNA, 25 bp, Canis familiaris
cattctgaccagcaggtatttgagt

SEQ ID NO: 67705 - DNA, 25 bp, Canis familiaris
cattcgacgaggtaacaattgatgt

SEQ ID NO: 67706 - DNA, 25 bp, Canis familiaris
cttcgacgtgcacaagtatcttgga

SEQ ID NO: 67707 - DNA, 25 bp, Canis familiaris
cattctgaccacgcaggtattggag

SEQ ID NO: 67708 - DNA, 25 bp, Canis familiaris
cattcataccacgaactctacatct

SEQ ID NO: 67709 - DNA, 25 bp, Canis familiaris
cttgcagaccacgatgaccttggca

SEQ ID NO: 67710 - DNA, 25 bp, Canis familiaris
cttgaacatcactatcatgacgtgt

SEQ ID NO: 67711 - DNA, 25 bp, Canis familiaris
cttgattctggagtctgctcgcatc

SEQ ID NO: 67712 - DNA, 25 bp, Canis familiaris
cttgtctgctggtcctgtgatgatg

SEQ ID NO: 67713 - DNA, 25 bp, Canis familiaris
cttgtctctgagagggagtggaagt

SEQ ID NO: 67714 - DNA, 25 bp, Canis familiaris
cattccctggtaggcggctgtaggg

SEQ ID NO: 67715 - DNA, 25 bp, Canis familiaris
cattcacccccgcaggggagggagg

SEQ ID NO: 67716 - DNA, 25 bp, Canis familiaris
cattcctccatctgtaggttaggag

SEQ ID NO: 67717 - DNA, 25 bp, Canis familiaris
cattcacctatagctccttctaggg

SEQ ID NO: 67718 - DNA, 25 bp, Canis familiaris
cttaattcatggacccaaatggggg

SEQ ID NO: 67719 - DNA, 25 bp, Canis familiaris
cattgaatccagctctccaagaggt

SEQ ID NO: 67720 - DNA, 25 bp, Canis familiaris
cattggtggcatgtccctgagcatg

SEQ ID NO: 67721 - DNA, 25 bp, Canis familiaris
cttggtgacaaaccccaatgtacag

SEQ ID NO: 67722 - DNA, 25 bp, Canis familiaris
cttgggcaacaaaccctgtgtccgg

SEQ ID NO: 67723 - DNA, 25 bp, Canis familiaris
cttggccgaacaacacagtgctgtg

SEQ ID NO: 67724 - DNA, 25 bp, Canis familiaris
cttgtccctgacagccgatcagatg

SEQ ID NO: 67725 - DNA, 25 bp, Canis familiaris
cttgaccctggaggctcagatcttg

SEQ ID NO: 67726 - DNA, 25 bp, Canis familiaris
cttgtccgtgaagatgtattgcccg

SEQ ID NO: 67727 - DNA, 25 bp, Canis familiaris
cttgtccggaagattgcaaatactg

SEQ ID NO: 67728 - DNA, 25 bp, Canis familiaris
cttgtcccgaggacccatggatcac

SEQ ID NO: 67729 - DNA, 25 bp, Canis familiaris
cttggcccaaggggcgtggccatgc

SEQ ID NO: 67730 - DNA, 25 bp, Canis familiaris
cttgtcatgcccaaggggtcgttgc

SEQ ID NO: 67731 - DNA, 25 bp, Canis familiaris
cttgtgttttgcgggcagtctttct

SEQ ID NO: 67732 - DNA, 25 bp, Canis familiaris
cttggtttgtggggaatgatcattc

SEQ ID NO: 67733 - DNA, 25 bp, Canis familiaris
cttgttcttcttgggccagacttga

SEQ ID NO: 67734 - DNA, 25 bp, Canis familiaris
cttgttgtttgttgcttcagtccag

SEQ ID NO: 67735 - DNA, 25 bp, Canis familiaris
cttgattttctgtgctacctgaaga

SEQ ID NO: 67736 - DNA, 25 bp, Canis familiaris
cttgactgttaatttggctgctgaa

SEQ ID NO: 67737 - DNA, 25 bp, Canis familiaris
cattatttttcattgctggtgcccc

SEQ ID NO: 67738 - DNA, 25 bp, Canis familiaris
cattatttcccattgcttacacttg

SEQ ID NO: 67739 - DNA, 25 bp, Canis familiaris
catttttctccaatccatgaaacat

SEQ ID NO: 67740 - DNA, 25 bp, Canis familiaris
cattatttcatggcactcctgtcac

SEQ ID NO: 67741 - DNA, 25 bp, Canis familiaris
cattgtagctgacatctgccttact

SEQ ID NO: 67742 - DNA, 25 bp, Canis familiaris
cattgtatgtggcatgtttgtatat

SEQ ID NO: 67743 - DNA, 25 bp, Canis familiaris
cattgcgctgtgtgtgtgttgggct

SEQ ID NO: 67744 - DNA, 25 bp, Canis familiaris
cattctgctttactagcttcttcat

SEQ ID NO: 67745 - DNA, 25 bp, Canis familiaris
cattcttatttcaatttctcctttt

SEQ ID NO: 67746 - DNA, 25 bp, Canis familiaris
cattttgactgttcttgtctcctac

SEQ ID NO: 67747 - DNA, 25 bp, Canis familiaris
cttgttggcggtttgctctacttaa

SEQ ID NO: 67748 - DNA, 25 bp, Canis familiaris
cttgttgatgaactaccctgtctct

SEQ ID NO: 67749 - DNA, 25 bp, Canis familiaris
cattttcatcaaccaaccagtatat

SEQ ID NO: 67750 - DNA, 25 bp, Canis familiaris
cattcctatcacccaaactgtaact

SEQ ID NO: 67751 - DNA, 25 bp, Canis familiaris
cattctctaactcaagacttgtgtc

SEQ ID NO: 67752 - DNA, 25 bp, Canis familiaris
cattcttttttatggttgagtgcta

SEQ ID NO: 67753 - DNA, 25 bp, Canis familiaris
catttttttctgattttgttgtcct

SEQ ID NO: 67754 - DNA, 25 bp, Canis familiaris
ctttatgagtctgattttttttcct

SEQ ID NO: 67755 - DNA, 25 bp, Canis familiaris
cttggttacagtctttttcttatct

SEQ ID NO: 67756 - DNA, 25 bp, Canis familiaris
cttggctaattacctgttttttctg

SEQ ID NO: 67757 - DNA, 25 bp, Canis familiaris
cttggcctttcatttgttttcattc

SEQ ID NO: 67758 - DNA, 25 bp, Canis familiaris
cattgtgactttctttgttcctttg

SEQ ID NO: 67759 - DNA, 25 bp, Canis familiaris
catttttgttgcctttcttagtttg

SEQ ID NO: 67760 - DNA, 25 bp, Canis familiaris
cattgatctcgttttttcttagcta

SEQ ID NO: 67761 - DNA, 25 bp, Canis familiaris
cattgttctcattctctctttatga

SEQ ID NO: 67762 - DNA, 25 bp, Canis familiaris
cattctattcattatgcctcaccat

SEQ ID NO: 67763 - DNA, 25 bp, Canis familiaris
cattctatcaaccagcatgaacctg

SEQ ID NO: 67764 - DNA, 25 bp, Canis familiaris
cattgccaagaaccgcaacctgcac

SEQ ID NO: 67765 - DNA, 25 bp, Canis familiaris
cattcacacacatacgagcggagca

SEQ ID NO: 67766 - DNA, 25 bp, Canis familiaris
cattgcagctaataaagctgataga

SEQ ID NO: 67767 - DNA, 25 bp, Canis familiaris
cattctgcttcttgataacattaca

SEQ ID NO: 67768 - DNA, 25 bp, Canis familiaris
cattgccttctgttactattatagt

SEQ ID NO: 67769 - DNA, 25 bp, Canis familiaris
cattgccttttgtccattaatcagc

SEQ ID NO: 67770 - DNA, 25 bp, Canis familiaris
cattctgtttcttcgattcattcgt

SEQ ID NO: 67771 - DNA, 25 bp, Canis familiaris
cattgtggttactgtttccagttga

SEQ ID NO: 67772 - DNA, 25 bp, Canis familiaris
cttgggctacactgaggaccaggtt

SEQ ID NO: 67773 - DNA, 25 bp, Canis familiaris
cttggtgcttaataaatgctcatga

SEQ ID NO: 67774 - DNA, 25 bp, Canis familiaris
cttgcctgctgtttggtaaccatgt

SEQ ID NO: 67775 - DNA, 25 bp, Canis familiaris
cttccagttttggctacggcaatcc

SEQ ID NO: 67776 - DNA, 25 bp, Canis familiaris
cttccaggtcttggcacagggcctg

SEQ ID NO: 67777 - DNA, 25 bp, Canis familiaris
cattcgggcttcccagagagagcct

SEQ ID NO: 67778 - DNA, 25 bp, Canis familiaris
cattttcgcttccctggagggtgtc

SEQ ID NO: 67779 - DNA, 25 bp, Canis familiaris
cattctcgctttcctggtagggtgt

SEQ ID NO: 67780 - DNA, 25 bp, Canis familiaris
cattctagcattacgcaggccagca

SEQ ID NO: 67781 - DNA, 25 bp, Canis familiaris
cattcatacattaatgaataagctc

SEQ ID NO: 67782 - DNA, 25 bp, Canis familiaris
cattctagctctatcactagcccta

SEQ ID NO: 67783 - DNA, 25 bp, Canis familiaris
cattctcagctcctcagacagagcc

SEQ ID NO: 67784 - DNA, 25 bp, Canis familiaris
cattccgcttcaaggcagagcaaat

SEQ ID NO: 67785 - DNA, 25 bp, Canis familiaris
cattccgttgcagctgagcgatata

SEQ ID NO: 67786 - DNA, 25 bp, Canis familiaris
cattccatagtctctcagacatcaa

SEQ ID NO: 67787 - DNA, 25 bp, Canis familiaris
cattcctgtgctttctcagatcaag

SEQ ID NO: 67788 - DNA, 25 bp, Canis familiaris
cattcgtggatgttctctatcaacg

SEQ ID NO: 67789 - DNA, 25 bp, Canis familiaris
cttccggagtattctattacttgga

SEQ ID NO: 67790 - DNA, 25 bp, Canis familiaris
cgtggcggtgttttcaaagtcgtgc

SEQ ID NO: 67791 - DNA, 25 bp, Canis familiaris
cattgctgcgggtgttcccgttgtc

SEQ ID NO: 67792 - DNA, 25 bp, Canis familiaris
cattctctggaggaggtcaccaggt

SEQ ID NO: 67793 - DNA, 25 bp, Canis familiaris
cattcttcaagtccctgcaggaggt

SEQ ID NO: 67794 - DNA, 25 bp, Canis familiaris
cttcgtcaaggcgctgaccatggac

SEQ ID NO: 67795 - DNA, 25 bp, Canis familiaris
cttggacagggctttcccaggatgc

SEQ ID NO: 67796 - DNA, 25 bp, Canis familiaris
cattcagcacattgagtttcccaag

SEQ ID NO: 67797 - DNA, 25 bp, Canis familiaris
cattggcaattactattcatctgag

SEQ ID NO: 67798 - DNA, 25 bp, Canis familiaris
cattgacagtgccaccattcaaagt

SEQ ID NO: 67799 - DNA, 25 bp, Canis familiaris
cgtgacggtcccatcaatgacggat

SEQ ID NO: 67800 - DNA, 25 bp, Canis familiaris
cttgggttctgcactcaatggggag

SEQ ID NO: 67801 - DNA, 25 bp, Canis familiaris
cttgggaatcttgctcgttggtgag

SEQ ID NO: 67802 - DNA, 25 bp, Canis familiaris
cttgaggaacggcccactgggagga

SEQ ID NO: 67803 - DNA, 25 bp, Canis familiaris
cttgagtaacagtcccatttaaatg

SEQ ID NO: 67804 - DNA, 25 bp, Canis familiaris
cttgatcaacgcccaccatttgata

SEQ ID NO: 67805 - DNA, 25 bp, Canis familiaris
ctcagttacgcacctcacaatttgg

SEQ ID NO: 67806 - DNA, 25 bp, Canis familiaris
cttgttcaggcacgccagaaggatg

SEQ ID NO: 67807 - DNA, 25 bp, Canis familiaris
cttgttggacagtgcagaccgttgc

SEQ ID NO: 67808 - DNA, 25 bp, Canis familiaris
ctttcgtgaatgtgtgtcggtcttt

SEQ ID NO: 67809 - DNA, 25 bp, Canis familiaris
cttcacatgtaatctttgaggtttt

SEQ ID NO: 67810 - DNA, 25 bp, Canis familiaris
cattaatcgatattctctctgagag

SEQ ID NO: 67811 - DNA, 25 bp, Canis familiaris
cattgacattgtctctccatggaca

SEQ ID NO: 67812 - DNA, 25 bp, Canis familiaris
cttgacaagtgctttctgctgtccc

SEQ ID NO: 67813 - DNA, 25 bp, Canis familiaris
cttgacatggtctttcattcctggg

SEQ ID NO: 67814 - DNA, 25 bp, Canis familiaris
cttggatgccacgtgtttcctggca

SEQ ID NO: 67815 - DNA, 25 bp, Canis familiaris
cattcgtgctcctgtatgttctaga

SEQ ID NO: 67816 - DNA, 25 bp, Canis familiaris
cattctgcactttgtgtagttcggt

SEQ ID NO: 67817 - DNA, 25 bp, Canis familiaris
cattcttctgtttatagtggctggt

SEQ ID NO: 67818 - DNA, 25 bp, Canis familiaris
cattcccttgggacagaggctacag

SEQ ID NO: 67819 - DNA, 25 bp, Canis familiaris
cattgtcacatttctcaaagttaag

SEQ ID NO: 67820 - DNA, 25 bp, Canis familiaris
cttgtccatgtctaagcacagggaa

SEQ ID NO: 67821 - DNA, 25 bp, Canis familiaris
cttggagcaggatggcggggagccc

SEQ ID NO: 67822 - DNA, 25 bp, Canis familiaris
cttggagcagaggcgggccgaggtg

SEQ ID NO: 67823 - DNA, 25 bp, Canis familiaris
cttggagcagaggcgggccgaggtg

SEQ ID NO: 67824 - DNA, 25 bp, Canis familiaris
cattggtgatggggtaccgagctcg

SEQ ID NO: 67825 - DNA, 25 bp, Canis familiaris
cattatgtactggtccacctgttct

SEQ ID NO: 67826 - DNA, 25 bp, Canis familiaris
cattctatgaagtttgcacctttca

SEQ ID NO: 67827 - DNA, 25 bp, Canis familiaris
cattctgtatactggcatcctgttt

SEQ ID NO: 67828 - DNA, 25 bp, Canis familiaris
ctttgcaaaagggcctgctccttgc

SEQ ID NO: 67829 - DNA, 25 bp, Canis familiaris
cttgatggacaaagggctccccagc

SEQ ID NO: 67830 - DNA, 25 bp, Canis familiaris
cattgggctcgatgaggtcctcaag

SEQ ID NO: 67831 - DNA, 25 bp, Canis familiaris
cattcacctcgatgagtctgtcctg

SEQ ID NO: 67832 - DNA, 25 bp, Canis familiaris
cattcctctccagcagtagatcgct

SEQ ID NO: 67833 - DNA, 25 bp, Canis familiaris
cattcacccagaacagctatgacca

SEQ ID NO: 67834 - DNA, 25 bp, Canis familiaris
cattgaccaagaactgcatggacct

SEQ ID NO: 67835 - DNA, 25 bp, Canis familiaris
cattgatctcaactacatggtgtac

SEQ ID NO: 67836 - DNA, 25 bp, Canis familiaris
cattgtcgcaagtcacagaattatt

SEQ ID NO: 67837 - DNA, 25 bp, Canis familiaris
cattccgcaggtgcacatgtgttct

SEQ ID NO: 67838 - DNA, 25 bp, Canis familiaris
cattccctgactgaattacatcttt

SEQ ID NO: 67839 - DNA, 25 bp, Canis familiaris
cttccatctggcaaaaatacttttc

SEQ ID NO: 67840 - DNA, 25 bp, Canis familiaris
cattcattcgctcaacaaacgttta

SEQ ID NO: 67841 - DNA, 25 bp, Canis familiaris
cttgctgtcgccaaagaaaagtctg

SEQ ID NO: 67842 - DNA, 25 bp, Canis familiaris
cttgtgtgtccttcagttacagctc

SEQ ID NO: 67843 - DNA, 25 bp, Canis familiaris
cattgtgttttatgtagaactccca

SEQ ID NO: 67844 - DNA, 25 bp, Canis familiaris
cttgtcttattatttaccctagcag

SEQ ID NO: 67845 - DNA, 25 bp, Canis familiaris
cttgttttgagccttaacatctagc

SEQ ID NO: 67846 - DNA, 25 bp, Canis familiaris
cttgttttgacccttgacatctagc

SEQ ID NO: 67847 - DNA, 25 bp, Canis familiaris
cttgttttgaaaggatggctgcacg

SEQ ID NO: 67848 - DNA, 25 bp, Canis familiaris
cattgttcttgttgaattgggcaca

SEQ ID NO: 67849 - DNA, 25 bp, Canis familiaris
cattctctcttacgttctggcagaa

SEQ ID NO: 67850 - DNA, 25 bp, Canis familiaris
cattactttccgtacttggcagcaa

SEQ ID NO: 67851 - DNA, 25 bp, Canis familiaris
cttgaaaagccgtccctgagcaaaa

SEQ ID NO: 67852 - DNA, 25 bp, Canis familiaris
cttgaatcaccgttgtgcctggcaa

SEQ ID NO: 67853 - DNA, 25 bp, Canis familiaris
cattctgaccctctggagctgtaaa

SEQ ID NO: 67854 - DNA, 25 bp, Canis familiaris
cttggagtctgtcttgagcttaata

SEQ ID NO: 67855 - DNA, 25 bp, Canis familiaris
cttgggctttgttggactgagtaaa

SEQ ID NO: 67856 - DNA, 25 bp, Canis familiaris
cattgaggtgtttctggacttttac

SEQ ID NO: 67857 - DNA, 25 bp, Canis familiaris
cttgttgttcaactgtactgtttga

SEQ ID NO: 67858 - DNA, 25 bp, Canis familiaris
cattcttttcaattctagcttctct

SEQ ID NO: 67859 - DNA, 25 bp, Canis familiaris
cattcctctcattagttatgttctt

SEQ ID NO: 67860 - DNA, 25 bp, Canis familiaris
cattcccatgaatgtcaatctttta

SEQ ID NO: 67861 - DNA, 25 bp, Canis familiaris
cattcacacagacagctagtcatta

SEQ ID NO: 67862 - DNA, 25 bp, Canis familiaris
cattccactgcaccactattgatgt

SEQ ID NO: 67863 - DNA, 25 bp, Canis familiaris
cattgccctgctgatctacatgatg

SEQ ID NO: 67864 - DNA, 25 bp, Canis familiaris
cattgcccccatttagattgcagtc

SEQ ID NO: 67865 - DNA, 25 bp, Canis familiaris
cattccggcgatacttgatgccctc

SEQ ID NO: 67866 - DNA, 25 bp, Canis familiaris
cattctctgatggtttgggggctcg

SEQ ID NO: 67867 - DNA, 25 bp, Canis familiaris
cattcttgcggtttgaacttgcttg

SEQ ID NO: 67868 - DNA, 25 bp, Canis familiaris
cattctttggctttgcagaccatgc

SEQ ID NO: 67869 - DNA, 25 bp, Canis familiaris
cattgctttagttacaatcatctgt

SEQ ID NO: 67870 - DNA, 25 bp, Canis familiaris
cattctgttcaggccaattgctgct

SEQ ID NO: 67871 - DNA, 25 bp, Canis familiaris
cttgctgcttgagctgcagaagctg

SEQ ID NO: 67872 - DNA, 25 bp, Canis familiaris
cattcatgagagaccacagacagcg

SEQ ID NO: 67873 - DNA, 25 bp, Canis familiaris
cattctgagagtcccatccacaggg

SEQ ID NO: 67874 - DNA, 25 bp, Canis familiaris
cattcgcagagccagtgctatcctg

SEQ ID NO: 67875 - DNA, 25 bp, Canis familiaris
cattgccaaaagtctcatgctctgc

SEQ ID NO: 67876 - DNA, 25 bp, Canis familiaris
cattccaaatagtcccctttattct

SEQ ID NO: 67877 - DNA, 25 bp, Canis familiaris
cattcccagaaagccctgactgaat

SEQ ID NO: 67878 - DNA, 25 bp, Canis familiaris
gttcccaatagatctactaccaact

SEQ ID NO: 67879 - DNA, 25 bp, Canis familiaris
cttcctaataaacgttaccactctg

SEQ ID NO: 67880 - DNA, 25 bp, Canis familiaris
cttaggaataacagcctcccaccta

SEQ ID NO: 67881 - DNA, 25 bp, Canis familiaris
cttaggaagggcagcttccgcaccc

SEQ ID NO: 67882 - DNA, 25 bp, Canis familiaris
cattcaggagagtgactttcgcccc

SEQ ID NO: 67883 - DNA, 25 bp, Canis familiaris
cattctgaaatgtgttgtgcccccc

SEQ ID NO: 67884 - DNA, 25 bp, Canis familiaris
cttgctgaattccgttgtactgccc

SEQ ID NO: 67885 - DNA, 25 bp, Canis familiaris
cttcgaagttggagcataccacgga

SEQ ID NO: 67886 - DNA, 25 bp, Canis familiaris
cattcgccgtgtgttcaacgactgc

SEQ ID NO: 67887 - DNA, 25 bp, Canis familiaris
cattgctgccaaatcatttcaactg

SEQ ID NO: 67888 - DNA, 25 bp, Canis familiaris
cattgctggcaatgtggtgcacact

SEQ ID NO: 67889 - DNA, 25 bp, Canis familiaris
cttgggcatcattgagggactctat

SEQ ID NO: 67890 - DNA, 25 bp, Canis familiaris
cttgggcttgtagagacctcagaac

SEQ ID NO: 67891 - DNA, 25 bp, Canis familiaris
cttaggcttccacaactctgaaaat

SEQ ID NO: 67892 - DNA, 25 bp, Canis familiaris
ctctcaaagacctcacctctaaata

SEQ ID NO: 67893 - DNA, 25 bp, Canis familiaris
ctctcaaatgatgctctacccttat

SEQ ID NO: 67894 - DNA, 25 bp, Canis familiaris
cattaatatcatggctctaaaatta

SEQ ID NO: 67895 - DNA, 25 bp, Canis familiaris
cattgccatatcggctcgcaaatct

SEQ ID NO: 67896 - DNA, 25 bp, Canis familiaris
cttgcacaatcgtcgtgcagcaagc

SEQ ID NO: 67897 - DNA, 25 bp, Canis familiaris
cattcacacgcgattgcgcaatgcc

SEQ ID NO: 67898 - DNA, 25 bp, Canis familiaris
cattgcacattgattcctgaagctt

SEQ ID NO: 67899 - DNA, 25 bp, Canis familiaris
cattccctctttgatgggcatttgg

SEQ ID NO: 67900 - DNA, 25 bp, Canis familiaris
cattgtctttttgcatcaggacttt

SEQ ID NO: 67901 - DNA, 25 bp, Canis familiaris
cattctcttttagaagtcactcatg

SEQ ID NO: 67902 - DNA, 25 bp, Canis familiaris
cattccctccctgcaagacaggatg

SEQ ID NO: 67903 - DNA, 25 bp, Canis familiaris
cattctccccaattccagtagagtc

SEQ ID NO: 67904 - DNA, 25 bp, Canis familiaris
cattgtcaccgttatcaccaaagtc

SEQ ID NO: 67905 - DNA, 25 bp, Canis familiaris
cattgatccctttcataggcagaga

SEQ ID NO: 67906 - DNA, 25 bp, Canis familiaris
cattctctcagcatccagtgacaag

SEQ ID NO: 67907 - DNA, 25 bp, Canis familiaris
cattcccatcttggcctgagaagac

SEQ ID NO: 67908 - DNA, 25 bp, Canis familiaris
cattcccataaagctatccagaaga

SEQ ID NO: 67909 - DNA, 25 bp, Canis familiaris
cattcaccataacctaataaactga

SEQ ID NO: 67910 - DNA, 25 bp, Canis familiaris
cttgacctgtgacctcaaaacaata

SEQ ID NO: 67911 - DNA, 25 bp, Canis familiaris
cttacgctgaacccatgcaatgaaa

SEQ ID NO: 67912 - DNA, 25 bp, Canis familiaris
cttcgactgcacggccaccatgaag

SEQ ID NO: 67913 - DNA, 25 bp, Canis familiaris
cttggagctccagagactgagacat

SEQ ID NO: 67914 - DNA, 25 bp, Canis familiaris
cttgggacagaggttgctgaacttt

SEQ ID NO: 67915 - DNA, 25 bp, Canis familiaris
cttggaacacaggtgtgtacagcgt

SEQ ID NO: 67916 - DNA, 25 bp, Canis familiaris
cttggggcagccaagctggacggtc

SEQ ID NO: 67917 - DNA, 25 bp, Canis familiaris
cttggctggagttgttgggctgggc

SEQ ID NO: 67918 - DNA, 25 bp, Canis familiaris
cttgcactagcgcacgaaggtgggc

SEQ ID NO: 67919 - DNA, 25 bp, Canis familiaris
cttcaaacgcatttcagggtacctg

SEQ ID NO: 67920 - DNA, 25 bp, Canis familiaris
cttaggatgcgattccaggggccat

SEQ ID NO: 67921 - DNA, 25 bp, Canis familiaris
cttgcgtagtgcgtccagggacaaa

SEQ ID NO: 67922 - DNA, 25 bp, Canis familiaris
cttgcttgaaggccgaggagaccag

SEQ ID NO: 67923 - DNA, 25 bp, Canis familiaris
cttgcctgccagggaggtgtaccag

SEQ ID NO: 67924 - DNA, 25 bp, Canis familiaris
cattcttccagctggttgtgattat

SEQ ID NO: 67925 - DNA, 25 bp, Canis familiaris
cattctattgcctgctttgtgcttt

SEQ ID NO: 67926 - DNA, 25 bp, Canis familiaris
cttgtagttctggcactttgcttta

SEQ ID NO: 67927 - DNA, 25 bp, Canis familiaris
cttgtctgtttagttctgtgtataa

SEQ ID NO: 67928 - DNA, 25 bp, Canis familiaris
cattctcccctgattcttgatataa

SEQ ID NO: 67929 - DNA, 25 bp, Canis familiaris
cattcgtccctgattctaaatttct

SEQ ID NO: 67930 - DNA, 25 bp, Canis familiaris
cttcgtccatccctttatggtgtac

SEQ ID NO: 67931 - DNA, 25 bp, Canis familiaris
cattgcccacgccgatttatggagc

SEQ ID NO: 67932 - DNA, 25 bp, Canis familiaris
cattgccatacccaaggtcatccag

SEQ ID NO: 67933 - DNA, 25 bp, Canis familiaris
cattgccaccattcaaggaccgagt

SEQ ID NO: 67934 - DNA, 25 bp, Canis familiaris
cattgcctgcctcaagaacctgcag

SEQ ID NO: 67935 - DNA, 25 bp, Canis familiaris
cattgcttcatcccatagaacctgt

SEQ ID NO: 67936 - DNA, 25 bp, Canis familiaris
cattgttcattcctataacctctcc

SEQ ID NO: 67937 - DNA, 25 bp, Canis familiaris
cattgtgttatgctgccagacctgc

SEQ ID NO: 67938 - DNA, 25 bp, Canis familiaris
cattggcagaatcatccagcccagc

SEQ ID NO: 67939 - DNA, 25 bp, Canis familiaris
cattcgatacatcttcacagccaca

SEQ ID NO: 67940 - DNA, 25 bp, Canis familiaris
cattgctgataccattatactacca

SEQ ID NO: 67941 - DNA, 25 bp, Canis familiaris
cattctgatcatgttctcacttcac

SEQ ID NO: 67942 - DNA, 25 bp, Canis familiaris
cattgctgataggtgttttatgctt

SEQ ID NO: 67943 - DNA, 25 bp, Canis familiaris
cattctatgcattgtttgtctttta

SEQ ID NO: 67944 - DNA, 25 bp, Canis familiaris
cattgttgtagtttgcagctttttg

SEQ ID NO: 67945 - DNA, 25 bp, Canis familiaris
cattgtcttagatttgagcctgttt

SEQ ID NO: 67946 - DNA, 25 bp, Canis familiaris
cattctccttgattgttcttgttat

SEQ ID NO: 67947 - DNA, 25 bp, Canis familiaris
cattcttttacatttctttcgcatt

SEQ ID NO: 67948 - DNA, 25 bp, Canis familiaris
cattcccgtacaaactttcctgatg

SEQ ID NO: 67949 - DNA, 25 bp, Canis familiaris
cattcccgacctgacttacagagtc

SEQ ID NO: 67950 - DNA, 25 bp, Canis familiaris
cttccactacctgattttaatactt

SEQ ID NO: 67951 - DNA, 25 bp, Canis familiaris
cttccaacccttatttcattacaat

SEQ ID NO: 67952 - DNA, 25 bp, Canis familiaris
cttccaaagtctgttttcctcataa

SEQ ID NO: 67953 - DNA, 25 bp, Canis familiaris
cattgtatatcagcttcttttccct

SEQ ID NO: 67954 - DNA, 25 bp, Canis familiaris
cttgatcattccattctttgtccat

SEQ ID NO: 67955 - DNA, 25 bp, Canis familiaris
cattgactaccagatttatttttta

SEQ ID NO: 67956 - DNA, 25 bp, Canis familiaris
cttgagctaccacgagatttaattt

SEQ ID NO: 67957 - DNA, 25 bp, Canis familiaris
cttgacaatcacagaggaaaactct

SEQ ID NO: 67958 - DNA, 25 bp, Canis familiaris
cattccctgcagatgaggagataac

SEQ ID NO: 67959 - DNA, 25 bp, Canis familiaris
cttccatgatggagagggtctaccc

SEQ ID NO: 67960 - DNA, 25 bp, Canis familiaris
cttccgtccggaggtatctactgac

SEQ ID NO: 67961 - DNA, 25 bp, Canis familiaris
cattccagacgggagcctcttttaa

SEQ ID NO: 67962 - DNA, 25 bp, Canis familiaris
cattgccgactgcaggtttctttca

SEQ ID NO: 67963 - DNA, 25 bp, Canis familiaris
cattccaactggacagtctactccc

SEQ ID NO: 67964 - DNA, 25 bp, Canis familiaris
cattccaaagagggctctccctcca

SEQ ID NO: 67965 - DNA, 25 bp, Canis familiaris
cttccagtcgacgactatcccacat

SEQ ID NO: 67966 - DNA, 25 bp, Canis familiaris
cttggaatctggggattctcccatt

SEQ ID NO: 67967 - DNA, 25 bp, Canis familiaris
ctaaaaggggtgtttgcctcaatag

SEQ ID NO: 67968 - DNA, 25 bp, Canis familiaris
cttcaaggggttctctcctgattcg

SEQ ID NO: 67969 - DNA, 25 bp, Canis familiaris
cttagggggagtctactgccctggg

SEQ ID NO: 67970 - DNA, 25 bp, Canis familiaris
cttaggaccctgagattctgacctg

SEQ ID NO: 67971 - DNA, 25 bp, Canis familiaris
ctcgaggtcacctacctactacgag

SEQ ID NO: 67972 - DNA, 25 bp, Canis familiaris
cttaggtcagttcctgtagtacgac

SEQ ID NO: 67973 - DNA, 25 bp, Canis familiaris
cttggtccatttgttagtgtcctcg

SEQ ID NO: 67974 - DNA, 25 bp, Canis familiaris
cttgtctcctttcaaaggtcctgag

SEQ ID NO: 67975 - DNA, 25 bp, Canis familiaris
ctttccctttccactggagctggaa

SEQ ID NO: 67976 - DNA, 25 bp, Canis familiaris
ctttcctccttagacttactggtgg

SEQ ID NO: 67977 - DNA, 25 bp, Canis familiaris
cttccccacctgcaacgaactgggg

SEQ ID NO: 67978 - DNA, 25 bp, Canis familiaris
ctataattatcgctattccaacggg

SEQ ID NO: 67979 - DNA, 25 bp, Canis familiaris
ctacgatcccgtcattaacagggag

SEQ ID NO: 67980 - DNA, 25 bp, Canis familiaris
cttgaagccctcatttagacagagg

SEQ ID NO: 67981 - DNA, 25 bp, Canis familiaris
cttgaagtcctcattaaacagaggt

SEQ ID NO: 67982 - DNA, 25 bp, Canis familiaris
cttagggcacctactagtacaatag

SEQ ID NO: 67983 - DNA, 25 bp, Canis familiaris
cttgagcaggcttttttgtagaatg

SEQ ID NO: 67984 - DNA, 25 bp, Canis familiaris
cttgcagcaacatctgtcggtccaa

SEQ ID NO: 67985 - DNA, 25 bp, Canis familiaris
cttggcatccaaattccagattcaa

SEQ ID NO: 67986 - DNA, 25 bp, Canis familiaris
cttggcagtaacatccagtgtatca

SEQ ID NO: 67987 - DNA, 25 bp, Canis familiaris
cgttcgttaccgcatggtcagcaat

SEQ ID NO: 67988 - DNA, 25 bp, Canis familiaris
cgtatccttaaaaagcctctataca

SEQ ID NO: 67989 - DNA, 25 bp, Canis familiaris
cttccactgttatccgtattctaac

SEQ ID NO: 67990 - DNA, 25 bp, Canis familiaris
cgtcccgtatattgtcgacgtccac

SEQ ID NO: 67991 - DNA, 25 bp, Canis familiaris
tagttccgtaagtggaagcccagcc

SEQ ID NO: 67992 - DNA, 25 bp, Canis familiaris
gagttccttacctggaagcctcagg

SEQ ID NO: 67993 - DNA, 25 bp, Canis familiaris
cttgtccctccctggggagtaggag

SEQ ID NO: 67994 - DNA, 25 bp, Canis familiaris
cttggcccccgatggagaaggaagc

SEQ ID NO: 67995 - DNA, 25 bp, Canis familiaris
cttcccccctttggatacaggacag

SEQ ID NO: 67996 - DNA, 25 bp, Canis familiaris
ctacgactccctgctggtcaaagtc

SEQ ID NO: 67997 - DNA, 25 bp, Canis familiaris
ctactaccgattggatggtttagtg

SEQ ID NO: 67998 - DNA, 25 bp, Canis familiaris
cttgcttccagaaagggtcttgagc

SEQ ID NO: 67999 - DNA, 25 bp, Canis familiaris
cttgttcagaattagggccttgcag

SEQ ID NO: 68000 - DNA, 25 bp, Canis familiaris
cattgctctctgtaaaggaacactg

SEQ ID NO: 68001 - DNA, 25 bp, Canis familiaris
cattccttgcatattataatcctcc

SEQ ID NO: 68002 - DNA, 25 bp, Canis familiaris
cttccttctgttgaaggcccagacc

SEQ ID NO: 68003 - DNA, 25 bp, Canis familiaris
cttgcttcttgtgaaaacccgtgac

SEQ ID NO: 68004 - DNA, 25 bp, Canis familiaris
cttgtgtcaagtctaacaccacctg

SEQ ID NO: 68005 - DNA, 25 bp, Canis familiaris
cattgtgtgtcagtttacacccccg

SEQ ID NO: 68006 - DNA, 25 bp, Canis familiaris
cattgtgggagtttgacctccgccg

SEQ ID NO: 68007 - DNA, 25 bp, Canis familiaris
cttggatgggtccaatgttcccggc

SEQ ID NO: 68008 - DNA, 25 bp, Canis familiaris
cttgctgaggtagtccttgtccaca

SEQ ID NO: 68009 - DNA, 25 bp, Canis familiaris
cttgctaggagagctccagtccctc

SEQ ID NO: 68010 - DNA, 25 bp, Canis familiaris
ctttgcaggcaaaatctcttccctg

SEQ ID NO: 68011 - DNA, 25 bp, Canis familiaris
ctttgaacatgaaacttttgcccgt

SEQ ID NO: 68012 - DNA, 25 bp, Canis familiaris
cattccactatattaattttgccca

SEQ ID NO: 68013 - DNA, 25 bp, Canis familiaris
cattccccttgaagagttcagcgga

SEQ ID NO: 68014 - DNA, 25 bp, Canis familiaris
cattcccctcagatctcttagggca

SEQ ID NO: 68015 - DNA, 25 bp, Canis familiaris
cttatcccctttgtccagggcataa

SEQ ID NO: 68016 - DNA, 25 bp, Canis familiaris
cttgtcccatctctgaatccaaggc

SEQ ID NO: 68017 - DNA, 25 bp, Canis familiaris
cttgtccgatgtctgtaccaaggcc

SEQ ID NO: 68018 - DNA, 25 bp, Canis familiaris
ctattgcctagtgtggacctgacct

SEQ ID NO: 68019 - DNA, 25 bp, Canis familiaris
cttgtacatagtgatgggcattgag

SEQ ID NO: 68020 - DNA, 25 bp, Canis familiaris
cttggactattcagggagctgcaaa

SEQ ID NO: 68021 - DNA, 25 bp, Canis familiaris
cttggagctcctgcggggtgagaag

SEQ ID NO: 68022 - DNA, 25 bp, Canis familiaris
cattgggctccatgctggatgtgga

SEQ ID NO: 68023 - DNA, 25 bp, Canis familiaris
cttggagctgctgtcggatgatgga

SEQ ID NO: 68024 - DNA, 25 bp, Canis familiaris
cttgttgcgctggtctggcagctaa

SEQ ID NO: 68025 - DNA, 25 bp, Canis familiaris
cattgacgccatgtcgggttattcg

SEQ ID NO: 68026 - DNA, 25 bp, Canis familiaris
cattgacctcaactacatggtttac

SEQ ID NO: 68027 - DNA, 25 bp, Canis familiaris
cattgacctcaactacatggtctac

SEQ ID NO: 68028 - DNA, 25 bp, Canis familiaris
cattggcccagtcatcatggtccat

SEQ ID NO: 68029 - DNA, 25 bp, Canis familiaris
cattgggcaaatcattatgtcattc

SEQ ID NO: 68030 - DNA, 25 bp, Canis familiaris
cattcccattatcagcatatgctcc

SEQ ID NO: 68031 - DNA, 25 bp, Canis familiaris
cttgacacttagccgctgtctcgcc

SEQ ID NO: 68032 - DNA, 25 bp, Canis familiaris
cattgcactagtgcgtgttcttgcc

SEQ ID NO: 68033 - DNA, 25 bp, Canis familiaris
cattgactggggctttctgctgccc

SEQ ID NO: 68034 - DNA, 25 bp, Canis familiaris
cattccatgtgtcttttctgaccac

SEQ ID NO: 68035 - DNA, 25 bp, Canis familiaris
cattcctctggagttctcttaaagc

SEQ ID NO: 68036 - DNA, 25 bp, Canis familiaris
cattgttgctgattctgttccggaa

SEQ ID NO: 68037 - DNA, 25 bp, Canis familiaris
cttgttgctgatctggacctgtatc

SEQ ID NO: 68038 - DNA, 25 bp, Canis familiaris
cttgcattatatgtggacagcccca

SEQ ID NO: 68039 - DNA, 25 bp, Canis familiaris
cttgattgaactttgtagcctcgcc

SEQ ID NO: 68040 - DNA, 25 bp, Canis familiaris
cttgtgtgacttcattgagactcat

SEQ ID NO: 68041 - DNA, 25 bp, Canis familiaris
cattgtgtattattgtcggcctcgt

SEQ ID NO: 68042 - DNA, 25 bp, Canis familiaris
cattggtttcatgggcaggccaggc

SEQ ID NO: 68043 - DNA, 25 bp, Canis familiaris
cttggtctgtgaggagggctgcatg

SEQ ID NO: 68044 - DNA, 25 bp, Canis familiaris
cattgagagctgcagggagcctgag

SEQ ID NO: 68045 - DNA, 25 bp, Canis familiaris
cattgagcagcagatccagacctac

SEQ ID NO: 68046 - DNA, 25 bp, Canis familiaris
cattgacgagtaccatgcagccaca

SEQ ID NO: 68047 - DNA, 25 bp, Canis familiaris
cttgcctgagcttgatgagcagccc

SEQ ID NO: 68048 - DNA, 25 bp, Canis familiaris
cttgcctagtctggaagctcctaac

SEQ ID NO: 68049 - DNA, 25 bp, Canis familiaris
cttggcttgctttgtggccactgaa

SEQ ID NO: 68050 - DNA, 25 bp, Canis familiaris
cttggcatactttctatggcctgtc

SEQ ID NO: 68051 - DNA, 25 bp, Canis familiaris
cattggcaaatttctgatcttttca

SEQ ID NO: 68052 - DNA, 25 bp, Canis familiaris
cattgtatatttttgcttctttgca

SEQ ID NO: 68053 - DNA, 25 bp, Canis familiaris
cttggcattcttatttctgtgtccc

SEQ ID NO: 68054 - DNA, 25 bp, Canis familiaris
cttggcttgttttgtatctcttttc

SEQ ID NO: 68055 - DNA, 25 bp, Canis familiaris
cattgccttttttgacattttcttc

SEQ ID NO: 68056 - DNA, 25 bp, Canis familiaris
cattccatgggaaagtctcttatct

SEQ ID NO: 68057 - DNA, 25 bp, Canis familiaris
cattccagtggaaagtctgctgtgc

SEQ ID NO: 68058 - DNA, 25 bp, Canis familiaris
cttcgggggaaggagctgtgcaggg

SEQ ID NO: 68059 - DNA, 25 bp, Canis familiaris
cattcctgagggcagggctggcggg

SEQ ID NO: 68060 - DNA, 25 bp, Canis familiaris
cattcctggggtggggcttgtattg

SEQ ID NO: 68061 - DNA, 25 bp, Canis familiaris
cattcctagactccggttttatgga

SEQ ID NO: 68062 - DNA, 25 bp, Canis familiaris
ctctccattagtaccctgttaaggg

SEQ ID NO: 68063 - DNA, 25 bp, Canis familiaris
cttgccacggttctctcttaagagt

SEQ ID NO: 68064 - DNA, 25 bp, Canis familiaris
ctttcctgaggtctccctgaaatga

SEQ ID NO: 68065 - DNA, 25 bp, Canis familiaris
cttccctgggccattccaaagatga

SEQ ID NO: 68066 - DNA, 25 bp, Canis familiaris
cttccagggggcaccacaggatcaa

SEQ ID NO: 68067 - DNA, 25 bp, Canis familiaris
cttccaagggagaccactcaaacag

SEQ ID NO: 68068 - DNA, 25 bp, Canis familiaris
cttccaaactgccacctcattaaag

SEQ ID NO: 68069 - DNA, 25 bp, Canis familiaris
cttgctgccaactagactttccaaa

SEQ ID NO: 68070 - DNA, 25 bp, Canis familiaris
cttgtccatcctagattcttcagct

SEQ ID NO: 68071 - DNA, 25 bp, Canis familiaris
cttgtcgcccgtatagtcgcgagag

SEQ ID NO: 68072 - DNA, 25 bp, Canis familiaris
cgtcggcttcgtcgtagtcggacga

SEQ ID NO: 68073 - DNA, 25 bp, Canis familiaris
cgttggccagggcaactgcgaaggc

SEQ ID NO: 68074 - DNA, 25 bp, Canis familiaris
cgtactccggaacacatcgactagg

SEQ ID NO: 68075 - DNA, 25 bp, Canis familiaris
cttctgctgcgagaacgacatcgac

SEQ ID NO: 68076 - DNA, 25 bp, Canis familiaris
cttggacgagcataagctcatcaga

SEQ ID NO: 68077 - DNA, 25 bp, Canis familiaris
cttgagattgcccaacctacaggaa

SEQ ID NO: 68078 - DNA, 25 bp, Canis familiaris
cttgagactctcacaatctacggac

SEQ ID NO: 68079 - DNA, 25 bp, Canis familiaris
cattggtcttctagccatgctgagc

SEQ ID NO: 68080 - DNA, 25 bp, Canis familiaris
cattgtgttactcagtgctgctgcc

SEQ ID NO: 68081 - DNA, 25 bp, Canis familiaris
cttggaggactgcagactctgccct

SEQ ID NO: 68082 - DNA, 25 bp, Canis familiaris
cattggtggacgcaggtgtgcccat

SEQ ID NO: 68083 - DNA, 25 bp, Canis familiaris
cttggtgaggagcagcagtcgccca

SEQ ID NO: 68084 - DNA, 25 bp, Canis familiaris
cttggtgtggagctgagcccgacac

SEQ ID NO: 68085 - DNA, 25 bp, Canis familiaris
cattgggcggagctgggaaccagtg

SEQ ID NO: 68086 - DNA, 25 bp, Canis familiaris
cttgggccaatctgttgcaaccctg

SEQ ID NO: 68087 - DNA, 25 bp, Canis familiaris
cttgggccaaagggagaagctcccg

SEQ ID NO: 68088 - DNA, 25 bp, Canis familiaris
cttgcctacaaatcacatgaagtcc

SEQ ID NO: 68089 - DNA, 25 bp, Canis familiaris
cattgcctactttaacaactgtcag

SEQ ID NO: 68090 - DNA, 25 bp, Canis familiaris
cattgccatcccttgcaacaacaag

SEQ ID NO: 68091 - DNA, 25 bp, Canis familiaris
cattgccatcccttgcaacaacaag

SEQ ID NO: 68092 - DNA, 25 bp, Canis familiaris
cttccactcgttccagaactcaacg

SEQ ID NO: 68093 - DNA, 25 bp, Canis familiaris
cttgtccttgtctcataacccagag

SEQ ID NO: 68094 - DNA, 25 bp, Canis familiaris
cttgcttttacattgagaatcccag

SEQ ID NO: 68095 - DNA, 25 bp, Canis familiaris
cttgtgcttgctggcttgtgaatcc

SEQ ID NO: 68096 - DNA, 25 bp, Canis familiaris
cttggttttgtttcagatcctgatc

SEQ ID NO: 68097 - DNA, 25 bp, Canis familiaris
cttggttgctttaaggtcctgtctt

SEQ ID NO: 68098 - DNA, 25 bp, Canis familiaris
cttggtttctattcaggtcctgatc

SEQ ID NO: 68099 - DNA, 25 bp, Canis familiaris
ctctagataacctcgggccgatcgc

SEQ ID NO: 68100 - DNA, 25 bp, Canis familiaris
ctgctaaacgacacttggtcctcgc

SEQ ID NO: 68101 - DNA, 25 bp, Canis familiaris
ctggactagtacacttggacctggg

SEQ ID NO: 68102 - DNA, 25 bp, Canis familiaris
cattgttagtactacaacccctggg

SEQ ID NO: 68103 - DNA, 25 bp, Canis familiaris
cattgttcgtacccacaaagcacct

SEQ ID NO: 68104 - DNA, 25 bp, Canis familiaris
cttgttcaattccctaagtaccagg

SEQ ID NO: 68105 - DNA, 25 bp, Canis familiaris
cttgtccaattcccttaggctattg

SEQ ID NO: 68106 - DNA, 25 bp, Canis familiaris
cttggcctctttttttgatctattt

SEQ ID NO: 68107 - DNA, 25 bp, Canis familiaris
cttggccaccaattcttttagatta

SEQ ID NO: 68108 - DNA, 25 bp, Canis familiaris
cttggacactgcagctcttttcagt

SEQ ID NO: 68109 - DNA, 25 bp, Canis familiaris
cattgtcaactctttgctttacagt

SEQ ID NO: 68110 - DNA, 25 bp, Canis familiaris
cttgtctgagctgttctctttgttt

SEQ ID NO: 68111 - DNA, 25 bp, Canis familiaris
cttgctgatattgtgtttttttttt

SEQ ID NO: 68112 - DNA, 25 bp, Canis familiaris
cattgctttacggtgttatttctat

SEQ ID NO: 68113 - DNA, 25 bp, Canis familiaris
cattgtcccctgtggtattgtcttg

SEQ ID NO: 68114 - DNA, 25 bp, Canis familiaris
cttgtctacctggggtctagctgtt

SEQ ID NO: 68115 - DNA, 25 bp, Canis familiaris
cttggccaaccttcagtctagtggt

SEQ ID NO: 68116 - DNA, 25 bp, Canis familiaris
cttgggagaccaacactctagagta

SEQ ID NO: 68117 - DNA, 25 bp, Canis familiaris
cattgggaactcagcaccatgaagc

SEQ ID NO: 68118 - DNA, 25 bp, Canis familiaris
cattggccgagctggaccagtgagg

SEQ ID NO: 68119 - DNA, 25 bp, Canis familiaris
cattggcctggcagaacccatcagg

SEQ ID NO: 68120 - DNA, 25 bp, Canis familiaris
cattggccaagcaggcagctccaag

SEQ ID NO: 68121 - DNA, 25 bp, Canis familiaris
cttggatcaatggggcagtcattag

SEQ ID NO: 68122 - DNA, 25 bp, Canis familiaris
cttgagacgatgtgactgtcattct

SEQ ID NO: 68123 - DNA, 25 bp, Canis familiaris
cttgatgtcggaagcctgttgcgct

SEQ ID NO: 68124 - DNA, 25 bp, Canis familiaris
cttggtggtgctgcttgtagtctca

SEQ ID NO: 68125 - DNA, 25 bp, Canis familiaris
cattgcggtcgcgcggatcatgatg

SEQ ID NO: 68126 - DNA, 25 bp, Canis familiaris
cattggtcgcctggaggagcagctg

SEQ ID NO: 68127 - DNA, 25 bp, Canis familiaris
cattggcaccctgcagctggtgctg

SEQ ID NO: 68128 - DNA, 25 bp, Canis familiaris
cattgtccacacggctggtggctgg

SEQ ID NO: 68129 - DNA, 25 bp, Canis familiaris
cttgcttcaacagtgtttggacgga

SEQ ID NO: 68130 - DNA, 25 bp, Canis familiaris
cattgtctcctctttttaacagtga

SEQ ID NO: 68131 - DNA, 25 bp, Canis familiaris
cattgtctttctctgattaacctac

SEQ ID NO: 68132 - DNA, 25 bp, Canis familiaris
cttgtccagttctaattaatcccac

SEQ ID NO: 68133 - DNA, 25 bp, Canis familiaris
cattgggccttgcaaatacatcccc

SEQ ID NO: 68134 - DNA, 25 bp, Canis familiaris
cttggggctgcttgaccagaacccc

SEQ ID NO: 68135 - DNA, 25 bp, Canis familiaris
cttctttagttgacagcagtacgcc

SEQ ID NO: 68136 - DNA, 25 bp, Canis familiaris
cttgctttaggttctctttcgatgc

SEQ ID NO: 68137 - DNA, 25 bp, Canis familiaris
ctatttttagatcgcctgcttcggc

SEQ ID NO: 68138 - DNA, 25 bp, Canis familiaris
cttgagtcttacctgcactgttcag

SEQ ID NO: 68139 - DNA, 25 bp, Canis familiaris
cttgggccaagcccactgtatcact

SEQ ID NO: 68140 - DNA, 25 bp, Canis familiaris
cttgtggtctctgccacgtatcagt

SEQ ID NO: 68141 - DNA, 25 bp, Canis familiaris
cattggtacctgttcatctttgagg

SEQ ID NO: 68142 - DNA, 25 bp, Canis familiaris
cttgagaattctctctctctaaagt

SEQ ID NO: 68143 - DNA, 25 bp, Canis familiaris
cttgatacattagcccttaaactat

SEQ ID NO: 68144 - DNA, 25 bp, Canis familiaris
cttgagactctagcctcttgcaaag

SEQ ID NO: 68145 - DNA, 25 bp, Canis familiaris
cttggaggctctgcctcccagagag

SEQ ID NO: 68146 - DNA, 25 bp, Canis familiaris
cttggagtctgaggttccgacaggc

SEQ ID NO: 68147 - DNA, 25 bp, Canis familiaris
cttgagcagtttttgtccggctggc

SEQ ID NO: 68148 - DNA, 25 bp, Canis familiaris
cttggcagggcttaggccggtgcca

SEQ ID NO: 68149 - DNA, 25 bp, Canis familiaris
cttggctggcgccaatggtgtgggc

SEQ ID NO: 68150 - DNA, 25 bp, Canis familiaris
cttcctgtccacgtgggagttgttg

SEQ ID NO: 68151 - DNA, 25 bp, Canis familiaris
cttctgtgatcttggggggtttctg

SEQ ID NO: 68152 - DNA, 25 bp, Canis familiaris
cttcgtgcccgacggggactacgag

SEQ ID NO: 68153 - DNA, 25 bp, Canis familiaris
ctacctggagaaccggcagcactac

SEQ ID NO: 68154 - DNA, 25 bp, Canis familiaris
cttccgtcaaacagcgagcctaggc

SEQ ID NO: 68155 - DNA, 25 bp, Canis familiaris
cttctcgttggagccggcgataggc

SEQ ID NO: 68156 - DNA, 25 bp, Canis familiaris
cgtccttgaaggccctggcaaaggc

SEQ ID NO: 68157 - DNA, 25 bp, Canis familiaris
cttccttgccaacccttagcaaagc

SEQ ID NO: 68158 - DNA, 25 bp, Canis familiaris
cttccttgtccatgtctaagcacag

SEQ ID NO: 68159 - DNA, 25 bp, Canis familiaris
cttcctctgagccatgatgccaaga

SEQ ID NO: 68160 - DNA, 25 bp, Canis familiaris
cttgtcctgcatccacatgcaataa

SEQ ID NO: 68161 - DNA, 25 bp, Canis familiaris
cttgcccatgcaacccattaaattg

SEQ ID NO: 68162 - DNA, 25 bp, Canis familiaris
cttgccgtgtctggcaccgaaaata

SEQ ID NO: 68163 - DNA, 25 bp, Canis familiaris
cttgcctttgggaccagaacaaagt

SEQ ID NO: 68164 - DNA, 25 bp, Canis familiaris
cttggcttctgggcctgagaatcaa

SEQ ID NO: 68165 - DNA, 25 bp, Canis familiaris
cttgaactcacgacctcgagataaa

SEQ ID NO: 68166 - DNA, 25 bp, Canis familiaris
cttgacaccacgtcgggactacaga

SEQ ID NO: 68167 - DNA, 25 bp, Canis familiaris
cttgagcatccccgggctgaataaa

SEQ ID NO: 68168 - DNA, 25 bp, Canis familiaris
cttgacccccagagtgtagatgcta

SEQ ID NO: 68169 - DNA, 25 bp, Canis familiaris
cttgacccctgagacctcaggcgtc

SEQ ID NO: 68170 - DNA, 25 bp, Canis familiaris
ctctccccttcaggccaaagggttg

SEQ ID NO: 68171 - DNA, 25 bp, Canis familiaris
cttgcccttgcctgacaaagagttt

SEQ ID NO: 68172 - DNA, 25 bp, Canis familiaris
cttacactatacaacctgaaagtgc

SEQ ID NO: 68173 - DNA, 25 bp, Canis familiaris
cttatacctcaaaagctgcttactc

SEQ ID NO: 68174 - DNA, 25 bp, Canis familiaris
cttaatgctcattacccagttaccc

SEQ ID NO: 68175 - DNA, 25 bp, Canis familiaris
cttgtcagtcaatgttcactacccc

SEQ ID NO: 68176 - DNA, 25 bp, Canis familiaris
cttcgggactggatcacattcccct

SEQ ID NO: 68177 - DNA, 25 bp, Canis familiaris
cttcgggcactcctagaaagcatcc

SEQ ID NO: 68178 - DNA, 25 bp, Canis familiaris
cttcggcagctccagctgcatggaa

SEQ ID NO: 68179 - DNA, 25 bp, Canis familiaris
cttcctcagctggaaaggagggggg

SEQ ID NO: 68180 - DNA, 25 bp, Canis familiaris
cttcccgcctaagcatcgcaaaggg

SEQ ID NO: 68181 - DNA, 25 bp, Canis familiaris
cttccgctggcttggaccgaaagga

SEQ ID NO: 68182 - DNA, 25 bp, Canis familiaris
cttcccggccatttccagaagggag

SEQ ID NO: 68183 - DNA, 25 bp, Canis familiaris
cttccccgtcgagttcaagagggag

SEQ ID NO: 68184 - DNA, 25 bp, Canis familiaris
cttcccgcgtagttacaggagccac

SEQ ID NO: 68185 - DNA, 25 bp, Canis familiaris
ctttccgaggaaatccaagtgcggc

SEQ ID NO: 68186 - DNA, 25 bp, Canis familiaris
ctttctgggagatggccaattgggt

SEQ ID NO: 68187 - DNA, 25 bp, Canis familiaris
cttctcgggagaagggccctggagc

SEQ ID NO: 68188 - DNA, 25 bp, Canis familiaris
cttctgccgtggccatggtccacgg

SEQ ID NO: 68189 - DNA, 25 bp, Canis familiaris
cttgcctagtacctgggccacaggt

SEQ ID NO: 68190 - DNA, 25 bp, Canis familiaris
cttgccgtgtcagctatgtgctacg

SEQ ID NO: 68191 - DNA, 25 bp, Canis familiaris
cttggcacgtcgtcctgttatagga

SEQ ID NO: 68192 - DNA, 25 bp, Canis familiaris
cttggcaaccactctgtctacaaga

SEQ ID NO: 68193 - DNA, 25 bp, Canis familiaris
ctatagaacaacgttgtacaaagaa

SEQ ID NO: 68194 - DNA, 25 bp, Canis familiaris
cttgaacttgaccagtgtgaaaaaa

SEQ ID NO: 68195 - DNA, 25 bp, Canis familiaris
cttcaagttgcacgtgcctataaaa

SEQ ID NO: 68196 - DNA, 25 bp, Canis familiaris
cttccagaccgcggcctaataatga

SEQ ID NO: 68197 - DNA, 25 bp, Canis familiaris
cttgccccacgaggccaaaatgcag

SEQ ID NO: 68198 - DNA, 25 bp, Canis familiaris
cttgcaggttcggtgctgaaaatgc

SEQ ID NO: 68199 - DNA, 25 bp, Canis familiaris
cttgaatttctcatctgaagccatg

SEQ ID NO: 68200 - DNA, 25 bp, Canis familiaris
cttgacactctggctgtttgacttg

SEQ ID NO: 68201 - DNA, 25 bp, Canis familiaris
cttgaagctcgacgtcattcagctt

SEQ ID NO: 68202 - DNA, 25 bp, Canis familiaris
cttggcactgggttgattcatgtct

SEQ ID NO: 68203 - DNA, 25 bp, Canis familiaris
cttggcctagtgccagttctgagaa

SEQ ID NO: 68204 - DNA, 25 bp, Canis familiaris
cttgtccgagcgccaggtcaagatc

SEQ ID NO: 68205 - DNA, 25 bp, Canis familiaris
cttggctgggctgcggccaagcagc

SEQ ID NO: 68206 - DNA, 25 bp, Canis familiaris
cttggccaggtggccctgcagtatg

SEQ ID NO: 68207 - DNA, 25 bp, Canis familiaris
ctatgtgccgggcaccacgctaagt

SEQ ID NO: 68208 - DNA, 25 bp, Canis familiaris
cttggctccagtcaccagtatgaga

SEQ ID NO: 68209 - DNA, 25 bp, Canis familiaris
cttggttttaagtatgtatggaatg

SEQ ID NO: 68210 - DNA, 25 bp, Canis familiaris
cattggttgttgagttctaggaaga

SEQ ID NO: 68211 - DNA, 25 bp, Canis familiaris
cttggggtcatgagtttgagtccca

SEQ ID NO: 68212 - DNA, 25 bp, Canis familiaris
cttggggtccaggttgtgatctcgg

SEQ ID NO: 68213 - DNA, 25 bp, Canis familiaris
cttggccttcaagttggttctgtgg

SEQ ID NO: 68214 - DNA, 25 bp, Canis familiaris
cttcgcttccaagttctgtttggag

SEQ ID NO: 68215 - DNA, 25 bp, Canis familiaris
cttggggctcagtttcttcatatgg

SEQ ID NO: 68216 - DNA, 25 bp, Canis familiaris
cttgcaggagcttagtttccttcag

SEQ ID NO: 68217 - DNA, 25 bp, Canis familiaris
cttcagaaccttcattcctcagggt

SEQ ID NO: 68218 - DNA, 25 bp, Canis familiaris
cttgcaaagcgttcgcatcgcctag

SEQ ID NO: 68219 - DNA, 25 bp, Canis familiaris
cttgcctagcgttcagacaccaata

SEQ ID NO: 68220 - DNA, 25 bp, Canis familiaris
cttgcacaaggcttcacacagccag

SEQ ID NO: 68221 - DNA, 25 bp, Canis familiaris
cttgcaatacctcacagagccagcc

SEQ ID NO: 68222 - DNA, 25 bp, Canis familiaris
cttggtgactctagataacctcggg

SEQ ID NO: 68223 - DNA, 25 bp, Canis familiaris
cttggtccactgcaaaccttgatgg

SEQ ID NO: 68224 - DNA, 25 bp, Canis familiaris
cattggctttctcccaaatattggg

SEQ ID NO: 68225 - DNA, 25 bp, Canis familiaris
ctctggctagtctcaaagttcgtat

SEQ ID NO: 68226 - DNA, 25 bp, Canis familiaris
cttccatcaagctcaactgttctgt

SEQ ID NO: 68227 - DNA, 25 bp, Canis familiaris
cttcgctgaatatatacaggtatgt

SEQ ID NO: 68228 - DNA, 25 bp, Canis familiaris
cttgccgactgatatccacgaggag

SEQ ID NO: 68229 - DNA, 25 bp, Canis familiaris
cttgccgagtcctagctactgaagg

SEQ ID NO: 68230 - DNA, 25 bp, Canis familiaris
cttggctgtgtgttcactacggcat

SEQ ID NO: 68231 - DNA, 25 bp, Canis familiaris
cttggctggctactactgagcaggt

SEQ ID NO: 68232 - DNA, 25 bp, Canis familiaris
cttggcttctcagttctgtgttgta

SEQ ID NO: 68233 - DNA, 25 bp, Canis familiaris
cttggcttccaatctgatgggcatg

SEQ ID NO: 68234 - DNA, 25 bp, Canis familiaris
cttggccttcaatgctctttgcata

SEQ ID NO: 68235 - DNA, 25 bp, Canis familiaris
cttcgtcttgcatccagtttgacta

SEQ ID NO: 68236 - DNA, 25 bp, Canis familiaris
cttgtggtgtgaccctgttcaatta

SEQ ID NO: 68237 - DNA, 25 bp, Canis familiaris
cttggtggtggctgtgtccacagtc

SEQ ID NO: 68238 - DNA, 25 bp, Canis familiaris
cttcaggggagatgttgaccagtat

SEQ ID NO: 68239 - DNA, 25 bp, Canis familiaris
cttccaggccagtcagtgggcggga

SEQ ID NO: 68240 - DNA, 25 bp, Canis familiaris
cttgtcatcgccccaggaggggctg

SEQ ID NO: 68241 - DNA, 25 bp, Canis familiaris
cttgctctggcctcaggaacttggc

SEQ ID NO: 68242 - DNA, 25 bp, Canis familiaris
cttgtctggcccccaaagtgggaag

SEQ ID NO: 68243 - DNA, 25 bp, Canis familiaris
cttgcttaccctcacacctgaggga

SEQ ID NO: 68244 - DNA, 25 bp, Canis familiaris
cttgcatatcacaactggacccaga

SEQ ID NO: 68245 - DNA, 25 bp, Canis familiaris
cttgccatttacaatgatgcggatg

SEQ ID NO: 68246 - DNA, 25 bp, Canis familiaris
cttgccatttgcaatgacgtggata

SEQ ID NO: 68247 - DNA, 25 bp, Canis familiaris
cttgcctttgttttgtggaatccag

SEQ ID NO: 68248 - DNA, 25 bp, Canis familiaris
cttcctttgtgtgtgaaagatcctc

SEQ ID NO: 68249 - DNA, 25 bp, Canis familiaris
cttccttcctgggtatggagtcctg

SEQ ID NO: 68250 - DNA, 25 bp, Canis familiaris
cttccttcctgggtgagccagactt

SEQ ID NO: 68251 - DNA, 25 bp, Canis familiaris
cttccttcactttagacatcgatat

SEQ ID NO: 68252 - DNA, 25 bp, Canis familiaris
cttgtctccagcctgaaaccagtac

SEQ ID NO: 68253 - DNA, 25 bp, Canis familiaris
cttggctccatcctgagaggtcagt

SEQ ID NO: 68254 - DNA, 25 bp, Canis familiaris
cttcctgcagcagctgaaggtgttt

SEQ ID NO: 68255 - DNA, 25 bp, Canis familiaris
cttcctgcagctgcataactggatc

SEQ ID NO: 68256 - DNA, 25 bp, Canis familiaris
cttgtcatcaatggaaatcccatca

SEQ ID NO: 68257 - DNA, 25 bp, Canis familiaris
cttgctattctggagaatgccaacg

SEQ ID NO: 68258 - DNA, 25 bp, Canis familiaris
cttgcagccttgtcagaacacacac

SEQ ID NO: 68259 - DNA, 25 bp, Canis familiaris
cttgccacttgggagaccaacactc

SEQ ID NO: 68260 - DNA, 25 bp, Canis familiaris
cttggccttctgaaggtcacctgcc

SEQ ID NO: 68261 - DNA, 25 bp, Canis familiaris
ctcatggcctttattgtaccttctc

SEQ ID NO: 68262 - DNA, 25 bp, Canis familiaris
cttgatggttgtttttctccttcta

SEQ ID NO: 68263 - DNA, 25 bp, Canis familiaris
cttgatcgttaattccatacctttg

SEQ ID NO: 68264 - DNA, 25 bp, Canis familiaris
cttgcacaatgctgaacgtaccttt

SEQ ID NO: 68265 - DNA, 25 bp, Canis familiaris
cttgcagattcttactcctatgcct

SEQ ID NO: 68266 - DNA, 25 bp, Canis familiaris
cttggattctagtcacagctctttt

SEQ ID NO: 68267 - DNA, 25 bp, Canis familiaris
cttgtgttctgcccaacatttcatt

SEQ ID NO: 68268 - DNA, 25 bp, Canis familiaris
cttggcttcatggcctaacactttg

SEQ ID NO: 68269 - DNA, 25 bp, Canis familiaris
cttggccctgctgtaaagcccataa

SEQ ID NO: 68270 - DNA, 25 bp, Canis familiaris
cttgtacctatctttgaaggccatt

SEQ ID NO: 68271 - DNA, 25 bp, Canis familiaris
cttctaccttcgacacagtgggatt

SEQ ID NO: 68272 - DNA, 25 bp, Canis familiaris
cttgcatgacagctccagcagggag

SEQ ID NO: 68273 - DNA, 25 bp, Canis familiaris
cttgcagccaccagcatgagggaga

SEQ ID NO: 68274 - DNA, 25 bp, Canis familiaris
cttgccaccttggcaagggctgtgt

SEQ ID NO: 68275 - DNA, 25 bp, Canis familiaris
cttgcccaccttttagagtcttagg

SEQ ID NO: 68276 - DNA, 25 bp, Canis familiaris
cttgtcctgttcattatgcgtttaa

SEQ ID NO: 68277 - DNA, 25 bp, Canis familiaris
cttggcctgtctgttatgtttttat

SEQ ID NO: 68278 - DNA, 25 bp, Canis familiaris
cttggtcgttctctatgttctaaat

SEQ ID NO: 68279 - DNA, 25 bp, Canis familiaris
cttgtcttttctctttgccaaaata

SEQ ID NO: 68280 - DNA, 25 bp, Canis familiaris
cttgtctactttgcttggctcaata

SEQ ID NO: 68281 - DNA, 25 bp, Canis familiaris
cttgtctcttttgttcaccagtata

SEQ ID NO: 68282 - DNA, 25 bp, Canis familiaris
cttgttcctctagtattacacactt

SEQ ID NO: 68283 - DNA, 25 bp, Canis familiaris
cttgtgtcacttttgttggagcctg

SEQ ID NO: 68284 - DNA, 25 bp, Canis familiaris
cttggcagccttgattagtgagcgc

SEQ ID NO: 68285 - DNA, 25 bp, Canis familiaris
cttccacgttgaattcaccagtgga

SEQ ID NO: 68286 - DNA, 25 bp, Canis familiaris
cttccacttctaaccctcagaagtt

SEQ ID NO: 68287 - DNA, 25 bp, Canis familiaris
cttgtcctttggtccctaatagcca

SEQ ID NO: 68288 - DNA, 25 bp, Canis familiaris
cttgctcctttgggctgattcaata

SEQ ID NO: 68289 - DNA, 25 bp, Canis familiaris
cttgtcctggatccctatttattaa

SEQ ID NO: 68290 - DNA, 25 bp, Canis familiaris
cttcgcgagagatcctttttctagg

SEQ ID NO: 68291 - DNA, 25 bp, Canis familiaris
cttccgaactgttgtttctttgact

SEQ ID NO: 68292 - DNA, 25 bp, Canis familiaris
cttatcgaaggccagtcccgtatga

SEQ ID NO: 68293 - DNA, 25 bp, Canis familiaris
cttgaagaatggccaccgggtttca

SEQ ID NO: 68294 - DNA, 25 bp, Canis familiaris
cttggatgagtgatggccgcagggc

SEQ ID NO: 68295 - DNA, 25 bp, Canis familiaris
cttggatggatgagtccgcttgtca

SEQ ID NO: 68296 - DNA, 25 bp, Canis familiaris
cttggagggctactctcctccatac

SEQ ID NO: 68297 - DNA, 25 bp, Canis familiaris
cttcgagtgccattctgctttttga

SEQ ID NO: 68298 - DNA, 25 bp, Canis familiaris
cttgtggcctgtttgctttgagtgc

SEQ ID NO: 68299 - DNA, 25 bp, Canis familiaris
cttggcagccgatcagttgtgtgtc

SEQ ID NO: 68300 - DNA, 25 bp, Canis familiaris
cttggcccagtcccatgggttgggc

SEQ ID NO: 68301 - DNA, 25 bp, Canis familiaris
cttggccgcagagctgaggtggggg

SEQ ID NO: 68302 - DNA, 25 bp, Canis familiaris
cttggttcagatgcagggggtgggg

SEQ ID NO: 68303 - DNA, 25 bp, Canis familiaris
ctatggtatacgccagcgacgcggc

SEQ ID NO: 68304 - DNA, 25 bp, Canis familiaris
cttgtattacgattcgcacgatgag

SEQ ID NO: 68305 - DNA, 25 bp, Canis familiaris
cttgtcatgtacccatccataaagt

SEQ ID NO: 68306 - DNA, 25 bp, Canis familiaris
cttgcatctgaagacatcagccaca

SEQ ID NO: 68307 - DNA, 25 bp, Canis familiaris
cttgcatcagtatgcccaagccatc

SEQ ID NO: 68308 - DNA, 25 bp, Canis familiaris
cttgacattagaacgagccctccga

SEQ ID NO: 68309 - DNA, 25 bp, Canis familiaris
cttccaggagcgagatccctccaaa

SEQ ID NO: 68310 - DNA, 25 bp, Canis familiaris
cttccagggaccaatccctagaatt

SEQ ID NO: 68311 - DNA, 25 bp, Canis familiaris
cttcctggacctaaccccagaatgg

SEQ ID NO: 68312 - DNA, 25 bp, Canis familiaris
cttcgaggacctaaaccagcaggca

SEQ ID NO: 68313 - DNA, 25 bp, Canis familiaris
cttgggtctcccaaattcacatggc

SEQ ID NO: 68314 - DNA, 25 bp, Canis familiaris
cttggcaacccctagttgcctggga

SEQ ID NO: 68315 - DNA, 25 bp, Canis familiaris
cttgcccactgtcaggttgtctggg

SEQ ID NO: 68316 - DNA, 25 bp, Canis familiaris
cttgccctttgagagtattgcggag

SEQ ID NO: 68317 - DNA, 25 bp, Canis familiaris
cttgtgcttttatactttgtggcag

SEQ ID NO: 68318 - DNA, 25 bp, Canis familiaris
cttgccctttaacatcggagatgcg

SEQ ID NO: 68319 - DNA, 25 bp, Canis familiaris
ctaccacgatagcagaattgaacac

SEQ ID NO: 68320 - DNA, 25 bp, Canis familiaris
ctaaaccagggtaattcaacacttg

SEQ ID NO: 68321 - DNA, 25 bp, Canis familiaris
ctacattttgggtattctttcacta

SEQ ID NO: 68322 - DNA, 25 bp, Canis familiaris
cttccttgtaagaatcctttactat

SEQ ID NO: 68323 - DNA, 25 bp, Canis familiaris
cttcccatggttatccgttatcaca

SEQ ID NO: 68324 - DNA, 25 bp, Canis familiaris
cttccctcagtcttacagtgttaac

SEQ ID NO: 68325 - DNA, 25 bp, Canis familiaris
cttctcgtagtatcggagttcactg

SEQ ID NO: 68326 - DNA, 25 bp, Canis familiaris
cttcctgtggtatctatttaacatg

SEQ ID NO: 68327 - DNA, 25 bp, Canis familiaris
cttccgtgctacttctagactaaca

SEQ ID NO: 68328 - DNA, 25 bp, Canis familiaris
cttccgtataagatcaggccaaatg

SEQ ID NO: 68329 - DNA, 25 bp, Canis familiaris
cttccgtgtgaacttccggctgaag

SEQ ID NO: 68330 - DNA, 25 bp, Canis familiaris
cttcctgatgtatcgttgtggccta

SEQ ID NO: 68331 - DNA, 25 bp, Canis familiaris
cttgcccagtaagctcagaaggcta

SEQ ID NO: 68332 - DNA, 25 bp, Canis familiaris
cttgccctgaattttccacatggag

SEQ ID NO: 68333 - DNA, 25 bp, Canis familiaris
cttgcaccgtattgagtctcaagaa

SEQ ID NO: 68334 - DNA, 25 bp, Canis familiaris
cttgccttgccatgagactcaggag

SEQ ID NO: 68335 - DNA, 25 bp, Canis familiaris
cttccggcgcataaagtcagcaagg

SEQ ID NO: 68336 - DNA, 25 bp, Canis familiaris
cttcctggcaggtagcttaaagagt

SEQ ID NO: 68337 - DNA, 25 bp, Canis familiaris
ctttcacagaggcatctttaacgtt

SEQ ID NO: 68338 - DNA, 25 bp, Canis familiaris
cttctcactggaggatccccagact

SEQ ID NO: 68339 - DNA, 25 bp, Canis familiaris
cttccttgagatgccagccagcaac

SEQ ID NO: 68340 - DNA, 25 bp, Canis familiaris
cttccaggagctgctgcaggacctg

SEQ ID NO: 68341 - DNA, 25 bp, Canis familiaris
cttccagcgcagtgccagtactgca

SEQ ID NO: 68342 - DNA, 25 bp, Canis familiaris
cttgctcagcgatggcagttcctga

SEQ ID NO: 68343 - DNA, 25 bp, Canis familiaris
cttctaggcggactgttactgagct

SEQ ID NO: 68344 - DNA, 25 bp, Canis familiaris
cttccacggcagctatatatctgga

SEQ ID NO: 68345 - DNA, 25 bp, Canis familiaris
cttgcccagccccaaatgtaggaag

SEQ ID NO: 68346 - DNA, 25 bp, Canis familiaris
cttcccactgtgccaaaaacagata

SEQ ID NO: 68347 - DNA, 25 bp, Canis familiaris
cttcccaccggccaaggcaagataa

SEQ ID NO: 68348 - DNA, 25 bp, Canis familiaris
cttgcaccacacaggcacaggggaa

SEQ ID NO: 68349 - DNA, 25 bp, Canis familiaris
cttgccccaggaccagacggggaag

SEQ ID NO: 68350 - DNA, 25 bp, Canis familiaris
cttcccggacagctgcaggaggtaa

SEQ ID NO: 68351 - DNA, 25 bp, Canis familiaris
cttccctgagtacgctgggggctag

SEQ ID NO: 68352 - DNA, 25 bp, Canis familiaris
cttgacctggggcctgggaggaggc

SEQ ID NO: 68353 - DNA, 25 bp, Canis familiaris
cttgaatcccacccgaggagcgggc

SEQ ID NO: 68354 - DNA, 25 bp, Canis familiaris
cttgccatcaacaccagtgggggga

SEQ ID NO: 68355 - DNA, 25 bp, Canis familiaris
cttgcccagactccgaggttaggtg

SEQ ID NO: 68356 - DNA, 25 bp, Canis familiaris
cttgcctcgcttctcaaattaagat

SEQ ID NO: 68357 - DNA, 25 bp, Canis familiaris
cttgttccactgctctattacgagt

SEQ ID NO: 68358 - DNA, 25 bp, Canis familiaris
cttggtccctgccatttgttgggga

SEQ ID NO: 68359 - DNA, 25 bp, Canis familiaris
cttgggccctgccaattaatgttaa

SEQ ID NO: 68360 - DNA, 25 bp, Canis familiaris
cttgggctccttttctatattaata

SEQ ID NO: 68361 - DNA, 25 bp, Canis familiaris
cttgggcatcttacttttgttcatt

SEQ ID NO: 68362 - DNA, 25 bp, Canis familiaris
cttgggcactggtaatttgttctta

SEQ ID NO: 68363 - DNA, 25 bp, Canis familiaris
cttgtgccctggagatagcttttac

SEQ ID NO: 68364 - DNA, 25 bp, Canis familiaris
cttgtacctgtatgtcttttagaaa

SEQ ID NO: 68365 - DNA, 25 bp, Canis familiaris
cttgtttctgtatcttcatttagca

SEQ ID NO: 68366 - DNA, 25 bp, Canis familiaris
cttgatcctctgcaacgtgcttgaa

SEQ ID NO: 68367 - DNA, 25 bp, Canis familiaris
ctttgcccaggctacttttgaagcg

SEQ ID NO: 68368 - DNA, 25 bp, Canis familiaris
cttgtgctcccctctgtgtgggagc

SEQ ID NO: 68369 - DNA, 25 bp, Canis familiaris
cttgtgtgccccagctggtgaaaga

SEQ ID NO: 68370 - DNA, 25 bp, Canis familiaris
cttgtcccgcgccgagagagagaaa

SEQ ID NO: 68371 - DNA, 25 bp, Canis familiaris
cttcctcctgcccgaagagagactg

SEQ ID NO: 68372 - DNA, 25 bp, Canis familiaris
cttaccagctccagcaacaggtcag

SEQ ID NO: 68373 - DNA, 25 bp, Canis familiaris
cttgtccttctcacagatactggca

SEQ ID NO: 68374 - DNA, 25 bp, Canis familiaris
cttgacagtcttttcaggacatgac

SEQ ID NO: 68375 - DNA, 25 bp, Canis familiaris
cttccagtcttatgaggacagcctc

SEQ ID NO: 68376 - DNA, 25 bp, Canis familiaris
cttctcctacgacgaggacactctc

SEQ ID NO: 68377 - DNA, 25 bp, Canis familiaris
cttccacttggacgagcataagctc

SEQ ID NO: 68378 - DNA, 25 bp, Canis familiaris
cttgtcactctgccacatggtaagt

SEQ ID NO: 68379 - DNA, 25 bp, Canis familiaris
cttgaggcctgagtcgcgtgaagtg

SEQ ID NO: 68380 - DNA, 25 bp, Canis familiaris
cttgacgagggattgtgtgtgtgtg

SEQ ID NO: 68381 - DNA, 25 bp, Canis familiaris
cttgcagcagggccagtgctttgga

SEQ ID NO: 68382 - DNA, 25 bp, Canis familiaris
cttgcgctgttagtggcttctgcgg

SEQ ID NO: 68383 - DNA, 25 bp, Canis familiaris
cttgcactctttggacatgctcatc

SEQ ID NO: 68384 - DNA, 25 bp, Canis familiaris
cttgattcatgttggcttctccagc

SEQ ID NO: 68385 - DNA, 25 bp, Canis familiaris
cttgcttggaagcattgcccagctt

SEQ ID NO: 68386 - DNA, 25 bp, Canis familiaris
cttgaggaccatatctgcctaccat

SEQ ID NO: 68387 - DNA, 25 bp, Canis familiaris
cttgagaggccagattgctcccagt

SEQ ID NO: 68388 - DNA, 25 bp, Canis familiaris
cttgcagggccacaagtgtgccgtc

SEQ ID NO: 68389 - DNA, 25 bp, Canis familiaris
cttgcaggagccgcaagcggtgctg

SEQ ID NO: 68390 - DNA, 25 bp, Canis familiaris
cttcgagagtcggtggcgtgtcggt

SEQ ID NO: 68391 - DNA, 25 bp, Canis familiaris
cttcgagcgttgttgcggttgtcgg

SEQ ID NO: 68392 - DNA, 25 bp, Canis familiaris
cttccatggtgtccatcggttctac

SEQ ID NO: 68393 - DNA, 25 bp, Canis familiaris
cttgcactttgggcctgttttacga

SEQ ID NO: 68394 - DNA, 25 bp, Canis familiaris
cttgtttccatggcctgtttgtaca

SEQ ID NO: 68395 - DNA, 25 bp, Canis familiaris
cttgctcaacacgggctttttacaa

SEQ ID NO: 68396 - DNA, 25 bp, Canis familiaris
cttgtcaactctgctcttgtttaaa

SEQ ID NO: 68397 - DNA, 25 bp, Canis familiaris
cttgtcattgttcctttgtttgtta

SEQ ID NO: 68398 - DNA, 25 bp, Canis familiaris
cttgtgtctgtttgttgctgttttt

SEQ ID NO: 68399 - DNA, 25 bp, Canis familiaris
cttgttctttagtctcttaatcttc

SEQ ID NO: 68400 - DNA, 25 bp, Canis familiaris
cttgcatattataatcctcctacac

SEQ ID NO: 68401 - DNA, 25 bp, Canis familiaris
cttgctgaaataagctctactagaa

SEQ ID NO: 68402 - DNA, 25 bp, Canis familiaris
cttgcctgagacactaactaaaccc

SEQ ID NO: 68403 - DNA, 25 bp, Canis familiaris
cttcctgcagaatgttctcaacaac

SEQ ID NO: 68404 - DNA, 25 bp, Canis familiaris
cttccgcaagaacatctccaaggcc

SEQ ID NO: 68405 - DNA, 25 bp, Canis familiaris
cttccaccaaagaatgctccggttc

SEQ ID NO: 68406 - DNA, 25 bp, Canis familiaris
cttccaccaaatatgctccggtcag

SEQ ID NO: 68407 - DNA, 25 bp, Canis familiaris
cttcccgtggagtttccaggtcagg

SEQ ID NO: 68408 - DNA, 25 bp, Canis familiaris
cttcctcgggggacatcttggtagg

SEQ ID NO: 68409 - DNA, 25 bp, Canis familiaris
cttcccggacaaacatttactgagt

SEQ ID NO: 68410 - DNA, 25 bp, Canis familiaris
cttcccttgaagaaataccagcctt

SEQ ID NO: 68411 - DNA, 25 bp, Canis familiaris
cttagtctccaaatgaaagctagat

SEQ ID NO: 68412 - DNA, 25 bp, Canis familiaris
cttccattccacgtgaaagacagtg

SEQ ID NO: 68413 - DNA, 25 bp, Canis familiaris
cttccttcaagctccagagccagtg

SEQ ID NO: 68414 - DNA, 25 bp, Canis familiaris
cttccagttgatccccaggagagga

SEQ ID NO: 68415 - DNA, 25 bp, Canis familiaris
cttcggtgtcatcgagctgtgtgga

SEQ ID NO: 68416 - DNA, 25 bp, Canis familiaris
cttcctggcatacacgttggcatgc

SEQ ID NO: 68417 - DNA, 25 bp, Canis familiaris
ctttcggatccaaggttggcccttg

SEQ ID NO: 68418 - DNA, 25 bp, Canis familiaris
cttaagattccactggttggcccac

SEQ ID NO: 68419 - DNA, 25 bp, Canis familiaris
cttaaaccgcggagatgcgtccacc

SEQ ID NO: 68420 - DNA, 25 bp, Canis familiaris
cttgaaaccaaaccaagcagtccct

SEQ ID NO: 68421 - DNA, 25 bp, Canis familiaris
cttgaagtcacatagctggagagcc

SEQ ID NO: 68422 - DNA, 25 bp, Canis familiaris
cttccagaacatcagctcagagcac

SEQ ID NO: 68423 - DNA, 25 bp, Canis familiaris
cttcctggcacaggctgtcgacagc

SEQ ID NO: 68424 - DNA, 25 bp, Canis familiaris
cttcctggagggtcatcagcagcat

SEQ ID NO: 68425 - DNA, 25 bp, Canis familiaris
cttccagcagatgtggatcagcaag

SEQ ID NO: 68426 - DNA, 25 bp, Canis familiaris
cttccagcagatgtggatcagcaag

SEQ ID NO: 68427 - DNA, 25 bp, Canis familiaris
cttccctgagccagactgccaggga

SEQ ID NO: 68428 - DNA, 25 bp, Canis familiaris
cttccggggcaccctaatgtggtgg

SEQ ID NO: 68429 - DNA, 25 bp, Canis familiaris
cttccggaggagtacctagtgagct

SEQ ID NO: 68430 - DNA, 25 bp, Canis familiaris
cttcctgggtagatgccttggtgta

SEQ ID NO: 68431 - DNA, 25 bp, Canis familiaris
cttccggagggattgttctggttca

SEQ ID NO: 68432 - DNA, 25 bp, Canis familiaris
cttgaggaggggctgcttctgaggt

SEQ ID NO: 68433 - DNA, 25 bp, Canis familiaris
cttgaggaggggctgcttctgaggt

SEQ ID NO: 68434 - DNA, 25 bp, Canis familiaris
cttgaggaggggctgcttctgaggt

SEQ ID NO: 68435 - DNA, 25 bp, Canis familiaris
cttgaggaggggctgcttctgaggt

SEQ ID NO: 68436 - DNA, 25 bp, Canis familiaris
cttgaggaggggctgcttctgaggt

SEQ ID NO: 68437 - DNA, 25 bp, Canis familiaris
cttgaggaggggctgcttctgaggt

SEQ ID NO: 68438 - DNA, 25 bp, Canis familiaris
cttgaggaggggctgcttctgaggt

SEQ ID NO: 68439 - DNA, 25 bp, Canis familiaris
cttgaggaggggctgcttctgaggt

SEQ ID NO: 68440 - DNA, 25 bp, Canis familiaris
cttgaggaggggctgcttctgaggt

SEQ ID NO: 68441 - DNA, 25 bp, Canis familiaris
cttgaggaggggctgcttctgaggt

SEQ ID NO: 68442 - DNA, 25 bp, Canis familiaris
cttgaggaggggctgcttctgaggt

SEQ ID NO: 68443 - DNA, 25 bp, Canis familiaris
cttgaggaggggctgcttctgaggt

SEQ ID NO: 68444 - DNA, 25 bp, Canis familiaris
cttgaggaggggctgcttctgaggt

SEQ ID NO: 68445 - DNA, 25 bp, Canis familiaris
cttgaggaggggctgcttctgaggt

SEQ ID NO: 68446 - DNA, 25 bp, Canis familiaris
cttgaggaggggctgcttctgaggt

SEQ ID NO: 68447 - DNA, 25 bp, Canis familiaris
cttaggggtgagtgtgtgcgtgcgt

SEQ ID NO: 68448 - DNA, 25 bp, Canis familiaris
ctttggggttctttgaggatcactt

SEQ ID NO: 68449 - DNA, 25 bp, Canis familiaris
cttgtatgagtttccttgggagctc

SEQ ID NO: 68450 - DNA, 25 bp, Canis familiaris
cttgtaagcttcgctgtgtcggagc

SEQ ID NO: 68451 - DNA, 25 bp, Canis familiaris
cttgtaagctgtcctgttctcagtg

SEQ ID NO: 68452 - DNA, 25 bp, Canis familiaris
cttgatatagctccctggatctttg

SEQ ID NO: 68453 - DNA, 25 bp, Canis familiaris
cttgcagtcgccagtggtggttgtg

SEQ ID NO: 68454 - DNA, 25 bp, Canis familiaris
cttgcagtcgccagtggtggttgtg

SEQ ID NO: 68455 - DNA, 25 bp, Canis familiaris
cttgctgtcttttttgggactgctg

SEQ ID NO: 68456 - DNA, 25 bp, Canis familiaris
cttctgtttatagtggctggtgcca

SEQ ID NO: 68457 - DNA, 25 bp, Canis familiaris
cttgtgctcattacagaagcggtcc

SEQ ID NO: 68458 - DNA, 25 bp, Canis familiaris
cttgtgctctggaaatacgcgtgaa

SEQ ID NO: 68459 - DNA, 25 bp, Canis familiaris
cttgaccggaatagcagccctgagc

SEQ ID NO: 68460 - DNA, 25 bp, Canis familiaris
cttgcgccagtggaggagaccggcc

SEQ ID NO: 68461 - DNA, 25 bp, Canis familiaris
cttgagccagagcttgagaccggcc

SEQ ID NO: 68462 - DNA, 25 bp, Canis familiaris
cttgaggcgcgcctggaaggcctcg

SEQ ID NO: 68463 - DNA, 25 bp, Canis familiaris
cttgcagctgccgcggacagctgta

SEQ ID NO: 68464 - DNA, 25 bp, Canis familiaris
cttgcactacaacggagcctgattc

SEQ ID NO: 68465 - DNA, 25 bp, Canis familiaris
cttctgtgcaccaggacctttcaga

SEQ ID NO: 68466 - DNA, 25 bp, Canis familiaris
cttcggagagagcgccgcgcttaga

SEQ ID NO: 68467 - DNA, 25 bp, Canis familiaris
cttgagggagggggctgctttctga

SEQ ID NO: 68468 - DNA, 25 bp, Canis familiaris
cttgcttctagtggggtctctattg

SEQ ID NO: 68469 - DNA, 25 bp, Canis familiaris
cttctttcacttgtgtctccagatt

SEQ ID NO: 68470 - DNA, 25 bp, Canis familiaris
cttgtttcacatacctttccgagga

SEQ ID NO: 68471 - DNA, 25 bp, Canis familiaris
cttattccgagcacttcccggaact

SEQ ID NO: 68472 - DNA, 25 bp, Canis familiaris
cttcttagggcttttgcccctgaat

SEQ ID NO: 68473 - DNA, 25 bp, Canis familiaris
cttcttcaggttcttccctggattc

SEQ ID NO: 68474 - DNA, 25 bp, Canis familiaris
cttgctcggggtcagacctgggttc

SEQ ID NO: 68475 - DNA, 25 bp, Canis familiaris
cttcctggggctgagggggtgtgtc

SEQ ID NO: 68476 - DNA, 25 bp, Canis familiaris
ctcccgggcacgatggaatgggtgt

SEQ ID NO: 68477 - DNA, 25 bp, Canis familiaris
ctcagggggcctccaagaaaagtat

SEQ ID NO: 68478 - DNA, 25 bp, Canis familiaris
cttgagttccctccaaagaaactat

SEQ ID NO: 68479 - DNA, 25 bp, Canis familiaris
cttgttgcttctcccaatgagaaca

SEQ ID NO: 68480 - DNA, 25 bp, Canis familiaris
cttgattgtttttcagtgtgagacc

SEQ ID NO: 68481 - DNA, 25 bp, Canis familiaris
cttgttgttgttgcagcgatttccc

SEQ ID NO: 68482 - DNA, 25 bp, Canis familiaris
cttgttatcttaaaggccttctact

SEQ ID NO: 68483 - DNA, 25 bp, Canis familiaris
ctttgtaattacgcagtccttcact

SEQ ID NO: 68484 - DNA, 25 bp, Canis familiaris
cttcctattaactaaactctacact

SEQ ID NO: 68485 - DNA, 25 bp, Canis familiaris
cttagcgttactggaaagctttccg

SEQ ID NO: 68486 - DNA, 25 bp, Canis familiaris
cttactttgcctggaaagccacagc

SEQ ID NO: 68487 - DNA, 25 bp, Canis familiaris
cttcacacttccgtacacagataca

SEQ ID NO: 68488 - DNA, 25 bp, Canis familiaris
cttcacttaccgaagccttacaccg

SEQ ID NO: 68489 - DNA, 25 bp, Canis familiaris
cttacttacttgaaccatgagacac

SEQ ID NO: 68490 - DNA, 25 bp, Canis familiaris
cttaatgtagccctagccagagatg

SEQ ID NO: 68491 - DNA, 25 bp, Canis familiaris
cttgatcgcccagattgcacaggag

SEQ ID NO: 68492 - DNA, 25 bp, Canis familiaris
cttccagcctatgctcagatcgaga

SEQ ID NO: 68493 - DNA, 25 bp, Canis familiaris
cttgctcacctttctcctaaagaaa

SEQ ID NO: 68494 - DNA, 25 bp, Canis familiaris
cttcgatccattctggttaaagaca

SEQ ID NO: 68495 - DNA, 25 bp, Canis familiaris
cttctggtttcgtagtctaaagact

SEQ ID NO: 68496 - DNA, 25 bp, Canis familiaris
cttctgtttttttgtcttacctgca

SEQ ID NO: 68497 - DNA, 25 bp, Canis familiaris
cttctttctgaaatagtcaaaacat

SEQ ID NO: 68498 - DNA, 25 bp, Canis familiaris
cttcctctctaagactactaatcat

SEQ ID NO: 68499 - DNA, 25 bp, Canis familiaris
cttcctcttagacactagacctatt

SEQ ID NO: 68500 - DNA, 25 bp, Canis familiaris
cttcctctaggacatcttgggcaat

SEQ ID NO: 68501 - DNA, 25 bp, Canis familiaris
cttcctgcgaaagccattggccaca

SEQ ID NO: 68502 - DNA, 25 bp, Canis familiaris
cttcctcctgagagcaactggtacc

SEQ ID NO: 68503 - DNA, 25 bp, Canis familiaris
cttcacccgatttctgagctggtca

SEQ ID NO: 68504 - DNA, 25 bp, Canis familiaris
cttgccctggcttttaggggcacta

SEQ ID NO: 68505 - DNA, 25 bp, Canis familiaris
cttgcccggctggtcggagaggagt

SEQ ID NO: 68506 - DNA, 25 bp, Canis familiaris
cttgctttcagcagtctgggcaggg

SEQ ID NO: 68507 - DNA, 25 bp, Canis familiaris
cttgctgttcgtggagggccaggag

SEQ ID NO: 68508 - DNA, 25 bp, Canis familiaris
cttgctgctgacccggagggaggac

SEQ ID NO: 68509 - DNA, 25 bp, Canis familiaris
cttgcctggacctgaggggaaccaa

SEQ ID NO: 68510 - DNA, 25 bp, Canis familiaris
ctttcggagctgggggttaacactg

SEQ ID NO: 68511 - DNA, 25 bp, Canis familiaris
cttctgggttccccgagtaacacag

SEQ ID NO: 68512 - DNA, 25 bp, Canis familiaris
cttctcggaacccctgtgatgaaac

SEQ ID NO: 68513 - DNA, 25 bp, Canis familiaris
gttcggccgaacacttgcagaaatt

SEQ ID NO: 68514 - DNA, 25 bp, Canis familiaris
cttcggcctaactctctgaaacgat

SEQ ID NO: 68515 - DNA, 25 bp, Canis familiaris
cttgcccaacaatcccaggaaagat

SEQ ID NO: 68516 - DNA, 25 bp, Canis familiaris
ctttccaaaccactgcccgaaagtg

SEQ ID NO: 68517 - DNA, 25 bp, Canis familiaris
cttccacaaccctcagtagacaagg

SEQ ID NO: 68518 - DNA, 25 bp, Canis familiaris
cttcctccccacagtgctaaaaggg

SEQ ID NO: 68519 - DNA, 25 bp, Canis familiaris
cttcctccctggctgtgtataaaca

SEQ ID NO: 68520 - DNA, 25 bp, Canis familiaris
cttcctggagcttttgtttacaaca

SEQ ID NO: 68521 - DNA, 25 bp, Canis familiaris
cttcccagaggttcatggatcccta

SEQ ID NO: 68522 - DNA, 25 bp, Canis familiaris
cttccctgggaagtcagtgctgccc

SEQ ID NO: 68523 - DNA, 25 bp, Canis familiaris
cttccggtgtgcaccaggagcacgg

SEQ ID NO: 68524 - DNA, 25 bp, Canis familiaris
cttcgtggtgctctgcatcgagaac

SEQ ID NO: 68525 - DNA, 25 bp, Canis familiaris
cttccatctggcagtctcaggcaat

SEQ ID NO: 68526 - DNA, 25 bp, Canis familiaris
cttcctctcatggggtcaggcatag

SEQ ID NO: 68527 - DNA, 25 bp, Canis familiaris
cttcgccatcaggggggatcatgca

SEQ ID NO: 68528 - DNA, 25 bp, Canis familiaris
cttccactcatcttgctggattctg

SEQ ID NO: 68529 - DNA, 25 bp, Canis familiaris
cttccctctcccagaaatgtacaat

SEQ ID NO: 68530 - DNA, 25 bp, Canis familiaris
ctttccctccaataaaatcccattg

SEQ ID NO: 68531 - DNA, 25 bp, Canis familiaris
cttctctcctacttaaaagtctaca

SEQ ID NO: 68532 - DNA, 25 bp, Canis familiaris
cttcacttcttccataaaaaatcac

SEQ ID NO: 68533 - DNA, 25 bp, Canis familiaris
cttcctcctctacaggatacacacc

SEQ ID NO: 68534 - DNA, 25 bp, Canis familiaris
cttccacgtgggatggagcacaccc

SEQ ID NO: 68535 - DNA, 25 bp, Canis familiaris
cttcaactgtgactgcctgacagcc

SEQ ID NO: 68536 - DNA, 25 bp, Canis familiaris
cttcaaggtcagcctgctggctgcc

SEQ ID NO: 68537 - DNA, 25 bp, Canis familiaris
ctataactgttgctgcgggctttaa

SEQ ID NO: 68538 - DNA, 25 bp, Canis familiaris
cttaatctgtggggccagcgcttgt

SEQ ID NO: 68539 - DNA, 25 bp, Canis familiaris
cttatatttagcgcaggctctctat

SEQ ID NO: 68540 - DNA, 25 bp, Canis familiaris
cttactgctgatttccaggtttaga

SEQ ID NO: 68541 - DNA, 25 bp, Canis familiaris
cttgcaccctgagctagagtttaac

SEQ ID NO: 68542 - DNA, 25 bp, Canis familiaris
cttcccctgcatgcaaatttcacaa

SEQ ID NO: 68543 - DNA, 25 bp, Canis familiaris
cttccccattcactaattataatta

SEQ ID NO: 68544 - DNA, 25 bp, Canis familiaris
cttcccgttactggagttacattcg

SEQ ID NO: 68545 - DNA, 25 bp, Canis familiaris
ctgtccctgttcggggttgactaag

SEQ ID NO: 68546 - DNA, 25 bp, Canis familiaris
cttactcacttccgggctggattaa

SEQ ID NO: 68547 - DNA, 25 bp, Canis familiaris
ctatcctagctccgggacggattac

SEQ ID NO: 68548 - DNA, 25 bp, Canis familiaris
cttccttggtgcctggacgagatct

SEQ ID NO: 68549 - DNA, 25 bp, Canis familiaris
cttgcactttctggcgagcgtgaat

SEQ ID NO: 68550 - DNA, 25 bp, Canis familiaris
cttcctttcttggcagcctgaatgc

SEQ ID NO: 68551 - DNA, 25 bp, Canis familiaris
cttccctgtctgaagcagcctgaac

SEQ ID NO: 68552 - DNA, 25 bp, Canis familiaris
cttcggatttgaagccgctgcatga

SEQ ID NO: 68553 - DNA, 25 bp, Canis familiaris
cttccagactgccaggtctgctcaa

SEQ ID NO: 68554 - DNA, 25 bp, Canis familiaris
cttccagaagtgccgcttgtcgggc

SEQ ID NO: 68555 - DNA, 25 bp, Canis familiaris
cttcctgaatgtggcgctagcctgg

SEQ ID NO: 68556 - DNA, 25 bp, Canis familiaris
cttcctgaagatccgctgaggtggg

SEQ ID NO: 68557 - DNA, 25 bp, Canis familiaris
cttccagaagtgcctggccgtaggc

SEQ ID NO: 68558 - DNA, 25 bp, Canis familiaris
cttgacgagcagaccatgggggcag

SEQ ID NO: 68559 - DNA, 25 bp, Canis familiaris
cttgcaggagcggcatctgcggggc

SEQ ID NO: 68560 - DNA, 25 bp, Canis familiaris
cttgctgctgggcacaggcaggagc

SEQ ID NO: 68561 - DNA, 25 bp, Canis familiaris
cttgccatgggtacacgctgtgcag

SEQ ID NO: 68562 - DNA, 25 bp, Canis familiaris
cttgctcactcgaacacgtgtgcgt

SEQ ID NO: 68563 - DNA, 25 bp, Canis familiaris
cttgctatcacgaccatctttgcag

SEQ ID NO: 68564 - DNA, 25 bp, Canis familiaris
cttgctgacatcttcctgattacat

SEQ ID NO: 68565 - DNA, 25 bp, Canis familiaris
cttgattatctttgctattacaatg

SEQ ID NO: 68566 - DNA, 25 bp, Canis familiaris
gtcatatttctctcgttaaaaacca

SEQ ID NO: 68567 - DNA, 25 bp, Canis familiaris
cttgatctctcctctcttaaagaac

SEQ ID NO: 68568 - DNA, 25 bp, Canis familiaris
cttgctttctccctttgaggacaaa

SEQ ID NO: 68569 - DNA, 25 bp, Canis familiaris
cttgctgtccctgtttcagagtaaa

SEQ ID NO: 68570 - DNA, 25 bp, Canis familiaris
cttcgtacactcgtgctgctagtaa

SEQ ID NO: 68571 - DNA, 25 bp, Canis familiaris
cttcggatcacgcccggagtagaag

SEQ ID NO: 68572 - DNA, 25 bp, Canis familiaris
cttgcagcgttcctccggaggaagc

SEQ ID NO: 68573 - DNA, 25 bp, Canis familiaris
cttgaggtcctgtcccatgggacag

SEQ ID NO: 68574 - DNA, 25 bp, Canis familiaris
cttgagtcacctgtccagttgtcag

SEQ ID NO: 68575 - DNA, 25 bp, Canis familiaris
cttcaccatacctcaagtcgtgctg

SEQ ID NO: 68576 - DNA, 25 bp, Canis familiaris
cttcgtcaaccaggacttcgtggtg

SEQ ID NO: 68577 - DNA, 25 bp, Canis familiaris
cttcctgaaccattaccctgtggac

SEQ ID NO: 68578 - DNA, 25 bp, Canis familiaris
cttccagcaaccaaatccaactgtt

SEQ ID NO: 68579 - DNA, 25 bp, Canis familiaris
cttccacataccttcattaacttat

SEQ ID NO: 68580 - DNA, 25 bp, Canis familiaris
cttgcccagcactgttttacttgtg

SEQ ID NO: 68581 - DNA, 25 bp, Canis familiaris
cttgccaacacctgttttcttgatt

SEQ ID NO: 68582 - DNA, 25 bp, Canis familiaris
ctagaattaatctgtttcttggctt

SEQ ID NO: 68583 - DNA, 25 bp, Canis familiaris
ctaacttaaatagctttgagatttc

SEQ ID NO: 68584 - DNA, 25 bp, Canis familiaris
cttactttagtagctttgagatttc

SEQ ID NO: 68585 - DNA, 25 bp, Canis familiaris
cttttttttaactttgcatttgcat

SEQ ID NO: 68586 - DNA, 25 bp, Canis familiaris
cttttctttttagttcgtgtgtgtg

SEQ ID NO: 68587 - DNA, 25 bp, Canis familiaris
cttcccttcacgttttcgtatgttg

SEQ ID NO: 68588 - DNA, 25 bp, Canis familiaris
cttccgtcccagatttcaaacttgg

SEQ ID NO: 68589 - DNA, 25 bp, Canis familiaris
cttccgtgcactcgatttacagcaa

SEQ ID NO: 68590 - DNA, 25 bp, Canis familiaris
cttccagagcttcttttcactaatt

SEQ ID NO: 68591 - DNA, 25 bp, Canis familiaris
cttccagcagttcgtttctatgtta

SEQ ID NO: 68592 - DNA, 25 bp, Canis familiaris
cttgccttgcttggttactgcatgc

SEQ ID NO: 68593 - DNA, 25 bp, Canis familiaris
cttgcagtacctgttgacatctccc

SEQ ID NO: 68594 - DNA, 25 bp, Canis familiaris
cttcagtacttcctatatctttcct

SEQ ID NO: 68595 - DNA, 25 bp, Canis familiaris
cttactctttcaaaactattcactt

SEQ ID NO: 68596 - DNA, 25 bp, Canis familiaris
cttcccgtctcagaatctaaacgtg

SEQ ID NO: 68597 - DNA, 25 bp, Canis familiaris
ctcacctacccagagactaaccggg

SEQ ID NO: 68598 - DNA, 25 bp, Canis familiaris
ctcagtttcccagcagataagaccc

SEQ ID NO: 68599 - DNA, 25 bp, Canis familiaris
gaattgttccgggccaaagaccaag

SEQ ID NO: 68600 - DNA, 25 bp, Canis familiaris
gcaggtgttcgggggcaaaccaata

SEQ ID NO: 68601 - DNA, 25 bp, Canis familiaris
cttgctgtatcgcggcgaacaccca

SEQ ID NO: 68602 - DNA, 25 bp, Canis familiaris
cttgctacaaggaaccacacaccca

SEQ ID NO: 68603 - DNA, 25 bp, Canis familiaris
cttgaacagaggccacctcaccaga

SEQ ID NO: 68604 - DNA, 25 bp, Canis familiaris
ctctggaagagacacacttgccaag

SEQ ID NO: 68605 - DNA, 25 bp, Canis familiaris
cttgaggaggcaccgagctcgaatc

SEQ ID NO: 68606 - DNA, 25 bp, Canis familiaris
cttcaggaggcgtcggctgcaaatg

SEQ ID NO: 68607 - DNA, 25 bp, Canis familiaris
cttcaggagacgttttgcaatcatg

SEQ ID NO: 68608 - DNA, 25 bp, Canis familiaris
cttcagaaaccagttggccctggct

SEQ ID NO: 68609 - DNA, 25 bp, Canis familiaris
cttcagaaaccaagaccgccatgca

SEQ ID NO: 68610 - DNA, 25 bp, Canis familiaris
cttagaaagtgcggagccccacgtt

SEQ ID NO: 68611 - DNA, 25 bp, Canis familiaris
cttacaccttcgcagaacccacttc

SEQ ID NO: 68612 - DNA, 25 bp, Canis familiaris
cttgccaactaccagttaaccctag

SEQ ID NO: 68613 - DNA, 25 bp, Canis familiaris
ctttctaccctcattaaccattagc

SEQ ID NO: 68614 - DNA, 25 bp, Canis familiaris
cttcccatccttccttaaggctaag

SEQ ID NO: 68615 - DNA, 25 bp, Canis familiaris
cttgctcccctaccgtagaaatagg

SEQ ID NO: 68616 - DNA, 25 bp, Canis familiaris
cttcctcccaagttgtaaactggca

SEQ ID NO: 68617 - DNA, 25 bp, Canis familiaris
ctaccccacgtgtttgaacaacgct

SEQ ID NO: 68618 - DNA, 25 bp, Canis familiaris
cttcgcatccatctttagaccaagg

SEQ ID NO: 68619 - DNA, 25 bp, Canis familiaris
cttgctctatctctgtctcaaataa

SEQ ID NO: 68620 - DNA, 25 bp, Canis familiaris
cttgctctgagcctctgtgtagtac

SEQ ID NO: 68621 - DNA, 25 bp, Canis familiaris
cttctcatggcttctggtggtagag

SEQ ID NO: 68622 - DNA, 25 bp, Canis familiaris
cttcctgacccttgatggccaaggg

SEQ ID NO: 68623 - DNA, 25 bp, Canis familiaris
cttaggcaaacttgaaggacagagg

SEQ ID NO: 68624 - DNA, 25 bp, Canis familiaris
cttcggcataacctggggacataac

SEQ ID NO: 68625 - DNA, 25 bp, Canis familiaris
cttgctgcctacacgtggcgtaaga

SEQ ID NO: 68626 - DNA, 25 bp, Canis familiaris
cttccacttaactggcctgcaatat

SEQ ID NO: 68627 - DNA, 25 bp, Canis familiaris
cttccacttaactggcctgcaatat

SEQ ID NO: 68628 - DNA, 25 bp, Canis familiaris
cttccacttaactggcctgcaatat

SEQ ID NO: 68629 - DNA, 25 bp, Canis familiaris
cttccctggacctgctaatcaatat

SEQ ID NO: 68630 - DNA, 25 bp, Canis familiaris
cttcccttgaccacagaatcagtag

SEQ ID NO: 68631 - DNA, 25 bp, Canis familiaris
cttactttacccagttcagctgaat

SEQ ID NO: 68632 - DNA, 25 bp, Canis familiaris
cttaccttgaacccgttgcatggaa

SEQ ID NO: 68633 - DNA, 25 bp, Canis familiaris
cttactttactctggtatatggaaa

SEQ ID NO: 68634 - DNA, 25 bp, Canis familiaris
ctcttcctacctggggttctggtag

SEQ ID NO: 68635 - DNA, 25 bp, Canis familiaris
cttccctccatttggggtctgagga

SEQ ID NO: 68636 - DNA, 25 bp, Canis familiaris
cttgcccaaagatggctgttcgagt

SEQ ID NO: 68637 - DNA, 25 bp, Canis familiaris
cttgccaaaatgaaagaaattgcag

SEQ ID NO: 68638 - DNA, 25 bp, Canis familiaris
cttgctgcctaaagaaaacttggac

SEQ ID NO: 68639 - DNA, 25 bp, Canis familiaris
cttctcctaaaaaagcacctgctgc

SEQ ID NO: 68640 - DNA, 25 bp, Canis familiaris
cttctctctaaggagaatggcccag

SEQ ID NO: 68641 - DNA, 25 bp, Canis familiaris
cttctgctttccccaatgggacagt

SEQ ID NO: 68642 - DNA, 25 bp, Canis familiaris
ctagttttccccctgtgaacaggca

SEQ ID NO: 68643 - DNA, 25 bp, Canis familiaris
cgttgtggtccatttttgggcggca

SEQ ID NO: 68644 - DNA, 25 bp, Canis familiaris
cttttggtgtacattccgagccgag

SEQ ID NO: 68645 - DNA, 25 bp, Canis familiaris
cttcttgtgggaaattccccgcgct

SEQ ID NO: 68646 - DNA, 25 bp, Canis familiaris
cttgctttgagccaccatatcacaa

SEQ ID NO: 68647 - DNA, 25 bp, Canis familiaris
cttcttggctgatccaactctgcat

SEQ ID NO: 68648 - DNA, 25 bp, Canis familiaris
cttctgggtgcataccagtcttacc

SEQ ID NO: 68649 - DNA, 25 bp, Canis familiaris
cttctgggtgcataccagtcttacc

SEQ ID NO: 68650 - DNA, 25 bp, Canis familiaris
cttctgccttattagctttttatca

SEQ ID NO: 68651 - DNA, 25 bp, Canis familiaris
cttcccttctcttgctttttagagt

SEQ ID NO: 68652 - DNA, 25 bp, Canis familiaris
cttcccttgttcttcgtgttagaat

SEQ ID NO: 68653 - DNA, 25 bp, Canis familiaris
cttcgagtttactacagtttacaca

SEQ ID NO: 68654 - DNA, 25 bp, Canis familiaris
cttccatacttactacagtgctgta

SEQ ID NO: 68655 - DNA, 25 bp, Canis familiaris
cttgcctccttaattgtgtcattga

SEQ ID NO: 68656 - DNA, 25 bp, Canis familiaris
cttgctgctccttatttattgtggt

SEQ ID NO: 68657 - DNA, 25 bp, Canis familiaris
cttgctttctatcctgtttgtagtc

SEQ ID NO: 68658 - DNA, 25 bp, Canis familiaris
cttctaggtcactgtttgtcaatca

SEQ ID NO: 68659 - DNA, 25 bp, Canis familiaris
ctttagcccaatcttctgtattagg

SEQ ID NO: 68660 - DNA, 25 bp, Canis familiaris
cttgctcagtcaaatctttcttaaa

SEQ ID NO: 68661 - DNA, 25 bp, Canis familiaris
cttctgcacccagtcttttcgaaat

SEQ ID NO: 68662 - DNA, 25 bp, Canis familiaris
cttctggccccttgtttatgcagag

SEQ ID NO: 68663 - DNA, 25 bp, Canis familiaris
cttctggcccctggtatggtggggg

SEQ ID NO: 68664 - DNA, 25 bp, Canis familiaris
cttccccctgcagcctttgggggag

SEQ ID NO: 68665 - DNA, 25 bp, Canis familiaris
cttgcgcccctggtcaagtgtgggg

SEQ ID NO: 68666 - DNA, 25 bp, Canis familiaris
cttcagaccctggatacatgctcat

SEQ ID NO: 68667 - DNA, 25 bp, Canis familiaris
cttaggcttttttatctcatccagg

SEQ ID NO: 68668 - DNA, 25 bp, Canis familiaris
cttccagctttagcataccactaag

SEQ ID NO: 68669 - DNA, 25 bp, Canis familiaris
cttacagcttgggacaaaccgaagc

SEQ ID NO: 68670 - DNA, 25 bp, Canis familiaris
cttcacgctgggtacaacccagaaa

SEQ ID NO: 68671 - DNA, 25 bp, Canis familiaris
cttccgctgggctttactccagcag

SEQ ID NO: 68672 - DNA, 25 bp, Canis familiaris
cttccgctgggctttactccagcag

SEQ ID NO: 68673 - DNA, 25 bp, Canis familiaris
cttccgctgggctttactccagcag

SEQ ID NO: 68674 - DNA, 25 bp, Canis familiaris
cttccgctgggctttactccagcag

SEQ ID NO: 68675 - DNA, 25 bp, Canis familiaris
cttcctgttagatatcctctcatca

SEQ ID NO: 68676 - DNA, 25 bp, Canis familiaris
cttcctgttattggtagttctctga

SEQ ID NO: 68677 - DNA, 25 bp, Canis familiaris
cttcactggtcatctgtaggctttg

SEQ ID NO: 68678 - DNA, 25 bp, Canis familiaris
cttgctggcctattctgtcatgagc

SEQ ID NO: 68679 - DNA, 25 bp, Canis familiaris
cttctgtcctgttcatgatgtgtgt

SEQ ID NO: 68680 - DNA, 25 bp, Canis familiaris
cttctttctgctccagggaatccaa

SEQ ID NO: 68681 - DNA, 25 bp, Canis familiaris
cttcctctcctgaagcagctgaagc

SEQ ID NO: 68682 - DNA, 25 bp, Canis familiaris
cttgcccctctggaagcatcataga

SEQ ID NO: 68683 - DNA, 25 bp, Canis familiaris
cttccccttgcggcagcaaagacat

SEQ ID NO: 68684 - DNA, 25 bp, Canis familiaris
cttccgcctgagtgccagattggca

SEQ ID NO: 68685 - DNA, 25 bp, Canis familiaris
cttcctcctggaagccgaggctgag

SEQ ID NO: 68686 - DNA, 25 bp, Canis familiaris
cttcctcatcatctacatcgaggag

SEQ ID NO: 68687 - DNA, 25 bp, Canis familiaris
cttccctctcttcagtggctgaggg

SEQ ID NO: 68688 - DNA, 25 bp, Canis familiaris
cttcctcattttcagttctgtacgg

SEQ ID NO: 68689 - DNA, 25 bp, Canis familiaris
cttcctttctatcacatccttaaaa

SEQ ID NO: 68690 - DNA, 25 bp, Canis familiaris
cttcttttcttacactcttggacaa

SEQ ID NO: 68691 - DNA, 25 bp, Canis familiaris
cttgctttcctttcttttgtgggca

SEQ ID NO: 68692 - DNA, 25 bp, Canis familiaris
cttccttgcatttccattcattggc

SEQ ID NO: 68693 - DNA, 25 bp, Canis familiaris
cttcctttgcttacattcatgtcct

SEQ ID NO: 68694 - DNA, 25 bp, Canis familiaris
cttccagctggttgtgattattttc

SEQ ID NO: 68695 - DNA, 25 bp, Canis familiaris
cttccactcattattttttctttgc

SEQ ID NO: 68696 - DNA, 25 bp, Canis familiaris
cttccttttcctatagttgctgtgt

SEQ ID NO: 68697 - DNA, 25 bp, Canis familiaris
cttcctctttgccgtgatgtttggt

SEQ ID NO: 68698 - DNA, 25 bp, Canis familiaris
cttcccggctcagtggagcatgctt

SEQ ID NO: 68699 - DNA, 25 bp, Canis familiaris
cttcctcagtgcagctggcaagttc

SEQ ID NO: 68700 - DNA, 25 bp, Canis familiaris
cttccttgcctgttgtcaagtctca

SEQ ID NO: 68701 - DNA, 25 bp, Canis familiaris
cttcctattcattgttctttctcaa

SEQ ID NO: 68702 - DNA, 25 bp, Canis familiaris
cttcctgttttttctaatgctaatg

SEQ ID NO: 68703 - DNA, 25 bp, Canis familiaris
cttttttccttgtggcatctactgc

SEQ ID NO: 68704 - DNA, 25 bp, Canis familiaris
ctttattttcctgatacctacaaca

SEQ ID NO: 68705 - DNA, 25 bp, Canis familiaris
cttcttttggttccataccttgcaa

SEQ ID NO: 68706 - DNA, 25 bp, Canis familiaris
cttccccttgtacctatctttgaag

SEQ ID NO: 68707 - DNA, 25 bp, Canis familiaris
cttcgaccctaggatttcctctaag

SEQ ID NO: 68708 - DNA, 25 bp, Canis familiaris
cttgctactctcaagtgtcttcacc

SEQ ID NO: 68709 - DNA, 25 bp, Canis familiaris
ctttcatcccatctgttaaccaagg

SEQ ID NO: 68710 - DNA, 25 bp, Canis familiaris
cttttgctccagtgttacaggaaaa

SEQ ID NO: 68711 - DNA, 25 bp, Canis familiaris
cttctggcatctgaggactacggca

SEQ ID NO: 68712 - DNA, 25 bp, Canis familiaris
cttcagcgccaggcgcgaattcggc

SEQ ID NO: 68713 - DNA, 25 bp, Canis familiaris
cttgctggccaggccacaatgctcc

SEQ ID NO: 68714 - DNA, 25 bp, Canis familiaris
cttgctgggaaggaagcctcacctt

SEQ ID NO: 68715 - DNA, 25 bp, Canis familiaris
cttcgctgcaatgggaacacccctt

SEQ ID NO: 68716 - DNA, 25 bp, Canis familiaris
cttgctggatttaaaccaccacctc

SEQ ID NO: 68717 - DNA, 25 bp, Canis familiaris
cttgctggtatcatggcagccaccc

SEQ ID NO: 68718 - DNA, 25 bp, Canis familiaris
cttctggcacacatggggacacagc

SEQ ID NO: 68719 - DNA, 25 bp, Canis familiaris
cttcctgcatcactgtggggaccag

SEQ ID NO: 68720 - DNA, 25 bp, Canis familiaris
ctatccatgccaaacggtcacaagt

SEQ ID NO: 68721 - DNA, 25 bp, Canis familiaris
cttcaaggcaaaggcaccaaactta

SEQ ID NO: 68722 - DNA, 25 bp, Canis familiaris
cttcgaggacactcatccttgagct

SEQ ID NO: 68723 - DNA, 25 bp, Canis familiaris
cttcgtggagcagggccacgtgcgc

SEQ ID NO: 68724 - DNA, 25 bp, Canis familiaris
cttcgtgagcagtggctcagtcacg

SEQ ID NO: 68725 - DNA, 25 bp, Canis familiaris
cttcttgccagatggtagcttcgcc

SEQ ID NO: 68726 - DNA, 25 bp, Canis familiaris
ctttccaatgttcgtacaactccgc

SEQ ID NO: 68727 - DNA, 25 bp, Canis familiaris
cttcccacttaccaaagactcgagc

SEQ ID NO: 68728 - DNA, 25 bp, Canis familiaris
cttcttccccaccaaaaatgcagtg

SEQ ID NO: 68729 - DNA, 25 bp, Canis familiaris
cttccctcccagaccaataaagtgg

SEQ ID NO: 68730 - DNA, 25 bp, Canis familiaris
cttccactcacctgatatttaagtg

SEQ ID NO: 68731 - DNA, 25 bp, Canis familiaris
cttccctccacatataccttgggtt

SEQ ID NO: 68732 - DNA, 25 bp, Canis familiaris
cttcccacacaaaggtcctcttgaa

SEQ ID NO: 68733 - DNA, 25 bp, Canis familiaris
ctttcgtccatgatgcgttcctaaa

SEQ ID NO: 68734 - DNA, 25 bp, Canis familiaris
cttctcagtccacactggggtacat

SEQ ID NO: 68735 - DNA, 25 bp, Canis familiaris
cttccagctctccagactggttgat

SEQ ID NO: 68736 - DNA, 25 bp, Canis familiaris
cttgcctgttccacttgtgagatgg

SEQ ID NO: 68737 - DNA, 25 bp, Canis familiaris
cttcggttctccatcgggatgtgac

SEQ ID NO: 68738 - DNA, 25 bp, Canis familiaris
cttcagttgcttgcttctgggtgtg

SEQ ID NO: 68739 - DNA, 25 bp, Canis familiaris
cttccttgttctgctgtgagctggg

SEQ ID NO: 68740 - DNA, 25 bp, Canis familiaris
ctatttcagtacttcatgtcccgtg

SEQ ID NO: 68741 - DNA, 25 bp, Canis familiaris
ctttaagtaggcctcatccagcgtg

SEQ ID NO: 68742 - DNA, 25 bp, Canis familiaris
cttttcaggtgtcccattcaggtag

SEQ ID NO: 68743 - DNA, 25 bp, Canis familiaris
cttcttcacggccctagggcttagg

SEQ ID NO: 68744 - DNA, 25 bp, Canis familiaris
cttagtccttggcctcaaggctctg

SEQ ID NO: 68745 - DNA, 25 bp, Canis familiaris
cttcctccctggagaagagctatga

SEQ ID NO: 68746 - DNA, 25 bp, Canis familiaris
cttcctccttggttacatcttgaca

SEQ ID NO: 68747 - DNA, 25 bp, Canis familiaris
cttccacctttggttataatgaata

SEQ ID NO: 68748 - DNA, 25 bp, Canis familiaris
ctttaccttttcttgtacatagtca

SEQ ID NO: 68749 - DNA, 25 bp, Canis familiaris
cttttccatattgccttcctaggct

SEQ ID NO: 68750 - DNA, 25 bp, Canis familiaris
cttcattccgggaccttttcaattg

SEQ ID NO: 68751 - DNA, 25 bp, Canis familiaris
cttattcttggccatccaattccat

SEQ ID NO: 68752 - DNA, 25 bp, Canis familiaris
cttcatgtccattgcttccaaagca

SEQ ID NO: 68753 - DNA, 25 bp, Canis familiaris
cttctaccactttgccaataggggc

SEQ ID NO: 68754 - DNA, 25 bp, Canis familiaris
cttctaagactctcctagagaggtc

SEQ ID NO: 68755 - DNA, 25 bp, Canis familiaris
cttgccgagccttagcctatgaagg

SEQ ID NO: 68756 - DNA, 25 bp, Canis familiaris
cttgccagcagggaagcacgtagag

SEQ ID NO: 68757 - DNA, 25 bp, Canis familiaris
cttcacaaggcctgaccatgcagag

SEQ ID NO: 68758 - DNA, 25 bp, Canis familiaris
cttgcccagttctgcaggtggagat

SEQ ID NO: 68759 - DNA, 25 bp, Canis familiaris
cttcccatttgctgcagggtgctgc

SEQ ID NO: 68760 - DNA, 25 bp, Canis familiaris
cttgcccatgttgcactgtttgcat

SEQ ID NO: 68761 - DNA, 25 bp, Canis familiaris
cttaacagctgtccagtgttggtga

SEQ ID NO: 68762 - DNA, 25 bp, Canis familiaris
cttcctgtcgccctatgtatctcca

SEQ ID NO: 68763 - DNA, 25 bp, Canis familiaris
cttcctgtcgccctatgtatctcca

SEQ ID NO: 68764 - DNA, 25 bp, Canis familiaris
cttcctggccacctgtggatgctaa

SEQ ID NO: 68765 - DNA, 25 bp, Canis familiaris
cttcctgccccgaatggatgggaca

SEQ ID NO: 68766 - DNA, 25 bp, Canis familiaris
cttccgccacaacaggagggtgttt

SEQ ID NO: 68767 - DNA, 25 bp, Canis familiaris
cttccccaacacagggctgggcatt

SEQ ID NO: 68768 - DNA, 25 bp, Canis familiaris
cttccggcaacaacgggcaagctct

SEQ ID NO: 68769 - DNA, 25 bp, Canis familiaris
cttccagccaaggactgggaccttc

SEQ ID NO: 68770 - DNA, 25 bp, Canis familiaris
cttcctgcacaaattctaaacctgt

SEQ ID NO: 68771 - DNA, 25 bp, Canis familiaris
cttctctccagctgactaaactttt

SEQ ID NO: 68772 - DNA, 25 bp, Canis familiaris
cttcgaccagtagctcaaacagtct

SEQ ID NO: 68773 - DNA, 25 bp, Canis familiaris
cttccccaggatgctgaaccaggat

SEQ ID NO: 68774 - DNA, 25 bp, Canis familiaris
cttgccttaggtcctgggcacggag

SEQ ID NO: 68775 - DNA, 25 bp, Canis familiaris
ctcatcgctaacagcctgggacggt

SEQ ID NO: 68776 - DNA, 25 bp, Canis familiaris
cttcgctcagtttgttgggagcgtg

SEQ ID NO: 68777 - DNA, 25 bp, Canis familiaris
cttctgcctgccagtgtgaggacgg

SEQ ID NO: 68778 - DNA, 25 bp, Canis familiaris
cttctgcttcctcagctggaaagga

SEQ ID NO: 68779 - DNA, 25 bp, Canis familiaris
cttcctccacagctgcttttagtga

SEQ ID NO: 68780 - DNA, 25 bp, Canis familiaris
cttcctagctcgttctttgggagaa

SEQ ID NO: 68781 - DNA, 25 bp, Canis familiaris
cttcctcactcgcttatagacaaaa

SEQ ID NO: 68782 - DNA, 25 bp, Canis familiaris
cttcctctctgccttcataaaaata

SEQ ID NO: 68783 - DNA, 25 bp, Canis familiaris
cttcctcctgctctccaaaggagat

SEQ ID NO: 68784 - DNA, 25 bp, Canis familiaris
cttcctgcgtgagttccacaagtgg

SEQ ID NO: 68785 - DNA, 25 bp, Canis familiaris
cttcctggaatggggccaagctggc

SEQ ID NO: 68786 - DNA, 25 bp, Canis familiaris
cttgccccagatgaggccagagcac

SEQ ID NO: 68787 - DNA, 25 bp, Canis familiaris
cttgcctccggcaagcggatgacac

SEQ ID NO: 68788 - DNA, 25 bp, Canis familiaris
cttcctccgcaagcgcgatgaaaca

SEQ ID NO: 68789 - DNA, 25 bp, Canis familiaris
cttccatctcctgtgccaggaaaca

SEQ ID NO: 68790 - DNA, 25 bp, Canis familiaris
cttccagccctgggcagcatgggaa

SEQ ID NO: 68791 - DNA, 25 bp, Canis familiaris
cttcctgcgactcaccaggtagacc

SEQ ID NO: 68792 - DNA, 25 bp, Canis familiaris
cttcatctggacaggcctggactga

SEQ ID NO: 68793 - DNA, 25 bp, Canis familiaris
cttccggatttggccatggcacaga

SEQ ID NO: 68794 - DNA, 25 bp, Canis familiaris
cttccaccattttcctggcatgaga

SEQ ID NO: 68795 - DNA, 25 bp, Canis familiaris
cttcctttcttctctgtgcagagta

SEQ ID NO: 68796 - DNA, 25 bp, Canis familiaris
cttccattctctattcttgggcttg

SEQ ID NO: 68797 - DNA, 25 bp, Canis familiaris
cttcctttctctactcagggttttg

SEQ ID NO: 68798 - DNA, 25 bp, Canis familiaris
cttaccctctctaccaggattatca

SEQ ID NO: 68799 - DNA, 25 bp, Canis familiaris
cttcgccagctcctttaagattgtc

SEQ ID NO: 68800 - DNA, 25 bp, Canis familiaris
cttcactcaggcttctttcagatag

SEQ ID NO: 68801 - DNA, 25 bp, Canis familiaris
cttcagcttggagattatagataat

SEQ ID NO: 68802 - DNA, 25 bp, Canis familiaris
cttcgctatggtatattgcaataaa

SEQ ID NO: 68803 - DNA, 25 bp, Canis familiaris
cttcctagcccttgaccaatgataa

SEQ ID NO: 68804 - DNA, 25 bp, Canis familiaris
cttcaaacctcataatagttaaaca

SEQ ID NO: 68805 - DNA, 25 bp, Canis familiaris
cttaaagccacatattcaattcaaa

SEQ ID NO: 68806 - DNA, 25 bp, Canis familiaris
cttaatcccaaccatactacatcaa

SEQ ID NO: 68807 - DNA, 25 bp, Canis familiaris
cttaccccaacaacactgactgtga

SEQ ID NO: 68808 - DNA, 25 bp, Canis familiaris
ctttcacccaaataccaggctactg

SEQ ID NO: 68809 - DNA, 25 bp, Canis familiaris
cggtactaccaaaacatcggttctg

SEQ ID NO: 68810 - DNA, 25 bp, Canis familiaris
cgggactaagccaaagacgaatttg

SEQ ID NO: 68811 - DNA, 25 bp, Canis familiaris
cggagaccaagacacgttaattcag

SEQ ID NO: 68812 - DNA, 25 bp, Canis familiaris
cttaaagatgaaccctgttaatcta

SEQ ID NO: 68813 - DNA, 25 bp, Canis familiaris
cttacaataaaggctgtctctttaa

SEQ ID NO: 68814 - DNA, 25 bp, Canis familiaris
cttcagaatacatctttctctcatt

SEQ ID NO: 68815 - DNA, 25 bp, Canis familiaris
ctacgagaccaagtgcaatcccatg

SEQ ID NO: 68816 - DNA, 25 bp, Canis familiaris
cttctggactcaccatcagtgacta

SEQ ID NO: 68817 - DNA, 25 bp, Canis familiaris
cttcggagctcttccagtgagtggg

SEQ ID NO: 68818 - DNA, 25 bp, Canis familiaris
cttctgagcggctccaggtgtgagc

SEQ ID NO: 68819 - DNA, 25 bp, Canis familiaris
cttctggaggctcccttgggacaag

SEQ ID NO: 68820 - DNA, 25 bp, Canis familiaris
cttcccaggcttcttccagaaagca

SEQ ID NO: 68821 - DNA, 25 bp, Canis familiaris
ctcttcacggaccttgtcggaacag

SEQ ID NO: 68822 - DNA, 25 bp, Canis familiaris
cttccttgcgtcctttgtgagaaca

SEQ ID NO: 68823 - DNA, 25 bp, Canis familiaris
cttctcttgcccattttggaggcgg

SEQ ID NO: 68824 - DNA, 25 bp, Canis familiaris
cttccttcgctcagtttgttgggag

SEQ ID NO: 68825 - DNA, 25 bp, Canis familiaris
cttcctggagccatttggctctggg

SEQ ID NO: 68826 - DNA, 25 bp, Canis familiaris
cttcctggagtctttgtgctctatg

SEQ ID NO: 68827 - DNA, 25 bp, Canis familiaris
cttccatgcatcacctggtgctcat

SEQ ID NO: 68828 - DNA, 25 bp, Canis familiaris
cttcctgcatgcatcacgtgtgcaa

SEQ ID NO: 68829 - DNA, 25 bp, Canis familiaris
cttagatgggtagctgtgcagactg

SEQ ID NO: 68830 - DNA, 25 bp, Canis familiaris
cttagcatccttatctgtagaccca

SEQ ID NO: 68831 - DNA, 25 bp, Canis familiaris
cttaccacgctcatttagacatcga

SEQ ID NO: 68832 - DNA, 25 bp, Canis familiaris
cttaccatggctgtatggaagtgaa

SEQ ID NO: 68833 - DNA, 25 bp, Canis familiaris
cttcccttccagtacgtagcagaat

SEQ ID NO: 68834 - DNA, 25 bp, Canis familiaris
cttccctctcctcacagtgaaatag

SEQ ID NO: 68835 - DNA, 25 bp, Canis familiaris
cttcaccaccttcactgtgacaaaa

SEQ ID NO: 68836 - DNA, 25 bp, Canis familiaris
cttcacgtcttttggcttactcaaa

SEQ ID NO: 68837 - DNA, 25 bp, Canis familiaris
cttcaaggtttctgccagcccactg

SEQ ID NO: 68838 - DNA, 25 bp, Canis familiaris
cttcatgggccttataccccaagct

SEQ ID NO: 68839 - DNA, 25 bp, Canis familiaris
cttcatggtgtcggatacctcctgg

SEQ ID NO: 68840 - DNA, 25 bp, Canis familiaris
cttctgggatgggagtccattctga

SEQ ID NO: 68841 - DNA, 25 bp, Canis familiaris
cttctgggcaggggactctgtttgg

SEQ ID NO: 68842 - DNA, 25 bp, Canis familiaris
ctcttcggacggtgcttgtttggag

SEQ ID NO: 68843 - DNA, 25 bp, Canis familiaris
ctttcgaggccctgtaattggaatg

SEQ ID NO: 68844 - DNA, 25 bp, Canis familiaris
ctgttcgagggccctgtaaattgga

SEQ ID NO: 68845 - DNA, 25 bp, Canis familiaris
cttcccagggtgagaaaagtgtcaa

SEQ ID NO: 68846 - DNA, 25 bp, Canis familiaris
cttccccgctttccaaagagttgag

SEQ ID NO: 68847 - DNA, 25 bp, Canis familiaris
cttctgtcttctaactcaaagttta

SEQ ID NO: 68848 - DNA, 25 bp, Canis familiaris
cttcccatttgttctattaccttga

SEQ ID NO: 68849 - DNA, 25 bp, Canis familiaris
cttcctcttttgtctcataagtccg

SEQ ID NO: 68850 - DNA, 25 bp, Canis familiaris
cttctttttctgctctgtagtccag

SEQ ID NO: 68851 - DNA, 25 bp, Canis familiaris
cttctggtttgtgcctcacagggag

SEQ ID NO: 68852 - DNA, 25 bp, Canis familiaris
cttcagctttttgttctctgcggag

SEQ ID NO: 68853 - DNA, 25 bp, Canis familiaris
cttcagcgttgaacacttccttgct

SEQ ID NO: 68854 - DNA, 25 bp, Canis familiaris
cttcctactaagacttgcgttgctg

SEQ ID NO: 68855 - DNA, 25 bp, Canis familiaris
cttcccgctagagcttcgggcggga

SEQ ID NO: 68856 - DNA, 25 bp, Canis familiaris
cttcctctctgaacgcttcagggga

SEQ ID NO: 68857 - DNA, 25 bp, Canis familiaris
cttccatcctgcactttaggtcagc

SEQ ID NO: 68858 - DNA, 25 bp, Canis familiaris
cttctccacatcacctggaggcttg

SEQ ID NO: 68859 - DNA, 25 bp, Canis familiaris
cttcatcacacctcctgaagagcct

SEQ ID NO: 68860 - DNA, 25 bp, Canis familiaris
cttctgcacagcgatgtctcgatga

SEQ ID NO: 68861 - DNA, 25 bp, Canis familiaris
cttcgacacagtgccacatggcttt

SEQ ID NO: 68862 - DNA, 25 bp, Canis familiaris
cttcgcactcaatgccaagtttttg

SEQ ID NO: 68863 - DNA, 25 bp, Canis familiaris
cttccatccagatgctaagttctgt

SEQ ID NO: 68864 - DNA, 25 bp, Canis familiaris
cttccgctcacaggctgtgagtcct

SEQ ID NO: 68865 - DNA, 25 bp, Canis familiaris
cttccgtgagcttgcttcagttgtg

SEQ ID NO: 68866 - DNA, 25 bp, Canis familiaris
cttccagaagccctctcgtggaggt

SEQ ID NO: 68867 - DNA, 25 bp, Canis familiaris
cttcccaagccctggatgatggtga

SEQ ID NO: 68868 - DNA, 25 bp, Canis familiaris
cttcccagtcgccaggggtgattgt

SEQ ID NO: 68869 - DNA, 25 bp, Canis familiaris
cttcccagctgcctgcaggagaggt

SEQ ID NO: 68870 - DNA, 25 bp, Canis familiaris
cttccctgccctggggaggtaggtg

SEQ ID NO: 68871 - DNA, 25 bp, Canis familiaris
cttccccccatcagtgggatgatgg

SEQ ID NO: 68872 - DNA, 25 bp, Canis familiaris
cttcccttactgagattgacatctt

SEQ ID NO: 68873 - DNA, 25 bp, Canis familiaris
cttccctatgccacgttacattaac

SEQ ID NO: 68874 - DNA, 25 bp, Canis familiaris
cttccctgtccctagtataactgac

SEQ ID NO: 68875 - DNA, 25 bp, Canis familiaris
cttcaccttgcgggatgtaccagga

SEQ ID NO: 68876 - DNA, 25 bp, Canis familiaris
cttcaccttcgtggtctacgagttc

SEQ ID NO: 68877 - DNA, 25 bp, Canis familiaris
cttcccgcctgaaggcgacggtggc

SEQ ID NO: 68878 - DNA, 25 bp, Canis familiaris
cttccctcctggtgcagcaaggggg

SEQ ID NO: 68879 - DNA, 25 bp, Canis familiaris
cttctcccaaagttgctgcacgaag

SEQ ID NO: 68880 - DNA, 25 bp, Canis familiaris
cttccccagcaacctcaaggagatg

SEQ ID NO: 68881 - DNA, 25 bp, Canis familiaris
cttcctccaatcctacgggagcaga

SEQ ID NO: 68882 - DNA, 25 bp, Canis familiaris
cttcctcatctatgctgaccaggac

SEQ ID NO: 68883 - DNA, 25 bp, Canis familiaris
cttcttacatcatctgcctcagaga

SEQ ID NO: 68884 - DNA, 25 bp, Canis familiaris
cttctttgtccactgctttgatgac

SEQ ID NO: 68885 - DNA, 25 bp, Canis familiaris
cttcttctgtcttgcatttgctgag

SEQ ID NO: 68886 - DNA, 25 bp, Canis familiaris
ctctttcgtttggttcagcagcaga

SEQ ID NO: 68887 - DNA, 25 bp, Canis familiaris
cttttggctgttaatgggtgcaata

SEQ ID NO: 68888 - DNA, 25 bp, Canis familiaris
cttcttgtttgattatgccccaatg

SEQ ID NO: 68889 - DNA, 25 bp, Canis familiaris
cttcctcctatatttctccgaatat

SEQ ID NO: 68890 - DNA, 25 bp, Canis familiaris
cttccttgcttttttcacatgtttt

SEQ ID NO: 68891 - DNA, 25 bp, Canis familiaris
cttcgctttcctttgtgacagtgat

SEQ ID NO: 68892 - DNA, 25 bp, Canis familiaris
cttctcatttccagattatcaatta

SEQ ID NO: 68893 - DNA, 25 bp, Canis familiaris
cttcctgctcccaaacttggattca

SEQ ID NO: 68894 - DNA, 25 bp, Canis familiaris
ctgtccatctcgggaaccgacgatc

SEQ ID NO: 68895 - DNA, 25 bp, Canis familiaris
cttctattcggcctatccagacgag

SEQ ID NO: 68896 - DNA, 25 bp, Canis familiaris
cttcgagtctggggtaagcactgtc

SEQ ID NO: 68897 - DNA, 25 bp, Canis familiaris
cttcaagctttgcgatacgcctacg

SEQ ID NO: 68898 - DNA, 25 bp, Canis familiaris
cttacagaataatgaccgcctacac

SEQ ID NO: 68899 - DNA, 25 bp, Canis familiaris
cttctcaaacttatgtagccaacac

SEQ ID NO: 68900 - DNA, 25 bp, Canis familiaris
ctttcaaacgatttttgttccatcg

SEQ ID NO: 68901 - DNA, 25 bp, Canis familiaris
ctttcaataaagttgttgcattccc

SEQ ID NO: 68902 - DNA, 25 bp, Canis familiaris
cttcaataaaacgtgcttttctctc

SEQ ID NO: 68903 - DNA, 25 bp, Canis familiaris
cttcaataaaacgtgcttttctctc

SEQ ID NO: 68904 - DNA, 25 bp, Canis familiaris
cttcttccaaacttgtgttcttgcc

SEQ ID NO: 68905 - DNA, 25 bp, Canis familiaris
cttctgaagcagcagcttgagttat

SEQ ID NO: 68906 - DNA, 25 bp, Canis familiaris
cttcatcttgcaggagcttagtttc

SEQ ID NO: 68907 - DNA, 25 bp, Canis familiaris
cttctccctggacacaggctttgta

SEQ ID NO: 68908 - DNA, 25 bp, Canis familiaris
cttctccactgtctacggttttgaa

SEQ ID NO: 68909 - DNA, 25 bp, Canis familiaris
cttcccactccttactgggatcttg

SEQ ID NO: 68910 - DNA, 25 bp, Canis familiaris
cttcctcccagcggaatgggctttg

SEQ ID NO: 68911 - DNA, 25 bp, Canis familiaris
cttcaccaccatggagaaggccggg

SEQ ID NO: 68912 - DNA, 25 bp, Canis familiaris
cttcaccaccatggagaaggctggg

SEQ ID NO: 68913 - DNA, 25 bp, Canis familiaris
cttcccacccagcacagaggggtac

SEQ ID NO: 68914 - DNA, 25 bp, Canis familiaris
cttctagaacgactggagggcgcgt

SEQ ID NO: 68915 - DNA, 25 bp, Canis familiaris
cttcaaaaatggctggcttgggctg

SEQ ID NO: 68916 - DNA, 25 bp, Canis familiaris
ctttactcaaggctgacctgcggtc

SEQ ID NO: 68917 - DNA, 25 bp, Canis familiaris
cttctgcactggtgggactgctgag

SEQ ID NO: 68918 - DNA, 25 bp, Canis familiaris
cttactagtgtttggacagctgaca

SEQ ID NO: 68919 - DNA, 25 bp, Canis familiaris
cttcactatttttaaagcgcaattt

SEQ ID NO: 68920 - DNA, 25 bp, Canis familiaris
cttcctgttccttaaagatctgatt

SEQ ID NO: 68921 - DNA, 25 bp, Canis familiaris
cttcctgtcctgctctaggacattt

SEQ ID NO: 68922 - DNA, 25 bp, Canis familiaris
cttcctgctcctctgtgcaggatgt

SEQ ID NO: 68923 - DNA, 25 bp, Canis familiaris
cttctctctctgtaatgtgccatat

SEQ ID NO: 68924 - DNA, 25 bp, Canis familiaris
cttcctacatacactgctctatgca

SEQ ID NO: 68925 - DNA, 25 bp, Canis familiaris
cttcctccaactgtgtctatagggc

SEQ ID NO: 68926 - DNA, 25 bp, Canis familiaris
cttcccttagctgtgcatctaggag

SEQ ID NO: 68927 - DNA, 25 bp, Canis familiaris
ctttacttagatgatattagggata

SEQ ID NO: 68928 - DNA, 25 bp, Canis familiaris
cttctggtatgaaccatttagtttg

SEQ ID NO: 68929 - DNA, 25 bp, Canis familiaris
cttctctggtatgacatttagtttg

SEQ ID NO: 68930 - DNA, 25 bp, Canis familiaris
cttccggcaggaaccattcagtttt

SEQ ID NO: 68931 - DNA, 25 bp, Canis familiaris
cttcacaaaggtaccaaagtttcat

SEQ ID NO: 68932 - DNA, 25 bp, Canis familiaris
ctttaaaggctgtccaagcattttt

SEQ ID NO: 68933 - DNA, 25 bp, Canis familiaris
ctctaataattgcccctggtttaca

SEQ ID NO: 68934 - DNA, 25 bp, Canis familiaris
cttaatcaggggtctctttctacac

SEQ ID NO: 68935 - DNA, 25 bp, Canis familiaris
cttatagggcctcctttatctaaag

SEQ ID NO: 68936 - DNA, 25 bp, Canis familiaris
cttcagaagcgcctttctcatagct

SEQ ID NO: 68937 - DNA, 25 bp, Canis familiaris
cttaaacgagccttctgcagatgcc

SEQ ID NO: 68938 - DNA, 25 bp, Canis familiaris
cttacacagaaccacttcagatggc

SEQ ID NO: 68939 - DNA, 25 bp, Canis familiaris
cttcaccacaaatgctatcgctctg

SEQ ID NO: 68940 - DNA, 25 bp, Canis familiaris
cttcctgccaactgctgtgggtggc

SEQ ID NO: 68941 - DNA, 25 bp, Canis familiaris
ctgtccgaacactcgaagcgtggct

SEQ ID NO: 68942 - DNA, 25 bp, Canis familiaris
cttactgacaacttgtaacttggtt

SEQ ID NO: 68943 - DNA, 25 bp, Canis familiaris
cttctagcacaaccatctaacattg

SEQ ID NO: 68944 - DNA, 25 bp, Canis familiaris
cttcttcaacagccacaacacattg

SEQ ID NO: 68945 - DNA, 25 bp, Canis familiaris
cttttgcaaggccacagatggtctc

SEQ ID NO: 68946 - DNA, 25 bp, Canis familiaris
cttctctttgtgccaagacgtgctc

SEQ ID NO: 68947 - DNA, 25 bp, Canis familiaris
cttctgttgaggtccacctgatgct

SEQ ID NO: 68948 - DNA, 25 bp, Canis familiaris
cttatattgggatgacctgaagaga

SEQ ID NO: 68949 - DNA, 25 bp, Canis familiaris
cttacattaggattcacaccacctg

SEQ ID NO: 68950 - DNA, 25 bp, Canis familiaris
cttctttagagttaacacgctccca

SEQ ID NO: 68951 - DNA, 25 bp, Canis familiaris
cttctttgatcaatttctcgccacc

SEQ ID NO: 68952 - DNA, 25 bp, Canis familiaris
cttctatcaatccatatttcatcca

SEQ ID NO: 68953 - DNA, 25 bp, Canis familiaris
cttcttcctctgtattggtccaggc

SEQ ID NO: 68954 - DNA, 25 bp, Canis familiaris
cttctttctagaaaggatctcgttc

SEQ ID NO: 68955 - DNA, 25 bp, Canis familiaris
cttctcttcgataaagcccgtgtcg

SEQ ID NO: 68956 - DNA, 25 bp, Canis familiaris
cttcccctaatagcagcctgatgac

SEQ ID NO: 68957 - DNA, 25 bp, Canis familiaris
cttcccctaatagcagcctgatgac

SEQ ID NO: 68958 - DNA, 25 bp, Canis familiaris
cttcgcccatgattggtgaccaaac

SEQ ID NO: 68959 - DNA, 25 bp, Canis familiaris
cttcccctgacttgcatgtaaatca

SEQ ID NO: 68960 - DNA, 25 bp, Canis familiaris
cttcctccttcactgatgctaaata

SEQ ID NO: 68961 - DNA, 25 bp, Canis familiaris
cttccctctctagttgtcaataaaa

SEQ ID NO: 68962 - DNA, 25 bp, Canis familiaris
cttccctccgaatccgttatataat

SEQ ID NO: 68963 - DNA, 25 bp, Canis familiaris
cttcacccccaaatacagtttcaga

SEQ ID NO: 68964 - DNA, 25 bp, Canis familiaris
cttcaccagtccaacttcagtttat

SEQ ID NO: 68965 - DNA, 25 bp, Canis familiaris
cttcccactggctactattttgata

SEQ ID NO: 68966 - DNA, 25 bp, Canis familiaris
cttctccgtggcatctatgcttatg

SEQ ID NO: 68967 - DNA, 25 bp, Canis familiaris
cttccctgcgtgattgttgtctgaa

SEQ ID NO: 68968 - DNA, 25 bp, Canis familiaris
cttccctggaataatcttgacgatt

SEQ ID NO: 68969 - DNA, 25 bp, Canis familiaris
cttccctcgaatgcttgatgaagct

SEQ ID NO: 68970 - DNA, 25 bp, Canis familiaris
cttccctcgaatgctgatgagcttg

SEQ ID NO: 68971 - DNA, 25 bp, Canis familiaris
cttcaccctgaagtccagacactga

SEQ ID NO: 68972 - DNA, 25 bp, Canis familiaris
cttcatctctctatctatcaacgga

SEQ ID NO: 68973 - DNA, 25 bp, Canis familiaris
cttcccctattcaatctagtgtgtg

SEQ ID NO: 68974 - DNA, 25 bp, Canis familiaris
cttcccaacttgacctgagaggtgt

SEQ ID NO: 68975 - DNA, 25 bp, Canis familiaris
cttcccatgaagatcttgggcttgt

SEQ ID NO: 68976 - DNA, 25 bp, Canis familiaris
cttcccagagagagcctggttctcc

SEQ ID NO: 68977 - DNA, 25 bp, Canis familiaris
cttccgcgagaaggactatgacagc

SEQ ID NO: 68978 - DNA, 25 bp, Canis familiaris
cttccgcgagaggtactatgacagc

SEQ ID NO: 68979 - DNA, 25 bp, Canis familiaris
cttcctggaagcctctctaggcatg

SEQ ID NO: 68980 - DNA, 25 bp, Canis familiaris
cttcctggaggcgtcctcagtgaga

SEQ ID NO: 68981 - DNA, 25 bp, Canis familiaris
cttctcaggactgcatcctcagtga

SEQ ID NO: 68982 - DNA, 25 bp, Canis familiaris
cttcgatggactgcaagccattgga

SEQ ID NO: 68983 - DNA, 25 bp, Canis familiaris
cttcgatccctggctgacattggga

SEQ ID NO: 68984 - DNA, 25 bp, Canis familiaris
cttcgctccctgatgttcatgggaa

SEQ ID NO: 68985 - DNA, 25 bp, Canis familiaris
cttcccacaggctgtggcaaggtca

SEQ ID NO: 68986 - DNA, 25 bp, Canis familiaris
cttccctcaccaaggacagcaggaa

SEQ ID NO: 68987 - DNA, 25 bp, Canis familiaris
cttccccgtgcatgcgacggagata

SEQ ID NO: 68988 - DNA, 25 bp, Canis familiaris
ctttgccggctcgcgaagcgaggcg

SEQ ID NO: 68989 - DNA, 25 bp, Canis familiaris
cttctggtggtagagaggacaggcc

SEQ ID NO: 68990 - DNA, 25 bp, Canis familiaris
cttcgtgtccaagcgggagggcagc

SEQ ID NO: 68991 - DNA, 25 bp, Canis familiaris
cttcttcaaaatggggtggggtgca

SEQ ID NO: 68992 - DNA, 25 bp, Canis familiaris
cttctccaaagggacctggggactg

SEQ ID NO: 68993 - DNA, 25 bp, Canis familiaris
cttcccaggtggccctggtgaggac

SEQ ID NO: 68994 - DNA, 25 bp, Canis familiaris
cttcgccgggctacgggtggagatc

SEQ ID NO: 68995 - DNA, 25 bp, Canis familiaris
cttcgtcacgtgggcgggtggagat

SEQ ID NO: 68996 - DNA, 25 bp, Canis familiaris
cttaatccttcatcagtttcgagat

SEQ ID NO: 68997 - DNA, 25 bp, Canis familiaris
cttccccctaaagtgttgctgtgtt

SEQ ID NO: 68998 - DNA, 25 bp, Canis familiaris
cttccctcctgagttctatgagcat

SEQ ID NO: 68999 - DNA, 25 bp, Canis familiaris
cttcggccctgtttctatgatattg

SEQ ID NO: 69000 - DNA, 25 bp, Canis familiaris
cttcggcctctgagttctgtttggc

SEQ ID NO: 69001 - DNA, 25 bp, Canis familiaris
cttcatggcctggctctttgttttg

SEQ ID NO: 69002 - DNA, 25 bp, Canis familiaris
cttctggccattactctcagtttag

SEQ ID NO: 69003 - DNA, 25 bp, Canis familiaris
cttctggtcttacttcttttcaatc

SEQ ID NO: 69004 - DNA, 25 bp, Canis familiaris
cttctctgctcattaatatctgttg

SEQ ID NO: 69005 - DNA, 25 bp, Canis familiaris
cttcatgtcatagttattattcagt

SEQ ID NO: 69006 - DNA, 25 bp, Canis familiaris
cttctgtccgtcattaccagtttta

SEQ ID NO: 69007 - DNA, 25 bp, Canis familiaris
ctttggccaactctcctagttataa

SEQ ID NO: 69008 - DNA, 25 bp, Canis familiaris
cttcttaccacacacagctaatatt

SEQ ID NO: 69009 - DNA, 25 bp, Canis familiaris
cttcccaccacagaagctgagaaaa

SEQ ID NO: 69010 - DNA, 25 bp, Canis familiaris
cttctccacccggaatgctgggatc

SEQ ID NO: 69011 - DNA, 25 bp, Canis familiaris
cttctccacccggaatgctgggatc

SEQ ID NO: 69012 - DNA, 25 bp, Canis familiaris
cttcccacaccatatatatctgtac

SEQ ID NO: 69013 - DNA, 25 bp, Canis familiaris
cttcgcctgctccaaaaatgcgctg

SEQ ID NO: 69014 - DNA, 25 bp, Canis familiaris
cttcagcctccaggaaatcatccta

SEQ ID NO: 69015 - DNA, 25 bp, Canis familiaris
cttcgccactcaggaagtgctgtcc

SEQ ID NO: 69016 - DNA, 25 bp, Canis familiaris
cttctgcccacagcaagatgcgttc

SEQ ID NO: 69017 - DNA, 25 bp, Canis familiaris
cttcggcttgcagcaggtgcaggtg

SEQ ID NO: 69018 - DNA, 25 bp, Canis familiaris
cttaggagatgctctggggcgtcca

SEQ ID NO: 69019 - DNA, 25 bp, Canis familiaris
cttcgagatgagtcctgagcattgg

SEQ ID NO: 69020 - DNA, 25 bp, Canis familiaris
cttctgcgtatatttgtgatatgag

SEQ ID NO: 69021 - DNA, 25 bp, Canis familiaris
cttctctttatcctctgcatcaagg

SEQ ID NO: 69022 - DNA, 25 bp, Canis familiaris
cttactggcaatgcttccacagcgt

SEQ ID NO: 69023 - DNA, 25 bp, Canis familiaris
cttctgctggaggccaatccacagg

SEQ ID NO: 69024 - DNA, 25 bp, Canis familiaris
cttcggaagctgccgcagccgaggt

SEQ ID NO: 69025 - DNA, 25 bp, Canis familiaris
cttcggggcagcagaccggtgatac

SEQ ID NO: 69026 - DNA, 25 bp, Canis familiaris
cttcttgcccaggatcaccgggaga

SEQ ID NO: 69027 - DNA, 25 bp, Canis familiaris
cttctgctgccctgatccaggaaga

SEQ ID NO: 69028 - DNA, 25 bp, Canis familiaris
cttcgctcactcgcatgtcagtgaa

SEQ ID NO: 69029 - DNA, 25 bp, Canis familiaris
cttcagctcagttcatgatctcggg

SEQ ID NO: 69030 - DNA, 25 bp, Canis familiaris
cttcagctcagtttagctggggcta

SEQ ID NO: 69031 - DNA, 25 bp, Canis familiaris
cttcttcagtgagacgggcgctggc

SEQ ID NO: 69032 - DNA, 25 bp, Canis familiaris
cttctacaatgagctgcgtgtggct

SEQ ID NO: 69033 - DNA, 25 bp, Canis familiaris
cttctacaatgagctgcgtgtggcc

SEQ ID NO: 69034 - DNA, 25 bp, Canis familiaris
cttctagacatgtcctggcaggggg

SEQ ID NO: 69035 - DNA, 25 bp, Canis familiaris
cttctgtggtgttcgggcgtatggt

SEQ ID NO: 69036 - DNA, 25 bp, Canis familiaris
cttcgtgtggtcttggtatttggct

SEQ ID NO: 69037 - DNA, 25 bp, Canis familiaris
cttctcctgtgttagcctttaggtg

SEQ ID NO: 69038 - DNA, 25 bp, Canis familiaris
cttcatcagtgtgctgccacttggg

SEQ ID NO: 69039 - DNA, 25 bp, Canis familiaris
cttcatatgagtctgtgctcactgt

SEQ ID NO: 69040 - DNA, 25 bp, Canis familiaris
cttcactgatgatccctagctgttt

SEQ ID NO: 69041 - DNA, 25 bp, Canis familiaris
cttccctgcagcacgtcgcttatat

SEQ ID NO: 69042 - DNA, 25 bp, Canis familiaris
cttcacccacttggcccataataat

SEQ ID NO: 69043 - DNA, 25 bp, Canis familiaris
cttccctcacttacttatcaattta

SEQ ID NO: 69044 - DNA, 25 bp, Canis familiaris
cttcacctacagacctcttcaagtg

SEQ ID NO: 69045 - DNA, 25 bp, Canis familiaris
cttcttctcaagaacctgtagagta

SEQ ID NO: 69046 - DNA, 25 bp, Canis familiaris
cttctccctagcacccataggtaag

SEQ ID NO: 69047 - DNA, 25 bp, Canis familiaris
ctttccaaaaacccatacctgagtg

SEQ ID NO: 69048 - DNA, 25 bp, Canis familiaris
ctttcacggacagaacaccccgatg

SEQ ID NO: 69049 - DNA, 25 bp, Canis familiaris
ctagtactaataagcaaacccaaat

SEQ ID NO: 69050 - DNA, 25 bp, Canis familiaris
ctagtatctgacacaccaaccaagc

SEQ ID NO: 69051 - DNA, 25 bp, Canis familiaris
cttctgttgaaggcccagaccggcc

SEQ ID NO: 69052 - DNA, 25 bp, Canis familiaris
cttctatgtgaagtcccaggaaatg

SEQ ID NO: 69053 - DNA, 25 bp, Canis familiaris
cttctcttgtgagccagctggaggt

SEQ ID NO: 69054 - DNA, 25 bp, Canis familiaris
cttctgcctcaacacagggggtggg

SEQ ID NO: 69055 - DNA, 25 bp, Canis familiaris
cttctggctcctcccgaggagaggg

SEQ ID NO: 69056 - DNA, 25 bp, Canis familiaris
cttcggcatctactctgaggaggag

SEQ ID NO: 69057 - DNA, 25 bp, Canis familiaris
cttcgacagcgacgtgggggagtac

SEQ ID NO: 69058 - DNA, 25 bp, Canis familiaris
cttctgaaccagctggatgggttcc

SEQ ID NO: 69059 - DNA, 25 bp, Canis familiaris
cttctgagagcccttggaggctgcc

SEQ ID NO: 69060 - DNA, 25 bp, Canis familiaris
cttcagggcttgttgctcagagtcc

SEQ ID NO: 69061 - DNA, 25 bp, Canis familiaris
cttattggccgtggcctggcacctg

SEQ ID NO: 69062 - DNA, 25 bp, Canis familiaris
cttcttcagtcgccgacatgcagct

SEQ ID NO: 69063 - DNA, 25 bp, Canis familiaris
cttctataactccagcattgcaatc

SEQ ID NO: 69064 - DNA, 25 bp, Canis familiaris
cttctctcagccatcagctgtgcaa

SEQ ID NO: 69065 - DNA, 25 bp, Canis familiaris
cttctcctgacactagcttcacaga

SEQ ID NO: 69066 - DNA, 25 bp, Canis familiaris
ctttttgacgctagcctactgtatt

SEQ ID NO: 69067 - DNA, 25 bp, Canis familiaris
ctttcgtacgctacgccaatggttt

SEQ ID NO: 69068 - DNA, 25 bp, Canis familiaris
ctttcctttctgtgaaatggtgttt

SEQ ID NO: 69069 - DNA, 25 bp, Canis familiaris
cttttcttatggaggattttacttg

SEQ ID NO: 69070 - DNA, 25 bp, Canis familiaris
cttttgggatccgggttgtgtacat

SEQ ID NO: 69071 - DNA, 25 bp, Canis familiaris
ctttaggcttcgcctttttgtcaat

SEQ ID NO: 69072 - DNA, 25 bp, Canis familiaris
ctttcattcttttttctctttggat

SEQ ID NO: 69073 - DNA, 25 bp, Canis familiaris
cttacttgcttatgttttacgcatt

SEQ ID NO: 69074 - DNA, 25 bp, Canis familiaris
cttacacgcatttggtctcgtagtc

SEQ ID NO: 69075 - DNA, 25 bp, Canis familiaris
cttacaggatttctgcccacaatca

SEQ ID NO: 69076 - DNA, 25 bp, Canis familiaris
cttaccatatttccatccacaaaca

SEQ ID NO: 69077 - DNA, 25 bp, Canis familiaris
cttacagaaattccccatcaacaga

SEQ ID NO: 69078 - DNA, 25 bp, Canis familiaris
cttaatgttatccaactccatgaag

SEQ ID NO: 69079 - DNA, 25 bp, Canis familiaris
cttagcactctgttaattcaatcaa

SEQ ID NO: 69080 - DNA, 25 bp, Canis familiaris
cttcaacgctcaaagcttaacaaca

SEQ ID NO: 69081 - DNA, 25 bp, Canis familiaris
cttcgcacactatcacttaacaata

SEQ ID NO: 69082 - DNA, 25 bp, Canis familiaris
cttctgctcctagtacttaatccta

SEQ ID NO: 69083 - DNA, 25 bp, Canis familiaris
cttctgtgctctgttcctagacagc

SEQ ID NO: 69084 - DNA, 25 bp, Canis familiaris
cttcatggtggccttcttcaaagtg

SEQ ID NO: 69085 - DNA, 25 bp, Canis familiaris
cttctggagggcgctgtcatatggt

SEQ ID NO: 69086 - DNA, 25 bp, Canis familiaris
cttctgggcaggaacgtacgtttct

SEQ ID NO: 69087 - DNA, 25 bp, Canis familiaris
cttctcggggaactgtacctcattg

SEQ ID NO: 69088 - DNA, 25 bp, Canis familiaris
ctttagttgacagcagtacgcctgg

SEQ ID NO: 69089 - DNA, 25 bp, Canis familiaris
ctttattctggaggcgtacccggtg

SEQ ID NO: 69090 - DNA, 25 bp, Canis familiaris
ctttaagtatgcagctgacccccag

SEQ ID NO: 69091 - DNA, 25 bp, Canis familiaris
cttcgaggttcgttgactcctgagc

SEQ ID NO: 69092 - DNA, 25 bp, Canis familiaris
cttcgactgtctcgtagacgccgag

SEQ ID NO: 69093 - DNA, 25 bp, Canis familiaris
cttctacttcggtgaggactgggac

SEQ ID NO: 69094 - DNA, 25 bp, Canis familiaris
ctttcgttcagggggtcatctggga

SEQ ID NO: 69095 - DNA, 25 bp, Canis familiaris
ctttcctggggatggaatcatgcgg

SEQ ID NO: 69096 - DNA, 25 bp, Canis familiaris
ctcttgccgtgagaaggttaagggg

SEQ ID NO: 69097 - DNA, 25 bp, Canis familiaris
cttctgccctgagttgcacgttaat

SEQ ID NO: 69098 - DNA, 25 bp, Canis familiaris
cttcttccatgagacactttaccag

SEQ ID NO: 69099 - DNA, 25 bp, Canis familiaris
ctttccactaggtaatcctactcgt

SEQ ID NO: 69100 - DNA, 25 bp, Canis familiaris
cttaaacgggagtacctgcttcagt

SEQ ID NO: 69101 - DNA, 25 bp, Canis familiaris
cttcaagcaactcggtacttttagt

SEQ ID NO: 69102 - DNA, 25 bp, Canis familiaris
cttcaacaacggcgactgcttcatc

SEQ ID NO: 69103 - DNA, 25 bp, Canis familiaris
cttctatcccggagatctctccata

SEQ ID NO: 69104 - DNA, 25 bp, Canis familiaris
cttttcccagactgcatccttaaat

SEQ ID NO: 69105 - DNA, 25 bp, Canis familiaris
cttaggtccaactgtccattcatgg

SEQ ID NO: 69106 - DNA, 25 bp, Canis familiaris
cttaggtaaaggtctgcctctctgg

SEQ ID NO: 69107 - DNA, 25 bp, Canis familiaris
cttagttcattacgatctccttagg

SEQ ID NO: 69108 - DNA, 25 bp, Canis familiaris
cttatttcattactatctccttatg

SEQ ID NO: 69109 - DNA, 25 bp, Canis familiaris
cttattccatcatgtttccaagtaa

SEQ ID NO: 69110 - DNA, 25 bp, Canis familiaris
ctttgtgctctagggttcccagtga

SEQ ID NO: 69111 - DNA, 25 bp, Canis familiaris
ctttttctttggttgcggagagcaa

SEQ ID NO: 69112 - DNA, 25 bp, Canis familiaris
cttttttctatgcctggtgggagct

SEQ ID NO: 69113 - DNA, 25 bp, Canis familiaris
ctttttgtgcggcctggaaggggag

SEQ ID NO: 69114 - DNA, 25 bp, Canis familiaris
cttctttggcggtgacaggggtgtg

SEQ ID NO: 69115 - DNA, 25 bp, Canis familiaris
cttctttggcacccgacaaatgggt

SEQ ID NO: 69116 - DNA, 25 bp, Canis familiaris
cttcgttaaccggagaaatgcccat

SEQ ID NO: 69117 - DNA, 25 bp, Canis familiaris
ctttaccaatccctgaaaaccactg

SEQ ID NO: 69118 - DNA, 25 bp, Canis familiaris
cttttgctcaattacagaaaaccag

SEQ ID NO: 69119 - DNA, 25 bp, Canis familiaris
cttttctttttcatacaacgcaggt

SEQ ID NO: 69120 - DNA, 25 bp, Canis familiaris
ctttattattttcaagtacatacgt

SEQ ID NO: 69121 - DNA, 25 bp, Canis familiaris
ctttttgttttccacatggtataag

SEQ ID NO: 69122 - DNA, 25 bp, Canis familiaris
ctttctttttcctctcagtgaatac

SEQ ID NO: 69123 - DNA, 25 bp, Canis familiaris
cttttttcctccacacatttgatta

SEQ ID NO: 69124 - DNA, 25 bp, Canis familiaris
cttttttcctccacacatttgatta

SEQ ID NO: 69125 - DNA, 25 bp, Canis familiaris
ctttatttccattaccaatcttcct

SEQ ID NO: 69126 - DNA, 25 bp, Canis familiaris
cttaattctcgaattcctgttccca

SEQ ID NO: 69127 - DNA, 25 bp, Canis familiaris
cttacttcctggagccatttggctc

SEQ ID NO: 69128 - DNA, 25 bp, Canis familiaris
ctttagtcgtgggagccggtgagct

SEQ ID NO: 69129 - DNA, 25 bp, Canis familiaris
ctttggccccgtggcttgagatgac

SEQ ID NO: 69130 - DNA, 25 bp, Canis familiaris
cttctccaccacgtcagcgatgaag

SEQ ID NO: 69131 - DNA, 25 bp, Canis familiaris
cttctccctcacttccaagaaaagt

SEQ ID NO: 69132 - DNA, 25 bp, Canis familiaris
cttctctgcccattttcttaaaact

SEQ ID NO: 69133 - DNA, 25 bp, Canis familiaris
cttcttcccactgtgccaaaaacag

SEQ ID NO: 69134 - DNA, 25 bp, Canis familiaris
cttttctacctctccgaatcaaatg

SEQ ID NO: 69135 - DNA, 25 bp, Canis familiaris
cttttacacactctccgaatggggt

SEQ ID NO: 69136 - DNA, 25 bp, Canis familiaris
cttcatttccaccctcaaaagttag

SEQ ID NO: 69137 - DNA, 25 bp, Canis familiaris
cttcatttccggtctccaagagaaa

SEQ ID NO: 69138 - DNA, 25 bp, Canis familiaris
cttcttgctcaggagcccgcaagga

SEQ ID NO: 69139 - DNA, 25 bp, Canis familiaris
cttctctgcacaaaccctaaaacac

SEQ ID NO: 69140 - DNA, 25 bp, Canis familiaris
cttagctcacacgagccttaaatat

SEQ ID NO: 69141 - DNA, 25 bp, Canis familiaris
cttagtcctcagctctgtatcagaa

SEQ ID NO: 69142 - DNA, 25 bp, Canis familiaris
cttttcgtcatccttattcagaccc

SEQ ID NO: 69143 - DNA, 25 bp, Canis familiaris
cttcttggtctcctgtgacgtaact

SEQ ID NO: 69144 - DNA, 25 bp, Canis familiaris
cttcgttctgccttgtgactatgaa

SEQ ID NO: 69145 - DNA, 25 bp, Canis familiaris
cttctgcttcctaatggactagatt

SEQ ID NO: 69146 - DNA, 25 bp, Canis familiaris
cttctgccactgcttggacaagcac

SEQ ID NO: 69147 - DNA, 25 bp, Canis familiaris
cttctgcaacccatgaggcggagca

SEQ ID NO: 69148 - DNA, 25 bp, Canis familiaris
cttctgcaagttcatggccttggcc

SEQ ID NO: 69149 - DNA, 25 bp, Canis familiaris
cttctccgtatgtggcgtgtgtgtc

SEQ ID NO: 69150 - DNA, 25 bp, Canis familiaris
cttctctccaagaagatgggtgttc

SEQ ID NO: 69151 - DNA, 25 bp, Canis familiaris
cttctccccaggcagaggatgcaat

SEQ ID NO: 69152 - DNA, 25 bp, Canis familiaris
cttctcgctctggacagacggacac

SEQ ID NO: 69153 - DNA, 25 bp, Canis familiaris
cttctggctcgccactatcgagaga

SEQ ID NO: 69154 - DNA, 25 bp, Canis familiaris
cttcgtgccagcaacttgctcaaga

SEQ ID NO: 69155 - DNA, 25 bp, Canis familiaris
cttctgtcacagccgcttgacaatg

SEQ ID NO: 69156 - DNA, 25 bp, Canis familiaris
cttctttgcagcctctgtggcatat

SEQ ID NO: 69157 - DNA, 25 bp, Canis familiaris
cttctctctagactggatgctgtta

SEQ ID NO: 69158 - DNA, 25 bp, Canis familiaris
cttcttgctgagcgctttttaccac

SEQ ID NO: 69159 - DNA, 25 bp, Canis familiaris
cttcttcgatgttgtttacatccac

SEQ ID NO: 69160 - DNA, 25 bp, Canis familiaris
cttcattctgttagttttcgctcca

SEQ ID NO: 69161 - DNA, 25 bp, Canis familiaris
cttctgggcttttactggcgccaga

SEQ ID NO: 69162 - DNA, 25 bp, Canis familiaris
cttctggtgtgtctgaagacagcta

SEQ ID NO: 69163 - DNA, 25 bp, Canis familiaris
ctttctgtattgctgtatgggcata

SEQ ID NO: 69164 - DNA, 25 bp, Canis familiaris
cttctgctgttcttattgtggccaa

SEQ ID NO: 69165 - DNA, 25 bp, Canis familiaris
cttctgccttgcactctgtgctaaa

SEQ ID NO: 69166 - DNA, 25 bp, Canis familiaris
cttctcctcatcatcgctgaaataa

SEQ ID NO: 69167 - DNA, 25 bp, Canis familiaris
cttcaccctcacaggtacgacaaca

SEQ ID NO: 69168 - DNA, 25 bp, Canis familiaris
cttaatccccaacaactgagagaat

SEQ ID NO: 69169 - DNA, 25 bp, Canis familiaris
cttcgtctcccttcataacgacaag

SEQ ID NO: 69170 - DNA, 25 bp, Canis familiaris
cttcgtgttcacgttaaggacacac

SEQ ID NO: 69171 - DNA, 25 bp, Canis familiaris
cttcgttcacgagatggaccacacc

SEQ ID NO: 69172 - DNA, 25 bp, Canis familiaris
cttctgactctctacttggacaaca

SEQ ID NO: 69173 - DNA, 25 bp, Canis familiaris
cttctacatcatcgagcgggagccc

SEQ ID NO: 69174 - DNA, 25 bp, Canis familiaris
cttctgactatgggcagtctcagcc

SEQ ID NO: 69175 - DNA, 25 bp, Canis familiaris
cttctcctgatgtgcagctggcagc

SEQ ID NO: 69176 - DNA, 25 bp, Canis familiaris
cttcttcttgtccagctggggaatg

SEQ ID NO: 69177 - DNA, 25 bp, Canis familiaris
cttctcttcttcagctggttagctg

SEQ ID NO: 69178 - DNA, 25 bp, Canis familiaris
cttattttagcttgtggagttctgg

SEQ ID NO: 69179 - DNA, 25 bp, Canis familiaris
cttttagtgtccttgagagttcttg

SEQ ID NO: 69180 - DNA, 25 bp, Canis familiaris
cttcttacctccttatcatgtatct

SEQ ID NO: 69181 - DNA, 25 bp, Canis familiaris
cttcttgtcttctgtgtaaatcatt

SEQ ID NO: 69182 - DNA, 25 bp, Canis familiaris
cttctcccctgcactgtaaaatgtt

SEQ ID NO: 69183 - DNA, 25 bp, Canis familiaris
ctctcatcccttctcgaagtttttg

SEQ ID NO: 69184 - DNA, 25 bp, Canis familiaris
cttttgcctatttcagagagttttg

SEQ ID NO: 69185 - DNA, 25 bp, Canis familiaris
cttcttggttttccacagctttggc

SEQ ID NO: 69186 - DNA, 25 bp, Canis familiaris
cttcttgattgtgcttccacgattg

SEQ ID NO: 69187 - DNA, 25 bp, Canis familiaris
cttttgatgtgtgtataccaatagc

SEQ ID NO: 69188 - DNA, 25 bp, Canis familiaris
cttttgttgatcctaaccaaagcag

SEQ ID NO: 69189 - DNA, 25 bp, Canis familiaris
cttattatcgtgatacctacaacag

SEQ ID NO: 69190 - DNA, 25 bp, Canis familiaris
cttctgcttctgtatgttcctggaa

SEQ ID NO: 69191 - DNA, 25 bp, Canis familiaris
cttctcatgactttgattccctgac

SEQ ID NO: 69192 - DNA, 25 bp, Canis familiaris
cttctcatgaactcagtcaccgtgg

SEQ ID NO: 69193 - DNA, 25 bp, Canis familiaris
cttctccaagcatcaccctgggagt

SEQ ID NO: 69194 - DNA, 25 bp, Canis familiaris
cttctgccataggaccccagtatag

SEQ ID NO: 69195 - DNA, 25 bp, Canis familiaris
cttctccatagtggcattcctgtca

SEQ ID NO: 69196 - DNA, 25 bp, Canis familiaris
cttctggcaagttcatggccctggc

SEQ ID NO: 69197 - DNA, 25 bp, Canis familiaris
cttctggggctctggctctcacact

SEQ ID NO: 69198 - DNA, 25 bp, Canis familiaris
cttctgggatgtcatcacctccagt

SEQ ID NO: 69199 - DNA, 25 bp, Canis familiaris
cttcaggtcagtcgacactatggag

SEQ ID NO: 69200 - DNA, 25 bp, Canis familiaris
gctgtggaatcgagccctagggaag

SEQ ID NO: 69201 - DNA, 25 bp, Canis familiaris
ctttgaatcctgtcccttgattaag

SEQ ID NO: 69202 - DNA, 25 bp, Canis familiaris
cttctttcttccctcggattgaagg

SEQ ID NO: 69203 - DNA, 25 bp, Canis familiaris
cttctttttcgcattctcatcagaa

SEQ ID NO: 69204 - DNA, 25 bp, Canis familiaris
cttcttttgctccagtgttacagga

SEQ ID NO: 69205 - DNA, 25 bp, Canis familiaris
ctttttccagctggtttaagcagag

SEQ ID NO: 69206 - DNA, 25 bp, Canis familiaris
cttattatctctccgtttcaacgaa

SEQ ID NO: 69207 - DNA, 25 bp, Canis familiaris
cttcatttctctctgtttcttaaat

SEQ ID NO: 69208 - DNA, 25 bp, Canis familiaris
cttcacaatcccctctatttaaagt

SEQ ID NO: 69209 - DNA, 25 bp, Canis familiaris
cttaatatcactggctccatattaa

SEQ ID NO: 69210 - DNA, 25 bp, Canis familiaris
cttcaaatcgctgcctgcattggtc

SEQ ID NO: 69211 - DNA, 25 bp, Canis familiaris
cttatctatcacaatccacttgccc

SEQ ID NO: 69212 - DNA, 25 bp, Canis familiaris
cttatttactttccatctgatatgc

SEQ ID NO: 69213 - DNA, 25 bp, Canis familiaris
cttagttactggttcactggtgccc

SEQ ID NO: 69214 - DNA, 25 bp, Canis familiaris
cttctgttcacacattcctgtgctg

SEQ ID NO: 69215 - DNA, 25 bp, Canis familiaris
ctgttggtaagaaacgcggcggcgc

SEQ ID NO: 69216 - DNA, 25 bp, Canis familiaris
cttctctgtaagacactttggggtc

SEQ ID NO: 69217 - DNA, 25 bp, Canis familiaris
cttctatctaaccctctttggagtg

SEQ ID NO: 69218 - DNA, 25 bp, Canis familiaris
cttcattcagagtgtttttgtttgt

SEQ ID NO: 69219 - DNA, 25 bp, Canis familiaris
ctttcaaggacagtgtttttgtagt

SEQ ID NO: 69220 - DNA, 25 bp, Canis familiaris
cttctaggagtcgtttcttcgctgg

SEQ ID NO: 69221 - DNA, 25 bp, Canis familiaris
cttctagggcttgactcctcagatt

SEQ ID NO: 69222 - DNA, 25 bp, Canis familiaris
ctatctgggccagtaactttagttg

SEQ ID NO: 69223 - DNA, 25 bp, Canis familiaris
cttctgttgcctagtactttctgta

SEQ ID NO: 69224 - DNA, 25 bp, Canis familiaris
cttctgttgtctttgggtctgatgt

SEQ ID NO: 69225 - DNA, 25 bp, Canis familiaris
cttctgtgttgtcttgtctggatgt

SEQ ID NO: 69226 - DNA, 25 bp, Canis familiaris
cttctgttgcggccttgcatttaga

SEQ ID NO: 69227 - DNA, 25 bp, Canis familiaris
cttatttccggcctatttgagtcat

SEQ ID NO: 69228 - DNA, 25 bp, Canis familiaris
cttcatttgccagtcgtgttgttta

SEQ ID NO: 69229 - DNA, 25 bp, Canis familiaris
cttcatacctaccagtcactttata

SEQ ID NO: 69230 - DNA, 25 bp, Canis familiaris
cttcattcctactgctaccatgtaa

SEQ ID NO: 69231 - DNA, 25 bp, Canis familiaris
cttcttcccactgaaggcagcttga

SEQ ID NO: 69232 - DNA, 25 bp, Canis familiaris
ctctttcctcctgaagtacgtgttt

SEQ ID NO: 69233 - DNA, 25 bp, Canis familiaris
ctatttcacccgagcagttgttttt

SEQ ID NO: 69234 - DNA, 25 bp, Canis familiaris
ctattgtacccaaaaggagtacgat

SEQ ID NO: 69235 - DNA, 25 bp, Canis familiaris
ctattgtacagaaaagggactacga

SEQ ID NO: 69236 - DNA, 25 bp, Canis familiaris
ctattttcagtttaggtccctcaat

SEQ ID NO: 69237 - DNA, 25 bp, Canis familiaris
cttttaaggtccaaatccgccagag

SEQ ID NO: 69238 - DNA, 25 bp, Canis familiaris
cttattttgccccaaatcccaagat

SEQ ID NO: 69239 - DNA, 25 bp, Canis familiaris
ctctatgtaggctccaaaaccaagg

SEQ ID NO: 69240 - DNA, 25 bp, Canis familiaris
cttctcaatgtccccagaaacacgg

SEQ ID NO: 69241 - DNA, 25 bp, Canis familiaris
cttctcaatgacctgcacaacttca

SEQ ID NO: 69242 - DNA, 25 bp, Canis familiaris
ctttcacagaatcaaaatgtgaagc

SEQ ID NO: 69243 - DNA, 25 bp, Canis familiaris
cttctcaccactctgaccattgtgg

SEQ ID NO: 69244 - DNA, 25 bp, Canis familiaris
cttctctcacgtgtacactctagag

SEQ ID NO: 69245 - DNA, 25 bp, Canis familiaris
cttctgtccttggttagccatacga

SEQ ID NO: 69246 - DNA, 25 bp, Canis familiaris
cttctgagccttgttacacactcca

SEQ ID NO: 69247 - DNA, 25 bp, Canis familiaris
cttagggcaaagttaccaccatcaa

SEQ ID NO: 69248 - DNA, 25 bp, Canis familiaris
cttaagagagtacatccagcccatc

SEQ ID NO: 69249 - DNA, 25 bp, Canis familiaris
cttaaccagtcgctagatgctctcc

SEQ ID NO: 69250 - DNA, 25 bp, Canis familiaris
cttacgcttgacgatgtagcacccc

SEQ ID NO: 69251 - DNA, 25 bp, Canis familiaris
cttacttgaaccatgagacacccta

SEQ ID NO: 69252 - DNA, 25 bp, Canis familiaris
cttagcctacttttataaccttcag

SEQ ID NO: 69253 - DNA, 25 bp, Canis familiaris
cttatcccactgtaataaaccttgg

SEQ ID NO: 69254 - DNA, 25 bp, Canis familiaris
cttatctcccttgtgcaaacagctt

SEQ ID NO: 69255 - DNA, 25 bp, Canis familiaris
cttatctgcacaagtgtttcaacct

SEQ ID NO: 69256 - DNA, 25 bp, Canis familiaris
cttcatgtgccaaagaatacagcca

SEQ ID NO: 69257 - DNA, 25 bp, Canis familiaris
cttctctgcattaaacacacacaca

SEQ ID NO: 69258 - DNA, 25 bp, Canis familiaris
ctttctcagtgggacaaagcaaccc

SEQ ID NO: 69259 - DNA, 25 bp, Canis familiaris
cttctccagccaccaaggtgcagac

SEQ ID NO: 69260 - DNA, 25 bp, Canis familiaris
cttctcaacctgactgggtgcagtg

SEQ ID NO: 69261 - DNA, 25 bp, Canis familiaris
cttcaacacctgctcaggggctggc

SEQ ID NO: 69262 - DNA, 25 bp, Canis familiaris
cttcttctctccatcaggggtagat

SEQ ID NO: 69263 - DNA, 25 bp, Canis familiaris
cttcttctcctcctggcaggtaaga

SEQ ID NO: 69264 - DNA, 25 bp, Canis familiaris
cttctttagccacagcatcctaaga

SEQ ID NO: 69265 - DNA, 25 bp, Canis familiaris
cttctttgagccacagcatctctaa

SEQ ID NO: 69266 - DNA, 25 bp, Canis familiaris
cttctcattacctacacagccaaga

SEQ ID NO: 69267 - DNA, 25 bp, Canis familiaris
cttctcaattccttacccacagaaa

SEQ ID NO: 69268 - DNA, 25 bp, Canis familiaris
ctttccattgcactcatagaccacg

SEQ ID NO: 69269 - DNA, 25 bp, Canis familiaris
ctttcgcctactgaagcctgggggc

SEQ ID NO: 69270 - DNA, 25 bp, Canis familiaris
ctttccttccgtgacgggaggagca

SEQ ID NO: 69271 - DNA, 25 bp, Canis familiaris
cttttcctccccatcttggaaatga

SEQ ID NO: 69272 - DNA, 25 bp, Canis familiaris
ctttccctaccgtgtctgataaatg

SEQ ID NO: 69273 - DNA, 25 bp, Canis familiaris
ctttccccatcctgggtaaccatgt

SEQ ID NO: 69274 - DNA, 25 bp, Canis familiaris
ctgttccaaaacagggataattttg

SEQ ID NO: 69275 - DNA, 25 bp, Canis familiaris
ctttccagaataaaggttgtgtatt

SEQ ID NO: 69276 - DNA, 25 bp, Canis familiaris
ctttactaataatggctttgagcaa

SEQ ID NO: 69277 - DNA, 25 bp, Canis familiaris
cttttcttatacggtcgcctacagg

SEQ ID NO: 69278 - DNA, 25 bp, Canis familiaris
cttttcgtaaaggatggctgggagc

SEQ ID NO: 69279 - DNA, 25 bp, Canis familiaris
cttttcttcaaaggacaaacagtca

SEQ ID NO: 69280 - DNA, 25 bp, Canis familiaris
ctatttttccaacaccatccagtgc

SEQ ID NO: 69281 - DNA, 25 bp, Canis familiaris
cttttggttgaacaagcagccgccc

SEQ ID NO: 69282 - DNA, 25 bp, Canis familiaris
cttttgagtttacaggctgcccggc

SEQ ID NO: 69283 - DNA, 25 bp, Canis familiaris
cttttgagccttttaccagctccag

SEQ ID NO: 69284 - DNA, 25 bp, Canis familiaris
cttttcagacctctcagacacatta

SEQ ID NO: 69285 - DNA, 25 bp, Canis familiaris
cttttcgtcttgctcagatcacaga

SEQ ID NO: 69286 - DNA, 25 bp, Canis familiaris
cttcttgagatattgcttagcatta

SEQ ID NO: 69287 - DNA, 25 bp, Canis familiaris
cttcttggatcaatggggcagtcat

SEQ ID NO: 69288 - DNA, 25 bp, Canis familiaris
ctttgtggaaattgggcgggcgcgg

SEQ ID NO: 69289 - DNA, 25 bp, Canis familiaris
ctttggtttttgctctgttgcgagt

SEQ ID NO: 69290 - DNA, 25 bp, Canis familiaris
ctttttttcttcaatttcaggacat

SEQ ID NO: 69291 - DNA, 25 bp, Canis familiaris
cttttcattttcaactttcatccaa

SEQ ID NO: 69292 - DNA, 25 bp, Canis familiaris
ctttatatttccgtttgtgtcacta

SEQ ID NO: 69293 - DNA, 25 bp, Canis familiaris
cttttatatttcccatgtcttcatt

SEQ ID NO: 69294 - DNA, 25 bp, Canis familiaris
cttttagatggcttccttttctctg

SEQ ID NO: 69295 - DNA, 25 bp, Canis familiaris
cttctatttgtgttgttctgttctt

SEQ ID NO: 69296 - DNA, 25 bp, Canis familiaris
ctttggtggtaattctctttctatg

SEQ ID NO: 69297 - DNA, 25 bp, Canis familiaris
ctttggtggtaattctctttctatg

SEQ ID NO: 69298 - DNA, 25 bp, Canis familiaris
cttacttaagactccatttctacca

SEQ ID NO: 69299 - DNA, 25 bp, Canis familiaris
ctttcagaaaactccaatgtccaaa

SEQ ID NO: 69300 - DNA, 25 bp, Canis familiaris
ctagtaagtccctccagattcggag

SEQ ID NO: 69301 - DNA, 25 bp, Canis familiaris
ctattaaccccttcaagctggactg

SEQ ID NO: 69302 - DNA, 25 bp, Canis familiaris
cttctaagccacccgaatctggaca

SEQ ID NO: 69303 - DNA, 25 bp, Canis familiaris
cttcatccctcccaaaatctggaat

SEQ ID NO: 69304 - DNA, 25 bp, Canis familiaris
ctatcagtcctcctaataacgggtc

SEQ ID NO: 69305 - DNA, 25 bp, Canis familiaris
ctatagtgtcacctaaataggctaa

SEQ ID NO: 69306 - DNA, 25 bp, Canis familiaris
cttcaggtactgtgctcttggctta

SEQ ID NO: 69307 - DNA, 25 bp, Canis familiaris
cttagtcaacacccactggagttaa

SEQ ID NO: 69308 - DNA, 25 bp, Canis familiaris
ctttttagaagccacggaattgcta

SEQ ID NO: 69309 - DNA, 25 bp, Canis familiaris
ctttttagaagccaaggcattctaa

SEQ ID NO: 69310 - DNA, 25 bp, Canis familiaris
ctctctttagacactacctccaaga

SEQ ID NO: 69311 - DNA, 25 bp, Canis familiaris
ttttttaaagtctcactacttagat

SEQ ID NO: 69312 - DNA, 25 bp, Canis familiaris
tttacggtaaactgcccacttggca

SEQ ID NO: 69313 - DNA, 25 bp, Canis familiaris
tttagcggtaaatccctaatttgag

SEQ ID NO: 69314 - DNA, 25 bp, Canis familiaris
ttaatctgggaataccctcggttcg

SEQ ID NO: 69315 - DNA, 25 bp, Canis familiaris
tttacttgaaaagcggtcttgaccg

SEQ ID NO: 69316 - DNA, 25 bp, Canis familiaris
tttttctaaagagaccctggaactg

SEQ ID NO: 69317 - DNA, 25 bp, Canis familiaris
cttttccaaagagacttcgttccag

SEQ ID NO: 69318 - DNA, 25 bp, Canis familiaris
cttttacaacgagaccacaccacac

SEQ ID NO: 69319 - DNA, 25 bp, Canis familiaris
cttttacaaggacgccaggcacact

SEQ ID NO: 69320 - DNA, 25 bp, Canis familiaris
ctttatgacacggggctgcaggaac

SEQ ID NO: 69321 - DNA, 25 bp, Canis familiaris
cttcttggcccacatgccattgaca

SEQ ID NO: 69322 - DNA, 25 bp, Canis familiaris
cttttggctccatttctgcaagaca

SEQ ID NO: 69323 - DNA, 25 bp, Canis familiaris
cttttgactgaatatctgactggca

SEQ ID NO: 69324 - DNA, 25 bp, Canis familiaris
cttcttgattggattcatgagtggc

SEQ ID NO: 69325 - DNA, 25 bp, Canis familiaris
cttctctgcctggggtgcaggtggg

SEQ ID NO: 69326 - DNA, 25 bp, Canis familiaris
cttctctgcttcttgttgtaggtga

SEQ ID NO: 69327 - DNA, 25 bp, Canis familiaris
cttctctcttcttttgtcatttgag

SEQ ID NO: 69328 - DNA, 25 bp, Canis familiaris
cttttgcacttgtcacttcatttgg

SEQ ID NO: 69329 - DNA, 25 bp, Canis familiaris
cttttatcctgctacagtctttcag

SEQ ID NO: 69330 - DNA, 25 bp, Canis familiaris
cttctttgcctgggaatctctatgt

SEQ ID NO: 69331 - DNA, 25 bp, Canis familiaris
cttcatttcctttaactgttgtcta

SEQ ID NO: 69332 - DNA, 25 bp, Canis familiaris
cttcttcgcctttgatttttgtccg

SEQ ID NO: 69333 - DNA, 25 bp, Canis familiaris
cttctctctggttgtgttttgttct

SEQ ID NO: 69334 - DNA, 25 bp, Canis familiaris
cttctcttctgggtattttgtttct

SEQ ID NO: 69335 - DNA, 25 bp, Canis familiaris
cttacttctgggaagattgcttcgt

SEQ ID NO: 69336 - DNA, 25 bp, Canis familiaris
cttcaccctgggggactcatgatgc

SEQ ID NO: 69337 - DNA, 25 bp, Canis familiaris
cttcagcccaaggcgtgatcctgga

SEQ ID NO: 69338 - DNA, 25 bp, Canis familiaris
cttacctcaatgctgcatcagccat

SEQ ID NO: 69339 - DNA, 25 bp, Canis familiaris
cttcaccgaatacttcagcatgcac

SEQ ID NO: 69340 - DNA, 25 bp, Canis familiaris
cttcatcgctaatgtggctcacact

SEQ ID NO: 69341 - DNA, 25 bp, Canis familiaris
cttcttccccagaggacatctatct

SEQ ID NO: 69342 - DNA, 25 bp, Canis familiaris
cttttcccaccactagatattatta

SEQ ID NO: 69343 - DNA, 25 bp, Canis familiaris
cttttcctgcaggagttgagtttga

SEQ ID NO: 69344 - DNA, 25 bp, Canis familiaris
cttcttcctgggcctttcttggaag

SEQ ID NO: 69345 - DNA, 25 bp, Canis familiaris
cttttccggtggtgactcgtgtgag

SEQ ID NO: 69346 - DNA, 25 bp, Canis familiaris
ctttaccggaggctgttctgttgtc

SEQ ID NO: 69347 - DNA, 25 bp, Canis familiaris
ctttggccagggcgcgatcctggag

SEQ ID NO: 69348 - DNA, 25 bp, Canis familiaris
ctttggcccagggcgtgatcctgga

SEQ ID NO: 69349 - DNA, 25 bp, Canis familiaris
ctttggtccagggcgcgattctgga

SEQ ID NO: 69350 - DNA, 25 bp, Canis familiaris
cttatatgtccgtagccaattctcc

SEQ ID NO: 69351 - DNA, 25 bp, Canis familiaris
cttatagttctgtcacgatatgctc

SEQ ID NO: 69352 - DNA, 25 bp, Canis familiaris
cttcatgccataattcacagttctt

SEQ ID NO: 69353 - DNA, 25 bp, Canis familiaris
cttcaggcaattccactcaactttt

SEQ ID NO: 69354 - DNA, 25 bp, Canis familiaris
cttcaggagatcgacagtcagactc

SEQ ID NO: 69355 - DNA, 25 bp, Canis familiaris
cttatggaatggacagccgaccgcc

SEQ ID NO: 69356 - DNA, 25 bp, Canis familiaris
ctattccagggtagcggacacccct

SEQ ID NO: 69357 - DNA, 25 bp, Canis familiaris
cttctcaacggaagggcctcaacct

SEQ ID NO: 69358 - DNA, 25 bp, Canis familiaris
cttcatcaccggtgatggaccaatc

SEQ ID NO: 69359 - DNA, 25 bp, Canis familiaris
cttcagcaccggggactacagcatt

SEQ ID NO: 69360 - DNA, 25 bp, Canis familiaris
cttcagacccagggactcctggtct

SEQ ID NO: 69361 - DNA, 25 bp, Canis familiaris
cttatgacccaatggcttctggcca

SEQ ID NO: 69362 - DNA, 25 bp, Canis familiaris
cttaacgagcagtggttctcccaac

SEQ ID NO: 69363 - DNA, 25 bp, Canis familiaris
cttttgagacatttggctcttccca

SEQ ID NO: 69364 - DNA, 25 bp, Canis familiaris
cttttattgagtcaccgatcccatc

SEQ ID NO: 69365 - DNA, 25 bp, Canis familiaris
cttattcaataagacggacccttct

SEQ ID NO: 69366 - DNA, 25 bp, Canis familiaris
cttttccataaggacgccagtcgtc

SEQ ID NO: 69367 - DNA, 25 bp, Canis familiaris
ctttatccactagacaccgtagagt

SEQ ID NO: 69368 - DNA, 25 bp, Canis familiaris
cttacaccagtgtgaaccttcagag

SEQ ID NO: 69369 - DNA, 25 bp, Canis familiaris
ctaaccctgccataaccatttggta

SEQ ID NO: 69370 - DNA, 25 bp, Canis familiaris
cttaccattgcctattaccacttaa

SEQ ID NO: 69371 - DNA, 25 bp, Canis familiaris
cttacctatcactcctatcaataaa

SEQ ID NO: 69372 - DNA, 25 bp, Canis familiaris
ctttcatcaacctctcatatcttaa

SEQ ID NO: 69373 - DNA, 25 bp, Canis familiaris
cttctatacccaactgtatcagtaa

SEQ ID NO: 69374 - DNA, 25 bp, Canis familiaris
cttctttattatactgtctcagtga

SEQ ID NO: 69375 - DNA, 25 bp, Canis familiaris
cttcttgttaagactgttatgtttc

SEQ ID NO: 69376 - DNA, 25 bp, Canis familiaris
cttcaggcttgtgtctttagttgcg

SEQ ID NO: 69377 - DNA, 25 bp, Canis familiaris
cttcactttgatctatttgatggtc

SEQ ID NO: 69378 - DNA, 25 bp, Canis familiaris
cttactgaattacatgctgtgaagg

SEQ ID NO: 69379 - DNA, 25 bp, Canis familiaris
cttacaagatggttacgtgagctgg

SEQ ID NO: 69380 - DNA, 25 bp, Canis familiaris
ctttcaagatgaatccaggtgatgt

SEQ ID NO: 69381 - DNA, 25 bp, Canis familiaris
ctttcaaaggtcctgagttcactta

SEQ ID NO: 69382 - DNA, 25 bp, Canis familiaris
ctttaacaatgtccggagcccttga

SEQ ID NO: 69383 - DNA, 25 bp, Canis familiaris
ctttattccaggtgtgacgcctttt

SEQ ID NO: 69384 - DNA, 25 bp, Canis familiaris
ctttattctcaggttgatactctgt

SEQ ID NO: 69385 - DNA, 25 bp, Canis familiaris
cttcttttcatggctgtataatatt

SEQ ID NO: 69386 - DNA, 25 bp, Canis familiaris
cttcttctgactcctttaactttga

SEQ ID NO: 69387 - DNA, 25 bp, Canis familiaris
ctattttacttcacattcacctggc

SEQ ID NO: 69388 - DNA, 25 bp, Canis familiaris
ctttttagacttcttccctgtgtct

SEQ ID NO: 69389 - DNA, 25 bp, Canis familiaris
ctttcttcaacgtgtttcacttgtc

SEQ ID NO: 69390 - DNA, 25 bp, Canis familiaris
cttttatcaacataccttacctctg

SEQ ID NO: 69391 - DNA, 25 bp, Canis familiaris
ctttttctgtaaacaccattgcctt

SEQ ID NO: 69392 - DNA, 25 bp, Canis familiaris
cttcattgacctcaactacatggtt

SEQ ID NO: 69393 - DNA, 25 bp, Canis familiaris
cttcattgacctcaactacatggtc

SEQ ID NO: 69394 - DNA, 25 bp, Canis familiaris
ctttctgctcctcagactgagtggt

SEQ ID NO: 69395 - DNA, 25 bp, Canis familiaris
cttcatctgagcctcaggacgcagc

SEQ ID NO: 69396 - DNA, 25 bp, Canis familiaris
cttcatcattggccaagcaggcagc

SEQ ID NO: 69397 - DNA, 25 bp, Canis familiaris
cttcatttgtgccacacgcatgggc

SEQ ID NO: 69398 - DNA, 25 bp, Canis familiaris
cttcaatgaatccacacctgctatg

SEQ ID NO: 69399 - DNA, 25 bp, Canis familiaris
cttaagcagcatcccagcttcatag

SEQ ID NO: 69400 - DNA, 25 bp, Canis familiaris
cttagtaagtgcctctagctcaaca

SEQ ID NO: 69401 - DNA, 25 bp, Canis familiaris
cttcactaacttggaagccccagcc

SEQ ID NO: 69402 - DNA, 25 bp, Canis familiaris
cttcatctcaacaggtggacccaca

SEQ ID NO: 69403 - DNA, 25 bp, Canis familiaris
cttcattacccgctgggctggagaa

SEQ ID NO: 69404 - DNA, 25 bp, Canis familiaris
cttcattctgcgttgggagtctgga

SEQ ID NO: 69405 - DNA, 25 bp, Canis familiaris
ctatcgaatgcgaggagtgtgggaa

SEQ ID NO: 69406 - DNA, 25 bp, Canis familiaris
ctaaactgatgaaggttgtaagaga

SEQ ID NO: 69407 - DNA, 25 bp, Canis familiaris
cttattctgatatagctgggcaatg

SEQ ID NO: 69408 - DNA, 25 bp, Canis familiaris
ctttcattgacgtgctggactgtgg

SEQ ID NO: 69409 - DNA, 25 bp, Canis familiaris
ctttcacgacccagaagcagtcgtt

SEQ ID NO: 69410 - DNA, 25 bp, Canis familiaris
ctttcccagtcccgtgaaattgttg

SEQ ID NO: 69411 - DNA, 25 bp, Canis familiaris
cttttcgctggagttgtgaaactgt

SEQ ID NO: 69412 - DNA, 25 bp, Canis familiaris
cttacctggcaggggagataccatg

SEQ ID NO: 69413 - DNA, 25 bp, Canis familiaris
ctttatcagcgccggcgactacgag

SEQ ID NO: 69414 - DNA, 25 bp, Canis familiaris
cttcttcaccggggagctgggggtg

SEQ ID NO: 69415 - DNA, 25 bp, Canis familiaris
cttcttccgcgagttggctgaggag

SEQ ID NO: 69416 - DNA, 25 bp, Canis familiaris
cttcttcacctttgcagggcaggag

SEQ ID NO: 69417 - DNA, 25 bp, Canis familiaris
cttttcaccttttgctgctatggca

SEQ ID NO: 69418 - DNA, 25 bp, Canis familiaris
cttaaactgcttctctgctctgaga

SEQ ID NO: 69419 - DNA, 25 bp, Canis familiaris
cttaatacctcccatctgttgaaaa

SEQ ID NO: 69420 - DNA, 25 bp, Canis familiaris
cttaatccccaccatcatgtataaa

SEQ ID NO: 69421 - DNA, 25 bp, Canis familiaris
cttacacattccttgcatattataa

SEQ ID NO: 69422 - DNA, 25 bp, Canis familiaris
cttagaggtcttttcattattgatg

SEQ ID NO: 69423 - DNA, 25 bp, Canis familiaris
cttaagggtcctggcaactctgcag

SEQ ID NO: 69424 - DNA, 25 bp, Canis familiaris
cttagccgagacttctggacttagg

SEQ ID NO: 69425 - DNA, 25 bp, Canis familiaris
cttactcaggactcgtgtctacagt

SEQ ID NO: 69426 - DNA, 25 bp, Canis familiaris
ctttctcaggcctcagctgggaagc

SEQ ID NO: 69427 - DNA, 25 bp, Canis familiaris
cttagtgcatgacctttcttcgaaa

SEQ ID NO: 69428 - DNA, 25 bp, Canis familiaris
cttcaggcatggcagggctgggaaa

SEQ ID NO: 69429 - DNA, 25 bp, Canis familiaris
cttcaggcgcgcggtctggcagtaa

SEQ ID NO: 69430 - DNA, 25 bp, Canis familiaris
cttaggaggctggtcagccgctcca

SEQ ID NO: 69431 - DNA, 25 bp, Canis familiaris
ctttgctgagtggcgtcatgcccac

SEQ ID NO: 69432 - DNA, 25 bp, Canis familiaris
cttcagcggctggtacatgggcaca

SEQ ID NO: 69433 - DNA, 25 bp, Canis familiaris
cttcatcagcccttacctggaaggg

SEQ ID NO: 69434 - DNA, 25 bp, Canis familiaris
cttcttcccatttgccaagaggggg

SEQ ID NO: 69435 - DNA, 25 bp, Canis familiaris
cgtcctggcccttgtaggggtagct

SEQ ID NO: 69436 - DNA, 25 bp, Canis familiaris
cttcactcccgttggggtagctact

SEQ ID NO: 69437 - DNA, 25 bp, Canis familiaris
ctcgacctcggggtgaggtagtgac

SEQ ID NO: 69438 - DNA, 25 bp, Canis familiaris
cttacctctggggctgctggaggga

SEQ ID NO: 69439 - DNA, 25 bp, Canis familiaris
cttaccttgggatttgaaagagcag

SEQ ID NO: 69440 - DNA, 25 bp, Canis familiaris
ctttttatgaagtgctgacaagaga

SEQ ID NO: 69441 - DNA, 25 bp, Canis familiaris
ctttctggagaccacttaaagagat

SEQ ID NO: 69442 - DNA, 25 bp, Canis familiaris
cttttgtgacattcaagtcctagaa

SEQ ID NO: 69443 - DNA, 25 bp, Canis familiaris
cttttgtacttcttgttcattaaat

SEQ ID NO: 69444 - DNA, 25 bp, Canis familiaris
cttatccttcccatgttcattaatt

SEQ ID NO: 69445 - DNA, 25 bp, Canis familiaris
cttacgtccgccactatattatcgc

SEQ ID NO: 69446 - DNA, 25 bp, Canis familiaris
cttagcgtccggaccgtaactctag

SEQ ID NO: 69447 - DNA, 25 bp, Canis familiaris
ctttggtccaagacccacaagccgc

SEQ ID NO: 69448 - DNA, 25 bp, Canis familiaris
ctttgggaaaacgcagaatctggga

SEQ ID NO: 69449 - DNA, 25 bp, Canis familiaris
ccgggataagaagccaaaagtggat

SEQ ID NO: 69450 - DNA, 25 bp, Canis familiaris
ctagaaatgaaacccgaataaggag

SEQ ID NO: 69451 - DNA, 25 bp, Canis familiaris
ctaaagggagaccacctgtccaggg

SEQ ID NO: 69452 - DNA, 25 bp, Canis familiaris
ctacaacggcaagaccttcaaccag

SEQ ID NO: 69453 - DNA, 25 bp, Canis familiaris
ctaacagggcatccgaacttgattc

SEQ ID NO: 69454 - DNA, 25 bp, Canis familiaris
ctaaatgattatcctgaagtatgca

SEQ ID NO: 69455 - DNA, 25 bp, Canis familiaris
cttcacagcacttccgggtagaggc

SEQ ID NO: 69456 - DNA, 25 bp, Canis familiaris
cttaagcccaccggagtaggatcag

SEQ ID NO: 69457 - DNA, 25 bp, Canis familiaris
cttaagcaagctgcggttgtggaag

SEQ ID NO: 69458 - DNA, 25 bp, Canis familiaris
cttttggagccgggttggtacagca

SEQ ID NO: 69459 - DNA, 25 bp, Canis familiaris
ctttggggcctggggctggacaagc

SEQ ID NO: 69460 - DNA, 25 bp, Canis familiaris
ctttgcgtcccgcttgggacagagg

SEQ ID NO: 69461 - DNA, 25 bp, Canis familiaris
ctttcgtcaccgatattgggctgcc

SEQ ID NO: 69462 - DNA, 25 bp, Canis familiaris
ctttcatgtcaggcgttaaactgtc

SEQ ID NO: 69463 - DNA, 25 bp, Canis familiaris
cttttgaatgtagttcaaccgtgga

SEQ ID NO: 69464 - DNA, 25 bp, Canis familiaris
cttttggttcaattcattcagggga

SEQ ID NO: 69465 - DNA, 25 bp, Canis familiaris
ctttgggttctatgatggagctgga

SEQ ID NO: 69466 - DNA, 25 bp, Canis familiaris
cttcagctgcgttctctagatgtga

SEQ ID NO: 69467 - DNA, 25 bp, Canis familiaris
cttatggcagtaatcatggctgtga

SEQ ID NO: 69468 - DNA, 25 bp, Canis familiaris
cttcatcgacttggctggccatgag

SEQ ID NO: 69469 - DNA, 25 bp, Canis familiaris
cttacaccctgcctggagcatagta

SEQ ID NO: 69470 - DNA, 25 bp, Canis familiaris
cttaccttgctgcatgatggtcagt

SEQ ID NO: 69471 - DNA, 25 bp, Canis familiaris
cttacctgctctgggatctgtggag

SEQ ID NO: 69472 - DNA, 25 bp, Canis familiaris
cttcagccgcttttacttgggagag

SEQ ID NO: 69473 - DNA, 25 bp, Canis familiaris
cttcatgccactgaatacgttgaaa

SEQ ID NO: 69474 - DNA, 25 bp, Canis familiaris
cttcaccattctttactgttatata

SEQ ID NO: 69475 - DNA, 25 bp, Canis familiaris
ctatccttttaaactggttatctat

SEQ ID NO: 69476 - DNA, 25 bp, Canis familiaris
ctatctggttcttaggggttcctca

SEQ ID NO: 69477 - DNA, 25 bp, Canis familiaris
ctttggtgtccatgggtttctctaa

SEQ ID NO: 69478 - DNA, 25 bp, Canis familiaris
ctttggatgcccagggtcctttgaa

SEQ ID NO: 69479 - DNA, 25 bp, Canis familiaris
ctttgacatcccacgtggcatttta

SEQ ID NO: 69480 - DNA, 25 bp, Canis familiaris
ctttggagccggtgttgtttgtcca

SEQ ID NO: 69481 - DNA, 25 bp, Canis familiaris
ctttctacgggatctgttttgtaca

SEQ ID NO: 69482 - DNA, 25 bp, Canis familiaris
ctttctacgtgatcttttttgtaca

SEQ ID NO: 69483 - DNA, 25 bp, Canis familiaris
ctttccagggatttttcattttcag

SEQ ID NO: 69484 - DNA, 25 bp, Canis familiaris
ctttccacttgctgaaaaggttcaa

SEQ ID NO: 69485 - DNA, 25 bp, Canis familiaris
ctttcctcttcaaacagcaaagttt

SEQ ID NO: 69486 - DNA, 25 bp, Canis familiaris
ctttcacattaaaagaaacacctgt

SEQ ID NO: 69487 - DNA, 25 bp, Canis familiaris
ctttcatttacacagatatccatgc

SEQ ID NO: 69488 - DNA, 25 bp, Canis familiaris
ctttctctaatctggctatactgtc

SEQ ID NO: 69489 - DNA, 25 bp, Canis familiaris
ctttctgcgttgtcgactataccgg

SEQ ID NO: 69490 - DNA, 25 bp, Canis familiaris
ctttctttcctgcacatctgggcag

SEQ ID NO: 69491 - DNA, 25 bp, Canis familiaris
ctatccctgtacgcctctggccgta

SEQ ID NO: 69492 - DNA, 25 bp, Canis familiaris
cttcaacatggagttcctgggcccc

SEQ ID NO: 69493 - DNA, 25 bp, Canis familiaris
cttcaatcttgaattcttagtgccc

SEQ ID NO: 69494 - DNA, 25 bp, Canis familiaris
ctgtcaaaaattgagtcacgtccga

SEQ ID NO: 69495 - DNA, 25 bp, Canis familiaris
cttcaacaccttgtatcagctgctc

SEQ ID NO: 69496 - DNA, 25 bp, Canis familiaris
cttaatgcacgccaggcgctacgcc

SEQ ID NO: 69497 - DNA, 25 bp, Canis familiaris
ctatgagctgcccgatggccaagtc

SEQ ID NO: 69498 - DNA, 25 bp, Canis familiaris
ctttgcaccaggttgccaagggagg

SEQ ID NO: 69499 - DNA, 25 bp, Canis familiaris
cttagcccatggtcagtcagtgagg

SEQ ID NO: 69500 - DNA, 25 bp, Canis familiaris
cttagccctggatttttgagtgtgt

SEQ ID NO: 69501 - DNA, 25 bp, Canis familiaris
cttaccctgagccatatagttgttg

SEQ ID NO: 69502 - DNA, 25 bp, Canis familiaris
cttcacccatcaccatttttgtatt

SEQ ID NO: 69503 - DNA, 25 bp, Canis familiaris
cttcacccaccagttctgagggcaa

SEQ ID NO: 69504 - DNA, 25 bp, Canis familiaris
cttacagtcacttgcttcggaggaa

SEQ ID NO: 69505 - DNA, 25 bp, Canis familiaris
cttacagtcatcccatccggaaaga

SEQ ID NO: 69506 - DNA, 25 bp, Canis familiaris
ctttcgccacttgtcggagaatgag

SEQ ID NO: 69507 - DNA, 25 bp, Canis familiaris
ctatggccccttgggaggactttgc

SEQ ID NO: 69508 - DNA, 25 bp, Canis familiaris
ctttcagcctccgggaggagttcct

SEQ ID NO: 69509 - DNA, 25 bp, Canis familiaris
ctttcacccgactgctgtagtcgtt

SEQ ID NO: 69510 - DNA, 25 bp, Canis familiaris
ctatccccggaatggctgaatctgg

SEQ ID NO: 69511 - DNA, 25 bp, Canis familiaris
cttcaccttggcactggctgaataa

SEQ ID NO: 69512 - DNA, 25 bp, Canis familiaris
cttcaacttggccctgtatggtcta

SEQ ID NO: 69513 - DNA, 25 bp, Canis familiaris
cttacgcttttgtcatctatgtgtc

SEQ ID NO: 69514 - DNA, 25 bp, Canis familiaris
cttaccttttaatatctgtgtctgt

SEQ ID NO: 69515 - DNA, 25 bp, Canis familiaris
cttcacctgttttttgcatagttca

SEQ ID NO: 69516 - DNA, 25 bp, Canis familiaris
ctttaattctggttcgcatcagttc

SEQ ID NO: 69517 - DNA, 25 bp, Canis familiaris
ctcttgaacatcactatcatgacgt

SEQ ID NO: 69518 - DNA, 25 bp, Canis familiaris
cttcaacacagcactctcagcaaaa

SEQ ID NO: 69519 - DNA, 25 bp, Canis familiaris
cttcagcaccagaacccgaagagcc

SEQ ID NO: 69520 - DNA, 25 bp, Canis familiaris
ctttcaccagagacctcggtaccag

SEQ ID NO: 69521 - DNA, 25 bp, Canis familiaris
ctttagccgaaccgctggatgacaa

SEQ ID NO: 69522 - DNA, 25 bp, Canis familiaris
ctttacccagttcagctgaataaat

SEQ ID NO: 69523 - DNA, 25 bp, Canis familiaris
cttttccggtctatctgagtaaatt

SEQ ID NO: 69524 - DNA, 25 bp, Canis familiaris
cttttagaagtcactcatgagtaac

SEQ ID NO: 69525 - DNA, 25 bp, Canis familiaris
ctatttgatatgttccgtcggttac

SEQ ID NO: 69526 - DNA, 25 bp, Canis familiaris
ctttgatgattagcttcccacttag

SEQ ID NO: 69527 - DNA, 25 bp, Canis familiaris
ctttgcattgtaagttgcccaataa

SEQ ID NO: 69528 - DNA, 25 bp, Canis familiaris
ctttcttgatcttgtttgccatgta

SEQ ID NO: 69529 - DNA, 25 bp, Canis familiaris
ctttcatcatacttcttctggattt

SEQ ID NO: 69530 - DNA, 25 bp, Canis familiaris
ctttcatgtccaaaatgttgatcta

SEQ ID NO: 69531 - DNA, 25 bp, Canis familiaris
ctttactccagcagatcttgcctac

SEQ ID NO: 69532 - DNA, 25 bp, Canis familiaris
ctttactccagcagatcttgcctac

SEQ ID NO: 69533 - DNA, 25 bp, Canis familiaris
ctttactccagcagatcttgcctac

SEQ ID NO: 69534 - DNA, 25 bp, Canis familiaris
ctttactccagcagatcttgcctac

SEQ ID NO: 69535 - DNA, 25 bp, Canis familiaris
ctttgatctcaacagtagctactac

SEQ ID NO: 69536 - DNA, 25 bp, Canis familiaris
cttatagacaagcaccagcccacaa

SEQ ID NO: 69537 - DNA, 25 bp, Canis familiaris
ctttcaacaagatctgagccccagc

SEQ ID NO: 69538 - DNA, 25 bp, Canis familiaris
cttttcagtacacttagtctgccag

SEQ ID NO: 69539 - DNA, 25 bp, Canis familiaris
ctttttgtcacagtggggagcctgc

SEQ ID NO: 69540 - DNA, 25 bp, Canis familiaris
ctttgggtgcacaaggggagcctcg

SEQ ID NO: 69541 - DNA, 25 bp, Canis familiaris
ctttccgtgaactggtgaccacagc

SEQ ID NO: 69542 - DNA, 25 bp, Canis familiaris
ctttccctgaacattttggccagca

SEQ ID NO: 69543 - DNA, 25 bp, Canis familiaris
cttagactctaagtttcctcatccg

SEQ ID NO: 69544 - DNA, 25 bp, Canis familiaris
cttagattgctagctttgtcctcca

SEQ ID NO: 69545 - DNA, 25 bp, Canis familiaris
cttagcaagttggctttctgtctcc

SEQ ID NO: 69546 - DNA, 25 bp, Canis familiaris
cttaggattgtgtttctgctctgct

SEQ ID NO: 69547 - DNA, 25 bp, Canis familiaris
cttacccgaattactgggcttaatg

SEQ ID NO: 69548 - DNA, 25 bp, Canis familiaris
cttacaccgtacgtgctgggttact

SEQ ID NO: 69549 - DNA, 25 bp, Canis familiaris
cttatctcacaaaccctggggtagc

SEQ ID NO: 69550 - DNA, 25 bp, Canis familiaris
ctttcacacaatcccacgggagggc

SEQ ID NO: 69551 - DNA, 25 bp, Canis familiaris
ctatacccacttcacaaggcaagcc

SEQ ID NO: 69552 - DNA, 25 bp, Canis familiaris
cttacccactgttggacagagcccc

SEQ ID NO: 69553 - DNA, 25 bp, Canis familiaris
ctatttccacagcagtgggtcccgc

SEQ ID NO: 69554 - DNA, 25 bp, Canis familiaris
ctatgtatctccaagagagtctcct

SEQ ID NO: 69555 - DNA, 25 bp, Canis familiaris
ctatgtatctccaagagagtctcct

SEQ ID NO: 69556 - DNA, 25 bp, Canis familiaris
ctttcttgcctctagaatcatccgt

SEQ ID NO: 69557 - DNA, 25 bp, Canis familiaris
ctttcacgaccaagaagcagccgat

SEQ ID NO: 69558 - DNA, 25 bp, Canis familiaris
ctttattgaccttagagcacccttc

SEQ ID NO: 69559 - DNA, 25 bp, Canis familiaris
cttttatccctgtgactcattcatt

SEQ ID NO: 69560 - DNA, 25 bp, Canis familiaris
ctataatgtccctgtgactgctttt

SEQ ID NO: 69561 - DNA, 25 bp, Canis familiaris
cttaacctgcaatgtggatctgttt

SEQ ID NO: 69562 - DNA, 25 bp, Canis familiaris
cttaccactgattttgtgtgtgtgt

SEQ ID NO: 69563 - DNA, 25 bp, Canis familiaris
cttaccaatattttgtatttgctga

SEQ ID NO: 69564 - DNA, 25 bp, Canis familiaris
ctttccattaaaggttcaggctgaa

SEQ ID NO: 69565 - DNA, 25 bp, Canis familiaris
ctttccctaccgtttagagcatgct

SEQ ID NO: 69566 - DNA, 25 bp, Canis familiaris
cttttccttgccagcttggacatgt

SEQ ID NO: 69567 - DNA, 25 bp, Canis familiaris
ctttcttcttcagcgctgtaggttg

SEQ ID NO: 69568 - DNA, 25 bp, Canis familiaris
ctttcttgcattgctctgctaaggt

SEQ ID NO: 69569 - DNA, 25 bp, Canis familiaris
ctttctagcagagtacgcaaatatt

SEQ ID NO: 69570 - DNA, 25 bp, Canis familiaris
ctttctagcagagtacgcaaatatt

SEQ ID NO: 69571 - DNA, 25 bp, Canis familiaris
ctttatattatggaccgaaattaat

SEQ ID NO: 69572 - DNA, 25 bp, Canis familiaris
cttcaatttcaggacatttacattc

SEQ ID NO: 69573 - DNA, 25 bp, Canis familiaris
ctctactttcttgctttacttaatg

SEQ ID NO: 69574 - DNA, 25 bp, Canis familiaris
cttagtgcgtcttgcttttagctct

SEQ ID NO: 69575 - DNA, 25 bp, Canis familiaris
cttagatggatctgtcattttgccc

SEQ ID NO: 69576 - DNA, 25 bp, Canis familiaris
ctatgagtcgagtggcctgccatgc

SEQ ID NO: 69577 - DNA, 25 bp, Canis familiaris
ctatgagaagtgtcgtcacccctgt

SEQ ID NO: 69578 - DNA, 25 bp, Canis familiaris
ctcatacatgcacacctgcacgtgc

SEQ ID NO: 69579 - DNA, 25 bp, Canis familiaris
cttacagctcctctacagatcaatg

SEQ ID NO: 69580 - DNA, 25 bp, Canis familiaris
cttacagtgccactgtactctcctg

SEQ ID NO: 69581 - DNA, 25 bp, Canis familiaris
ctttatgctgggactactcatcgtt

SEQ ID NO: 69582 - DNA, 25 bp, Canis familiaris
cttatatgggagtcctctcgcttgt

SEQ ID NO: 69583 - DNA, 25 bp, Canis familiaris
ctttgatagggtccctgcctgcata

SEQ ID NO: 69584 - DNA, 25 bp, Canis familiaris
ctataatagttgtcaaatgggcata

SEQ ID NO: 69585 - DNA, 25 bp, Canis familiaris
ctattgacgatttcaactcggcccc

SEQ ID NO: 69586 - DNA, 25 bp, Canis familiaris
cttatgacgaggaaacgccgccatc

SEQ ID NO: 69587 - DNA, 25 bp, Canis familiaris
cttagagaaagtcagcgccagccag

SEQ ID NO: 69588 - DNA, 25 bp, Canis familiaris
cttagattaaatcaccacggcataa

SEQ ID NO: 69589 - DNA, 25 bp, Canis familiaris
ctttttataatagcccgtgcttgac

SEQ ID NO: 69590 - DNA, 25 bp, Canis familiaris
ctttgtttatctattcatccgtcga

SEQ ID NO: 69591 - DNA, 25 bp, Canis familiaris
ctttttttattgtgccatagtctga

SEQ ID NO: 69592 - DNA, 25 bp, Canis familiaris
ctttttcatttgacatgggccactt

SEQ ID NO: 69593 - DNA, 25 bp, Canis familiaris
ggtgagcacatggctctaggaccca

SEQ ID NO: 69594 - DNA, 25 bp, Canis familiaris
ctttctatctggcacttcctatgtg

SEQ ID NO: 69595 - DNA, 25 bp, Canis familiaris
cttttctgctggatgccatcccagg

SEQ ID NO: 69596 - DNA, 25 bp, Canis familiaris
cttttctgctccagctaacacaggc

SEQ ID NO: 69597 - DNA, 25 bp, Canis familiaris
cttttactctctggtgacaccggaa

SEQ ID NO: 69598 - DNA, 25 bp, Canis familiaris
ctttttctctctggggctagcaata

SEQ ID NO: 69599 - DNA, 25 bp, Canis familiaris
ctttttgcctcctagccatcaaaat

SEQ ID NO: 69600 - DNA, 25 bp, Canis familiaris
ctttttgcccattgaccagataaat

SEQ ID NO: 69601 - DNA, 25 bp, Canis familiaris
ctgttttgccgggtcagaaaaaatg

SEQ ID NO: 69602 - DNA, 25 bp, Canis familiaris
ctgattaagaccggttgaaaactag

SEQ ID NO: 69603 - DNA, 25 bp, Canis familiaris
ctttatcccgccgttgaacaactag

SEQ ID NO: 69604 - DNA, 25 bp, Canis familiaris
ctttatcccgccgtgtgaataggtt

SEQ ID NO: 69605 - DNA, 25 bp, Canis familiaris
cttattcctctggcctggcaggaag

SEQ ID NO: 69606 - DNA, 25 bp, Canis familiaris
cttatcccttcatggccgtaagtga

SEQ ID NO: 69607 - DNA, 25 bp, Canis familiaris
ctattggcctccttggccctaaata

SEQ ID NO: 69608 - DNA, 25 bp, Canis familiaris
ctttccccttctcgaatgctaataa

SEQ ID NO: 69609 - DNA, 25 bp, Canis familiaris
cttatcccaaagctgaacccataga

SEQ ID NO: 69610 - DNA, 25 bp, Canis familiaris
ctttgcccgaatgtcagactccatc

SEQ ID NO: 69611 - DNA, 25 bp, Canis familiaris
ctgattgcccagattgttaccttca

SEQ ID NO: 69612 - DNA, 25 bp, Canis familiaris
ctatcctcaaatttgtcttgcactg

SEQ ID NO: 69613 - DNA, 25 bp, Canis familiaris
ctattgcacagattatcacctccct

SEQ ID NO: 69614 - DNA, 25 bp, Canis familiaris
ctttccatgacattgagcccagttc

SEQ ID NO: 69615 - DNA, 25 bp, Canis familiaris
cttactcatcacaaagaccacttta

SEQ ID NO: 69616 - DNA, 25 bp, Canis familiaris
cttaactgactgaatgaccctaaaa

SEQ ID NO: 69617 - DNA, 25 bp, Canis familiaris
ctataccatgtaaataagccaaaag

SEQ ID NO: 69618 - DNA, 25 bp, Canis familiaris
ctatgactaagacatcagagaagaa

SEQ ID NO: 69619 - DNA, 25 bp, Canis familiaris
ctttgctcatgaccttggaataaaa

SEQ ID NO: 69620 - DNA, 25 bp, Canis familiaris
ctttctgtgacactctggagagagc

SEQ ID NO: 69621 - DNA, 25 bp, Canis familiaris
ctttttgacacattggcaagtgcaa

SEQ ID NO: 69622 - DNA, 25 bp, Canis familiaris
cttttccacagcttggctcaggaga

SEQ ID NO: 69623 - DNA, 25 bp, Canis familiaris
ctatttccggcatcgccgaggaggc

SEQ ID NO: 69624 - DNA, 25 bp, Canis familiaris
ctatttccggcatcgccgaggaggc

SEQ ID NO: 69625 - DNA, 25 bp, Canis familiaris
ctatttccggcatcgccgaggaggc

SEQ ID NO: 69626 - DNA, 25 bp, Canis familiaris
ctatttccggcatcgccgaggaggc

SEQ ID NO: 69627 - DNA, 25 bp, Canis familiaris
ctatttccggcatcgccgaggaggc

SEQ ID NO: 69628 - DNA, 25 bp, Canis familiaris
ctatttccggcatcgccgaggaggc

SEQ ID NO: 69629 - DNA, 25 bp, Canis familiaris
cttttacaagccgcaaaggcagcag

SEQ ID NO: 69630 - DNA, 25 bp, Canis familiaris
ctttccttagccacaaaggccacgc

SEQ ID NO: 69631 - DNA, 25 bp, Canis familiaris
ctttccttatccccaagagacgtag

SEQ ID NO: 69632 - DNA, 25 bp, Canis familiaris
cttatccattgcactccggatgtgc

SEQ ID NO: 69633 - DNA, 25 bp, Canis familiaris
cttaccaggtggacggagatggcca

SEQ ID NO: 69634 - DNA, 25 bp, Canis familiaris
cttaccaggtggacatttttgcaga

SEQ ID NO: 69635 - DNA, 25 bp, Canis familiaris
cttatccccgagacactttttatgg

SEQ ID NO: 69636 - DNA, 25 bp, Canis familiaris
ctttccgcaccatacttttttctgg

SEQ ID NO: 69637 - DNA, 25 bp, Canis familiaris
ctttcctgcactaaacttctttggt

SEQ ID NO: 69638 - DNA, 25 bp, Canis familiaris
cttttgctgctttaacattttctgg

SEQ ID NO: 69639 - DNA, 25 bp, Canis familiaris
ctttttctttagccatttctctgcg

SEQ ID NO: 69640 - DNA, 25 bp, Canis familiaris
ctttttctgtatcctgacatttttc

SEQ ID NO: 69641 - DNA, 25 bp, Canis familiaris
ctatttgtcctagctaatttcgtcc

SEQ ID NO: 69642 - DNA, 25 bp, Canis familiaris
ctttctgtctttgatatttttccca

SEQ ID NO: 69643 - DNA, 25 bp, Canis familiaris
cttatttctgttatttattcttctg

SEQ ID NO: 69644 - DNA, 25 bp, Canis familiaris
ctttttctgttcatttcatcttgcc

SEQ ID NO: 69645 - DNA, 25 bp, Canis familiaris
ctttgactatgactgttttttggac

SEQ ID NO: 69646 - DNA, 25 bp, Canis familiaris
ctttattaaccacttcacttgtgac

SEQ ID NO: 69647 - DNA, 25 bp, Canis familiaris
ctttcatctgaaacattccacattt

SEQ ID NO: 69648 - DNA, 25 bp, Canis familiaris
ctatccttacatggcaacacatcgt

SEQ ID NO: 69649 - DNA, 25 bp, Canis familiaris
ctatgtcctcactgcagacacactg

SEQ ID NO: 69650 - DNA, 25 bp, Canis familiaris
cttatccatatgggaacatccttcc

SEQ ID NO: 69651 - DNA, 25 bp, Canis familiaris
cttttatgatgttaacatccgcagc

SEQ ID NO: 69652 - DNA, 25 bp, Canis familiaris
ctttgtgatgtggtacctcagcctg

SEQ ID NO: 69653 - DNA, 25 bp, Canis familiaris
ctttgctgcatcattttgccgactg

SEQ ID NO: 69654 - DNA, 25 bp, Canis familiaris
ctttgctcatccacggatcaggctg

SEQ ID NO: 69655 - DNA, 25 bp, Canis familiaris
cttagtccagcatgcttgtagtgct

SEQ ID NO: 69656 - DNA, 25 bp, Canis familiaris
cttagccaagctgctagtaggcatc

SEQ ID NO: 69657 - DNA, 25 bp, Canis familiaris
ctttgcagaagcacgtgttgtccca

SEQ ID NO: 69658 - DNA, 25 bp, Canis familiaris
ctttcagcagatgtggatttcccaa

SEQ ID NO: 69659 - DNA, 25 bp, Canis familiaris
ctttcagctgtctatgtggatccgg

SEQ ID NO: 69660 - DNA, 25 bp, Canis familiaris
ctttgggtctgagtacccagagtca

SEQ ID NO: 69661 - DNA, 25 bp, Canis familiaris
ctttggctgatcaatccacccaagg

SEQ ID NO: 69662 - DNA, 25 bp, Canis familiaris
ctttggctgattcatccaccaggtt

SEQ ID NO: 69663 - DNA, 25 bp, Canis familiaris
ctttggctacagaacagctccaggt

SEQ ID NO: 69664 - DNA, 25 bp, Canis familiaris
ctattgtgttcaccaagctcacgcc

SEQ ID NO: 69665 - DNA, 25 bp, Canis familiaris
ctttgtgtgtacgaatgctcatgaa

SEQ ID NO: 69666 - DNA, 25 bp, Canis familiaris
ctttgtatagcagtcgtgcctcaat

SEQ ID NO: 69667 - DNA, 25 bp, Canis familiaris
cttatgcacggattgtgtcctccat

SEQ ID NO: 69668 - DNA, 25 bp, Canis familiaris
ctatcatgacgtgtgtgtgttcaac

SEQ ID NO: 69669 - DNA, 25 bp, Canis familiaris
ctattagcagtggtttctctggggc

SEQ ID NO: 69670 - DNA, 25 bp, Canis familiaris
ctttcacgcttcatttgctaggcgt

SEQ ID NO: 69671 - DNA, 25 bp, Canis familiaris
ctttcatccattttcacagctagcc

SEQ ID NO: 69672 - DNA, 25 bp, Canis familiaris
ctttacacatatttcgcagttgggt

SEQ ID NO: 69673 - DNA, 25 bp, Canis familiaris
cttttctgtgtgttctagcttcggt

SEQ ID NO: 69674 - DNA, 25 bp, Canis familiaris
cttactctgggagcgtctgttggct

SEQ ID NO: 69675 - DNA, 25 bp, Canis familiaris
ctttctcgtagagcctcgtgggctc

SEQ ID NO: 69676 - DNA, 25 bp, Canis familiaris
cttatcaggaacgcctcgatacgct

SEQ ID NO: 69677 - DNA, 25 bp, Canis familiaris
ctgtatcgagtacaccacttcacca

SEQ ID NO: 69678 - DNA, 25 bp, Canis familiaris
ctttcggctacaagaagcctcctcc

SEQ ID NO: 69679 - DNA, 25 bp, Canis familiaris
ctcttcggtgattagtagacaacta

SEQ ID NO: 69680 - DNA, 25 bp, Canis familiaris
ctttccagtctttgtaactcatcga

SEQ ID NO: 69681 - DNA, 25 bp, Canis familiaris
cttttgccctattctttctagcaga

SEQ ID NO: 69682 - DNA, 25 bp, Canis familiaris
cttttgccctattctttctagcaga

SEQ ID NO: 69683 - DNA, 25 bp, Canis familiaris
cttttgccctattctgtctagcaga

SEQ ID NO: 69684 - DNA, 25 bp, Canis familiaris
cttttcctgcttccactatagcaca

SEQ ID NO: 69685 - DNA, 25 bp, Canis familiaris
cttttcacataacctcttaccatta

SEQ ID NO: 69686 - DNA, 25 bp, Canis familiaris
cttatctcaagatccttacctttat

SEQ ID NO: 69687 - DNA, 25 bp, Canis familiaris
cttatctcttggaccttgagccaca

SEQ ID NO: 69688 - DNA, 25 bp, Canis familiaris
ctttcttgaatggccttaccagcgc

SEQ ID NO: 69689 - DNA, 25 bp, Canis familiaris
ctttttggagaccattaaagagatc

SEQ ID NO: 69690 - DNA, 25 bp, Canis familiaris
ctattttgaggatgttgagattatt

SEQ ID NO: 69691 - DNA, 25 bp, Canis familiaris
ctttttatcgcatcagaagcatttt

SEQ ID NO: 69692 - DNA, 25 bp, Canis familiaris
ctttttgatcgttaaggaggattca

SEQ ID NO: 69693 - DNA, 25 bp, Canis familiaris
ctttggttgctttaaggaagaacat

SEQ ID NO: 69694 - DNA, 25 bp, Canis familiaris
ctagggccctttcaggaggacagct

SEQ ID NO: 69695 - DNA, 25 bp, Canis familiaris
gctaggggcactttggtacggaaca

SEQ ID NO: 69696 - DNA, 25 bp, Canis familiaris
ctaggaacacagtggtagggcagcc

SEQ ID NO: 69697 - DNA, 25 bp, Canis familiaris
ctttgaccacagaggagggccacaa

SEQ ID NO: 69698 - DNA, 25 bp, Canis familiaris
cttagactctaaagtgggcccaacg

SEQ ID NO: 69699 - DNA, 25 bp, Canis familiaris
ctatagatcctttaggggcaccatg

SEQ ID NO: 69700 - DNA, 25 bp, Canis familiaris
ctatgagccacttaggggccctaat

SEQ ID NO: 69701 - DNA, 25 bp, Canis familiaris
ctatatgagaatccagggcagccct

SEQ ID NO: 69702 - DNA, 25 bp, Canis familiaris
ctattcagaactgtgtgcacccctg

SEQ ID NO: 69703 - DNA, 25 bp, Canis familiaris
ctttcgtacacttacaccagcacgg

SEQ ID NO: 69704 - DNA, 25 bp, Canis familiaris
ctttccataactcatcaccggtggt

SEQ ID NO: 69705 - DNA, 25 bp, Canis familiaris
ctttccatattcccagcggatgggt

SEQ ID NO: 69706 - DNA, 25 bp, Canis familiaris
ctttccattctcttcaggaagctga

SEQ ID NO: 69707 - DNA, 25 bp, Canis familiaris
ctttccttcatcttgcaggagctta

SEQ ID NO: 69708 - DNA, 25 bp, Canis familiaris
cttttgctctgtgtcaagacttgaa

SEQ ID NO: 69709 - DNA, 25 bp, Canis familiaris
cttttgccgccaccaaagttgataa

SEQ ID NO: 69710 - DNA, 25 bp, Canis familiaris
ctttttcccaccatgatgttataat

SEQ ID NO: 69711 - DNA, 25 bp, Canis familiaris
ctttttcctccacatggtactactt

SEQ ID NO: 69712 - DNA, 25 bp, Canis familiaris
cttttccctgcaagaatgttacata

SEQ ID NO: 69713 - DNA, 25 bp, Canis familiaris
cttttcttccattgagcattctaat

SEQ ID NO: 69714 - DNA, 25 bp, Canis familiaris
cttttgttccctccttgatgaatta

SEQ ID NO: 69715 - DNA, 25 bp, Canis familiaris
ctttatttcctcccttgcaaatgaa

SEQ ID NO: 69716 - DNA, 25 bp, Canis familiaris
ctttttttctcacctgcacttagag

SEQ ID NO: 69717 - DNA, 25 bp, Canis familiaris
cttttcttgtgtactctcagcttag

SEQ ID NO: 69718 - DNA, 25 bp, Canis familiaris
cttttcaagctgctcctgatcggag

SEQ ID NO: 69719 - DNA, 25 bp, Canis familiaris
cttttctcgctccattctgaagtaa

SEQ ID NO: 69720 - DNA, 25 bp, Canis familiaris
cttatcctcttccacttggacaaat

SEQ ID NO: 69721 - DNA, 25 bp, Canis familiaris
cttttctcttcctttgaacacttga

SEQ ID NO: 69722 - DNA, 25 bp, Canis familiaris
ctttttgcttcctttagcctgattc

SEQ ID NO: 69723 - DNA, 25 bp, Canis familiaris
cttttggcttcatctgtacacgtcc

SEQ ID NO: 69724 - DNA, 25 bp, Canis familiaris
cttttgggctaccaggacaggctcc

SEQ ID NO: 69725 - DNA, 25 bp, Canis familiaris
ctttctggagcttccgtaactgcat

SEQ ID NO: 69726 - DNA, 25 bp, Canis familiaris
ctttgttagtacctgtcaccacatc

SEQ ID NO: 69727 - DNA, 25 bp, Canis familiaris
cttttgtggtgacgtggaccccagt

SEQ ID NO: 69728 - DNA, 25 bp, Canis familiaris
cttttgtgtgagtagggtcgcccag

SEQ ID NO: 69729 - DNA, 25 bp, Canis familiaris
ctttatgcttatgaggactgcccta

SEQ ID NO: 69730 - DNA, 25 bp, Canis familiaris
cttatagttattttccatctcctcc

SEQ ID NO: 69731 - DNA, 25 bp, Canis familiaris
cttaggttcattttccagacactga

SEQ ID NO: 69732 - DNA, 25 bp, Canis familiaris
cttaggtgttggcaggatccctgag

SEQ ID NO: 69733 - DNA, 25 bp, Canis familiaris
ctaggagttttgcagaggccttgta

SEQ ID NO: 69734 - DNA, 25 bp, Canis familiaris
ctcgggatttcaaacatgcgccaaa

SEQ ID NO: 69735 - DNA, 25 bp, Canis familiaris
cttagtttgagcatacctgccaaaa

SEQ ID NO: 69736 - DNA, 25 bp, Canis familiaris
ctttgttcagaagacactcctccaa

SEQ ID NO: 69737 - DNA, 25 bp, Canis familiaris
ctatgtttaacataatcccctccag

SEQ ID NO: 69738 - DNA, 25 bp, Canis familiaris
ctatttaatacatgaacagcctttg

SEQ ID NO: 69739 - DNA, 25 bp, Canis familiaris
ctttctagaagccgcacgcaggttg

SEQ ID NO: 69740 - DNA, 25 bp, Canis familiaris
ctatcaccgtggctgaggcaggcct

SEQ ID NO: 69741 - DNA, 25 bp, Canis familiaris
ctatatacggctgttgcagcaggct

SEQ ID NO: 69742 - DNA, 25 bp, Canis familiaris
cttttccagctgggcatgcatgccc

SEQ ID NO: 69743 - DNA, 25 bp, Canis familiaris
cttttcagcatcactgatgaccctt

SEQ ID NO: 69744 - DNA, 25 bp, Canis familiaris
cttttccctactagcagctgttttg

SEQ ID NO: 69745 - DNA, 25 bp, Canis familiaris
ctatagtcccatgtaactctttagc

SEQ ID NO: 69746 - DNA, 25 bp, Canis familiaris
cttattccctctaattcacatttaa

SEQ ID NO: 69747 - DNA, 25 bp, Canis familiaris
cttttcctctgaatatcttgtgttc

SEQ ID NO: 69748 - DNA, 25 bp, Canis familiaris
cttttcctcaaatctttgcttctgt

SEQ ID NO: 69749 - DNA, 25 bp, Canis familiaris
ctttccctgactgacttatttcact

SEQ ID NO: 69750 - DNA, 25 bp, Canis familiaris
ctttctttccgtgtgtatttctaag

SEQ ID NO: 69751 - DNA, 25 bp, Canis familiaris
ctttctttcgtatttgtattttcat

SEQ ID NO: 69752 - DNA, 25 bp, Canis familiaris
cttatttgcccctttaattgtgtct

SEQ ID NO: 69753 - DNA, 25 bp, Canis familiaris
ctttttgcccttctaaatgttctct

SEQ ID NO: 69754 - DNA, 25 bp, Canis familiaris
ctcttttcttttctaagatcttatt

SEQ ID NO: 69755 - DNA, 25 bp, Canis familiaris
cccaatgccaactcttaagtccgtt

SEQ ID NO: 69756 - DNA, 25 bp, Canis familiaris
cccaaaaagcccataaatcacccat

SEQ ID NO: 69757 - DNA, 25 bp, Canis familiaris
ctcccagggttcattacaacaccca

SEQ ID NO: 69758 - DNA, 25 bp, Canis familiaris
tcttcaaatgcctttttaaaactca

SEQ ID NO: 69759 - DNA, 25 bp, Canis familiaris
ctatcaagcaggccttctacaacac

SEQ ID NO: 69760 - DNA, 25 bp, Canis familiaris
cttatcagactgtttccaccacaaa

SEQ ID NO: 69761 - DNA, 25 bp, Canis familiaris
ctttctgagcattttaccactgcaa

SEQ ID NO: 69762 - DNA, 25 bp, Canis familiaris
ctttcgtattccttcaaccaatgtt

SEQ ID NO: 69763 - DNA, 25 bp, Canis familiaris
ctttccgtatcctcaaggcattctt

SEQ ID NO: 69764 - DNA, 25 bp, Canis familiaris
ctttcactgtttcctcaaggtagtc

SEQ ID NO: 69765 - DNA, 25 bp, Canis familiaris
cttatctttttcccaatgtgctgtt

SEQ ID NO: 69766 - DNA, 25 bp, Canis familiaris
ctttatatctattgccccatggtgt

SEQ ID NO: 69767 - DNA, 25 bp, Canis familiaris
cttatgaccttgtccgtgtgtgtgt

SEQ ID NO: 69768 - DNA, 25 bp, Canis familiaris
ctatatagttatggccggatttgct

SEQ ID NO: 69769 - DNA, 25 bp, Canis familiaris
ctatatccactgacccggtattatc

SEQ ID NO: 69770 - DNA, 25 bp, Canis familiaris
ctaacatcccccttggttagtcgat

SEQ ID NO: 69771 - DNA, 25 bp, Canis familiaris
ctctaacaccccaggatcaagtcca

SEQ ID NO: 69772 - DNA, 25 bp, Canis familiaris
ctataccaacccactgaaagttcag

SEQ ID NO: 69773 - DNA, 25 bp, Canis familiaris
gcttaaagccccacggagagggatc

SEQ ID NO: 69774 - DNA, 25 bp, Canis familiaris
cttatacggccacccaggagatggg

SEQ ID NO: 69775 - DNA, 25 bp, Canis familiaris
cttataccccaagctcgaggtctga

SEQ ID NO: 69776 - DNA, 25 bp, Canis familiaris
ctatttccccaacccagagtgaata

SEQ ID NO: 69777 - DNA, 25 bp, Canis familiaris
ctttgctcccactcctagaaaaaag

SEQ ID NO: 69778 - DNA, 25 bp, Canis familiaris
ctttctcacctcttcaataaaaaat

SEQ ID NO: 69779 - DNA, 25 bp, Canis familiaris
ctttctctccgtcaaacaaataaat

SEQ ID NO: 69780 - DNA, 25 bp, Canis familiaris
ctttcctcaattcaattcaattccg

SEQ ID NO: 69781 - DNA, 25 bp, Canis familiaris
ctttctgctacatataaggaattcc

SEQ ID NO: 69782 - DNA, 25 bp, Canis familiaris
ctttgctttcaatttgatgggattg

SEQ ID NO: 69783 - DNA, 25 bp, Canis familiaris
ctttgccttcaaataagctctgtct

SEQ ID NO: 69784 - DNA, 25 bp, Canis familiaris
ctttccttctttgccagatgattta

SEQ ID NO: 69785 - DNA, 25 bp, Canis familiaris
ctttctcacttaatagccaggactt

SEQ ID NO: 69786 - DNA, 25 bp, Canis familiaris
ctttccacttttacacggagtctct

SEQ ID NO: 69787 - DNA, 25 bp, Canis familiaris
ctttccgtcttgaaatggcgcgtcc

SEQ ID NO: 69788 - DNA, 25 bp, Canis familiaris
ctttccccaatgtattgagtgccca

SEQ ID NO: 69789 - DNA, 25 bp, Canis familiaris
ctttccccagctggattagtgtcta

SEQ ID NO: 69790 - DNA, 25 bp, Canis familiaris
ctttccccactcattgggctcaaat

SEQ ID NO: 69791 - DNA, 25 bp, Canis familiaris
ctttcttcacccatggggtcacaac

SEQ ID NO: 69792 - DNA, 25 bp, Canis familiaris
ctttcttcccctctgagagcaggaa

SEQ ID NO: 69793 - DNA, 25 bp, Canis familiaris
ctttctccccacttgaaccatggag

SEQ ID NO: 69794 - DNA, 25 bp, Canis familiaris
ctttctggcctccttataacatggg

SEQ ID NO: 69795 - DNA, 25 bp, Canis familiaris
ctagtagtcaatgtattttcagggg

SEQ ID NO: 69796 - DNA, 25 bp, Canis familiaris
ctagtttgagtgatttttcttggca

SEQ ID NO: 69797 - DNA, 25 bp, Canis familiaris
ctttgtccaagcactttgtcatctc

SEQ ID NO: 69798 - DNA, 25 bp, Canis familiaris
cttattctattgaactattacacca

SEQ ID NO: 69799 - DNA, 25 bp, Canis familiaris
ctttgtttctgcaacatttcgcctc

SEQ ID NO: 69800 - DNA, 25 bp, Canis familiaris
ctttgttgttggccgttccaatttg

SEQ ID NO: 69801 - DNA, 25 bp, Canis familiaris
ctttggttttgtggatcccatagtg

SEQ ID NO: 69802 - DNA, 25 bp, Canis familiaris
ctactggtactgtggatacttagga

SEQ ID NO: 69803 - DNA, 25 bp, Canis familiaris
ctactggtactcgtggatactctag

SEQ ID NO: 69804 - DNA, 25 bp, Canis familiaris
ctagctggccattctgggaaataac

SEQ ID NO: 69805 - DNA, 25 bp, Canis familiaris
ctagttcctcacctggtgactaccc

SEQ ID NO: 69806 - DNA, 25 bp, Canis familiaris
cttattccgccgtgtactacgatat

SEQ ID NO: 69807 - DNA, 25 bp, Canis familiaris
cttttgccccgatgtcagatgacga

SEQ ID NO: 69808 - DNA, 25 bp, Canis familiaris
ctttatctcccgtgacagtgacatc

SEQ ID NO: 69809 - DNA, 25 bp, Canis familiaris
ctagtatacaccatggacagacacc

SEQ ID NO: 69810 - DNA, 25 bp, Canis familiaris
ctagatatattctctggcaaagacg

SEQ ID NO: 69811 - DNA, 25 bp, Canis familiaris
ctagatcttcagttctggctatata

SEQ ID NO: 69812 - DNA, 25 bp, Canis familiaris
cttattgccagcttgctggctagtt

SEQ ID NO: 69813 - DNA, 25 bp, Canis familiaris
ctttgtgctcagcgctgctggagtt

SEQ ID NO: 69814 - DNA, 25 bp, Canis familiaris
cttttgctgcctcctggagtgtgga

SEQ ID NO: 69815 - DNA, 25 bp, Canis familiaris
cttttggctgtaatgggtgcatatg

SEQ ID NO: 69816 - DNA, 25 bp, Canis familiaris
cttttggcgcccacagtgatgatgt

SEQ ID NO: 69817 - DNA, 25 bp, Canis familiaris
cttttctgccccaaagtggtgttgg

SEQ ID NO: 69818 - DNA, 25 bp, Canis familiaris
cttttctccccaagtgattttgcga

SEQ ID NO: 69819 - DNA, 25 bp, Canis familiaris
ctttttccatcttgctgtttttcaa

SEQ ID NO: 69820 - DNA, 25 bp, Canis familiaris
cttttccctcttgttttatggtcag

SEQ ID NO: 69821 - DNA, 25 bp, Canis familiaris
cggtcccctctgagtatttaatctc

SEQ ID NO: 69822 - DNA, 25 bp, Canis familiaris
ctttccccatctcatgtgtttaact

SEQ ID NO: 69823 - DNA, 25 bp, Canis familiaris
ctttccccatttgatatcttagctc

SEQ ID NO: 69824 - DNA, 25 bp, Canis familiaris
ctttcccccctgttattggagatgc

SEQ ID NO: 69825 - DNA, 25 bp, Canis familiaris
cttattccagcccttttttgagtgt

SEQ ID NO: 69826 - DNA, 25 bp, Canis familiaris
ctatgtttagccattatttaatctg

SEQ ID NO: 69827 - DNA, 25 bp, Canis familiaris
ctatgaaatcgcgcttcttgaagac

SEQ ID NO: 69828 - DNA, 25 bp, Canis familiaris
ctttaggcagcagcttttaatacag

SEQ ID NO: 69829 - DNA, 25 bp, Canis familiaris
ctatttgtccaggctgatttatgat

SEQ ID NO: 69830 - DNA, 25 bp, Canis familiaris
ctacttaccaggctttcttctaaag

SEQ ID NO: 69831 - DNA, 25 bp, Canis familiaris
cttttaccagtgattctgccctacg

SEQ ID NO: 69832 - DNA, 25 bp, Canis familiaris
cttttcaccgtttccacaacatacg

SEQ ID NO: 69833 - DNA, 25 bp, Canis familiaris
cttttcaatctacttccagataaga

SEQ ID NO: 69834 - DNA, 25 bp, Canis familiaris
cttttgagtgtagttcacgctgaaa

SEQ ID NO: 69835 - DNA, 25 bp, Canis familiaris
ctttcgatggtagtcgccgtgccta

SEQ ID NO: 69836 - DNA, 25 bp, Canis familiaris
ctttcgatggtagtcgccgtgccta

SEQ ID NO: 69837 - DNA, 25 bp, Canis familiaris
ctaatcgtggtccccttggaccaat

SEQ ID NO: 69838 - DNA, 25 bp, Canis familiaris
ctttcctggtggccctcagggaaat

SEQ ID NO: 69839 - DNA, 25 bp, Canis familiaris
ctttccagggtccactcatgtggga

SEQ ID NO: 69840 - DNA, 25 bp, Canis familiaris
ctttccaggaccctcgagttgggag

SEQ ID NO: 69841 - DNA, 25 bp, Canis familiaris
ctttgtaggacatctctcacttggg

SEQ ID NO: 69842 - DNA, 25 bp, Canis familiaris
ctgaggtagtactactcaatttgga

SEQ ID NO: 69843 - DNA, 25 bp, Canis familiaris
ctagttactggctgtcttgttggac

SEQ ID NO: 69844 - DNA, 25 bp, Canis familiaris
ctagtttccttcctcatctaaggac

SEQ ID NO: 69845 - DNA, 25 bp, Canis familiaris
ctatggtttcttcggttcatcatgg

SEQ ID NO: 69846 - DNA, 25 bp, Canis familiaris
ctatgtttttttgaggctgattgag

SEQ ID NO: 69847 - DNA, 25 bp, Canis familiaris
ctaggttttcctcccagtagtgagg

SEQ ID NO: 69848 - DNA, 25 bp, Canis familiaris
ctagaaatttcgagcctggccatag

SEQ ID NO: 69849 - DNA, 25 bp, Canis familiaris
ctaagaattctttgcctacctctag

SEQ ID NO: 69850 - DNA, 25 bp, Canis familiaris
ctcggaatattttgttcaacgtcgc

SEQ ID NO: 69851 - DNA, 25 bp, Canis familiaris
ctttgaacatctatcttccaggctc

SEQ ID NO: 69852 - DNA, 25 bp, Canis familiaris
ctgggaacatcccatttcctgaggg

SEQ ID NO: 69853 - DNA, 25 bp, Canis familiaris
tcgggaaatactgtccccagacgtc

SEQ ID NO: 69854 - DNA, 25 bp, Canis familiaris
ctgcggaaatgagcctccaacggcc

SEQ ID NO: 69855 - DNA, 25 bp, Canis familiaris
ctatggattaacgccagcaactcgg

SEQ ID NO: 69856 - DNA, 25 bp, Canis familiaris
ctatgaatatggcgcccaatacccg

SEQ ID NO: 69857 - DNA, 25 bp, Canis familiaris
ctatgtcaagtcaccaatttccctg

SEQ ID NO: 69858 - DNA, 25 bp, Canis familiaris
ctttcagactctctcatttactctg

SEQ ID NO: 69859 - DNA, 25 bp, Canis familiaris
ctttagtctcttaatcttcgctttg

SEQ ID NO: 69860 - DNA, 25 bp, Canis familiaris
ctttggctccttcattttgtttgag

SEQ ID NO: 69861 - DNA, 25 bp, Canis familiaris
ctttcctacttgctcttttgtgata

SEQ ID NO: 69862 - DNA, 25 bp, Canis familiaris
ctttgccattcttctgtttatagtg

SEQ ID NO: 69863 - DNA, 25 bp, Canis familiaris
ctttgtgattgccgcgtgtttagtg

SEQ ID NO: 69864 - DNA, 25 bp, Canis familiaris
ctttggctggcaggggtgtgtgtgt

SEQ ID NO: 69865 - DNA, 25 bp, Canis familiaris
cttttctgaccccatgttgttgata

SEQ ID NO: 69866 - DNA, 25 bp, Canis familiaris
cttttcttcctccatcattgtaaat

SEQ ID NO: 69867 - DNA, 25 bp, Canis familiaris
ctattctttcctcacatgcttaaat

SEQ ID NO: 69868 - DNA, 25 bp, Canis familiaris
ctttctggtagttccccataacatg

SEQ ID NO: 69869 - DNA, 25 bp, Canis familiaris
ctttctggctttttcttcagtacag

SEQ ID NO: 69870 - DNA, 25 bp, Canis familiaris
ctttgctggtcatttttgtggctga

SEQ ID NO: 69871 - DNA, 25 bp, Canis familiaris
ctttgtcagctctgctggtgtctcg

SEQ ID NO: 69872 - DNA, 25 bp, Canis familiaris
ctttgtcagccaagcggcatctgct

SEQ ID NO: 69873 - DNA, 25 bp, Canis familiaris
ctttgacagcaaagcctgtgtgctt

SEQ ID NO: 69874 - DNA, 25 bp, Canis familiaris
ctttggacacttctggcagcttttt

SEQ ID NO: 69875 - DNA, 25 bp, Canis familiaris
ctttgggagtctcttcgcctatata

SEQ ID NO: 69876 - DNA, 25 bp, Canis familiaris
ctttctgggtcccactcccagaatt

SEQ ID NO: 69877 - DNA, 25 bp, Canis familiaris
ctttatgggcaactaatcttcgata

SEQ ID NO: 69878 - DNA, 25 bp, Canis familiaris
ctttcatgggcttaaacttcactaa

SEQ ID NO: 69879 - DNA, 25 bp, Canis familiaris
ctttttggctgataccatctgcaat

SEQ ID NO: 69880 - DNA, 25 bp, Canis familiaris
ctttccggcgagtcaacagttatcc

SEQ ID NO: 69881 - DNA, 25 bp, Canis familiaris
ctttccagccagatcacaagggtct

SEQ ID NO: 69882 - DNA, 25 bp, Canis familiaris
ctttcacagccactttctacagaga

SEQ ID NO: 69883 - DNA, 25 bp, Canis familiaris
ctttagacactacctccaagatgaa

SEQ ID NO: 69884 - DNA, 25 bp, Canis familiaris
ctttgagaggtaattacatagtgta

SEQ ID NO: 69885 - DNA, 25 bp, Canis familiaris
ctctaggagagcaaaatgaaagcgt

SEQ ID NO: 69886 - DNA, 25 bp, Canis familiaris
ctaggggagctatgatgtcaacacc

SEQ ID NO: 69887 - DNA, 25 bp, Canis familiaris
ctagaaccagtatattgctggcagc

SEQ ID NO: 69888 - DNA, 25 bp, Canis familiaris
ctatgaacgcagcctgggtgggccg

SEQ ID NO: 69889 - DNA, 25 bp, Canis familiaris
ctatgaactcaacctgggccagatc

SEQ ID NO: 69890 - DNA, 25 bp, Canis familiaris
ctatcagaccaacaaagccaagcac

SEQ ID NO: 69891 - DNA, 25 bp, Canis familiaris
ctacaaaaggggtcaccaagccgct

SEQ ID NO: 69892 - DNA, 25 bp, Canis familiaris
ctataaccggtttcaaattgccaca

SEQ ID NO: 69893 - DNA, 25 bp, Canis familiaris
ctaactggtgtgagtcaaacgcccc

SEQ ID NO: 69894 - DNA, 25 bp, Canis familiaris
ctaactggtgtgagtcaaacgcccc

SEQ ID NO: 69895 - DNA, 25 bp, Canis familiaris
ctaactggtgtgagtcaaacgcccc

SEQ ID NO: 69896 - DNA, 25 bp, Canis familiaris
ctaactggtgtgagtcaaacgcccc

SEQ ID NO: 69897 - DNA, 25 bp, Canis familiaris
ctagaccaatggccctggaacagcc

SEQ ID NO: 69898 - DNA, 25 bp, Canis familiaris
ctaggagacatgctgctctggtaca

SEQ ID NO: 69899 - DNA, 25 bp, Canis familiaris
ctatggcagctgctggctcaggggc

SEQ ID NO: 69900 - DNA, 25 bp, Canis familiaris
ctttgctctgccccttggggcaagt

SEQ ID NO: 69901 - DNA, 25 bp, Canis familiaris
ctttctctgtcacctttgacgagtg

SEQ ID NO: 69902 - DNA, 25 bp, Canis familiaris
ctttctctgtcacactcagcagtga

SEQ ID NO: 69903 - DNA, 25 bp, Canis familiaris
ctagttctggcacaccagcaacctg

SEQ ID NO: 69904 - DNA, 25 bp, Canis familiaris
ctatggtgctggccgagggaactat

SEQ ID NO: 69905 - DNA, 25 bp, Canis familiaris
ctaaactgtcctaagagcaaagatc

SEQ ID NO: 69906 - DNA, 25 bp, Canis familiaris
ctagtgccagttctgagaaacagtc

SEQ ID NO: 69907 - DNA, 25 bp, Canis familiaris
ctttcgagctgtttgcagacaaagt

SEQ ID NO: 69908 - DNA, 25 bp, Canis familiaris
ctttccatgtgtttccatccagaag

SEQ ID NO: 69909 - DNA, 25 bp, Canis familiaris
ctttctcttgtgctcattacagaag

SEQ ID NO: 69910 - DNA, 25 bp, Canis familiaris
ctttctgcctgggtcactgggaagg

SEQ ID NO: 69911 - DNA, 25 bp, Canis familiaris
ctttaccagcgcgcctggaacaggg

SEQ ID NO: 69912 - DNA, 25 bp, Canis familiaris
ctttcccccatgacgtggcaaaatg

SEQ ID NO: 69913 - DNA, 25 bp, Canis familiaris
ctttgcctcacttacttgccaaaat

SEQ ID NO: 69914 - DNA, 25 bp, Canis familiaris
ctttgactacaagcatcctgataaa

SEQ ID NO: 69915 - DNA, 25 bp, Canis familiaris
ctttgtctagcatcctttcatttga

SEQ ID NO: 69916 - DNA, 25 bp, Canis familiaris
ctttgctttatagctcttgcttgga

SEQ ID NO: 69917 - DNA, 25 bp, Canis familiaris
ctttctttttgactgttcttcaact

SEQ ID NO: 69918 - DNA, 25 bp, Canis familiaris
ctttttttaaatttctcacactcat

SEQ ID NO: 69919 - DNA, 25 bp, Canis familiaris
ctatttgaatttctatatttcccat

SEQ ID NO: 69920 - DNA, 25 bp, Canis familiaris
ctttctgaatttccacgtgttccga

SEQ ID NO: 69921 - DNA, 25 bp, Canis familiaris
ctttctaactatcaagtcgctccag

SEQ ID NO: 69922 - DNA, 25 bp, Canis familiaris
cttttacctcatcagcatagcctta

SEQ ID NO: 69923 - DNA, 25 bp, Canis familiaris
ctttttcctcaggcactacactgta

SEQ ID NO: 69924 - DNA, 25 bp, Canis familiaris
ctatattatcgctaatccaacggga

SEQ ID NO: 69925 - DNA, 25 bp, Canis familiaris
ctatcttatcaatatggaaacatcc

SEQ ID NO: 69926 - DNA, 25 bp, Canis familiaris
ctttggctacacaaggacaggctcc

SEQ ID NO: 69927 - DNA, 25 bp, Canis familiaris
ctttggtagtcatttacagtgccac

SEQ ID NO: 69928 - DNA, 25 bp, Canis familiaris
ctttggatttcattcattcgctcaa

SEQ ID NO: 69929 - DNA, 25 bp, Canis familiaris
ctttggatttatttatgcttcagaa

SEQ ID NO: 69930 - DNA, 25 bp, Canis familiaris
ctttgagttttgttgactgtatcct

SEQ ID NO: 69931 - DNA, 25 bp, Canis familiaris
ctttgactttcttttgtcttctctt

SEQ ID NO: 69932 - DNA, 25 bp, Canis familiaris
ctttgtatagtcattttctctgctt

SEQ ID NO: 69933 - DNA, 25 bp, Canis familiaris
ctttgtcaagctcatttcctggtat

SEQ ID NO: 69934 - DNA, 25 bp, Canis familiaris
ctttgtcaagctcatttcctggtat

SEQ ID NO: 69935 - DNA, 25 bp, Canis familiaris
ctttgtcaagctcatttcctggtat

SEQ ID NO: 69936 - DNA, 25 bp, Canis familiaris
ctctaataacttgcccactggttta

SEQ ID NO: 69937 - DNA, 25 bp, Canis familiaris
ctgttgaaacttgcccaagtattct

SEQ ID NO: 69938 - DNA, 25 bp, Canis familiaris
ctttgtagaccccaccaatttgtgc

SEQ ID NO: 69939 - DNA, 25 bp, Canis familiaris
ctaggtacctcggcacaacagtttg

SEQ ID NO: 69940 - DNA, 25 bp, Canis familiaris
ctaggtaccctgggcaagtcgctgt

SEQ ID NO: 69941 - DNA, 25 bp, Canis familiaris
ctattgtgacacctttaaatccgtt

SEQ ID NO: 69942 - DNA, 25 bp, Canis familiaris
ctattgtgaagcgtttacctctccc

SEQ ID NO: 69943 - DNA, 25 bp, Canis familiaris
ctatctgtgtaggttaattttcaaa

SEQ ID NO: 69944 - DNA, 25 bp, Canis familiaris
ctttgagtagcgagtcttcttatag

SEQ ID NO: 69945 - DNA, 25 bp, Canis familiaris
ctttgttagcctgtcttctttagag

SEQ ID NO: 69946 - DNA, 25 bp, Canis familiaris
gcttcctaagcctggtttttcagcc

SEQ ID NO: 69947 - DNA, 25 bp, Canis familiaris
cctacatgaaaaagttttaatcaca

SEQ ID NO: 69948 - DNA, 25 bp, Canis familiaris
ctttataaagtacctcttgacacca

SEQ ID NO: 69949 - DNA, 25 bp, Canis familiaris
ctttagacacagaatacgcatataa

SEQ ID NO: 69950 - DNA, 25 bp, Canis familiaris
cgaactgtacagatcaccttagaac

SEQ ID NO: 69951 - DNA, 25 bp, Canis familiaris
ctaacgtgagcacaaccccaaatct

SEQ ID NO: 69952 - DNA, 25 bp, Canis familiaris
ctaactggattacacccctggattg

SEQ ID NO: 69953 - DNA, 25 bp, Canis familiaris
ctgtttaattacaccagcatcgcga

SEQ ID NO: 69954 - DNA, 25 bp, Canis familiaris
cgatgttaaaacaagactacaaaga

SEQ ID NO: 69955 - DNA, 25 bp, Canis familiaris
ctattgtaccaaaggactatcgata

SEQ ID NO: 69956 - DNA, 25 bp, Canis familiaris
ctactgtacaaaagacctacgatac

SEQ ID NO: 69957 - DNA, 25 bp, Canis familiaris
ctatcgatgactatctgaccaacca

SEQ ID NO: 69958 - DNA, 25 bp, Canis familiaris
ctttcatcctgcccgacgagggcaa

SEQ ID NO: 69959 - DNA, 25 bp, Canis familiaris
ctttccaggctacgtcgggatcaag

SEQ ID NO: 69960 - DNA, 25 bp, Canis familiaris
ctttcctggctaccagtgggtctga

SEQ ID NO: 69961 - DNA, 25 bp, Canis familiaris
ctttcagctgtggcaccatcagtgt

SEQ ID NO: 69962 - DNA, 25 bp, Canis familiaris
ctttcctgagaccctcatgtgattc

SEQ ID NO: 69963 - DNA, 25 bp, Canis familiaris
ctttcccgcaggctcgatgtaagaa

SEQ ID NO: 69964 - DNA, 25 bp, Canis familiaris
ctttcttctgaggggtgctgtaaga

SEQ ID NO: 69965 - DNA, 25 bp, Canis familiaris
ctttcttgataggaactcatgctta

SEQ ID NO: 69966 - DNA, 25 bp, Canis familiaris
ctattttgcatacacagttcttttt

SEQ ID NO: 69967 - DNA, 25 bp, Canis familiaris
ctttctatctggcctcaggttttta

SEQ ID NO: 69968 - DNA, 25 bp, Canis familiaris
ctttttctggcattgccttttttga

SEQ ID NO: 69969 - DNA, 25 bp, Canis familiaris
ctttctctcgtatgacctttattgc

SEQ ID NO: 69970 - DNA, 25 bp, Canis familiaris
ctttctgctccttggtacttagatt

SEQ ID NO: 69971 - DNA, 25 bp, Canis familiaris
ctttctccttgtctaattatgtata

SEQ ID NO: 69972 - DNA, 25 bp, Canis familiaris
ctttctctcttgtgtgtttcttaat

SEQ ID NO: 69973 - DNA, 25 bp, Canis familiaris
ctttccatcctttggctttgtcata

SEQ ID NO: 69974 - DNA, 25 bp, Canis familiaris
ctttatctcttagtcagctctttca

SEQ ID NO: 69975 - DNA, 25 bp, Canis familiaris
ctttctcactatccgtgctttacag

SEQ ID NO: 69976 - DNA, 25 bp, Canis familiaris
ctatctgatcatctgccgtgcagtc

SEQ ID NO: 69977 - DNA, 25 bp, Canis familiaris
ctattgcatctgtaactgtcacatc

SEQ ID NO: 69978 - DNA, 25 bp, Canis familiaris
ctatgtctgtgaaactgctctgcaa

SEQ ID NO: 69979 - DNA, 25 bp, Canis familiaris
ctagctctgcttctgtactgcatat

SEQ ID NO: 69980 - DNA, 25 bp, Canis familiaris
ctttacttgcctaacatgcaattac

SEQ ID NO: 69981 - DNA, 25 bp, Canis familiaris
ctttgtttccattatctgagactcc

SEQ ID NO: 69982 - DNA, 25 bp, Canis familiaris
ctttgtctgttgattctaacttgta

SEQ ID NO: 69983 - DNA, 25 bp, Canis familiaris
ctatggttgctgtttttaagtgtgt

SEQ ID NO: 69984 - DNA, 25 bp, Canis familiaris
ctattgtgtggtggtttttgtttgt

SEQ ID NO: 69985 - DNA, 25 bp, Canis familiaris
ctatctgggttcttgtggggtttgt

SEQ ID NO: 69986 - DNA, 25 bp, Canis familiaris
ctttgccctcagtggggtgtctgtt

SEQ ID NO: 69987 - DNA, 25 bp, Canis familiaris
ctttcctccagaagggcctgtggga

SEQ ID NO: 69988 - DNA, 25 bp, Canis familiaris
ctttcttcacgaagcggggcaggca

SEQ ID NO: 69989 - DNA, 25 bp, Canis familiaris
ctatctcagtcaggcaatgcgtggc

SEQ ID NO: 69990 - DNA, 25 bp, Canis familiaris
ctatctgcattatctatgcagcatg

SEQ ID NO: 69991 - DNA, 25 bp, Canis familiaris
ctctcggaatgacgcaagcatggaa

SEQ ID NO: 69992 - DNA, 25 bp, Canis familiaris
ctcacggcaaattcaacggcacagt

SEQ ID NO: 69993 - DNA, 25 bp, Canis familiaris
ctcaaggaatcaccgtctccaagtt

SEQ ID NO: 69994 - DNA, 25 bp, Canis familiaris
ctacggaactcttggcttaggcttc

SEQ ID NO: 69995 - DNA, 25 bp, Canis familiaris
ctagccggactacgggttgcgtcta

SEQ ID NO: 69996 - DNA, 25 bp, Canis familiaris
ctatccagggtatgttttcctcatg

SEQ ID NO: 69997 - DNA, 25 bp, Canis familiaris
ctatacctggtatttttgccttatt

SEQ ID NO: 69998 - DNA, 25 bp, Canis familiaris
ctatcacctggtgagttgagcccac

SEQ ID NO: 69999 - DNA, 25 bp, Canis familiaris
ctatcaactttcgatggtagtcgcc

SEQ ID NO: 70000 - DNA, 25 bp, Canis familiaris
ctataccatgctactcatggattgt

SEQ ID NO: 70001 - DNA, 25 bp, Canis familiaris
ctatacaagaccatggattgtgagt

SEQ ID NO: 70002 - DNA, 25 bp, Canis familiaris
gctaccgttcgcacgatctgtagtc

SEQ ID NO: 70003 - DNA, 25 bp, Canis familiaris
ctatcccaatcggacctcgatttct

SEQ ID NO: 70004 - DNA, 25 bp, Canis familiaris
ctatcccataacaaactccaattcc

SEQ ID NO: 70005 - DNA, 25 bp, Canis familiaris
ctatccctaaaaactccaagatcct

SEQ ID NO: 70006 - DNA, 25 bp, Canis familiaris
ctacgacggaatacaaccaagggct

SEQ ID NO: 70007 - DNA, 25 bp, Canis familiaris
ctataaccctataaacctctgtgcc

SEQ ID NO: 70008 - DNA, 25 bp, Canis familiaris
ctcatgaaactggaataagcgcttt

SEQ ID NO: 70009 - DNA, 25 bp, Canis familiaris
ctcagaaacagaccatttccttgga

SEQ ID NO: 70010 - DNA, 25 bp, Canis familiaris
ctttaagcaggcgtttatttctgca

SEQ ID NO: 70011 - DNA, 25 bp, Canis familiaris
ctttacactagctttctgcatttaa

SEQ ID NO: 70012 - DNA, 25 bp, Canis familiaris
ctatctagacagtactttctttagt

SEQ ID NO: 70013 - DNA, 25 bp, Canis familiaris
ctatcctataaagctgttttcctga

SEQ ID NO: 70014 - DNA, 25 bp, Canis familiaris
ctatggtcaaaagtctgttttctgg

SEQ ID NO: 70015 - DNA, 25 bp, Canis familiaris
ctagcccccatgatatgattttcca

SEQ ID NO: 70016 - DNA, 25 bp, Canis familiaris
ctagccccgggaagctgtgattagc

SEQ ID NO: 70017 - DNA, 25 bp, Canis familiaris
gctagacccgggaacagtagtcctt

SEQ ID NO: 70018 - DNA, 25 bp, Canis familiaris
ctaccccagttcaaactattcctgt

SEQ ID NO: 70019 - DNA, 25 bp, Canis familiaris
ctatccccaattttagcattttcta

SEQ ID NO: 70020 - DNA, 25 bp, Canis familiaris
ctttaccacattttgaattcttcag

SEQ ID NO: 70021 - DNA, 25 bp, Canis familiaris
ctttcaccacggtcgagacctacac

SEQ ID NO: 70022 - DNA, 25 bp, Canis familiaris
ctcttacccgttcatacctatgatc

SEQ ID NO: 70023 - DNA, 25 bp, Canis familiaris
cctttctccgttgaactgctttagt

SEQ ID NO: 70024 - DNA, 25 bp, Canis familiaris
ctttctctgggtatgaaccattcta

SEQ ID NO: 70025 - DNA, 25 bp, Canis familiaris
ctagtctctcggatttagacgttag

SEQ ID NO: 70026 - DNA, 25 bp, Canis familiaris
ctagtctcttgatctttagtcttcc

SEQ ID NO: 70027 - DNA, 25 bp, Canis familiaris
ctagattttaacattttcagatatt

SEQ ID NO: 70028 - DNA, 25 bp, Canis familiaris
ctgattttaaacaaactgtaccact

SEQ ID NO: 70029 - DNA, 25 bp, Canis familiaris
ctttgctttaaatcctgttgcctcc

SEQ ID NO: 70030 - DNA, 25 bp, Canis familiaris
ctatatcacttagacacactgtgtg

SEQ ID NO: 70031 - DNA, 25 bp, Canis familiaris
ctttcgtgctctgagtactggagag

SEQ ID NO: 70032 - DNA, 25 bp, Canis familiaris
ctttcaggcactgggtctgtgggga

SEQ ID NO: 70033 - DNA, 25 bp, Canis familiaris
ctttcggacatcccaggtgaggcca

SEQ ID NO: 70034 - DNA, 25 bp, Canis familiaris
ctttcgggctctgagtgactggaga

SEQ ID NO: 70035 - DNA, 25 bp, Canis familiaris
ctttcaggtgggacagtgttgaaga

SEQ ID NO: 70036 - DNA, 25 bp, Canis familiaris
ctttcataatccgacgatgtagaag

SEQ ID NO: 70037 - DNA, 25 bp, Canis familiaris
ctttcatgctggcccatcgttagaa

SEQ ID NO: 70038 - DNA, 25 bp, Canis familiaris
ctattcacaggcccctggcttataa

SEQ ID NO: 70039 - DNA, 25 bp, Canis familiaris
ctaataaagctgatagaggtcaaaa

SEQ ID NO: 70040 - DNA, 25 bp, Canis familiaris
ctaaaaagctgctctagccgccaag

SEQ ID NO: 70041 - DNA, 25 bp, Canis familiaris
ctatcgaaccgctttgagccaggaa

SEQ ID NO: 70042 - DNA, 25 bp, Canis familiaris
ctataggagcccttggagcccagaa

SEQ ID NO: 70043 - DNA, 25 bp, Canis familiaris
ctcaagtagccggtcggccaataaa

SEQ ID NO: 70044 - DNA, 25 bp, Canis familiaris
ctaagtctgagtcccagtccaaaaa

SEQ ID NO: 70045 - DNA, 25 bp, Canis familiaris
ctatggtctagacccgtgctcagtg

SEQ ID NO: 70046 - DNA, 25 bp, Canis familiaris
ctatatcttcaggcgcgcggtctgg

SEQ ID NO: 70047 - DNA, 25 bp, Canis familiaris
ctttcagccaggccggatcctggag

SEQ ID NO: 70048 - DNA, 25 bp, Canis familiaris
ctttctgccagccctagggatgggg

SEQ ID NO: 70049 - DNA, 25 bp, Canis familiaris
ctttctgccaggccttgtgtcaagt

SEQ ID NO: 70050 - DNA, 25 bp, Canis familiaris
ctttccatctggctgctgatgctaa

SEQ ID NO: 70051 - DNA, 25 bp, Canis familiaris
ctttccatctgatatgcatttagtc

SEQ ID NO: 70052 - DNA, 25 bp, Canis familiaris
ctttgccactgatggcttgctggcc

SEQ ID NO: 70053 - DNA, 25 bp, Canis familiaris
ctttccccagcatgcttgtgatggc

SEQ ID NO: 70054 - DNA, 25 bp, Canis familiaris
ctttcaccctcattggtgtgtgtcc

SEQ ID NO: 70055 - DNA, 25 bp, Canis familiaris
ctttcaccttcatttgctggcgtga

SEQ ID NO: 70056 - DNA, 25 bp, Canis familiaris
ctatccatggctatttgggcattgt

SEQ ID NO: 70057 - DNA, 25 bp, Canis familiaris
ctattctggtagtctgtgggctctg

SEQ ID NO: 70058 - DNA, 25 bp, Canis familiaris
ctttctgagcctccgaggtctgtga

SEQ ID NO: 70059 - DNA, 25 bp, Canis familiaris
ctagtcagttctccgctgagttgga

SEQ ID NO: 70060 - DNA, 25 bp, Canis familiaris
ctagtcgtgcctcatctattattgc

SEQ ID NO: 70061 - DNA, 25 bp, Canis familiaris
ctcactcgggtcatccatatttctg

SEQ ID NO: 70062 - DNA, 25 bp, Canis familiaris
ctatcttggtgtctctttgtacgga

SEQ ID NO: 70063 - DNA, 25 bp, Canis familiaris
ctatttaggtgcccttaggacagtt

SEQ ID NO: 70064 - DNA, 25 bp, Canis familiaris
ctatcgtgggccccgtaggagagat

SEQ ID NO: 70065 - DNA, 25 bp, Canis familiaris
ctactggagggctcctacctaactg

SEQ ID NO: 70066 - DNA, 25 bp, Canis familiaris
ctgccaggagggtccgggaccgacg

SEQ ID NO: 70067 - DNA, 25 bp, Canis familiaris
ctcacgtcgaagtgggagacccctt

SEQ ID NO: 70068 - DNA, 25 bp, Canis familiaris
ctatcctcagtctggccagagatcc

SEQ ID NO: 70069 - DNA, 25 bp, Canis familiaris
ctatctcacaggctgctgcagctgg

SEQ ID NO: 70070 - DNA, 25 bp, Canis familiaris
ctttgccagctggactgcaggcgac

SEQ ID NO: 70071 - DNA, 25 bp, Canis familiaris
ctttgcctctgtttctgaggatatg

SEQ ID NO: 70072 - DNA, 25 bp, Canis familiaris
ctttctgcccatttctacagaaacc

SEQ ID NO: 70073 - DNA, 25 bp, Canis familiaris
ctttctcaccattttggctggaagg

SEQ ID NO: 70074 - DNA, 25 bp, Canis familiaris
ctttccccaggattggcacagcaag

SEQ ID NO: 70075 - DNA, 25 bp, Canis familiaris
ctttctctccacgtgtggcaacttg

SEQ ID NO: 70076 - DNA, 25 bp, Canis familiaris
ctttctctccaccttgtgagggtat

SEQ ID NO: 70077 - DNA, 25 bp, Canis familiaris
ctttctgctttcccttggaagtggt

SEQ ID NO: 70078 - DNA, 25 bp, Canis familiaris
ctttctgctgcataggctctggaag

SEQ ID NO: 70079 - DNA, 25 bp, Canis familiaris
ctttcatgccacgtagctctggaaa

SEQ ID NO: 70080 - DNA, 25 bp, Canis familiaris
ctttctgccacttagcacttgtata

SEQ ID NO: 70081 - DNA, 25 bp, Canis familiaris
ctttctgacactttcacttttgcag

SEQ ID NO: 70082 - DNA, 25 bp, Canis familiaris
ctttctccctcagtcattgtttaga

SEQ ID NO: 70083 - DNA, 25 bp, Canis familiaris
ctttcatccctagcttattttgtgg

SEQ ID NO: 70084 - DNA, 25 bp, Canis familiaris
ctaggctccggaggatctattactt

SEQ ID NO: 70085 - DNA, 25 bp, Canis familiaris
ctcaggcctcaatgactctacatac

SEQ ID NO: 70086 - DNA, 25 bp, Canis familiaris
ctatgggcagcagtggacctacgaa

SEQ ID NO: 70087 - DNA, 25 bp, Canis familiaris
ctaggtgacaaacacagcacagaag

SEQ ID NO: 70088 - DNA, 25 bp, Canis familiaris
ctaggttaaggttctcagtgacatg

SEQ ID NO: 70089 - DNA, 25 bp, Canis familiaris
ctaggtctaaggttgcgcagtatgt

SEQ ID NO: 70090 - DNA, 25 bp, Canis familiaris
ctaggtaaccgatgccttaatgaag

SEQ ID NO: 70091 - DNA, 25 bp, Canis familiaris
ctagaggatccccggactataaaag

SEQ ID NO: 70092 - DNA, 25 bp, Canis familiaris
ctaaggaccacagaactataccttt

SEQ ID NO: 70093 - DNA, 25 bp, Canis familiaris
ctaaggtcttcacactctgattcct

SEQ ID NO: 70094 - DNA, 25 bp, Canis familiaris
ctaactgacaaactactgtaacact

SEQ ID NO: 70095 - DNA, 25 bp, Canis familiaris
ctatcactgtaaccaactaatgcca

SEQ ID NO: 70096 - DNA, 25 bp, Canis familiaris
ctatatcaggacagcaactgggcca

SEQ ID NO: 70097 - DNA, 25 bp, Canis familiaris
ctttgggaagccccatgggcacatg

SEQ ID NO: 70098 - DNA, 25 bp, Canis familiaris
ctttggccagatcttcaggcccgac

SEQ ID NO: 70099 - DNA, 25 bp, Canis familiaris
ctttggacatgctcatctaggaact

SEQ ID NO: 70100 - DNA, 25 bp, Canis familiaris
ctttgatgacatcccattcgcagac

SEQ ID NO: 70101 - DNA, 25 bp, Canis familiaris
ctatcagtggatttttcagcagaac

SEQ ID NO: 70102 - DNA, 25 bp, Canis familiaris
ctatctgctgtgctgctttcaggat

SEQ ID NO: 70103 - DNA, 25 bp, Canis familiaris
ctttgctgcggttttgatggctggc

SEQ ID NO: 70104 - DNA, 25 bp, Canis familiaris
ctttgtgctttcttgtgtgacttga

SEQ ID NO: 70105 - DNA, 25 bp, Canis familiaris
ctatttgtgttgttctgttcttgag

SEQ ID NO: 70106 - DNA, 25 bp, Canis familiaris
ctattctgtcttcatcttttgggct

SEQ ID NO: 70107 - DNA, 25 bp, Canis familiaris
ctattctgccttgagcttctcaggt

SEQ ID NO: 70108 - DNA, 25 bp, Canis familiaris
ctttcccatctcgtgtgtcatgagt

SEQ ID NO: 70109 - DNA, 25 bp, Canis familiaris
ctttctcctccttttgatgactgga

SEQ ID NO: 70110 - DNA, 25 bp, Canis familiaris
ctttcccaccctctgtgacagagag

SEQ ID NO: 70111 - DNA, 25 bp, Canis familiaris
ctttccgcgccactggtgaataggg

SEQ ID NO: 70112 - DNA, 25 bp, Canis familiaris
ctacgctctgcccgtgggaaagcag

SEQ ID NO: 70113 - DNA, 25 bp, Canis familiaris
ctaccactcccgtgataacacttat

SEQ ID NO: 70114 - DNA, 25 bp, Canis familiaris
ctaccccgcacagaattacttttat

SEQ ID NO: 70115 - DNA, 25 bp, Canis familiaris
ctacccaccccataggtttatcatg

SEQ ID NO: 70116 - DNA, 25 bp, Canis familiaris
ctacctgatgcccaccaaggatgtg

SEQ ID NO: 70117 - DNA, 25 bp, Canis familiaris
ctttgccatcaccaccaagaatatt

SEQ ID NO: 70118 - DNA, 25 bp, Canis familiaris
ctttgagtgatcctccaacttcatt

SEQ ID NO: 70119 - DNA, 25 bp, Canis familiaris
ctattgcagattttctcccttttga

SEQ ID NO: 70120 - DNA, 25 bp, Canis familiaris
ctttgaagatgctctgctggccata

SEQ ID NO: 70121 - DNA, 25 bp, Canis familiaris
ctttgaatgaagattgtccatattg

SEQ ID NO: 70122 - DNA, 25 bp, Canis familiaris
ctttgtggttgcaggtctcatattt

SEQ ID NO: 70123 - DNA, 25 bp, Canis familiaris
ctttcggcttctttgtctataatat

SEQ ID NO: 70124 - DNA, 25 bp, Canis familiaris
ctttcctgttcattatgctttaatt

SEQ ID NO: 70125 - DNA, 25 bp, Canis familiaris
ctttctctttcattcattcttacag

SEQ ID NO: 70126 - DNA, 25 bp, Canis familiaris
ctttctccttcattatctatatctc

SEQ ID NO: 70127 - DNA, 25 bp, Canis familiaris
ctttctcctaaaacttatctagtga

SEQ ID NO: 70128 - DNA, 25 bp, Canis familiaris
ctttctcttctgtatcctgtattag

SEQ ID NO: 70129 - DNA, 25 bp, Canis familiaris
ctttctcgtataatccttttcttca

SEQ ID NO: 70130 - DNA, 25 bp, Canis familiaris
ctttgtcattatgtctctgttcctc

SEQ ID NO: 70131 - DNA, 25 bp, Canis familiaris
ctatcttttgatgtgctgtttccca

SEQ ID NO: 70132 - DNA, 25 bp, Canis familiaris
ctatcacttttgagagtcacgacca

SEQ ID NO: 70133 - DNA, 25 bp, Canis familiaris
ctatcacaagtcctaaacacagacc

SEQ ID NO: 70134 - DNA, 25 bp, Canis familiaris
ctataccagctcctgagagccacca

SEQ ID NO: 70135 - DNA, 25 bp, Canis familiaris
ctatatcctgcattgctgatgccca

SEQ ID NO: 70136 - DNA, 25 bp, Canis familiaris
ctttcccagatgaatcccaggtgat

SEQ ID NO: 70137 - DNA, 25 bp, Canis familiaris
ctattcccatggaccctgaacatgt

SEQ ID NO: 70138 - DNA, 25 bp, Canis familiaris
ctttgccttgatcccctaagagggc

SEQ ID NO: 70139 - DNA, 25 bp, Canis familiaris
ctttgccttgaggtgtctcttgggg

SEQ ID NO: 70140 - DNA, 25 bp, Canis familiaris
ctttcctatagctgtcctttgtgaa

SEQ ID NO: 70141 - DNA, 25 bp, Canis familiaris
ctttcctactgctgtcagcgctgag

SEQ ID NO: 70142 - DNA, 25 bp, Canis familiaris
ctattcccagtgtgcacagccaaga

SEQ ID NO: 70143 - DNA, 25 bp, Canis familiaris
ctatacgccgtgtcaccgtgaaatg

SEQ ID NO: 70144 - DNA, 25 bp, Canis familiaris
ctatctcgagcattgtcccggaaag

SEQ ID NO: 70145 - DNA, 25 bp, Canis familiaris
ctagctcgatatttccatctggacc

SEQ ID NO: 70146 - DNA, 25 bp, Canis familiaris
ctaggcagactcctagcactgggag

SEQ ID NO: 70147 - DNA, 25 bp, Canis familiaris
ctatgagagggcccggctggagact

SEQ ID NO: 70148 - DNA, 25 bp, Canis familiaris
ctatggggacagtgggagcaactga

SEQ ID NO: 70149 - DNA, 25 bp, Canis familiaris
ctaggcctgacgtgtggaaccttac

SEQ ID NO: 70150 - DNA, 25 bp, Canis familiaris
ctaggcctgggccattggggccatg

SEQ ID NO: 70151 - DNA, 25 bp, Canis familiaris
ctagacgggagggatggggctgcag

SEQ ID NO: 70152 - DNA, 25 bp, Canis familiaris
ctaacggggttacgttgctgccgag

SEQ ID NO: 70153 - DNA, 25 bp, Canis familiaris
ctacctggggtctagctgtttttga

SEQ ID NO: 70154 - DNA, 25 bp, Canis familiaris
ctaccaggggtaccatgacattgtg

SEQ ID NO: 70155 - DNA, 25 bp, Canis familiaris
ctattcagacgtgcaacaacttgga

SEQ ID NO: 70156 - DNA, 25 bp, Canis familiaris
ctattaccagtagccaatcgatcgc

SEQ ID NO: 70157 - DNA, 25 bp, Canis familiaris
ctttgcacctgagggccagacgatc

SEQ ID NO: 70158 - DNA, 25 bp, Canis familiaris
ctttgagccacagcatctctaagac

SEQ ID NO: 70159 - DNA, 25 bp, Canis familiaris
ctttgtgcacctgctgttggatgaa

SEQ ID NO: 70160 - DNA, 25 bp, Canis familiaris
ctttgagatcctgacctgagctgaa

SEQ ID NO: 70161 - DNA, 25 bp, Canis familiaris
ctattagctccttactctgggtgtg

SEQ ID NO: 70162 - DNA, 25 bp, Canis familiaris
ctagtactcacacccagctgggtaa

SEQ ID NO: 70163 - DNA, 25 bp, Canis familiaris
ctaattataccccctgggtcattct

SEQ ID NO: 70164 - DNA, 25 bp, Canis familiaris
ctaaatgacccccggggctgcatca

SEQ ID NO: 70165 - DNA, 25 bp, Canis familiaris
ctgaatcggtcaactcggggttacg

SEQ ID NO: 70166 - DNA, 25 bp, Canis familiaris
ctgaacgtctttgtgcctcagttac

SEQ ID NO: 70167 - DNA, 25 bp, Canis familiaris
ctatactttttcttccaatgtctgc

SEQ ID NO: 70168 - DNA, 25 bp, Canis familiaris
ctaatttctctccattccaaggagc

SEQ ID NO: 70169 - DNA, 25 bp, Canis familiaris
ctaaccttgtccaacccagtacaag

SEQ ID NO: 70170 - DNA, 25 bp, Canis familiaris
ctaaacttgggccctgccaattaat

SEQ ID NO: 70171 - DNA, 25 bp, Canis familiaris
ctaaccgggtgccaatgaccaccaa

SEQ ID NO: 70172 - DNA, 25 bp, Canis familiaris
gctaaacgggggatgacttcactgc

SEQ ID NO: 70173 - DNA, 25 bp, Canis familiaris
ctctacctggagaagtttattcacc

SEQ ID NO: 70174 - DNA, 25 bp, Canis familiaris
ctattgcggggtgggctctatccac

SEQ ID NO: 70175 - DNA, 25 bp, Canis familiaris
ctttgaggaagcaaggtccccagcc

SEQ ID NO: 70176 - DNA, 25 bp, Canis familiaris
ctttgggtgacttaagactccgccg

SEQ ID NO: 70177 - DNA, 25 bp, Canis familiaris
ctatcggcggccagaaagtcaccat

SEQ ID NO: 70178 - DNA, 25 bp, Canis familiaris
ctactctggtgccccaaagtcattt

SEQ ID NO: 70179 - DNA, 25 bp, Canis familiaris
ctacctgtgtagactggaaatcctt

SEQ ID NO: 70180 - DNA, 25 bp, Canis familiaris
ctacccctgaacttatatatactcc

SEQ ID NO: 70181 - DNA, 25 bp, Canis familiaris
ctggtccctgaattattttgtccct

SEQ ID NO: 70182 - DNA, 25 bp, Canis familiaris
ctagtagtctaatctcttttccacg

SEQ ID NO: 70183 - DNA, 25 bp, Canis familiaris
ctatgacaactatttttgtttcgac

SEQ ID NO: 70184 - DNA, 25 bp, Canis familiaris
ctagaggatctgttttgtgtcttaa

SEQ ID NO: 70185 - DNA, 25 bp, Canis familiaris
ctataaactctatctagtgcttaga

SEQ ID NO: 70186 - DNA, 25 bp, Canis familiaris
ctataaccagtacgtacgcttcgac

SEQ ID NO: 70187 - DNA, 25 bp, Canis familiaris
cgtgaaccgggagcacgtctggacc

SEQ ID NO: 70188 - DNA, 25 bp, Canis familiaris
ctgtatacccaggcccaggttaggc

SEQ ID NO: 70189 - DNA, 25 bp, Canis familiaris
ctatatgaccgaggctacacgtccc

SEQ ID NO: 70190 - DNA, 25 bp, Canis familiaris
ctaatgaccgggtgaggagccccct

SEQ ID NO: 70191 - DNA, 25 bp, Canis familiaris
ctataaccgggaggagttcgcgcgc

SEQ ID NO: 70192 - DNA, 25 bp, Canis familiaris
ctaaatccgcagcaaactgccgtgc

SEQ ID NO: 70193 - DNA, 25 bp, Canis familiaris
ctagttctcatcctaaattgcctcc

SEQ ID NO: 70194 - DNA, 25 bp, Canis familiaris
ctagtcctttcagagattccctaac

SEQ ID NO: 70195 - DNA, 25 bp, Canis familiaris
ctcattccttttgacaagccgtaaa

SEQ ID NO: 70196 - DNA, 25 bp, Canis familiaris
ctatttctttgtatgaaccaataaa

SEQ ID NO: 70197 - DNA, 25 bp, Canis familiaris
ctatcttctttatttgaatacgagt

SEQ ID NO: 70198 - DNA, 25 bp, Canis familiaris
ctatttcctctacctgatactaagt

SEQ ID NO: 70199 - DNA, 25 bp, Canis familiaris
ctatttctccccttgatacttatat

SEQ ID NO: 70200 - DNA, 25 bp, Canis familiaris
ctttcctcatctgtctgaacatttt

SEQ ID NO: 70201 - DNA, 25 bp, Canis familiaris
ctttccacattcatcatttatattt

SEQ ID NO: 70202 - DNA, 25 bp, Canis familiaris
ctatgtccaactatctgcctatatt

SEQ ID NO: 70203 - DNA, 25 bp, Canis familiaris
ctagtccaatatagtccaatgcata

SEQ ID NO: 70204 - DNA, 25 bp, Canis familiaris
ctagtgctacttgcctagtgctact

SEQ ID NO: 70205 - DNA, 25 bp, Canis familiaris
ctatgtgtgtttcatgctatggcta

SEQ ID NO: 70206 - DNA, 25 bp, Canis familiaris
ctatgcgatgtttcccttttattta

SEQ ID NO: 70207 - DNA, 25 bp, Canis familiaris
ctatagatagcattccctttttttt

SEQ ID NO: 70208 - DNA, 25 bp, Canis familiaris
ctaccaacacaccccattagtttag

SEQ ID NO: 70209 - DNA, 25 bp, Canis familiaris
ctaccaccaagctcacaaagtttct

SEQ ID NO: 70210 - DNA, 25 bp, Canis familiaris
ctaccaaaagcagccaaccatcttt

SEQ ID NO: 70211 - DNA, 25 bp, Canis familiaris
ctaacattaagatcggtgcccttta

SEQ ID NO: 70212 - DNA, 25 bp, Canis familiaris
ctaaatctaaatctgtgaccctttt

SEQ ID NO: 70213 - DNA, 25 bp, Canis familiaris
ctaggattggaacctttctgccctt

SEQ ID NO: 70214 - DNA, 25 bp, Canis familiaris
ctagccatggaaatgagttcatctc

SEQ ID NO: 70215 - DNA, 25 bp, Canis familiaris
ctacgatggtgtcgaatcttccttc

SEQ ID NO: 70216 - DNA, 25 bp, Canis familiaris
ctatgtatgagtctcttcttccctt

SEQ ID NO: 70217 - DNA, 25 bp, Canis familiaris
ctatgttcagccgggacgtctattt

SEQ ID NO: 70218 - DNA, 25 bp, Canis familiaris
ctagactagcccagacgcatcaatt

SEQ ID NO: 70219 - DNA, 25 bp, Canis familiaris
cgggaagcccatcaccatcttccag

SEQ ID NO: 70220 - DNA, 25 bp, Canis familiaris
ctctggaaggcgacgacctcatcct

SEQ ID NO: 70221 - DNA, 25 bp, Canis familiaris
ctttgagagacggagacccctgctc

SEQ ID NO: 70222 - DNA, 25 bp, Canis familiaris
ctatcatgggtccacaatcacccct

SEQ ID NO: 70223 - DNA, 25 bp, Canis familiaris
ctagagtcagtcctatcaacctgcc

SEQ ID NO: 70224 - DNA, 25 bp, Canis familiaris
ctagcagtcaacaatgaacaccagt

SEQ ID NO: 70225 - DNA, 25 bp, Canis familiaris
ctagagctaccttatgacccagcac

SEQ ID NO: 70226 - DNA, 25 bp, Canis familiaris
ctatgagtatctaaagccccagcct

SEQ ID NO: 70227 - DNA, 25 bp, Canis familiaris
ctatttattatgtagcaccgtggct

SEQ ID NO: 70228 - DNA, 25 bp, Canis familiaris
ctattattattctctgccagctgtg

SEQ ID NO: 70229 - DNA, 25 bp, Canis familiaris
ctttgattttattcgcaccattgcg

SEQ ID NO: 70230 - DNA, 25 bp, Canis familiaris
ctttgtcttttgtcatgaccaagca

SEQ ID NO: 70231 - DNA, 25 bp, Canis familiaris
ctttgttgtgtctctgactcagagc

SEQ ID NO: 70232 - DNA, 25 bp, Canis familiaris
ctatgtgccttttactatcctgagc

SEQ ID NO: 70233 - DNA, 25 bp, Canis familiaris
ctagacactctgacaagctgaccaa

SEQ ID NO: 70234 - DNA, 25 bp, Canis familiaris
ctatcaactgataccactatacata

SEQ ID NO: 70235 - DNA, 25 bp, Canis familiaris
ctatcaccatcatctatctatcatc

SEQ ID NO: 70236 - DNA, 25 bp, Canis familiaris
ctatcccattggctgctattctgaa

SEQ ID NO: 70237 - DNA, 25 bp, Canis familiaris
ctatgctccattctctaactcaaga

SEQ ID NO: 70238 - DNA, 25 bp, Canis familiaris
ctatgcttcagtcctaaccgatact

SEQ ID NO: 70239 - DNA, 25 bp, Canis familiaris
ctcgttcgggcattacttcaactac

SEQ ID NO: 70240 - DNA, 25 bp, Canis familiaris
ctcgttcacgtcaggaaccacgaca

SEQ ID NO: 70241 - DNA, 25 bp, Canis familiaris
ctagtgcccgttctggaaacagtca

SEQ ID NO: 70242 - DNA, 25 bp, Canis familiaris
ctacccacggccatgtgaaaaagca

SEQ ID NO: 70243 - DNA, 25 bp, Canis familiaris
ctactaccccccagaagataagaag

SEQ ID NO: 70244 - DNA, 25 bp, Canis familiaris
ctctttgccctctctggaggtacag

SEQ ID NO: 70245 - DNA, 25 bp, Canis familiaris
ctttgtccactcatgctgcaagatg

SEQ ID NO: 70246 - DNA, 25 bp, Canis familiaris
ctttgcccaatccttgcagagaaaa

SEQ ID NO: 70247 - DNA, 25 bp, Canis familiaris
ctatccccattccttaggactaggg

SEQ ID NO: 70248 - DNA, 25 bp, Canis familiaris
ctaccccatcttctaggccaagaag

SEQ ID NO: 70249 - DNA, 25 bp, Canis familiaris
ctaccccagctttgaaaccaggtca

SEQ ID NO: 70250 - DNA, 25 bp, Canis familiaris
ctacctccaagatgaaacctgaaat

SEQ ID NO: 70251 - DNA, 25 bp, Canis familiaris
ctatcttccaattaaatatgctcta

SEQ ID NO: 70252 - DNA, 25 bp, Canis familiaris
ctatccccagatacaggtgcagtgc

SEQ ID NO: 70253 - DNA, 25 bp, Canis familiaris
ctattcccagtcagaggcgctatgt

SEQ ID NO: 70254 - DNA, 25 bp, Canis familiaris
ctaggtccttgcaatgggtctgaga

SEQ ID NO: 70255 - DNA, 25 bp, Canis familiaris
ctaggctcctcttctagagactaat

SEQ ID NO: 70256 - DNA, 25 bp, Canis familiaris
ctaggcccctaaaagaagaagctct

SEQ ID NO: 70257 - DNA, 25 bp, Canis familiaris
ctttgcttcgctgaatatatacagg

SEQ ID NO: 70258 - DNA, 25 bp, Canis familiaris
ctattctttcaccaatatcacactg

SEQ ID NO: 70259 - DNA, 25 bp, Canis familiaris
ctagttcttctccagaaacactgag

SEQ ID NO: 70260 - DNA, 25 bp, Canis familiaris
ctatggtcttgccaaaatgaaagaa

SEQ ID NO: 70261 - DNA, 25 bp, Canis familiaris
ctatgaccttcctaccatcagggaa

SEQ ID NO: 70262 - DNA, 25 bp, Canis familiaris
ctatgcagaatttactcccgggcca

SEQ ID NO: 70263 - DNA, 25 bp, Canis familiaris
ctatcaagatggtgtccggggctgg

SEQ ID NO: 70264 - DNA, 25 bp, Canis familiaris
ctaccactggtgaccaccgggtgac

SEQ ID NO: 70265 - DNA, 25 bp, Canis familiaris
ctaaaccatgtcacccaaggtgact

SEQ ID NO: 70266 - DNA, 25 bp, Canis familiaris
ctaacaccttaaccccagatgatgg

SEQ ID NO: 70267 - DNA, 25 bp, Canis familiaris
ctaacagccgggaccctgcgtatag

SEQ ID NO: 70268 - DNA, 25 bp, Canis familiaris
ctcaatccggggaccgtgggatcac

SEQ ID NO: 70269 - DNA, 25 bp, Canis familiaris
ctcagctccggacatccgggactta

SEQ ID NO: 70270 - DNA, 25 bp, Canis familiaris
ctagtgcacgagactcttcggctga

SEQ ID NO: 70271 - DNA, 25 bp, Canis familiaris
ctaggcattgagattcctgcagaga

SEQ ID NO: 70272 - DNA, 25 bp, Canis familiaris
ctagccttgtgttcgcactggtaag

SEQ ID NO: 70273 - DNA, 25 bp, Canis familiaris
ctatcacttcctaccagtggaaata

SEQ ID NO: 70274 - DNA, 25 bp, Canis familiaris
ctatcactacctctcttggaaatcg

SEQ ID NO: 70275 - DNA, 25 bp, Canis familiaris
ctaccatagcctttttgtattagtg

SEQ ID NO: 70276 - DNA, 25 bp, Canis familiaris
ctattcattgttaatttgttctcat

SEQ ID NO: 70277 - DNA, 25 bp, Canis familiaris
ctatttatgttatgtgtcttcctgt

SEQ ID NO: 70278 - DNA, 25 bp, Canis familiaris
ctatttgtgacttctgtctttctct

SEQ ID NO: 70279 - DNA, 25 bp, Canis familiaris
ctatgtagaacatcttcttggtctc

SEQ ID NO: 70280 - DNA, 25 bp, Canis familiaris
ctatgtagacactctttgttacaaa

SEQ ID NO: 70281 - DNA, 25 bp, Canis familiaris
ctatgtaatatgtccttctttaccc

SEQ ID NO: 70282 - DNA, 25 bp, Canis familiaris
ctatttaattcctgtttatcctcca

SEQ ID NO: 70283 - DNA, 25 bp, Canis familiaris
ctatagaaaccctgcttattaacca

SEQ ID NO: 70284 - DNA, 25 bp, Canis familiaris
ctatataaacccaagcatccttagc

SEQ ID NO: 70285 - DNA, 25 bp, Canis familiaris
ctttgtataacctactgacctcaga

SEQ ID NO: 70286 - DNA, 25 bp, Canis familiaris
ctattttaagccaagcagtcccgaa

SEQ ID NO: 70287 - DNA, 25 bp, Canis familiaris
ctagtttgagagcaatgccatcacc

SEQ ID NO: 70288 - DNA, 25 bp, Canis familiaris
ctagatcgtcgatcatactcacctc

SEQ ID NO: 70289 - DNA, 25 bp, Canis familiaris
ctacgttgctgatatactggctcat

SEQ ID NO: 70290 - DNA, 25 bp, Canis familiaris
ctatatgttgatcttgccttctttg

SEQ ID NO: 70291 - DNA, 25 bp, Canis familiaris
ctatctcctgacttgtgggttttgc

SEQ ID NO: 70292 - DNA, 25 bp, Canis familiaris
ctattcctactgtaaggctgttgcc

SEQ ID NO: 70293 - DNA, 25 bp, Canis familiaris
ctatctcccctactagactgtaagc

SEQ ID NO: 70294 - DNA, 25 bp, Canis familiaris
ctatctcccgcttgtcaaagtatca

SEQ ID NO: 70295 - DNA, 25 bp, Canis familiaris
ctttgagccctactattgagttcca

SEQ ID NO: 70296 - DNA, 25 bp, Canis familiaris
ctattagccatcaggagggtctcca

SEQ ID NO: 70297 - DNA, 25 bp, Canis familiaris
ctatttgctgccagggaggctgccc

SEQ ID NO: 70298 - DNA, 25 bp, Canis familiaris
ctttgagctcaatgggcagctgcgg

SEQ ID NO: 70299 - DNA, 25 bp, Canis familiaris
ctattggatcctgggagcgggcggg

SEQ ID NO: 70300 - DNA, 25 bp, Canis familiaris
ctatctggcagggggacgctgggag

SEQ ID NO: 70301 - DNA, 25 bp, Canis familiaris
ctacgggacctgaagctgcggaagt

SEQ ID NO: 70302 - DNA, 25 bp, Canis familiaris
ctatctgcggggccattcgcaggat

SEQ ID NO: 70303 - DNA, 25 bp, Canis familiaris
ctatctcggtggtgtgtcaggactt

SEQ ID NO: 70304 - DNA, 25 bp, Canis familiaris
ctttgagtctggtgtcacatgagac

SEQ ID NO: 70305 - DNA, 25 bp, Canis familiaris
ctttggctctgctggtgaccagttt

SEQ ID NO: 70306 - DNA, 25 bp, Canis familiaris
ctattgagctttagggttatttctt

SEQ ID NO: 70307 - DNA, 25 bp, Canis familiaris
ctagtactgtatttggctttttctt

SEQ ID NO: 70308 - DNA, 25 bp, Canis familiaris
ctagctactctaaatttcggttgtt

SEQ ID NO: 70309 - DNA, 25 bp, Canis familiaris
ctagaacccagatttcctgtctcgg

SEQ ID NO: 70310 - DNA, 25 bp, Canis familiaris
ctataagccagacattccttcgttc

SEQ ID NO: 70311 - DNA, 25 bp, Canis familiaris
ctataaccagagatcctgcttcgac

SEQ ID NO: 70312 - DNA, 25 bp, Canis familiaris
ctataaccggagtagctgcttcgac

SEQ ID NO: 70313 - DNA, 25 bp, Canis familiaris
ctatcagtcctgcgctaatgttcgg

SEQ ID NO: 70314 - DNA, 25 bp, Canis familiaris
ctatagtcctagcctcctagtagcc

SEQ ID NO: 70315 - DNA, 25 bp, Canis familiaris
ctagagtcagctagctgctcctctg

SEQ ID NO: 70316 - DNA, 25 bp, Canis familiaris
ctagacaagctaactcgatgcgccc

SEQ ID NO: 70317 - DNA, 25 bp, Canis familiaris
ctagccaacatcaaatgctggacct

SEQ ID NO: 70318 - DNA, 25 bp, Canis familiaris
ctaccaatgtcttttgtaccttcat

SEQ ID NO: 70319 - DNA, 25 bp, Canis familiaris
ctatccacgctaattattaccccag

SEQ ID NO: 70320 - DNA, 25 bp, Canis familiaris
ctatccacgctaattgattacgcca

SEQ ID NO: 70321 - DNA, 25 bp, Canis familiaris
ctaccggccattattccgtctgtaa

SEQ ID NO: 70322 - DNA, 25 bp, Canis familiaris
ctattgcaggccttgtttccagtga

SEQ ID NO: 70323 - DNA, 25 bp, Canis familiaris
ctattcagacctagtgccttatgtc

SEQ ID NO: 70324 - DNA, 25 bp, Canis familiaris
ctatatacacagagctcttagagct

SEQ ID NO: 70325 - DNA, 25 bp, Canis familiaris
ctattgtcactagctctatatacac

SEQ ID NO: 70326 - DNA, 25 bp, Canis familiaris
ctatttctgcttgccattggccatc

SEQ ID NO: 70327 - DNA, 25 bp, Canis familiaris
ctatctttggaggccattagaagct

SEQ ID NO: 70328 - DNA, 25 bp, Canis familiaris
ctatctttgtagaactctatacctg

SEQ ID NO: 70329 - DNA, 25 bp, Canis familiaris
ctatttgtaatgaaatcctcaattt

SEQ ID NO: 70330 - DNA, 25 bp, Canis familiaris
ctacttgttatgcatataaatattt

SEQ ID NO: 70331 - DNA, 25 bp, Canis familiaris
ctacttttcaactaatccaactata

SEQ ID NO: 70332 - DNA, 25 bp, Canis familiaris
ctacttactctttaatccctagaca

SEQ ID NO: 70333 - DNA, 25 bp, Canis familiaris
ctattgtccctcaacaacaacaaaa

SEQ ID NO: 70334 - DNA, 25 bp, Canis familiaris
ctatggcccccaaaaagcaggagaa

SEQ ID NO: 70335 - DNA, 25 bp, Canis familiaris
ctatggcccggtctagagcggccag

SEQ ID NO: 70336 - DNA, 25 bp, Canis familiaris
ctatttcgggatcggggtgtgccag

SEQ ID NO: 70337 - DNA, 25 bp, Canis familiaris
ctatcatacaggtcacgagcggtgg

SEQ ID NO: 70338 - DNA, 25 bp, Canis familiaris
ctacccagactagaggccagggccc

SEQ ID NO: 70339 - DNA, 25 bp, Canis familiaris
ctagaacgactggagggcgcgtggg

SEQ ID NO: 70340 - DNA, 25 bp, Canis familiaris
ctagtagggctggatgggcccccga

SEQ ID NO: 70341 - DNA, 25 bp, Canis familiaris
ctaggagggggtgaccgcacccatg

SEQ ID NO: 70342 - DNA, 25 bp, Canis familiaris
ctgaggggaacgatgaccgaccgat

SEQ ID NO: 70343 - DNA, 25 bp, Canis familiaris
ctgagtgggaacgggtggcccggct

SEQ ID NO: 70344 - DNA, 25 bp, Canis familiaris
ctgaatggggacgggtggcccggct

SEQ ID NO: 70345 - DNA, 25 bp, Canis familiaris
cccatgcgggaccggtggttggtcg

SEQ ID NO: 70346 - DNA, 25 bp, Canis familiaris
ctgattcgggacctttgtggggccg

SEQ ID NO: 70347 - DNA, 25 bp, Canis familiaris
ctatctcaggagtccgtaggggccc

SEQ ID NO: 70348 - DNA, 25 bp, Canis familiaris
ctacctgggcctggtggagagcccc

SEQ ID NO: 70349 - DNA, 25 bp, Canis familiaris
ctatcattcgcggtctggagacccc

SEQ ID NO: 70350 - DNA, 25 bp, Canis familiaris
ctatcacttcaccttgaggatcctt

SEQ ID NO: 70351 - DNA, 25 bp, Canis familiaris
ctatcctttcctggagggcgttatt

SEQ ID NO: 70352 - DNA, 25 bp, Canis familiaris
ctatctctttcccagtgggctgaaa

SEQ ID NO: 70353 - DNA, 25 bp, Canis familiaris
ctacctcttctgcaggtggcaacat

SEQ ID NO: 70354 - DNA, 25 bp, Canis familiaris
ctatttcttctgaaaccccagcatc

SEQ ID NO: 70355 - DNA, 25 bp, Canis familiaris
ctatttcacatgatatgcccccatc

SEQ ID NO: 70356 - DNA, 25 bp, Canis familiaris
ccctgtcaatgtgagccccagtcct

SEQ ID NO: 70357 - DNA, 25 bp, Canis familiaris
ctccttgcagttgtaaccagtccac

SEQ ID NO: 70358 - DNA, 25 bp, Canis familiaris
ctccacgtcattgttaaccatcaca

SEQ ID NO: 70359 - DNA, 25 bp, Canis familiaris
ctcaaagtcttccttaaccctatgg

SEQ ID NO: 70360 - DNA, 25 bp, Canis familiaris
ctagaaggctgtgtatagtccattt

SEQ ID NO: 70361 - DNA, 25 bp, Canis familiaris
ctagaattcgctgttgccctaattc

SEQ ID NO: 70362 - DNA, 25 bp, Canis familiaris
ctaggagtcagtggggcccaccacc

SEQ ID NO: 70363 - DNA, 25 bp, Canis familiaris
ctcggagtcctagggtcgagctcca

SEQ ID NO: 70364 - DNA, 25 bp, Canis familiaris
ctaggagttaacagtctgccgcctg

SEQ ID NO: 70365 - DNA, 25 bp, Canis familiaris
ctaggagtgtaccttagctccgctg

SEQ ID NO: 70366 - DNA, 25 bp, Canis familiaris
ctatctgtgtttatccagtccgttc

SEQ ID NO: 70367 - DNA, 25 bp, Canis familiaris
ctactggtgttactcaggtccctac

SEQ ID NO: 70368 - DNA, 25 bp, Canis familiaris
ctacatggtttacatgttccaatat

SEQ ID NO: 70369 - DNA, 25 bp, Canis familiaris
ctcacggtttatactcttacgatac

SEQ ID NO: 70370 - DNA, 25 bp, Canis familiaris
ctacggctttatgctgcagaacgaa

SEQ ID NO: 70371 - DNA, 25 bp, Canis familiaris
ctagaggcttttactgatggccaga

SEQ ID NO: 70372 - DNA, 25 bp, Canis familiaris
ctaggagcttgtacctgcatcatcc

SEQ ID NO: 70373 - DNA, 25 bp, Canis familiaris
ctaggtttgtgctgatccatccata

SEQ ID NO: 70374 - DNA, 25 bp, Canis familiaris
ctatgtgttcgatttctcaactaaa

SEQ ID NO: 70375 - DNA, 25 bp, Canis familiaris
ctagcttttgaattgccaaccctgc

SEQ ID NO: 70376 - DNA, 25 bp, Canis familiaris
ctcagctttaaaacatcaggccttg

SEQ ID NO: 70377 - DNA, 25 bp, Canis familiaris
ctcagcttgatgaactctcatgcac

SEQ ID NO: 70378 - DNA, 25 bp, Canis familiaris
ctagcaccatgaagatcaagatcat

SEQ ID NO: 70379 - DNA, 25 bp, Canis familiaris
ctaggccagatctcattgatctggt

SEQ ID NO: 70380 - DNA, 25 bp, Canis familiaris
ctagtgacaagctctgctgaccatg

SEQ ID NO: 70381 - DNA, 25 bp, Canis familiaris
ctagtcacagactcaggaccaattg

SEQ ID NO: 70382 - DNA, 25 bp, Canis familiaris
ctagtccacccgctgaagcattatt

SEQ ID NO: 70383 - DNA, 25 bp, Canis familiaris
ctagtgtcccctcaatacattcata

SEQ ID NO: 70384 - DNA, 25 bp, Canis familiaris
ctacgacgcttttataacattcatc

SEQ ID NO: 70385 - DNA, 25 bp, Canis familiaris
ctaaagcatgtattttattcattct

SEQ ID NO: 70386 - DNA, 25 bp, Canis familiaris
ctataatcctcagtctactaatcct

SEQ ID NO: 70387 - DNA, 25 bp, Canis familiaris
ctactacccattgacatctaggccc

SEQ ID NO: 70388 - DNA, 25 bp, Canis familiaris
ctacctcctacccagactagaggcc

SEQ ID NO: 70389 - DNA, 25 bp, Canis familiaris
ctatcctcctcagtgtacactaaat

SEQ ID NO: 70390 - DNA, 25 bp, Canis familiaris
ctaccttgtcatgtaccatccaata

SEQ ID NO: 70391 - DNA, 25 bp, Canis familiaris
ctatctttacacatattctcgatat

SEQ ID NO: 70392 - DNA, 25 bp, Canis familiaris
ctcactttaagtttttggcatattc

SEQ ID NO: 70393 - DNA, 25 bp, Canis familiaris
ctcctttaaaggctgtccaagcatt

SEQ ID NO: 70394 - DNA, 25 bp, Canis familiaris
cccaaggaaggtgttgcgcaacttc

SEQ ID NO: 70395 - DNA, 25 bp, Canis familiaris
ccccaggtagggctagcaacacttt

SEQ ID NO: 70396 - DNA, 25 bp, Canis familiaris
gctagccaggtacccctaaatacta

SEQ ID NO: 70397 - DNA, 25 bp, Canis familiaris
ctactcatcgttcccagaaaaacca

SEQ ID NO: 70398 - DNA, 25 bp, Canis familiaris
ctatccatagcaaggcatcgacaaa

SEQ ID NO: 70399 - DNA, 25 bp, Canis familiaris
ctcatatgaagtaaccgcctagcaa

SEQ ID NO: 70400 - DNA, 25 bp, Canis familiaris
ctatataaaataacctccatctcaa

SEQ ID NO: 70401 - DNA, 25 bp, Canis familiaris
ctatctaggaatagacacacacaca

SEQ ID NO: 70402 - DNA, 25 bp, Canis familiaris
ctatctacatgccttagcacacgcc

SEQ ID NO: 70403 - DNA, 25 bp, Canis familiaris
ctatcaaccagcatgaacctggctg

SEQ ID NO: 70404 - DNA, 25 bp, Canis familiaris
ctatcactcagccggagaccatggt

SEQ ID NO: 70405 - DNA, 25 bp, Canis familiaris
ctacaagccgggccagacagtgttc

SEQ ID NO: 70406 - DNA, 25 bp, Canis familiaris
ctactcagctggtggatacccttcg

SEQ ID NO: 70407 - DNA, 25 bp, Canis familiaris
ctattcctgtgatgccaagttgtta

SEQ ID NO: 70408 - DNA, 25 bp, Canis familiaris
ctaacctgtcctcaaattctcatga

SEQ ID NO: 70409 - DNA, 25 bp, Canis familiaris
ctaacctcttcctggacatcttaaa

SEQ ID NO: 70410 - DNA, 25 bp, Canis familiaris
ctaaccacatgccctttgggcctaa

SEQ ID NO: 70411 - DNA, 25 bp, Canis familiaris
ctaccccaggactcaggggccaact

SEQ ID NO: 70412 - DNA, 25 bp, Canis familiaris
ctatcacgccactactgcgagggtg

SEQ ID NO: 70413 - DNA, 25 bp, Canis familiaris
ctatgacccaaactctatgctggtg

SEQ ID NO: 70414 - DNA, 25 bp, Canis familiaris
ctatatccgtaacctggatagtgaa

SEQ ID NO: 70415 - DNA, 25 bp, Canis familiaris
ctatacatcgcctaccgtgtatgaa

SEQ ID NO: 70416 - DNA, 25 bp, Canis familiaris
ctaggaccctaccagattgaggaga

SEQ ID NO: 70417 - DNA, 25 bp, Canis familiaris
ctaccgctgctctggaagtcaggaa

SEQ ID NO: 70418 - DNA, 25 bp, Canis familiaris
ctatgccgcccaaggacgacaagaa

SEQ ID NO: 70419 - DNA, 25 bp, Canis familiaris
ctaccacatccaaggaaggcagcag

SEQ ID NO: 70420 - DNA, 25 bp, Canis familiaris
ctagccctccgaagacgggcattag

SEQ ID NO: 70421 - DNA, 25 bp, Canis familiaris
ctacgacttgcgcaacgtgctgttg

SEQ ID NO: 70422 - DNA, 25 bp, Canis familiaris
ctacgacttatgctttagttgtaaa

SEQ ID NO: 70423 - DNA, 25 bp, Canis familiaris
ctcaccctttggttgccaggtataa

SEQ ID NO: 70424 - DNA, 25 bp, Canis familiaris
ctatctcctctttgtatcggtgttc

SEQ ID NO: 70425 - DNA, 25 bp, Canis familiaris
ctatccctttttcagtatcagtccc

SEQ ID NO: 70426 - DNA, 25 bp, Canis familiaris
ctatcatacttgtctatttttcgtc

SEQ ID NO: 70427 - DNA, 25 bp, Canis familiaris
ctatccacacagtctttttgggttt

SEQ ID NO: 70428 - DNA, 25 bp, Canis familiaris
ctactcccagggatttggcgacttt

SEQ ID NO: 70429 - DNA, 25 bp, Canis familiaris
ctagaccataggctattagggacac

SEQ ID NO: 70430 - DNA, 25 bp, Canis familiaris
ctgaacgtagaaatttggagtaaat

SEQ ID NO: 70431 - DNA, 25 bp, Canis familiaris
cgaatcgtgccttttctaactggaa

SEQ ID NO: 70432 - DNA, 25 bp, Canis familiaris
ctaccgggccagttctgtactgaga

SEQ ID NO: 70433 - DNA, 25 bp, Canis familiaris
ctatgagcaggacagtattaccggt

SEQ ID NO: 70434 - DNA, 25 bp, Canis familiaris
ctagagagtggtgtttcccggtcag

SEQ ID NO: 70435 - DNA, 25 bp, Canis familiaris
ctagagcgtcggtttacaggcggcc

SEQ ID NO: 70436 - DNA, 25 bp, Canis familiaris
ctatacgtgaggaatcccaagggcc

SEQ ID NO: 70437 - DNA, 25 bp, Canis familiaris
ctaagcactgaggaaccctggtcgc

SEQ ID NO: 70438 - DNA, 25 bp, Canis familiaris
ctaaatctgggagctcctctatctc

SEQ ID NO: 70439 - DNA, 25 bp, Canis familiaris
ctatcaactggcattccactatatt

SEQ ID NO: 70440 - DNA, 25 bp, Canis familiaris
ctatcaaactgcattccacatatta

SEQ ID NO: 70441 - DNA, 25 bp, Canis familiaris
ctaccatcccagactccgatgttag

SEQ ID NO: 70442 - DNA, 25 bp, Canis familiaris
ctcacgcctgtaatcccagcacttt

SEQ ID NO: 70443 - DNA, 25 bp, Canis familiaris
ctagtccttcagtctgtcagtcttt

SEQ ID NO: 70444 - DNA, 25 bp, Canis familiaris
ctatctttatagtttcatctttttg

SEQ ID NO: 70445 - DNA, 25 bp, Canis familiaris
ctatcttcctgttattatttttgag

SEQ ID NO: 70446 - DNA, 25 bp, Canis familiaris
ctatttttttgcctttgtgtgtatg

SEQ ID NO: 70447 - DNA, 25 bp, Canis familiaris
ctagttcttttggctgtatgttctt

SEQ ID NO: 70448 - DNA, 25 bp, Canis familiaris
ctatgtatttattgtgatggttgtc

SEQ ID NO: 70449 - DNA, 25 bp, Canis familiaris
ctagatgttaaagaggttgccagtg

SEQ ID NO: 70450 - DNA, 25 bp, Canis familiaris
ctagttgtaacgtgtctgtctggta

SEQ ID NO: 70451 - DNA, 25 bp, Canis familiaris
ctagggccgaggttgagttctgtct

SEQ ID NO: 70452 - DNA, 25 bp, Canis familiaris
ctaggagggaggtgttgttgttgta

SEQ ID NO: 70453 - DNA, 25 bp, Canis familiaris
ctaggaggtccttggttggtgggct

SEQ ID NO: 70454 - DNA, 25 bp, Canis familiaris
ctagggggcgctgtggggaggagcc

SEQ ID NO: 70455 - DNA, 25 bp, Canis familiaris
ctaggtggcagtctttgggagcgct

SEQ ID NO: 70456 - DNA, 25 bp, Canis familiaris
ctatggtgtcctcttgggttactgc

SEQ ID NO: 70457 - DNA, 25 bp, Canis familiaris
ctcagggtccaggggaggtttcagc

SEQ ID NO: 70458 - DNA, 25 bp, Canis familiaris
ctcagggacctggggtgtttgtagt

SEQ ID NO: 70459 - DNA, 25 bp, Canis familiaris
ctaggatgccctgggttcttggtat

SEQ ID NO: 70460 - DNA, 25 bp, Canis familiaris
ctaacgtccaggattcttggttact

SEQ ID NO: 70461 - DNA, 25 bp, Canis familiaris
ctagccttccggagtattctattac

SEQ ID NO: 70462 - DNA, 25 bp, Canis familiaris
ctagactacctgcaagtatttcttg

SEQ ID NO: 70463 - DNA, 25 bp, Canis familiaris
ctaacccctgactagttttagatca

SEQ ID NO: 70464 - DNA, 25 bp, Canis familiaris
ctatacccacgatcatgttttctgt

SEQ ID NO: 70465 - DNA, 25 bp, Canis familiaris
ctatcacaccaacttatttcttcct

SEQ ID NO: 70466 - DNA, 25 bp, Canis familiaris
ctatatagccaactgattttcacat

SEQ ID NO: 70467 - DNA, 25 bp, Canis familiaris
ctataagtcactcatgtcttcatgc

SEQ ID NO: 70468 - DNA, 25 bp, Canis familiaris
ctatcacttcctgatttctcagcca

SEQ ID NO: 70469 - DNA, 25 bp, Canis familiaris
ctatcctgtccgtatgtctcaacag

SEQ ID NO: 70470 - DNA, 25 bp, Canis familiaris
ctaggctgtccgttattaccatgat

SEQ ID NO: 70471 - DNA, 25 bp, Canis familiaris
ctaggcttccgtgtctggatttgcc

SEQ ID NO: 70472 - DNA, 25 bp, Canis familiaris
ctagagttcaggacctctgactccc

SEQ ID NO: 70473 - DNA, 25 bp, Canis familiaris
ctatgatgcttatatcaccttcccc

SEQ ID NO: 70474 - DNA, 25 bp, Canis familiaris
ctatatcaatattcatcctagcccc

SEQ ID NO: 70475 - DNA, 25 bp, Canis familiaris
ctacgagtagactactgagcccacc

SEQ ID NO: 70476 - DNA, 25 bp, Canis familiaris
ctaggagctagatgacaccctgccg

SEQ ID NO: 70477 - DNA, 25 bp, Canis familiaris
ctagaagcaagggcaacctctccgc

SEQ ID NO: 70478 - DNA, 25 bp, Canis familiaris
ctagaagccaatccctaatactccg

SEQ ID NO: 70479 - DNA, 25 bp, Canis familiaris
ctatgggcaaatcacttcactcttc

SEQ ID NO: 70480 - DNA, 25 bp, Canis familiaris
ctatgatggaaaacagtgtcattct

SEQ ID NO: 70481 - DNA, 25 bp, Canis familiaris
ctatgaggcacagcccattgctttg

SEQ ID NO: 70482 - DNA, 25 bp, Canis familiaris
ctagggcaccatgaatcctgagtga

SEQ ID NO: 70483 - DNA, 25 bp, Canis familiaris
ctaggctctcctgggtgggaatgaa

SEQ ID NO: 70484 - DNA, 25 bp, Canis familiaris
ctcgggctcgtgcgtaggacaaatg

SEQ ID NO: 70485 - DNA, 25 bp, Canis familiaris
ctcgggttggggtgggaggcagcgt

SEQ ID NO: 70486 - DNA, 25 bp, Canis familiaris
ctctgggtatggggtccggtccagg

SEQ ID NO: 70487 - DNA, 25 bp, Canis familiaris
ctctggagttcggatccacgggggg

SEQ ID NO: 70488 - DNA, 25 bp, Canis familiaris
ctcggagtctcgggtcttccgaggc

SEQ ID NO: 70489 - DNA, 25 bp, Canis familiaris
ctcggacacttgagattgcccaacc

SEQ ID NO: 70490 - DNA, 25 bp, Canis familiaris
ctagagaagcttattcgcccagacc

SEQ ID NO: 70491 - DNA, 25 bp, Canis familiaris
ctagtgagagatgccttcccaagcc

SEQ ID NO: 70492 - DNA, 25 bp, Canis familiaris
ctaggaatatccgagtgctccaccc

SEQ ID NO: 70493 - DNA, 25 bp, Canis familiaris
ctaggacagaccaaggacacctccc

SEQ ID NO: 70494 - DNA, 25 bp, Canis familiaris
ctaggacaaccctagaactctccag

SEQ ID NO: 70495 - DNA, 25 bp, Canis familiaris
ctagaacaatacccctagttccagg

SEQ ID NO: 70496 - DNA, 25 bp, Canis familiaris
ctagcccagtaccttttttcagagg

SEQ ID NO: 70497 - DNA, 25 bp, Canis familiaris
ctagcccgtcggtattgtttgaaga

SEQ ID NO: 70498 - DNA, 25 bp, Canis familiaris
ctatcccctcttgttgattgtggta

SEQ ID NO: 70499 - DNA, 25 bp, Canis familiaris
ctatgaccactgtggtgctgggtgg

SEQ ID NO: 70500 - DNA, 25 bp, Canis familiaris
ctaggcctctgatgtgtgggctggc

SEQ ID NO: 70501 - DNA, 25 bp, Canis familiaris
ctatggctgtctgagcgctgttggt

SEQ ID NO: 70502 - DNA, 25 bp, Canis familiaris
ctatggtgtgctgcggttcatcatg

SEQ ID NO: 70503 - DNA, 25 bp, Canis familiaris
ctatcagtgccaagggcttcctgta

SEQ ID NO: 70504 - DNA, 25 bp, Canis familiaris
ctatacttattacctttctgctcaa

SEQ ID NO: 70505 - DNA, 25 bp, Canis familiaris
ctatctctttttccttcttcaagat

SEQ ID NO: 70506 - DNA, 25 bp, Canis familiaris
ctatccttcttattctaacccagag

SEQ ID NO: 70507 - DNA, 25 bp, Canis familiaris
ctatgcctggcctttctataaacca

SEQ ID NO: 70508 - DNA, 25 bp, Canis familiaris
ctagtctggcacttccttggactac

SEQ ID NO: 70509 - DNA, 25 bp, Canis familiaris
ctatctgtggccaccttggatggat

SEQ ID NO: 70510 - DNA, 25 bp, Canis familiaris
ctatgctgggccatacacgagagcc

SEQ ID NO: 70511 - DNA, 25 bp, Canis familiaris
ctagctaggtcattcacgggagtca

SEQ ID NO: 70512 - DNA, 25 bp, Canis familiaris
ctagttggttgtccgtggtgtgttt

SEQ ID NO: 70513 - DNA, 25 bp, Canis familiaris
ctatgattgggttcactggccttgt

SEQ ID NO: 70514 - DNA, 25 bp, Canis familiaris
ctatcttggttgccctggcagcata

SEQ ID NO: 70515 - DNA, 25 bp, Canis familiaris
ctatcttggatctttgcaggagcta

SEQ ID NO: 70516 - DNA, 25 bp, Canis familiaris
ctatgcttgggctgaaggacatggc

SEQ ID NO: 70517 - DNA, 25 bp, Canis familiaris
ctagcaagtggctaacaggttgagc

SEQ ID NO: 70518 - DNA, 25 bp, Canis familiaris
ctatgccatgggcgccaagtctgta

SEQ ID NO: 70519 - DNA, 25 bp, Canis familiaris
ctagactgcggttgcgacaggcgtg

SEQ ID NO: 70520 - DNA, 25 bp, Canis familiaris
ctaggcggactgttactgagctgcg

SEQ ID NO: 70521 - DNA, 25 bp, Canis familiaris
ctatggcatggactgggtccgccag

SEQ ID NO: 70522 - DNA, 25 bp, Canis familiaris
ctatgtgctgggagtggcctggttg

SEQ ID NO: 70523 - DNA, 25 bp, Canis familiaris
ctcagtggtggtctgggcttggttt

SEQ ID NO: 70524 - DNA, 25 bp, Canis familiaris
ctagtgggagtgaggccttgctgtg

SEQ ID NO: 70525 - DNA, 25 bp, Canis familiaris
ctagtgaggcagcagggagcccggc

SEQ ID NO: 70526 - DNA, 25 bp, Canis familiaris
ctaggaggggatgggtgccacagcc

SEQ ID NO: 70527 - DNA, 25 bp, Canis familiaris
ctatgtgggtgacgaggcccagagc

SEQ ID NO: 70528 - DNA, 25 bp, Canis familiaris
ctatgtgggcgacgaggcccagagc

SEQ ID NO: 70529 - DNA, 25 bp, Canis familiaris
ctagggagcgcaaagccaccaagac

SEQ ID NO: 70530 - DNA, 25 bp, Canis familiaris
ctaaggggccttgaccatgtacacg

SEQ ID NO: 70531 - DNA, 25 bp, Canis familiaris
ctaaagtgcaggagccccgtgaagc

SEQ ID NO: 70532 - DNA, 25 bp, Canis familiaris
ctaccagtggtggaggccgcgttag

SEQ ID NO: 70533 - DNA, 25 bp, Canis familiaris
ctatcagtgggtgaggcgaggttga

SEQ ID NO: 70534 - DNA, 25 bp, Canis familiaris
ctacctgggctattgtaagcgtgta

SEQ ID NO: 70535 - DNA, 25 bp, Canis familiaris
ctacttgtggtacttaggcagtggc

SEQ ID NO: 70536 - DNA, 25 bp, Canis familiaris
ctactggagagttgcacgagacgtg

SEQ ID NO: 70537 - DNA, 25 bp, Canis familiaris
ctatctgagatcctcgcacagagat

SEQ ID NO: 70538 - DNA, 25 bp, Canis familiaris
ctatcagagatcctgttagagattg

SEQ ID NO: 70539 - DNA, 25 bp, Canis familiaris
ctatcagcatccctgtgttggctaa

SEQ ID NO: 70540 - DNA, 25 bp, Canis familiaris
tctacaattgtgcgttgacggaaaa

SEQ ID NO: 70541 - DNA, 25 bp, Canis familiaris
ctaaattggcagtgtgacttgcaca

SEQ ID NO: 70542 - DNA, 25 bp, Canis familiaris
ctagacttcgagcaggagatggcca

SEQ ID NO: 70543 - DNA, 25 bp, Canis familiaris
ctagaagtatgacaagcagatcgac

SEQ ID NO: 70544 - DNA, 25 bp, Canis familiaris
ctaagagaacacaaagcaatacatt

SEQ ID NO: 70545 - DNA, 25 bp, Canis familiaris
ctcaaagaaacagcctaaatttaca

SEQ ID NO: 70546 - DNA, 25 bp, Canis familiaris
ctctatatatagacctcctaactga

SEQ ID NO: 70547 - DNA, 25 bp, Canis familiaris
ctatctgtatactcccaacactgat

SEQ ID NO: 70548 - DNA, 25 bp, Canis familiaris
ctatcttatatagcccatgccatct

SEQ ID NO: 70549 - DNA, 25 bp, Canis familiaris
ctcagtggtagagcgcttgcctagc

SEQ ID NO: 70550 - DNA, 25 bp, Canis familiaris
ctagctgtctagaatcgttgctcaa

SEQ ID NO: 70551 - DNA, 25 bp, Canis familiaris
ctatgtgtctgaagatatttgcaaa

SEQ ID NO: 70552 - DNA, 25 bp, Canis familiaris
ctatgacctcaacttttcaaaaaga

SEQ ID NO: 70553 - DNA, 25 bp, Canis familiaris
ctagccagaaacaacttaacacaga

SEQ ID NO: 70554 - DNA, 25 bp, Canis familiaris
ctagcctgcagatacacttctacga

SEQ ID NO: 70555 - DNA, 25 bp, Canis familiaris
ctacctcaacaagctgctcatcacg

SEQ ID NO: 70556 - DNA, 25 bp, Canis familiaris
ctacctattatagatattgcaccct

SEQ ID NO: 70557 - DNA, 25 bp, Canis familiaris
ctacctattatagatattgcaccct

SEQ ID NO: 70558 - DNA, 25 bp, Canis familiaris
ctaatctgattaaaagggcccgctt

SEQ ID NO: 70559 - DNA, 25 bp, Canis familiaris
ctactcagcttttagaggccaccct

SEQ ID NO: 70560 - DNA, 25 bp, Canis familiaris
ctatcccttttaacatgacacctat

SEQ ID NO: 70561 - DNA, 25 bp, Canis familiaris
ctatcttctcttaaacttcagcttt

SEQ ID NO: 70562 - DNA, 25 bp, Canis familiaris
ctatcctctcgtaccacaacagagg

SEQ ID NO: 70563 - DNA, 25 bp, Canis familiaris
ctatcccatcagagcagctcaacaa

SEQ ID NO: 70564 - DNA, 25 bp, Canis familiaris
ctatctcctcatatctctcaaatta

SEQ ID NO: 70565 - DNA, 25 bp, Canis familiaris
ctatctccaccgtcactgacaagta

SEQ ID NO: 70566 - DNA, 25 bp, Canis familiaris
ctatctgtacacgtccttctgaaag

SEQ ID NO: 70567 - DNA, 25 bp, Canis familiaris
ctagcatgtgattgcttcactcctg

SEQ ID NO: 70568 - DNA, 25 bp, Canis familiaris
ctatgctgtgaactttcccttggag

SEQ ID NO: 70569 - DNA, 25 bp, Canis familiaris
ctatgctgaaagatattcccttatc

SEQ ID NO: 70570 - DNA, 25 bp, Canis familiaris
ctagctaaagccatgatcagcctta

SEQ ID NO: 70571 - DNA, 25 bp, Canis familiaris
ctaggcagtgagcctgtacccttca

SEQ ID NO: 70572 - DNA, 25 bp, Canis familiaris
ctagtgcttcagtcctataccgata

SEQ ID NO: 70573 - DNA, 25 bp, Canis familiaris
ctagattctcaggttatatcagtga

SEQ ID NO: 70574 - DNA, 25 bp, Canis familiaris
ctagcagagtacgcagaatatgagt

SEQ ID NO: 70575 - DNA, 25 bp, Canis familiaris
ctatgaggcattgactcagaaagtt

SEQ ID NO: 70576 - DNA, 25 bp, Canis familiaris
ctatctctgatagctctagaaattt

SEQ ID NO: 70577 - DNA, 25 bp, Canis familiaris
ctatgcccattccctaaaagtcatg

SEQ ID NO: 70578 - DNA, 25 bp, Canis familiaris
ctacggcatgttcctaacgtccaga

SEQ ID NO: 70579 - DNA, 25 bp, Canis familiaris
ctcaaggacatccctaacctgacag

SEQ ID NO: 70580 - DNA, 25 bp, Canis familiaris
ctaaggagtcacgtagttctcacgc

SEQ ID NO: 70581 - DNA, 25 bp, Canis familiaris
ctacagggaacctgcttttccctct

SEQ ID NO: 70582 - DNA, 25 bp, Canis familiaris
ctaatttgaccctggtcccaactct

SEQ ID NO: 70583 - DNA, 25 bp, Canis familiaris
ctaatgggacccttgcaatgcggaa

SEQ ID NO: 70584 - DNA, 25 bp, Canis familiaris
ctacgtgagatcccagggccggaag

SEQ ID NO: 70585 - DNA, 25 bp, Canis familiaris
cgcccacaatcgaggacccgaaagg

SEQ ID NO: 70586 - DNA, 25 bp, Canis familiaris
ctcgccaagaagaaggactccaaaa

SEQ ID NO: 70587 - DNA, 25 bp, Canis familiaris
ctagtcaataagctggtccaagaaa

SEQ ID NO: 70588 - DNA, 25 bp, Canis familiaris
ctaaccaacctgggtccaatgctca

SEQ ID NO: 70589 - DNA, 25 bp, Canis familiaris
ctaagggacgagggcccacgtccag

SEQ ID NO: 70590 - DNA, 25 bp, Canis familiaris
ctaagggaacgtggccctcggagtg

SEQ ID NO: 70591 - DNA, 25 bp, Canis familiaris
ctaaagaaatcattccccatcagga

SEQ ID NO: 70592 - DNA, 25 bp, Canis familiaris
ctaaaaaacacttcccatataatga

SEQ ID NO: 70593 - DNA, 25 bp, Canis familiaris
ctagaaaaacctgccaaatatgatg

SEQ ID NO: 70594 - DNA, 25 bp, Canis familiaris
ctaataaacgggtcacatacacaat

SEQ ID NO: 70595 - DNA, 25 bp, Canis familiaris
ctaggaactggtgatccatacacac

SEQ ID NO: 70596 - DNA, 25 bp, Canis familiaris
ctacttcacggtcaccatcacagat

SEQ ID NO: 70597 - DNA, 25 bp, Canis familiaris
ctacttccttttcctgcaggagttg

SEQ ID NO: 70598 - DNA, 25 bp, Canis familiaris
ctacctccttagaagctgcggtctt

SEQ ID NO: 70599 - DNA, 25 bp, Canis familiaris
ctacctgcatctgagtcatctgggt

SEQ ID NO: 70600 - DNA, 25 bp, Canis familiaris
ctaccctgctgacgtcacagtattt

SEQ ID NO: 70601 - DNA, 25 bp, Canis familiaris
ctactcctctgacgaatgggtatat

SEQ ID NO: 70602 - DNA, 25 bp, Canis familiaris
ctactcctctgacgaatgggtatat

SEQ ID NO: 70603 - DNA, 25 bp, Canis familiaris
ctatccatttatcagtggactcttc

SEQ ID NO: 70604 - DNA, 25 bp, Canis familiaris
ctatgcactttttacgtcacttctt

SEQ ID NO: 70605 - DNA, 25 bp, Canis familiaris
ctaagttttagtggatcagattttt

SEQ ID NO: 70606 - DNA, 25 bp, Canis familiaris
ctacagtttctggttggcttcgtta

SEQ ID NO: 70607 - DNA, 25 bp, Canis familiaris
ctaattccttagtggcttcagagta

SEQ ID NO: 70608 - DNA, 25 bp, Canis familiaris
ctaataacccatctggcttccaatg

SEQ ID NO: 70609 - DNA, 25 bp, Canis familiaris
gccaaacccagtgttctgtccaaat

SEQ ID NO: 70610 - DNA, 25 bp, Canis familiaris
ctcttaccgtgtctttgtcctaagg

SEQ ID NO: 70611 - DNA, 25 bp, Canis familiaris
ctctaactcgttctatttttacagc

SEQ ID NO: 70612 - DNA, 25 bp, Canis familiaris
ctacaatgttttcctgactttagac

SEQ ID NO: 70613 - DNA, 25 bp, Canis familiaris
ctacctctgttggcatctttttaat

SEQ ID NO: 70614 - DNA, 25 bp, Canis familiaris
ctaccatctgtttcttagtggcccc

SEQ ID NO: 70615 - DNA, 25 bp, Canis familiaris
ctagtctgctgggatcttatttgcc

SEQ ID NO: 70616 - DNA, 25 bp, Canis familiaris
ctatgctgcaggcttttttggctct

SEQ ID NO: 70617 - DNA, 25 bp, Canis familiaris
ctagcatgcagggacttatttggcc

SEQ ID NO: 70618 - DNA, 25 bp, Canis familiaris
ctagcgcagcatccagcttgtagta

SEQ ID NO: 70619 - DNA, 25 bp, Canis familiaris
ctactgatgcacccactgattcaag

SEQ ID NO: 70620 - DNA, 25 bp, Canis familiaris
ctagcgtgcatcttcctaatagagg

SEQ ID NO: 70621 - DNA, 25 bp, Canis familiaris
ctagagggtccccatatcaggcgtg

SEQ ID NO: 70622 - DNA, 25 bp, Canis familiaris
ctacgggttcctctctgagcgagcg

SEQ ID NO: 70623 - DNA, 25 bp, Canis familiaris
ctactgggccgagtttcgtggtggg

SEQ ID NO: 70624 - DNA, 25 bp, Canis familiaris
ctaaccccgattggtcgtaggcagg

SEQ ID NO: 70625 - DNA, 25 bp, Canis familiaris
ctacacctaaacggttggtggcgag

SEQ ID NO: 70626 - DNA, 25 bp, Canis familiaris
ctacctccaaaggtggtcctgaggg

SEQ ID NO: 70627 - DNA, 25 bp, Canis familiaris
ctagcgcacgaaggtgggctcctag

SEQ ID NO: 70628 - DNA, 25 bp, Canis familiaris
ctactgcatcgacaatgaggctttg

SEQ ID NO: 70629 - DNA, 25 bp, Canis familiaris
ctacgacgagctgctgcagtcctac

SEQ ID NO: 70630 - DNA, 25 bp, Canis familiaris
ctcagaagcgattgcactacccgcc

SEQ ID NO: 70631 - DNA, 25 bp, Canis familiaris
ctatgacagatatgactcctccttg

SEQ ID NO: 70632 - DNA, 25 bp, Canis familiaris
ctagcatagtaacagccttctcgtc

SEQ ID NO: 70633 - DNA, 25 bp, Canis familiaris
ctaggaggatccaagccttccagtt

SEQ ID NO: 70634 - DNA, 25 bp, Canis familiaris
ctagcgtggacatttgccattccct

SEQ ID NO: 70635 - DNA, 25 bp, Canis familiaris
ctagggtagcacttctcttgaggtt

SEQ ID NO: 70636 - DNA, 25 bp, Canis familiaris
ctaggcggagcagcgatcggaggtg

SEQ ID NO: 70637 - DNA, 25 bp, Canis familiaris
ctaggaggacgcatagggaccatgg

SEQ ID NO: 70638 - DNA, 25 bp, Canis familiaris
ctaccagggcatctcagtggtcctg

SEQ ID NO: 70639 - DNA, 25 bp, Canis familiaris
ctaccatgaagtctggcaactccga

SEQ ID NO: 70640 - DNA, 25 bp, Canis familiaris
ctaacatggggctggaactcgtgac

SEQ ID NO: 70641 - DNA, 25 bp, Canis familiaris
ctaaagaggaccctgaacctggcgc

SEQ ID NO: 70642 - DNA, 25 bp, Canis familiaris
ctaaaagtactaccactcagggcgc

SEQ ID NO: 70643 - DNA, 25 bp, Canis familiaris
ctaatgtattaacccccaggaccat

SEQ ID NO: 70644 - DNA, 25 bp, Canis familiaris
ctcctaattataccccctgggtcat

SEQ ID NO: 70645 - DNA, 25 bp, Canis familiaris
ctggtaaccatatacccgtgatggc

SEQ ID NO: 70646 - DNA, 25 bp, Canis familiaris
ctagaataccgatacttctctgtag

SEQ ID NO: 70647 - DNA, 25 bp, Canis familiaris
ctagaataccgatacatcttgtaga

SEQ ID NO: 70648 - DNA, 25 bp, Canis familiaris
ctaaaacggcagcacatgttgttgc

SEQ ID NO: 70649 - DNA, 25 bp, Canis familiaris
ctaattactccactgacatgctttc

SEQ ID NO: 70650 - DNA, 25 bp, Canis familiaris
ctagggactagcatgcactgcttgt

SEQ ID NO: 70651 - DNA, 25 bp, Canis familiaris
ctaggcatcactgtatcctgtctgt

SEQ ID NO: 70652 - DNA, 25 bp, Canis familiaris
ctaggtcctggaatggcttctgcct

SEQ ID NO: 70653 - DNA, 25 bp, Canis familiaris
ctatggaatcatccgttttctgcct

SEQ ID NO: 70654 - DNA, 25 bp, Canis familiaris
ctagagccacatccagtttttaagt

SEQ ID NO: 70655 - DNA, 25 bp, Canis familiaris
ctagttccatgggtctttccgagta

SEQ ID NO: 70656 - DNA, 25 bp, Canis familiaris
ctagccgccagggacttatcttggc

SEQ ID NO: 70657 - DNA, 25 bp, Canis familiaris
ctatgccgccaactactgtgatgga

SEQ ID NO: 70658 - DNA, 25 bp, Canis familiaris
ctatgtagccatgtcactgtgaata

SEQ ID NO: 70659 - DNA, 25 bp, Canis familiaris
ctatgtgcaggagaaggatgatgat

SEQ ID NO: 70660 - DNA, 25 bp, Canis familiaris
ctagtggtggcatagaggattctga

SEQ ID NO: 70661 - DNA, 25 bp, Canis familiaris
ctagtttgccgtagggcctgcgaaa

SEQ ID NO: 70662 - DNA, 25 bp, Canis familiaris
ctacattcatggcttgggcctggcc

SEQ ID NO: 70663 - DNA, 25 bp, Canis familiaris
ctacttcaagctcatgttcgaccgc

SEQ ID NO: 70664 - DNA, 25 bp, Canis familiaris
ctacttctgcactgggtatgaccct

SEQ ID NO: 70665 - DNA, 25 bp, Canis familiaris
ctagtgtcttacggtcttgatccct

SEQ ID NO: 70666 - DNA, 25 bp, Canis familiaris
ctagcttcttaaaacactgacctct

SEQ ID NO: 70667 - DNA, 25 bp, Canis familiaris
ctagatgcacttaccaacctgacgg

SEQ ID NO: 70668 - DNA, 25 bp, Canis familiaris
ctatgcagacagttccatacctggg

SEQ ID NO: 70669 - DNA, 25 bp, Canis familiaris
ctatgaatagcctcttccttgctgt

SEQ ID NO: 70670 - DNA, 25 bp, Canis familiaris
ctaggcagacactgcttctcttcgt

SEQ ID NO: 70671 - DNA, 25 bp, Canis familiaris
ctagaggatcacagccacgttggat

SEQ ID NO: 70672 - DNA, 25 bp, Canis familiaris
ctcagggctgattaggactttggtc

SEQ ID NO: 70673 - DNA, 25 bp, Canis familiaris
ctatgtgtctgtgttcatctgtatg

SEQ ID NO: 70674 - DNA, 25 bp, Canis familiaris
ctatggctctgttcctgttgtagaa

SEQ ID NO: 70675 - DNA, 25 bp, Canis familiaris
ctagttctgtggccagctgcttaga

SEQ ID NO: 70676 - DNA, 25 bp, Canis familiaris
ctatgtccaaaagtctggcccagaa

SEQ ID NO: 70677 - DNA, 25 bp, Canis familiaris
ctatgacatcaatttggtacctaaa

SEQ ID NO: 70678 - DNA, 25 bp, Canis familiaris
ctatgatgtacactgtggtcacccc

SEQ ID NO: 70679 - DNA, 25 bp, Canis familiaris
ctatgagtgcaacctggtgtccctg

SEQ ID NO: 70680 - DNA, 25 bp, Canis familiaris
ctagagtccgacagttctgctctga

SEQ ID NO: 70681 - DNA, 25 bp, Canis familiaris
ctagcagtcagttcttgttttcaaa

SEQ ID NO: 70682 - DNA, 25 bp, Canis familiaris
ctagcggttgccttctgtttaaagc

SEQ ID NO: 70683 - DNA, 25 bp, Canis familiaris
ctagcgtcttgacttctgtcttgac

SEQ ID NO: 70684 - DNA, 25 bp, Canis familiaris
ctagaccactagttctgcttctggg

SEQ ID NO: 70685 - DNA, 25 bp, Canis familiaris
ctcgacagcccgtggttcagggaga

SEQ ID NO: 70686 - DNA, 25 bp, Canis familiaris
ctcggcgcccgtggagaacggggag

SEQ ID NO: 70687 - DNA, 25 bp, Canis familiaris
ctagccgactggaggggcggtgggt

SEQ ID NO: 70688 - DNA, 25 bp, Canis familiaris
ctaccatggcgggtgtggccgcctg

SEQ ID NO: 70689 - DNA, 25 bp, Canis familiaris
ctaggcattgcggacgtggtcgtgc

SEQ ID NO: 70690 - DNA, 25 bp, Canis familiaris
ctatggcatccgcaagctgcagatc

SEQ ID NO: 70691 - DNA, 25 bp, Canis familiaris
ctagtgcatccgccagagcagcgta

SEQ ID NO: 70692 - DNA, 25 bp, Canis familiaris
ctacgatgccccagacattgcaaac

SEQ ID NO: 70693 - DNA, 25 bp, Canis familiaris
ctacgtgccgtccaactatgtggag

SEQ ID NO: 70694 - DNA, 25 bp, Canis familiaris
ctacgtggctacctgtcatgttgga

SEQ ID NO: 70695 - DNA, 25 bp, Canis familiaris
ctatggtggttaatgtgcttttgat

SEQ ID NO: 70696 - DNA, 25 bp, Canis familiaris
ctatggttgcatttctgttttctat

SEQ ID NO: 70697 - DNA, 25 bp, Canis familiaris
ctagcatttcatttagcttttatgt

SEQ ID NO: 70698 - DNA, 25 bp, Canis familiaris
ctaactgtgtaagtgcttataatgg

SEQ ID NO: 70699 - DNA, 25 bp, Canis familiaris
ctaccgtggaggcagtgaagatgtg

SEQ ID NO: 70700 - DNA, 25 bp, Canis familiaris
ctagccaggtgggccagggggctga

SEQ ID NO: 70701 - DNA, 25 bp, Canis familiaris
ctagcacagcgagcccagtgggtag

SEQ ID NO: 70702 - DNA, 25 bp, Canis familiaris
ctcccccgccgcgggggatcagcca

SEQ ID NO: 70703 - DNA, 25 bp, Canis familiaris
ctagggaccctggacggagtcccag

SEQ ID NO: 70704 - DNA, 25 bp, Canis familiaris
ctacggcaccctcaaggagccgtcg

SEQ ID NO: 70705 - DNA, 25 bp, Canis familiaris
ctacggcgacgagaagctgagcccc

SEQ ID NO: 70706 - DNA, 25 bp, Canis familiaris
ctacctggacgtgaagcagaacgcc

SEQ ID NO: 70707 - DNA, 25 bp, Canis familiaris
ctactgtgggttggaatggaccaga

SEQ ID NO: 70708 - DNA, 25 bp, Canis familiaris
ctactgggggaccagatcggccagc

SEQ ID NO: 70709 - DNA, 25 bp, Canis familiaris
ctacgacgggacggagctgcaggag

SEQ ID NO: 70710 - DNA, 25 bp, Canis familiaris
ctcactacggtagctacaaggactg

SEQ ID NO: 70711 - DNA, 25 bp, Canis familiaris
ctcacgaaggctttttcaaggccta

SEQ ID NO: 70712 - DNA, 25 bp, Canis familiaris
ctacatgaaccgtctcttgcatcag

SEQ ID NO: 70713 - DNA, 25 bp, Canis familiaris
ctagcaaacacatttctccagacct

SEQ ID NO: 70714 - DNA, 25 bp, Canis familiaris
ctaggacctatctttggaggccatt

SEQ ID NO: 70715 - DNA, 25 bp, Canis familiaris
ctaggtcctcctgataggtgacatt

SEQ ID NO: 70716 - DNA, 25 bp, Canis familiaris
ctacgttcttctgatgaggtgtctc

SEQ ID NO: 70717 - DNA, 25 bp, Canis familiaris
ctactgccgctaataattggtgctc

SEQ ID NO: 70718 - DNA, 25 bp, Canis familiaris
ctactgtcttatgatcacgtttgcc

SEQ ID NO: 70719 - DNA, 25 bp, Canis familiaris
ctaccattctcatatgaagttacgc

SEQ ID NO: 70720 - DNA, 25 bp, Canis familiaris
ctacctctgtctctgaatttaccta

SEQ ID NO: 70721 - DNA, 25 bp, Canis familiaris
ctaatatcgttttcaatttccttgg

SEQ ID NO: 70722 - DNA, 25 bp, Canis familiaris
ctacctcaattttcatttttcttct

SEQ ID NO: 70723 - DNA, 25 bp, Canis familiaris
ctacctgaaaaagttgtgttgctat

SEQ ID NO: 70724 - DNA, 25 bp, Canis familiaris
ctcacggacacagacttccagtctt

SEQ ID NO: 70725 - DNA, 25 bp, Canis familiaris
ctacttaccatcagtctcctggtta

SEQ ID NO: 70726 - DNA, 25 bp, Canis familiaris
ctactctctccaagggtccttgatg

SEQ ID NO: 70727 - DNA, 25 bp, Canis familiaris
ctagacctgccaagggtcctcagtc

SEQ ID NO: 70728 - DNA, 25 bp, Canis familiaris
ctagataatcctcgggctcgtatct

SEQ ID NO: 70729 - DNA, 25 bp, Canis familiaris
ctagataacctcgggccgatcgcac

SEQ ID NO: 70730 - DNA, 25 bp, Canis familiaris
ctagataacacaccgtcgtgctcca

SEQ ID NO: 70731 - DNA, 25 bp, Canis familiaris
ctagaactcccaggtcatgtgcttt

SEQ ID NO: 70732 - DNA, 25 bp, Canis familiaris
ctacactcacgaggtgtcggtttta

SEQ ID NO: 70733 - DNA, 25 bp, Canis familiaris
ctaccagcactaacccggtgtttgg

SEQ ID NO: 70734 - DNA, 25 bp, Canis familiaris
ctacacagcctcagacctgagtttc

SEQ ID NO: 70735 - DNA, 25 bp, Canis familiaris
ctagcaagcgcaaggccctgggttc

SEQ ID NO: 70736 - DNA, 25 bp, Canis familiaris
ctaataccaggcctcctggtctctg

SEQ ID NO: 70737 - DNA, 25 bp, Canis familiaris
ctagataacatgtgccttggctgtc

SEQ ID NO: 70738 - DNA, 25 bp, Canis familiaris
ctagtgatgacgtcagatcccggtc

SEQ ID NO: 70739 - DNA, 25 bp, Canis familiaris
ctagatgtgacgtgtctcctgttcc

SEQ ID NO: 70740 - DNA, 25 bp, Canis familiaris
ctagtggggaggtctcgtgaggccg

SEQ ID NO: 70741 - DNA, 25 bp, Canis familiaris
ctagcggaggggtcctccgggcagc

SEQ ID NO: 70742 - DNA, 25 bp, Canis familiaris
ctacatctccgtgtactccgtggag

SEQ ID NO: 70743 - DNA, 25 bp, Canis familiaris
ctaagcccatgtggtagcccagggg

SEQ ID NO: 70744 - DNA, 25 bp, Canis familiaris
ctgacccttgatttcagcccaggtc

SEQ ID NO: 70745 - DNA, 25 bp, Canis familiaris
ctacttcctgtgtcatgacctcagg

SEQ ID NO: 70746 - DNA, 25 bp, Canis familiaris
ctacctctcaggcctgaacgagatc

SEQ ID NO: 70747 - DNA, 25 bp, Canis familiaris
ctagccacctgaggaagacccatcg

SEQ ID NO: 70748 - DNA, 25 bp, Canis familiaris
ctactacctggactggatccaccag

SEQ ID NO: 70749 - DNA, 25 bp, Canis familiaris
ctaggacgctgcagcgaatccaccg

SEQ ID NO: 70750 - DNA, 25 bp, Canis familiaris
ctacgacaggaagcacacaatcacg

SEQ ID NO: 70751 - DNA, 25 bp, Canis familiaris
ctactgggaactgcaacaaactggc

SEQ ID NO: 70752 - DNA, 25 bp, Canis familiaris
ctaccctagcacgaaactaattcga

SEQ ID NO: 70753 - DNA, 25 bp, Canis familiaris
ctaccttcccaaaacaaattcacat

SEQ ID NO: 70754 - DNA, 25 bp, Canis familiaris
ctagccttctccccaaaatatgaat

SEQ ID NO: 70755 - DNA, 25 bp, Canis familiaris
ctacctttcatgtccaaaatgttga

SEQ ID NO: 70756 - DNA, 25 bp, Canis familiaris
ctactctctgtctctataattttga

SEQ ID NO: 70757 - DNA, 25 bp, Canis familiaris
ctaatgcatatgttttaccattttg

SEQ ID NO: 70758 - DNA, 25 bp, Canis familiaris
ctagatgaaattgaaggcttgatat

SEQ ID NO: 70759 - DNA, 25 bp, Canis familiaris
ctagcacaaacagaagctcttactc

SEQ ID NO: 70760 - DNA, 25 bp, Canis familiaris
ctagccaaccatgctagtcctagat

SEQ ID NO: 70761 - DNA, 25 bp, Canis familiaris
ctcacaagacctgtacttcaagtac

SEQ ID NO: 70762 - DNA, 25 bp, Canis familiaris
ctagaagccacctcactttagatca

SEQ ID NO: 70763 - DNA, 25 bp, Canis familiaris
ctacagggcagttccactcttaata

SEQ ID NO: 70764 - DNA, 25 bp, Canis familiaris
ctgatgagggcctgccctttactcg

SEQ ID NO: 70765 - DNA, 25 bp, Canis familiaris
cgtgactggctagctgcctgtattt

SEQ ID NO: 70766 - DNA, 25 bp, Canis familiaris
cggcaccagtcagaccgatatgtca

SEQ ID NO: 70767 - DNA, 25 bp, Canis familiaris
ctagcctattcagttcctttgtttg

SEQ ID NO: 70768 - DNA, 25 bp, Canis familiaris
ctaggtgcttcatatctttccattt

SEQ ID NO: 70769 - DNA, 25 bp, Canis familiaris
ctaggatttgatggatcttgtctca

SEQ ID NO: 70770 - DNA, 25 bp, Canis familiaris
ctagagcatattttgatttaccatc

SEQ ID NO: 70771 - DNA, 25 bp, Canis familiaris
ctagatgctcttactgacttccagc

SEQ ID NO: 70772 - DNA, 25 bp, Canis familiaris
ctagagttctcctactagccacata

SEQ ID NO: 70773 - DNA, 25 bp, Canis familiaris
ctagaggattcctagcccagtgcta

SEQ ID NO: 70774 - DNA, 25 bp, Canis familiaris
ctagaagtgcagcctgacccagttt

SEQ ID NO: 70775 - DNA, 25 bp, Canis familiaris
ctaaacgatgtccacccagattgtc

SEQ ID NO: 70776 - DNA, 25 bp, Canis familiaris
ctaccagtatgtcacccaactgctg

SEQ ID NO: 70777 - DNA, 25 bp, Canis familiaris
ctaccgtcatagcaccatatatctg

SEQ ID NO: 70778 - DNA, 25 bp, Canis familiaris
ctcacctggaagcagccttttcaag

SEQ ID NO: 70779 - DNA, 25 bp, Canis familiaris
ctagtcttgaagccctcatttagac

SEQ ID NO: 70780 - DNA, 25 bp, Canis familiaris
ctagcttatgacaccatcttccaga

SEQ ID NO: 70781 - DNA, 25 bp, Canis familiaris
ctaccttgactacccttgagataat

SEQ ID NO: 70782 - DNA, 25 bp, Canis familiaris
ctaccacaaccacctcgtgagaaat

SEQ ID NO: 70783 - DNA, 25 bp, Canis familiaris
ctaccacattcttgctctctaaaaa

SEQ ID NO: 70784 - DNA, 25 bp, Canis familiaris
ctaccacagcttgacctacatagaa

SEQ ID NO: 70785 - DNA, 25 bp, Canis familiaris
ctagcctagtccgcttcagatagaa

SEQ ID NO: 70786 - DNA, 25 bp, Canis familiaris
ctcacctggtacccttcagatagtt

SEQ ID NO: 70787 - DNA, 25 bp, Canis familiaris
ctagccctgtaccctgaaaagtgaa

SEQ ID NO: 70788 - DNA, 25 bp, Canis familiaris
ctaccacgcgtccactatgacgagg

SEQ ID NO: 70789 - DNA, 25 bp, Canis familiaris
ctagcacacggtgatcttgcatccc

SEQ ID NO: 70790 - DNA, 25 bp, Canis familiaris
ctagcagcacgtgacgcttgttctc

SEQ ID NO: 70791 - DNA, 25 bp, Canis familiaris
ctagatcgagtggccaggtcttctc

SEQ ID NO: 70792 - DNA, 25 bp, Canis familiaris
ctagaggcagtacagactattgtct

SEQ ID NO: 70793 - DNA, 25 bp, Canis familiaris
ctagcaacactacaactcctagctc

SEQ ID NO: 70794 - DNA, 25 bp, Canis familiaris
ctaactacgagtagactactgagcc

SEQ ID NO: 70795 - DNA, 25 bp, Canis familiaris
ctacctgcctgggaacagactgccc

SEQ ID NO: 70796 - DNA, 25 bp, Canis familiaris
ctagcacagcgggaacacagaggca

SEQ ID NO: 70797 - DNA, 25 bp, Canis familiaris
ctagctctggtgcatcagggggcaa

SEQ ID NO: 70798 - DNA, 25 bp, Canis familiaris
ctagtgcatgtcctgccagggggac

SEQ ID NO: 70799 - DNA, 25 bp, Canis familiaris
ctacgagacctgcaggaggcgttct

SEQ ID NO: 70800 - DNA, 25 bp, Canis familiaris
ctacgagactctgtgccaggagctg

SEQ ID NO: 70801 - DNA, 25 bp, Canis familiaris
ctcaaagcatttgcccagggcgtat

SEQ ID NO: 70802 - DNA, 25 bp, Canis familiaris
ctaatcagatcttctctcgggagga

SEQ ID NO: 70803 - DNA, 25 bp, Canis familiaris
ctaacagttatctcaggggtgccac

SEQ ID NO: 70804 - DNA, 25 bp, Canis familiaris
ctaacttattgcccgggcagtgccc

SEQ ID NO: 70805 - DNA, 25 bp, Canis familiaris
ctaaggctttagagggagatcccga

SEQ ID NO: 70806 - DNA, 25 bp, Canis familiaris
ctaacgtttagcagtcagagcggcc

SEQ ID NO: 70807 - DNA, 25 bp, Canis familiaris
ctcaaagcttaacaacaagccccac

SEQ ID NO: 70808 - DNA, 25 bp, Canis familiaris
ctcacagacttggactaatccccct

SEQ ID NO: 70809 - DNA, 25 bp, Canis familiaris
ctacgacggcgccgattacatcgcc

SEQ ID NO: 70810 - DNA, 25 bp, Canis familiaris
ctacaactacaggtcttactgcccc

SEQ ID NO: 70811 - DNA, 25 bp, Canis familiaris
ctcaacctaaggagtcactgctaca

SEQ ID NO: 70812 - DNA, 25 bp, Canis familiaris
ctaaggtcagggggtcctacacaga

SEQ ID NO: 70813 - DNA, 25 bp, Canis familiaris
ctcacgggcacaacaggaaccaacg

SEQ ID NO: 70814 - DNA, 25 bp, Canis familiaris
cccgggtgccaatgaaccaaccaat

SEQ ID NO: 70815 - DNA, 25 bp, Canis familiaris
cggcgggctgcctaaacaaaactgc

SEQ ID NO: 70816 - DNA, 25 bp, Canis familiaris
cgaccgtcgccaacagaaacaacgc

SEQ ID NO: 70817 - DNA, 25 bp, Canis familiaris
ctacgctgctcgacttgcaaaacaa

SEQ ID NO: 70818 - DNA, 25 bp, Canis familiaris
ctcagcctctcccaattagaacaga

SEQ ID NO: 70819 - DNA, 25 bp, Canis familiaris
ctagcttctctgcattaaacacaca

SEQ ID NO: 70820 - DNA, 25 bp, Canis familiaris
ctagagtgtgcacattaccaacaga

SEQ ID NO: 70821 - DNA, 25 bp, Canis familiaris
ctagaggatctccattccctaaata

SEQ ID NO: 70822 - DNA, 25 bp, Canis familiaris
ctagaggtcatcattccttcattca

SEQ ID NO: 70823 - DNA, 25 bp, Canis familiaris
ctagagcagtgtctgccgcttttca

SEQ ID NO: 70824 - DNA, 25 bp, Canis familiaris
ctagaagtgtccactgcacctgtca

SEQ ID NO: 70825 - DNA, 25 bp, Canis familiaris
ctaagtgcctcaggactgcaccttg

SEQ ID NO: 70826 - DNA, 25 bp, Canis familiaris
ctgaaatcctcactgcacacatgag

SEQ ID NO: 70827 - DNA, 25 bp, Canis familiaris
ctaaatctcaagcaccagcggacct

SEQ ID NO: 70828 - DNA, 25 bp, Canis familiaris
ctaatattcggctagctcaggctac

SEQ ID NO: 70829 - DNA, 25 bp, Canis familiaris
ctaagtacgcacggccggtacagtg

SEQ ID NO: 70830 - DNA, 25 bp, Canis familiaris
ctaagtacgcacggccggtacagtg

SEQ ID NO: 70831 - DNA, 25 bp, Canis familiaris
ctacgtatagagttgccttgtacct

SEQ ID NO: 70832 - DNA, 25 bp, Canis familiaris
ctactcctacaattcacttttctgc

SEQ ID NO: 70833 - DNA, 25 bp, Canis familiaris
ctaactctaacttatcttctgctct

SEQ ID NO: 70834 - DNA, 25 bp, Canis familiaris
ctcaacctagtttccaactggaaag

SEQ ID NO: 70835 - DNA, 25 bp, Canis familiaris
ctaactattttgtgcaatggcgaaa

SEQ ID NO: 70836 - DNA, 25 bp, Canis familiaris
ctagacttcttttagagatcataga

SEQ ID NO: 70837 - DNA, 25 bp, Canis familiaris
ctaacctttcatcagatgcccagta

SEQ ID NO: 70838 - DNA, 25 bp, Canis familiaris
ctaacttatcgttcgtgctctcacg

SEQ ID NO: 70839 - DNA, 25 bp, Canis familiaris
ctagatcttatgtgtctgagtcccg

SEQ ID NO: 70840 - DNA, 25 bp, Canis familiaris
ctagatctgttttttgagccctctg

SEQ ID NO: 70841 - DNA, 25 bp, Canis familiaris
ctagtcaacttcttgtttcactctg

SEQ ID NO: 70842 - DNA, 25 bp, Canis familiaris
ctacagccacttctgttctatttcc

SEQ ID NO: 70843 - DNA, 25 bp, Canis familiaris
ctagcaccctttagtcaggttgcca

SEQ ID NO: 70844 - DNA, 25 bp, Canis familiaris
ctaccacctgtgtgttgggatctcg

SEQ ID NO: 70845 - DNA, 25 bp, Canis familiaris
ctaaatgcgcatggtatgttttgat

SEQ ID NO: 70846 - DNA, 25 bp, Canis familiaris
ctactgtccatgtctatactttgat

SEQ ID NO: 70847 - DNA, 25 bp, Canis familiaris
ctactagcaccctaatcttggactt

SEQ ID NO: 70848 - DNA, 25 bp, Canis familiaris
ctactggcacatcccaacagggacc

SEQ ID NO: 70849 - DNA, 25 bp, Canis familiaris
ctacgagcacttcaatcagcaccac

SEQ ID NO: 70850 - DNA, 25 bp, Canis familiaris
ctggcattgccctcaacgaccactt

SEQ ID NO: 70851 - DNA, 25 bp, Canis familiaris
cggtactaacatgacgtgccacctg

SEQ ID NO: 70852 - DNA, 25 bp, Canis familiaris
ctggtagtaactttctcccagcgtt

SEQ ID NO: 70853 - DNA, 25 bp, Canis familiaris
ctggtaggggtgcactcaccctgtt

SEQ ID NO: 70854 - DNA, 25 bp, Canis familiaris
ctagtagagtgggccctccactcct

SEQ ID NO: 70855 - DNA, 25 bp, Canis familiaris
ctagtcaagaggacccggttcctgc

SEQ ID NO: 70856 - DNA, 25 bp, Canis familiaris
ctagaccagggcattcccattcttg

SEQ ID NO: 70857 - DNA, 25 bp, Canis familiaris
ctgaggacaacgatcccgattcctg

SEQ ID NO: 70858 - DNA, 25 bp, Canis familiaris
ctcaggcaaaccacactggcttcta

SEQ ID NO: 70859 - DNA, 25 bp, Canis familiaris
ctcaaatgaagccaagcacccttta

SEQ ID NO: 70860 - DNA, 25 bp, Canis familiaris
ctcagtgggacaaagcaaccctaca

SEQ ID NO: 70861 - DNA, 25 bp, Canis familiaris
ctagctgaattaatgccaaccctaa

SEQ ID NO: 70862 - DNA, 25 bp, Canis familiaris
ctagctgacaagagtcacaccctct

SEQ ID NO: 70863 - DNA, 25 bp, Canis familiaris
ctagcagaaactaatcgagccccct

SEQ ID NO: 70864 - DNA, 25 bp, Canis familiaris
ctagcaggaactaatcgagccccct

SEQ ID NO: 70865 - DNA, 25 bp, Canis familiaris
ctagaggaaatgaacacttctgtcc

SEQ ID NO: 70866 - DNA, 25 bp, Canis familiaris
ctaatggacaatatcaccctctgcc

SEQ ID NO: 70867 - DNA, 25 bp, Canis familiaris
ctaatggactagattccagccatcc

SEQ ID NO: 70868 - DNA, 25 bp, Canis familiaris
ctaatggcaaggatctgcccctctg

SEQ ID NO: 70869 - DNA, 25 bp, Canis familiaris
ctagaggagggcctgggctaccagc

SEQ ID NO: 70870 - DNA, 25 bp, Canis familiaris
ctgcgagggacgcgttcttcagcag

SEQ ID NO: 70871 - DNA, 25 bp, Canis familiaris
ctagaaagcatccggttctccaggt

SEQ ID NO: 70872 - DNA, 25 bp, Canis familiaris
ctacaacctcacagtttccagagga

SEQ ID NO: 70873 - DNA, 25 bp, Canis familiaris
ctaaggctccactgttactatgagg

SEQ ID NO: 70874 - DNA, 25 bp, Canis familiaris
ctacagagccccgcttactaaaagc

SEQ ID NO: 70875 - DNA, 25 bp, Canis familiaris
ctcacttgcacggccacgaattaaa

SEQ ID NO: 70876 - DNA, 25 bp, Canis familiaris
ctacttccagccaaacctcaaaata

SEQ ID NO: 70877 - DNA, 25 bp, Canis familiaris
ctacttccgtgctacttctagacta

SEQ ID NO: 70878 - DNA, 25 bp, Canis familiaris
ctaattccatgtctttgccaacgta

SEQ ID NO: 70879 - DNA, 25 bp, Canis familiaris
ctagctgtccttggagaattaaagt

SEQ ID NO: 70880 - DNA, 25 bp, Canis familiaris
ctcggtcccaggtgttaacgtgcac

SEQ ID NO: 70881 - DNA, 25 bp, Canis familiaris
ctccattccccgagtggaacggaga

SEQ ID NO: 70882 - DNA, 25 bp, Canis familiaris
ctacaccccacgagtgatggtcgga

SEQ ID NO: 70883 - DNA, 25 bp, Canis familiaris
ctacctcgccctgtatatgtgtggc

SEQ ID NO: 70884 - DNA, 25 bp, Canis familiaris
ctaccttcccaccagcaatgtgtgg

SEQ ID NO: 70885 - DNA, 25 bp, Canis familiaris
ctagccattcataaccgcaagggac

SEQ ID NO: 70886 - DNA, 25 bp, Canis familiaris
ctaccatctcataatcaacaactaa

SEQ ID NO: 70887 - DNA, 25 bp, Canis familiaris
ctacctacatctacatacgcaacta

SEQ ID NO: 70888 - DNA, 25 bp, Canis familiaris
ctacttcacatttctctacaactaa

SEQ ID NO: 70889 - DNA, 25 bp, Canis familiaris
ctaccccatgtacctaagctatata

SEQ ID NO: 70890 - DNA, 25 bp, Canis familiaris
ctaccactatgaagcggaagtatga

SEQ ID NO: 70891 - DNA, 25 bp, Canis familiaris
ctcaggcactcagccgaacacttaa

SEQ ID NO: 70892 - DNA, 25 bp, Canis familiaris
ctcggcccatgtggtcaaacgtaca

SEQ ID NO: 70893 - DNA, 25 bp, Canis familiaris
ctcggcccagctaacaaacgtagga

SEQ ID NO: 70894 - DNA, 25 bp, Canis familiaris
gctaggcccctaaaagaagaagctc

SEQ ID NO: 70895 - DNA, 25 bp, Canis familiaris
ctacccctctcaaatagacagcctg

SEQ ID NO: 70896 - DNA, 25 bp, Canis familiaris
ctagctcacctctgggagaagcctc

SEQ ID NO: 70897 - DNA, 25 bp, Canis familiaris
ctagctccactctgatgtgtgagag

SEQ ID NO: 70898 - DNA, 25 bp, Canis familiaris
ctagccttccacgagattgagagaa

SEQ ID NO: 70899 - DNA, 25 bp, Canis familiaris
ctagcacccaacctgagctcaggaa

SEQ ID NO: 70900 - DNA, 25 bp, Canis familiaris
ctagcagccttcctgtgaactggag

SEQ ID NO: 70901 - DNA, 25 bp, Canis familiaris
ctagacatgtctctggtcacggggg

SEQ ID NO: 70902 - DNA, 25 bp, Canis familiaris
ctacaagtcccgaatccaggtgcgt

SEQ ID NO: 70903 - DNA, 25 bp, Canis familiaris
ctacgagaactgggaccggagcctt

SEQ ID NO: 70904 - DNA, 25 bp, Canis familiaris
ctaagaaagcctcacctgcagagcc

SEQ ID NO: 70905 - DNA, 25 bp, Canis familiaris
ctaagccaacttcccagagagatcc

SEQ ID NO: 70906 - DNA, 25 bp, Canis familiaris
ctagagcacgcacatctccaagaga

SEQ ID NO: 70907 - DNA, 25 bp, Canis familiaris
ctaccaccaggaatcagttgatgag

SEQ ID NO: 70908 - DNA, 25 bp, Canis familiaris
ctacctctgccgcatatgtatgtga

SEQ ID NO: 70909 - DNA, 25 bp, Canis familiaris
ctaccaccctgaatgcttcatgtgc

SEQ ID NO: 70910 - DNA, 25 bp, Canis familiaris
ctagacaacctcaagcctcagtcag

SEQ ID NO: 70911 - DNA, 25 bp, Canis familiaris
ctctgatcaatgtctccgactgcag

SEQ ID NO: 70912 - DNA, 25 bp, Canis familiaris
ctcagactttctgaactcccaaggt

SEQ ID NO: 70913 - DNA, 25 bp, Canis familiaris
ctaccaaccttattccctcaaggat

SEQ ID NO: 70914 - DNA, 25 bp, Canis familiaris
ctacctacctggttgatcctgccag

SEQ ID NO: 70915 - DNA, 25 bp, Canis familiaris
ctagcaggacactggtgctttgccg

SEQ ID NO: 70916 - DNA, 25 bp, Canis familiaris
ctcagtgaaaccgttgacttgccga

SEQ ID NO: 70917 - DNA, 25 bp, Canis familiaris
ctcagtaaaccactctgatttagtg

SEQ ID NO: 70918 - DNA, 25 bp, Canis familiaris
ctcttttgcccactgtgagttactt

SEQ ID NO: 70919 - DNA, 25 bp, Canis familiaris
ctcacttgggcatcattggtacctg

SEQ ID NO: 70920 - DNA, 25 bp, Canis familiaris
ctacattcagagtgctgggtttcta

SEQ ID NO: 70921 - DNA, 25 bp, Canis familiaris
ctacaatcagagtgccggttcttac

SEQ ID NO: 70922 - DNA, 25 bp, Canis familiaris
ctaataaaagatccagcactttttc

SEQ ID NO: 70923 - DNA, 25 bp, Canis familiaris
ctagaatataacaccgcttctgtgt

SEQ ID NO: 70924 - DNA, 25 bp, Canis familiaris
ctaaataaagtgttgcctctcttgt

SEQ ID NO: 70925 - DNA, 25 bp, Canis familiaris
ctaattagcaggtggcctccttcaa

SEQ ID NO: 70926 - DNA, 25 bp, Canis familiaris
ctaattacgatccaggccaccaagg

SEQ ID NO: 70927 - DNA, 25 bp, Canis familiaris
ctacactacatgacaaatctaccaa

SEQ ID NO: 70928 - DNA, 25 bp, Canis familiaris
ctacatttatgcaacagcctcaaaa

SEQ ID NO: 70929 - DNA, 25 bp, Canis familiaris
ctacaacatcacaactgcagcaaac

SEQ ID NO: 70930 - DNA, 25 bp, Canis familiaris
ctaacacatcactactgaatcgttc

SEQ ID NO: 70931 - DNA, 25 bp, Canis familiaris
ctaccacacttaccagatgctcata

SEQ ID NO: 70932 - DNA, 25 bp, Canis familiaris
ctacagaccttcatcaagctgctcc

SEQ ID NO: 70933 - DNA, 25 bp, Canis familiaris
ctacaatcctctactcaaggcgctt

SEQ ID NO: 70934 - DNA, 25 bp, Canis familiaris
ctacatatgcctgactaagctgaca

SEQ ID NO: 70935 - DNA, 25 bp, Canis familiaris
ctacttgctcatttactactcagca

SEQ ID NO: 70936 - DNA, 25 bp, Canis familiaris
ctacatacgcaactacacacataca

SEQ ID NO: 70937 - DNA, 25 bp, Canis familiaris
ctaccctcactgcaacaaatcacgg

SEQ ID NO: 70938 - DNA, 25 bp, Canis familiaris
ctacccatcagcacaacctgtacag

SEQ ID NO: 70939 - DNA, 25 bp, Canis familiaris
ctaccaatcacacaacctgtacagt

SEQ ID NO: 70940 - DNA, 25 bp, Canis familiaris
ctaccagatggactgccacgctgta

SEQ ID NO: 70941 - DNA, 25 bp, Canis familiaris
ctaccagggtgcctactgcatggag

SEQ ID NO: 70942 - DNA, 25 bp, Canis familiaris
ctaccaggctgtgctgatccatgga

SEQ ID NO: 70943 - DNA, 25 bp, Canis familiaris
ctaccaggatgaggcctcaccgatg

SEQ ID NO: 70944 - DNA, 25 bp, Canis familiaris
ctacacttgataggattcactatgt

SEQ ID NO: 70945 - DNA, 25 bp, Canis familiaris
ctagcctgcatatgtgttcactttt

SEQ ID NO: 70946 - DNA, 25 bp, Canis familiaris
ctagcctttttattcctgtgtgtac

SEQ ID NO: 70947 - DNA, 25 bp, Canis familiaris
ctagcctagattttcatcctgttct

SEQ ID NO: 70948 - DNA, 25 bp, Canis familiaris
ctacccgagatatgcatcctgtgtc

SEQ ID NO: 70949 - DNA, 25 bp, Canis familiaris
ctacccaggctgggctactggagca

SEQ ID NO: 70950 - DNA, 25 bp, Canis familiaris
ctacaatgagggagctggtgaagcc

SEQ ID NO: 70951 - DNA, 25 bp, Canis familiaris
ctacgtggcctggcagctgcagtaa

SEQ ID NO: 70952 - DNA, 25 bp, Canis familiaris
ctagcagccagcaggcctgcattaa

SEQ ID NO: 70953 - DNA, 25 bp, Canis familiaris
ctactgccagcaacgctgctgcagt

SEQ ID NO: 70954 - DNA, 25 bp, Canis familiaris
ctacctcagcatttcctggaaaggg

SEQ ID NO: 70955 - DNA, 25 bp, Canis familiaris
ctactctgacattgctcctggcaaa

SEQ ID NO: 70956 - DNA, 25 bp, Canis familiaris
ctacaataaaggcctggagcagcaa

SEQ ID NO: 70957 - DNA, 25 bp, Canis familiaris
ctagaagagcagcgggagcagcagc

SEQ ID NO: 70958 - DNA, 25 bp, Canis familiaris
ctaaagagcaatgtggggcagccca

SEQ ID NO: 70959 - DNA, 25 bp, Canis familiaris
ctaaggccacttagggcggccgagc

SEQ ID NO: 70960 - DNA, 25 bp, Canis familiaris
ctaaggacctttgtgctggggctga

SEQ ID NO: 70961 - DNA, 25 bp, Canis familiaris
ctgaaggaccgtccattctttgccg

SEQ ID NO: 70962 - DNA, 25 bp, Canis familiaris
ctacagaacagctccaggttctacg

SEQ ID NO: 70963 - DNA, 25 bp, Canis familiaris
ctacaaatctgctcctgttacatcc

SEQ ID NO: 70964 - DNA, 25 bp, Canis familiaris
ctaatatattgctcaccttacaccc

SEQ ID NO: 70965 - DNA, 25 bp, Canis familiaris
ctagctttgtgatccctgtagcaac

SEQ ID NO: 70966 - DNA, 25 bp, Canis familiaris
ctactgctctttgtcactatactac

SEQ ID NO: 70967 - DNA, 25 bp, Canis familiaris
ctactgcttttcttcatccaaaata

SEQ ID NO: 70968 - DNA, 25 bp, Canis familiaris
ctacctgctctttggaccacaatga

SEQ ID NO: 70969 - DNA, 25 bp, Canis familiaris
ctcacctctaaataccatcacatta

SEQ ID NO: 70970 - DNA, 25 bp, Canis familiaris
ctaccctgccagtgaacaccaatga

SEQ ID NO: 70971 - DNA, 25 bp, Canis familiaris
ctacgaccctgctgaggagctacat

SEQ ID NO: 70972 - DNA, 25 bp, Canis familiaris
ctaccagccagccgggaatgtacaa

SEQ ID NO: 70973 - DNA, 25 bp, Canis familiaris
ctacgagcccatccggaaaggccag

SEQ ID NO: 70974 - DNA, 25 bp, Canis familiaris
ctacggccgcaagggggtggccatc

SEQ ID NO: 70975 - DNA, 25 bp, Canis familiaris
ctacgccctgacagtgctggtgggc

SEQ ID NO: 70976 - DNA, 25 bp, Canis familiaris
ctacctcttcaactctgtggtgaac

SEQ ID NO: 70977 - DNA, 25 bp, Canis familiaris
ctcaagtgttctccactgggtaatg

SEQ ID NO: 70978 - DNA, 25 bp, Canis familiaris
ctcaaagacttgcacaggccaaatt

SEQ ID NO: 70979 - DNA, 25 bp, Canis familiaris
ctctaagactgggttagcctaaact

SEQ ID NO: 70980 - DNA, 25 bp, Canis familiaris
cgtacccggctttgcagccgaattt

SEQ ID NO: 70981 - DNA, 25 bp, Canis familiaris
cgcgacccggcgcggtggaaatttg

SEQ ID NO: 70982 - DNA, 25 bp, Canis familiaris
ctcacgggggcctggggaagttgtg

SEQ ID NO: 70983 - DNA, 25 bp, Canis familiaris
ctcggcaggggtgttggggagtggc

SEQ ID NO: 70984 - DNA, 25 bp, Canis familiaris
ctagctcaggggatctctgggtggc

SEQ ID NO: 70985 - DNA, 25 bp, Canis familiaris
ctaccagtgaacttgcttgaaggcc

SEQ ID NO: 70986 - DNA, 25 bp, Canis familiaris
ctacagcgtgacccatgcttcaaga

SEQ ID NO: 70987 - DNA, 25 bp, Canis familiaris
ctaagcatgtggtctctgtgaagga

SEQ ID NO: 70988 - DNA, 25 bp, Canis familiaris
ctactggagcgctttggcaatgcca

SEQ ID NO: 70989 - DNA, 25 bp, Canis familiaris
ctacgtggcctacagcaacagctgc

SEQ ID NO: 70990 - DNA, 25 bp, Canis familiaris
ctacgtggtcaacatcacctacaac

SEQ ID NO: 70991 - DNA, 25 bp, Canis familiaris
ctacttctgtcatggacccaacact

SEQ ID NO: 70992 - DNA, 25 bp, Canis familiaris
ctacgtgggcgacgaggcccagagc

SEQ ID NO: 70993 - DNA, 25 bp, Canis familiaris
ctaccgaatgcgctgaggcggcgcc

SEQ ID NO: 70994 - DNA, 25 bp, Canis familiaris
ctacctgcaattatgagatgtggac

SEQ ID NO: 70995 - DNA, 25 bp, Canis familiaris
ctactctgagttacatagactgtgt

SEQ ID NO: 70996 - DNA, 25 bp, Canis familiaris
ctagcgctagtatcataaagctggc

SEQ ID NO: 70997 - DNA, 25 bp, Canis familiaris
ctacccagtatcttaaaccagcttg

SEQ ID NO: 70998 - DNA, 25 bp, Canis familiaris
ctactaacctctccagaaaccttga

SEQ ID NO: 70999 - DNA, 25 bp, Canis familiaris
ctactaacctcacccaggtactgtg

SEQ ID NO: 71000 - DNA, 25 bp, Canis familiaris
ctgcacgagacaacacccgttaatg

SEQ ID NO: 71001 - DNA, 25 bp, Canis familiaris
ctacgggcaaacgggcagctgaaga

SEQ ID NO: 71002 - DNA, 25 bp, Canis familiaris
ctaatggggaacgctgactcctgca

SEQ ID NO: 71003 - DNA, 25 bp, Canis familiaris
ctactgcgagtgaggacgcctccaa

SEQ ID NO: 71004 - DNA, 25 bp, Canis familiaris
ctacgcagatgacatggacgccacc

SEQ ID NO: 71005 - DNA, 25 bp, Canis familiaris
ctaccagaagcctgaagctgcctca

SEQ ID NO: 71006 - DNA, 25 bp, Canis familiaris
ctcacacagtaagtagggcgcctaa

SEQ ID NO: 71007 - DNA, 25 bp, Canis familiaris
ctacagcgttcaggcacggagacca

SEQ ID NO: 71008 - DNA, 25 bp, Canis familiaris
ctaaggtttggccggtaccagatgt

SEQ ID NO: 71009 - DNA, 25 bp, Canis familiaris
ctaagtgttttgagctttccttgtt

SEQ ID NO: 71010 - DNA, 25 bp, Canis familiaris
ctaaggttgttggtgaagctctttg

SEQ ID NO: 71011 - DNA, 25 bp, Canis familiaris
ctactggctggtaggtcccttttat

SEQ ID NO: 71012 - DNA, 25 bp, Canis familiaris
ctacgatcacgtatacacctattat

SEQ ID NO: 71013 - DNA, 25 bp, Canis familiaris
ctacgtcactgatataagctcctta

SEQ ID NO: 71014 - DNA, 25 bp, Canis familiaris
ctactggttcctaaagctccttcag

SEQ ID NO: 71015 - DNA, 25 bp, Canis familiaris
ctactttttgctgcagacctctttg

SEQ ID NO: 71016 - DNA, 25 bp, Canis familiaris
ctacctgtacctgagcaccatggag

SEQ ID NO: 71017 - DNA, 25 bp, Canis familiaris
ctacctggagacgacgtgcgtggag

SEQ ID NO: 71018 - DNA, 25 bp, Canis familiaris
ctaccatggtgaccacgggtgacgg

SEQ ID NO: 71019 - DNA, 25 bp, Canis familiaris
ctcaccaggtcatccgagtggtcgg

SEQ ID NO: 71020 - DNA, 25 bp, Canis familiaris
ctacgcaggggacgctgagtggctc

SEQ ID NO: 71021 - DNA, 25 bp, Canis familiaris
ctagccctgctggcatgggttgttc

SEQ ID NO: 71022 - DNA, 25 bp, Canis familiaris
ctaccctgttatctattgtcatcta

SEQ ID NO: 71023 - DNA, 25 bp, Canis familiaris
ctaaacgtgccatctcattgtgctt

SEQ ID NO: 71024 - DNA, 25 bp, Canis familiaris
ctaaacctccagtttgaacttcctg

SEQ ID NO: 71025 - DNA, 25 bp, Canis familiaris
ctaaatcacctccgttgaactcagc

SEQ ID NO: 71026 - DNA, 25 bp, Canis familiaris
ctaaaccctccgggcaagcaaggag

SEQ ID NO: 71027 - DNA, 25 bp, Canis familiaris
ctaaaccttttggccagagaatgaa

SEQ ID NO: 71028 - DNA, 25 bp, Canis familiaris
ctaaactgctttctgctcatgggaa

SEQ ID NO: 71029 - DNA, 25 bp, Canis familiaris
ctcatgaatctcagcacctgtctgg

SEQ ID NO: 71030 - DNA, 25 bp, Canis familiaris
ctcatgcacagaaagtactattagt

SEQ ID NO: 71031 - DNA, 25 bp, Canis familiaris
ctcgtggaaagggccatgggctccc

SEQ ID NO: 71032 - DNA, 25 bp, Canis familiaris
ctaaggaacggaggcgagcggcccg

SEQ ID NO: 71033 - DNA, 25 bp, Canis familiaris
gctacggacccgtgtgaagaccacg

SEQ ID NO: 71034 - DNA, 25 bp, Canis familiaris
gtcggggttggctgtggcaaaacag

SEQ ID NO: 71035 - DNA, 25 bp, Canis familiaris
ctcccggtttcagtgaagtaaacag

SEQ ID NO: 71036 - DNA, 25 bp, Canis familiaris
ctctgccggctgtgaagtaataaag

SEQ ID NO: 71037 - DNA, 25 bp, Canis familiaris
ctgctcaaattgcgggtcaacataa

SEQ ID NO: 71038 - DNA, 25 bp, Canis familiaris
ctccaaaggtatgcgaagcctgcaa

SEQ ID NO: 71039 - DNA, 25 bp, Canis familiaris
ctacgaaggatatggacagactgaa

SEQ ID NO: 71040 - DNA, 25 bp, Canis familiaris
ctaccagaggaatgagccagccgcc

SEQ ID NO: 71041 - DNA, 25 bp, Canis familiaris
ctacaataaagatctccaggccctg

SEQ ID NO: 71042 - DNA, 25 bp, Canis familiaris
ctcaattacagaaaaccaggtccat

SEQ ID NO: 71043 - DNA, 25 bp, Canis familiaris
ctcaaggccaggaaaatcgtgtcct

SEQ ID NO: 71044 - DNA, 25 bp, Canis familiaris
ctacggccagaagaacctgctcttc

SEQ ID NO: 71045 - DNA, 25 bp, Canis familiaris
ctacccgaaagcatacatctgctct

SEQ ID NO: 71046 - DNA, 25 bp, Canis familiaris
ctaccgcccaggatagcaggcctga

SEQ ID NO: 71047 - DNA, 25 bp, Canis familiaris
ctaacccctggcaccagcaggtaat

SEQ ID NO: 71048 - DNA, 25 bp, Canis familiaris
ctaaccctctgttcccagagactac

SEQ ID NO: 71049 - DNA, 25 bp, Canis familiaris
ctaacccaggtctcctgaagtctcc

SEQ ID NO: 71050 - DNA, 25 bp, Canis familiaris
ctacccacatggacctcggagagtc

SEQ ID NO: 71051 - DNA, 25 bp, Canis familiaris
ctacctcctgataccctggagatgc

SEQ ID NO: 71052 - DNA, 25 bp, Canis familiaris
ctacaccagctgaatgccctattgg

SEQ ID NO: 71053 - DNA, 25 bp, Canis familiaris
ctcaccagagccaccgtgactggag

SEQ ID NO: 71054 - DNA, 25 bp, Canis familiaris
ctaatgcagcccaccaattggagaa

SEQ ID NO: 71055 - DNA, 25 bp, Canis familiaris
ctcaatgcccccgtacggagaaaca

SEQ ID NO: 71056 - DNA, 25 bp, Canis familiaris
ctacctcccatctcaggagaccaaa

SEQ ID NO: 71057 - DNA, 25 bp, Canis familiaris
ctacctcacctcccaggggaagagg

SEQ ID NO: 71058 - DNA, 25 bp, Canis familiaris
ctacctacctcccaagggtgtgtga

SEQ ID NO: 71059 - DNA, 25 bp, Canis familiaris
ctacccgctctccaaagttgtggtg

SEQ ID NO: 71060 - DNA, 25 bp, Canis familiaris
ctaccctgcaacccaaactggggag

SEQ ID NO: 71061 - DNA, 25 bp, Canis familiaris
ctaccctctctcaaaacctgggaag

SEQ ID NO: 71062 - DNA, 25 bp, Canis familiaris
ctaccccttcagtcaatcgggaccg

SEQ ID NO: 71063 - DNA, 25 bp, Canis familiaris
ctacgcggttttgagctgggatcct

SEQ ID NO: 71064 - DNA, 25 bp, Canis familiaris
ctacgcccttttggacttagatgcc

SEQ ID NO: 71065 - DNA, 25 bp, Canis familiaris
ctacgcacgcttgctcttttagaga

SEQ ID NO: 71066 - DNA, 25 bp, Canis familiaris
ctactgcagtctttgctcttattcc

SEQ ID NO: 71067 - DNA, 25 bp, Canis familiaris
ctaagcagctcgtgccttcaggagc

SEQ ID NO: 71068 - DNA, 25 bp, Canis familiaris
ctaacagctggcgtccctgaagaaa

SEQ ID NO: 71069 - DNA, 25 bp, Canis familiaris
ctacacgcgtccaaccgacaaggac

SEQ ID NO: 71070 - DNA, 25 bp, Canis familiaris
ctacccagctccatcattaacagga

SEQ ID NO: 71071 - DNA, 25 bp, Canis familiaris
ctaccatcagcactctgtttcagcc

SEQ ID NO: 71072 - DNA, 25 bp, Canis familiaris
ctactatgcaccaagtgtgtcccct

SEQ ID NO: 71073 - DNA, 25 bp, Canis familiaris
ctacctgctcagaacttgtgtgtcc

SEQ ID NO: 71074 - DNA, 25 bp, Canis familiaris
ctacgctgtagcaatttacttccaa

SEQ ID NO: 71075 - DNA, 25 bp, Canis familiaris
ctacgtgtgcatgatttcctctgca

SEQ ID NO: 71076 - DNA, 25 bp, Canis familiaris
ctacttgtaaattctccctgttgca

SEQ ID NO: 71077 - DNA, 25 bp, Canis familiaris
ctacatatataaattgtcttgctgt

SEQ ID NO: 71078 - DNA, 25 bp, Canis familiaris
ctactgtgcatagtttgcccactgc

SEQ ID NO: 71079 - DNA, 25 bp, Canis familiaris
ctaccatcacacattcaagcacagc

SEQ ID NO: 71080 - DNA, 25 bp, Canis familiaris
ctacctactattaccatccacagag

SEQ ID NO: 71081 - DNA, 25 bp, Canis familiaris
ctcaccccataaagccattcagcga

SEQ ID NO: 71082 - DNA, 25 bp, Canis familiaris
ctcacatcactcaacaggccattgt

SEQ ID NO: 71083 - DNA, 25 bp, Canis familiaris
ctactatctcttcaggctttctgaa

SEQ ID NO: 71084 - DNA, 25 bp, Canis familiaris
ctcatttccttcagatttttgccct

SEQ ID NO: 71085 - DNA, 25 bp, Canis familiaris
ctctttttgcttatgtggtgtccct

SEQ ID NO: 71086 - DNA, 25 bp, Canis familiaris
ctctttattctcacgggttgttgca

SEQ ID NO: 71087 - DNA, 25 bp, Canis familiaris
ctcactgtttccatcggggttggga

SEQ ID NO: 71088 - DNA, 25 bp, Canis familiaris
ctcacttgttccccagatttttggt

SEQ ID NO: 71089 - DNA, 25 bp, Canis familiaris
ctacggctcccgcatgtttagtagg

SEQ ID NO: 71090 - DNA, 25 bp, Canis familiaris
ctacggatacatggctcgtttagta

SEQ ID NO: 71091 - DNA, 25 bp, Canis familiaris
ctacggtattggccgtgtgtgtgtg

SEQ ID NO: 71092 - DNA, 25 bp, Canis familiaris
ctaatggtgaatcgccggtgggggc

SEQ ID NO: 71093 - DNA, 25 bp, Canis familiaris
cgaggaggaacctggactgggacag

SEQ ID NO: 71094 - DNA, 25 bp, Canis familiaris
ctaagaggaccctgaactgggccag

SEQ ID NO: 71095 - DNA, 25 bp, Canis familiaris
ctacgagggtcctgagtctggtggc

SEQ ID NO: 71096 - DNA, 25 bp, Canis familiaris
ctacgagggtcctgagctggttggc

SEQ ID NO: 71097 - DNA, 25 bp, Canis familiaris
ctaaactggtcgagcgatggatttc

SEQ ID NO: 71098 - DNA, 25 bp, Canis familiaris
ctaaccgcctctactgcggagtgtt

SEQ ID NO: 71099 - DNA, 25 bp, Canis familiaris
ctcaaccgcttttctacagtttgtg

SEQ ID NO: 71100 - DNA, 25 bp, Canis familiaris
ctctgaccgttaaccaaggtttgtg

SEQ ID NO: 71101 - DNA, 25 bp, Canis familiaris
ctctacctttaaccaggttgtgttg

SEQ ID NO: 71102 - DNA, 25 bp, Canis familiaris
ctctacctttaaccaagcttgtgtt

SEQ ID NO: 71103 - DNA, 25 bp, Canis familiaris
ctgtactttttctccagttactgta

SEQ ID NO: 71104 - DNA, 25 bp, Canis familiaris
ctgaactttttcagtttatatgtat

SEQ ID NO: 71105 - DNA, 25 bp, Canis familiaris
ctaaccttctttattatgttgtatt

SEQ ID NO: 71106 - DNA, 25 bp, Canis familiaris
ctaccctcagtttttctacttgata

SEQ ID NO: 71107 - DNA, 25 bp, Canis familiaris
ctacgggatctgttttgtacattta

SEQ ID NO: 71108 - DNA, 25 bp, Canis familiaris
ctacctgtacatcttttcacatatc

SEQ ID NO: 71109 - DNA, 25 bp, Canis familiaris
ctacctgacccttatttcctatcag

SEQ ID NO: 71110 - DNA, 25 bp, Canis familiaris
ctcaactaccctatgcaaccttggg

SEQ ID NO: 71111 - DNA, 25 bp, Canis familiaris
ctcacagtaccaaacgattccctgg

SEQ ID NO: 71112 - DNA, 25 bp, Canis familiaris
ctacatctacgacagagaccccgag

SEQ ID NO: 71113 - DNA, 25 bp, Canis familiaris
ctcactcgaagtgaagaccccagtt

SEQ ID NO: 71114 - DNA, 25 bp, Canis familiaris
ctaagcagaagtgagcgcctcgcca

SEQ ID NO: 71115 - DNA, 25 bp, Canis familiaris
ctaagcaaaggccaaccctgccatg

SEQ ID NO: 71116 - DNA, 25 bp, Canis familiaris
ctaacggagagccacatcttggcca

SEQ ID NO: 71117 - DNA, 25 bp, Canis familiaris
ctcaaggaagtggctgctcttgtca

SEQ ID NO: 71118 - DNA, 25 bp, Canis familiaris
ctacgtgagcctgcagttctgctcg

SEQ ID NO: 71119 - DNA, 25 bp, Canis familiaris
ctactggagccactcctattgctgg

SEQ ID NO: 71120 - DNA, 25 bp, Canis familiaris
ctactggacaagcatctctggctgc

SEQ ID NO: 71121 - DNA, 25 bp, Canis familiaris
ctactatatcaaggcactctccaag

SEQ ID NO: 71122 - DNA, 25 bp, Canis familiaris
ctactgtccaatgatgttgccaagt

SEQ ID NO: 71123 - DNA, 25 bp, Canis familiaris
ctacatggtctacatgttccagtat

SEQ ID NO: 71124 - DNA, 25 bp, Canis familiaris
ctacatgttccagtatgactccact

SEQ ID NO: 71125 - DNA, 25 bp, Canis familiaris
ctacgtgtgccaggtgctgcagcac

SEQ ID NO: 71126 - DNA, 25 bp, Canis familiaris
ctacgaatgctgcctggcatctctc

SEQ ID NO: 71127 - DNA, 25 bp, Canis familiaris
ctaagaactgctaggtctctctgcc

SEQ ID NO: 71128 - DNA, 25 bp, Canis familiaris
ctaacaacttgagttgctgccgccg

SEQ ID NO: 71129 - DNA, 25 bp, Canis familiaris
ctcaacaggttcatgtgtgcccagc

SEQ ID NO: 71130 - DNA, 25 bp, Canis familiaris
ctaaaaattgcactctgtcccagcc

SEQ ID NO: 71131 - DNA, 25 bp, Canis familiaris
ctaaccaatagacctaccttcagag

SEQ ID NO: 71132 - DNA, 25 bp, Canis familiaris
ctacaccaacgttctattcttctag

SEQ ID NO: 71133 - DNA, 25 bp, Canis familiaris
ctacgccaggggcccaagttcaagt

SEQ ID NO: 71134 - DNA, 25 bp, Canis familiaris
ctacaccgagggcccgagctgtaga

SEQ ID NO: 71135 - DNA, 25 bp, Canis familiaris
ctaccctgtgggccagttctgggag

SEQ ID NO: 71136 - DNA, 25 bp, Canis familiaris
ctaccctgtatgtctgtccttgggg

SEQ ID NO: 71137 - DNA, 25 bp, Canis familiaris
ctaccctctatattgttcaatagga

SEQ ID NO: 71138 - DNA, 25 bp, Canis familiaris
ctacccttgtcatttgtgcacatta

SEQ ID NO: 71139 - DNA, 25 bp, Canis familiaris
ctacttcttccaactctgacatatt

SEQ ID NO: 71140 - DNA, 25 bp, Canis familiaris
ctaattagccctgcttaatctatgt

SEQ ID NO: 71141 - DNA, 25 bp, Canis familiaris
ctgaaaacacgtgttcattctatgc

SEQ ID NO: 71142 - DNA, 25 bp, Canis familiaris
ctgaaataccctgcttttactctat

SEQ ID NO: 71143 - DNA, 25 bp, Canis familiaris
ctacttacctctacttatctactgt

SEQ ID NO: 71144 - DNA, 25 bp, Canis familiaris
ctactcttttccatgtacatccagt

SEQ ID NO: 71145 - DNA, 25 bp, Canis familiaris
ctacttggtcctaaatatatcacac

SEQ ID NO: 71146 - DNA, 25 bp, Canis familiaris
ctacttgtgttctcttgctatcaaa

SEQ ID NO: 71147 - DNA, 25 bp, Canis familiaris
ctaaatgtgttgtcctcctgtaaaa

SEQ ID NO: 71148 - DNA, 25 bp, Canis familiaris
ctaatagagccaagcacccagtaag

SEQ ID NO: 71149 - DNA, 25 bp, Canis familiaris
ctactaatgccacacacgcgggcaa

SEQ ID NO: 71150 - DNA, 25 bp, Canis familiaris
ctaaatggacacacagcggaggaga

SEQ ID NO: 71151 - DNA, 25 bp, Canis familiaris
ctaactccacacacaggcctgtgaa

SEQ ID NO: 71152 - DNA, 25 bp, Canis familiaris
ctacaactatccacagccagctgga

SEQ ID NO: 71153 - DNA, 25 bp, Canis familiaris
ctactgactgtgacttacacaggag

SEQ ID NO: 71154 - DNA, 25 bp, Canis familiaris
ctacgagctggctttgatcctgaaa

SEQ ID NO: 71155 - DNA, 25 bp, Canis familiaris
ctacaactggcttatgtggctagga

SEQ ID NO: 71156 - DNA, 25 bp, Canis familiaris
ctacgtcggcttcatgagctcggag

SEQ ID NO: 71157 - DNA, 25 bp, Canis familiaris
ctacggcgtggacatgagctgcctg

SEQ ID NO: 71158 - DNA, 25 bp, Canis familiaris
ctaacatgtgggtaagctcgtgctg

SEQ ID NO: 71159 - DNA, 25 bp, Canis familiaris
ctacgcaagtgtgacctccatgctg

SEQ ID NO: 71160 - DNA, 25 bp, Canis familiaris
ctacgagggggtgctgcagctggtg

SEQ ID NO: 71161 - DNA, 25 bp, Canis familiaris
ctaagagctgtggtgtcggggtgtc

SEQ ID NO: 71162 - DNA, 25 bp, Canis familiaris
ctaagaccgtgggctggggatgtcc

SEQ ID NO: 71163 - DNA, 25 bp, Canis familiaris
ctaaacgatggtgcttggtgagtct

SEQ ID NO: 71164 - DNA, 25 bp, Canis familiaris
ctaaacggagcttcactgcgctgag

SEQ ID NO: 71165 - DNA, 25 bp, Canis familiaris
ctacagtcaggagtcccagcatctg

SEQ ID NO: 71166 - DNA, 25 bp, Canis familiaris
ctactgtggggaacacagatctggc

SEQ ID NO: 71167 - DNA, 25 bp, Canis familiaris
ctactgtgacggccagcagcaaagg

SEQ ID NO: 71168 - DNA, 25 bp, Canis familiaris
ctcagttgagacctacccacatgga

SEQ ID NO: 71169 - DNA, 25 bp, Canis familiaris
ctcagttggaggtacagccaagatg

SEQ ID NO: 71170 - DNA, 25 bp, Canis familiaris
ctcaccggcacttagaggaaatttg

SEQ ID NO: 71171 - DNA, 25 bp, Canis familiaris
ctcaccctgactcaaggagttggta

SEQ ID NO: 71172 - DNA, 25 bp, Canis familiaris
ctacccatgaagtaatagagtgtcg

SEQ ID NO: 71173 - DNA, 25 bp, Canis familiaris
ctaccctcgagattctagtgtggct

SEQ ID NO: 71174 - DNA, 25 bp, Canis familiaris
ctacagcgacggttatggcagggtg

SEQ ID NO: 71175 - DNA, 25 bp, Canis familiaris
ctacatggtctggaaagagctgggg

SEQ ID NO: 71176 - DNA, 25 bp, Canis familiaris
ctaaggttggaagtggtcatgaggg

SEQ ID NO: 71177 - DNA, 25 bp, Canis familiaris
ctaagacttgcgttgctggatcagc

SEQ ID NO: 71178 - DNA, 25 bp, Canis familiaris
ctaagacttgcgttgctggatcagc

SEQ ID NO: 71179 - DNA, 25 bp, Canis familiaris
ctaagacttgcgttgctggatcagc

SEQ ID NO: 71180 - DNA, 25 bp, Canis familiaris
ctaagaacagcgtcatgtggcggcc

SEQ ID NO: 71181 - DNA, 25 bp, Canis familiaris
ctacgagtgcgaccagtgcgggaag

SEQ ID NO: 71182 - DNA, 25 bp, Canis familiaris
ctacagggtgaccagcgcaagaaca

SEQ ID NO: 71183 - DNA, 25 bp, Canis familiaris
ctacaggcagagcccagcactgaga

SEQ ID NO: 71184 - DNA, 25 bp, Canis familiaris
ctactgtgagagacctcattggccg

SEQ ID NO: 71185 - DNA, 25 bp, Canis familiaris
ctacatttacacatctagcagtcag

SEQ ID NO: 71186 - DNA, 25 bp, Canis familiaris
ctactttatcacttcacacagatga

SEQ ID NO: 71187 - DNA, 25 bp, Canis familiaris
ctcactgttgaccactcaagctatg

SEQ ID NO: 71188 - DNA, 25 bp, Canis familiaris
ctcaggaatgacctcgattgccagc

SEQ ID NO: 71189 - DNA, 25 bp, Canis familiaris
ctcagcgactcggtcatttgacaca

SEQ ID NO: 71190 - DNA, 25 bp, Canis familiaris
ctcagcaacccgatgttccatcaaa

SEQ ID NO: 71191 - DNA, 25 bp, Canis familiaris
ctccataccacaccgttcgaagaac

SEQ ID NO: 71192 - DNA, 25 bp, Canis familiaris
ctcagacgccacagccttggaaaga

SEQ ID NO: 71193 - DNA, 25 bp, Canis familiaris
ctaatcccatgcaaccccatgaaaa

SEQ ID NO: 71194 - DNA, 25 bp, Canis familiaris
ctaatgccatgactaccttctgtat

SEQ ID NO: 71195 - DNA, 25 bp, Canis familiaris
ctaagtctatgctagctcttctgct

SEQ ID NO: 71196 - DNA, 25 bp, Canis familiaris
ctaagtgctcatcagaactcacccc

SEQ ID NO: 71197 - DNA, 25 bp, Canis familiaris
ctacttgatcatcatgaacccccgc

SEQ ID NO: 71198 - DNA, 25 bp, Canis familiaris
ctacttctcgggaactggtcgcgat

SEQ ID NO: 71199 - DNA, 25 bp, Canis familiaris
ctccttctctggtggtggtttgttt

SEQ ID NO: 71200 - DNA, 25 bp, Canis familiaris
ctactctcggggccgatgtggtggt

SEQ ID NO: 71201 - DNA, 25 bp, Canis familiaris
ctactccggtggcctgaaactggcc

SEQ ID NO: 71202 - DNA, 25 bp, Canis familiaris
ctactcctcggtacgagccagtggc

SEQ ID NO: 71203 - DNA, 25 bp, Canis familiaris
ctactgcagacacaactaccgggtg

SEQ ID NO: 71204 - DNA, 25 bp, Canis familiaris
ctactgcagacacaactaccgggtg

SEQ ID NO: 71205 - DNA, 25 bp, Canis familiaris
ctactgcagacacaactaccgggtg

SEQ ID NO: 71206 - DNA, 25 bp, Canis familiaris
ctactgcagacacaactaccgggtg

SEQ ID NO: 71207 - DNA, 25 bp, Canis familiaris
ctactgcagacacaactaccgggtg

SEQ ID NO: 71208 - DNA, 25 bp, Canis familiaris
ctacatgcacagagaattacccaga

SEQ ID NO: 71209 - DNA, 25 bp, Canis familiaris
ctactgcacctggagataccctcca

SEQ ID NO: 71210 - DNA, 25 bp, Canis familiaris
ctactcattctgggtacataccaca

SEQ ID NO: 71211 - DNA, 25 bp, Canis familiaris
ctacatcatctcgcttatattgggc

SEQ ID NO: 71212 - DNA, 25 bp, Canis familiaris
ctactgcagctgcgcctatgattgg

SEQ ID NO: 71213 - DNA, 25 bp, Canis familiaris
ctcaggcagctccagcagcatgaag

SEQ ID NO: 71214 - DNA, 25 bp, Canis familiaris
ctcactcgccagccacaaatgaata

SEQ ID NO: 71215 - DNA, 25 bp, Canis familiaris
ctcactccacctgctaaaatacgtt

SEQ ID NO: 71216 - DNA, 25 bp, Canis familiaris
ctactctctcctgctcaaatatatc

SEQ ID NO: 71217 - DNA, 25 bp, Canis familiaris
ctcactgctcccttggcaataaatc

SEQ ID NO: 71218 - DNA, 25 bp, Canis familiaris
ctcactggcccgggaattcatgatc

SEQ ID NO: 71219 - DNA, 25 bp, Canis familiaris
ctcagtggcctcgcaggtataactc

SEQ ID NO: 71220 - DNA, 25 bp, Canis familiaris
ctacatggcctccaaggagtaagaa

SEQ ID NO: 71221 - DNA, 25 bp, Canis familiaris
ctactggcgctgccaaggctgtggg

SEQ ID NO: 71222 - DNA, 25 bp, Canis familiaris
ctacttgcgctccatgctgggagtg

SEQ ID NO: 71223 - DNA, 25 bp, Canis familiaris
ctcagtaccatcagcttgcaggggc

SEQ ID NO: 71224 - DNA, 25 bp, Canis familiaris
ctcagtaatcccctggaccagaaca

SEQ ID NO: 71225 - DNA, 25 bp, Canis familiaris
ctcagccaacccctggttacaggag

SEQ ID NO: 71226 - DNA, 25 bp, Canis familiaris
ctcaacggcacctggtagacgctga

SEQ ID NO: 71227 - DNA, 25 bp, Canis familiaris
ctacacggcgcttcgagacaacgag

SEQ ID NO: 71228 - DNA, 25 bp, Canis familiaris
ctactgggtctgtcagtacccgcaa

SEQ ID NO: 71229 - DNA, 25 bp, Canis familiaris
ctactggtgtcttcaccaccatgga

SEQ ID NO: 71230 - DNA, 25 bp, Canis familiaris
ctactagaactgccccacaagaaat

SEQ ID NO: 71231 - DNA, 25 bp, Canis familiaris
ctacaagaccatcgcccgagaggaa

SEQ ID NO: 71232 - DNA, 25 bp, Canis familiaris
ctaaacccacaggccacaggccaaa

SEQ ID NO: 71233 - DNA, 25 bp, Canis familiaris
ctaagacggagggtccaccacaaca

SEQ ID NO: 71234 - DNA, 25 bp, Canis familiaris
ctaaggcagggggtccaacacagaa

SEQ ID NO: 71235 - DNA, 25 bp, Canis familiaris
ctaagggctggtctctgctgaaggt

SEQ ID NO: 71236 - DNA, 25 bp, Canis familiaris
ctacaggagctcttttctctgacgg

SEQ ID NO: 71237 - DNA, 25 bp, Canis familiaris
ctactgagagctcttctgcttgggc

SEQ ID NO: 71238 - DNA, 25 bp, Canis familiaris
ctactcagagctctatcgtccgagc

SEQ ID NO: 71239 - DNA, 25 bp, Canis familiaris
ctactcgctgtgcatagtgccaggt

SEQ ID NO: 71240 - DNA, 25 bp, Canis familiaris
ctaatcctgggctaatgaaggacct

SEQ ID NO: 71241 - DNA, 25 bp, Canis familiaris
ctcaggtctgggtaggcaactgccc

SEQ ID NO: 71242 - DNA, 25 bp, Canis familiaris
ctcaagcttggttatgtgtcccggt

SEQ ID NO: 71243 - DNA, 25 bp, Canis familiaris
ctaagtcaggtaaatacgcctggtt

SEQ ID NO: 71244 - DNA, 25 bp, Canis familiaris
ctcaattcaattcaattccgggttc

SEQ ID NO: 71245 - DNA, 25 bp, Canis familiaris
ctaattccctaatttccatctagtt

SEQ ID NO: 71246 - DNA, 25 bp, Canis familiaris
ctcaaaccgctcacaagtactaatt

SEQ ID NO: 71247 - DNA, 25 bp, Canis familiaris
ctcaaactcctctcaaacacaaagc

SEQ ID NO: 71248 - DNA, 25 bp, Canis familiaris
ctcaatgacttttacataccaaaaa

SEQ ID NO: 71249 - DNA, 25 bp, Canis familiaris
ctctaacttttgtcaactactgaaa

SEQ ID NO: 71250 - DNA, 25 bp, Canis familiaris
ctctcaacttttgccctgttaaata

SEQ ID NO: 71251 - DNA, 25 bp, Canis familiaris
ctcatcaccttagtcaccaatttca

SEQ ID NO: 71252 - DNA, 25 bp, Canis familiaris
ctactctctgtagaaactttcaaac

SEQ ID NO: 71253 - DNA, 25 bp, Canis familiaris
ctcacctcttacatgaatctcttct

SEQ ID NO: 71254 - DNA, 25 bp, Canis familiaris
ctacagccattaatggttctctatg

SEQ ID NO: 71255 - DNA, 25 bp, Canis familiaris
ctacagcctgcatctgtttggtaaa

SEQ ID NO: 71256 - DNA, 25 bp, Canis familiaris
ctcaccaatgagctgtttttacaaa

SEQ ID NO: 71257 - DNA, 25 bp, Canis familiaris
ctcaccctgagtcttttaaaatcca

SEQ ID NO: 71258 - DNA, 25 bp, Canis familiaris
ctcacccatcgttcttattacaatg

SEQ ID NO: 71259 - DNA, 25 bp, Canis familiaris
ctcaaccatgctcaattttacctcc

SEQ ID NO: 71260 - DNA, 25 bp, Canis familiaris
ctcaaagtctctcattctttctcac

SEQ ID NO: 71261 - DNA, 25 bp, Canis familiaris
ctaaggcccttatctggtgctatgc

SEQ ID NO: 71262 - DNA, 25 bp, Canis familiaris
ctaattcccttctcatgtctgaata

SEQ ID NO: 71263 - DNA, 25 bp, Canis familiaris
ctaatctttcctgtcacttgttatg

SEQ ID NO: 71264 - DNA, 25 bp, Canis familiaris
ctacactttcctgctgcatatctgt

SEQ ID NO: 71265 - DNA, 25 bp, Canis familiaris
ctacactgttcagttggccttaccc

SEQ ID NO: 71266 - DNA, 25 bp, Canis familiaris
ctacacactctcgtagagcgtctag

SEQ ID NO: 71267 - DNA, 25 bp, Canis familiaris
ctacacactgaccttgagtgactac

SEQ ID NO: 71268 - DNA, 25 bp, Canis familiaris
ctacaacaacaacgaggatgctcct

SEQ ID NO: 71269 - DNA, 25 bp, Canis familiaris
ctaatacatgccgacgggcgctgac

SEQ ID NO: 71270 - DNA, 25 bp, Canis familiaris
ctcaaagctgcccaaagtcctggcc

SEQ ID NO: 71271 - DNA, 25 bp, Canis familiaris
ctcacaattgcccaggctttcggca

SEQ ID NO: 71272 - DNA, 25 bp, Canis familiaris
ctcaaatcccgaatcacttccgagg

SEQ ID NO: 71273 - DNA, 25 bp, Canis familiaris
ctcaaggggcgaatcctatccggtg

SEQ ID NO: 71274 - DNA, 25 bp, Canis familiaris
ctaagagggctacctctgtggcggg

SEQ ID NO: 71275 - DNA, 25 bp, Canis familiaris
ctaagagggcatctctgcccggtgg

SEQ ID NO: 71276 - DNA, 25 bp, Canis familiaris
ctcaagcaggtcaccaccgtggtgg

SEQ ID NO: 71277 - DNA, 25 bp, Canis familiaris
ctcaaatgaatgagccacccaggtg

SEQ ID NO: 71278 - DNA, 25 bp, Canis familiaris
ctcaaaactcgggaccaacatgttc

SEQ ID NO: 71279 - DNA, 25 bp, Canis familiaris
ctacaacacgggggccgtgctgttc

SEQ ID NO: 71280 - DNA, 25 bp, Canis familiaris
ctacagaaccagctggccctgctgg

SEQ ID NO: 71281 - DNA, 25 bp, Canis familiaris
ctaaggccacaaggtccaggctggt

SEQ ID NO: 71282 - DNA, 25 bp, Canis familiaris
ctacttcaacaagcccacagggtac

SEQ ID NO: 71283 - DNA, 25 bp, Canis familiaris
ctacttctcaccaaaccacggagga

SEQ ID NO: 71284 - DNA, 25 bp, Canis familiaris
ctacttctatcagagatcctgttag

SEQ ID NO: 71285 - DNA, 25 bp, Canis familiaris
ctacttcctccatgtcatcagatta

SEQ ID NO: 71286 - DNA, 25 bp, Canis familiaris
ctacttccgccaggccgagaatggc

SEQ ID NO: 71287 - DNA, 25 bp, Canis familiaris
ctactgccccaagtgcatggacgtg

SEQ ID NO: 71288 - DNA, 25 bp, Canis familiaris
ctcagatcgccaaagtgggccagat

SEQ ID NO: 71289 - DNA, 25 bp, Canis familiaris
ctaaccacgaagacgctgcagagca

SEQ ID NO: 71290 - DNA, 25 bp, Canis familiaris
ctacactgacaggcgggcgagcgct

SEQ ID NO: 71291 - DNA, 25 bp, Canis familiaris
ctacactgagcaccaggtggtctcc

SEQ ID NO: 71292 - DNA, 25 bp, Canis familiaris
ctacaatgagctgcgtgtggctccc

SEQ ID NO: 71293 - DNA, 25 bp, Canis familiaris
ctacaatgagctgcgtgtggcccct

SEQ ID NO: 71294 - DNA, 25 bp, Canis familiaris
ctacagctgagctccatctacagcc

SEQ ID NO: 71295 - DNA, 25 bp, Canis familiaris
ctactctgagcaggacacgggccag

SEQ ID NO: 71296 - DNA, 25 bp, Canis familiaris
ctcactcatccagcgactgaggtca

SEQ ID NO: 71297 - DNA, 25 bp, Canis familiaris
ctactgcggactcactgcaagcata

SEQ ID NO: 71298 - DNA, 25 bp, Canis familiaris
ctactgcgtggcttgtcaggagctc

SEQ ID NO: 71299 - DNA, 25 bp, Canis familiaris
ctacttgctgcctttactactcaag

SEQ ID NO: 71300 - DNA, 25 bp, Canis familiaris
ctgacttgtgggaaacttcatgggt

SEQ ID NO: 71301 - DNA, 25 bp, Canis familiaris
ctacttgttctatgacttggggctc

SEQ ID NO: 71302 - DNA, 25 bp, Canis familiaris
ctcacttgtcacatcggtctgggac

SEQ ID NO: 71303 - DNA, 25 bp, Canis familiaris
ctcacatcctacacagacctgagcc

SEQ ID NO: 71304 - DNA, 25 bp, Canis familiaris
ctcacatcctacacagacctgagcc

SEQ ID NO: 71305 - DNA, 25 bp, Canis familiaris
ctcacatcctacacagacctgagcc

SEQ ID NO: 71306 - DNA, 25 bp, Canis familiaris
ctcaacctgacattgctacagtgca

SEQ ID NO: 71307 - DNA, 25 bp, Canis familiaris
ctcatggtgtacatgtacctgccag

SEQ ID NO: 71308 - DNA, 25 bp, Canis familiaris
ctcagggaactattaccggcttttg

SEQ ID NO: 71309 - DNA, 25 bp, Canis familiaris
ctaaggtcattatcccagggttctg

SEQ ID NO: 71310 - DNA, 25 bp, Canis familiaris
ctcagggcgtaatcccagggtcttg

SEQ ID NO: 71311 - DNA, 25 bp, Canis familiaris
ctcggtgtgttttcttcagggttag

SEQ ID NO: 71312 - DNA, 25 bp, Canis familiaris
ctctgttggttctgttaggtttatt

SEQ ID NO: 71313 - DNA, 25 bp, Canis familiaris
ctcgttggtgtccttgttaggtgtt

SEQ ID NO: 71314 - DNA, 25 bp, Canis familiaris
ctcagtctactaatccttaattacc

SEQ ID NO: 71315 - DNA, 25 bp, Canis familiaris
ctcccataatttctaattctctcac

SEQ ID NO: 71316 - DNA, 25 bp, Canis familiaris
ctcctacgtggtcaacatcacctac

SEQ ID NO: 71317 - DNA, 25 bp, Canis familiaris
ctcggaccggctgacacataccgat

SEQ ID NO: 71318 - DNA, 25 bp, Canis familiaris
ctcagcaaccgagaactgcttccca

SEQ ID NO: 71319 - DNA, 25 bp, Canis familiaris
ctcagcaacctagcacaagtacact

SEQ ID NO: 71320 - DNA, 25 bp, Canis familiaris
ctcacgattgtaaaagtgtttctct

SEQ ID NO: 71321 - DNA, 25 bp, Canis familiaris
ctacagttgtatcttctcttgtgcc

SEQ ID NO: 71322 - DNA, 25 bp, Canis familiaris
ctcaagtccttgtttgaatggagcc

SEQ ID NO: 71323 - DNA, 25 bp, Canis familiaris
ctcacaacctcactggagaccgagt

SEQ ID NO: 71324 - DNA, 25 bp, Canis familiaris
ctcagcgtctaagtggagacccagt

SEQ ID NO: 71325 - DNA, 25 bp, Canis familiaris
ctcagggaaattcaaccgagtggca

SEQ ID NO: 71326 - DNA, 25 bp, Canis familiaris
ctaagcggactgcacaaccagcgtg

SEQ ID NO: 71327 - DNA, 25 bp, Canis familiaris
ctgctacggcgctgaagggccgggg

SEQ ID NO: 71328 - DNA, 25 bp, Canis familiaris
ctcaacggcgagatcagcgccctgg

SEQ ID NO: 71329 - DNA, 25 bp, Canis familiaris
ctcaagctgctcacaaaggtcctgg

SEQ ID NO: 71330 - DNA, 25 bp, Canis familiaris
ctcaatgttccctgggtccaggctc

SEQ ID NO: 71331 - DNA, 25 bp, Canis familiaris
ctacagaccctaaggtcccgagctc

SEQ ID NO: 71332 - DNA, 25 bp, Canis familiaris
ctacaagacctaggccttcgcaggt

SEQ ID NO: 71333 - DNA, 25 bp, Canis familiaris
ctaagagacctaggctttcctcagc

SEQ ID NO: 71334 - DNA, 25 bp, Canis familiaris
ctaaccctctgaggcgttctctatg

SEQ ID NO: 71335 - DNA, 25 bp, Canis familiaris
ctacagaccttatgcagatctttgt

SEQ ID NO: 71336 - DNA, 25 bp, Canis familiaris
ctcacagtctttcacagaatatcag

SEQ ID NO: 71337 - DNA, 25 bp, Canis familiaris
ctacaccattggcaaggagatcatt

SEQ ID NO: 71338 - DNA, 25 bp, Canis familiaris
ctacaccttggcgcaggaggccata

SEQ ID NO: 71339 - DNA, 25 bp, Canis familiaris
ctacacactggccccaggggaagga

SEQ ID NO: 71340 - DNA, 25 bp, Canis familiaris
ctacagactagcccggggtcagcag

SEQ ID NO: 71341 - DNA, 25 bp, Canis familiaris
ctacagagtcgcacgtgaggcactg

SEQ ID NO: 71342 - DNA, 25 bp, Canis familiaris
ctacaggtctcccaggtgagcctgg

SEQ ID NO: 71343 - DNA, 25 bp, Canis familiaris
ctcacagccctgagatcgtgacctg

SEQ ID NO: 71344 - DNA, 25 bp, Canis familiaris
ctcagcacggacagacttgcaccag

SEQ ID NO: 71345 - DNA, 25 bp, Canis familiaris
ctcatgccgggaaactggtcgcgga

SEQ ID NO: 71346 - DNA, 25 bp, Canis familiaris
ctcagccaaggcacagggtggccag

SEQ ID NO: 71347 - DNA, 25 bp, Canis familiaris
ctcagccaggggccggagttcctgg

SEQ ID NO: 71348 - DNA, 25 bp, Canis familiaris
ctcgtacgggagtggtgtcatctag

SEQ ID NO: 71349 - DNA, 25 bp, Canis familiaris
ctcagtaggtgtgacccgtagccgg

SEQ ID NO: 71350 - DNA, 25 bp, Canis familiaris
ctcagtaatggtggccctctgggcc

SEQ ID NO: 71351 - DNA, 25 bp, Canis familiaris
ctcttagtccttggcctcaaggctc

SEQ ID NO: 71352 - DNA, 25 bp, Canis familiaris
ctcttacccttctggcaagatcttg

SEQ ID NO: 71353 - DNA, 25 bp, Canis familiaris
ctctatagtgacatctcggacagat

SEQ ID NO: 71354 - DNA, 25 bp, Canis familiaris
ctcttggtgtttccagggagccatc

SEQ ID NO: 71355 - DNA, 25 bp, Canis familiaris
ctcagttggttaagcatgggtggct

SEQ ID NO: 71356 - DNA, 25 bp, Canis familiaris
ctacttggactattcagggagctgc

SEQ ID NO: 71357 - DNA, 25 bp, Canis familiaris
ctacttccatcctgcagggagcagc

SEQ ID NO: 71358 - DNA, 25 bp, Canis familiaris
ctcactctactgccgaagggatagc

SEQ ID NO: 71359 - DNA, 25 bp, Canis familiaris
ctcactatacaccagaaactaagaa

SEQ ID NO: 71360 - DNA, 25 bp, Canis familiaris
ctcacatcagacattaaacctcagg

SEQ ID NO: 71361 - DNA, 25 bp, Canis familiaris
ctcacactgagattacacaagcgtc

SEQ ID NO: 71362 - DNA, 25 bp, Canis familiaris
ctcgcagcgagcaatagccaaccac

SEQ ID NO: 71363 - DNA, 25 bp, Canis familiaris
ctcgatgactgcatgcatggaacca

SEQ ID NO: 71364 - DNA, 25 bp, Canis familiaris
ctcgatattcttttggaccctacta

SEQ ID NO: 71365 - DNA, 25 bp, Canis familiaris
ctcatggttttatggtcgtagactg

SEQ ID NO: 71366 - DNA, 25 bp, Canis familiaris
ctctggtattactcgtgcgtacacg

SEQ ID NO: 71367 - DNA, 25 bp, Canis familiaris
ctcagagtatgatcggttggctaac

SEQ ID NO: 71368 - DNA, 25 bp, Canis familiaris
ctcagtcccacgcagttgtgtgaac

SEQ ID NO: 71369 - DNA, 25 bp, Canis familiaris
ctcagaaccccctttgttggattag

SEQ ID NO: 71370 - DNA, 25 bp, Canis familiaris
ctaacaccgttcgttggtcgtgtgg

SEQ ID NO: 71371 - DNA, 25 bp, Canis familiaris
ctgcaaaccgttcctttgtgggatt

SEQ ID NO: 71372 - DNA, 25 bp, Canis familiaris
ctaaatcccacaatgctttggtttt

SEQ ID NO: 71373 - DNA, 25 bp, Canis familiaris
ctacaactccaaacgcattgacttt

SEQ ID NO: 71374 - DNA, 25 bp, Canis familiaris
ctacaagcctgaagtgctttgacat

SEQ ID NO: 71375 - DNA, 25 bp, Canis familiaris
ctcaatagtctgtaggctttggctc

SEQ ID NO: 71376 - DNA, 25 bp, Canis familiaris
ctaaagttgatgaagctgtagctgt

SEQ ID NO: 71377 - DNA, 25 bp, Canis familiaris
ctaatggctttaactctcactgata

SEQ ID NO: 71378 - DNA, 25 bp, Canis familiaris
ctacatggggcttgatcccacgacc

SEQ ID NO: 71379 - DNA, 25 bp, Canis familiaris
ctcacagcggagacaatcccacggg

SEQ ID NO: 71380 - DNA, 25 bp, Canis familiaris
ctcacagcggagacaatcccacggg

SEQ ID NO: 71381 - DNA, 25 bp, Canis familiaris
ctcacagcggagacaatcccacggg

SEQ ID NO: 71382 - DNA, 25 bp, Canis familiaris
ctacagcgcagttatgacacccatg

SEQ ID NO: 71383 - DNA, 25 bp, Canis familiaris
ctacatgccaatcgagtgacagaca

SEQ ID NO: 71384 - DNA, 25 bp, Canis familiaris
ctcactcccatggagtcactaagcc

SEQ ID NO: 71385 - DNA, 25 bp, Canis familiaris
ctcactgccctgggacaggacccag

SEQ ID NO: 71386 - DNA, 25 bp, Canis familiaris
ctcgcatacctctctagaactaagc

SEQ ID NO: 71387 - DNA, 25 bp, Canis familiaris
ctcagattccttctataacaccagc

SEQ ID NO: 71388 - DNA, 25 bp, Canis familiaris
ctcaacgcctacacataaatccgcc

SEQ ID NO: 71389 - DNA, 25 bp, Canis familiaris
ctaaggtcgagcctcattaaacgag

SEQ ID NO: 71390 - DNA, 25 bp, Canis familiaris
ctaagagtcgagcctccattaaacg

SEQ ID NO: 71391 - DNA, 25 bp, Canis familiaris
ctaagttcgaccccaacgagatcaa

SEQ ID NO: 71392 - DNA, 25 bp, Canis familiaris
ctaagttcgaccccaacgagatcaa

SEQ ID NO: 71393 - DNA, 25 bp, Canis familiaris
ctaagttcgaccccaacgagatcaa

SEQ ID NO: 71394 - DNA, 25 bp, Canis familiaris
ctaagtattacccacagacatatat

SEQ ID NO: 71395 - DNA, 25 bp, Canis familiaris
ctacactcattgctcccagaattga

SEQ ID NO: 71396 - DNA, 25 bp, Canis familiaris
ctacagcaagtgcattttgactgga

SEQ ID NO: 71397 - DNA, 25 bp, Canis familiaris
ctcacactgagtggtattagtcatg

SEQ ID NO: 71398 - DNA, 25 bp, Canis familiaris
ctcacctacttccagttgtctgggg

SEQ ID NO: 71399 - DNA, 25 bp, Canis familiaris
ctcataacaaaccctttctggttgc

SEQ ID NO: 71400 - DNA, 25 bp, Canis familiaris
ctctgacaggtaccccatttgtggg

SEQ ID NO: 71401 - DNA, 25 bp, Canis familiaris
cctgaaggtggaactctttagtggt

SEQ ID NO: 71402 - DNA, 25 bp, Canis familiaris
cgtagggtggcagccgttggggagc

SEQ ID NO: 71403 - DNA, 25 bp, Canis familiaris
cgatcggcggacgcctaattggttc

SEQ ID NO: 71404 - DNA, 25 bp, Canis familiaris
cctagccaggactcccagaaagttt

SEQ ID NO: 71405 - DNA, 25 bp, Canis familiaris
ctcacctagaactcccaggtcatgt

SEQ ID NO: 71406 - DNA, 25 bp, Canis familiaris
ctaagaagaacagcccagccttgtc

SEQ ID NO: 71407 - DNA, 25 bp, Canis familiaris
ctaaaaatacatcctctctctcatt

SEQ ID NO: 71408 - DNA, 25 bp, Canis familiaris
ctaagcatagtatactctcctcatt

SEQ ID NO: 71409 - DNA, 25 bp, Canis familiaris
ctcacagcacagtgctacttccaag

SEQ ID NO: 71410 - DNA, 25 bp, Canis familiaris
ctaagaataggccagctccagcaca

SEQ ID NO: 71411 - DNA, 25 bp, Canis familiaris
ctcagagagatgcaccgccaagcaa

SEQ ID NO: 71412 - DNA, 25 bp, Canis familiaris
ctcagaaacgcagggccagacaccc

SEQ ID NO: 71413 - DNA, 25 bp, Canis familiaris
ctcagaagggtcggcacagggcgcc

SEQ ID NO: 71414 - DNA, 25 bp, Canis familiaris
ctctgttgcggcagactcggacgca

SEQ ID NO: 71415 - DNA, 25 bp, Canis familiaris
ctcagttccaatttctcaagcacag

SEQ ID NO: 71416 - DNA, 25 bp, Canis familiaris
ctcacttccacaatgtccgacatta

SEQ ID NO: 71417 - DNA, 25 bp, Canis familiaris
ctcaatttcataattcactgatcta

SEQ ID NO: 71418 - DNA, 25 bp, Canis familiaris
ctaagtagcatcttctcactcttgg

SEQ ID NO: 71419 - DNA, 25 bp, Canis familiaris
ctacaacaatctatcctgctgctgg

SEQ ID NO: 71420 - DNA, 25 bp, Canis familiaris
ctacacacctgcatgttctctgtga

SEQ ID NO: 71421 - DNA, 25 bp, Canis familiaris
ctcagagacctgtgtctcctgggag

SEQ ID NO: 71422 - DNA, 25 bp, Canis familiaris
ctaattgctcggtttcctctgagag

SEQ ID NO: 71423 - DNA, 25 bp, Canis familiaris
ctcaattggccttggacttcgaagc

SEQ ID NO: 71424 - DNA, 25 bp, Canis familiaris
ctaatgctggttttaatggcggcgc

SEQ ID NO: 71425 - DNA, 25 bp, Canis familiaris
ctcagctgccttgtttaccgagctg

SEQ ID NO: 71426 - DNA, 25 bp, Canis familiaris
ctcagcccttgaatttccactgtgg

SEQ ID NO: 71427 - DNA, 25 bp, Canis familiaris
ctcacagccttgctgggctacaagg

SEQ ID NO: 71428 - DNA, 25 bp, Canis familiaris
ctacaccctgagtggctgacatcac

SEQ ID NO: 71429 - DNA, 25 bp, Canis familiaris
ctaattctcgcaaatgggacatctc

SEQ ID NO: 71430 - DNA, 25 bp, Canis familiaris
ctaatgatcacggatatgacaactt

SEQ ID NO: 71431 - DNA, 25 bp, Canis familiaris
ctaatatacctgtgcaaacaatctc

SEQ ID NO: 71432 - DNA, 25 bp, Canis familiaris
ctaactatcctgttcacatcacata

SEQ ID NO: 71433 - DNA, 25 bp, Canis familiaris
ctcaactgctctgggacacagcact

SEQ ID NO: 71434 - DNA, 25 bp, Canis familiaris
ctacacgtgcgtgacacagagcgag

SEQ ID NO: 71435 - DNA, 25 bp, Canis familiaris
ctaagggcgctggaggctgggcagc

SEQ ID NO: 71436 - DNA, 25 bp, Canis familiaris
ctaaggtctgtggcaggctggctgg

SEQ ID NO: 71437 - DNA, 25 bp, Canis familiaris
ctaaatctctatgcagtgtgtgtgt

SEQ ID NO: 71438 - DNA, 25 bp, Canis familiaris
ctcatcaaggctacaattgctggtg

SEQ ID NO: 71439 - DNA, 25 bp, Canis familiaris
ctcaagatggctgcccgatggctgc

SEQ ID NO: 71440 - DNA, 25 bp, Canis familiaris
ctaatgatgatttctgccttggccc

SEQ ID NO: 71441 - DNA, 25 bp, Canis familiaris
ctaatgtttgaggctctcctccagc

SEQ ID NO: 71442 - DNA, 25 bp, Canis familiaris
ctaatgtttgaggctctcctccagc

SEQ ID NO: 71443 - DNA, 25 bp, Canis familiaris
ctaagccttatggctgtcttcccat

SEQ ID NO: 71444 - DNA, 25 bp, Canis familiaris
ctaagccttaggctgtcttcccata

SEQ ID NO: 71445 - DNA, 25 bp, Canis familiaris
ctaagccttaggctgtcttcccata

SEQ ID NO: 71446 - DNA, 25 bp, Canis familiaris
ctaagccttaggctgtcttcccata

SEQ ID NO: 71447 - DNA, 25 bp, Canis familiaris
ctaagccttaggctgtcttcccata

SEQ ID NO: 71448 - DNA, 25 bp, Canis familiaris
ctaagccttaggctgtcttcccata

SEQ ID NO: 71449 - DNA, 25 bp, Canis familiaris
ctaagccttaggctgtcttcccata

SEQ ID NO: 71450 - DNA, 25 bp, Canis familiaris
ctaacctctgaggggagccccaaga

SEQ ID NO: 71451 - DNA, 25 bp, Canis familiaris
ctcaagcccaagaggagctcctcca

SEQ ID NO: 71452 - DNA, 25 bp, Canis familiaris
ctcacccttagaggagaggactcca

SEQ ID NO: 71453 - DNA, 25 bp, Canis familiaris
ctcagcccttgcgatcatggaaaat

SEQ ID NO: 71454 - DNA, 25 bp, Canis familiaris
ctcacatcctgtgcattaaggacat

SEQ ID NO: 71455 - DNA, 25 bp, Canis familiaris
ctcacagccttgcattcaactacta

SEQ ID NO: 71456 - DNA, 25 bp, Canis familiaris
ctcacacctggtatacagttctgac

SEQ ID NO: 71457 - DNA, 25 bp, Canis familiaris
ctcagctcctggtttatcaaatgca

SEQ ID NO: 71458 - DNA, 25 bp, Canis familiaris
ctcctggtggtatatcgacatccgc

SEQ ID NO: 71459 - DNA, 25 bp, Canis familiaris
ctcactggaggatccccagactcac

SEQ ID NO: 71460 - DNA, 25 bp, Canis familiaris
ctcagctgtgacaggtggccagtcc

SEQ ID NO: 71461 - DNA, 25 bp, Canis familiaris
ctcaagtgagtgatgcatggccgta

SEQ ID NO: 71462 - DNA, 25 bp, Canis familiaris
ctcaagattgtcagcaatgcctcct

SEQ ID NO: 71463 - DNA, 25 bp, Canis familiaris
ctcaagattgtcagcaatgcatcct

SEQ ID NO: 71464 - DNA, 25 bp, Canis familiaris
ctaatgattctcactatacaccaga

SEQ ID NO: 71465 - DNA, 25 bp, Canis familiaris
ctcaccttatctggctgtacacgag

SEQ ID NO: 71466 - DNA, 25 bp, Canis familiaris
ctcatcctgttctttccaagcgaac

SEQ ID NO: 71467 - DNA, 25 bp, Canis familiaris
ctcagcatgtttgccatccaaggcc

SEQ ID NO: 71468 - DNA, 25 bp, Canis familiaris
ctcaggttatgatcccagggtcttg

SEQ ID NO: 71469 - DNA, 25 bp, Canis familiaris
ctaacttagagccgcctaacctctg

SEQ ID NO: 71470 - DNA, 25 bp, Canis familiaris
ctaattgttacccctaattctctgt

SEQ ID NO: 71471 - DNA, 25 bp, Canis familiaris
ctcagattgtctttaactttgtttt

SEQ ID NO: 71472 - DNA, 25 bp, Canis familiaris
ctaatgctttgcttacagctttgag

SEQ ID NO: 71473 - DNA, 25 bp, Canis familiaris
ctaatgcttcttcaatggtggatgc

SEQ ID NO: 71474 - DNA, 25 bp, Canis familiaris
ctcaagcttcccactgaatctgatg

SEQ ID NO: 71475 - DNA, 25 bp, Canis familiaris
ctaagcttgcccagagtccagagga

SEQ ID NO: 71476 - DNA, 25 bp, Canis familiaris
ctaagctccccgaaaccagacgagc

SEQ ID NO: 71477 - DNA, 25 bp, Canis familiaris
ctaagcccctcgaagaagcagcagc

SEQ ID NO: 71478 - DNA, 25 bp, Canis familiaris
ctaatggcttctctggagctgacct

SEQ ID NO: 71479 - DNA, 25 bp, Canis familiaris
ctcagagcccttctgggcttctttg

SEQ ID NO: 71480 - DNA, 25 bp, Canis familiaris
ctcaaccagtggtggactttttctc

SEQ ID NO: 71481 - DNA, 25 bp, Canis familiaris
ctcaactcctggtgtacctattctg

SEQ ID NO: 71482 - DNA, 25 bp, Canis familiaris
ctcaccacctggacgagtttatccg

SEQ ID NO: 71483 - DNA, 25 bp, Canis familiaris
ctcacactgcccggggcttatttct

SEQ ID NO: 71484 - DNA, 25 bp, Canis familiaris
ctcagctctcactggaggttattta

SEQ ID NO: 71485 - DNA, 25 bp, Canis familiaris
ctcagcctcaagcagagcctttagg

SEQ ID NO: 71486 - DNA, 25 bp, Canis familiaris
ctcagctttagtggagaacttgaag

SEQ ID NO: 71487 - DNA, 25 bp, Canis familiaris
ctcactggtattggatagctcacga

SEQ ID NO: 71488 - DNA, 25 bp, Canis familiaris
ctcatgcgtgacttcgaaggcacgt

SEQ ID NO: 71489 - DNA, 25 bp, Canis familiaris
ctcttgagcacagagaaccaccccg

SEQ ID NO: 71490 - DNA, 25 bp, Canis familiaris
ctctgatgaggagaaagccccaccc

SEQ ID NO: 71491 - DNA, 25 bp, Canis familiaris
ctctaaggagaatggcccagtcctc

SEQ ID NO: 71492 - DNA, 25 bp, Canis familiaris
ctcattacagaagcggtccattccg

SEQ ID NO: 71493 - DNA, 25 bp, Canis familiaris
ctcattacagaaaaacggtcccagt

SEQ ID NO: 71494 - DNA, 25 bp, Canis familiaris
ctcccacagtatcaaccattttttc

SEQ ID NO: 71495 - DNA, 25 bp, Canis familiaris
ctctggccagtacacccatgaattt

SEQ ID NO: 71496 - DNA, 25 bp, Canis familiaris
ctctaccgcacatcccggtatttta

SEQ ID NO: 71497 - DNA, 25 bp, Canis familiaris
ctctatttgtcaaccccgatttagt

SEQ ID NO: 71498 - DNA, 25 bp, Canis familiaris
ctcttgattggctgtcatagccatt

SEQ ID NO: 71499 - DNA, 25 bp, Canis familiaris
ctcttattggatttagtcagctcat

SEQ ID NO: 71500 - DNA, 25 bp, Canis familiaris
ctgctgtgatcggtttcagtacttt

SEQ ID NO: 71501 - DNA, 25 bp, Canis familiaris
ctcgtatcatgctttttgacacttt

SEQ ID NO: 71502 - DNA, 25 bp, Canis familiaris
ctcttctagttttctgacaccttta

SEQ ID NO: 71503 - DNA, 25 bp, Canis familiaris
ctcatttattttttctagtccctat

SEQ ID NO: 71504 - DNA, 25 bp, Canis familiaris
ctaattattgtttattccaccgaat

SEQ ID NO: 71505 - DNA, 25 bp, Canis familiaris
ctaattacaattttctcagcaccaa

SEQ ID NO: 71506 - DNA, 25 bp, Canis familiaris
ctaaggacacagtggcgcagcacct

SEQ ID NO: 71507 - DNA, 25 bp, Canis familiaris
ctaagggtgcggcggcagcacctgc

SEQ ID NO: 71508 - DNA, 25 bp, Canis familiaris
ctcaaccgtgcaccgtgacggtcag

SEQ ID NO: 71509 - DNA, 25 bp, Canis familiaris
ctcccacgtcgacatgacggtcaac

SEQ ID NO: 71510 - DNA, 25 bp, Canis familiaris
ctcaccggatcctcaacgtgtagtc

SEQ ID NO: 71511 - DNA, 25 bp, Canis familiaris
ctcaccccttcaccaaactgaagtc

SEQ ID NO: 71512 - DNA, 25 bp, Canis familiaris
gctgtacccctcacgaattaaggac

SEQ ID NO: 71513 - DNA, 25 bp, Canis familiaris
ctctaacaccacaactgaagtaaaa

SEQ ID NO: 71514 - DNA, 25 bp, Canis familiaris
ctcatcccccactcttgaaaataat

SEQ ID NO: 71515 - DNA, 25 bp, Canis familiaris
gctttcccggcaagttaagacgaat

SEQ ID NO: 71516 - DNA, 25 bp, Canis familiaris
ctcttccacggtgtatccagacgta

SEQ ID NO: 71517 - DNA, 25 bp, Canis familiaris
ctctgtacctgggaaatctcagtcc

SEQ ID NO: 71518 - DNA, 25 bp, Canis familiaris
ctctaatccgcactcaaactatttt

SEQ ID NO: 71519 - DNA, 25 bp, Canis familiaris
ctcaacacacaccatcagaattcac

SEQ ID NO: 71520 - DNA, 25 bp, Canis familiaris
ctcaatcccaccttagaatcactgt

SEQ ID NO: 71521 - DNA, 25 bp, Canis familiaris
ctgaacccagccacatttagcaggt

SEQ ID NO: 71522 - DNA, 25 bp, Canis familiaris
ctaactccgacagcatctttaattc

SEQ ID NO: 71523 - DNA, 25 bp, Canis familiaris
ctaagtcctaaaatctaagaaccag

SEQ ID NO: 71524 - DNA, 25 bp, Canis familiaris
ctaacatcgcatttcatttaaaaaa

SEQ ID NO: 71525 - DNA, 25 bp, Canis familiaris
ctcaattcctgatcttgtccattaa

SEQ ID NO: 71526 - DNA, 25 bp, Canis familiaris
ctcacttgcctttttaccatacata

SEQ ID NO: 71527 - DNA, 25 bp, Canis familiaris
ctcaccagccttagtgttcgtacca

SEQ ID NO: 71528 - DNA, 25 bp, Canis familiaris
ctcaccccttcacggggtagctcag

SEQ ID NO: 71529 - DNA, 25 bp, Canis familiaris
ctcacccgtcccggggtggatgagt

SEQ ID NO: 71530 - DNA, 25 bp, Canis familiaris
ctaaccgtcacttgggactggcagc

SEQ ID NO: 71531 - DNA, 25 bp, Canis familiaris
ctaaccgctcacctcaaagtggagg

SEQ ID NO: 71532 - DNA, 25 bp, Canis familiaris
ctgtacccactgttaagttggtggc

SEQ ID NO: 71533 - DNA, 25 bp, Canis familiaris
ctaacccactacctgactggggctg

SEQ ID NO: 71534 - DNA, 25 bp, Canis familiaris
ctaacctccttggccagtgtgggag

SEQ ID NO: 71535 - DNA, 25 bp, Canis familiaris
ctaatccccctgactagtgatgaca

SEQ ID NO: 71536 - DNA, 25 bp, Canis familiaris
ctcagtcccttcaacacaggatgga

SEQ ID NO: 71537 - DNA, 25 bp, Canis familiaris
ctcatgtggcctacatgtgcctggc

SEQ ID NO: 71538 - DNA, 25 bp, Canis familiaris
ctcatggcccacatggcctccaagg

SEQ ID NO: 71539 - DNA, 25 bp, Canis familiaris
ctcagagcttcgggagtccgaaggt

SEQ ID NO: 71540 - DNA, 25 bp, Canis familiaris
ctcgagttccgcgtacgagtcaggt

SEQ ID NO: 71541 - DNA, 25 bp, Canis familiaris
ctcattggttctgtagccgtcggat

SEQ ID NO: 71542 - DNA, 25 bp, Canis familiaris
ctcatgggcctctttgagccaggag

SEQ ID NO: 71543 - DNA, 25 bp, Canis familiaris
ctcaatgacaactttgtcaagctca

SEQ ID NO: 71544 - DNA, 25 bp, Canis familiaris
ctaagactcagccttgacaagatgc

SEQ ID NO: 71545 - DNA, 25 bp, Canis familiaris
ctcacacagcgccagttacataatg

SEQ ID NO: 71546 - DNA, 25 bp, Canis familiaris
ctcactcacagccagctaactgaca

SEQ ID NO: 71547 - DNA, 25 bp, Canis familiaris
ctcagcatcacaggtgctggctgct

SEQ ID NO: 71548 - DNA, 25 bp, Canis familiaris
ctcagtcatcagggttgcctaatat

SEQ ID NO: 71549 - DNA, 25 bp, Canis familiaris
ctcagatcaagagactcctcagtga

SEQ ID NO: 71550 - DNA, 25 bp, Canis familiaris
ctcaacaatgctgaacatctcgccc

SEQ ID NO: 71551 - DNA, 25 bp, Canis familiaris
ctcaacaaatcccagtctctgacca

SEQ ID NO: 71552 - DNA, 25 bp, Canis familiaris
ctcacacaacctctgtttgtccaag

SEQ ID NO: 71553 - DNA, 25 bp, Canis familiaris
ctcaacgaccactttgtcaagctca

SEQ ID NO: 71554 - DNA, 25 bp, Canis familiaris
aaggagtacacggtgttcctgacca

SEQ ID NO: 71555 - DNA, 25 bp, Canis familiaris
ctaatcccccatttgtacaacatgg

SEQ ID NO: 71556 - DNA, 25 bp, Canis familiaris
ctcttccccacctgattaacagtgg

SEQ ID NO: 71557 - DNA, 25 bp, Canis familiaris
ctcttccaggacgtgcagaaaccgt

SEQ ID NO: 71558 - DNA, 25 bp, Canis familiaris
ctctacggaatcgcgggaccagtaa

SEQ ID NO: 71559 - DNA, 25 bp, Canis familiaris
ctctacctagccgcgggacggataa

SEQ ID NO: 71560 - DNA, 25 bp, Canis familiaris
ctcacacccccaggcagggttggaa

SEQ ID NO: 71561 - DNA, 25 bp, Canis familiaris
ctcaaactcctctgggtggggaaag

SEQ ID NO: 71562 - DNA, 25 bp, Canis familiaris
ctgaaagtattttgtggtccgaaag

SEQ ID NO: 71563 - DNA, 25 bp, Canis familiaris
ctaattggagtttgaggcccctaag

SEQ ID NO: 71564 - DNA, 25 bp, Canis familiaris
ctcagactggagaggggagcgccct

SEQ ID NO: 71565 - DNA, 25 bp, Canis familiaris
ctcaacgacatggcggccgagggcg

SEQ ID NO: 71566 - DNA, 25 bp, Canis familiaris
ctctcacgatatccgtgccctatag

SEQ ID NO: 71567 - DNA, 25 bp, Canis familiaris
ctcatccgaaccctgcgaatgtatt

SEQ ID NO: 71568 - DNA, 25 bp, Canis familiaris
ctcacacccacacctggatgaggtt

SEQ ID NO: 71569 - DNA, 25 bp, Canis familiaris
ctcaccctcacaaccgaaggtgggg

SEQ ID NO: 71570 - DNA, 25 bp, Canis familiaris
ctcatcctacaccccgaagtgaagg

SEQ ID NO: 71571 - DNA, 25 bp, Canis familiaris
ctcatttctacaacaggagcgctga

SEQ ID NO: 71572 - DNA, 25 bp, Canis familiaris
ctcttctgccaaacgggccatgcag

SEQ ID NO: 71573 - DNA, 25 bp, Canis familiaris
ctcttacctagggcggctcatgaaa

SEQ ID NO: 71574 - DNA, 25 bp, Canis familiaris
ctctaatcgacatgttgcctcaaca

SEQ ID NO: 71575 - DNA, 25 bp, Canis familiaris
ctctcaaaactcgggaccaacatgt

SEQ ID NO: 71576 - DNA, 25 bp, Canis familiaris
ctctcaattactcaatttgcaacta

SEQ ID NO: 71577 - DNA, 25 bp, Canis familiaris
ctcttactactggaattcaccacca

SEQ ID NO: 71578 - DNA, 25 bp, Canis familiaris
ctctcaacagttgcaatccttaccc

SEQ ID NO: 71579 - DNA, 25 bp, Canis familiaris
ctctcaacaggctggtccattcagg

SEQ ID NO: 71580 - DNA, 25 bp, Canis familiaris
ctcagaaagatctgttccttcccct

SEQ ID NO: 71581 - DNA, 25 bp, Canis familiaris
ctcaatgaggtctgcttcttacagc

SEQ ID NO: 71582 - DNA, 25 bp, Canis familiaris
ctaatcgctacaagcctctttggct

SEQ ID NO: 71583 - DNA, 25 bp, Canis familiaris
ctcaatcctcaaggcccttatcgta

SEQ ID NO: 71584 - DNA, 25 bp, Canis familiaris
ccagcatttcgatcctcgtcaggtg

SEQ ID NO: 71585 - DNA, 25 bp, Canis familiaris
ctcacatttatacagccgaagtgct

SEQ ID NO: 71586 - DNA, 25 bp, Canis familiaris
ctcatgcttatatttagcccaggct

SEQ ID NO: 71587 - DNA, 25 bp, Canis familiaris
ctcagcaccaaattacttagatgta

SEQ ID NO: 71588 - DNA, 25 bp, Canis familiaris
ctcactccacagttagctgtgtgat

SEQ ID NO: 71589 - DNA, 25 bp, Canis familiaris
ctcactctggcgttggtgtgggtca

SEQ ID NO: 71590 - DNA, 25 bp, Canis familiaris
ctcactcacgcgtctattttggtag

SEQ ID NO: 71591 - DNA, 25 bp, Canis familiaris
ctcactgaggagtctgcttttccct

SEQ ID NO: 71592 - DNA, 25 bp, Canis familiaris
ctcacttctgagtctgaatctaccc

SEQ ID NO: 71593 - DNA, 25 bp, Canis familiaris
ctcacactctgctacatgatcatca

SEQ ID NO: 71594 - DNA, 25 bp, Canis familiaris
ctcagcagcatttcacagatcagcg

SEQ ID NO: 71595 - DNA, 25 bp, Canis familiaris
ctcagctgctcagatcgccagcaga

SEQ ID NO: 71596 - DNA, 25 bp, Canis familiaris
ctcaggtcatggtcccaggaccctt

SEQ ID NO: 71597 - DNA, 25 bp, Canis familiaris
ctcagggtcgtggggctgagccctg

SEQ ID NO: 71598 - DNA, 25 bp, Canis familiaris
ctcagggtcggcgtgttggtggagc

SEQ ID NO: 71599 - DNA, 25 bp, Canis familiaris
ctcatggggctttgtttcctgaagg

SEQ ID NO: 71600 - DNA, 25 bp, Canis familiaris
ctctagaggccttataccattcaag

SEQ ID NO: 71601 - DNA, 25 bp, Canis familiaris
ctctaggggtcctcagctatcatgg

SEQ ID NO: 71602 - DNA, 25 bp, Canis familiaris
ctcacatgaaggccagcacccttat

SEQ ID NO: 71603 - DNA, 25 bp, Canis familiaris
ctgttgttgggacccctatcaattc

SEQ ID NO: 71604 - DNA, 25 bp, Canis familiaris
ctcttgttttgagccttaacatcta

SEQ ID NO: 71605 - DNA, 25 bp, Canis familiaris
ctctgtcctttagacttgaactttt

SEQ ID NO: 71606 - DNA, 25 bp, Canis familiaris
ctcttccctctagacgctgagagtt

SEQ ID NO: 71607 - DNA, 25 bp, Canis familiaris
ctcacttcccagagacctgaattca

SEQ ID NO: 71608 - DNA, 25 bp, Canis familiaris
ctcaactcccacacacagggacgag

SEQ ID NO: 71609 - DNA, 25 bp, Canis familiaris
ctcaccagcccctgaaggggccagt

SEQ ID NO: 71610 - DNA, 25 bp, Canis familiaris
ctcaccccggggaagaggggagctg

SEQ ID NO: 71611 - DNA, 25 bp, Canis familiaris
ctcacgccctgggggagggggatgc

SEQ ID NO: 71612 - DNA, 25 bp, Canis familiaris
ctcacctcgccctgggagggcgacg

SEQ ID NO: 71613 - DNA, 25 bp, Canis familiaris
ctcagcagcacgttttgggaagggt

SEQ ID NO: 71614 - DNA, 25 bp, Canis familiaris
ctcagcttcttcaggcggtagctga

SEQ ID NO: 71615 - DNA, 25 bp, Canis familiaris
ctcagcactttcttagcaggttcta

SEQ ID NO: 71616 - DNA, 25 bp, Canis familiaris
ctctcaggcttcttccaggttaaat

SEQ ID NO: 71617 - DNA, 25 bp, Canis familiaris
ctctcagacacttctagcaggatct

SEQ ID NO: 71618 - DNA, 25 bp, Canis familiaris
ctctaggcagctgctgtagcctcac

SEQ ID NO: 71619 - DNA, 25 bp, Canis familiaris
ctcgatcaagaggctgaccctgcag

SEQ ID NO: 71620 - DNA, 25 bp, Canis familiaris
ctcagagagaaggcagcagccccag

SEQ ID NO: 71621 - DNA, 25 bp, Canis familiaris
ctcaagaggatggtgcgcctggcgg

SEQ ID NO: 71622 - DNA, 25 bp, Canis familiaris
ctcatcaaggtggagagcgccgcgg

SEQ ID NO: 71623 - DNA, 25 bp, Canis familiaris
ctctcagcagctatagggtgggggc

SEQ ID NO: 71624 - DNA, 25 bp, Canis familiaris
ctctcaggggcatgatcaggggggc

SEQ ID NO: 71625 - DNA, 25 bp, Canis familiaris
ctcaaggatggcctgttgcgtgggg

SEQ ID NO: 71626 - DNA, 25 bp, Canis familiaris
ctcactggcatggccttccgtgttc

SEQ ID NO: 71627 - DNA, 25 bp, Canis familiaris
ctcaccgatgccatgtgcagggacc

SEQ ID NO: 71628 - DNA, 25 bp, Canis familiaris
ctcacggatgccagtctcataacaa

SEQ ID NO: 71629 - DNA, 25 bp, Canis familiaris
ctcatcttcgacagtgcacaaaaac

SEQ ID NO: 71630 - DNA, 25 bp, Canis familiaris
ctcactgtcgtgcgtggcaagtacg

SEQ ID NO: 71631 - DNA, 25 bp, Canis familiaris
ctcctgtctgtacagggcagctccc

SEQ ID NO: 71632 - DNA, 25 bp, Canis familiaris
ctccggcatgtgcaaggccggcttc

SEQ ID NO: 71633 - DNA, 25 bp, Canis familiaris
cccgaatgctgacattgacgtagtc

SEQ ID NO: 71634 - DNA, 25 bp, Canis familiaris
ctgcctaactatctggactttgccg

SEQ ID NO: 71635 - DNA, 25 bp, Canis familiaris
ctccttaaatgcctaactttgttgg

SEQ ID NO: 71636 - DNA, 25 bp, Canis familiaris
ctcctaaactgatgaaggttgtaag

SEQ ID NO: 71637 - DNA, 25 bp, Canis familiaris
ctctctcaaatttgtacagggagat

SEQ ID NO: 71638 - DNA, 25 bp, Canis familiaris
ctcacaactattctccagaagaagg

SEQ ID NO: 71639 - DNA, 25 bp, Canis familiaris
ctcaaaccatcacaccagaacaaag

SEQ ID NO: 71640 - DNA, 25 bp, Canis familiaris
ctcatataccggctccagactaaag

SEQ ID NO: 71641 - DNA, 25 bp, Canis familiaris
ctctatggcggatacgcagcctaca

SEQ ID NO: 71642 - DNA, 25 bp, Canis familiaris
ctcaggggcagctcacagagcgccc

SEQ ID NO: 71643 - DNA, 25 bp, Canis familiaris
ctcagcggggccaacatcatgtgcc

SEQ ID NO: 71644 - DNA, 25 bp, Canis familiaris
ctcacacagatgcactgacacatgt

SEQ ID NO: 71645 - DNA, 25 bp, Canis familiaris
ctcatcatagtggctgtgacgattg

SEQ ID NO: 71646 - DNA, 25 bp, Canis familiaris
ctcacagcagcttcagctgcctggt

SEQ ID NO: 71647 - DNA, 25 bp, Canis familiaris
ctcacacagcttggctttgcttttc

SEQ ID NO: 71648 - DNA, 25 bp, Canis familiaris
ctcacaggttgctttctcttatatc

SEQ ID NO: 71649 - DNA, 25 bp, Canis familiaris
ctccatctttcctgcctggaaaggg

SEQ ID NO: 71650 - DNA, 25 bp, Canis familiaris
ctcacctgacttttacactgtttct

SEQ ID NO: 71651 - DNA, 25 bp, Canis familiaris
ctccctggatcgagtcactgatttt

SEQ ID NO: 71652 - DNA, 25 bp, Canis familiaris
ctcactgggatcctttactcgtatt

SEQ ID NO: 71653 - DNA, 25 bp, Canis familiaris
ctcgtggtgtcgagcataccttctt

SEQ ID NO: 71654 - DNA, 25 bp, Canis familiaris
ctcagtggtttggtgccaccttcag

SEQ ID NO: 71655 - DNA, 25 bp, Canis familiaris
ctgcgtgggtgtagaccattctgtg

SEQ ID NO: 71656 - DNA, 25 bp, Canis familiaris
ctcagaaggcttcagaaattgatga

SEQ ID NO: 71657 - DNA, 25 bp, Canis familiaris
ctcaccaggcgccagggcaattgta

SEQ ID NO: 71658 - DNA, 25 bp, Canis familiaris
ctcactgaggtgccaggtgttgatg

SEQ ID NO: 71659 - DNA, 25 bp, Canis familiaris
ctcacgcactggctggtgggatgta

SEQ ID NO: 71660 - DNA, 25 bp, Canis familiaris
ctcacacactggtggtgctctgtga

SEQ ID NO: 71661 - DNA, 25 bp, Canis familiaris
ctctacatattctcgtcatgcttgc

SEQ ID NO: 71662 - DNA, 25 bp, Canis familiaris
ctcaggctacccggattcattgcct

SEQ ID NO: 71663 - DNA, 25 bp, Canis familiaris
ctcagatgtcggttggtacgtcctc

SEQ ID NO: 71664 - DNA, 25 bp, Canis familiaris
ctcttgatctagctggtatctgccc

SEQ ID NO: 71665 - DNA, 25 bp, Canis familiaris
ctcatatgagcttcgggctctccac

SEQ ID NO: 71666 - DNA, 25 bp, Canis familiaris
ctaatcaataatcggctcatctcca

SEQ ID NO: 71667 - DNA, 25 bp, Canis familiaris
ctcaaactcaacagcttctccaagc

SEQ ID NO: 71668 - DNA, 25 bp, Canis familiaris
ctcaaaatccattcctttccaaata

SEQ ID NO: 71669 - DNA, 25 bp, Canis familiaris
ctcctgaatctatcctttcaaaagg

SEQ ID NO: 71670 - DNA, 25 bp, Canis familiaris
ctccgaattctccccgagaaacgag

SEQ ID NO: 71671 - DNA, 25 bp, Canis familiaris
ctccgcgtccccatggagaagacgg

SEQ ID NO: 71672 - DNA, 25 bp, Canis familiaris
ctcgggtggcttctgggcaaacgag

SEQ ID NO: 71673 - DNA, 25 bp, Canis familiaris
ctccactgggtaatgtggaaaaaag

SEQ ID NO: 71674 - DNA, 25 bp, Canis familiaris
ctctcactggaggttatttaaataa

SEQ ID NO: 71675 - DNA, 25 bp, Canis familiaris
ctctgagacgtggtttaatagtaaa

SEQ ID NO: 71676 - DNA, 25 bp, Canis familiaris
ctcggacatgtcatggtgaatggcc

SEQ ID NO: 71677 - DNA, 25 bp, Canis familiaris
ctcggccatgtcatggtaaacggtc

SEQ ID NO: 71678 - DNA, 25 bp, Canis familiaris
ctctgcccagtctggaaagaccctc

SEQ ID NO: 71679 - DNA, 25 bp, Canis familiaris
ctcatcctgtccacaaaatagccct

SEQ ID NO: 71680 - DNA, 25 bp, Canis familiaris
ctcattcttctaaaactccagcctt

SEQ ID NO: 71681 - DNA, 25 bp, Canis familiaris
ctcattttcatagtcactgatccac

SEQ ID NO: 71682 - DNA, 25 bp, Canis familiaris
ctcatgcctctaaacgtgatccatc

SEQ ID NO: 71683 - DNA, 25 bp, Canis familiaris
ctctagcgctgcagcacttatcaac

SEQ ID NO: 71684 - DNA, 25 bp, Canis familiaris
ctctcaccaacgctttcaaacgatt

SEQ ID NO: 71685 - DNA, 25 bp, Canis familiaris
ctcttcccctaattccaatactagt

SEQ ID NO: 71686 - DNA, 25 bp, Canis familiaris
ctcttctcctgggacccaaatctgg

SEQ ID NO: 71687 - DNA, 25 bp, Canis familiaris
ctcaatcccggaactccaggattac

SEQ ID NO: 71688 - DNA, 25 bp, Canis familiaris
ctcattccgttatcctcaggactac

SEQ ID NO: 71689 - DNA, 25 bp, Canis familiaris
ctcttctcgttacctctggtacaaa

SEQ ID NO: 71690 - DNA, 25 bp, Canis familiaris
ctcatgtctcctcatcgttagtaga

SEQ ID NO: 71691 - DNA, 25 bp, Canis familiaris
ctcagttcctcagccagtagggatg

SEQ ID NO: 71692 - DNA, 25 bp, Canis familiaris
ctcagggcctacccaatgctagtga

SEQ ID NO: 71693 - DNA, 25 bp, Canis familiaris
ctcaggactcccccaagtgagggag

SEQ ID NO: 71694 - DNA, 25 bp, Canis familiaris
ctcagttccccacagggacaggcag

SEQ ID NO: 71695 - DNA, 25 bp, Canis familiaris
ctcagcttcccaaggacgcgtaggg

SEQ ID NO: 71696 - DNA, 25 bp, Canis familiaris
ctcactcaccctgaggacttgggga

SEQ ID NO: 71697 - DNA, 25 bp, Canis familiaris
ctcacccatccgaactactatggct

SEQ ID NO: 71698 - DNA, 25 bp, Canis familiaris
ctcagaactccagactacatacagg

SEQ ID NO: 71699 - DNA, 25 bp, Canis familiaris
ctcaaaccccgagacaactcatcaa

SEQ ID NO: 71700 - DNA, 25 bp, Canis familiaris
ctcagacccccgtaataaatccatg

SEQ ID NO: 71701 - DNA, 25 bp, Canis familiaris
ctcagggctccttggaaacacccat

SEQ ID NO: 71702 - DNA, 25 bp, Canis familiaris
ctcagcccctcttgggaaacctgag

SEQ ID NO: 71703 - DNA, 25 bp, Canis familiaris
ctcactctctgtgcggggcaataaa

SEQ ID NO: 71704 - DNA, 25 bp, Canis familiaris
ctgccctcgtaggttggcctacaag

SEQ ID NO: 71705 - DNA, 25 bp, Canis familiaris
ctgcatgacttgcaggttggcctca

SEQ ID NO: 71706 - DNA, 25 bp, Canis familiaris
ctcagaagtgcaagctgattcccca

SEQ ID NO: 71707 - DNA, 25 bp, Canis familiaris
ctcagagaattttattgccatccaa

SEQ ID NO: 71708 - DNA, 25 bp, Canis familiaris
ctcacaaagtcttttctcagccagc

SEQ ID NO: 71709 - DNA, 25 bp, Canis familiaris
ctcaaattgtcactgtctgtagcac

SEQ ID NO: 71710 - DNA, 25 bp, Canis familiaris
ctcaaaggcatcctgggctacactg

SEQ ID NO: 71711 - DNA, 25 bp, Canis familiaris
ctcaatgggcagctgcggtccatct

SEQ ID NO: 71712 - DNA, 25 bp, Canis familiaris
ctcaatgggcagcttcgatccattc

SEQ ID NO: 71713 - DNA, 25 bp, Canis familiaris
ctcaatttgcagctgtctctctgat

SEQ ID NO: 71714 - DNA, 25 bp, Canis familiaris
ctcagtttagttatctgcaaattga

SEQ ID NO: 71715 - DNA, 25 bp, Canis familiaris
ctcagaactcgtttgtgtccaatgg

SEQ ID NO: 71716 - DNA, 25 bp, Canis familiaris
ctcattgaaagtttggatcctgatg

SEQ ID NO: 71717 - DNA, 25 bp, Canis familiaris
ctcagctcagaaccttgtgacctgt

SEQ ID NO: 71718 - DNA, 25 bp, Canis familiaris
ctcagccaagtgtctctgtgtctgg

SEQ ID NO: 71719 - DNA, 25 bp, Canis familiaris
ctcagccctgcctcgatgttgaggc

SEQ ID NO: 71720 - DNA, 25 bp, Canis familiaris
ctcaggccacctagcctgcatatgt

SEQ ID NO: 71721 - DNA, 25 bp, Canis familiaris
ctcaggagccctatgccttgtaagt

SEQ ID NO: 71722 - DNA, 25 bp, Canis familiaris
ctcaggcccctcattttatagaagg

SEQ ID NO: 71723 - DNA, 25 bp, Canis familiaris
ctcagagcacccattttttgttcaa

SEQ ID NO: 71724 - DNA, 25 bp, Canis familiaris
ctcagacctgagtttctgttgattt

SEQ ID NO: 71725 - DNA, 25 bp, Canis familiaris
ctcagccttggttccttgtgagttt

SEQ ID NO: 71726 - DNA, 25 bp, Canis familiaris
ctcacttctttggcctgttgaattt

SEQ ID NO: 71727 - DNA, 25 bp, Canis familiaris
ctcactgtgctgatgtccatgtgtg

SEQ ID NO: 71728 - DNA, 25 bp, Canis familiaris
ctcacagctctgcattccagtggaa

SEQ ID NO: 71729 - DNA, 25 bp, Canis familiaris
ctcatcagcgatgattactttgaag

SEQ ID NO: 71730 - DNA, 25 bp, Canis familiaris
ctcaagaggaatgactgtttatgcc

SEQ ID NO: 71731 - DNA, 25 bp, Canis familiaris
ctctagagtactaccttatattgcc

SEQ ID NO: 71732 - DNA, 25 bp, Canis familiaris
ctcatggcattctccctttaagcca

SEQ ID NO: 71733 - DNA, 25 bp, Canis familiaris
ctcaggtggaacggcttgaaaggac

SEQ ID NO: 71734 - DNA, 25 bp, Canis familiaris
ctctcgttgtggtccatttttgggc

SEQ ID NO: 71735 - DNA, 25 bp, Canis familiaris
cccgattctgtgatcctttgggccc

SEQ ID NO: 71736 - DNA, 25 bp, Canis familiaris
ctcaagtactctttctctcttggtc

SEQ ID NO: 71737 - DNA, 25 bp, Canis familiaris
ctcaattcctcctttttgtgtgtga

SEQ ID NO: 71738 - DNA, 25 bp, Canis familiaris
ctcatttttaattccttttgtgaca

SEQ ID NO: 71739 - DNA, 25 bp, Canis familiaris
ctcaattttacctcccagtggacat

SEQ ID NO: 71740 - DNA, 25 bp, Canis familiaris
ctcattttcttccgtcacttaggaa

SEQ ID NO: 71741 - DNA, 25 bp, Canis familiaris
ctcttctttattcctcaactggaga

SEQ ID NO: 71742 - DNA, 25 bp, Canis familiaris
ctcttcttgttgggccagttgttgt

SEQ ID NO: 71743 - DNA, 25 bp, Canis familiaris
ctctttttaccagctttcttgcttt

SEQ ID NO: 71744 - DNA, 25 bp, Canis familiaris
ctgtaccaatgagattttccttttt

SEQ ID NO: 71745 - DNA, 25 bp, Canis familiaris
ctctacctgtgtcttttcatttttt

SEQ ID NO: 71746 - DNA, 25 bp, Canis familiaris
ctcacccgaggtattgcacttattt

SEQ ID NO: 71747 - DNA, 25 bp, Canis familiaris
ctcagcccaaggtcgtttctgttat

SEQ ID NO: 71748 - DNA, 25 bp, Canis familiaris
ctcaccccgagatttacatgctgtt

SEQ ID NO: 71749 - DNA, 25 bp, Canis familiaris
ctcaccccaggatgtattggtcaag

SEQ ID NO: 71750 - DNA, 25 bp, Canis familiaris
ctcaccccatggttggacctgtaat

SEQ ID NO: 71751 - DNA, 25 bp, Canis familiaris
ctcacctgcacttagaggaaatgtg

SEQ ID NO: 71752 - DNA, 25 bp, Canis familiaris
ctcacagccagcgtcaaggaagcgg

SEQ ID NO: 71753 - DNA, 25 bp, Canis familiaris
ctcacacctgagggagagaggcggc

SEQ ID NO: 71754 - DNA, 25 bp, Canis familiaris
ctcactgctctgtggaaatgggcca

SEQ ID NO: 71755 - DNA, 25 bp, Canis familiaris
ctcattcttggatgctcattggccc

SEQ ID NO: 71756 - DNA, 25 bp, Canis familiaris
ctcttgcgcctctatcatgattgag

SEQ ID NO: 71757 - DNA, 25 bp, Canis familiaris
ctcaaggctctggagctgtggatgc

SEQ ID NO: 71758 - DNA, 25 bp, Canis familiaris
ctcatcaggccatggtggcagctgt

SEQ ID NO: 71759 - DNA, 25 bp, Canis familiaris
ctcacaggtcaagctggacgtcaga

SEQ ID NO: 71760 - DNA, 25 bp, Canis familiaris
ctcactcagtcagtccttacttagt

SEQ ID NO: 71761 - DNA, 25 bp, Canis familiaris
ctcactatgtctgccattttcgatt

SEQ ID NO: 71762 - DNA, 25 bp, Canis familiaris
ctcactgttctatctttccagcatt

SEQ ID NO: 71763 - DNA, 25 bp, Canis familiaris
ctctatggttactttgctgccgtag

SEQ ID NO: 71764 - DNA, 25 bp, Canis familiaris
ctctttgtgtacttcagtcttggaa

SEQ ID NO: 71765 - DNA, 25 bp, Canis familiaris
ctctttttaatctatccctgtgacc

SEQ ID NO: 71766 - DNA, 25 bp, Canis familiaris
ctcagtgttgtattttgccgtgtcc

SEQ ID NO: 71767 - DNA, 25 bp, Canis familiaris
ctcagctattgtctttggtgccatg

SEQ ID NO: 71768 - DNA, 25 bp, Canis familiaris
ctcacataagattcttctgtttcag

SEQ ID NO: 71769 - DNA, 25 bp, Canis familiaris
ctcattaaatcagttatggttcctt

SEQ ID NO: 71770 - DNA, 25 bp, Canis familiaris
ctcagcccaatggctttgtttccat

SEQ ID NO: 71771 - DNA, 25 bp, Canis familiaris
ctcagtcacacagtctttcattcat

SEQ ID NO: 71772 - DNA, 25 bp, Canis familiaris
ctcaccacacaggcagtgcctactg

SEQ ID NO: 71773 - DNA, 25 bp, Canis familiaris
ctcacacaccggggttgcagtgggg

SEQ ID NO: 71774 - DNA, 25 bp, Canis familiaris
ctcacagcaccatgtttacaggggg

SEQ ID NO: 71775 - DNA, 25 bp, Canis familiaris
ctcactgcctgcttgttttcagagg

SEQ ID NO: 71776 - DNA, 25 bp, Canis familiaris
ctcactgcgcttaattctgtgcaca

SEQ ID NO: 71777 - DNA, 25 bp, Canis familiaris
ctcactgcacttaatcgcatctgta

SEQ ID NO: 71778 - DNA, 25 bp, Canis familiaris
ctcactcacttacctgttgtacaga

SEQ ID NO: 71779 - DNA, 25 bp, Canis familiaris
ctcaagcctcatggtcttttccaga

SEQ ID NO: 71780 - DNA, 25 bp, Canis familiaris
ctcaaccatcagctctttctgtacg

SEQ ID NO: 71781 - DNA, 25 bp, Canis familiaris
ctcagccttagcactttgttcactg

SEQ ID NO: 71782 - DNA, 25 bp, Canis familiaris
ctcagtatttgagctttgtctcctt

SEQ ID NO: 71783 - DNA, 25 bp, Canis familiaris
ctcagtttgtacttgattgtttttc

SEQ ID NO: 71784 - DNA, 25 bp, Canis familiaris
ctcactttgtgatttgtttggggat

SEQ ID NO: 71785 - DNA, 25 bp, Canis familiaris
ctcactttgttagctttgttctgca

SEQ ID NO: 71786 - DNA, 25 bp, Canis familiaris
ctcacatatgtgatttcttgtttac

SEQ ID NO: 71787 - DNA, 25 bp, Canis familiaris
ctcacaattgccttgacctgtagtc

SEQ ID NO: 71788 - DNA, 25 bp, Canis familiaris
ctcaggcattgtttacgctataggt

SEQ ID NO: 71789 - DNA, 25 bp, Canis familiaris
ctcagagtctgattaacacgaaggt

SEQ ID NO: 71790 - DNA, 25 bp, Canis familiaris
ctcacagctcaaggaccagcgcaag

SEQ ID NO: 71791 - DNA, 25 bp, Canis familiaris
ctcacagcctagggctggccaaggt

SEQ ID NO: 71792 - DNA, 25 bp, Canis familiaris
ctcacaggtccttgtgtgcacacag

SEQ ID NO: 71793 - DNA, 25 bp, Canis familiaris
ctcacaggtctcttaatcacactga

SEQ ID NO: 71794 - DNA, 25 bp, Canis familiaris
ctcacggcgctcttcaaggagcagc

SEQ ID NO: 71795 - DNA, 25 bp, Canis familiaris
ctcacggcgcttacgatgcagaagc

SEQ ID NO: 71796 - DNA, 25 bp, Canis familiaris
ctcaggctgtgtgacctgctgtagc

SEQ ID NO: 71797 - DNA, 25 bp, Canis familiaris
ctcagcgctgagatcaatctgccta

SEQ ID NO: 71798 - DNA, 25 bp, Canis familiaris
ctcactgctggggagtccctgccac

SEQ ID NO: 71799 - DNA, 25 bp, Canis familiaris
ctcatcagtgggggaccctatcctt

SEQ ID NO: 71800 - DNA, 25 bp, Canis familiaris
ctcatcagtcggagactcatctcga

SEQ ID NO: 71801 - DNA, 25 bp, Canis familiaris
ctccagtcgggatatcagtcggtga

SEQ ID NO: 71802 - DNA, 25 bp, Canis familiaris
ctcttctcgggattcaacttgagga

SEQ ID NO: 71803 - DNA, 25 bp, Canis familiaris
ctcttatcaggatgagcttctcgtg

SEQ ID NO: 71804 - DNA, 25 bp, Canis familiaris
ctcttgagccgagacctgtgagctg

SEQ ID NO: 71805 - DNA, 25 bp, Canis familiaris
ctcttggccagagcccatctagagt

SEQ ID NO: 71806 - DNA, 25 bp, Canis familiaris
ctcatggtgaagtccctcatcagaa

SEQ ID NO: 71807 - DNA, 25 bp, Canis familiaris
ctctggtgaaccacagacggagccc

SEQ ID NO: 71808 - DNA, 25 bp, Canis familiaris
ctcagagtgaaccagacagacccca

SEQ ID NO: 71809 - DNA, 25 bp, Canis familiaris
ctcacgtgtacactctagagcaccc

SEQ ID NO: 71810 - DNA, 25 bp, Canis familiaris
ctcacgtgtgagcagctgaagaacc

SEQ ID NO: 71811 - DNA, 25 bp, Canis familiaris
ctcatccttgagctcttgaggaccc

SEQ ID NO: 71812 - DNA, 25 bp, Canis familiaris
ctcatgtcttgtgccttgggttaat

SEQ ID NO: 71813 - DNA, 25 bp, Canis familiaris
ctcagtctttgggcattggggtggg

SEQ ID NO: 71814 - DNA, 25 bp, Canis familiaris
ctcagtctggggtctagggggatgg

SEQ ID NO: 71815 - DNA, 25 bp, Canis familiaris
ctcagtagagtccactctgggggtg

SEQ ID NO: 71816 - DNA, 25 bp, Canis familiaris
ctcagaacagctggactgggcagcc

SEQ ID NO: 71817 - DNA, 25 bp, Canis familiaris
ctcacagcacagggcctggggcagc

SEQ ID NO: 71818 - DNA, 25 bp, Canis familiaris
ctcacacacacaggtgcttctggcc

SEQ ID NO: 71819 - DNA, 25 bp, Canis familiaris
ctcctatgagagggcccggctggag

SEQ ID NO: 71820 - DNA, 25 bp, Canis familiaris
ctcacaatgtgagcgacctggccag

SEQ ID NO: 71821 - DNA, 25 bp, Canis familiaris
ctcactagcagagccacctgaacag

SEQ ID NO: 71822 - DNA, 25 bp, Canis familiaris
ctcactgtcgcagcaatcctggaag

SEQ ID NO: 71823 - DNA, 25 bp, Canis familiaris
ctcacttccaccaagcatctggagc

SEQ ID NO: 71824 - DNA, 25 bp, Canis familiaris
ctcacttccaccaagcatctggagc

SEQ ID NO: 71825 - DNA, 25 bp, Canis familiaris
ctcacttccaccaagcatctggagc

SEQ ID NO: 71826 - DNA, 25 bp, Canis familiaris
ctctctagaaccagtctctagcccc

SEQ ID NO: 71827 - DNA, 25 bp, Canis familiaris
ctctcagaaagcaaatgtgccgagc

SEQ ID NO: 71828 - DNA, 25 bp, Canis familiaris
ctctcaaataggacatctcgatgga

SEQ ID NO: 71829 - DNA, 25 bp, Canis familiaris
ctctcatatatcttgtgcactatct

SEQ ID NO: 71830 - DNA, 25 bp, Canis familiaris
ctctatcagcactgggttctcctaa

SEQ ID NO: 71831 - DNA, 25 bp, Canis familiaris
ctctgtaccctgagtcttcttaact

SEQ ID NO: 71832 - DNA, 25 bp, Canis familiaris
ctctagtccctgtgtagtcattacc

SEQ ID NO: 71833 - DNA, 25 bp, Canis familiaris
ctcttcttccaggcttaggcattac

SEQ ID NO: 71834 - DNA, 25 bp, Canis familiaris
ctcttggttagtgtcaggctctgca

SEQ ID NO: 71835 - DNA, 25 bp, Canis familiaris
ctcctggttaatgtggacctccacc

SEQ ID NO: 71836 - DNA, 25 bp, Canis familiaris
ctcccctctgaagtatagaccctac

SEQ ID NO: 71837 - DNA, 25 bp, Canis familiaris
ctcttcctcgaaaaggtgctactgc

SEQ ID NO: 71838 - DNA, 25 bp, Canis familiaris
ctcttcttcgggaacgcatttcatc

SEQ ID NO: 71839 - DNA, 25 bp, Canis familiaris
ctcttctctgaggtgtaaatactat

SEQ ID NO: 71840 - DNA, 25 bp, Canis familiaris
ctcatcattgtgggtgtaacaattg

SEQ ID NO: 71841 - DNA, 25 bp, Canis familiaris
ctcaccatgctccggaagactattg

SEQ ID NO: 71842 - DNA, 25 bp, Canis familiaris
ctcattcagccgagggacctttgtg

SEQ ID NO: 71843 - DNA, 25 bp, Canis familiaris
ctcagtcacctgagcatctgactct

SEQ ID NO: 71844 - DNA, 25 bp, Canis familiaris
ctcatctccattcagcactgactaa

SEQ ID NO: 71845 - DNA, 25 bp, Canis familiaris
ctcatccaatctgaatctcccaagg

SEQ ID NO: 71846 - DNA, 25 bp, Canis familiaris
ctcaccaacatcctactgaactaga

SEQ ID NO: 71847 - DNA, 25 bp, Canis familiaris
ctcactcctacacacaaatctgaat

SEQ ID NO: 71848 - DNA, 25 bp, Canis familiaris
ctcagctcctccaggaagatctcaa

SEQ ID NO: 71849 - DNA, 25 bp, Canis familiaris
ctcagtcccagctggaagcatgctc

SEQ ID NO: 71850 - DNA, 25 bp, Canis familiaris
ctcacccagcaggcgctgaagcagg

SEQ ID NO: 71851 - DNA, 25 bp, Canis familiaris
ctcagccccaggactgattggtggg

SEQ ID NO: 71852 - DNA, 25 bp, Canis familiaris
ctcaggcctcaactctggttgtagc

SEQ ID NO: 71853 - DNA, 25 bp, Canis familiaris
ctcagtgccatgtcagattgtgccc

SEQ ID NO: 71854 - DNA, 25 bp, Canis familiaris
ctcagcgccatgaagatggagactg

SEQ ID NO: 71855 - DNA, 25 bp, Canis familiaris
ctcagctccagacttcgatacttaa

SEQ ID NO: 71856 - DNA, 25 bp, Canis familiaris
ctcagtccagtgttcagatttctac

SEQ ID NO: 71857 - DNA, 25 bp, Canis familiaris
ctcattggagtcttagtctcttact

SEQ ID NO: 71858 - DNA, 25 bp, Canis familiaris
ctcagatgtgcacctctagtgcctt

SEQ ID NO: 71859 - DNA, 25 bp, Canis familiaris
ctcagggcaggcgtaggagccgggg

SEQ ID NO: 71860 - DNA, 25 bp, Canis familiaris
ctcacctgctctgttgaggtctggt

SEQ ID NO: 71861 - DNA, 25 bp, Canis familiaris
ctcacccctctcgtgagggagcagc

SEQ ID NO: 71862 - DNA, 25 bp, Canis familiaris
ctcaccagtctccagcaggggactg

SEQ ID NO: 71863 - DNA, 25 bp, Canis familiaris
ctcagccttgctgcagcaggggaag

SEQ ID NO: 71864 - DNA, 25 bp, Canis familiaris
ctcacctgctctgctgcaggggaca

SEQ ID NO: 71865 - DNA, 25 bp, Canis familiaris
ctcaccgctgttcgctgaggaacaa

SEQ ID NO: 71866 - DNA, 25 bp, Canis familiaris
ctcatcccgtctctggaaagctggg

SEQ ID NO: 71867 - DNA, 25 bp, Canis familiaris
ctcacccagtctccagcaataatgg

SEQ ID NO: 71868 - DNA, 25 bp, Canis familiaris
ctcactcaagattgtcagcaatgca

SEQ ID NO: 71869 - DNA, 25 bp, Canis familiaris
ctcagccaggatgtgcaatagaatg

SEQ ID NO: 71870 - DNA, 25 bp, Canis familiaris
ctcagcacagggttgttcaaaggca

SEQ ID NO: 71871 - DNA, 25 bp, Canis familiaris
ctcatacagggaagcctgagaagcc

SEQ ID NO: 71872 - DNA, 25 bp, Canis familiaris
ctcgtcgcaggaacactgtcaaaca

SEQ ID NO: 71873 - DNA, 25 bp, Canis familiaris
ctcagtctggtgattcatatgctaa

SEQ ID NO: 71874 - DNA, 25 bp, Canis familiaris
ctcaccgggagacttgctcttaagg

SEQ ID NO: 71875 - DNA, 25 bp, Canis familiaris
ctcagcccagggatgtgccaataag

SEQ ID NO: 71876 - DNA, 25 bp, Canis familiaris
ctcaccagcaggctttgacgcaagt

SEQ ID NO: 71877 - DNA, 25 bp, Canis familiaris
ctctccagactggttgatcaccggc

SEQ ID NO: 71878 - DNA, 25 bp, Canis familiaris
ctctcccaatagaaatacccatccg

SEQ ID NO: 71879 - DNA, 25 bp, Canis familiaris
ctcacctccaaaagaaacgcttctg

SEQ ID NO: 71880 - DNA, 25 bp, Canis familiaris
ctcatccccactatatacaactttg

SEQ ID NO: 71881 - DNA, 25 bp, Canis familiaris
ctcacctcaggctgtagtcactttt

SEQ ID NO: 71882 - DNA, 25 bp, Canis familiaris
ctcagtgtcaactaaattactttgt

SEQ ID NO: 71883 - DNA, 25 bp, Canis familiaris
ctcactttacgagattccatcttgt

SEQ ID NO: 71884 - DNA, 25 bp, Canis familiaris
ctcactttcccatgatatctacttg

SEQ ID NO: 71885 - DNA, 25 bp, Canis familiaris
ctcttattcccatgattcctcgagt

SEQ ID NO: 71886 - DNA, 25 bp, Canis familiaris
ctcttttggctatgaatgcttaata

SEQ ID NO: 71887 - DNA, 25 bp, Canis familiaris
ctcttttcagtttttgcttatacac

SEQ ID NO: 71888 - DNA, 25 bp, Canis familiaris
ctcttgttctttctctgttaactaa

SEQ ID NO: 71889 - DNA, 25 bp, Canis familiaris
ctcttttcttctttcaatatgaagc

SEQ ID NO: 71890 - DNA, 25 bp, Canis familiaris
ctctccttttccataaggacgccag

SEQ ID NO: 71891 - DNA, 25 bp, Canis familiaris
ctcaccattttggctggaaggacag

SEQ ID NO: 71892 - DNA, 25 bp, Canis familiaris
ctcacctcatttatctgtcagaata

SEQ ID NO: 71893 - DNA, 25 bp, Canis familiaris
ctcagcctcttcattgtctaaatga

SEQ ID NO: 71894 - DNA, 25 bp, Canis familiaris
ctcagccattctgtctgttgcgtaa

SEQ ID NO: 71895 - DNA, 25 bp, Canis familiaris
ctcagccttcaggcctgtgtgtgaa

SEQ ID NO: 71896 - DNA, 25 bp, Canis familiaris
ctcagccttcacttgctgttgtgca

SEQ ID NO: 71897 - DNA, 25 bp, Canis familiaris
ctctactgtccaatgatgttgccaa

SEQ ID NO: 71898 - DNA, 25 bp, Canis familiaris
ctcataggtctgtaatttgtcaaat

SEQ ID NO: 71899 - DNA, 25 bp, Canis familiaris
ctcattccctagtatttggatatat

SEQ ID NO: 71900 - DNA, 25 bp, Canis familiaris
ctcagtaccttctatgcttgtcaaa

SEQ ID NO: 71901 - DNA, 25 bp, Canis familiaris
ctcagtcacctccagctttgatgag

SEQ ID NO: 71902 - DNA, 25 bp, Canis familiaris
ctcagtgtactctgccttatgcatg

SEQ ID NO: 71903 - DNA, 25 bp, Canis familiaris
ctcagtgtatccagtctctgtttcc

SEQ ID NO: 71904 - DNA, 25 bp, Canis familiaris
ctcagatctttcaggggtttcccat

SEQ ID NO: 71905 - DNA, 25 bp, Canis familiaris
ctcagacacctctggggacttccag

SEQ ID NO: 71906 - DNA, 25 bp, Canis familiaris
ctcagcaaagtctggcgtgatcaac

SEQ ID NO: 71907 - DNA, 25 bp, Canis familiaris
ctcagcatccagcctggtcggagag

SEQ ID NO: 71908 - DNA, 25 bp, Canis familiaris
ctcagtgccatgcgttcgctgaaag

SEQ ID NO: 71909 - DNA, 25 bp, Canis familiaris
ctcaggcaatgcccattcctgtggg

SEQ ID NO: 71910 - DNA, 25 bp, Canis familiaris
ctcagaccatcttctttcatgctgg

SEQ ID NO: 71911 - DNA, 25 bp, Canis familiaris
ctcagccccgcagtttgaggagctg

SEQ ID NO: 71912 - DNA, 25 bp, Canis familiaris
ctcagcagctggcaccttgagtggt

SEQ ID NO: 71913 - DNA, 25 bp, Canis familiaris
ctccaggtactgccttcagggttag

SEQ ID NO: 71914 - DNA, 25 bp, Canis familiaris
ctctcgggaactatcgcgactgtca

SEQ ID NO: 71915 - DNA, 25 bp, Canis familiaris
ctctggagagaattgcctcccgcgt

SEQ ID NO: 71916 - DNA, 25 bp, Canis familiaris
ctcagggaccttgcattccagatgg

SEQ ID NO: 71917 - DNA, 25 bp, Canis familiaris
ctcagggatcctagagtccgttgga

SEQ ID NO: 71918 - DNA, 25 bp, Canis familiaris
ctcggtcactctggggccagtttag

SEQ ID NO: 71919 - DNA, 25 bp, Canis familiaris
ctctagcccctggggacagctttag

SEQ ID NO: 71920 - DNA, 25 bp, Canis familiaris
ctctaccaacagggccgacgtggag

SEQ ID NO: 71921 - DNA, 25 bp, Canis familiaris
ctctaccaccctgttaggggcaaat

SEQ ID NO: 71922 - DNA, 25 bp, Canis familiaris
ctcttccactccattgttgggacat

SEQ ID NO: 71923 - DNA, 25 bp, Canis familiaris
ctctttcctctcagtgttgggtgat

SEQ ID NO: 71924 - DNA, 25 bp, Canis familiaris
ctctttccccagctggattagtgtc

SEQ ID NO: 71925 - DNA, 25 bp, Canis familiaris
ctctcggaccacgttgtgattcagg

SEQ ID NO: 71926 - DNA, 25 bp, Canis familiaris
ctcactgctcactcttagtgtcata

SEQ ID NO: 71927 - DNA, 25 bp, Canis familiaris
ctcacgctcctcttgatagcttgaa

SEQ ID NO: 71928 - DNA, 25 bp, Canis familiaris
ctcagccacccattgttcagatgaa

SEQ ID NO: 71929 - DNA, 25 bp, Canis familiaris
ctcacgcatctcatcttgtcagatg

SEQ ID NO: 71930 - DNA, 25 bp, Canis familiaris
ctcatggacatcttcctctgtgatg

SEQ ID NO: 71931 - DNA, 25 bp, Canis familiaris
ctcagaatgacaccctctggagcca

SEQ ID NO: 71932 - DNA, 25 bp, Canis familiaris
ctcagagcagcagccctctgaagcc

SEQ ID NO: 71933 - DNA, 25 bp, Canis familiaris
ctcatgcaagagctcgcacgaggcc

SEQ ID NO: 71934 - DNA, 25 bp, Canis familiaris
ctcatgccatggtctctgcaaggcc

SEQ ID NO: 71935 - DNA, 25 bp, Canis familiaris
ctcatcgattgatttacggcgctaa

SEQ ID NO: 71936 - DNA, 25 bp, Canis familiaris
ctcatcgattaactggctctgtgta

SEQ ID NO: 71937 - DNA, 25 bp, Canis familiaris
ctctaattcaactgcaaattccata

SEQ ID NO: 71938 - DNA, 25 bp, Canis familiaris
ctctaattcaactgccaattccact

SEQ ID NO: 71939 - DNA, 25 bp, Canis familiaris
ctccaattctactaacagtttccga

SEQ ID NO: 71940 - DNA, 25 bp, Canis familiaris
ctccttgctcttgaaacttcgtcga

SEQ ID NO: 71941 - DNA, 25 bp, Canis familiaris
ctcctacttggataactgtggtaat

SEQ ID NO: 71942 - DNA, 25 bp, Canis familiaris
ctctctttctagggacctgtggcta

SEQ ID NO: 71943 - DNA, 25 bp, Canis familiaris
ctcacctcaggtggagacgtgtggc

SEQ ID NO: 71944 - DNA, 25 bp, Canis familiaris
ctcacctgctgggggacatgtgggc

SEQ ID NO: 71945 - DNA, 25 bp, Canis familiaris
ctcaccaggccttgagacacaggac

SEQ ID NO: 71946 - DNA, 25 bp, Canis familiaris
ctcaccaggactcagacgatgcagc

SEQ ID NO: 71947 - DNA, 25 bp, Canis familiaris
ctcagcgagtcattgaaccctagcc

SEQ ID NO: 71948 - DNA, 25 bp, Canis familiaris
ctgcgggtgctgcagaccctaaaga

SEQ ID NO: 71949 - DNA, 25 bp, Canis familiaris
ctcagggatgctcatggcctctgaa

SEQ ID NO: 71950 - DNA, 25 bp, Canis familiaris
ctcagtatggtggcaggccattaga

SEQ ID NO: 71951 - DNA, 25 bp, Canis familiaris
ctcaggaggggcgctgcatatcagg

SEQ ID NO: 71952 - DNA, 25 bp, Canis familiaris
ctcagtccgtgatccattgtgtatt

SEQ ID NO: 71953 - DNA, 25 bp, Canis familiaris
ccagtccttaggcgaatttctttct

SEQ ID NO: 71954 - DNA, 25 bp, Canis familiaris
ctgcgaccgacggctcgaatttcta

SEQ ID NO: 71955 - DNA, 25 bp, Canis familiaris
ctggatacttccttagaaattctag

SEQ ID NO: 71956 - DNA, 25 bp, Canis familiaris
ctctggactcccttagaaaccggag

SEQ ID NO: 71957 - DNA, 25 bp, Canis familiaris
ctctggacctccacaagaaccatgg

SEQ ID NO: 71958 - DNA, 25 bp, Canis familiaris
ctcatggaagccattcggttcctgt

SEQ ID NO: 71959 - DNA, 25 bp, Canis familiaris
ctcaggaattcatttctccttcctc

SEQ ID NO: 71960 - DNA, 25 bp, Canis familiaris
ctcggttcgatactctgacttaccc

SEQ ID NO: 71961 - DNA, 25 bp, Canis familiaris
ctccgtcttgggttggctaaccacg

SEQ ID NO: 71962 - DNA, 25 bp, Canis familiaris
ctcgctttggggtgccccaggatgc

SEQ ID NO: 71963 - DNA, 25 bp, Canis familiaris
ctcgttgtacggtaacccagtgcac

SEQ ID NO: 71964 - DNA, 25 bp, Canis familiaris
gacgagggacggtcgaccaatggga

SEQ ID NO: 71965 - DNA, 25 bp, Canis familiaris
ctcggggcaaagaagatccctggga

SEQ ID NO: 71966 - DNA, 25 bp, Canis familiaris
ctcagcagagagccaagtttctcct

SEQ ID NO: 71967 - DNA, 25 bp, Canis familiaris
ctcaggtgacctagtggttgcctcc

SEQ ID NO: 71968 - DNA, 25 bp, Canis familiaris
ctcaggggcctagtgggagctacct

SEQ ID NO: 71969 - DNA, 25 bp, Canis familiaris
ctcagcgggaaatggggtcctcact

SEQ ID NO: 71970 - DNA, 25 bp, Canis familiaris
ctcagcaggggttgggggacttgtt

SEQ ID NO: 71971 - DNA, 25 bp, Canis familiaris
ctcagcagggtgcagcgctggtttg

SEQ ID NO: 71972 - DNA, 25 bp, Canis familiaris
ctcagagagggcttggctgtgttct

SEQ ID NO: 71973 - DNA, 25 bp, Canis familiaris
ctcagagcggagaaagcatttgttt

SEQ ID NO: 71974 - DNA, 25 bp, Canis familiaris
ctcagtggtcagccaagcaattttg

SEQ ID NO: 71975 - DNA, 25 bp, Canis familiaris
ctctcggtctggggcaatttcgaca

SEQ ID NO: 71976 - DNA, 25 bp, Canis familiaris
ctcaccgcctcgggaagcagtggac

SEQ ID NO: 71977 - DNA, 25 bp, Canis familiaris
ctcacctcctggggggagctgatga

SEQ ID NO: 71978 - DNA, 25 bp, Canis familiaris
ctctcgacctcggggtgaggtagtg

SEQ ID NO: 71979 - DNA, 25 bp, Canis familiaris
ctctcaggcttgggcagggacctag

SEQ ID NO: 71980 - DNA, 25 bp, Canis familiaris
ctcatgccatgatggggggcatcct

SEQ ID NO: 71981 - DNA, 25 bp, Canis familiaris
ctcagcctacggggaggatcctggc

SEQ ID NO: 71982 - DNA, 25 bp, Canis familiaris
ctcaccttctgcctgaatgtgtcgc

SEQ ID NO: 71983 - DNA, 25 bp, Canis familiaris
ctctgcgtatcgctgagctgggtgc

SEQ ID NO: 71984 - DNA, 25 bp, Canis familiaris
ctcagtttggctaagctgggcctcc

SEQ ID NO: 71985 - DNA, 25 bp, Canis familiaris
ctcagtgtggggagtgggccactca

SEQ ID NO: 71986 - DNA, 25 bp, Canis familiaris
ctcttaagccgaagtgagcgcctct

SEQ ID NO: 71987 - DNA, 25 bp, Canis familiaris
ctcttacagtcgatggacttcctga

SEQ ID NO: 71988 - DNA, 25 bp, Canis familiaris
ctgcgtatagtgcttggccttcgcg

SEQ ID NO: 71989 - DNA, 25 bp, Canis familiaris
ctcgaatgggcacttgggcttggct

SEQ ID NO: 71990 - DNA, 25 bp, Canis familiaris
ctctagcaggacactggtgctttgc

SEQ ID NO: 71991 - DNA, 25 bp, Canis familiaris
ctctagcaggacactggtgctttgc

SEQ ID NO: 71992 - DNA, 25 bp, Canis familiaris
ctctagaggatctgttttgtgtctt

SEQ ID NO: 71993 - DNA, 25 bp, Canis familiaris
ctctagaggatcttgaggtctggga

SEQ ID NO: 71994 - DNA, 25 bp, Canis familiaris
ctcagaggcttctgcaggcctaggg

SEQ ID NO: 71995 - DNA, 25 bp, Canis familiaris
ctcaggtgtgtcagcaggccgagca

SEQ ID NO: 71996 - DNA, 25 bp, Canis familiaris
ctcagtttgttgggagcgtgaaagg

SEQ ID NO: 71997 - DNA, 25 bp, Canis familiaris
ctcattttgcctgacatgctgtaaa

SEQ ID NO: 71998 - DNA, 25 bp, Canis familiaris
ctcatatttccatgaagctttgaca

SEQ ID NO: 71999 - DNA, 25 bp, Canis familiaris
ctcatttttgagggagcttccactt

SEQ ID NO: 72000 - DNA, 25 bp, Canis familiaris
ctcttggtcgagaaatgtcccctgg

SEQ ID NO: 72001 - DNA, 25 bp, Canis familiaris
ctctaacctgagaggatcctcccgc

SEQ ID NO: 72002 - DNA, 25 bp, Canis familiaris
ctctcaaccttgaggttccttcgta

SEQ ID NO: 72003 - DNA, 25 bp, Canis familiaris
ctctcaactttgcttgtctttcatg

SEQ ID NO: 72004 - DNA, 25 bp, Canis familiaris
ctctcagtgtttcatgctgccttat

SEQ ID NO: 72005 - DNA, 25 bp, Canis familiaris
ctctcaattatttacttctcttact

SEQ ID NO: 72006 - DNA, 25 bp, Canis familiaris
ctcttcaagtttagctgtttgtaca

SEQ ID NO: 72007 - DNA, 25 bp, Canis familiaris
ctcagtactttcatctttttatcta

SEQ ID NO: 72008 - DNA, 25 bp, Canis familiaris
ctcttacagcgtttttctttttgat

SEQ ID NO: 72009 - DNA, 25 bp, Canis familiaris
ctcataaccgctttcttttctcgag

SEQ ID NO: 72010 - DNA, 25 bp, Canis familiaris
ctcagaatttgcattctctgcctct

SEQ ID NO: 72011 - DNA, 25 bp, Canis familiaris
ctcatgtatttctttgccattcctt

SEQ ID NO: 72012 - DNA, 25 bp, Canis familiaris
ctcattttttgttgctgctgtgcca

SEQ ID NO: 72013 - DNA, 25 bp, Canis familiaris
ctcattttttgtaggtctgtaataa

SEQ ID NO: 72014 - DNA, 25 bp, Canis familiaris
ctcttttcttgggctgtcatctaga

SEQ ID NO: 72015 - DNA, 25 bp, Canis familiaris
ctctatgtttgcctaagtcactggt

SEQ ID NO: 72016 - DNA, 25 bp, Canis familiaris
ctcatgtgcttgcccaagaccaggg

SEQ ID NO: 72017 - DNA, 25 bp, Canis familiaris
ctcagtttcccatgagccacaggga

SEQ ID NO: 72018 - DNA, 25 bp, Canis familiaris
ctcagtctggccagagatccacggg

SEQ ID NO: 72019 - DNA, 25 bp, Canis familiaris
ctcagtgttgagggcctctcacggg

SEQ ID NO: 72020 - DNA, 25 bp, Canis familiaris
ctcagcgtctgacagagtctccgtg

SEQ ID NO: 72021 - DNA, 25 bp, Canis familiaris
ctcagctcctgagagatgccctaat

SEQ ID NO: 72022 - DNA, 25 bp, Canis familiaris
ctcagctccgagcagcagggctgaa

SEQ ID NO: 72023 - DNA, 25 bp, Canis familiaris
ctcagcttcgtgggcaagcgcagag

SEQ ID NO: 72024 - DNA, 25 bp, Canis familiaris
ctcagcttccagcgaacggcaggag

SEQ ID NO: 72025 - DNA, 25 bp, Canis familiaris
ctcagtccccagtgagggcaggaga

SEQ ID NO: 72026 - DNA, 25 bp, Canis familiaris
ctcattccctgccccaggaaggggc

SEQ ID NO: 72027 - DNA, 25 bp, Canis familiaris
ctcttgccctgtcccaaaagagggc

SEQ ID NO: 72028 - DNA, 25 bp, Canis familiaris
ctctatggtcttgccaaaatgaaag

SEQ ID NO: 72029 - DNA, 25 bp, Canis familiaris
ctcggtagcttgtctaaaagaatga

SEQ ID NO: 72030 - DNA, 25 bp, Canis familiaris
ctcagttcctcttatccacaaaata

SEQ ID NO: 72031 - DNA, 25 bp, Canis familiaris
ctcagttctctgtcctcaaaaattg

SEQ ID NO: 72032 - DNA, 25 bp, Canis familiaris
ctcagtatttggcccagaggtttcc

SEQ ID NO: 72033 - DNA, 25 bp, Canis familiaris
ctcatgtgtttgctccgaggtgtag

SEQ ID NO: 72034 - DNA, 25 bp, Canis familiaris
ctctatgccagtgatcctgagtttg

SEQ ID NO: 72035 - DNA, 25 bp, Canis familiaris
ctctcccaatcgttcggtcatagga

SEQ ID NO: 72036 - DNA, 25 bp, Canis familiaris
ctcatcttcacttgtataggttcgg

SEQ ID NO: 72037 - DNA, 25 bp, Canis familiaris
ctctcttcacaaggtcttggccggt

SEQ ID NO: 72038 - DNA, 25 bp, Canis familiaris
cccttctagggtcaggacgtggaca

SEQ ID NO: 72039 - DNA, 25 bp, Canis familiaris
ctcttattcggacccaggacgtgaa

SEQ ID NO: 72040 - DNA, 25 bp, Canis familiaris
ctctctttgggggccgattgggaga

SEQ ID NO: 72041 - DNA, 25 bp, Canis familiaris
ctgctttgggaccctcttggaggag

SEQ ID NO: 72042 - DNA, 25 bp, Canis familiaris
ctctcttctggatgcccaatggaaa

SEQ ID NO: 72043 - DNA, 25 bp, Canis familiaris
ctctctgtcagtcccctaataggaa

SEQ ID NO: 72044 - DNA, 25 bp, Canis familiaris
ctctcccagctaccctaagaataac

SEQ ID NO: 72045 - DNA, 25 bp, Canis familiaris
ctctcaccgtgtgcctatcacgaat

SEQ ID NO: 72046 - DNA, 25 bp, Canis familiaris
ctctaccagctggagaattactgca

SEQ ID NO: 72047 - DNA, 25 bp, Canis familiaris
ctctcagccagaggaggaatcagta

SEQ ID NO: 72048 - DNA, 25 bp, Canis familiaris
ctctagccaaagtcatccatgacca

SEQ ID NO: 72049 - DNA, 25 bp, Canis familiaris
ctctcagccaggtatctgcacaact

SEQ ID NO: 72050 - DNA, 25 bp, Canis familiaris
ctctactggccactgtgcagaactg

SEQ ID NO: 72051 - DNA, 25 bp, Canis familiaris
ctctactggcgctgccaaggctgtg

SEQ ID NO: 72052 - DNA, 25 bp, Canis familiaris
ctcattggaggctttcaatgggtga

SEQ ID NO: 72053 - DNA, 25 bp, Canis familiaris
ctcaggggccagacacacaggcgta

SEQ ID NO: 72054 - DNA, 25 bp, Canis familiaris
ctcaggcggccagtgcacaatggaa

SEQ ID NO: 72055 - DNA, 25 bp, Canis familiaris
ctcagtctcctcttccaatggagat

SEQ ID NO: 72056 - DNA, 25 bp, Canis familiaris
ctcagtgctgcagccttcaatggga

SEQ ID NO: 72057 - DNA, 25 bp, Canis familiaris
ctcagctgcagagtccttcatgaag

SEQ ID NO: 72058 - DNA, 25 bp, Canis familiaris
ctcagctcaacagccacacaatgta

SEQ ID NO: 72059 - DNA, 25 bp, Canis familiaris
ctcatcatccaagtcctcatcaagg

SEQ ID NO: 72060 - DNA, 25 bp, Canis familiaris
ctcatatctcaagtgagtcatctca

SEQ ID NO: 72061 - DNA, 25 bp, Canis familiaris
ctctattatacgcctgcactcagga

SEQ ID NO: 72062 - DNA, 25 bp, Canis familiaris
ctctactggcacccaactaggtgcc

SEQ ID NO: 72063 - DNA, 25 bp, Canis familiaris
ctcttctggcagcgattctgacagt

SEQ ID NO: 72064 - DNA, 25 bp, Canis familiaris
ctcttcgaggactttctagcagttt

SEQ ID NO: 72065 - DNA, 25 bp, Canis familiaris
ctcattcttggagttcttaaatctt

SEQ ID NO: 72066 - DNA, 25 bp, Canis familiaris
ctcttctggtgtgtctgaagacagc

SEQ ID NO: 72067 - DNA, 25 bp, Canis familiaris
ctctttggctgtgttgttgcccaag

SEQ ID NO: 72068 - DNA, 25 bp, Canis familiaris
ctctttggggcactgattctcttaa

SEQ ID NO: 72069 - DNA, 25 bp, Canis familiaris
ctctttggggcaggtggactgaggt

SEQ ID NO: 72070 - DNA, 25 bp, Canis familiaris
ctcatcatcaacccagggagacaga

SEQ ID NO: 72071 - DNA, 25 bp, Canis familiaris
ctcatgtgctccccagacggggata

SEQ ID NO: 72072 - DNA, 25 bp, Canis familiaris
ctcatcctgcacgacgacgaggtga

SEQ ID NO: 72073 - DNA, 25 bp, Canis familiaris
ctcatcaagcaccatccatggggga

SEQ ID NO: 72074 - DNA, 25 bp, Canis familiaris
ctcagcaagatgcctctctggtggt

SEQ ID NO: 72075 - DNA, 25 bp, Canis familiaris
ctcagcacttgctattctggagaat

SEQ ID NO: 72076 - DNA, 25 bp, Canis familiaris
ctcagcagtgttttctgctgcaaag

SEQ ID NO: 72077 - DNA, 25 bp, Canis familiaris
ctctgcgatgctgcccatgcgcaga

SEQ ID NO: 72078 - DNA, 25 bp, Canis familiaris
ctctcgatgactgcatgcatggaac

SEQ ID NO: 72079 - DNA, 25 bp, Canis familiaris
ctctcaatgacaactttgtcaagct

SEQ ID NO: 72080 - DNA, 25 bp, Canis familiaris
ctcatcgtggctgttttcacaacca

SEQ ID NO: 72081 - DNA, 25 bp, Canis familiaris
ctcataggttgtttcttcatctacg

SEQ ID NO: 72082 - DNA, 25 bp, Canis familiaris
ctctcaggttgaattcttcccatca

SEQ ID NO: 72083 - DNA, 25 bp, Canis familiaris
ctctaagttagattccagcacctga

SEQ ID NO: 72084 - DNA, 25 bp, Canis familiaris
ctctacagtgtgatgaccctcgtaa

SEQ ID NO: 72085 - DNA, 25 bp, Canis familiaris
ctctccgttttaagcctatgctaca

SEQ ID NO: 72086 - DNA, 25 bp, Canis familiaris
ctctctccagtattgtaccttctaa

SEQ ID NO: 72087 - DNA, 25 bp, Canis familiaris
ctcttcacctgagtggatcctggct

SEQ ID NO: 72088 - DNA, 25 bp, Canis familiaris
ctcatccccgatggctgtggggtcc

SEQ ID NO: 72089 - DNA, 25 bp, Canis familiaris
ctccccagggggggctggtatcagt

SEQ ID NO: 72090 - DNA, 25 bp, Canis familiaris
ctctccccggcatgggtggtacaag

SEQ ID NO: 72091 - DNA, 25 bp, Canis familiaris
ctctcccttgggctctgatgaaaaa

SEQ ID NO: 72092 - DNA, 25 bp, Canis familiaris
ctcagacttctctcttcttgaaaat

SEQ ID NO: 72093 - DNA, 25 bp, Canis familiaris
ctcagagtcccgttggcttagaaca

SEQ ID NO: 72094 - DNA, 25 bp, Canis familiaris
ctcaggccaagtttggtgaaccaca

SEQ ID NO: 72095 - DNA, 25 bp, Canis familiaris
ctctcccaatgttgctcgtaatgcc

SEQ ID NO: 72096 - DNA, 25 bp, Canis familiaris
ctctctccggtgaccagtgagactc

SEQ ID NO: 72097 - DNA, 25 bp, Canis familiaris
ctctcgtgggagacgcaggcacaac

SEQ ID NO: 72098 - DNA, 25 bp, Canis familiaris
ctcatcgtgctggagggcgtggacc

SEQ ID NO: 72099 - DNA, 25 bp, Canis familiaris
ctcatcgagatggagcagcggctgg

SEQ ID NO: 72100 - DNA, 25 bp, Canis familiaris
ctcatcgcactgctcgggcaggaag

SEQ ID NO: 72101 - DNA, 25 bp, Canis familiaris
cccgactggtcgaagggggacatca

SEQ ID NO: 72102 - DNA, 25 bp, Canis familiaris
ctctggaattctcaaggctgggaaa

SEQ ID NO: 72103 - DNA, 25 bp, Canis familiaris
ctccggtatgtgcaaggcgggcttc

SEQ ID NO: 72104 - DNA, 25 bp, Canis familiaris
ctcccgtaccactgtcaaggacttg

SEQ ID NO: 72105 - DNA, 25 bp, Canis familiaris
ctcccgtaacaataaagccttctcg

SEQ ID NO: 72106 - DNA, 25 bp, Canis familiaris
ctccggttcaacgccaagtttgccg

SEQ ID NO: 72107 - DNA, 25 bp, Canis familiaris
ctcctacttcaaggcccaaggttgg

SEQ ID NO: 72108 - DNA, 25 bp, Canis familiaris
ctcatttctttcagcccaaggctgg

SEQ ID NO: 72109 - DNA, 25 bp, Canis familiaris
ctcagatctcttagggcaccaatga

SEQ ID NO: 72110 - DNA, 25 bp, Canis familiaris
ctcagtcatctggggccatgctaag

SEQ ID NO: 72111 - DNA, 25 bp, Canis familiaris
ctcagtcagctcgtttatgccagag

SEQ ID NO: 72112 - DNA, 25 bp, Canis familiaris
ctcagtcctccttggcagaagattg

SEQ ID NO: 72113 - DNA, 25 bp, Canis familiaris
ctcagtctcctgccggaagacatgg

SEQ ID NO: 72114 - DNA, 25 bp, Canis familiaris
ctcttcttctcgggaaaccaggtct

SEQ ID NO: 72115 - DNA, 25 bp, Canis familiaris
ctcttcttcccagtataaccagctg

SEQ ID NO: 72116 - DNA, 25 bp, Canis familiaris
ctctttcttcagtttcatagccctg

SEQ ID NO: 72117 - DNA, 25 bp, Canis familiaris
ctcagtccttggtttcaggagcctg

SEQ ID NO: 72118 - DNA, 25 bp, Canis familiaris
ctcaggcatcttggactggaggtcc

SEQ ID NO: 72119 - DNA, 25 bp, Canis familiaris
ctcaggatcctggtattgagcccca

SEQ ID NO: 72120 - DNA, 25 bp, Canis familiaris
ctcagagacttggtaaccccagcct

SEQ ID NO: 72121 - DNA, 25 bp, Canis familiaris
cgcgatgaccagataacctttgcct

SEQ ID NO: 72122 - DNA, 25 bp, Canis familiaris
cggtctcatcagttgaacgtttcgc

SEQ ID NO: 72123 - DNA, 25 bp, Canis familiaris
cggtctcatcagttgaacgtttcgc

SEQ ID NO: 72124 - DNA, 25 bp, Canis familiaris
ctggtctgccagttgaagggttagc

SEQ ID NO: 72125 - DNA, 25 bp, Canis familiaris
ctctgtagcacagttgatagtggtt

SEQ ID NO: 72126 - DNA, 25 bp, Canis familiaris
ctctgatcgcacttctgatgggggt

SEQ ID NO: 72127 - DNA, 25 bp, Canis familiaris
ctctgactgcactacagtggttcat

SEQ ID NO: 72128 - DNA, 25 bp, Canis familiaris
ctctgaatcctaagggctggtctct

SEQ ID NO: 72129 - DNA, 25 bp, Canis familiaris
ctctcaaattataaggggatccctg

SEQ ID NO: 72130 - DNA, 25 bp, Canis familiaris
ctgaccaaaactgagggatcgcctg

SEQ ID NO: 72131 - DNA, 25 bp, Canis familiaris
cgactagacaacgacacgtacccgg

SEQ ID NO: 72132 - DNA, 25 bp, Canis familiaris
cggccaaaaggatcagactcccgat

SEQ ID NO: 72133 - DNA, 25 bp, Canis familiaris
cgacccaaagagttcctccattaga

SEQ ID NO: 72134 - DNA, 25 bp, Canis familiaris
cggccccacaaaacacttttagcag

SEQ ID NO: 72135 - DNA, 25 bp, Canis familiaris
cgtcccagaaccacctgtatgtagg

SEQ ID NO: 72136 - DNA, 25 bp, Canis familiaris
ctctttgcataaaaccctatttaag

SEQ ID NO: 72137 - DNA, 25 bp, Canis familiaris
ctctagaaatgaaacccgaataagg

SEQ ID NO: 72138 - DNA, 25 bp, Canis familiaris
ctcttcaaggtttcccgttagatca

SEQ ID NO: 72139 - DNA, 25 bp, Canis familiaris
ctcttctaagtttccacccaggaag

SEQ ID NO: 72140 - DNA, 25 bp, Canis familiaris
ctcttctgaagtgatccagccacag

SEQ ID NO: 72141 - DNA, 25 bp, Canis familiaris
ctcttatatagcccaacacgcactg

SEQ ID NO: 72142 - DNA, 25 bp, Canis familiaris
ctctctctagaacaaacccttacaa

SEQ ID NO: 72143 - DNA, 25 bp, Canis familiaris
ctcttgctggatttaaaccaccacc

SEQ ID NO: 72144 - DNA, 25 bp, Canis familiaris
ctcttcagagatcggataccaatcc

SEQ ID NO: 72145 - DNA, 25 bp, Canis familiaris
ctctgtgtggatcggtggctccatc

SEQ ID NO: 72146 - DNA, 25 bp, Canis familiaris
ctctgggaggaggtgactgctattg

SEQ ID NO: 72147 - DNA, 25 bp, Canis familiaris
ctcatctgccggggtagtgctaggg

SEQ ID NO: 72148 - DNA, 25 bp, Canis familiaris
ctcatctgcggggtggtgtgagggc

SEQ ID NO: 72149 - DNA, 25 bp, Canis familiaris
ctcatctgccgggcaggcctgaagg

SEQ ID NO: 72150 - DNA, 25 bp, Canis familiaris
ctctacctggcctgcgagaatggcg

SEQ ID NO: 72151 - DNA, 25 bp, Canis familiaris
ctcttacttctccagcgatgaatca

SEQ ID NO: 72152 - DNA, 25 bp, Canis familiaris
ctcttcactatcccattcgtatgag

SEQ ID NO: 72153 - DNA, 25 bp, Canis familiaris
ctctcaacttcgccttcaaagataa

SEQ ID NO: 72154 - DNA, 25 bp, Canis familiaris
ctctacctctgtccttcaaggaagc

SEQ ID NO: 72155 - DNA, 25 bp, Canis familiaris
ctctacccatcacaacatacaaagc

SEQ ID NO: 72156 - DNA, 25 bp, Canis familiaris
ctcttccccagtgaccaaaatgaac

SEQ ID NO: 72157 - DNA, 25 bp, Canis familiaris
ctcttccacgtcagaccacattaga

SEQ ID NO: 72158 - DNA, 25 bp, Canis familiaris
ctcttctaattcatgtccacactgg

SEQ ID NO: 72159 - DNA, 25 bp, Canis familiaris
ctcttccaattcctatgctatcaag

SEQ ID NO: 72160 - DNA, 25 bp, Canis familiaris
ctcttccactatcctaatgttcagc

SEQ ID NO: 72161 - DNA, 25 bp, Canis familiaris
ctctagcgcacttcattaactcgaa

SEQ ID NO: 72162 - DNA, 25 bp, Canis familiaris
ctcttcatcctatttcaactaaaaa

SEQ ID NO: 72163 - DNA, 25 bp, Canis familiaris
ctcttgctccaagttaacttttcaa

SEQ ID NO: 72164 - DNA, 25 bp, Canis familiaris
ctctttccaaacacctttgcgcaaa

SEQ ID NO: 72165 - DNA, 25 bp, Canis familiaris
ctcttattaaccatctgcttcctat

SEQ ID NO: 72166 - DNA, 25 bp, Canis familiaris
ctctatttaaccagctggtggcccc

SEQ ID NO: 72167 - DNA, 25 bp, Canis familiaris
ctcttctagaacgactggagggcgc

SEQ ID NO: 72168 - DNA, 25 bp, Canis familiaris
ctcagtctcagaagagggggggagc

SEQ ID NO: 72169 - DNA, 25 bp, Canis familiaris
ctcattcctgcctgggagtgggagg

SEQ ID NO: 72170 - DNA, 25 bp, Canis familiaris
ctcattcctgcctgggagtgggagg

SEQ ID NO: 72171 - DNA, 25 bp, Canis familiaris
ctcattcctgcctgggagtgggagg

SEQ ID NO: 72172 - DNA, 25 bp, Canis familiaris
ctcattcctgcctgggagtgggagg

SEQ ID NO: 72173 - DNA, 25 bp, Canis familiaris
ctcttctcccttaatggcttgtagt

SEQ ID NO: 72174 - DNA, 25 bp, Canis familiaris
ctcttccaccttcgatgccggggct

SEQ ID NO: 72175 - DNA, 25 bp, Canis familiaris
ctcttcccctgtggtcggggtgaat

SEQ ID NO: 72176 - DNA, 25 bp, Canis familiaris
ctctttccactgtgagcagggccag

SEQ ID NO: 72177 - DNA, 25 bp, Canis familiaris
ctctttctactctggccaggtggat

SEQ ID NO: 72178 - DNA, 25 bp, Canis familiaris
ctctattctcacggcgtgccaagga

SEQ ID NO: 72179 - DNA, 25 bp, Canis familiaris
ctcttttgctccaggcacagaggag

SEQ ID NO: 72180 - DNA, 25 bp, Canis familiaris
ctcttcagttcgtgtgcggagacag

SEQ ID NO: 72181 - DNA, 25 bp, Canis familiaris
ctcttatggtggtggcctggtgatg

SEQ ID NO: 72182 - DNA, 25 bp, Canis familiaris
ctcttaccagggggcgctgtgtgat

SEQ ID NO: 72183 - DNA, 25 bp, Canis familiaris
ctcttcccgggggcaggatgtcagg

SEQ ID NO: 72184 - DNA, 25 bp, Canis familiaris
ctcttcccctagctatgagcagtca

SEQ ID NO: 72185 - DNA, 25 bp, Canis familiaris
ctcttcccctcagtttcagtggagg

SEQ ID NO: 72186 - DNA, 25 bp, Canis familiaris
ctcatactccactctgttttggcag

SEQ ID NO: 72187 - DNA, 25 bp, Canis familiaris
ctctactagcaccctaatcttggac

SEQ ID NO: 72188 - DNA, 25 bp, Canis familiaris
ctcttatcacatgcgtatatctgtg

SEQ ID NO: 72189 - DNA, 25 bp, Canis familiaris
ctcatctaacatcctgttccttggt

SEQ ID NO: 72190 - DNA, 25 bp, Canis familiaris
ctctccaacattttttcattggcca

SEQ ID NO: 72191 - DNA, 25 bp, Canis familiaris
ctctcccacctgtgtgcaattggag

SEQ ID NO: 72192 - DNA, 25 bp, Canis familiaris
ctctaccacctctgtctgtaggaga

SEQ ID NO: 72193 - DNA, 25 bp, Canis familiaris
ctcttacacccatctctgtggaagc

SEQ ID NO: 72194 - DNA, 25 bp, Canis familiaris
ctctttcaccactactgtccaaaag

SEQ ID NO: 72195 - DNA, 25 bp, Canis familiaris
ctctttagacactacctccaagatg

SEQ ID NO: 72196 - DNA, 25 bp, Canis familiaris
ctctattaacacacctgatcatttg

SEQ ID NO: 72197 - DNA, 25 bp, Canis familiaris
ctcttctagcaaccatctttatctt

SEQ ID NO: 72198 - DNA, 25 bp, Canis familiaris
ctcttaagcaagctgcggttgtgga

SEQ ID NO: 72199 - DNA, 25 bp, Canis familiaris
ctcaggacagagtcgggtgtgtggg

SEQ ID NO: 72200 - DNA, 25 bp, Canis familiaris
ctcaggaggatgtggggtgccgtga

SEQ ID NO: 72201 - DNA, 25 bp, Canis familiaris
ctggtttcagcttggggtgggtaca

SEQ ID NO: 72202 - DNA, 25 bp, Canis familiaris
ctggttgtaatcaggaatggactcc

SEQ ID NO: 72203 - DNA, 25 bp, Canis familiaris
ctgagattgacatcttgaaaggcac

SEQ ID NO: 72204 - DNA, 25 bp, Canis familiaris
ctctggtgacatttggaatattgac

SEQ ID NO: 72205 - DNA, 25 bp, Canis familiaris
ctctcggatatctttaggaagcact

SEQ ID NO: 72206 - DNA, 25 bp, Canis familiaris
ctctctgggccaggctacaagacct

SEQ ID NO: 72207 - DNA, 25 bp, Canis familiaris
ctcatcgccttctaccacaagatgg

SEQ ID NO: 72208 - DNA, 25 bp, Canis familiaris
ctcatcctcttcgccatgtgaagga

SEQ ID NO: 72209 - DNA, 25 bp, Canis familiaris
ctctctccttcctcaggaagcattg

SEQ ID NO: 72210 - DNA, 25 bp, Canis familiaris
ctctcttcttcctagaggtctgtac

SEQ ID NO: 72211 - DNA, 25 bp, Canis familiaris
ctctcttccttcgaggagtctggga

SEQ ID NO: 72212 - DNA, 25 bp, Canis familiaris
ctcttgcccattttggaggcggcac

SEQ ID NO: 72213 - DNA, 25 bp, Canis familiaris
ctcttacctgcttctggcagtggac

SEQ ID NO: 72214 - DNA, 25 bp, Canis familiaris
ctcttcacctcgtgttgttgacttc

SEQ ID NO: 72215 - DNA, 25 bp, Canis familiaris
ctcttagccacgcttatgttcacag

SEQ ID NO: 72216 - DNA, 25 bp, Canis familiaris
ctcttacgtgcgcctttctgccgga

SEQ ID NO: 72217 - DNA, 25 bp, Canis familiaris
ctgcattaagtgcgtgccttccagg

SEQ ID NO: 72218 - DNA, 25 bp, Canis familiaris
ctcatggtcctgcgtgactattcag

SEQ ID NO: 72219 - DNA, 25 bp, Canis familiaris
ctcttgatgccctgtatctatcaca

SEQ ID NO: 72220 - DNA, 25 bp, Canis familiaris
ctcttgctcacctgtcacataaagc

SEQ ID NO: 72221 - DNA, 25 bp, Canis familiaris
ctcttcgctcactgtccattaaaga

SEQ ID NO: 72222 - DNA, 25 bp, Canis familiaris
ctcttccctagactacttgaaggca

SEQ ID NO: 72223 - DNA, 25 bp, Canis familiaris
ctctctccctagctggtagttgagc

SEQ ID NO: 72224 - DNA, 25 bp, Canis familiaris
ctctcttctcacctgggtagtggaa

SEQ ID NO: 72225 - DNA, 25 bp, Canis familiaris
ctcatcattccctttggtagattaa

SEQ ID NO: 72226 - DNA, 25 bp, Canis familiaris
ctcccgtcccttgtagattataaat

SEQ ID NO: 72227 - DNA, 25 bp, Canis familiaris
ctcatccttaccctttagatgtatt

SEQ ID NO: 72228 - DNA, 25 bp, Canis familiaris
ctcttattagcagttttgtgtgtat

SEQ ID NO: 72229 - DNA, 25 bp, Canis familiaris
ctcatgtattaatttcattttatca

SEQ ID NO: 72230 - DNA, 25 bp, Canis familiaris
ctcattcattagagtcatgtttatc

SEQ ID NO: 72231 - DNA, 25 bp, Canis familiaris
ctcatgctcactgacgttttctgat

SEQ ID NO: 72232 - DNA, 25 bp, Canis familiaris
ctcatcagccatgacgagatgttct

SEQ ID NO: 72233 - DNA, 25 bp, Canis familiaris
ctcatgcccaggtcttagactgctt

SEQ ID NO: 72234 - DNA, 25 bp, Canis familiaris
ctctcccaggaggtctggtcttcag

SEQ ID NO: 72235 - DNA, 25 bp, Canis familiaris
ctcatccctggacttgttatttctg

SEQ ID NO: 72236 - DNA, 25 bp, Canis familiaris
ctcatcctctaactttgtgttctag

SEQ ID NO: 72237 - DNA, 25 bp, Canis familiaris
ctctccttcattctggtgttacggt

SEQ ID NO: 72238 - DNA, 25 bp, Canis familiaris
ctctcatttactctggatctgtctc

SEQ ID NO: 72239 - DNA, 25 bp, Canis familiaris
ctctctggtactccaggcactgttc

SEQ ID NO: 72240 - DNA, 25 bp, Canis familiaris
ctctctgcattagccagtacgtgct

SEQ ID NO: 72241 - DNA, 25 bp, Canis familiaris
ctcatctatgtcgcacaatactgcg

SEQ ID NO: 72242 - DNA, 25 bp, Canis familiaris
ctcatttgatctgtctgctactgga

SEQ ID NO: 72243 - DNA, 25 bp, Canis familiaris
ctctttggctgattcatccaccagg

SEQ ID NO: 72244 - DNA, 25 bp, Canis familiaris
ctctttcctggactcacagtctagt

SEQ ID NO: 72245 - DNA, 25 bp, Canis familiaris
ctcatttcctggtatgacaatgaat

SEQ ID NO: 72246 - DNA, 25 bp, Canis familiaris
ctcatcctcccacagaatctaaaac

SEQ ID NO: 72247 - DNA, 25 bp, Canis familiaris
ctcatcccacctcaggtgtacctga

SEQ ID NO: 72248 - DNA, 25 bp, Canis familiaris
ctctctcgacctcggggtgaggtag

SEQ ID NO: 72249 - DNA, 25 bp, Canis familiaris
ctctctgctcagtggggggagggga

SEQ ID NO: 72250 - DNA, 25 bp, Canis familiaris
ctctcccagtcccgggaggggagag

SEQ ID NO: 72251 - DNA, 25 bp, Canis familiaris
ctctcccgcgtcagggaggggtaca

SEQ ID NO: 72252 - DNA, 25 bp, Canis familiaris
ctctcagcccggacggtgattgggt

SEQ ID NO: 72253 - DNA, 25 bp, Canis familiaris
ctctcacctggactgcagggtctgg

SEQ ID NO: 72254 - DNA, 25 bp, Canis familiaris
ctcttcgatggactgcaagccattg

SEQ ID NO: 72255 - DNA, 25 bp, Canis familiaris
ctcttgcatctgccctgaagaataa

SEQ ID NO: 72256 - DNA, 25 bp, Canis familiaris
ctcttgtcttccgtagcactgaaat

SEQ ID NO: 72257 - DNA, 25 bp, Canis familiaris
ctcttgtccctcagaactacagatg

SEQ ID NO: 72258 - DNA, 25 bp, Canis familiaris
ctcggtccacttggaacccgatgtc

SEQ ID NO: 72259 - DNA, 25 bp, Canis familiaris
ctccgaggacgtcaacctggtgtcc

SEQ ID NO: 72260 - DNA, 25 bp, Canis familiaris
ctctcaggtaccagaacccggtagc

SEQ ID NO: 72261 - DNA, 25 bp, Canis familiaris
ctctagagttccaagatatccgccg

SEQ ID NO: 72262 - DNA, 25 bp, Canis familiaris
ctctagagtgccaaacagttctgct

SEQ ID NO: 72263 - DNA, 25 bp, Canis familiaris
ctctagtaccattcacattgttgca

SEQ ID NO: 72264 - DNA, 25 bp, Canis familiaris
ctctctgtcaccttcagatcttgtg

SEQ ID NO: 72265 - DNA, 25 bp, Canis familiaris
ctcattggacctggtgattctggtc

SEQ ID NO: 72266 - DNA, 25 bp, Canis familiaris
ctcatcagagtcgtggtgtccagga

SEQ ID NO: 72267 - DNA, 25 bp, Canis familiaris
ctcttgactcgcaggcagccgagaa

SEQ ID NO: 72268 - DNA, 25 bp, Canis familiaris
ctcttcctgctgagtgaccggagca

SEQ ID NO: 72269 - DNA, 25 bp, Canis familiaris
ctctatccaggaggcggccgaagcc

SEQ ID NO: 72270 - DNA, 25 bp, Canis familiaris
ctcttcagcaggtggtggccaggtc

SEQ ID NO: 72271 - DNA, 25 bp, Canis familiaris
ctcatccagtggtagtcgtgcagcc

SEQ ID NO: 72272 - DNA, 25 bp, Canis familiaris
ctcatcccggcagagagcagcagcc

SEQ ID NO: 72273 - DNA, 25 bp, Canis familiaris
ctcatccggaacctggagcagctgg

SEQ ID NO: 72274 - DNA, 25 bp, Canis familiaris
ctctccaagaatgtgaagagcccca

SEQ ID NO: 72275 - DNA, 25 bp, Canis familiaris
ctgcttaataatttaaggccaggcc

SEQ ID NO: 72276 - DNA, 25 bp, Canis familiaris
ctgtccctaataaaagatccagcac

SEQ ID NO: 72277 - DNA, 25 bp, Canis familiaris
ctctccccaataaagataccactat

SEQ ID NO: 72278 - DNA, 25 bp, Canis familiaris
ctcattctccaaaatccaaccaagc

SEQ ID NO: 72279 - DNA, 25 bp, Canis familiaris
ctctttccaatgaacctgcatacaa

SEQ ID NO: 72280 - DNA, 25 bp, Canis familiaris
ctcttgtggcataacctctgtacac

SEQ ID NO: 72281 - DNA, 25 bp, Canis familiaris
ctcattgtgattccaccataggagc

SEQ ID NO: 72282 - DNA, 25 bp, Canis familiaris
ctctatgagctgtcacccatgatgg

SEQ ID NO: 72283 - DNA, 25 bp, Canis familiaris
ctctgtgtggacttcctgatgcagc

SEQ ID NO: 72284 - DNA, 25 bp, Canis familiaris
ctcatgcatgggacctgcccagaga

SEQ ID NO: 72285 - DNA, 25 bp, Canis familiaris
ctctgcagggacctctgggataggg

SEQ ID NO: 72286 - DNA, 25 bp, Canis familiaris
ctctaggcaggcatctgtcttctga

SEQ ID NO: 72287 - DNA, 25 bp, Canis familiaris
ctcatcagttgagacgtttctgcaa

SEQ ID NO: 72288 - DNA, 25 bp, Canis familiaris
ctctcagggcaatctttttgcatag

SEQ ID NO: 72289 - DNA, 25 bp, Canis familiaris
ctgtcagtgggattctaaatgttat

SEQ ID NO: 72290 - DNA, 25 bp, Canis familiaris
ctctcgtcgtcttctaaatttcact

SEQ ID NO: 72291 - DNA, 25 bp, Canis familiaris
ctctttgcctccctcaaatttagaa

SEQ ID NO: 72292 - DNA, 25 bp, Canis familiaris
ctcatttcctcccatgtaactaaga

SEQ ID NO: 72293 - DNA, 25 bp, Canis familiaris
ctcttggcctgcatgactaccatga

SEQ ID NO: 72294 - DNA, 25 bp, Canis familiaris
ctgtaggggctgaattactatgaag

SEQ ID NO: 72295 - DNA, 25 bp, Canis familiaris
ctctagggggccaccattgatattc

SEQ ID NO: 72296 - DNA, 25 bp, Canis familiaris
ctctagggtgggaagctcatgcggt

SEQ ID NO: 72297 - DNA, 25 bp, Canis familiaris
ctctcaacgtggtctacatgctggt

SEQ ID NO: 72298 - DNA, 25 bp, Canis familiaris
ctcatcccgtgcacaactatggatg

SEQ ID NO: 72299 - DNA, 25 bp, Canis familiaris
ctcatctcgggcacagtctttgtga

SEQ ID NO: 72300 - DNA, 25 bp, Canis familiaris
ctcatcctgaactcgattgttctgc

SEQ ID NO: 72301 - DNA, 25 bp, Canis familiaris
ctctcattaaggtcagtgggtctgc

SEQ ID NO: 72302 - DNA, 25 bp, Canis familiaris
ctctgctaagggtcccggtcatggt

SEQ ID NO: 72303 - DNA, 25 bp, Canis familiaris
ctctctaggggtcccaggagctggc

SEQ ID NO: 72304 - DNA, 25 bp, Canis familiaris
ctctacatgggtggtcacggcagcc

SEQ ID NO: 72305 - DNA, 25 bp, Canis familiaris
ctctactcagaatatccagggccag

SEQ ID NO: 72306 - DNA, 25 bp, Canis familiaris
ctctaacgagaaactctgagaccaa

SEQ ID NO: 72307 - DNA, 25 bp, Canis familiaris
ctctcagagcgagcagactttgccc

SEQ ID NO: 72308 - DNA, 25 bp, Canis familiaris
ctctcagagcgagcagactttgccc

SEQ ID NO: 72309 - DNA, 25 bp, Canis familiaris
ctctaggcgagccaggagtcccaga

SEQ ID NO: 72310 - DNA, 25 bp, Canis familiaris
ctctgatgggcagctggatttccaa

SEQ ID NO: 72311 - DNA, 25 bp, Canis familiaris
ctctgatgggcagctggatttccaa

SEQ ID NO: 72312 - DNA, 25 bp, Canis familiaris
ctctgatgggcagctggatttccaa

SEQ ID NO: 72313 - DNA, 25 bp, Canis familiaris
ctctagaggatcttgtttatccaaa

SEQ ID NO: 72314 - DNA, 25 bp, Canis familiaris
ctctcagggcatgtcttttgcatag

SEQ ID NO: 72315 - DNA, 25 bp, Canis familiaris
ctctgcagggtgttcctatctgtac

SEQ ID NO: 72316 - DNA, 25 bp, Canis familiaris
ctctgcaccgttatcatgaagtcca

SEQ ID NO: 72317 - DNA, 25 bp, Canis familiaris
ctcatcccttcttactgcagagtat

SEQ ID NO: 72318 - DNA, 25 bp, Canis familiaris
ctcatccctttggatctcatgcttt

SEQ ID NO: 72319 - DNA, 25 bp, Canis familiaris
ctctcatctatttgcccatagcttt

SEQ ID NO: 72320 - DNA, 25 bp, Canis familiaris
ctcatcacacaaaacgatagcttaa

SEQ ID NO: 72321 - DNA, 25 bp, Canis familiaris
ctctcagccaagcacatgtcatcat

SEQ ID NO: 72322 - DNA, 25 bp, Canis familiaris
ctctgctgtcaactcagtgtgccat

SEQ ID NO: 72323 - DNA, 25 bp, Canis familiaris
ctctcatgtcacccagataccaaga

SEQ ID NO: 72324 - DNA, 25 bp, Canis familiaris
ctctcttaagtccacaccaaacgtt

SEQ ID NO: 72325 - DNA, 25 bp, Canis familiaris
ctctctttttcaaccacgtgcaagt

SEQ ID NO: 72326 - DNA, 25 bp, Canis familiaris
ctctttgctagtatccaccatcaag

SEQ ID NO: 72327 - DNA, 25 bp, Canis familiaris
ctctttctagaaactctttcagaac

SEQ ID NO: 72328 - DNA, 25 bp, Canis familiaris
ctctttctgaccagctcttggaata

SEQ ID NO: 72329 - DNA, 25 bp, Canis familiaris
ctctgtttcccaatcttaggcttac

SEQ ID NO: 72330 - DNA, 25 bp, Canis familiaris
ctcttttcccaaatctcaacttatg

SEQ ID NO: 72331 - DNA, 25 bp, Canis familiaris
ctctctactccaacatcataaactt

SEQ ID NO: 72332 - DNA, 25 bp, Canis familiaris
ctcgctaccagaaatcctaccgatg

SEQ ID NO: 72333 - DNA, 25 bp, Canis familiaris
ctcgttcctttcttgctagtcagag

SEQ ID NO: 72334 - DNA, 25 bp, Canis familiaris
ctctttgcctttgccatctattggc

SEQ ID NO: 72335 - DNA, 25 bp, Canis familiaris
ctcttcccctattcaatctagtgtg

SEQ ID NO: 72336 - DNA, 25 bp, Canis familiaris
ctctacacctccaactacttagtgc

SEQ ID NO: 72337 - DNA, 25 bp, Canis familiaris
ctcttagcctacaactcatttcatg

SEQ ID NO: 72338 - DNA, 25 bp, Canis familiaris
ctctctaggagacaacatttatttt

SEQ ID NO: 72339 - DNA, 25 bp, Canis familiaris
ctctctcgtaaataaatctttttgt

SEQ ID NO: 72340 - DNA, 25 bp, Canis familiaris
ctctgccgtaaagggaacttctgtg

SEQ ID NO: 72341 - DNA, 25 bp, Canis familiaris
ctctctcgagatgagggtactgcgc

SEQ ID NO: 72342 - DNA, 25 bp, Canis familiaris
ctctaccagctgggtggtggtgccc

SEQ ID NO: 72343 - DNA, 25 bp, Canis familiaris
ctctaccagcagcgtggggcaggac

SEQ ID NO: 72344 - DNA, 25 bp, Canis familiaris
ctctgaacaagggtttccacgagcc

SEQ ID NO: 72345 - DNA, 25 bp, Canis familiaris
ctctgaccatagttttacaccaagt

SEQ ID NO: 72346 - DNA, 25 bp, Canis familiaris
ctctggcctattattcagtctcagg

SEQ ID NO: 72347 - DNA, 25 bp, Canis familiaris
ctctgcccatagactttggttcaaa

SEQ ID NO: 72348 - DNA, 25 bp, Canis familiaris
ctctctccacttgactgtgttcgaa

SEQ ID NO: 72349 - DNA, 25 bp, Canis familiaris
ctcttgacacttagccgctgtctcg

SEQ ID NO: 72350 - DNA, 25 bp, Canis familiaris
ctcttgaccgtgactctgtttggga

SEQ ID NO: 72351 - DNA, 25 bp, Canis familiaris
ctctttcctgtagtctcttagtgta

SEQ ID NO: 72352 - DNA, 25 bp, Canis familiaris
ctctcttcgtgtttttatagttcaa

SEQ ID NO: 72353 - DNA, 25 bp, Canis familiaris
ctctaagggctatttctaagactga

SEQ ID NO: 72354 - DNA, 25 bp, Canis familiaris
ctctagaggatccattcctaggcac

SEQ ID NO: 72355 - DNA, 25 bp, Canis familiaris
ctcgagtgtaggttctcaacgcgcc

SEQ ID NO: 72356 - DNA, 25 bp, Canis familiaris
ggggcgtaggttatcagggcaaaat

SEQ ID NO: 72357 - DNA, 25 bp, Canis familiaris
gcgagccctgacgcgttaggaaaaa

SEQ ID NO: 72358 - DNA, 25 bp, Canis familiaris
cggacctgacctccttagtaagatg

SEQ ID NO: 72359 - DNA, 25 bp, Canis familiaris
ctcccactacttttccagtaagcat

SEQ ID NO: 72360 - DNA, 25 bp, Canis familiaris
ctcctaccctgtgttatgctaactg

SEQ ID NO: 72361 - DNA, 25 bp, Canis familiaris
ctctctgaccttctttatctgtaag

SEQ ID NO: 72362 - DNA, 25 bp, Canis familiaris
ctcttcatccttcagcagtatatct

SEQ ID NO: 72363 - DNA, 25 bp, Canis familiaris
ctcttctccacgtactggaacttct

SEQ ID NO: 72364 - DNA, 25 bp, Canis familiaris
ctctttctaaaatgtatcactgtgt

SEQ ID NO: 72365 - DNA, 25 bp, Canis familiaris
ctcggttctaactgaggctctggta

SEQ ID NO: 72366 - DNA, 25 bp, Canis familiaris
ctctggtcgtaccacgggcattgtg

SEQ ID NO: 72367 - DNA, 25 bp, Canis familiaris
ctctggccgccattactgggaagta

SEQ ID NO: 72368 - DNA, 25 bp, Canis familiaris
ctcgtccgtttaatggtgatgcctt

SEQ ID NO: 72369 - DNA, 25 bp, Canis familiaris
ctctgtcctacttcttggaaacttt

SEQ ID NO: 72370 - DNA, 25 bp, Canis familiaris
ctctgtttatacctcttaaaaatgc

SEQ ID NO: 72371 - DNA, 25 bp, Canis familiaris
ctcttctggaacccttacaagagat

SEQ ID NO: 72372 - DNA, 25 bp, Canis familiaris
ctcattgctgttcccactttaaggt

SEQ ID NO: 72373 - DNA, 25 bp, Canis familiaris
ctctttttgcccctttggggctgca

SEQ ID NO: 72374 - DNA, 25 bp, Canis familiaris
ctctttcttcctgcttttgggagca

SEQ ID NO: 72375 - DNA, 25 bp, Canis familiaris
ctcttctcttaccaactcttgggaa

SEQ ID NO: 72376 - DNA, 25 bp, Canis familiaris
ctcttttttcaaccgcctggtgaga

SEQ ID NO: 72377 - DNA, 25 bp, Canis familiaris
ccctttctactactaccaggtggag

SEQ ID NO: 72378 - DNA, 25 bp, Canis familiaris
ctctctttttctatcattcacggga

SEQ ID NO: 72379 - DNA, 25 bp, Canis familiaris
ctctagctacttggactattcaggg

SEQ ID NO: 72380 - DNA, 25 bp, Canis familiaris
ctctagctccttggaactttggtgg

SEQ ID NO: 72381 - DNA, 25 bp, Canis familiaris
ctcttctctcttgagcctttagtgg

SEQ ID NO: 72382 - DNA, 25 bp, Canis familiaris
ctcttccttgctgttttaatgtggt

SEQ ID NO: 72383 - DNA, 25 bp, Canis familiaris
ctcttgtgccctgtatttactgtgc

SEQ ID NO: 72384 - DNA, 25 bp, Canis familiaris
ctcttgtggcctgtttgctttgagt

SEQ ID NO: 72385 - DNA, 25 bp, Canis familiaris
ctcttttcactactctttttcgtat

SEQ ID NO: 72386 - DNA, 25 bp, Canis familiaris
ctgctacttcaggatattttgtcta

SEQ ID NO: 72387 - DNA, 25 bp, Canis familiaris
ctctacgcctggtatggacggctac

SEQ ID NO: 72388 - DNA, 25 bp, Canis familiaris
ctctacgcctggtcaaacctggaaa

SEQ ID NO: 72389 - DNA, 25 bp, Canis familiaris
ctctcaagctgctgggtgacctgga

SEQ ID NO: 72390 - DNA, 25 bp, Canis familiaris
ctctcattgcaccgggagacgggag

SEQ ID NO: 72391 - DNA, 25 bp, Canis familiaris
ctctcccatcgacgtcaatgggtgg

SEQ ID NO: 72392 - DNA, 25 bp, Canis familiaris
ctcttcctggggacatgtgggcttc

SEQ ID NO: 72393 - DNA, 25 bp, Canis familiaris
ctcttcattggtttcatgctggcct

SEQ ID NO: 72394 - DNA, 25 bp, Canis familiaris
ctctcttgtctgtacatagtggcct

SEQ ID NO: 72395 - DNA, 25 bp, Canis familiaris
ctctcttgtctgtacatagtggcct

SEQ ID NO: 72396 - DNA, 25 bp, Canis familiaris
ctcttgtgctcattacagaagcggt

SEQ ID NO: 72397 - DNA, 25 bp, Canis familiaris
ctctcgtatcaaactacctgggttc

SEQ ID NO: 72398 - DNA, 25 bp, Canis familiaris
ctcttgtgacaagcacatccctggg

SEQ ID NO: 72399 - DNA, 25 bp, Canis familiaris
ctcttgtattacgattcgcacgatg

SEQ ID NO: 72400 - DNA, 25 bp, Canis familiaris
ctctgtgtatacagcttctcgccag

SEQ ID NO: 72401 - DNA, 25 bp, Canis familiaris
ctcttctgttaagtttaggcagatc

SEQ ID NO: 72402 - DNA, 25 bp, Canis familiaris
ctcttctgtctacctttggggatag

SEQ ID NO: 72403 - DNA, 25 bp, Canis familiaris
ctcttctgtctcactttctttgagg

SEQ ID NO: 72404 - DNA, 25 bp, Canis familiaris
ctcttgcttctactttttttcaggg

SEQ ID NO: 72405 - DNA, 25 bp, Canis familiaris
ctctcttttggtcagtttctcagga

SEQ ID NO: 72406 - DNA, 25 bp, Canis familiaris
ctctgctgtttgttctattttccac

SEQ ID NO: 72407 - DNA, 25 bp, Canis familiaris
ctctgtccgaaaatttatctgccac

SEQ ID NO: 72408 - DNA, 25 bp, Canis familiaris
ctgcattccacatattatttttgcc

SEQ ID NO: 72409 - DNA, 25 bp, Canis familiaris
ctcttcatcaatctcttcttattca

SEQ ID NO: 72410 - DNA, 25 bp, Canis familiaris
ctcttccaatgcaattctctgaaat

SEQ ID NO: 72411 - DNA, 25 bp, Canis familiaris
ctcttccatccttgtctgcaggaag

SEQ ID NO: 72412 - DNA, 25 bp, Canis familiaris
ctcttccatcagtgctctgtggtga

SEQ ID NO: 72413 - DNA, 25 bp, Canis familiaris
ctcttcctcatctctgctgaaggag

SEQ ID NO: 72414 - DNA, 25 bp, Canis familiaris
ctcttctccagctccagagcaaaga

SEQ ID NO: 72415 - DNA, 25 bp, Canis familiaris
ctctcattctctctccaagaaatta

SEQ ID NO: 72416 - DNA, 25 bp, Canis familiaris
ctctatttagcggagaaatatggta

SEQ ID NO: 72417 - DNA, 25 bp, Canis familiaris
ctcttttctagctaattatattgta

SEQ ID NO: 72418 - DNA, 25 bp, Canis familiaris
ctcttcttctggttttatgttttca

SEQ ID NO: 72419 - DNA, 25 bp, Canis familiaris
ctctgtgcttgtctgtttagttctg

SEQ ID NO: 72420 - DNA, 25 bp, Canis familiaris
ctctctttgccttttatgaccttgg

SEQ ID NO: 72421 - DNA, 25 bp, Canis familiaris
ctcctgttgttattgttgtccgtaa

SEQ ID NO: 72422 - DNA, 25 bp, Canis familiaris
ctctcttggttgtgttcttccagaa

SEQ ID NO: 72423 - DNA, 25 bp, Canis familiaris
ctctttgacttgtgcttttgctctc

SEQ ID NO: 72424 - DNA, 25 bp, Canis familiaris
ctcttcgagtattctctttgagccc

SEQ ID NO: 72425 - DNA, 25 bp, Canis familiaris
ctctatcgtgtcacacttgatgtcc

SEQ ID NO: 72426 - DNA, 25 bp, Canis familiaris
ctctgagcgtgctggcagcttgggc

SEQ ID NO: 72427 - DNA, 25 bp, Canis familiaris
ctcgagtcctcgagctgtgaggctc

SEQ ID NO: 72428 - DNA, 25 bp, Canis familiaris
ctctagacttcgagcaggagatggc

SEQ ID NO: 72429 - DNA, 25 bp, Canis familiaris
ctctagacttcgagcaggagatggc

SEQ ID NO: 72430 - DNA, 25 bp, Canis familiaris
ctccaacattccagccaaaagccag

SEQ ID NO: 72431 - DNA, 25 bp, Canis familiaris
ctccaggttcctgggattcgagccc

SEQ ID NO: 72432 - DNA, 25 bp, Canis familiaris
ctctcaggttcttcagttaaggtcc

SEQ ID NO: 72433 - DNA, 25 bp, Canis familiaris
cctcaagacctctggtgaaacccca

SEQ ID NO: 72434 - DNA, 25 bp, Canis familiaris
ctctcagggcccaacttgaaaccct

SEQ ID NO: 72435 - DNA, 25 bp, Canis familiaris
ctccctgcgttcaagcggaagaccc

SEQ ID NO: 72436 - DNA, 25 bp, Canis familiaris
ctcctcttggtgacgggaacctgtt

SEQ ID NO: 72437 - DNA, 25 bp, Canis familiaris
cccacttggtggcggccaccttggg

SEQ ID NO: 72438 - DNA, 25 bp, Canis familiaris
ctctactaggttccgcggtactagg

SEQ ID NO: 72439 - DNA, 25 bp, Canis familiaris
ctctacgcggtacccagggagacag

SEQ ID NO: 72440 - DNA, 25 bp, Canis familiaris
ctcttcctggcgacctagtgggaag

SEQ ID NO: 72441 - DNA, 25 bp, Canis familiaris
ctcttcagccgcttttacttgggag

SEQ ID NO: 72442 - DNA, 25 bp, Canis familiaris
ctctcgcgccctatatatcttgcgc

SEQ ID NO: 72443 - DNA, 25 bp, Canis familiaris
ctctccccagtcattgacattgcgc

SEQ ID NO: 72444 - DNA, 25 bp, Canis familiaris
ctcttccacggcagctatatatctg

SEQ ID NO: 72445 - DNA, 25 bp, Canis familiaris
ctctctctaatgcatcccatagttg

SEQ ID NO: 72446 - DNA, 25 bp, Canis familiaris
ctctcttaagcggcaccaacgtgag

SEQ ID NO: 72447 - DNA, 25 bp, Canis familiaris
ctctcttctcgggattcaacttgag

SEQ ID NO: 72448 - DNA, 25 bp, Canis familiaris
ctctactctctggtgttcagactcc

SEQ ID NO: 72449 - DNA, 25 bp, Canis familiaris
ctctactgcctggtcatcatgccag

SEQ ID NO: 72450 - DNA, 25 bp, Canis familiaris
ctctacgtgctggtcaactggttgg

SEQ ID NO: 72451 - DNA, 25 bp, Canis familiaris
ctctgtggtctggaccaggcagttg

SEQ ID NO: 72452 - DNA, 25 bp, Canis familiaris
ctctgtctgagggcaccatgggatt

SEQ ID NO: 72453 - DNA, 25 bp, Canis familiaris
ctctttgatggctctgtggaggtag

SEQ ID NO: 72454 - DNA, 25 bp, Canis familiaris
ctctgccaatccactggggtgtagc

SEQ ID NO: 72455 - DNA, 25 bp, Canis familiaris
ctctcatcaactccactggggaaga

SEQ ID NO: 72456 - DNA, 25 bp, Canis familiaris
ctctcacacacacgcagctgtggga

SEQ ID NO: 72457 - DNA, 25 bp, Canis familiaris
ctcttacagcaccatgcgactgtga

SEQ ID NO: 72458 - DNA, 25 bp, Canis familiaris
ctcttctctgcatcgtgacgtagca

SEQ ID NO: 72459 - DNA, 25 bp, Canis familiaris
ctctgtctggattctctgaagccca

SEQ ID NO: 72460 - DNA, 25 bp, Canis familiaris
ctcggctgggatcctttgcagccac

SEQ ID NO: 72461 - DNA, 25 bp, Canis familiaris
ctctggcctggtctgctgatggcca

SEQ ID NO: 72462 - DNA, 25 bp, Canis familiaris
ctctggctgctcctggagagttcct

SEQ ID NO: 72463 - DNA, 25 bp, Canis familiaris
ctcttcttcaggcgatgtgcttgct

SEQ ID NO: 72464 - DNA, 25 bp, Canis familiaris
ctctctcgacaacgagtctcctgac

SEQ ID NO: 72465 - DNA, 25 bp, Canis familiaris
ctcttcatacaatgcctgaccagac

SEQ ID NO: 72466 - DNA, 25 bp, Canis familiaris
ctctcccaagggtctgagccagagc

SEQ ID NO: 72467 - DNA, 25 bp, Canis familiaris
ctctcaataaacccgatttgtgctc

SEQ ID NO: 72468 - DNA, 25 bp, Canis familiaris
ctctttcagaccccagttctgtatt

SEQ ID NO: 72469 - DNA, 25 bp, Canis familiaris
ctctttcaggcctcagtatttttag

SEQ ID NO: 72470 - DNA, 25 bp, Canis familiaris
ctctactccctatcagtattttcct

SEQ ID NO: 72471 - DNA, 25 bp, Canis familiaris
ctctactcctcttttttttgatact

SEQ ID NO: 72472 - DNA, 25 bp, Canis familiaris
ctctaccttttgatttctagaacct

SEQ ID NO: 72473 - DNA, 25 bp, Canis familiaris
ctccgttttcacattggaacaacct

SEQ ID NO: 72474 - DNA, 25 bp, Canis familiaris
ctctccttctctaaccagaaaaagc

SEQ ID NO: 72475 - DNA, 25 bp, Canis familiaris
ctctctgccattgtaaagaccaacc

SEQ ID NO: 72476 - DNA, 25 bp, Canis familiaris
ctctgtctcttctaaaagcggaagc

SEQ ID NO: 72477 - DNA, 25 bp, Canis familiaris
ctctggtttctctcaagggtagtac

SEQ ID NO: 72478 - DNA, 25 bp, Canis familiaris
ctctcggttgtcggcaacggttggt

SEQ ID NO: 72479 - DNA, 25 bp, Canis familiaris
ctctccagtaggcacgacgttaggt

SEQ ID NO: 72480 - DNA, 25 bp, Canis familiaris
ctcgtcagggaccacgacgtcgagg

SEQ ID NO: 72481 - DNA, 25 bp, Canis familiaris
ctcggcatgggtccacggacctaga

SEQ ID NO: 72482 - DNA, 25 bp, Canis familiaris
ctctggtgtgcgaccacatcgaact

SEQ ID NO: 72483 - DNA, 25 bp, Canis familiaris
ctctgggtatgaaccattctaagtt

SEQ ID NO: 72484 - DNA, 25 bp, Canis familiaris
ctctgccagtatctaattctaagga

SEQ ID NO: 72485 - DNA, 25 bp, Canis familiaris
ctctccatgtcaccaaatccatgca

SEQ ID NO: 72486 - DNA, 25 bp, Canis familiaris
ctctcctttggctgatcatccaaca

SEQ ID NO: 72487 - DNA, 25 bp, Canis familiaris
ctcttctttcagtcagacctatcca

SEQ ID NO: 72488 - DNA, 25 bp, Canis familiaris
ctctgcactgaatggctgacctgac

SEQ ID NO: 72489 - DNA, 25 bp, Canis familiaris
ctctgccgacattgtgtgaccgtaa

SEQ ID NO: 72490 - DNA, 25 bp, Canis familiaris
ctctgcctcacaagcttactttaac

SEQ ID NO: 72491 - DNA, 25 bp, Canis familiaris
ctctgtctctaagttatttaaatta

SEQ ID NO: 72492 - DNA, 25 bp, Canis familiaris
ctctgtgccttaagtagtatggaga

SEQ ID NO: 72493 - DNA, 25 bp, Canis familiaris
ctctggcctgtgttcgaccaggaag

SEQ ID NO: 72494 - DNA, 25 bp, Canis familiaris
ctctgggagtgaaggtccaggagca

SEQ ID NO: 72495 - DNA, 25 bp, Canis familiaris
ctctcgcgagccaacagttcagaaa

SEQ ID NO: 72496 - DNA, 25 bp, Canis familiaris
ctctgggcaggcaacagtcctagca

SEQ ID NO: 72497 - DNA, 25 bp, Canis familiaris
ctctgggaggcctggcctccgtgtg

SEQ ID NO: 72498 - DNA, 25 bp, Canis familiaris
ctctcgtgacatcacgggtccgtgg

SEQ ID NO: 72499 - DNA, 25 bp, Canis familiaris
ctctctggacaccacgaggatcact

SEQ ID NO: 72500 - DNA, 25 bp, Canis familiaris
ctctctcaggcagccgatggtgcca

SEQ ID NO: 72501 - DNA, 25 bp, Canis familiaris
ctctaacgcccggagaggctcagga

SEQ ID NO: 72502 - DNA, 25 bp, Canis familiaris
ctctcaagccccagggaccaatttg

SEQ ID NO: 72503 - DNA, 25 bp, Canis familiaris
ctcttcatcaccggtgatggaccaa

SEQ ID NO: 72504 - DNA, 25 bp, Canis familiaris
ctctttcgagctgtttgcagacaaa

SEQ ID NO: 72505 - DNA, 25 bp, Canis familiaris
ctctttggacatgctcatctaggaa

SEQ ID NO: 72506 - DNA, 25 bp, Canis familiaris
ctctccgcagatatcatcattagta

SEQ ID NO: 72507 - DNA, 25 bp, Canis familiaris
ctctccaacatcatgcatcaagcag

SEQ ID NO: 72508 - DNA, 25 bp, Canis familiaris
ctctgctggactgtgccaacaaggt

SEQ ID NO: 72509 - DNA, 25 bp, Canis familiaris
ctctccaagtgcggccaagcacagt

SEQ ID NO: 72510 - DNA, 25 bp, Canis familiaris
ctctatcacagtccgcacatataaa

SEQ ID NO: 72511 - DNA, 25 bp, Canis familiaris
ctctctctgtgtgtgactatcataa

SEQ ID NO: 72512 - DNA, 25 bp, Canis familiaris
ctctgcactggtgttttcatatcgt

SEQ ID NO: 72513 - DNA, 25 bp, Canis familiaris
ctctcacacgtggttttctatcatg

SEQ ID NO: 72514 - DNA, 25 bp, Canis familiaris
ctctcagcacagggttgttcaaagg

SEQ ID NO: 72515 - DNA, 25 bp, Canis familiaris
ctctgacaagggtttccagagccgc

SEQ ID NO: 72516 - DNA, 25 bp, Canis familiaris
ctctcacaacaactattcatagacc

SEQ ID NO: 72517 - DNA, 25 bp, Canis familiaris
ctctcacccaacttgcgcaagatgc

SEQ ID NO: 72518 - DNA, 25 bp, Canis familiaris
ctctacccatctcttgaagacctga

SEQ ID NO: 72519 - DNA, 25 bp, Canis familiaris
ctctcctgccttctagagagacctg

SEQ ID NO: 72520 - DNA, 25 bp, Canis familiaris
ctctcttgcgctcttatatgtaccg

SEQ ID NO: 72521 - DNA, 25 bp, Canis familiaris
ctctttctctgtgtgatgactatca

SEQ ID NO: 72522 - DNA, 25 bp, Canis familiaris
ctctcactctttgagtaccactgga

SEQ ID NO: 72523 - DNA, 25 bp, Canis familiaris
ctcgacgtcattcagcttcacggtg

SEQ ID NO: 72524 - DNA, 25 bp, Canis familiaris
ctcgaactgttctagtacttgggcg

SEQ ID NO: 72525 - DNA, 25 bp, Canis familiaris
ctcggacaagtctctatctaatggt

SEQ ID NO: 72526 - DNA, 25 bp, Canis familiaris
ctctttattgactctctgctgaatg

SEQ ID NO: 72527 - DNA, 25 bp, Canis familiaris
ctctccttcatattcttcctgaaat

SEQ ID NO: 72528 - DNA, 25 bp, Canis familiaris
ctctcggattacttctgagctggaa

SEQ ID NO: 72529 - DNA, 25 bp, Canis familiaris
ctctcgtcttgtgttgagggacagg

SEQ ID NO: 72530 - DNA, 25 bp, Canis familiaris
ctctctgtttgtctctaatgaataa

SEQ ID NO: 72531 - DNA, 25 bp, Canis familiaris
ctctttctcactctctcagataaat

SEQ ID NO: 72532 - DNA, 25 bp, Canis familiaris
ctctttctcttgtgctcattacaga

SEQ ID NO: 72533 - DNA, 25 bp, Canis familiaris
ctctattccagctttgtttccagca

SEQ ID NO: 72534 - DNA, 25 bp, Canis familiaris
ctctttcacgcttcatttgctaggc

SEQ ID NO: 72535 - DNA, 25 bp, Canis familiaris
ctctctgtccgagatcatctgtcaa

SEQ ID NO: 72536 - DNA, 25 bp, Canis familiaris
ctctctgtgcctaatgttcttcaat

SEQ ID NO: 72537 - DNA, 25 bp, Canis familiaris
ctccttgcatctattttccatatac

SEQ ID NO: 72538 - DNA, 25 bp, Canis familiaris
ctctctaatcgacatgttgcctcaa

SEQ ID NO: 72539 - DNA, 25 bp, Canis familiaris
ctcttaggctctctttctcaaaaat

SEQ ID NO: 72540 - DNA, 25 bp, Canis familiaris
ctctttcctcatttttctcatagta

SEQ ID NO: 72541 - DNA, 25 bp, Canis familiaris
ctcttttcactgttgctttctatgt

SEQ ID NO: 72542 - DNA, 25 bp, Canis familiaris
ctctgtctcccatagttttgtctat

SEQ ID NO: 72543 - DNA, 25 bp, Canis familiaris
ctctttcttcaacgtgtttcacttg

SEQ ID NO: 72544 - DNA, 25 bp, Canis familiaris
ctctctcttgtcactgtgttacact

SEQ ID NO: 72545 - DNA, 25 bp, Canis familiaris
ctctatcctgccagtgctggtgagc

SEQ ID NO: 72546 - DNA, 25 bp, Canis familiaris
ctcgatcctgccattgtatctgcac

SEQ ID NO: 72547 - DNA, 25 bp, Canis familiaris
ctctacctgccagtattcattgccg

SEQ ID NO: 72548 - DNA, 25 bp, Canis familiaris
ctgccatcagtccactttcaggtgg

SEQ ID NO: 72549 - DNA, 25 bp, Canis familiaris
ctctcacagtcgatctacggggcaa

SEQ ID NO: 72550 - DNA, 25 bp, Canis familiaris
ctctctcttcgtgctataggcggta

SEQ ID NO: 72551 - DNA, 25 bp, Canis familiaris
ctctcgtgccagtgcttaggctttg

SEQ ID NO: 72552 - DNA, 25 bp, Canis familiaris
gtggcaggcccaggaaggcagagtg

SEQ ID NO: 72553 - DNA, 25 bp, Canis familiaris
ctctggagagagcaaaacttctgtc

SEQ ID NO: 72554 - DNA, 25 bp, Canis familiaris
ctctgcgtgggtgtagaccattctg

SEQ ID NO: 72555 - DNA, 25 bp, Canis familiaris
ctcggggactgtacgcagccttcga

SEQ ID NO: 72556 - DNA, 25 bp, Canis familiaris
ctcggggcatcaccaaaggcgtgaa

SEQ ID NO: 72557 - DNA, 25 bp, Canis familiaris
ctctggggccagtttagatgctgtg

SEQ ID NO: 72558 - DNA, 25 bp, Canis familiaris
ctctggtcccatttcctagagtggg

SEQ ID NO: 72559 - DNA, 25 bp, Canis familiaris
ctctgagtcccctcgtatgtatggg

SEQ ID NO: 72560 - DNA, 25 bp, Canis familiaris
ctctagccccaggccaggatggggg

SEQ ID NO: 72561 - DNA, 25 bp, Canis familiaris
ctctcaaactcctctgggtggggaa

SEQ ID NO: 72562 - DNA, 25 bp, Canis familiaris
ctctctgacccctttgggtgcagag

SEQ ID NO: 72563 - DNA, 25 bp, Canis familiaris
ctctcagaccctagcttggagtcag

SEQ ID NO: 72564 - DNA, 25 bp, Canis familiaris
ctctaacacctacacgttcaaggaa

SEQ ID NO: 72565 - DNA, 25 bp, Canis familiaris
ctgccttcaccaagaacccgaagga

SEQ ID NO: 72566 - DNA, 25 bp, Canis familiaris
ctctttaccgattggcgccagggag

SEQ ID NO: 72567 - DNA, 25 bp, Canis familiaris
ctcctgattccgtgggatcggcggt

SEQ ID NO: 72568 - DNA, 25 bp, Canis familiaris
ctctctgactccgaaaggaaggtgg

SEQ ID NO: 72569 - DNA, 25 bp, Canis familiaris
ctctgtaccccttagtaagtgcctc

SEQ ID NO: 72570 - DNA, 25 bp, Canis familiaris
ctctgtgacccatttagaagtggcc

SEQ ID NO: 72571 - DNA, 25 bp, Canis familiaris
ctcgatacgctggaaaaagtgcgcg

SEQ ID NO: 72572 - DNA, 25 bp, Canis familiaris
ctctggaggtgctgaaggagctgct

SEQ ID NO: 72573 - DNA, 25 bp, Canis familiaris
ctctgccatgtacaagggagctgtg

SEQ ID NO: 72574 - DNA, 25 bp, Canis familiaris
ctctgccatgtacatcgacgtgtga

SEQ ID NO: 72575 - DNA, 25 bp, Canis familiaris
ctctccattgcagagcgcgcggagt

SEQ ID NO: 72576 - DNA, 25 bp, Canis familiaris
ctctcactgtgctgatgtccatgtg

SEQ ID NO: 72577 - DNA, 25 bp, Canis familiaris
ctctcagctgtattttcagttttcc

SEQ ID NO: 72578 - DNA, 25 bp, Canis familiaris
ctctcctttatttcagttaccatcc

SEQ ID NO: 72579 - DNA, 25 bp, Canis familiaris
ctccaactatacaaagttccccctg

SEQ ID NO: 72580 - DNA, 25 bp, Canis familiaris
ctcctattataccagagctcttccc

SEQ ID NO: 72581 - DNA, 25 bp, Canis familiaris
ctctctcttaaattgctgtgttccc

SEQ ID NO: 72582 - DNA, 25 bp, Canis familiaris
ctctctcctatccagacactgatgt

SEQ ID NO: 72583 - DNA, 25 bp, Canis familiaris
ctctcaccatcttcaacactgtgtt

SEQ ID NO: 72584 - DNA, 25 bp, Canis familiaris
ctctcacctctcttggactgtgaga

SEQ ID NO: 72585 - DNA, 25 bp, Canis familiaris
ctctgtcccacatgcaatcgtgaga

SEQ ID NO: 72586 - DNA, 25 bp, Canis familiaris
ctctggcagcccaaattcctgcaga

SEQ ID NO: 72587 - DNA, 25 bp, Canis familiaris
ctcggcaccacactgtgttgcataa

SEQ ID NO: 72588 - DNA, 25 bp, Canis familiaris
ctcggtctgaggcatgtctctggag

SEQ ID NO: 72589 - DNA, 25 bp, Canis familiaris
ctcggagtagctgcagcttctcagg

SEQ ID NO: 72590 - DNA, 25 bp, Canis familiaris
ctctggacagttgccactgtggtgt

SEQ ID NO: 72591 - DNA, 25 bp, Canis familiaris
ctcgttctgtaggagagattggtgt

SEQ ID NO: 72592 - DNA, 25 bp, Canis familiaris
ctcggtctaccctgattggtgccga

SEQ ID NO: 72593 - DNA, 25 bp, Canis familiaris
ctcgctgtctacccaataaagttgc

SEQ ID NO: 72594 - DNA, 25 bp, Canis familiaris
ctctctgtggtctacaaaaatgttg

SEQ ID NO: 72595 - DNA, 25 bp, Canis familiaris
ctctcggcgctcttaaaggacttgg

SEQ ID NO: 72596 - DNA, 25 bp, Canis familiaris
ctctcggtggcctacaagaacgtgg

SEQ ID NO: 72597 - DNA, 25 bp, Canis familiaris
ctccaggtgttcttccaataagtcc

SEQ ID NO: 72598 - DNA, 25 bp, Canis familiaris
ctccggggtcagagaaccagctctt

SEQ ID NO: 72599 - DNA, 25 bp, Canis familiaris
ctcgggtgtgggagacaccccctga

SEQ ID NO: 72600 - DNA, 25 bp, Canis familiaris
cggttgcaggggagttgcctggcca

SEQ ID NO: 72601 - DNA, 25 bp, Canis familiaris
cggttgcaggggagttgcctggcca

SEQ ID NO: 72602 - DNA, 25 bp, Canis familiaris
cggttgcaggggagttgcctggcca

SEQ ID NO: 72603 - DNA, 25 bp, Canis familiaris
ctcggtaggaggagtctgccgcggc

SEQ ID NO: 72604 - DNA, 25 bp, Canis familiaris
ctctggtagtaactttctcccagcg

SEQ ID NO: 72605 - DNA, 25 bp, Canis familiaris
ctctggggtatcattcatctccctc

SEQ ID NO: 72606 - DNA, 25 bp, Canis familiaris
ctcgggaagatcactccagtcccta

SEQ ID NO: 72607 - DNA, 25 bp, Canis familiaris
ctcgggaggaatacccaccatggct

SEQ ID NO: 72608 - DNA, 25 bp, Canis familiaris
ctcggggaagaagccacccagtacg

SEQ ID NO: 72609 - DNA, 25 bp, Canis familiaris
ctcggggacagctcaacaagccagc

SEQ ID NO: 72610 - DNA, 25 bp, Canis familiaris
ctcgagaggcacatccaaggacatc

SEQ ID NO: 72611 - DNA, 25 bp, Canis familiaris
ctcggaggactttctagctgtcccg

SEQ ID NO: 72612 - DNA, 25 bp, Canis familiaris
ctctgaggtgcagctttacttccca

SEQ ID NO: 72613 - DNA, 25 bp, Canis familiaris
ctctggggccagcttatttcaacaa

SEQ ID NO: 72614 - DNA, 25 bp, Canis familiaris
ctctggccctctgggttttgaagga

SEQ ID NO: 72615 - DNA, 25 bp, Canis familiaris
ctctactccccaggttggtgaaggg

SEQ ID NO: 72616 - DNA, 25 bp, Canis familiaris
ctcgttgacccaggtttagaaggtg

SEQ ID NO: 72617 - DNA, 25 bp, Canis familiaris
ctcctggttcccgaatctagcaggg

SEQ ID NO: 72618 - DNA, 25 bp, Canis familiaris
ctgattagttccggagacaaagtgg

SEQ ID NO: 72619 - DNA, 25 bp, Canis familiaris
ctgtgaaaccgagaatcccattgga

SEQ ID NO: 72620 - DNA, 25 bp, Canis familiaris
ctgggacccatgaacattcccttgg

SEQ ID NO: 72621 - DNA, 25 bp, Canis familiaris
ctctggacccagaagattcggcatt

SEQ ID NO: 72622 - DNA, 25 bp, Canis familiaris
ctctggtcctcagagttcactggcc

SEQ ID NO: 72623 - DNA, 25 bp, Canis familiaris
ctctgatgctcctggagggtcggcc

SEQ ID NO: 72624 - DNA, 25 bp, Canis familiaris
ctcgtgtctacagtcaggagtccca

SEQ ID NO: 72625 - DNA, 25 bp, Canis familiaris
ctctcttctgagcacaaaagcgcca

SEQ ID NO: 72626 - DNA, 25 bp, Canis familiaris
ctctctctagaggaatggaacacca

SEQ ID NO: 72627 - DNA, 25 bp, Canis familiaris
ctctctgctcgtcaaggtcattgca

SEQ ID NO: 72628 - DNA, 25 bp, Canis familiaris
ctctccttgatgcacatggtggtga

SEQ ID NO: 72629 - DNA, 25 bp, Canis familiaris
ctctcactctcaaccatgtcatggt

SEQ ID NO: 72630 - DNA, 25 bp, Canis familiaris
ctctgcccatcaaggaatctgagat

SEQ ID NO: 72631 - DNA, 25 bp, Canis familiaris
ctctgggaaatggcagcactgatga

SEQ ID NO: 72632 - DNA, 25 bp, Canis familiaris
ctcgggcatcaatcagcacctgata

SEQ ID NO: 72633 - DNA, 25 bp, Canis familiaris
ctctaggacatttcaccctggacac

SEQ ID NO: 72634 - DNA, 25 bp, Canis familiaris
ctctcaggccttgagggctgggccg

SEQ ID NO: 72635 - DNA, 25 bp, Canis familiaris
ctcgaagttgttaagcgctgggccg

SEQ ID NO: 72636 - DNA, 25 bp, Canis familiaris
ctcgaatgcttgatgaagcttgtga

SEQ ID NO: 72637 - DNA, 25 bp, Canis familiaris
ctcgatggcttacttgacttattta

SEQ ID NO: 72638 - DNA, 25 bp, Canis familiaris
ctcggcgtctttaatcaaatctcta

SEQ ID NO: 72639 - DNA, 25 bp, Canis familiaris
ctcgaggctctttatgtcagacctc

SEQ ID NO: 72640 - DNA, 25 bp, Canis familiaris
ctctgtggtcttttggtactcatca

SEQ ID NO: 72641 - DNA, 25 bp, Canis familiaris
ctcgtcgtctttggtggactctaga

SEQ ID NO: 72642 - DNA, 25 bp, Canis familiaris
ctctgtggtttagcgccaccttgag

SEQ ID NO: 72643 - DNA, 25 bp, Canis familiaris
ctctgtggtttagcgccactttcgg

SEQ ID NO: 72644 - DNA, 25 bp, Canis familiaris
ctctgttttttggcctcatttacac

SEQ ID NO: 72645 - DNA, 25 bp, Canis familiaris
ctctctccttttccacatattaagc

SEQ ID NO: 72646 - DNA, 25 bp, Canis familiaris
ctctcccattttcatctttactatg

SEQ ID NO: 72647 - DNA, 25 bp, Canis familiaris
ctctcacctcctttattattattat

SEQ ID NO: 72648 - DNA, 25 bp, Canis familiaris
ctctagcctctttgtgtgtttttgt

SEQ ID NO: 72649 - DNA, 25 bp, Canis familiaris
ctctgcctatttttttgcctttgtg

SEQ ID NO: 72650 - DNA, 25 bp, Canis familiaris
ctctctctttcttttggttagtggt

SEQ ID NO: 72651 - DNA, 25 bp, Canis familiaris
ctctcatttctcttcattggtttat

SEQ ID NO: 72652 - DNA, 25 bp, Canis familiaris
ctctcattgcctctgcattgattct

SEQ ID NO: 72653 - DNA, 25 bp, Canis familiaris
ctctctttctgcacagtgacctgag

SEQ ID NO: 72654 - DNA, 25 bp, Canis familiaris
ctctctgttcttctgagcagcactg

SEQ ID NO: 72655 - DNA, 25 bp, Canis familiaris
ctctacttctatcagagatcctgtt

SEQ ID NO: 72656 - DNA, 25 bp, Canis familiaris
ctctccccagtgaagagccctatgt

SEQ ID NO: 72657 - DNA, 25 bp, Canis familiaris
ctctctggcaacctgaattcctatg

SEQ ID NO: 72658 - DNA, 25 bp, Canis familiaris
ctctctggcatacctattttcttag

SEQ ID NO: 72659 - DNA, 25 bp, Canis familiaris
ctctggacacaggtacttgtttcag

SEQ ID NO: 72660 - DNA, 25 bp, Canis familiaris
ctcggcccaggtcctgggcttgctg

SEQ ID NO: 72661 - DNA, 25 bp, Canis familiaris
ctcggaccacagacagggtgcggct

SEQ ID NO: 72662 - DNA, 25 bp, Canis familiaris
ctctcgggagagggccgtggagctc

SEQ ID NO: 72663 - DNA, 25 bp, Canis familiaris
ctctgtgcgggaggggttgggtcca

SEQ ID NO: 72664 - DNA, 25 bp, Canis familiaris
ctcgctctgggcgcggaaagggccc

SEQ ID NO: 72665 - DNA, 25 bp, Canis familiaris
ctctcctgaactgcggtctaggggg

SEQ ID NO: 72666 - DNA, 25 bp, Canis familiaris
ctcctcgaactacggactcgtacga

SEQ ID NO: 72667 - DNA, 25 bp, Canis familiaris
ctcccgactcaacaacacgaacaac

SEQ ID NO: 72668 - DNA, 25 bp, Canis familiaris
ctctccccgaacacatactaacaga

SEQ ID NO: 72669 - DNA, 25 bp, Canis familiaris
ctctgcccctgattatcaaaaaaaa

SEQ ID NO: 72670 - DNA, 25 bp, Canis familiaris
ctcgtcatcctgtcaaatatagcaa

SEQ ID NO: 72671 - DNA, 25 bp, Canis familiaris
ctctgtgctccttcatctggaagtg

SEQ ID NO: 72672 - DNA, 25 bp, Canis familiaris
ctctctctccctacacgatagagtt

SEQ ID NO: 72673 - DNA, 25 bp, Canis familiaris
ctctctgccctctgacgaagaaggc

SEQ ID NO: 72674 - DNA, 25 bp, Canis familiaris
ctcctgcccgaagagagactggtcc

SEQ ID NO: 72675 - DNA, 25 bp, Canis familiaris
ctctctccacgagggggtgggtctt

SEQ ID NO: 72676 - DNA, 25 bp, Canis familiaris
ctctctcctctatggtgggacagtc

SEQ ID NO: 72677 - DNA, 25 bp, Canis familiaris
ctctcacctcacaatgccggtaagt

SEQ ID NO: 72678 - DNA, 25 bp, Canis familiaris
ctctcaccaactggccggtgtggtg

SEQ ID NO: 72679 - DNA, 25 bp, Canis familiaris
ctctcccaactccaattgtgacgtg

SEQ ID NO: 72680 - DNA, 25 bp, Canis familiaris
ctctccaatgccagaattatacagg

SEQ ID NO: 72681 - DNA, 25 bp, Canis familiaris
ctctccatagttcatcctcataaag

SEQ ID NO: 72682 - DNA, 25 bp, Canis familiaris
ctctccaaatgtcctccaaacatca

SEQ ID NO: 72683 - DNA, 25 bp, Canis familiaris
ctcccaagagatcccactcgattat

SEQ ID NO: 72684 - DNA, 25 bp, Canis familiaris
ctctctcgagagtaggcatatcctt

SEQ ID NO: 72685 - DNA, 25 bp, Canis familiaris
ctctctctgagacaagcaacaagct

SEQ ID NO: 72686 - DNA, 25 bp, Canis familiaris
ctcgtatgaaaaagtaaactatcct

SEQ ID NO: 72687 - DNA, 25 bp, Canis familiaris
ctcctgaataaatacataaaatctc

SEQ ID NO: 72688 - DNA, 25 bp, Canis familiaris
ctcgcgaaaagcctaggtataatcc

SEQ ID NO: 72689 - DNA, 25 bp, Canis familiaris
ctgctttgggggcagctgtctagac

SEQ ID NO: 72690 - DNA, 25 bp, Canis familiaris
ctctcttggggcctgacactagaga

SEQ ID NO: 72691 - DNA, 25 bp, Canis familiaris
ctctctttcaccctacacaaagatg

SEQ ID NO: 72692 - DNA, 25 bp, Canis familiaris
ctctctctgtgactatcataaaaaa

SEQ ID NO: 72693 - DNA, 25 bp, Canis familiaris
ctctctctgtgactatcataaataa

SEQ ID NO: 72694 - DNA, 25 bp, Canis familiaris
ctctctctgtctctcatgaataaat

SEQ ID NO: 72695 - DNA, 25 bp, Canis familiaris
ctctctcattctcagatagatagat

SEQ ID NO: 72696 - DNA, 25 bp, Canis familiaris
ctctctctccacagtatgcatctgt

SEQ ID NO: 72697 - DNA, 25 bp, Canis familiaris
ctctgttgccgatgctatcatcatt

SEQ ID NO: 72698 - DNA, 25 bp, Canis familiaris
ctctgtctgcagtatggtgtcattt

SEQ ID NO: 72699 - DNA, 25 bp, Canis familiaris
ctctgctcatgtgtgtgcttgcaca

SEQ ID NO: 72700 - DNA, 25 bp, Canis familiaris
ctctgctgagtgggctgcgagaagc

SEQ ID NO: 72701 - DNA, 25 bp, Canis familiaris
ctctgctagctgcatcgctggaaat

SEQ ID NO: 72702 - DNA, 25 bp, Canis familiaris
ctctgtcctggacctggtcaactat

SEQ ID NO: 72703 - DNA, 25 bp, Canis familiaris
ctctctcgctgaacacttgttactt

SEQ ID NO: 72704 - DNA, 25 bp, Canis familiaris
ctctctcacaatgctcttgttgttt

SEQ ID NO: 72705 - DNA, 25 bp, Canis familiaris
ctctctgaggtcggttgttgtcttt

SEQ ID NO: 72706 - DNA, 25 bp, Canis familiaris
ctctctgatgtgtgccttttgttca

SEQ ID NO: 72707 - DNA, 25 bp, Canis familiaris
ctctcttggctggcctggtgatgtg

SEQ ID NO: 72708 - DNA, 25 bp, Canis familiaris
ctctctcattgcccagtggtgatac

SEQ ID NO: 72709 - DNA, 25 bp, Canis familiaris
ctctctgcttctactgtgtgaacca

SEQ ID NO: 72710 - DNA, 25 bp, Canis familiaris
ctctctgctcctctgtggaagcagc

SEQ ID NO: 72711 - DNA, 25 bp, Canis familiaris
ctctctgctcgtttgtgtcgagtca

SEQ ID NO: 72712 - DNA, 25 bp, Canis familiaris
ctctctctgtgtttttgctggtgag

SEQ ID NO: 72713 - DNA, 25 bp, Canis familiaris
ctctctctgtctatctcgtttgagt

SEQ ID NO: 72714 - DNA, 25 bp, Canis familiaris
ctctctcttctattctgttttgaca

SEQ ID NO: 72715 - DNA, 25 bp, Canis familiaris
ctctctctgtctttcgtatttatga

SEQ ID NO: 72716 - DNA, 25 bp, Canis familiaris
ctctctcatgtcactcagctaatgc

SEQ ID NO: 72717 - DNA, 25 bp, Canis familiaris
ctctctcatatatctcaatatagag

SEQ ID NO: 72718 - DNA, 25 bp, Canis familiaris
ctctctctacacctcttatgaataa

SEQ ID NO: 72719 - DNA, 25 bp, Canis familiaris
ctctctccgtgtctctatgaatata

SEQ ID NO: 72720 - DNA, 25 bp, Canis familiaris
ctctctctctgtgactatcataaaa

SEQ ID NO: 72721 - DNA, 25 bp, Canis familiaris
ctctctctgtgtgactatcatgaat

SEQ ID NO: 72722 - DNA, 25 bp, Canis familiaris
ctctctctgtgtgtgtgactatcat

SEQ ID NO: 72723 - DNA, 25 bp, Canis familiaris
ctctctctctctatgtgactatcat

SEQ ID NO: 72724 - DNA, 25 bp, Canis familiaris
ctctctctctctatgtgactatcat

SEQ ID NO: 72725 - DNA, 25 bp, Canis familiaris
ctctgctctcttagtggcatttctt

SEQ ID NO: 72726 - DNA, 25 bp, Canis familiaris
ctctcctcttgatgctgcagtattt

SEQ ID NO: 72727 - DNA, 25 bp, Canis familiaris
ctctctctcggctggaggtgttggt

SEQ ID NO: 72728 - DNA, 25 bp, Canis familiaris
ctctccctaggctgggctttggatg

SEQ ID NO: 72729 - DNA, 25 bp, Canis familiaris
ctctccctagagcagtggctctcag

SEQ ID NO: 72730 - DNA, 25 bp, Canis familiaris
ctctgacttctctgactggtctagc

SEQ ID NO: 72731 - DNA, 25 bp, Canis familiaris
ctctgactcctgttttggtcatacc

SEQ ID NO: 72732 - DNA, 25 bp, Canis familiaris
ctcgatgtcgaggatgttggtgcaa

SEQ ID NO: 72733 - DNA, 25 bp, Canis familiaris
ctctgatctcagaatgatgaagtgc

SEQ ID NO: 72734 - DNA, 25 bp, Canis familiaris
ctctgtgccagcagcttagatgcgt

SEQ ID NO: 72735 - DNA, 25 bp, Canis familiaris
ctctctgaggctgctaaccggaaca

SEQ ID NO: 72736 - DNA, 25 bp, Canis familiaris
ctctctgagtgcgctatcgtcaagg

SEQ ID NO: 72737 - DNA, 25 bp, Canis familiaris
ctctctgagagcttctacctctaag

SEQ ID NO: 72738 - DNA, 25 bp, Canis familiaris
ctctctaacctctacctgtgaaaat

SEQ ID NO: 72739 - DNA, 25 bp, Canis familiaris
ctcctatacgcctaatcggagccct

SEQ ID NO: 72740 - DNA, 25 bp, Canis familiaris
ctctcacatatcccagactgggtcc

SEQ ID NO: 72741 - DNA, 25 bp, Canis familiaris
ctctccttagggaaggtgctgcctt

SEQ ID NO: 72742 - DNA, 25 bp, Canis familiaris
ctcccttttcacaggttccatattt

SEQ ID NO: 72743 - DNA, 25 bp, Canis familiaris
ctcccgttggacacgttgttttgag

SEQ ID NO: 72744 - DNA, 25 bp, Canis familiaris
ctccctttaaccagattgtattggc

SEQ ID NO: 72745 - DNA, 25 bp, Canis familiaris
ccccctattactctaggcctatggc

SEQ ID NO: 72746 - DNA, 25 bp, Canis familiaris
ctcccttgttaggcctgggcctagg

SEQ ID NO: 72747 - DNA, 25 bp, Canis familiaris
ctccctcttctagatccgggttatc

SEQ ID NO: 72748 - DNA, 25 bp, Canis familiaris
ctcgccattttaggtccgggctgta

SEQ ID NO: 72749 - DNA, 25 bp, Canis familiaris
ctctccaccttatgacacaggtctt

SEQ ID NO: 72750 - DNA, 25 bp, Canis familiaris
ctctccatcatcctgggacacaggt

SEQ ID NO: 72751 - DNA, 25 bp, Canis familiaris
ctctctctgcgccaggggcaaagtg

SEQ ID NO: 72752 - DNA, 25 bp, Canis familiaris
ctctgactccgaaaggaaggtggac

SEQ ID NO: 72753 - DNA, 25 bp, Canis familiaris
ctctccccgtgacggaatgcagggg

SEQ ID NO: 72754 - DNA, 25 bp, Canis familiaris
ctctctccgctttcaggcaagagaa

SEQ ID NO: 72755 - DNA, 25 bp, Canis familiaris
ctctctgccggttattcacgatggc

SEQ ID NO: 72756 - DNA, 25 bp, Canis familiaris
ctcgatcctgggtcgccaggatggc

SEQ ID NO: 72757 - DNA, 25 bp, Canis familiaris
ctcgtgcaactgcctagctcagaag

SEQ ID NO: 72758 - DNA, 25 bp, Canis familiaris
ctcggcaattgttgcctcggcagct

SEQ ID NO: 72759 - DNA, 25 bp, Canis familiaris
ctcggcaattgttgcctcggcagct

SEQ ID NO: 72760 - DNA, 25 bp, Canis familiaris
ctcgaccattttgtgcagcatcagc

SEQ ID NO: 72761 - DNA, 25 bp, Canis familiaris
ctctgactctaagtagcacagaaga

SEQ ID NO: 72762 - DNA, 25 bp, Canis familiaris
ctcgccttggaccgacaaagtttga

SEQ ID NO: 72763 - DNA, 25 bp, Canis familiaris
ctctcctcgggtaaccatcagtttg

SEQ ID NO: 72764 - DNA, 25 bp, Canis familiaris
ctctgcctcagagtattgaccctgt

SEQ ID NO: 72765 - DNA, 25 bp, Canis familiaris
ctctccgcacagtacgagactctgt

SEQ ID NO: 72766 - DNA, 25 bp, Canis familiaris
ctctcgcccagaacagacaggttta

SEQ ID NO: 72767 - DNA, 25 bp, Canis familiaris
ctctctccatctaacaaatggtcct

SEQ ID NO: 72768 - DNA, 25 bp, Canis familiaris
ctctccctgtattccaaggtcaatg

SEQ ID NO: 72769 - DNA, 25 bp, Canis familiaris
ctgccacggtatcccatcagggaat

SEQ ID NO: 72770 - DNA, 25 bp, Canis familiaris
ctgtccaggaagctccaggtttcaa

SEQ ID NO: 72771 - DNA, 25 bp, Canis familiaris
gctcccgagtacacctggtttaagg

SEQ ID NO: 72772 - DNA, 25 bp, Canis familiaris
ctcccagaggccacttggtactagg

SEQ ID NO: 72773 - DNA, 25 bp, Canis familiaris
ctcccacaactcattccctagtggg

SEQ ID NO: 72774 - DNA, 25 bp, Canis familiaris
ctcccaaaacttgccctatgtacgt

SEQ ID NO: 72775 - DNA, 25 bp, Canis familiaris
ctctgccaagaagacccaaaggacg

SEQ ID NO: 72776 - DNA, 25 bp, Canis familiaris
gcttcaaagaaaacgccgaccaagg

SEQ ID NO: 72777 - DNA, 25 bp, Canis familiaris
ctccatgaacactaacccgaccatg

SEQ ID NO: 72778 - DNA, 25 bp, Canis familiaris
ctctctggaagagacacacttgcca

SEQ ID NO: 72779 - DNA, 25 bp, Canis familiaris
ctctctggaagagacccaactgcaa

SEQ ID NO: 72780 - DNA, 25 bp, Canis familiaris
ctctcgcgagaaaacctcggctgga

SEQ ID NO: 72781 - DNA, 25 bp, Canis familiaris
ctctctgtggtaaacgccggggact

SEQ ID NO: 72782 - DNA, 25 bp, Canis familiaris
ctctgctgtggcaagaacccactgg

SEQ ID NO: 72783 - DNA, 25 bp, Canis familiaris
ctctctgtctgcacatgggcacaaa

SEQ ID NO: 72784 - DNA, 25 bp, Canis familiaris
ctctctcatatatcttgtgcactat

SEQ ID NO: 72785 - DNA, 25 bp, Canis familiaris
ctctgctttgcagctattgcactag

SEQ ID NO: 72786 - DNA, 25 bp, Canis familiaris
ctctgtggatgagaatggccggatg

SEQ ID NO: 72787 - DNA, 25 bp, Canis familiaris
ctctgagcaggacacgggccagatg

SEQ ID NO: 72788 - DNA, 25 bp, Canis familiaris
ctctgaggtggctacgggaagatct

SEQ ID NO: 72789 - DNA, 25 bp, Canis familiaris
ctctgcggtgtgtgcgggacacaag

SEQ ID NO: 72790 - DNA, 25 bp, Canis familiaris
ctctgtggttcagtgcccgagacag

SEQ ID NO: 72791 - DNA, 25 bp, Canis familiaris
ctcgaggttcaggccacagaccgag

SEQ ID NO: 72792 - DNA, 25 bp, Canis familiaris
ctcgagatgttggtcccacaccaac

SEQ ID NO: 72793 - DNA, 25 bp, Canis familiaris
ctcgatctgctagacccaaacaaga

SEQ ID NO: 72794 - DNA, 25 bp, Canis familiaris
ctcgttcctgcctcctaaaagcaga

SEQ ID NO: 72795 - DNA, 25 bp, Canis familiaris
ctccattccgtctccttaggaagga

SEQ ID NO: 72796 - DNA, 25 bp, Canis familiaris
ctctctccctgtttctttaagcggg

SEQ ID NO: 72797 - DNA, 25 bp, Canis familiaris
ctctgtcccaatttctcttgtatga

SEQ ID NO: 72798 - DNA, 25 bp, Canis familiaris
ctctgtcccaggcccagatttagat

SEQ ID NO: 72799 - DNA, 25 bp, Canis familiaris
ctcgattccgctacgatcagttaat

SEQ ID NO: 72800 - DNA, 25 bp, Canis familiaris
ctcgattccgctacgatcagttaat

SEQ ID NO: 72801 - DNA, 25 bp, Canis familiaris
ctcgattccgctacgatcaattaat

SEQ ID NO: 72802 - DNA, 25 bp, Canis familiaris
ctcgatatccctacttacattagga

SEQ ID NO: 72803 - DNA, 25 bp, Canis familiaris
ctctcttcctcaactttctgtagaa

SEQ ID NO: 72804 - DNA, 25 bp, Canis familiaris
ctctcttctgagtcccttcagatag

SEQ ID NO: 72805 - DNA, 25 bp, Canis familiaris
ctcgctttgagggccttgaggacca

SEQ ID NO: 72806 - DNA, 25 bp, Canis familiaris
ctcgaatgctgatgagcttgtgagc

SEQ ID NO: 72807 - DNA, 25 bp, Canis familiaris
ctctgccacagatactcatgcttgt

SEQ ID NO: 72808 - DNA, 25 bp, Canis familiaris
ctctccacagacgtcagcagttgag

SEQ ID NO: 72809 - DNA, 25 bp, Canis familiaris
ctctctcacaatcagcagcggggag

SEQ ID NO: 72810 - DNA, 25 bp, Canis familiaris
ctcccaggagcaagaggagcggagc

SEQ ID NO: 72811 - DNA, 25 bp, Canis familiaris
ctctctcctcgcgtgtggagggagc

SEQ ID NO: 72812 - DNA, 25 bp, Canis familiaris
ctctctcccagcctggagtaggagg

SEQ ID NO: 72813 - DNA, 25 bp, Canis familiaris
ctcggaacacgggatctaggggaat

SEQ ID NO: 72814 - DNA, 25 bp, Canis familiaris
ctctgtgggccaggcgactgagggc

SEQ ID NO: 72815 - DNA, 25 bp, Canis familiaris
ctctgttggcaggggtgggatggcg

SEQ ID NO: 72816 - DNA, 25 bp, Canis familiaris
ctctgttggctgggcaggcagtgtg

SEQ ID NO: 72817 - DNA, 25 bp, Canis familiaris
ctctgttggctgctccaagagtggg

SEQ ID NO: 72818 - DNA, 25 bp, Canis familiaris
ctctgtcatcctggatcccagtgag

SEQ ID NO: 72819 - DNA, 25 bp, Canis familiaris
ctctgcctggctggtccagcagatg

SEQ ID NO: 72820 - DNA, 25 bp, Canis familiaris
ctctcctgtctggtctcaggcagga

SEQ ID NO: 72821 - DNA, 25 bp, Canis familiaris
ctctgaccgcgggtgcagtcagtga

SEQ ID NO: 72822 - DNA, 25 bp, Canis familiaris
ctctgaccctgtagtagtcatgcca

SEQ ID NO: 72823 - DNA, 25 bp, Canis familiaris
ctctgcaccccaactagatatgtca

SEQ ID NO: 72824 - DNA, 25 bp, Canis familiaris
ctctctcccctcttaattatgaatt

SEQ ID NO: 72825 - DNA, 25 bp, Canis familiaris
ctctcctggcgcattaacttggtta

SEQ ID NO: 72826 - DNA, 25 bp, Canis familiaris
ctctcctacttggataactgtggta

SEQ ID NO: 72827 - DNA, 25 bp, Canis familiaris
ctctcctacttggataactgtggta

SEQ ID NO: 72828 - DNA, 25 bp, Canis familiaris
ctctcctacttggataactgtggta

SEQ ID NO: 72829 - DNA, 25 bp, Canis familiaris
ctctcgtctccttgtgttttgtgga

SEQ ID NO: 72830 - DNA, 25 bp, Canis familiaris
ctgccgtcaaaaattctgtttgggg

SEQ ID NO: 72831 - DNA, 25 bp, Canis familiaris
ctccctaaaaagccttgtcttcctg

SEQ ID NO: 72832 - DNA, 25 bp, Canis familiaris
ctcccttgaagatgtttgttgaacc

SEQ ID NO: 72833 - DNA, 25 bp, Canis familiaris
ctctgtttaaaatttctgctcttga

SEQ ID NO: 72834 - DNA, 25 bp, Canis familiaris
ctctctgttccaaaatcttctttta

SEQ ID NO: 72835 - DNA, 25 bp, Canis familiaris
ctccgtgtccaaactgttttcttca

SEQ ID NO: 72836 - DNA, 25 bp, Canis familiaris
ctccaaaccaagctgtccttcggaa

SEQ ID NO: 72837 - DNA, 25 bp, Canis familiaris
ctgctccaagtctggggccttggga

SEQ ID NO: 72838 - DNA, 25 bp, Canis familiaris
ctctcgaggagttggggcacctggg

SEQ ID NO: 72839 - DNA, 25 bp, Canis familiaris
ctctctccgcagtggaggacctgga

SEQ ID NO: 72840 - DNA, 25 bp, Canis familiaris
ctctctctctcaggtacagaaccgg

SEQ ID NO: 72841 - DNA, 25 bp, Canis familiaris
ctctctcgatccctacgatagacac

SEQ ID NO: 72842 - DNA, 25 bp, Canis familiaris
ctctgccgcatatgtatgtgataaa

SEQ ID NO: 72843 - DNA, 25 bp, Canis familiaris
ctctcctgaataaatacataaaatc

SEQ ID NO: 72844 - DNA, 25 bp, Canis familiaris
ctctctgtgaccagcataaataaat

SEQ ID NO: 72845 - DNA, 25 bp, Canis familiaris
ctctcgacctcacgctaagaaagtc

SEQ ID NO: 72846 - DNA, 25 bp, Canis familiaris
ctctcctccatctctacgaaaaagt

SEQ ID NO: 72847 - DNA, 25 bp, Canis familiaris
ctctctgccctctcgacgagagaag

SEQ ID NO: 72848 - DNA, 25 bp, Canis familiaris
ctctctgaggccttcgaggtgtgga

SEQ ID NO: 72849 - DNA, 25 bp, Canis familiaris
ctctcgaggttctgggctctatgta

SEQ ID NO: 72850 - DNA, 25 bp, Canis familiaris
ctctcggtattccaggagtcctgaa

SEQ ID NO: 72851 - DNA, 25 bp, Canis familiaris
ctctctgcagtcttggggagtctct

SEQ ID NO: 72852 - DNA, 25 bp, Canis familiaris
ctctgctagctccagactggtgctc

SEQ ID NO: 72853 - DNA, 25 bp, Canis familiaris
ctctgtgacccagctgctgtgatgt

SEQ ID NO: 72854 - DNA, 25 bp, Canis familiaris
ctctgatgaccgacggttgctgtgg

SEQ ID NO: 72855 - DNA, 25 bp, Canis familiaris
ctcgcataacgtgggttttggatag

SEQ ID NO: 72856 - DNA, 25 bp, Canis familiaris
ctcgtcaagcctttgagtttcctca

SEQ ID NO: 72857 - DNA, 25 bp, Canis familiaris
ctcgtcgatagctctgacgtaccca

SEQ ID NO: 72858 - DNA, 25 bp, Canis familiaris
ctcgtctgtcgctcagaccatgatc

SEQ ID NO: 72859 - DNA, 25 bp, Canis familiaris
ctctggtgtagctgatgatccgaat

SEQ ID NO: 72860 - DNA, 25 bp, Canis familiaris
ctctgttgtctcatgagcacacgaa

SEQ ID NO: 72861 - DNA, 25 bp, Canis familiaris
ctctgccttccaaggccttgaatca

SEQ ID NO: 72862 - DNA, 25 bp, Canis familiaris
ctctccctccgaacaattgaatctt

SEQ ID NO: 72863 - DNA, 25 bp, Canis familiaris
ctcccctcctttgatgggactttgc

SEQ ID NO: 72864 - DNA, 25 bp, Canis familiaris
ctccccatttttggtgggacttcag

SEQ ID NO: 72865 - DNA, 25 bp, Canis familiaris
ctctccgttttcgcttggatttgag

SEQ ID NO: 72866 - DNA, 25 bp, Canis familiaris
ctctcggttgtctccttattttatt

SEQ ID NO: 72867 - DNA, 25 bp, Canis familiaris
ctctcggtgtgttccagtgtttagc

SEQ ID NO: 72868 - DNA, 25 bp, Canis familiaris
ctctccagtgctgactgctgtgttt

SEQ ID NO: 72869 - DNA, 25 bp, Canis familiaris
ctctccctgccacattgagatgatt

SEQ ID NO: 72870 - DNA, 25 bp, Canis familiaris
ctctccctgccacattgagatgatt

SEQ ID NO: 72871 - DNA, 25 bp, Canis familiaris
ctctccctgccacattgagatgatt

SEQ ID NO: 72872 - DNA, 25 bp, Canis familiaris
ctctccctgccacattgagatgatt

SEQ ID NO: 72873 - DNA, 25 bp, Canis familiaris
ctctccctcaggaatctgagatctc

SEQ ID NO: 72874 - DNA, 25 bp, Canis familiaris
ctctccagtcacgtatcgcgtgatc

SEQ ID NO: 72875 - DNA, 25 bp, Canis familiaris
ctcccgtcagcagattcggtatctg

SEQ ID NO: 72876 - DNA, 25 bp, Canis familiaris
ctctcctgtgagccctacagggtgc

SEQ ID NO: 72877 - DNA, 25 bp, Canis familiaris
ctctctgttggtcctgacagggggt

SEQ ID NO: 72878 - DNA, 25 bp, Canis familiaris
ctctctgttagtccatgattaaggg

SEQ ID NO: 72879 - DNA, 25 bp, Canis familiaris
ctctctgtgtgactatcatgaataa

SEQ ID NO: 72880 - DNA, 25 bp, Canis familiaris
ctctctgtgtcgctcatgaactaaa

SEQ ID NO: 72881 - DNA, 25 bp, Canis familiaris
ctctctggagtgctgcctatatcaa

SEQ ID NO: 72882 - DNA, 25 bp, Canis familiaris
ctctctgtgtgtgtgactatcataa

SEQ ID NO: 72883 - DNA, 25 bp, Canis familiaris
ctctgctgtcctgggattgcatatg

SEQ ID NO: 72884 - DNA, 25 bp, Canis familiaris
ctctgcattccagggcgctgtcata

SEQ ID NO: 72885 - DNA, 25 bp, Canis familiaris
ctgctgcattccgctgggtataaca

SEQ ID NO: 72886 - DNA, 25 bp, Canis familiaris
ctctgcataggccctgagaccatag

SEQ ID NO: 72887 - DNA, 25 bp, Canis familiaris
ctctgcactcagcactggagactac

SEQ ID NO: 72888 - DNA, 25 bp, Canis familiaris
ctctgaccagaggtggaaccccgag

SEQ ID NO: 72889 - DNA, 25 bp, Canis familiaris
ctctcccgaggtggaacccatgggt

SEQ ID NO: 72890 - DNA, 25 bp, Canis familiaris
ctctcccagggagtgagcagctact

SEQ ID NO: 72891 - DNA, 25 bp, Canis familiaris
ctcgcccggagactagagcagcata

SEQ ID NO: 72892 - DNA, 25 bp, Canis familiaris
ctcccagggagacaggccttgctgg

SEQ ID NO: 72893 - DNA, 25 bp, Canis familiaris
ctccctgggatgcaacgacgtcggg

SEQ ID NO: 72894 - DNA, 25 bp, Canis familiaris
ctctcctccaatcgaacacatcgac

SEQ ID NO: 72895 - DNA, 25 bp, Canis familiaris
ctccgtccagatcaaacctggagct

SEQ ID NO: 72896 - DNA, 25 bp, Canis familiaris
ctccgtacagtggccttactacgtc

SEQ ID NO: 72897 - DNA, 25 bp, Canis familiaris
ctccagctaaggaccttaagtgggc

SEQ ID NO: 72898 - DNA, 25 bp, Canis familiaris
ctcccttaagctgtaacaggtggcc

SEQ ID NO: 72899 - DNA, 25 bp, Canis familiaris
ctccccttactcttgcaccaagagt

SEQ ID NO: 72900 - DNA, 25 bp, Canis familiaris
ctccttatttaccagcaaccagact

SEQ ID NO: 72901 - DNA, 25 bp, Canis familiaris
ctcctctgtttaacgcagacccgac

SEQ ID NO: 72902 - DNA, 25 bp, Canis familiaris
ctctctgtttaaaaatgaccccact

SEQ ID NO: 72903 - DNA, 25 bp, Canis familiaris
ctctgcgagtcttgggaaaccccag

SEQ ID NO: 72904 - DNA, 25 bp, Canis familiaris
ctcgctgagtcctggaacgggcaga

SEQ ID NO: 72905 - DNA, 25 bp, Canis familiaris
ctctgcctggacacgagtcgggaaa

SEQ ID NO: 72906 - DNA, 25 bp, Canis familiaris
ctctgccggccaaaggccaaggcca

SEQ ID NO: 72907 - DNA, 25 bp, Canis familiaris
ctctccagggcggaggcccagagaa

SEQ ID NO: 72908 - DNA, 25 bp, Canis familiaris
ctctccacaccacagtactcagagt

SEQ ID NO: 72909 - DNA, 25 bp, Canis familiaris
ctctccaaaagagctcatctctggt

SEQ ID NO: 72910 - DNA, 25 bp, Canis familiaris
ctctccaagaggacaatcatctggg

SEQ ID NO: 72911 - DNA, 25 bp, Canis familiaris
ctctcctggaggaactgtgctcggg

SEQ ID NO: 72912 - DNA, 25 bp, Canis familiaris
ctctccagtagtctcagtgcttggc

SEQ ID NO: 72913 - DNA, 25 bp, Canis familiaris
ctctccatccatacagtaggcttcg

SEQ ID NO: 72914 - DNA, 25 bp, Canis familiaris
ctccctccaagcacaatttccagag

SEQ ID NO: 72915 - DNA, 25 bp, Canis familiaris
ctctcctccaatatgttttcctggg

SEQ ID NO: 72916 - DNA, 25 bp, Canis familiaris
ctccctggaaccaagttccctggtg

SEQ ID NO: 72917 - DNA, 25 bp, Canis familiaris
ctcggggagaccagctgtcacccga

SEQ ID NO: 72918 - DNA, 25 bp, Canis familiaris
ctcctgggaacccagtgtaccctca

SEQ ID NO: 72919 - DNA, 25 bp, Canis familiaris
ctccgtggaactgctgagaaccctc

SEQ ID NO: 72920 - DNA, 25 bp, Canis familiaris
ctctctgggatcttactgggaccaa

SEQ ID NO: 72921 - DNA, 25 bp, Canis familiaris
ctctctgggatcccctgaggaaggg

SEQ ID NO: 72922 - DNA, 25 bp, Canis familiaris
ctcctgggtcttgcctggaagagtt

SEQ ID NO: 72923 - DNA, 25 bp, Canis familiaris
ctctggtggccgatcgggggattgt

SEQ ID NO: 72924 - DNA, 25 bp, Canis familiaris
ctcgggagcccagtgtgggcggatc

SEQ ID NO: 72925 - DNA, 25 bp, Canis familiaris
ctcgggaccaacatgttctgaactc

SEQ ID NO: 72926 - DNA, 25 bp, Canis familiaris
ctcccaggccaagcctggctaaccc

SEQ ID NO: 72927 - DNA, 25 bp, Canis familiaris
ctccacttacaagcgcagactacag

SEQ ID NO: 72928 - DNA, 25 bp, Canis familiaris
ctctcctggaccacaagtctagcag

SEQ ID NO: 72929 - DNA, 25 bp, Canis familiaris
ctctccccctcatcaaaaagcaaaa

SEQ ID NO: 72930 - DNA, 25 bp, Canis familiaris
ctctcctgcctccttgaaagaaaaa

SEQ ID NO: 72931 - DNA, 25 bp, Canis familiaris
ctctcgctctctctgaatgaataaa

SEQ ID NO: 72932 - DNA, 25 bp, Canis familiaris
ctctcgtgcactctttggtcagaag

SEQ ID NO: 72933 - DNA, 25 bp, Canis familiaris
ctctcgtgccgtgcttggcatatgt

SEQ ID NO: 72934 - DNA, 25 bp, Canis familiaris
ctcctggccgtgggctgtaagtttt

SEQ ID NO: 72935 - DNA, 25 bp, Canis familiaris
ctccgacactgggttgtacctgttt

SEQ ID NO: 72936 - DNA, 25 bp, Canis familiaris
ctccgacgtggaatttgggttattg

SEQ ID NO: 72937 - DNA, 25 bp, Canis familiaris
ctccccggtgaccttggatttgaag

SEQ ID NO: 72938 - DNA, 25 bp, Canis familiaris
ctcccccgaacgagggccagaatgg

SEQ ID NO: 72939 - DNA, 25 bp, Canis familiaris
ctcccccaaaaggcgaagcacgact

SEQ ID NO: 72940 - DNA, 25 bp, Canis familiaris
ctccccaggaaagcaggtcctgccc

SEQ ID NO: 72941 - DNA, 25 bp, Canis familiaris
ctcccaaggggagcattggccccgg

SEQ ID NO: 72942 - DNA, 25 bp, Canis familiaris
ctccaaaggtggtcctgagggtcct

SEQ ID NO: 72943 - DNA, 25 bp, Canis familiaris
ctctgacgagttctccgaggtcatc

SEQ ID NO: 72944 - DNA, 25 bp, Canis familiaris
ctcgggagtgtcctccgagagcggc

SEQ ID NO: 72945 - DNA, 25 bp, Canis familiaris
ctctgatggcagctgtccttgatga

SEQ ID NO: 72946 - DNA, 25 bp, Canis familiaris
ctctgctggcgtttgcctgtgatga

SEQ ID NO: 72947 - DNA, 25 bp, Canis familiaris
ctctgtatctgatttttgtgcagaa

SEQ ID NO: 72948 - DNA, 25 bp, Canis familiaris
ctctgttgctcattttaccagaaga

SEQ ID NO: 72949 - DNA, 25 bp, Canis familiaris
ctctgcaagtcacttttcccaatga

SEQ ID NO: 72950 - DNA, 25 bp, Canis familiaris
ctctggacttggttatgcccttgag

SEQ ID NO: 72951 - DNA, 25 bp, Canis familiaris
ctgctgaacttcaaatattcctaat

SEQ ID NO: 72952 - DNA, 25 bp, Canis familiaris
ctctgaccaatctctcgttctagat

SEQ ID NO: 72953 - DNA, 25 bp, Canis familiaris
ctctgactaatctgcctattgttaa

SEQ ID NO: 72954 - DNA, 25 bp, Canis familiaris
ctctgactggactgactgttgccga

SEQ ID NO: 72955 - DNA, 25 bp, Canis familiaris
ctctgaccctcatggctgttggagg

SEQ ID NO: 72956 - DNA, 25 bp, Canis familiaris
ctctgcccctccgagagctaggagg

SEQ ID NO: 72957 - DNA, 25 bp, Canis familiaris
ctccctcctgaccagattcaggcat

SEQ ID NO: 72958 - DNA, 25 bp, Canis familiaris
ctcccatccgaccaatgtctgtaaa

SEQ ID NO: 72959 - DNA, 25 bp, Canis familiaris
ctccctgacgaactgattccttcaa

SEQ ID NO: 72960 - DNA, 25 bp, Canis familiaris
ctcgctctttgaaagttcctgccag

SEQ ID NO: 72961 - DNA, 25 bp, Canis familiaris
ctcgctttcaaaatgttaccacggt

SEQ ID NO: 72962 - DNA, 25 bp, Canis familiaris
cctctttcaataaatccgaccgatt

SEQ ID NO: 72963 - DNA, 25 bp, Canis familiaris
ctcctgtactttttccagacacttt

SEQ ID NO: 72964 - DNA, 25 bp, Canis familiaris
ctccctggtgttttatgcccagttt

SEQ ID NO: 72965 - DNA, 25 bp, Canis familiaris
ctcctcataggttgtttcttcatct

SEQ ID NO: 72966 - DNA, 25 bp, Canis familiaris
ctctgcttcaggttattttctttcc

SEQ ID NO: 72967 - DNA, 25 bp, Canis familiaris
ctctggaacacttatttttattact

SEQ ID NO: 72968 - DNA, 25 bp, Canis familiaris
ctctgaaatactcatttttttggaa

SEQ ID NO: 72969 - DNA, 25 bp, Canis familiaris
ctctgtattacatgatcttttttag

SEQ ID NO: 72970 - DNA, 25 bp, Canis familiaris
ctctgtactcactcatttattcttt

SEQ ID NO: 72971 - DNA, 25 bp, Canis familiaris
ctctgcttcttttcatgtttgtcta

SEQ ID NO: 72972 - DNA, 25 bp, Canis familiaris
ctctgtttctcttatgtattcttaa

SEQ ID NO: 72973 - DNA, 25 bp, Canis familiaris
ccgtctactatatttttacttggca

SEQ ID NO: 72974 - DNA, 25 bp, Canis familiaris
ctctcccactctggttttatttgta

SEQ ID NO: 72975 - DNA, 25 bp, Canis familiaris
ctctcccacaccaattctgttgtga

SEQ ID NO: 72976 - DNA, 25 bp, Canis familiaris
ctctgctccacagcttgtagttttg

SEQ ID NO: 72977 - DNA, 25 bp, Canis familiaris
ctctcctctcaccaggaaggttgtg

SEQ ID NO: 72978 - DNA, 25 bp, Canis familiaris
ctctccttcctcaggaagcattggt

SEQ ID NO: 72979 - DNA, 25 bp, Canis familiaris
ctctccgtgatcgtgggacactggg

SEQ ID NO: 72980 - DNA, 25 bp, Canis familiaris
ctctgcacggtgactgctggacagg

SEQ ID NO: 72981 - DNA, 25 bp, Canis familiaris
ctctgcaagcggctgctggaggagg

SEQ ID NO: 72982 - DNA, 25 bp, Canis familiaris
ctctgctcacctccattgggagagg

SEQ ID NO: 72983 - DNA, 25 bp, Canis familiaris
ctctggcatctcttcattggtgcag

SEQ ID NO: 72984 - DNA, 25 bp, Canis familiaris
ctctgtgtgcattttgtgtctggcc

SEQ ID NO: 72985 - DNA, 25 bp, Canis familiaris
ctctcctgacagaatggtcttgcca

SEQ ID NO: 72986 - DNA, 25 bp, Canis familiaris
ctctcctaatattcggctagctcag

SEQ ID NO: 72987 - DNA, 25 bp, Canis familiaris
ctctccaagctgagcacgctcgtag

SEQ ID NO: 72988 - DNA, 25 bp, Canis familiaris
ctctccacacgggccttcagagagg

SEQ ID NO: 72989 - DNA, 25 bp, Canis familiaris
ctctgccctggggcctacaggggaa

SEQ ID NO: 72990 - DNA, 25 bp, Canis familiaris
ctcccatcaggctccttaaggtaac

SEQ ID NO: 72991 - DNA, 25 bp, Canis familiaris
ctctcctctggctcctatgagagca

SEQ ID NO: 72992 - DNA, 25 bp, Canis familiaris
ctctccttgttcacatctagtgagc

SEQ ID NO: 72993 - DNA, 25 bp, Canis familiaris
ctctgctcgtttgtgtcgagtcaga

SEQ ID NO: 72994 - DNA, 25 bp, Canis familiaris
ctgagccgttccttaaagtgcagcc

SEQ ID NO: 72995 - DNA, 25 bp, Canis familiaris
ctgaccgaactctgaaaacacgtgt

SEQ ID NO: 72996 - DNA, 25 bp, Canis familiaris
ctggaggccttctgaaaaactgatt

SEQ ID NO: 72997 - DNA, 25 bp, Canis familiaris
ctctgccccttctttaaaaatgtat

SEQ ID NO: 72998 - DNA, 25 bp, Canis familiaris
ctctcccctgtttttatgtcaatta

SEQ ID NO: 72999 - DNA, 25 bp, Canis familiaris
ctctccccctgtctgtatagaaagg

SEQ ID NO: 73000 - DNA, 25 bp, Canis familiaris
ctctccacctctgcaagttattata

SEQ ID NO: 73001 - DNA, 25 bp, Canis familiaris
ctctccacccaaaatggaaattaag

SEQ ID NO: 73002 - DNA, 25 bp, Canis familiaris
ctctccccgataacagcgatttgtt

SEQ ID NO: 73003 - DNA, 25 bp, Canis familiaris
ctctgccctcagacacacaggaggt

SEQ ID NO: 73004 - DNA, 25 bp, Canis familiaris
ctctgcccaaacaatccgtggatgg

SEQ ID NO: 73005 - DNA, 25 bp, Canis familiaris
ctctgccctcaacatctgttggggg

SEQ ID NO: 73006 - DNA, 25 bp, Canis familiaris
ctctgccctgaatgagctgcgtgag

SEQ ID NO: 73007 - DNA, 25 bp, Canis familiaris
ctctgccctgacggtgtggggcact

SEQ ID NO: 73008 - DNA, 25 bp, Canis familiaris
ctctgtgcctgtggtgtggtggggc

SEQ ID NO: 73009 - DNA, 25 bp, Canis familiaris
ctctgtctcttgagttggaggtgac

SEQ ID NO: 73010 - DNA, 25 bp, Canis familiaris
ctctgccattcgagcttggaaatga

SEQ ID NO: 73011 - DNA, 25 bp, Canis familiaris
ctctgcccattccagcttggaaatt

SEQ ID NO: 73012 - DNA, 25 bp, Canis familiaris
ctctcctcattctgttgtttgatct

SEQ ID NO: 73013 - DNA, 25 bp, Canis familiaris
ctctcctgtccatagttttgtgcag

SEQ ID NO: 73014 - DNA, 25 bp, Canis familiaris
ctctccttctgagagcccttggagg

SEQ ID NO: 73015 - DNA, 25 bp, Canis familiaris
ctccctgtaccttgtccttggggag

SEQ ID NO: 73016 - DNA, 25 bp, Canis familiaris
ctctccattacccttcatttttggg

SEQ ID NO: 73017 - DNA, 25 bp, Canis familiaris
cgcggattaacctgcaccttatgcg

SEQ ID NO: 73018 - DNA, 25 bp, Canis familiaris
ctcggttaagcctctcacttgaaga

SEQ ID NO: 73019 - DNA, 25 bp, Canis familiaris
ctcggaaaacctcctcactgagaac

SEQ ID NO: 73020 - DNA, 25 bp, Canis familiaris
ctccgaaattcccctttagaacatg

SEQ ID NO: 73021 - DNA, 25 bp, Canis familiaris
ctcggtaaatcccctttgggatgat

SEQ ID NO: 73022 - DNA, 25 bp, Canis familiaris
ctcgttgaaattccagttctgggat

SEQ ID NO: 73023 - DNA, 25 bp, Canis familiaris
ctcgtttcttagcatcttctgggaa

SEQ ID NO: 73024 - DNA, 25 bp, Canis familiaris
ctctgatttcttagcacatttctta

SEQ ID NO: 73025 - DNA, 25 bp, Canis familiaris
ctctgccttcttagcaccaattgtg

SEQ ID NO: 73026 - DNA, 25 bp, Canis familiaris
ctgcgtcttcaggatcaagccctgg

SEQ ID NO: 73027 - DNA, 25 bp, Canis familiaris
ctcggcctgcaggtcgatgacctgc

SEQ ID NO: 73028 - DNA, 25 bp, Canis familiaris
ctctgtgcagctcgagaaggacgtg

SEQ ID NO: 73029 - DNA, 25 bp, Canis familiaris
ctctgtgcagcaccaaggggggggg

SEQ ID NO: 73030 - DNA, 25 bp, Canis familiaris
ctctgctcagtggggggaggggagg

SEQ ID NO: 73031 - DNA, 25 bp, Canis familiaris
ctcccagtgccaagtgacgtggcgg

SEQ ID NO: 73032 - DNA, 25 bp, Canis familiaris
ctctccagtaccctgagctgatggt

SEQ ID NO: 73033 - DNA, 25 bp, Canis familiaris
ctcgcagatgtcgtccaagtgtgtg

SEQ ID NO: 73034 - DNA, 25 bp, Canis familiaris
ctctgagctctcgatgctgctaatg

SEQ ID NO: 73035 - DNA, 25 bp, Canis familiaris
ctctgcactgatcatctgctactgg

SEQ ID NO: 73036 - DNA, 25 bp, Canis familiaris
ctctgtgctcaggatcctgcacggt

SEQ ID NO: 73037 - DNA, 25 bp, Canis familiaris
ctgctgttcagccctaactggctag

SEQ ID NO: 73038 - DNA, 25 bp, Canis familiaris
ctcgttctcactgtagcattgctag

SEQ ID NO: 73039 - DNA, 25 bp, Canis familiaris
ctctgttctctctactcgagtgtag

SEQ ID NO: 73040 - DNA, 25 bp, Canis familiaris
ctctgcttcttacctcagggatgac

SEQ ID NO: 73041 - DNA, 25 bp, Canis familiaris
ctctgcttcattcccgtgtgaggaa

SEQ ID NO: 73042 - DNA, 25 bp, Canis familiaris
ctctgttgatctaccttgtaatcta

SEQ ID NO: 73043 - DNA, 25 bp, Canis familiaris
ctctgtgttcgtgttgctgtttata

SEQ ID NO: 73044 - DNA, 25 bp, Canis familiaris
ctctggttgccattttctgtgtaag

SEQ ID NO: 73045 - DNA, 25 bp, Canis familiaris
ctctggtatgacatttagtttgaga

SEQ ID NO: 73046 - DNA, 25 bp, Canis familiaris
ctctggatgcccatttattctctgg

SEQ ID NO: 73047 - DNA, 25 bp, Canis familiaris
ctctgagagcttctgttcttctctg

SEQ ID NO: 73048 - DNA, 25 bp, Canis familiaris
ctctgatatactctgttcgtgctct

SEQ ID NO: 73049 - DNA, 25 bp, Canis familiaris
ctctgtctcactctctaagtatcta

SEQ ID NO: 73050 - DNA, 25 bp, Canis familiaris
ctcgtcatcagccctctggaaataa

SEQ ID NO: 73051 - DNA, 25 bp, Canis familiaris
ctctgcatccgggctgcttaaataa

SEQ ID NO: 73052 - DNA, 25 bp, Canis familiaris
ctctgtctcggagtcctggcaaagg

SEQ ID NO: 73053 - DNA, 25 bp, Canis familiaris
ctctgccctcatgtcctggaaaggg

SEQ ID NO: 73054 - DNA, 25 bp, Canis familiaris
ctctgacacgatcccactgaaaagg

SEQ ID NO: 73055 - DNA, 25 bp, Canis familiaris
ctcgccacgttccatgtacaatagg

SEQ ID NO: 73056 - DNA, 25 bp, Canis familiaris
ctcccacctgtcagttgtttgctta

SEQ ID NO: 73057 - DNA, 25 bp, Canis familiaris
ctctgcccgcagacgagttgatttt

SEQ ID NO: 73058 - DNA, 25 bp, Canis familiaris
ctctccagccctgagttgattctgt

SEQ ID NO: 73059 - DNA, 25 bp, Canis familiaris
ctctccagtactcatttgcaactat

SEQ ID NO: 73060 - DNA, 25 bp, Canis familiaris
ctcccttgcctgtatttctaattaa

SEQ ID NO: 73061 - DNA, 25 bp, Canis familiaris
ctctgcgttttgcctttaacactaa

SEQ ID NO: 73062 - DNA, 25 bp, Canis familiaris
ctcggctttgagactttataacttt

SEQ ID NO: 73063 - DNA, 25 bp, Canis familiaris
ctcggctcttgacacttagccgctg

SEQ ID NO: 73064 - DNA, 25 bp, Canis familiaris
ctctggcatgctaactagttacgcg

SEQ ID NO: 73065 - DNA, 25 bp, Canis familiaris
ctctggccgtaccactggcatcgtg

SEQ ID NO: 73066 - DNA, 25 bp, Canis familiaris
ctctggccatgcacctgggtagagt

SEQ ID NO: 73067 - DNA, 25 bp, Canis familiaris
ctctgaacagctcctctggttaggt

SEQ ID NO: 73068 - DNA, 25 bp, Canis familiaris
ctctgcaacactgcccaggaaggga

SEQ ID NO: 73069 - DNA, 25 bp, Canis familiaris
ctctgccctctcgacgagagaaggc

SEQ ID NO: 73070 - DNA, 25 bp, Canis familiaris
ctctgccctctctggacagaagtga

SEQ ID NO: 73071 - DNA, 25 bp, Canis familiaris
ctctgccttcctgggacagatgcag

SEQ ID NO: 73072 - DNA, 25 bp, Canis familiaris
ctctgctttctccggagctgcagaa

SEQ ID NO: 73073 - DNA, 25 bp, Canis familiaris
ctctgcctttctcgagtggcacaga

SEQ ID NO: 73074 - DNA, 25 bp, Canis familiaris
ctctccaattccgagtgtctcagga

SEQ ID NO: 73075 - DNA, 25 bp, Canis familiaris
ctcccaattgccggggccaagaatg

SEQ ID NO: 73076 - DNA, 25 bp, Canis familiaris
ctcccaaagccgaagccgaagcaaa

SEQ ID NO: 73077 - DNA, 25 bp, Canis familiaris
ctggccaaaaagtatgggggcttca

SEQ ID NO: 73078 - DNA, 25 bp, Canis familiaris
ctgggaaacggccgagggtgcttga

SEQ ID NO: 73079 - DNA, 25 bp, Canis familiaris
ctgggaaacggccgagggtgcttga

SEQ ID NO: 73080 - DNA, 25 bp, Canis familiaris
ctgcggaacccaccgaggtggtcga

SEQ ID NO: 73081 - DNA, 25 bp, Canis familiaris
ctctggacatcactatcacgacgtg

SEQ ID NO: 73082 - DNA, 25 bp, Canis familiaris
ctctgctccacatgtcacaaagctt

SEQ ID NO: 73083 - DNA, 25 bp, Canis familiaris
ctctgctgcccattctagtaatatt

SEQ ID NO: 73084 - DNA, 25 bp, Canis familiaris
ctctgctgaccatgctcattatttt

SEQ ID NO: 73085 - DNA, 25 bp, Canis familiaris
ctctgcttccaattgcatttaagtt

SEQ ID NO: 73086 - DNA, 25 bp, Canis familiaris
ctctgcctccaccaatttgcaaaat

SEQ ID NO: 73087 - DNA, 25 bp, Canis familiaris
ctctgcccatctgcaccaataaaat

SEQ ID NO: 73088 - DNA, 25 bp, Canis familiaris
ctctgcccttcttcatgaataaaat

SEQ ID NO: 73089 - DNA, 25 bp, Canis familiaris
ctctgcctgtctctcatgaataaat

SEQ ID NO: 73090 - DNA, 25 bp, Canis familiaris
ctctgctctgggctatgattgggtt

SEQ ID NO: 73091 - DNA, 25 bp, Canis familiaris
ctctgtcttggttaatgggtattat

SEQ ID NO: 73092 - DNA, 25 bp, Canis familiaris
ctctgctttggtgttgaggggtgaa

SEQ ID NO: 73093 - DNA, 25 bp, Canis familiaris
ctctgctttgagtgttgagggctag

SEQ ID NO: 73094 - DNA, 25 bp, Canis familiaris
ctctgtattagccagtgtgtgtgtg

SEQ ID NO: 73095 - DNA, 25 bp, Canis familiaris
ctctgtggctggccaggcagtggtg

SEQ ID NO: 73096 - DNA, 25 bp, Canis familiaris
ctctgtcaggaccagtgccaggtgg

SEQ ID NO: 73097 - DNA, 25 bp, Canis familiaris
ctcgtcggaaggccacggcacagaa

SEQ ID NO: 73098 - DNA, 25 bp, Canis familiaris
ctctgccgggagctcacggctaagg

SEQ ID NO: 73099 - DNA, 25 bp, Canis familiaris
ctctggctggggagacggtagctgt

SEQ ID NO: 73100 - DNA, 25 bp, Canis familiaris
ctctggggctggctgaggtgtgagc

SEQ ID NO: 73101 - DNA, 25 bp, Canis familiaris
ctctgactcctgggtgagctgtgga

SEQ ID NO: 73102 - DNA, 25 bp, Canis familiaris
ctcgcctgcacagaggagtcgtgtc

SEQ ID NO: 73103 - DNA, 25 bp, Canis familiaris
ctcgcgctctcagagggtctctgat

SEQ ID NO: 73104 - DNA, 25 bp, Canis familiaris
ctccctccgctggaggtccaaggac

SEQ ID NO: 73105 - DNA, 25 bp, Canis familiaris
ctccactcacggcaaattcaacggc

SEQ ID NO: 73106 - DNA, 25 bp, Canis familiaris
ctccactcacggcaaattcaacggc

SEQ ID NO: 73107 - DNA, 25 bp, Canis familiaris
ctccactcagcgcaaaaatccggca

SEQ ID NO: 73108 - DNA, 25 bp, Canis familiaris
ctcccacggacgcaaacgcgagaag

SEQ ID NO: 73109 - DNA, 25 bp, Canis familiaris
ccccacttgcctcttaactgaaaag

SEQ ID NO: 73110 - DNA, 25 bp, Canis familiaris
ctgcccctatctatgtttttaaaat

SEQ ID NO: 73111 - DNA, 25 bp, Canis familiaris
ctcggctctcttatttagttaacca

SEQ ID NO: 73112 - DNA, 25 bp, Canis familiaris
ctccgtctcccaactatatagtaac

SEQ ID NO: 73113 - DNA, 25 bp, Canis familiaris
ctcctttcacgctcaaagcttacac

SEQ ID NO: 73114 - DNA, 25 bp, Canis familiaris
ctcccttctggagagacttgtacat

SEQ ID NO: 73115 - DNA, 25 bp, Canis familiaris
ctcccaggttgagcaagttctactc

SEQ ID NO: 73116 - DNA, 25 bp, Canis familiaris
ctcgcacagtttttcacacatttcc

SEQ ID NO: 73117 - DNA, 25 bp, Canis familiaris
ctcgccaaattgcaagcacaagtgc

SEQ ID NO: 73118 - DNA, 25 bp, Canis familiaris
ctcccatgaaggcccagccaaggag

SEQ ID NO: 73119 - DNA, 25 bp, Canis familiaris
ctccctgtaggcccaacaagagtga

SEQ ID NO: 73120 - DNA, 25 bp, Canis familiaris
ctcggtctcggctacagccaaaggg

SEQ ID NO: 73121 - DNA, 25 bp, Canis familiaris
ctctggtgctcaggtacatcccaga

SEQ ID NO: 73122 - DNA, 25 bp, Canis familiaris
ctcggtgtttgtacattgcacagaa

SEQ ID NO: 73123 - DNA, 25 bp, Canis familiaris
ctcggctgtattaatcacgcgatgt

SEQ ID NO: 73124 - DNA, 25 bp, Canis familiaris
ctgtggctaaccaagacccagtttc

SEQ ID NO: 73125 - DNA, 25 bp, Canis familiaris
ctcggtcaacagaagacctcgtcgc

SEQ ID NO: 73126 - DNA, 25 bp, Canis familiaris
ctcggtaaccagggaacctggccag

SEQ ID NO: 73127 - DNA, 25 bp, Canis familiaris
ctccgtcaaccagccaaggggacag

SEQ ID NO: 73128 - DNA, 25 bp, Canis familiaris
ctccgacaaccggcaaattgtttct

SEQ ID NO: 73129 - DNA, 25 bp, Canis familiaris
ctcctgaaaccgggctttgatttag

SEQ ID NO: 73130 - DNA, 25 bp, Canis familiaris
ttcctggcaaggcggttcgggtaga

SEQ ID NO: 73131 - DNA, 25 bp, Canis familiaris
ctgcctgggaagcgttactggagta

SEQ ID NO: 73132 - DNA, 25 bp, Canis familiaris
ctcctgagagcaactggtaccgtag

SEQ ID NO: 73133 - DNA, 25 bp, Canis familiaris
ctctgctatgtcccaagtacctgga

SEQ ID NO: 73134 - DNA, 25 bp, Canis familiaris
ctctgcaagggtcagccacctgcag

SEQ ID NO: 73135 - DNA, 25 bp, Canis familiaris
ctctgcaagggagcaggcctctctc

SEQ ID NO: 73136 - DNA, 25 bp, Canis familiaris
ctcgcgagggcatcaggaccctgaa

SEQ ID NO: 73137 - DNA, 25 bp, Canis familiaris
ctgtcacaggacccggaacactgga

SEQ ID NO: 73138 - DNA, 25 bp, Canis familiaris
ctgcctactacctgaatgacctgga

SEQ ID NO: 73139 - DNA, 25 bp, Canis familiaris
ctcgtgaccaccagaagaccaggat

SEQ ID NO: 73140 - DNA, 25 bp, Canis familiaris
ctccataccacctgggaatcacgac

SEQ ID NO: 73141 - DNA, 25 bp, Canis familiaris
ctcctccaatcctgggactactgga

SEQ ID NO: 73142 - DNA, 25 bp, Canis familiaris
ctcgtacaaccttaggctccacaag

SEQ ID NO: 73143 - DNA, 25 bp, Canis familiaris
ctcgttcaagctcaaccgcaagaag

SEQ ID NO: 73144 - DNA, 25 bp, Canis familiaris
ctcgtctcaagtcacatatctcggt

SEQ ID NO: 73145 - DNA, 25 bp, Canis familiaris
ctctggcaaagtggatattgtcgcc

SEQ ID NO: 73146 - DNA, 25 bp, Canis familiaris
ctctgggagcgctgttttagcacca

SEQ ID NO: 73147 - DNA, 25 bp, Canis familiaris
ctctggagcagggggtatgaagaac

SEQ ID NO: 73148 - DNA, 25 bp, Canis familiaris
ctgctcgtgcggggacattacggac

SEQ ID NO: 73149 - DNA, 25 bp, Canis familiaris
ctcgcagtcccggatcattacgaac

SEQ ID NO: 73150 - DNA, 25 bp, Canis familiaris
ctctgagctcacaggatttcctgaa

SEQ ID NO: 73151 - DNA, 25 bp, Canis familiaris
ctctgagcacctgggtcccaatgaa

SEQ ID NO: 73152 - DNA, 25 bp, Canis familiaris
ctctgagccctgagtgcctaaggcc

SEQ ID NO: 73153 - DNA, 25 bp, Canis familiaris
ctctgatccctgcagtgtcaatgag

SEQ ID NO: 73154 - DNA, 25 bp, Canis familiaris
ctctgagcacacccttgacaatggg

SEQ ID NO: 73155 - DNA, 25 bp, Canis familiaris
ctctgagcctcatctgtgaaacagg

SEQ ID NO: 73156 - DNA, 25 bp, Canis familiaris
ctctggtcacgggggacacaggcac

SEQ ID NO: 73157 - DNA, 25 bp, Canis familiaris
ctcggcctcgagcggagaatgcgca

SEQ ID NO: 73158 - DNA, 25 bp, Canis familiaris
ctcgtccgccggggatggacgcagc

SEQ ID NO: 73159 - DNA, 25 bp, Canis familiaris
ctcgtctctgcaccggaggaaagtc

SEQ ID NO: 73160 - DNA, 25 bp, Canis familiaris
ctcgttcttggcatggaggcaagtg

SEQ ID NO: 73161 - DNA, 25 bp, Canis familiaris
ctcgtctttgatgcggtcgcaggag

SEQ ID NO: 73162 - DNA, 25 bp, Canis familiaris
ctcgtttctctccggattgaggggg

SEQ ID NO: 73163 - DNA, 25 bp, Canis familiaris
ctcggaatctgtcggtgtgtgacgg

SEQ ID NO: 73164 - DNA, 25 bp, Canis familiaris
ctcggtacgagccagtggctgagat

SEQ ID NO: 73165 - DNA, 25 bp, Canis familiaris
ctcctgcatacacacatgtacgagt

SEQ ID NO: 73166 - DNA, 25 bp, Canis familiaris
ctcgtatactctctgaagcgtgata

SEQ ID NO: 73167 - DNA, 25 bp, Canis familiaris
ctcgcagatacactcttgggggatc

SEQ ID NO: 73168 - DNA, 25 bp, Canis familiaris
ctctgcaattcttcttcctggaatt

SEQ ID NO: 73169 - DNA, 25 bp, Canis familiaris
ctcgacttcaccaactctgaatgat

SEQ ID NO: 73170 - DNA, 25 bp, Canis familiaris
ctcgttcatgcataacttgaaagag

SEQ ID NO: 73171 - DNA, 25 bp, Canis familiaris
ctcctgtgcacatgaacttcccaga

SEQ ID NO: 73172 - DNA, 25 bp, Canis familiaris
ctccctgcacagcaagttccaggct

SEQ ID NO: 73173 - DNA, 25 bp, Canis familiaris
ctccctgacacgtgaccgcaagggt

SEQ ID NO: 73174 - DNA, 25 bp, Canis familiaris
ctccctgacggaggcccatgaaaga

SEQ ID NO: 73175 - DNA, 25 bp, Canis familiaris
ctcccatgattgctacacccaatag

SEQ ID NO: 73176 - DNA, 25 bp, Canis familiaris
ctcccagaggcagcactctgcctaa

SEQ ID NO: 73177 - DNA, 25 bp, Canis familiaris
ctcccaggtcatgtgctttggacac

SEQ ID NO: 73178 - DNA, 25 bp, Canis familiaris
ctcggattacatgtgcttggcgatt

SEQ ID NO: 73179 - DNA, 25 bp, Canis familiaris
ctctgtttccatgtcttgactgttg

SEQ ID NO: 73180 - DNA, 25 bp, Canis familiaris
ccctttctcagtattttgttttctg

SEQ ID NO: 73181 - DNA, 25 bp, Canis familiaris
ctccggttcagtgtttctttagtgt

SEQ ID NO: 73182 - DNA, 25 bp, Canis familiaris
ccccagtggcttgtttgtattttat

SEQ ID NO: 73183 - DNA, 25 bp, Canis familiaris
ctcccggctttgcttttgttgaatt

SEQ ID NO: 73184 - DNA, 25 bp, Canis familiaris
ctcccctgccttaatgttttatggc

SEQ ID NO: 73185 - DNA, 25 bp, Canis familiaris
tctcgactttccccgagaagccaaa

SEQ ID NO: 73186 - DNA, 25 bp, Canis familiaris
ctcccttttttcgtgatttgcaatg

SEQ ID NO: 73187 - DNA, 25 bp, Canis familiaris
ctcccttttcctgcttgagaaagtc

SEQ ID NO: 73188 - DNA, 25 bp, Canis familiaris
ctcccttctttgggcagtagaaaca

SEQ ID NO: 73189 - DNA, 25 bp, Canis familiaris
ctcgctgcgatctattgaaagtcag

SEQ ID NO: 73190 - DNA, 25 bp, Canis familiaris
ctcgcgagtcatggagatgaaggcc

SEQ ID NO: 73191 - DNA, 25 bp, Canis familiaris
ctcgccgagctggagagcaagttcc

SEQ ID NO: 73192 - DNA, 25 bp, Canis familiaris
ctccgcgagcgacgctcagactttg

SEQ ID NO: 73193 - DNA, 25 bp, Canis familiaris
ctccgggcctggggatgtttgtgac

SEQ ID NO: 73194 - DNA, 25 bp, Canis familiaris
ctcgcggagccggtaatgtgtctgg

SEQ ID NO: 73195 - DNA, 25 bp, Canis familiaris
ctcgggacactatagcagtatctga

SEQ ID NO: 73196 - DNA, 25 bp, Canis familiaris
ctctgaggccacaggggctgacgac

SEQ ID NO: 73197 - DNA, 25 bp, Canis familiaris
ctcgtgtccacaaggggcttgcaac

SEQ ID NO: 73198 - DNA, 25 bp, Canis familiaris
ctctgtgcccaagtgcgggctggag

SEQ ID NO: 73199 - DNA, 25 bp, Canis familiaris
ctctggacctcctgggctgagagga

SEQ ID NO: 73200 - DNA, 25 bp, Canis familiaris
ctcggaccttccctggtggagggag

SEQ ID NO: 73201 - DNA, 25 bp, Canis familiaris
ctgcaaggccctgggtggggggaga

SEQ ID NO: 73202 - DNA, 25 bp, Canis familiaris
ctccaggcccttgaggttggggaag

SEQ ID NO: 73203 - DNA, 25 bp, Canis familiaris
ctccgggcctgtaagcccagaggga

SEQ ID NO: 73204 - DNA, 25 bp, Canis familiaris
ctccccatcctaaactccagtgggg

SEQ ID NO: 73205 - DNA, 25 bp, Canis familiaris
ctccccccagaagagctagcgtggg

SEQ ID NO: 73206 - DNA, 25 bp, Canis familiaris
ctcccttccggagagcagggcttgc

SEQ ID NO: 73207 - DNA, 25 bp, Canis familiaris
ctcgccttccgcaaaactgtgagca

SEQ ID NO: 73208 - DNA, 25 bp, Canis familiaris
ctcgttctgcccaggaggtggcaag

SEQ ID NO: 73209 - DNA, 25 bp, Canis familiaris
ctcgtatctccccatggacgggagc

SEQ ID NO: 73210 - DNA, 25 bp, Canis familiaris
ctcgtacgacactggacgcgcgagg

SEQ ID NO: 73211 - DNA, 25 bp, Canis familiaris
ctcgtccgggaacagggctgaggag

SEQ ID NO: 73212 - DNA, 25 bp, Canis familiaris
ctcgctgccgagcagtacagggcga

SEQ ID NO: 73213 - DNA, 25 bp, Canis familiaris
ctccctggcagccagcttcagggga

SEQ ID NO: 73214 - DNA, 25 bp, Canis familiaris
ctccccagcagcaagcactctgggt

SEQ ID NO: 73215 - DNA, 25 bp, Canis familiaris
ctccctcatcagtgaccagtgggtg

SEQ ID NO: 73216 - DNA, 25 bp, Canis familiaris
ctccagcctatgtgacctaagtctg

SEQ ID NO: 73217 - DNA, 25 bp, Canis familiaris
cccagcagtttagcttaatttgcct

SEQ ID NO: 73218 - DNA, 25 bp, Canis familiaris
cccaactataagcttataactccag

SEQ ID NO: 73219 - DNA, 25 bp, Canis familiaris
cccacttaaaatctatcagtcccac

SEQ ID NO: 73220 - DNA, 25 bp, Canis familiaris
ctcccacttaaaatctatcagtccc

SEQ ID NO: 73221 - DNA, 25 bp, Canis familiaris
ctcccaccatcatagtcaatagctc

SEQ ID NO: 73222 - DNA, 25 bp, Canis familiaris
ctcccacctatacccatatatatat

SEQ ID NO: 73223 - DNA, 25 bp, Canis familiaris
ctccctccaaagaatcatactcacc

SEQ ID NO: 73224 - DNA, 25 bp, Canis familiaris
ctcccccaaaattcaatcgcatgtc

SEQ ID NO: 73225 - DNA, 25 bp, Canis familiaris
ctcgtcccaagatgaggagctgctg

SEQ ID NO: 73226 - DNA, 25 bp, Canis familiaris
ctcgcctcgatgaactgggaggtgt

SEQ ID NO: 73227 - DNA, 25 bp, Canis familiaris
ctctgggctgacaacggtgtgcagg

SEQ ID NO: 73228 - DNA, 25 bp, Canis familiaris
ctcgacacgtggaccgtcaggaacg

SEQ ID NO: 73229 - DNA, 25 bp, Canis familiaris
ctcctacgtgggcgacgaggcccag

SEQ ID NO: 73230 - DNA, 25 bp, Canis familiaris
ctcgcccggtgggcagactggggcg

SEQ ID NO: 73231 - DNA, 25 bp, Canis familiaris
ctcctccagggttccaacgagatcg

SEQ ID NO: 73232 - DNA, 25 bp, Canis familiaris
ctccccggaggagatcaggaacatg

SEQ ID NO: 73233 - DNA, 25 bp, Canis familiaris
ctcggctcggacaggcacgaaacag

SEQ ID NO: 73234 - DNA, 25 bp, Canis familiaris
ctccctcggccaaaacaaagtcgtg

SEQ ID NO: 73235 - DNA, 25 bp, Canis familiaris
ctccccgtccaagacagaggttctg

SEQ ID NO: 73236 - DNA, 25 bp, Canis familiaris
ctccccgggacggaaatggattcag

SEQ ID NO: 73237 - DNA, 25 bp, Canis familiaris
ctccgcggggagggacaagccaaag

SEQ ID NO: 73238 - DNA, 25 bp, Canis familiaris
ctcccgaggggtgcacagcactcgg

SEQ ID NO: 73239 - DNA, 25 bp, Canis familiaris
ctcgtcgtgtgagggcccagacgga

SEQ ID NO: 73240 - DNA, 25 bp, Canis familiaris
ctcgtgctgctggacaaggctcaga

SEQ ID NO: 73241 - DNA, 25 bp, Canis familiaris
ctcgctgcgacatcatggtgctgca

SEQ ID NO: 73242 - DNA, 25 bp, Canis familiaris
ctccggagaacacctgtatctcgta

SEQ ID NO: 73243 - DNA, 25 bp, Canis familiaris
ctcctaggagatcttttccctacca

SEQ ID NO: 73244 - DNA, 25 bp, Canis familiaris
ccaaagggagggtgtccccagagca

SEQ ID NO: 73245 - DNA, 25 bp, Canis familiaris
ctccaaggggagcattggccccgga

SEQ ID NO: 73246 - DNA, 25 bp, Canis familiaris
ctcgggcgagaagcggaggcccgtg

SEQ ID NO: 73247 - DNA, 25 bp, Canis familiaris
ctgccggccaaaggccaaggccaag

SEQ ID NO: 73248 - DNA, 25 bp, Canis familiaris
ctccgtctaaaccttggtctcaagt

SEQ ID NO: 73249 - DNA, 25 bp, Canis familiaris
ctcctgttacctgttcgaactatgt

SEQ ID NO: 73250 - DNA, 25 bp, Canis familiaris
ctcctgaggaccctttgaaccatag

SEQ ID NO: 73251 - DNA, 25 bp, Canis familiaris
ctcctgggacccaatttgatcatcc

SEQ ID NO: 73252 - DNA, 25 bp, Canis familiaris
ctcctggtacctccacagtagaact

SEQ ID NO: 73253 - DNA, 25 bp, Canis familiaris
ctcctgttaacccgctaagaagtat

SEQ ID NO: 73254 - DNA, 25 bp, Canis familiaris
ctcgtgtgtcccgtgtgtacaaagt

SEQ ID NO: 73255 - DNA, 25 bp, Canis familiaris
ctctgtgtgtctctcctgaataaat

SEQ ID NO: 73256 - DNA, 25 bp, Canis familiaris
ctctgtctgtgtctctcatgaataa

SEQ ID NO: 73257 - DNA, 25 bp, Canis familiaris
ctgcgaatggctcattaaatcagtt

SEQ ID NO: 73258 - DNA, 25 bp, Canis familiaris
ctgcgaatggctcattaaatcagtt

SEQ ID NO: 73259 - DNA, 25 bp, Canis familiaris
ctcggtgtgtgccatcagaaaaatt

SEQ ID NO: 73260 - DNA, 25 bp, Canis familiaris
ctcggctctggcccagaaggaggcc

SEQ ID NO: 73261 - DNA, 25 bp, Canis familiaris
ctcgactgtttgccaaagtctcgca

SEQ ID NO: 73262 - DNA, 25 bp, Canis familiaris
ctcgactctcatttaacaggcacca

SEQ ID NO: 73263 - DNA, 25 bp, Canis familiaris
ctccactcatgagaaccttgcacca

SEQ ID NO: 73264 - DNA, 25 bp, Canis familiaris
ctccactcatgagaaccttgcacca

SEQ ID NO: 73265 - DNA, 25 bp, Canis familiaris
ctccactcatgagaaccttgcacca

SEQ ID NO: 73266 - DNA, 25 bp, Canis familiaris
ctcgcactgtatcaagcgtcagact

SEQ ID NO: 73267 - DNA, 25 bp, Canis familiaris
ctcgcactcttgatggtgagagtct

SEQ ID NO: 73268 - DNA, 25 bp, Canis familiaris
ctccatttcatggtggtccaattta

SEQ ID NO: 73269 - DNA, 25 bp, Canis familiaris
ctccatgttcggtaccactattcgt

SEQ ID NO: 73270 - DNA, 25 bp, Canis familiaris
ctccaggagggaacctctcatcagc

SEQ ID NO: 73271 - DNA, 25 bp, Canis familiaris
ctcctagacctaacctctggatgcg

SEQ ID NO: 73272 - DNA, 25 bp, Canis familiaris
ctcctggacgtcaagccttgggacg

SEQ ID NO: 73273 - DNA, 25 bp, Canis familiaris
ctcgcaggacgcagttctgtgcgga

SEQ ID NO: 73274 - DNA, 25 bp, Canis familiaris
ctcgcaaatgggacatctcgatgga

SEQ ID NO: 73275 - DNA, 25 bp, Canis familiaris
ctcgaagatgattctgctccttgga

SEQ ID NO: 73276 - DNA, 25 bp, Canis familiaris
ctctggagcagtttgccactgtggt

SEQ ID NO: 73277 - DNA, 25 bp, Canis familiaris
ctctgtggcagtttcatatttgcta

SEQ ID NO: 73278 - DNA, 25 bp, Canis familiaris
ctctgtgtatgtgtacgcttgtata

SEQ ID NO: 73279 - DNA, 25 bp, Canis familiaris
ctcgttcatgttaggctgtcttgta

SEQ ID NO: 73280 - DNA, 25 bp, Canis familiaris
ctcgctgttgttgggtgctttttgg

SEQ ID NO: 73281 - DNA, 25 bp, Canis familiaris
ctgcagcggcggtgggtaattagag

SEQ ID NO: 73282 - DNA, 25 bp, Canis familiaris
ctcccgtggggtcacatttgcagaa

SEQ ID NO: 73283 - DNA, 25 bp, Canis familiaris
ctcccggcgtggaaccatatcatga

SEQ ID NO: 73284 - DNA, 25 bp, Canis familiaris
ctcccggcgagccaggctgaatgaa

SEQ ID NO: 73285 - DNA, 25 bp, Canis familiaris
ctcccaccagcctaagctgagcatg

SEQ ID NO: 73286 - DNA, 25 bp, Canis familiaris
ctcgcgcctctggagaagctgcgat

SEQ ID NO: 73287 - DNA, 25 bp, Canis familiaris
ctctggcgcatcggagttcgagggg

SEQ ID NO: 73288 - DNA, 25 bp, Canis familiaris
ctctgggacccagtgtatattcctg

SEQ ID NO: 73289 - DNA, 25 bp, Canis familiaris
ctctggatacctctggcattttcta

SEQ ID NO: 73290 - DNA, 25 bp, Canis familiaris
ctcgctgtaccttttcttattttgg

SEQ ID NO: 73291 - DNA, 25 bp, Canis familiaris
ctcggtatccctacttcattagatt

SEQ ID NO: 73292 - DNA, 25 bp, Canis familiaris
ctccgtattgtcttctgtatcttga

SEQ ID NO: 73293 - DNA, 25 bp, Canis familiaris
ctccctaattctattcctttgatct

SEQ ID NO: 73294 - DNA, 25 bp, Canis familiaris
cgcacctttttaaggcccgtgatga

SEQ ID NO: 73295 - DNA, 25 bp, Canis familiaris
ctcctctttttgaaccccatcgagg

SEQ ID NO: 73296 - DNA, 25 bp, Canis familiaris
ctcctatcttttcaacccttgtgga

SEQ ID NO: 73297 - DNA, 25 bp, Canis familiaris
ctcccaaagtgtccagttccttgag

SEQ ID NO: 73298 - DNA, 25 bp, Canis familiaris
ctcccgaaggtgacaactccgtgag

SEQ ID NO: 73299 - DNA, 25 bp, Canis familiaris
ctcggcgacaggtacgagctgctgg

SEQ ID NO: 73300 - DNA, 25 bp, Canis familiaris
ctcggagaaggcaacgagcccaccc

SEQ ID NO: 73301 - DNA, 25 bp, Canis familiaris
ctcgtgggagacgcaggcacaactc

SEQ ID NO: 73302 - DNA, 25 bp, Canis familiaris
ctcgtgggacacgggagacacaagg

SEQ ID NO: 73303 - DNA, 25 bp, Canis familiaris
ctcggtgtgacacacaggtgcccgg

SEQ ID NO: 73304 - DNA, 25 bp, Canis familiaris
ctccctggacctaaggagcgactgg

SEQ ID NO: 73305 - DNA, 25 bp, Canis familiaris
ctccaacgtccgacagaacgtccag

SEQ ID NO: 73306 - DNA, 25 bp, Canis familiaris
ctccaccaaaccagaaggctccaga

SEQ ID NO: 73307 - DNA, 25 bp, Canis familiaris
ctccctcctacctggatggtacaga

SEQ ID NO: 73308 - DNA, 25 bp, Canis familiaris
ctccccctgaccaagatctggataa

SEQ ID NO: 73309 - DNA, 25 bp, Canis familiaris
ctcggccacatgtcgccgacagaga

SEQ ID NO: 73310 - DNA, 25 bp, Canis familiaris
ctctggctcctagcaccatgaagat

SEQ ID NO: 73311 - DNA, 25 bp, Canis familiaris
ctctggctccgaggacagcaaaatg

SEQ ID NO: 73312 - DNA, 25 bp, Canis familiaris
ctcgccaccagaaatgcagaaacag

SEQ ID NO: 73313 - DNA, 25 bp, Canis familiaris
ctcgccacaaatatgggtactgcgg

SEQ ID NO: 73314 - DNA, 25 bp, Canis familiaris
ctcccgccaatgggggtgacacttg

SEQ ID NO: 73315 - DNA, 25 bp, Canis familiaris
ctcccgttatgacgggctgacctgg

SEQ ID NO: 73316 - DNA, 25 bp, Canis familiaris
ctccagcggttgcgggtgagtgggc

SEQ ID NO: 73317 - DNA, 25 bp, Canis familiaris
ctccttggtctctagaggtactgag

SEQ ID NO: 73318 - DNA, 25 bp, Canis familiaris
ctcccagggctctggggcacattga

SEQ ID NO: 73319 - DNA, 25 bp, Canis familiaris
ctcccaggacgctggggcacactga

SEQ ID NO: 73320 - DNA, 25 bp, Canis familiaris
ctctggaagaagcccggaaactgaa

SEQ ID NO: 73321 - DNA, 25 bp, Canis familiaris
ctccgcaagtgatcccgaaagtgaa

SEQ ID NO: 73322 - DNA, 25 bp, Canis familiaris
ctccgtgaggaagccgaggcgtcac

SEQ ID NO: 73323 - DNA, 25 bp, Canis familiaris
ctcccataggaacccaggcaggacc

SEQ ID NO: 73324 - DNA, 25 bp, Canis familiaris
ctccgcgaaacaccgaacaggacct

SEQ ID NO: 73325 - DNA, 25 bp, Canis familiaris
ctcccacaacaaccatcaaataacc

SEQ ID NO: 73326 - DNA, 25 bp, Canis familiaris
ctgagcgacaccactatggagaaat

SEQ ID NO: 73327 - DNA, 25 bp, Canis familiaris
ctgcgcagggccatgcaagggtaat

SEQ ID NO: 73328 - DNA, 25 bp, Canis familiaris
ctccagccgcgcacaagtgttagat

SEQ ID NO: 73329 - DNA, 25 bp, Canis familiaris
ctccaatagccaccaacctgaagtg

SEQ ID NO: 73330 - DNA, 25 bp, Canis familiaris
ctcctcaaggcaccaggcctgagaa

SEQ ID NO: 73331 - DNA, 25 bp, Canis familiaris
ctcctccatgtgccagcatggttca

SEQ ID NO: 73332 - DNA, 25 bp, Canis familiaris
ctcgcccagtgccgagctggaaaca

SEQ ID NO: 73333 - DNA, 25 bp, Canis familiaris
ctcgtccgtggccgagcaaggacag

SEQ ID NO: 73334 - DNA, 25 bp, Canis familiaris
ctcgtggcgctgcgcgagcagaagg

SEQ ID NO: 73335 - DNA, 25 bp, Canis familiaris
ctcggcacgctgcggagagtacaag

SEQ ID NO: 73336 - DNA, 25 bp, Canis familiaris
ctcggccgcactggagaacgacaag

SEQ ID NO: 73337 - DNA, 25 bp, Canis familiaris
ctcctcatccaggggaacaaccagc

SEQ ID NO: 73338 - DNA, 25 bp, Canis familiaris
ctgccttcgtcgggtacagactgag

SEQ ID NO: 73339 - DNA, 25 bp, Canis familiaris
ctcctctggtcggcttagagcttgt

SEQ ID NO: 73340 - DNA, 25 bp, Canis familiaris
ctcgtcaggtgcaggtcagcacgtt

SEQ ID NO: 73341 - DNA, 25 bp, Canis familiaris
ctcgccaggtgggtgtggtcgtggc

SEQ ID NO: 73342 - DNA, 25 bp, Canis familiaris
ctcgccaggtgggtttgttctgtgg

SEQ ID NO: 73343 - DNA, 25 bp, Canis familiaris
ctggccaggggctctttacagccag

SEQ ID NO: 73344 - DNA, 25 bp, Canis familiaris
ctgggatgggcgctaatttcctccc

SEQ ID NO: 73345 - DNA, 25 bp, Canis familiaris
cgccagtggtggctttttccctggc

SEQ ID NO: 73346 - DNA, 25 bp, Canis familiaris
ctccctgcagggatttatcaccgct

SEQ ID NO: 73347 - DNA, 25 bp, Canis familiaris
ctccctccggtaattacgtggcatg

SEQ ID NO: 73348 - DNA, 25 bp, Canis familiaris
ctccctcatgctgtagttggggcgt

SEQ ID NO: 73349 - DNA, 25 bp, Canis familiaris
ctccctcactgaatacctgtggcac

SEQ ID NO: 73350 - DNA, 25 bp, Canis familiaris
ctccgccacgtttcgtgttatcaat

SEQ ID NO: 73351 - DNA, 25 bp, Canis familiaris
ctccaccctgatttccatttaaaag

SEQ ID NO: 73352 - DNA, 25 bp, Canis familiaris
ctcccagagttctttctttgatgaa

SEQ ID NO: 73353 - DNA, 25 bp, Canis familiaris
ctcccatgcatgttttttgttagat

SEQ ID NO: 73354 - DNA, 25 bp, Canis familiaris
ctcgcccactttcgtggtatcagat

SEQ ID NO: 73355 - DNA, 25 bp, Canis familiaris
ctcgctacactactcctgaggatgc

SEQ ID NO: 73356 - DNA, 25 bp, Canis familiaris
ctcgtgcaccatgtctgtgtgtgtg

SEQ ID NO: 73357 - DNA, 25 bp, Canis familiaris
ctctggcccatggactcttaggaaa

SEQ ID NO: 73358 - DNA, 25 bp, Canis familiaris
ctcgtctccaccttctaaggattca

SEQ ID NO: 73359 - DNA, 25 bp, Canis familiaris
ctcggttcctctccaaagtgattaa

SEQ ID NO: 73360 - DNA, 25 bp, Canis familiaris
ctctggccttcttacaaagtctgtt

SEQ ID NO: 73361 - DNA, 25 bp, Canis familiaris
ctcggcttctctgccaaatgactgt

SEQ ID NO: 73362 - DNA, 25 bp, Canis familiaris
ctcggcacttctggcagcaagatga

SEQ ID NO: 73363 - DNA, 25 bp, Canis familiaris
ctcgtgcaattcggcagccagttaa

SEQ ID NO: 73364 - DNA, 25 bp, Canis familiaris
ctccttatagggcctcctttatcta

SEQ ID NO: 73365 - DNA, 25 bp, Canis familiaris
ctcctgcgacgggcgtcgtgttttt

SEQ ID NO: 73366 - DNA, 25 bp, Canis familiaris
ctcccgacggggatgagtctcttga

SEQ ID NO: 73367 - DNA, 25 bp, Canis familiaris
ctcccgaggggagtggagctcgctg

SEQ ID NO: 73368 - DNA, 25 bp, Canis familiaris
ctcgccgatgtgtgtcggtgtcgga

SEQ ID NO: 73369 - DNA, 25 bp, Canis familiaris
ctcgcacgagggctctgtgtgtgag

SEQ ID NO: 73370 - DNA, 25 bp, Canis familiaris
ctcgcatgtgcgggttgttgtgatg

SEQ ID NO: 73371 - DNA, 25 bp, Canis familiaris
ctcgtgccgtgcttggcatatgtgg

SEQ ID NO: 73372 - DNA, 25 bp, Canis familiaris
ctcgctgccagagctgtcatctggt

SEQ ID NO: 73373 - DNA, 25 bp, Canis familiaris
ctccccaggccgtgctggtaagagt

SEQ ID NO: 73374 - DNA, 25 bp, Canis familiaris
ctccccacccagagggcaaaactag

SEQ ID NO: 73375 - DNA, 25 bp, Canis familiaris
ctcccgcacacgaaccggaaacaat

SEQ ID NO: 73376 - DNA, 25 bp, Canis familiaris
ctccctacctcaacctgtaaattat

SEQ ID NO: 73377 - DNA, 25 bp, Canis familiaris
ctcctagactcccacttctaaaatt

SEQ ID NO: 73378 - DNA, 25 bp, Canis familiaris
ctcgcatcaaccagacatctgtgta

SEQ ID NO: 73379 - DNA, 25 bp, Canis familiaris
ctcccaacacacacacatgtgtgca

SEQ ID NO: 73380 - DNA, 25 bp, Canis familiaris
ctcgtcctacctaagcagtatgctt

SEQ ID NO: 73381 - DNA, 25 bp, Canis familiaris
ctcccacttcacaggatttgctctt

SEQ ID NO: 73382 - DNA, 25 bp, Canis familiaris
ctcccactttctcagtgtctgattc

SEQ ID NO: 73383 - DNA, 25 bp, Canis familiaris
ctccgcagctttttcagtggtctgg

SEQ ID NO: 73384 - DNA, 25 bp, Canis familiaris
ctgcgcaacgttggtcttggaagga

SEQ ID NO: 73385 - DNA, 25 bp, Canis familiaris
ctccccgatcttctcaggaagcgaa

SEQ ID NO: 73386 - DNA, 25 bp, Canis familiaris
ctcctacctttgcttgagtactgca

SEQ ID NO: 73387 - DNA, 25 bp, Canis familiaris
ctcccaccttggctagaggcagaag

SEQ ID NO: 73388 - DNA, 25 bp, Canis familiaris
ctcccaaatcgtcatcagggccaag

SEQ ID NO: 73389 - DNA, 25 bp, Canis familiaris
ctcccagggagccatacagggccta

SEQ ID NO: 73390 - DNA, 25 bp, Canis familiaris
ctcgcctggaggcaagagggaggag

SEQ ID NO: 73391 - DNA, 25 bp, Canis familiaris
ctccctcaaggacgcaggtgacagg

SEQ ID NO: 73392 - DNA, 25 bp, Canis familiaris
ctccctctcaaaagactgtgcacag

SEQ ID NO: 73393 - DNA, 25 bp, Canis familiaris
ctcccctcaagaagtctcagaactc

SEQ ID NO: 73394 - DNA, 25 bp, Canis familiaris
ctcctcctaagtactcggatcagcc

SEQ ID NO: 73395 - DNA, 25 bp, Canis familiaris
ctcgttccacgtatcgcgtgatggt

SEQ ID NO: 73396 - DNA, 25 bp, Canis familiaris
ctcgtcggccctatggtgatcgagt

SEQ ID NO: 73397 - DNA, 25 bp, Canis familiaris
ctcgaattctccccgagtacgagat

SEQ ID NO: 73398 - DNA, 25 bp, Canis familiaris
ctcgactttccccgagaagccaaat

SEQ ID NO: 73399 - DNA, 25 bp, Canis familiaris
ctcgactttcccagagaagcaaata

SEQ ID NO: 73400 - DNA, 25 bp, Canis familiaris
ctcccttggcccagaagacacaagt

SEQ ID NO: 73401 - DNA, 25 bp, Canis familiaris
ctcccttggccctgtcaggaatgtt

SEQ ID NO: 73402 - DNA, 25 bp, Canis familiaris
ctccgtcggctccgagtcaagtagt

SEQ ID NO: 73403 - DNA, 25 bp, Canis familiaris
ctccttgggctacagacatggtttc

SEQ ID NO: 73404 - DNA, 25 bp, Canis familiaris
ctcctggctggctacgatgagcatg

SEQ ID NO: 73405 - DNA, 25 bp, Canis familiaris
ctcctggctggctacgatgagcatg

SEQ ID NO: 73406 - DNA, 25 bp, Canis familiaris
ctcccgtgctgctttcagaagctaa

SEQ ID NO: 73407 - DNA, 25 bp, Canis familiaris
ctcgccctgctcttaaaaaagaaag

SEQ ID NO: 73408 - DNA, 25 bp, Canis familiaris
ctgcagccgggacaccaaaacgaag

SEQ ID NO: 73409 - DNA, 25 bp, Canis familiaris
cggccggtagaagtccacggcgaag

SEQ ID NO: 73410 - DNA, 25 bp, Canis familiaris
ctccagggtggctacccggggaatg

SEQ ID NO: 73411 - DNA, 25 bp, Canis familiaris
ctcccactgtggtacccggtggaga

SEQ ID NO: 73412 - DNA, 25 bp, Canis familiaris
ctcccaagcattcacccctgggagt

SEQ ID NO: 73413 - DNA, 25 bp, Canis familiaris
ctgcccacacaggataacccggggt

SEQ ID NO: 73414 - DNA, 25 bp, Canis familiaris
ctgacaaccaggagacccacttttc

SEQ ID NO: 73415 - DNA, 25 bp, Canis familiaris
cgacagtgcacaaaaacgccattat

SEQ ID NO: 73416 - DNA, 25 bp, Canis familiaris
ctccctgacaacgagaccttctatg

SEQ ID NO: 73417 - DNA, 25 bp, Canis familiaris
ctcgcctagagatagcccttgtgat

SEQ ID NO: 73418 - DNA, 25 bp, Canis familiaris
ctcgcgatcaagtaggactcggata

SEQ ID NO: 73419 - DNA, 25 bp, Canis familiaris
ctccaggcaatgctggcccagtgat

SEQ ID NO: 73420 - DNA, 25 bp, Canis familiaris
ctcggggtcagaactcatgcagtga

SEQ ID NO: 73421 - DNA, 25 bp, Canis familiaris
ctccgtggtctgagcccaatgaaaa

SEQ ID NO: 73422 - DNA, 25 bp, Canis familiaris
ctcgctctttatctctccaaataaa

SEQ ID NO: 73423 - DNA, 25 bp, Canis familiaris
ctccatttaccattcccagaacaaa

SEQ ID NO: 73424 - DNA, 25 bp, Canis familiaris
ctccttttcctgtcctgcaggaatt

SEQ ID NO: 73425 - DNA, 25 bp, Canis familiaris
acctgtctaccctcagaaaaccata

SEQ ID NO: 73426 - DNA, 25 bp, Canis familiaris
ctcccttgccattggccgtagagac

SEQ ID NO: 73427 - DNA, 25 bp, Canis familiaris
ctcgctttggcgtgggtatgaagcc

SEQ ID NO: 73428 - DNA, 25 bp, Canis familiaris
ctccttgggcgtgggtcttgaaaga

SEQ ID NO: 73429 - DNA, 25 bp, Canis familiaris
ctcctggggctgtggcccgaaggat

SEQ ID NO: 73430 - DNA, 25 bp, Canis familiaris
ctcctggagggtcggcccaaagatg

SEQ ID NO: 73431 - DNA, 25 bp, Canis familiaris
ctcctctagggtcgccttcagggag

SEQ ID NO: 73432 - DNA, 25 bp, Canis familiaris
ctccctctggagagcctccaggaac

SEQ ID NO: 73433 - DNA, 25 bp, Canis familiaris
ctcccctgcggatgacttcaggcag

SEQ ID NO: 73434 - DNA, 25 bp, Canis familiaris
ctcccccagtaccttgaagagcagt

SEQ ID NO: 73435 - DNA, 25 bp, Canis familiaris
ctcctcgccaaatcttaaactgttt

SEQ ID NO: 73436 - DNA, 25 bp, Canis familiaris
ctcccacaaaagccagttactgtgt

SEQ ID NO: 73437 - DNA, 25 bp, Canis familiaris
ctcccaccggatccagaagacgtgt

SEQ ID NO: 73438 - DNA, 25 bp, Canis familiaris
ctcggtgccctacaatgaacgtgtt

SEQ ID NO: 73439 - DNA, 25 bp, Canis familiaris
ctccttctcctacaaggcagggttc

SEQ ID NO: 73440 - DNA, 25 bp, Canis familiaris
ctccattctcctttcatggggggtt

SEQ ID NO: 73441 - DNA, 25 bp, Canis familiaris
ctccccacctgattttcgggatgtt

SEQ ID NO: 73442 - DNA, 25 bp, Canis familiaris
ctcccttccagagttgtcctgagga

SEQ ID NO: 73443 - DNA, 25 bp, Canis familiaris
ctcgttgtccagcttgtggggctga

SEQ ID NO: 73444 - DNA, 25 bp, Canis familiaris
ctcggggccagggctggggtaagag

SEQ ID NO: 73445 - DNA, 25 bp, Canis familiaris
ctcgcggaggcaaggcggaggacaa

SEQ ID NO: 73446 - DNA, 25 bp, Canis familiaris
ctcgcagaaggcgctgctgctggag

SEQ ID NO: 73447 - DNA, 25 bp, Canis familiaris
ctcgccaagaggagcatgcatgctg

SEQ ID NO: 73448 - DNA, 25 bp, Canis familiaris
ctcccaatggtggcgtgatggccca

SEQ ID NO: 73449 - DNA, 25 bp, Canis familiaris
ctcccacagggtcctgtgtccacag

SEQ ID NO: 73450 - DNA, 25 bp, Canis familiaris
ctccctccaagtgctttgcgagcag

SEQ ID NO: 73451 - DNA, 25 bp, Canis familiaris
ctcgtcccaggttgccttggaaaat

SEQ ID NO: 73452 - DNA, 25 bp, Canis familiaris
ctgctcttccggggacttggagcta

SEQ ID NO: 73453 - DNA, 25 bp, Canis familiaris
ctcctagacggtagcctcagggcta

SEQ ID NO: 73454 - DNA, 25 bp, Canis familiaris
ctcgctcgaggtgacccagagaaaa

SEQ ID NO: 73455 - DNA, 25 bp, Canis familiaris
ctcgctggcggcttaccgaggagga

SEQ ID NO: 73456 - DNA, 25 bp, Canis familiaris
ctcccagcaggcttaccaggaagca

SEQ ID NO: 73457 - DNA, 25 bp, Canis familiaris
ctcccacaagcagtcaccagaatag

SEQ ID NO: 73458 - DNA, 25 bp, Canis familiaris
ctcccttcacatgcaaagacaatat

SEQ ID NO: 73459 - DNA, 25 bp, Canis familiaris
ctcgccaggccagctaagaaaatgc

SEQ ID NO: 73460 - DNA, 25 bp, Canis familiaris
ctccctgtgttggtaataaaacttg

SEQ ID NO: 73461 - DNA, 25 bp, Canis familiaris
ctcccatccctcctaaatggaactt

SEQ ID NO: 73462 - DNA, 25 bp, Canis familiaris
ctccccacccagagaatatattctt

SEQ ID NO: 73463 - DNA, 25 bp, Canis familiaris
ctcccgacccgtagcagaagatttg

SEQ ID NO: 73464 - DNA, 25 bp, Canis familiaris
ctcgccaacctccttaagatgtagg

SEQ ID NO: 73465 - DNA, 25 bp, Canis familiaris
ctccctaccccaagagcaagaaggc

SEQ ID NO: 73466 - DNA, 25 bp, Canis familiaris
ctccctacctccaaacaaggtcaca

SEQ ID NO: 73467 - DNA, 25 bp, Canis familiaris
ctccccacctagggcacaggggcaa

SEQ ID NO: 73468 - DNA, 25 bp, Canis familiaris
ctcctccccatcagtcaacgggagg

SEQ ID NO: 73469 - DNA, 25 bp, Canis familiaris
ctcctccccaaagccatggaaggtg

SEQ ID NO: 73470 - DNA, 25 bp, Canis familiaris
ctcctcctgacacactttgtggggg

SEQ ID NO: 73471 - DNA, 25 bp, Canis familiaris
ctcccactacaaactttccgtgcag

SEQ ID NO: 73472 - DNA, 25 bp, Canis familiaris
ctcccactacaaactttccgtgcag

SEQ ID NO: 73473 - DNA, 25 bp, Canis familiaris
ctcccactacaaactttccgtgcag

SEQ ID NO: 73474 - DNA, 25 bp, Canis familiaris
ctcccactacaaactttccgtgcag

SEQ ID NO: 73475 - DNA, 25 bp, Canis familiaris
ctcccactacaaactttccgtgcag

SEQ ID NO: 73476 - DNA, 25 bp, Canis familiaris
ctcccactacaaactttccgtgcag

SEQ ID NO: 73477 - DNA, 25 bp, Canis familiaris
ctcccactacaaactttccgtgcag

SEQ ID NO: 73478 - DNA, 25 bp, Canis familiaris
ctcccactacaaactttccgtgcag

SEQ ID NO: 73479 - DNA, 25 bp, Canis familiaris
ctcccactacaaactgttgccgtgc

SEQ ID NO: 73480 - DNA, 25 bp, Canis familiaris
ctcccactcaccagctgttgagagt

SEQ ID NO: 73481 - DNA, 25 bp, Canis familiaris
ctccccaccaattgatgataagaca

SEQ ID NO: 73482 - DNA, 25 bp, Canis familiaris
ctcccatcccaagtgaaacagtttt

SEQ ID NO: 73483 - DNA, 25 bp, Canis familiaris
ctcccacccagacaagacaggttcc

SEQ ID NO: 73484 - DNA, 25 bp, Canis familiaris
ctccccacaggagaccaagtgttgc

SEQ ID NO: 73485 - DNA, 25 bp, Canis familiaris
ctccgccccagtgacgcaaatgggc

SEQ ID NO: 73486 - DNA, 25 bp, Canis familiaris
ctcctgtcccatgcaagctgcaggg

SEQ ID NO: 73487 - DNA, 25 bp, Canis familiaris
ctcgctcttcctccgaggagggaat

SEQ ID NO: 73488 - DNA, 25 bp, Canis familiaris
ctccctatactcttcaagcactgga

SEQ ID NO: 73489 - DNA, 25 bp, Canis familiaris
ctcctccatattcttatgtctcaca

SEQ ID NO: 73490 - DNA, 25 bp, Canis familiaris
ctcctaatattcggctagctcaggc

SEQ ID NO: 73491 - DNA, 25 bp, Canis familiaris
ctcctaaaccgccttacagctgagt

SEQ ID NO: 73492 - DNA, 25 bp, Canis familiaris
ctcccaaaacagcctgtcatcgtga

SEQ ID NO: 73493 - DNA, 25 bp, Canis familiaris
ctcctccaaggccgtggttgtgaag

SEQ ID NO: 73494 - DNA, 25 bp, Canis familiaris
ctccatctcaacattgggattgtgt

SEQ ID NO: 73495 - DNA, 25 bp, Canis familiaris
ctccttagacacctgcagttttgat

SEQ ID NO: 73496 - DNA, 25 bp, Canis familiaris
ctcgctctggtgaaatacatttctt

SEQ ID NO: 73497 - DNA, 25 bp, Canis familiaris
ctcgcctgcgtgacgacacaagttt

SEQ ID NO: 73498 - DNA, 25 bp, Canis familiaris
ctcgacatctgccagggccaagtaa

SEQ ID NO: 73499 - DNA, 25 bp, Canis familiaris
ctcgcgcctcgaggagaaagtgaag

SEQ ID NO: 73500 - DNA, 25 bp, Canis familiaris
ctcccccagacccaagagtattgta

SEQ ID NO: 73501 - DNA, 25 bp, Canis familiaris
ctcccacctaccggcagatgggtgt

SEQ ID NO: 73502 - DNA, 25 bp, Canis familiaris
ctcccctctaacagcaggctgtgtg

SEQ ID NO: 73503 - DNA, 25 bp, Canis familiaris
ctcccgccttagaacgatctgttga

SEQ ID NO: 73504 - DNA, 25 bp, Canis familiaris
ctcccaggttctaacgtgtgcttta

SEQ ID NO: 73505 - DNA, 25 bp, Canis familiaris
ctcctggtttcctctgtggtaataa

SEQ ID NO: 73506 - DNA, 25 bp, Canis familiaris
ctccaagcttctaccgtgggtaatg

SEQ ID NO: 73507 - DNA, 25 bp, Canis familiaris
ctcgcaagtttggcgcgtgaggaag

SEQ ID NO: 73508 - DNA, 25 bp, Canis familiaris
ctcgcaactgttgagccatggcaaa

SEQ ID NO: 73509 - DNA, 25 bp, Canis familiaris
ctccagcactctgtggcctgaaaat

SEQ ID NO: 73510 - DNA, 25 bp, Canis familiaris
ctcccacatatctgtctccagaatt

SEQ ID NO: 73511 - DNA, 25 bp, Canis familiaris
ctcccaaactggttcccacatagga

SEQ ID NO: 73512 - DNA, 25 bp, Canis familiaris
ctcccaacacatcaatgactccaga

SEQ ID NO: 73513 - DNA, 25 bp, Canis familiaris
ctcccaacgcagcagataacatcaa

SEQ ID NO: 73514 - DNA, 25 bp, Canis familiaris
ctcccgtcagcggaggaagcacgtc

SEQ ID NO: 73515 - DNA, 25 bp, Canis familiaris
ctcccacatttggagagcacccctg

SEQ ID NO: 73516 - DNA, 25 bp, Canis familiaris
ctcccatcgtgggagcgaacgttgt

SEQ ID NO: 73517 - DNA, 25 bp, Canis familiaris
ctccgctttggcaagaccatcgtgg

SEQ ID NO: 73518 - DNA, 25 bp, Canis familiaris
ctccgttctggctgagtctgcagaa

SEQ ID NO: 73519 - DNA, 25 bp, Canis familiaris
ctcgccttttgctgctgttggagaa

SEQ ID NO: 73520 - DNA, 25 bp, Canis familiaris
ctcccttggctcacttggatgaaga

SEQ ID NO: 73521 - DNA, 25 bp, Canis familiaris
ctccctccccattctaggaaaagtg

SEQ ID NO: 73522 - DNA, 25 bp, Canis familiaris
ctccctcccagcagcgagggactat

SEQ ID NO: 73523 - DNA, 25 bp, Canis familiaris
ctcccatctccactctgggaagaca

SEQ ID NO: 73524 - DNA, 25 bp, Canis familiaris
ccccagtcctgctgtggaagtacaa

SEQ ID NO: 73525 - DNA, 25 bp, Canis familiaris
ctccctgcccagtgtggggctgaaa

SEQ ID NO: 73526 - DNA, 25 bp, Canis familiaris
ctccacggccagctaaggccatggt

SEQ ID NO: 73527 - DNA, 25 bp, Canis familiaris
ctccctgcggctgtaagccagaggg

SEQ ID NO: 73528 - DNA, 25 bp, Canis familiaris
ctccctgcggctgtaagccagaggg

SEQ ID NO: 73529 - DNA, 25 bp, Canis familiaris
ctccctgcggctgtaagccagaggg

SEQ ID NO: 73530 - DNA, 25 bp, Canis familiaris
ctccctgcggctgtaagccagaggg

SEQ ID NO: 73531 - DNA, 25 bp, Canis familiaris
ctccctgcggctgtaagccagaggg

SEQ ID NO: 73532 - DNA, 25 bp, Canis familiaris
ctccctgcggctgtaagccagaggg

SEQ ID NO: 73533 - DNA, 25 bp, Canis familiaris
ctccctgcggctgtaagccagaggg

SEQ ID NO: 73534 - DNA, 25 bp, Canis familiaris
ctccctgtagctctaaccaaggctg

SEQ ID NO: 73535 - DNA, 25 bp, Canis familiaris
ctccctgtgtgttccaaacctgggc

SEQ ID NO: 73536 - DNA, 25 bp, Canis familiaris
ctcccttgtgtgtcctgaattgatg

SEQ ID NO: 73537 - DNA, 25 bp, Canis familiaris
ctcgcttttatctctgacagtaggt

SEQ ID NO: 73538 - DNA, 25 bp, Canis familiaris
ctgccttttatggtcgacgtagttt

SEQ ID NO: 73539 - DNA, 25 bp, Canis familiaris
ctccttttataacatactactcttg

SEQ ID NO: 73540 - DNA, 25 bp, Canis familiaris
cccttttaacatgacacctatttgt

SEQ ID NO: 73541 - DNA, 25 bp, Canis familiaris
ctccgttctaactccacaacaattt

SEQ ID NO: 73542 - DNA, 25 bp, Canis familiaris
ctcctgttctaatacccatgtcaat

SEQ ID NO: 73543 - DNA, 25 bp, Canis familiaris
ctggagtttcaataccggagatcat

SEQ ID NO: 73544 - DNA, 25 bp, Canis familiaris
ctgtcaggttcatcgtcggggtgac

SEQ ID NO: 73545 - DNA, 25 bp, Canis familiaris
ctgccagttggctcagttcaaggaa

SEQ ID NO: 73546 - DNA, 25 bp, Canis familiaris
ctgccgttgagcttagtctctcgag

SEQ ID NO: 73547 - DNA, 25 bp, Canis familiaris
ctccgatatgtccagattctcttga

SEQ ID NO: 73548 - DNA, 25 bp, Canis familiaris
ctcccttggtcgatgccattgattc

SEQ ID NO: 73549 - DNA, 25 bp, Canis familiaris
ctcctttgctgtgactggctatgac

SEQ ID NO: 73550 - DNA, 25 bp, Canis familiaris
ctcccaagtctggccaggctgatgg

SEQ ID NO: 73551 - DNA, 25 bp, Canis familiaris
ctcccacgtgcttgtagactgacag

SEQ ID NO: 73552 - DNA, 25 bp, Canis familiaris
ctcctacctgcttctagccaaaaag

SEQ ID NO: 73553 - DNA, 25 bp, Canis familiaris
ctcgacaccctttgatccagaagaa

SEQ ID NO: 73554 - DNA, 25 bp, Canis familiaris
ctccaccccaaaggtcagcaagcag

SEQ ID NO: 73555 - DNA, 25 bp, Canis familiaris
ctcgccaccaagtatgtgctcatct

SEQ ID NO: 73556 - DNA, 25 bp, Canis familiaris
ctcccggcaagattcatctgttcga

SEQ ID NO: 73557 - DNA, 25 bp, Canis familiaris
ctcccggaatggccattttgcagtt

SEQ ID NO: 73558 - DNA, 25 bp, Canis familiaris
ctccgggtcatttgttttgcatttt

SEQ ID NO: 73559 - DNA, 25 bp, Canis familiaris
ctccgacgtttctcgtagcaatgtg

SEQ ID NO: 73560 - DNA, 25 bp, Canis familiaris
ctccgacgtttctcgtagcaatgtg

SEQ ID NO: 73561 - DNA, 25 bp, Canis familiaris
ctccgacgtttctcgtagcaatgtg

SEQ ID NO: 73562 - DNA, 25 bp, Canis familiaris
ctcctggagttggcttcgtagcaac

SEQ ID NO: 73563 - DNA, 25 bp, Canis familiaris
ctcgcggttcatggtttgccagaac

SEQ ID NO: 73564 - DNA, 25 bp, Canis familiaris
ctccggtccttgcggcagatgaagc

SEQ ID NO: 73565 - DNA, 25 bp, Canis familiaris
ctccggtacctgtgctactatgagt

SEQ ID NO: 73566 - DNA, 25 bp, Canis familiaris
ctccttgtgaccccacaactagggt

SEQ ID NO: 73567 - DNA, 25 bp, Canis familiaris
ctcccagttctcaaatcacagctag

SEQ ID NO: 73568 - DNA, 25 bp, Canis familiaris
ctcccagactcctttgcacatggag

SEQ ID NO: 73569 - DNA, 25 bp, Canis familiaris
ctccctactcctttgtaagcagtgc

SEQ ID NO: 73570 - DNA, 25 bp, Canis familiaris
ctcccatactcccttgacaaaatgc

SEQ ID NO: 73571 - DNA, 25 bp, Canis familiaris
ctcccacctacgtcgatcaaagtca

SEQ ID NO: 73572 - DNA, 25 bp, Canis familiaris
ctcctgccttgggtctgaaacaaac

SEQ ID NO: 73573 - DNA, 25 bp, Canis familiaris
ctcctgcctatcctttataattcta

SEQ ID NO: 73574 - DNA, 25 bp, Canis familiaris
ctcgcccttcagtattttcatggat

SEQ ID NO: 73575 - DNA, 25 bp, Canis familiaris
ctccgtctccaggcagttatatcgt

SEQ ID NO: 73576 - DNA, 25 bp, Canis familiaris
ctccctccgaacaattgaatcttat

SEQ ID NO: 73577 - DNA, 25 bp, Canis familiaris
ctccctcgcagatttcttaacacta

SEQ ID NO: 73578 - DNA, 25 bp, Canis familiaris
ctccttctaatcacactctacaata

SEQ ID NO: 73579 - DNA, 25 bp, Canis familiaris
ctccagcttaacttcacttagcaga

SEQ ID NO: 73580 - DNA, 25 bp, Canis familiaris
ctcgccttgcacatgacactacagg

SEQ ID NO: 73581 - DNA, 25 bp, Canis familiaris
ctcgctgctatgtctgtgaccagca

SEQ ID NO: 73582 - DNA, 25 bp, Canis familiaris
ctcccttgtgctggtccagaactgt

SEQ ID NO: 73583 - DNA, 25 bp, Canis familiaris
ctccaagtgttggttctatgactga

SEQ ID NO: 73584 - DNA, 25 bp, Canis familiaris
ctcctgagtttctttgtgatgtggt

SEQ ID NO: 73585 - DNA, 25 bp, Canis familiaris
ctcccaggttctgtgtctaggtggg

SEQ ID NO: 73586 - DNA, 25 bp, Canis familiaris
ctccggggtcatctgctaagacagg

SEQ ID NO: 73587 - DNA, 25 bp, Canis familiaris
ctcccagaggtattcccaaacaggc

SEQ ID NO: 73588 - DNA, 25 bp, Canis familiaris
ctccaagaggtagctgccctagagg

SEQ ID NO: 73589 - DNA, 25 bp, Canis familiaris
ctgccacagtttactacccgaagtg

SEQ ID NO: 73590 - DNA, 25 bp, Canis familiaris
ctgccaaatcattatcccccagaac

SEQ ID NO: 73591 - DNA, 25 bp, Canis familiaris
ctgcttggaatattcccctgcttac

SEQ ID NO: 73592 - DNA, 25 bp, Canis familiaris
ctgctgggagagatcccctggcttg

SEQ ID NO: 73593 - DNA, 25 bp, Canis familiaris
ctcctcagaacaatcctcctagggc

SEQ ID NO: 73594 - DNA, 25 bp, Canis familiaris
ctcctcagctagcaccctaaggtgc

SEQ ID NO: 73595 - DNA, 25 bp, Canis familiaris
ctcccatgctagaacctacactgtg

SEQ ID NO: 73596 - DNA, 25 bp, Canis familiaris
ctcccactaacacctatactatcag

SEQ ID NO: 73597 - DNA, 25 bp, Canis familiaris
ctcccagcggacaactcaaattcat

SEQ ID NO: 73598 - DNA, 25 bp, Canis familiaris
ctcccagcggacagtgcaatgcttg

SEQ ID NO: 73599 - DNA, 25 bp, Canis familiaris
ctccctcaggaatctgagatctcga

SEQ ID NO: 73600 - DNA, 25 bp, Canis familiaris
ctgccttagggatcgcacacctaat

SEQ ID NO: 73601 - DNA, 25 bp, Canis familiaris
ctcctgtgaggttaccgcagcttta

SEQ ID NO: 73602 - DNA, 25 bp, Canis familiaris
ctcccgaggattaccagcgatttct

SEQ ID NO: 73603 - DNA, 25 bp, Canis familiaris
ctccctgaggatctgtaccatttga

SEQ ID NO: 73604 - DNA, 25 bp, Canis familiaris
ctccctagtgtgttgtatcctttta

SEQ ID NO: 73605 - DNA, 25 bp, Canis familiaris
ctccccggtgcttatattttatttg

SEQ ID NO: 73606 - DNA, 25 bp, Canis familiaris
ctccccagtgtgtttctattttttg

SEQ ID NO: 73607 - DNA, 25 bp, Canis familiaris
ctcgcccattcttatttattttgtc

SEQ ID NO: 73608 - DNA, 25 bp, Canis familiaris
ctccctctcatttcattttgttttg

SEQ ID NO: 73609 - DNA, 25 bp, Canis familiaris
ctccagttcatgtcgttcttttatt

SEQ ID NO: 73610 - DNA, 25 bp, Canis familiaris
ctcctcttctcactttattgttaga

SEQ ID NO: 73611 - DNA, 25 bp, Canis familiaris
ctcctaaccatttctttcctatgaa

SEQ ID NO: 73612 - DNA, 25 bp, Canis familiaris
ctcctaaccccagcttctgttagaa

SEQ ID NO: 73613 - DNA, 25 bp, Canis familiaris
ctcctaaccccagcttctgttagaa

SEQ ID NO: 73614 - DNA, 25 bp, Canis familiaris
ctcctaccccagtgttcagtataga

SEQ ID NO: 73615 - DNA, 25 bp, Canis familiaris
ctcccccaccaatggaagtctagag

SEQ ID NO: 73616 - DNA, 25 bp, Canis familiaris
ctccccggcttataaatgtcaagtg

SEQ ID NO: 73617 - DNA, 25 bp, Canis familiaris
ctgccccggttgaaacaggtgtcgg

SEQ ID NO: 73618 - DNA, 25 bp, Canis familiaris
ctcccagcgctgtgtccacagggag

SEQ ID NO: 73619 - DNA, 25 bp, Canis familiaris
ctcccagcgctgggggtctggggat

SEQ ID NO: 73620 - DNA, 25 bp, Canis familiaris
ctcccactctggggcttcagaggga

SEQ ID NO: 73621 - DNA, 25 bp, Canis familiaris
ctcccacttggctgggccaggagag

SEQ ID NO: 73622 - DNA, 25 bp, Canis familiaris
ctgcccgtattttgggccgcgaggt

SEQ ID NO: 73623 - DNA, 25 bp, Canis familiaris
ctcccagtgcatagggttccgcggg

SEQ ID NO: 73624 - DNA, 25 bp, Canis familiaris
ctcccagccataagcatgtgtccgg

SEQ ID NO: 73625 - DNA, 25 bp, Canis familiaris
ctccctgtgcattatgagctgctcc

SEQ ID NO: 73626 - DNA, 25 bp, Canis familiaris
ctcccttgctgcttgagctgcagaa

SEQ ID NO: 73627 - DNA, 25 bp, Canis familiaris
ctccctgtgtgaccaccaggatgct

SEQ ID NO: 73628 - DNA, 25 bp, Canis familiaris
ctccctgttgaagtccatatagtat

SEQ ID NO: 73629 - DNA, 25 bp, Canis familiaris
ctccctcttgaatcagctgatacga

SEQ ID NO: 73630 - DNA, 25 bp, Canis familiaris
ctccctcctgactatcatcatgaaa

SEQ ID NO: 73631 - DNA, 25 bp, Canis familiaris
ctccccatcttgttgctagaatcac

SEQ ID NO: 73632 - DNA, 25 bp, Canis familiaris
ctccccattcttatatcacatgcac

SEQ ID NO: 73633 - DNA, 25 bp, Canis familiaris
ctcccagctattcctttatgatgac

SEQ ID NO: 73634 - DNA, 25 bp, Canis familiaris
ctcccaggttgccgttataactatg

SEQ ID NO: 73635 - DNA, 25 bp, Canis familiaris
ctcctcgttttcattctaactgata

SEQ ID NO: 73636 - DNA, 25 bp, Canis familiaris
ctcccccatttcattaaagatttca

SEQ ID NO: 73637 - DNA, 25 bp, Canis familiaris
ctccccacagctagctttaaactta

SEQ ID NO: 73638 - DNA, 25 bp, Canis familiaris
ctccccctctcgttaagaatcatat

SEQ ID NO: 73639 - DNA, 25 bp, Canis familiaris
ctccccctcacaccatgggataaat

SEQ ID NO: 73640 - DNA, 25 bp, Canis familiaris
ctcccctggacacagaggtgcccat

SEQ ID NO: 73641 - DNA, 25 bp, Canis familiaris
ctccccgagagctcaggggcatcca

SEQ ID NO: 73642 - DNA, 25 bp, Canis familiaris
ctcccctcagaggccaggggtgctg

SEQ ID NO: 73643 - DNA, 25 bp, Canis familiaris
ctcccctcagaggccaggggtgctg

SEQ ID NO: 73644 - DNA, 25 bp, Canis familiaris
ctcccctccaggggggtgagctgca

SEQ ID NO: 73645 - DNA, 25 bp, Canis familiaris
ctccaccttccgggtagagtgtcag

SEQ ID NO: 73646 - DNA, 25 bp, Canis familiaris
ctccccattcctgggtgagaccaag

SEQ ID NO: 73647 - DNA, 25 bp, Canis familiaris
ctgcacgtttttcaggaggcgcaag

SEQ ID NO: 73648 - DNA, 25 bp, Canis familiaris
ctccactcctttccaggatggacaa

SEQ ID NO: 73649 - DNA, 25 bp, Canis familiaris
ctccaaggttgtcctggtgccaaaa

SEQ ID NO: 73650 - DNA, 25 bp, Canis familiaris
ctccaggagctgcgttgagtccaac

SEQ ID NO: 73651 - DNA, 25 bp, Canis familiaris
ctcccagcagctgtttctgtagtac

SEQ ID NO: 73652 - DNA, 25 bp, Canis familiaris
ctcccaggctggcctgttttctatc

SEQ ID NO: 73653 - DNA, 25 bp, Canis familiaris
ctccctgctgatggctggggtttac

SEQ ID NO: 73654 - DNA, 25 bp, Canis familiaris
ctccctcatgacgatggtgttcttt

SEQ ID NO: 73655 - DNA, 25 bp, Canis familiaris
ctccccactctgtggttctttgggg

SEQ ID NO: 73656 - DNA, 25 bp, Canis familiaris
ctgccccctatgtggtttttagtgg

SEQ ID NO: 73657 - DNA, 25 bp, Canis familiaris
ctgccttcctacggacttttattgt

SEQ ID NO: 73658 - DNA, 25 bp, Canis familiaris
ctcctacccacccagtttaattgtg

SEQ ID NO: 73659 - DNA, 25 bp, Canis familiaris
ctcccatccacagcaggtttgaatt

SEQ ID NO: 73660 - DNA, 25 bp, Canis familiaris
ctccgtccaccgtgattctgagtat

SEQ ID NO: 73661 - DNA, 25 bp, Canis familiaris
ctcctgtcccctgtttgtgggaggg

SEQ ID NO: 73662 - DNA, 25 bp, Canis familiaris
ctccttctccctgatctggggaggc

SEQ ID NO: 73663 - DNA, 25 bp, Canis familiaris
ctcccttcccatgaagatcttgggc

SEQ ID NO: 73664 - DNA, 25 bp, Canis familiaris
ctcccatcttcgtgcaaggcttggg

SEQ ID NO: 73665 - DNA, 25 bp, Canis familiaris
ctccccttgccaagagacgcgggac

SEQ ID NO: 73666 - DNA, 25 bp, Canis familiaris
ctcccctggccagggcaatggggtg

SEQ ID NO: 73667 - DNA, 25 bp, Canis familiaris
ctccccttccgtgagatgcagggct

SEQ ID NO: 73668 - DNA, 25 bp, Canis familiaris
ctccctttcctgctgagggggtgca

SEQ ID NO: 73669 - DNA, 25 bp, Canis familiaris
ctccctccctggtggggatgagtga

SEQ ID NO: 73670 - DNA, 25 bp, Canis familiaris
ctccctggccaggtgggtggttggg

SEQ ID NO: 73671 - DNA, 25 bp, Canis familiaris
ctccctgccccagaggggactgggg

SEQ ID NO: 73672 - DNA, 25 bp, Canis familiaris
ctccggccctgccaaagggcagtgg

SEQ ID NO: 73673 - DNA, 25 bp, Canis familiaris
ctccctgtcgtgcgaaggtgggcgc

SEQ ID NO: 73674 - DNA, 25 bp, Canis familiaris
ctccctgtgcctctgtgggaggggc

SEQ ID NO: 73675 - DNA, 25 bp, Canis familiaris
ctccctgggtctctggggagggctc

SEQ ID NO: 73676 - DNA, 25 bp, Canis familiaris
ctccctaggtttagcgagtgagtag

SEQ ID NO: 73677 - DNA, 25 bp, Canis familiaris
ctgccccggaagagcgtgtggcacg

SEQ ID NO: 73678 - DNA, 25 bp, Canis familiaris
ctgctaccgaacccaggaggaactg

SEQ ID NO: 73679 - DNA, 25 bp, Canis familiaris
ctgcgatggcaagcccgggagaagg

SEQ ID NO: 73680 - DNA, 25 bp, Canis familiaris
ctccatgtggcggccctggaggaac

SEQ ID NO: 73681 - DNA, 25 bp, Canis familiaris
ctcctgtagcctcagccagggaaag

SEQ ID NO: 73682 - DNA, 25 bp, Canis familiaris
ctcctgggccatctgggttccaggg

SEQ ID NO: 73683 - DNA, 25 bp, Canis familiaris
ctcctgcaggcactgtggggttacg

SEQ ID NO: 73684 - DNA, 25 bp, Canis familiaris
ctcctgagctccgggacatttagcg

SEQ ID NO: 73685 - DNA, 25 bp, Canis familiaris
ctcctgacttgtgggttttgctgac

SEQ ID NO: 73686 - DNA, 25 bp, Canis familiaris
ctgccatgacctacacgttgtttga

SEQ ID NO: 73687 - DNA, 25 bp, Canis familiaris
ctcctagcctccgggagtatctatt

SEQ ID NO: 73688 - DNA, 25 bp, Canis familiaris
ctcccccatcactgaagctattatc

SEQ ID NO: 73689 - DNA, 25 bp, Canis familiaris
ctcctcccactttgaagttctgtgt

SEQ ID NO: 73690 - DNA, 25 bp, Canis familiaris
ctccatcctccctcaagtttggaaa

SEQ ID NO: 73691 - DNA, 25 bp, Canis familiaris
ctcctaccctgctttttttgcagta

SEQ ID NO: 73692 - DNA, 25 bp, Canis familiaris
ctcccatctcttttctgttattgag

SEQ ID NO: 73693 - DNA, 25 bp, Canis familiaris
ctcccgctttctgctacatataagg

SEQ ID NO: 73694 - DNA, 25 bp, Canis familiaris
ctcccagtttccctatcatacagga

SEQ ID NO: 73695 - DNA, 25 bp, Canis familiaris
ctcctctgggtctcagtgaacagga

SEQ ID NO: 73696 - DNA, 25 bp, Canis familiaris
ctcccgagagcgctcgtgaactgga

SEQ ID NO: 73697 - DNA, 25 bp, Canis familiaris
cccctgaaacttctgaactgttcac

SEQ ID NO: 73698 - DNA, 25 bp, Canis familiaris
ctccctggaaccactgaacttcaga

SEQ ID NO: 73699 - DNA, 25 bp, Canis familiaris
ctcccttcaacgctcaaagcttaac

SEQ ID NO: 73700 - DNA, 25 bp, Canis familiaris
ctcccctacaggttcgaacttctga

SEQ ID NO: 73701 - DNA, 25 bp, Canis familiaris
ctccacactacatatttcaccaatt

SEQ ID NO: 73702 - DNA, 25 bp, Canis familiaris
ctcccaggtgcatggtgtcatccag

SEQ ID NO: 73703 - DNA, 25 bp, Canis familiaris
ctcccaggtcatcgagcagctatgc

SEQ ID NO: 73704 - DNA, 25 bp, Canis familiaris
ctccgaagctgacgaacttccgcgg

SEQ ID NO: 73705 - DNA, 25 bp, Canis familiaris
ctccgaagtattcagtaccgctcag

SEQ ID NO: 73706 - DNA, 25 bp, Canis familiaris
ctccgaagtattcagtaccgctcag

SEQ ID NO: 73707 - DNA, 25 bp, Canis familiaris
ctccgtctgtttaattacaccagca

SEQ ID NO: 73708 - DNA, 25 bp, Canis familiaris
ctccagatctgcagcttcattacac

SEQ ID NO: 73709 - DNA, 25 bp, Canis familiaris
ctccaatgtgccctctacaatggcc

SEQ ID NO: 73710 - DNA, 25 bp, Canis familiaris
ctcctcttctcattctacagagtgc

SEQ ID NO: 73711 - DNA, 25 bp, Canis familiaris
ctccatccagttatgatcggtctga

SEQ ID NO: 73712 - DNA, 25 bp, Canis familiaris
ctcctgtagttttgaattgctgcca

SEQ ID NO: 73713 - DNA, 25 bp, Canis familiaris
ctccctagagtattaacgctccaag

SEQ ID NO: 73714 - DNA, 25 bp, Canis familiaris
ctccctaagctactacaaggcgcaa

SEQ ID NO: 73715 - DNA, 25 bp, Canis familiaris
ctgccttgacagcgtaacaggaaaa

SEQ ID NO: 73716 - DNA, 25 bp, Canis familiaris
ctcctttcacacactagctgggaaa

SEQ ID NO: 73717 - DNA, 25 bp, Canis familiaris
ctccttaatcccaacctgttgaaga

SEQ ID NO: 73718 - DNA, 25 bp, Canis familiaris
ctgaccaaatccttaaccttagcga

SEQ ID NO: 73719 - DNA, 25 bp, Canis familiaris
ctgccagaatatgctaaaccttttg

SEQ ID NO: 73720 - DNA, 25 bp, Canis familiaris
ctgctgcaaaagttaacccctgttt

SEQ ID NO: 73721 - DNA, 25 bp, Canis familiaris
ctgccaaaaataaatctccggtgtt

SEQ ID NO: 73722 - DNA, 25 bp, Canis familiaris
ctcctaaaggattctcatgcccgtg

SEQ ID NO: 73723 - DNA, 25 bp, Canis familiaris
ctccttctaggtttgacccgtgagc

SEQ ID NO: 73724 - DNA, 25 bp, Canis familiaris
ctccctgtgaggaacccgacgtggg

SEQ ID NO: 73725 - DNA, 25 bp, Canis familiaris
ctcccgctgaggagggcgaagccgg

SEQ ID NO: 73726 - DNA, 25 bp, Canis familiaris
ctccctgcgaagatggtctccagat

SEQ ID NO: 73727 - DNA, 25 bp, Canis familiaris
ctcctctgggtgactggcacttaga

SEQ ID NO: 73728 - DNA, 25 bp, Canis familiaris
ctccctgtggctgtgagcatgctaa

SEQ ID NO: 73729 - DNA, 25 bp, Canis familiaris
ctccctgctgaaaggcagctggtac

SEQ ID NO: 73730 - DNA, 25 bp, Canis familiaris
ctccctgctgagatgtatgctgtct

SEQ ID NO: 73731 - DNA, 25 bp, Canis familiaris
ctccttctggcagtgctaatatcgc

SEQ ID NO: 73732 - DNA, 25 bp, Canis familiaris
ctgtcattctgttcaggccaattgc

SEQ ID NO: 73733 - DNA, 25 bp, Canis familiaris
ctgccacagcataacaggccttgtg

SEQ ID NO: 73734 - DNA, 25 bp, Canis familiaris
ctcctgcagctgaaaggcctcgagg

SEQ ID NO: 73735 - DNA, 25 bp, Canis familiaris
ctcctcgggaaggcacagcagacag

SEQ ID NO: 73736 - DNA, 25 bp, Canis familiaris
ctccctgtggaaattcgagaccagc

SEQ ID NO: 73737 - DNA, 25 bp, Canis familiaris
ctccctgtggaaattcgagaccagc

SEQ ID NO: 73738 - DNA, 25 bp, Canis familiaris
ctccctgtgagaagtcacgggccgc

SEQ ID NO: 73739 - DNA, 25 bp, Canis familiaris
ctccctctggcagctagcagggcaa

SEQ ID NO: 73740 - DNA, 25 bp, Canis familiaris
ctcctccggcgaaagcgggacttgg

SEQ ID NO: 73741 - DNA, 25 bp, Canis familiaris
ctgccccgagcggggccggattttg

SEQ ID NO: 73742 - DNA, 25 bp, Canis familiaris
ctccgcggagaggggccggagggcg

SEQ ID NO: 73743 - DNA, 25 bp, Canis familiaris
ctcccgcacagaaaggccacaaggg

SEQ ID NO: 73744 - DNA, 25 bp, Canis familiaris
ctccccagagttcactgaccagggc

SEQ ID NO: 73745 - DNA, 25 bp, Canis familiaris
ctccccagaggacactcatcctggg

SEQ ID NO: 73746 - DNA, 25 bp, Canis familiaris
ctccccaagtagggtcctcggtgag

SEQ ID NO: 73747 - DNA, 25 bp, Canis familiaris
ctccccagttctgggatccctagag

SEQ ID NO: 73748 - DNA, 25 bp, Canis familiaris
ctgacctttttgggatcactgtagg

SEQ ID NO: 73749 - DNA, 25 bp, Canis familiaris
ctgaactctttacagatattctgag

SEQ ID NO: 73750 - DNA, 25 bp, Canis familiaris
ctccgtcttctactatgagattcta

SEQ ID NO: 73751 - DNA, 25 bp, Canis familiaris
ctcctagcttctcataagactcata

SEQ ID NO: 73752 - DNA, 25 bp, Canis familiaris
ctccgtgttcaccaaagacttcaca

SEQ ID NO: 73753 - DNA, 25 bp, Canis familiaris
ctccctgagtcatccaaatcttcat

SEQ ID NO: 73754 - DNA, 25 bp, Canis familiaris
ctccctgttcattctaggtcttcat

SEQ ID NO: 73755 - DNA, 25 bp, Canis familiaris
ctccctcttatccaagcaatttcag

SEQ ID NO: 73756 - DNA, 25 bp, Canis familiaris
ctccctgtgtacaatagcaatcaag

SEQ ID NO: 73757 - DNA, 25 bp, Canis familiaris
ctccctgtgttactcagctacatag

SEQ ID NO: 73758 - DNA, 25 bp, Canis familiaris
ctcccttctgtttcactaatgagga

SEQ ID NO: 73759 - DNA, 25 bp, Canis familiaris
ctccctcttcttgactgacataaaa

SEQ ID NO: 73760 - DNA, 25 bp, Canis familiaris
ctgcagactcttctaacttaaaaac

SEQ ID NO: 73761 - DNA, 25 bp, Canis familiaris
ctgccacttgtcttaactctgaaca

SEQ ID NO: 73762 - DNA, 25 bp, Canis familiaris
cgtactattacttccattggtgccc

SEQ ID NO: 73763 - DNA, 25 bp, Canis familiaris
ctgggccaaatttgcacctggtgac

SEQ ID NO: 73764 - DNA, 25 bp, Canis familiaris
ctgagcgccaactccaaagtggaca

SEQ ID NO: 73765 - DNA, 25 bp, Canis familiaris
ctgacacgaaccccgtcagggacaa

SEQ ID NO: 73766 - DNA, 25 bp, Canis familiaris
ctccacttagccccgggggacagag

SEQ ID NO: 73767 - DNA, 25 bp, Canis familiaris
ctccccgaccgggagtggcgacaag

SEQ ID NO: 73768 - DNA, 25 bp, Canis familiaris
ctccgccgaggggcggggctgagga

SEQ ID NO: 73769 - DNA, 25 bp, Canis familiaris
ctccgccagggaaggcgccctggta

SEQ ID NO: 73770 - DNA, 25 bp, Canis familiaris
ctccgcatcagatgatggagatgcc

SEQ ID NO: 73771 - DNA, 25 bp, Canis familiaris
ctccctgctcaatggagagcctgct

SEQ ID NO: 73772 - DNA, 25 bp, Canis familiaris
ctccgtgctgaacgtggagcctgct

SEQ ID NO: 73773 - DNA, 25 bp, Canis familiaris
ctccgagcagcagggctgaacccat

SEQ ID NO: 73774 - DNA, 25 bp, Canis familiaris
ctccaggcacaacttgaacacctaa

SEQ ID NO: 73775 - DNA, 25 bp, Canis familiaris
ctgccaggctcacttgttacaagga

SEQ ID NO: 73776 - DNA, 25 bp, Canis familiaris
ctcctggtctgttgcctgaaccagg

SEQ ID NO: 73777 - DNA, 25 bp, Canis familiaris
ctgcattaccggtcgatgcaacgag

SEQ ID NO: 73778 - DNA, 25 bp, Canis familiaris
ctgctgctgacctgggacaatggac

SEQ ID NO: 73779 - DNA, 25 bp, Canis familiaris
ctccactactcgcgacgaggacgtc

SEQ ID NO: 73780 - DNA, 25 bp, Canis familiaris
ctccgtactctgcacagagacccgc

SEQ ID NO: 73781 - DNA, 25 bp, Canis familiaris
ctccttactcatggtcgaatcacaa

SEQ ID NO: 73782 - DNA, 25 bp, Canis familiaris
ctccctcaagattgtcagcaatgcc

SEQ ID NO: 73783 - DNA, 25 bp, Canis familiaris
ctccccaatcatttgacattgcgcc

SEQ ID NO: 73784 - DNA, 25 bp, Canis familiaris
ctccaacctcaacggcatgtggcat

SEQ ID NO: 73785 - DNA, 25 bp, Canis familiaris
ctccacctctaactttgggcacaaa

SEQ ID NO: 73786 - DNA, 25 bp, Canis familiaris
ctccaggctctacctttgaggaaga

SEQ ID NO: 73787 - DNA, 25 bp, Canis familiaris
ctccgggtgacctgtcaggacgcag

SEQ ID NO: 73788 - DNA, 25 bp, Canis familiaris
ctcccggctggtgatgtcgtacacc

SEQ ID NO: 73789 - DNA, 25 bp, Canis familiaris
ctccccgcagaggatttcgtgtacc

SEQ ID NO: 73790 - DNA, 25 bp, Canis familiaris
ctcctcaacaatggtgtctcgggcg

SEQ ID NO: 73791 - DNA, 25 bp, Canis familiaris
ctcctcccagtctttctaaggggca

SEQ ID NO: 73792 - DNA, 25 bp, Canis familiaris
ctcccccctgctttatagagggaat

SEQ ID NO: 73793 - DNA, 25 bp, Canis familiaris
ctccacgccccttaatgagaggaac

SEQ ID NO: 73794 - DNA, 25 bp, Canis familiaris
ctccagtcagacgttgtagggcccc

SEQ ID NO: 73795 - DNA, 25 bp, Canis familiaris
ctccgtccacacttggacgagcccc

SEQ ID NO: 73796 - DNA, 25 bp, Canis familiaris
ctccctccccagagagcgaggatct

SEQ ID NO: 73797 - DNA, 25 bp, Canis familiaris
ctccagcccccaggggaaggatttg

SEQ ID NO: 73798 - DNA, 25 bp, Canis familiaris
ctcctggccggcttgggaagagggg

SEQ ID NO: 73799 - DNA, 25 bp, Canis familiaris
ctgccaggccgggtgagggtggagg

SEQ ID NO: 73800 - DNA, 25 bp, Canis familiaris
ctccgtcgctctgggagggctaagc

SEQ ID NO: 73801 - DNA, 25 bp, Canis familiaris
ctccgactgctgggcggggtagagg

SEQ ID NO: 73802 - DNA, 25 bp, Canis familiaris
ctgccgatgctctgggcgaggaatg

SEQ ID NO: 73803 - DNA, 25 bp, Canis familiaris
ctccctctcatacgtgtaccagagt

SEQ ID NO: 73804 - DNA, 25 bp, Canis familiaris
ctccaacctcaggtgtcaccaggtc

SEQ ID NO: 73805 - DNA, 25 bp, Canis familiaris
ctccgacgccgcattcggaggcatc

SEQ ID NO: 73806 - DNA, 25 bp, Canis familiaris
ctccaattcctgatcctggcaagat

SEQ ID NO: 73807 - DNA, 25 bp, Canis familiaris
ctccacattccggacaggtcataga

SEQ ID NO: 73808 - DNA, 25 bp, Canis familiaris
ctccagctctcagcccaaataaagc

SEQ ID NO: 73809 - DNA, 25 bp, Canis familiaris
ctccttctctaaccagaaaaagcga

SEQ ID NO: 73810 - DNA, 25 bp, Canis familiaris
ctccctgcctggagagaacagtagg

SEQ ID NO: 73811 - DNA, 25 bp, Canis familiaris
ctccctcctctctgtgtgaagaagg

SEQ ID NO: 73812 - DNA, 25 bp, Canis familiaris
ctccctgtcccatggtatcagaagt

SEQ ID NO: 73813 - DNA, 25 bp, Canis familiaris
ctccgtgtctccttgagtcaagtgg

SEQ ID NO: 73814 - DNA, 25 bp, Canis familiaris
ctcctatacccacctggcaggtggg

SEQ ID NO: 73815 - DNA, 25 bp, Canis familiaris
ctcctcgagtcctcgagctgtgagg

SEQ ID NO: 73816 - DNA, 25 bp, Canis familiaris
ctcctcaacttcccagactgtgggg

SEQ ID NO: 73817 - DNA, 25 bp, Canis familiaris
ctcctccacgatcatcagatcatcg

SEQ ID NO: 73818 - DNA, 25 bp, Canis familiaris
ctcctccatcagttgacattgtcgc

SEQ ID NO: 73819 - DNA, 25 bp, Canis familiaris
ctccccattcattgacattgtctct

SEQ ID NO: 73820 - DNA, 25 bp, Canis familiaris
ctccctggtgattatcttcgtccag

SEQ ID NO: 73821 - DNA, 25 bp, Canis familiaris
ctcctcggtttattccagtgccgtt

SEQ ID NO: 73822 - DNA, 25 bp, Canis familiaris
ctccactgtttttctctaatgcttg

SEQ ID NO: 73823 - DNA, 25 bp, Canis familiaris
ctcccctttgtgtgtgaatgtgtgt

SEQ ID NO: 73824 - DNA, 25 bp, Canis familiaris
ctccccctgttgtctgtaagatggg

SEQ ID NO: 73825 - DNA, 25 bp, Canis familiaris
ctccctgtctgggccttgtaagggc

SEQ ID NO: 73826 - DNA, 25 bp, Canis familiaris
ctccctgtctgattcactgtatgaa

SEQ ID NO: 73827 - DNA, 25 bp, Canis familiaris
ctcctcttctcactcaggaattcat

SEQ ID NO: 73828 - DNA, 25 bp, Canis familiaris
ctcctggtcacaattgagaatttct

SEQ ID NO: 73829 - DNA, 25 bp, Canis familiaris
ctcctgtgcccaaagaaagtcttta

SEQ ID NO: 73830 - DNA, 25 bp, Canis familiaris
ctccctgcccagcagaaagtctgct

SEQ ID NO: 73831 - DNA, 25 bp, Canis familiaris
ctccgctgggcaaaagaagtctggt

SEQ ID NO: 73832 - DNA, 25 bp, Canis familiaris
ctccacggactaccgaatgcgctga

SEQ ID NO: 73833 - DNA, 25 bp, Canis familiaris
ctgtaaatgccaagaaagatgctgt

SEQ ID NO: 73834 - DNA, 25 bp, Canis familiaris
ctgccaaacctgcagccagagctgc

SEQ ID NO: 73835 - DNA, 25 bp, Canis familiaris
ctcctgaaccactgcaagcctgaga

SEQ ID NO: 73836 - DNA, 25 bp, Canis familiaris
ctcctgttgggctgcacagcacgga

SEQ ID NO: 73837 - DNA, 25 bp, Canis familiaris
ctcctatgtgggtgacgaggcccag

SEQ ID NO: 73838 - DNA, 25 bp, Canis familiaris
ctcctatctggttggtgcttgggca

SEQ ID NO: 73839 - DNA, 25 bp, Canis familiaris
ctcctacggtattggccgtgtgtgt

SEQ ID NO: 73840 - DNA, 25 bp, Canis familiaris
ctcctgacgtgttagactttgggtt

SEQ ID NO: 73841 - DNA, 25 bp, Canis familiaris
ctccttccctagtgctttgaggttt

SEQ ID NO: 73842 - DNA, 25 bp, Canis familiaris
ctccttccccttttctatgaggaat

SEQ ID NO: 73843 - DNA, 25 bp, Canis familiaris
ctccgatcagctgcttgaactcatg

SEQ ID NO: 73844 - DNA, 25 bp, Canis familiaris
ctccccagcacatctaagcatctgg

SEQ ID NO: 73845 - DNA, 25 bp, Canis familiaris
ctccactaaccagagagctgctgtg

SEQ ID NO: 73846 - DNA, 25 bp, Canis familiaris
ctccctgaactcttggggctgagcc

SEQ ID NO: 73847 - DNA, 25 bp, Canis familiaris
ctccttgagggcctgggccagagcc

SEQ ID NO: 73848 - DNA, 25 bp, Canis familiaris
ctcctagagactgagtgtccgagac

SEQ ID NO: 73849 - DNA, 25 bp, Canis familiaris
ctcctatcttctgagtttctgaaaa

SEQ ID NO: 73850 - DNA, 25 bp, Canis familiaris
ctcctcacttcttttctatctgaag

SEQ ID NO: 73851 - DNA, 25 bp, Canis familiaris
ctccaaacaggcttctcttctgaaa

SEQ ID NO: 73852 - DNA, 25 bp, Canis familiaris
ctccaaaagagctcatctctggtga

SEQ ID NO: 73853 - DNA, 25 bp, Canis familiaris
ctcctacgtcgctaatccgtgatat

SEQ ID NO: 73854 - DNA, 25 bp, Canis familiaris
ctcctgcacattgtacagccgtata

SEQ ID NO: 73855 - DNA, 25 bp, Canis familiaris
ctcctagctatctgccacatgcagt

SEQ ID NO: 73856 - DNA, 25 bp, Canis familiaris
ctccccatcactgggcaggcaattc

SEQ ID NO: 73857 - DNA, 25 bp, Canis familiaris
ctccccatcctgggcagaattcaga

SEQ ID NO: 73858 - DNA, 25 bp, Canis familiaris
ctcctagtaatgcccagaattcaga

SEQ ID NO: 73859 - DNA, 25 bp, Canis familiaris
ctcctgggtagagctgcacttcagc

SEQ ID NO: 73860 - DNA, 25 bp, Canis familiaris
ctccggcggacagctgcttacatgt

SEQ ID NO: 73861 - DNA, 25 bp, Canis familiaris
ctccccgagactgtttgactgtgaa

SEQ ID NO: 73862 - DNA, 25 bp, Canis familiaris
ctcccccaagcttatgttagcgtgg

SEQ ID NO: 73863 - DNA, 25 bp, Canis familiaris
ctcctgcccaatttatttgctgcgg

SEQ ID NO: 73864 - DNA, 25 bp, Canis familiaris
ctccccgagatacgagaaggcagga

SEQ ID NO: 73865 - DNA, 25 bp, Canis familiaris
ctccccgagtacgagatagcaggga

SEQ ID NO: 73866 - DNA, 25 bp, Canis familiaris
ctccttccatgctcctgacaaggaa

SEQ ID NO: 73867 - DNA, 25 bp, Canis familiaris
ctccaacctgggtgactcatggatg

SEQ ID NO: 73868 - DNA, 25 bp, Canis familiaris
ctccgagttggtggctgactctggg

SEQ ID NO: 73869 - DNA, 25 bp, Canis familiaris
ctcctggctatgctaggcactcaag

SEQ ID NO: 73870 - DNA, 25 bp, Canis familiaris
ctcctcgtgaggctggatctcaaaa

SEQ ID NO: 73871 - DNA, 25 bp, Canis familiaris
ctgcccatagactttggttcaaaag

SEQ ID NO: 73872 - DNA, 25 bp, Canis familiaris
ctgcccagaagccttgagtcagctg

SEQ ID NO: 73873 - DNA, 25 bp, Canis familiaris
ctccgagctgacctgtgttcgggac

SEQ ID NO: 73874 - DNA, 25 bp, Canis familiaris
ctcctccgacgccgcattcggaggc

SEQ ID NO: 73875 - DNA, 25 bp, Canis familiaris
ctccaccgaagcccatgtaagcagc

SEQ ID NO: 73876 - DNA, 25 bp, Canis familiaris
ctccgacaaggagcgctacgcacag

SEQ ID NO: 73877 - DNA, 25 bp, Canis familiaris
ctccaagagagaaccctaggccgcc

SEQ ID NO: 73878 - DNA, 25 bp, Canis familiaris
ctccaagaggacaatcatctgggcc

SEQ ID NO: 73879 - DNA, 25 bp, Canis familiaris
ctccacatgagcacatctgcctgag

SEQ ID NO: 73880 - DNA, 25 bp, Canis familiaris
ctccagcgatgaatcatttgcgatg

SEQ ID NO: 73881 - DNA, 25 bp, Canis familiaris
ctcctgtgaggcatttggagcctga

SEQ ID NO: 73882 - DNA, 25 bp, Canis familiaris
ctcctgggttttgtgagccagcctc

SEQ ID NO: 73883 - DNA, 25 bp, Canis familiaris
ctcctatggtgggtgctttgtcccc

SEQ ID NO: 73884 - DNA, 25 bp, Canis familiaris
ctccgcatggtggcagtgctggtgt

SEQ ID NO: 73885 - DNA, 25 bp, Canis familiaris
ctccgagcaatgcagagctggtggc

SEQ ID NO: 73886 - DNA, 25 bp, Canis familiaris
ctccgatcaatccgacgttgtctaa

SEQ ID NO: 73887 - DNA, 25 bp, Canis familiaris
ctgcagttctaccagtctgtggtta

SEQ ID NO: 73888 - DNA, 25 bp, Canis familiaris
ctccactcatagcttcggtgcttat

SEQ ID NO: 73889 - DNA, 25 bp, Canis familiaris
ctccatctcaggaccctgggatcat

SEQ ID NO: 73890 - DNA, 25 bp, Canis familiaris
ctccatgcctttcctgcaggaagat

SEQ ID NO: 73891 - DNA, 25 bp, Canis familiaris
ctcctgtcttgtcatgtgctgaaat

SEQ ID NO: 73892 - DNA, 25 bp, Canis familiaris
ctccttctgctctctgtatataagc

SEQ ID NO: 73893 - DNA, 25 bp, Canis familiaris
ctcctttgctgctgctaatgacaac

SEQ ID NO: 73894 - DNA, 25 bp, Canis familiaris
ctccatctgtccttgtcaataaaca

SEQ ID NO: 73895 - DNA, 25 bp, Canis familiaris
ctcctctctgtggtctacaaaaatg

SEQ ID NO: 73896 - DNA, 25 bp, Canis familiaris
ctcccgctggtaataaaatctgttc

SEQ ID NO: 73897 - DNA, 25 bp, Canis familiaris
cgccgtcttgtgaacaagaattttt

SEQ ID NO: 73898 - DNA, 25 bp, Canis familiaris
ctgccttctggtgcaccagtgcagt

SEQ ID NO: 73899 - DNA, 25 bp, Canis familiaris
ctgtttcaggctgcacaacgaccgg

SEQ ID NO: 73900 - DNA, 25 bp, Canis familiaris
ctgatgcgtcgagtgctaaacagca

SEQ ID NO: 73901 - DNA, 25 bp, Canis familiaris
ctgctgcagctgccactgagaagaa

SEQ ID NO: 73902 - DNA, 25 bp, Canis familiaris
ctcctgctggcacttgagcagccag

SEQ ID NO: 73903 - DNA, 25 bp, Canis familiaris
ctccatctgcgactgtgcaaatgat

SEQ ID NO: 73904 - DNA, 25 bp, Canis familiaris
ctccagctgctgttgaagaatatat

SEQ ID NO: 73905 - DNA, 25 bp, Canis familiaris
ctccagctatgctatgaccttaggt

SEQ ID NO: 73906 - DNA, 25 bp, Canis familiaris
ctccacagtcattgctcctaaagct

SEQ ID NO: 73907 - DNA, 25 bp, Canis familiaris
ctccatgcagtgagcccgacatgtg

SEQ ID NO: 73908 - DNA, 25 bp, Canis familiaris
ctccatggctgtggctcatcaaaga

SEQ ID NO: 73909 - DNA, 25 bp, Canis familiaris
ctccaggagctggtgctaaaggggc

SEQ ID NO: 73910 - DNA, 25 bp, Canis familiaris
ctgccggactggttcgacaaggcca

SEQ ID NO: 73911 - DNA, 25 bp, Canis familiaris
ctgccggactattttccatgcatgg

SEQ ID NO: 73912 - DNA, 25 bp, Canis familiaris
ctccagcaacatatttccagttcca

SEQ ID NO: 73913 - DNA, 25 bp, Canis familiaris
ctgccaaacatgagtgcctagtcca

SEQ ID NO: 73914 - DNA, 25 bp, Canis familiaris
ctgccgaactgaggtgcttacgaca

SEQ ID NO: 73915 - DNA, 25 bp, Canis familiaris
ctcctgaattgagttgatttgcaga

SEQ ID NO: 73916 - DNA, 25 bp, Canis familiaris
ctcctagttctgtctgcatttgaag

SEQ ID NO: 73917 - DNA, 25 bp, Canis familiaris
ctcctgtctctttgctcatttacag

SEQ ID NO: 73918 - DNA, 25 bp, Canis familiaris
ctcctatcttaccttttgcacagat

SEQ ID NO: 73919 - DNA, 25 bp, Canis familiaris
ctgccttcgttccgtgtagattgat

SEQ ID NO: 73920 - DNA, 25 bp, Canis familiaris
ctccatgcctgttaacgtggttcat

SEQ ID NO: 73921 - DNA, 25 bp, Canis familiaris
ctcccctgcattatggctgcatttt

SEQ ID NO: 73922 - DNA, 25 bp, Canis familiaris
ctgactcctgttttggtcatacctc

SEQ ID NO: 73923 - DNA, 25 bp, Canis familiaris
ctcctcctatgtgtggtatcagttc

SEQ ID NO: 73924 - DNA, 25 bp, Canis familiaris
ctgcctgcctatgtgggtggagtct

SEQ ID NO: 73925 - DNA, 25 bp, Canis familiaris
ctgctctggctacaggcttgaggcg

SEQ ID NO: 73926 - DNA, 25 bp, Canis familiaris
ctccgtgcaaggagcctgatgcggg

SEQ ID NO: 73927 - DNA, 25 bp, Canis familiaris
ctccgtgcacttggtgctcagattg

SEQ ID NO: 73928 - DNA, 25 bp, Canis familiaris
ctcctggatcgctgtccatgattag

SEQ ID NO: 73929 - DNA, 25 bp, Canis familiaris
ctcctggataccatcagctgcttga

SEQ ID NO: 73930 - DNA, 25 bp, Canis familiaris
ctcctggacctcacagttctgtgaa

SEQ ID NO: 73931 - DNA, 25 bp, Canis familiaris
cccaaacctttgcacacgtgaactc

SEQ ID NO: 73932 - DNA, 25 bp, Canis familiaris
cccaaagctctgtggaccggctttt

SEQ ID NO: 73933 - DNA, 25 bp, Canis familiaris
cccagacttcaataaaacgtgcttt

SEQ ID NO: 73934 - DNA, 25 bp, Canis familiaris
cccagacttcaataaaacgtgcttt

SEQ ID NO: 73935 - DNA, 25 bp, Canis familiaris
ctccaacaacaatcaacttcgtcat

SEQ ID NO: 73936 - DNA, 25 bp, Canis familiaris
ctccatcaaaggtttacggcaatat

SEQ ID NO: 73937 - DNA, 25 bp, Canis familiaris
ctcctcaactgtgtctgcgggaatg

SEQ ID NO: 73938 - DNA, 25 bp, Canis familiaris
ctccagcaacgggccctgggatagt

SEQ ID NO: 73939 - DNA, 25 bp, Canis familiaris
ctccagaatgagtccccagagcaca

SEQ ID NO: 73940 - DNA, 25 bp, Canis familiaris
ctccgaggcaaccacgcaagaagat

SEQ ID NO: 73941 - DNA, 25 bp, Canis familiaris
ctccaggtgcacgtacggtgggttc

SEQ ID NO: 73942 - DNA, 25 bp, Canis familiaris
ctccagttcccttcagaggggctgg

SEQ ID NO: 73943 - DNA, 25 bp, Canis familiaris
ctccttccccataagggttgctggg

SEQ ID NO: 73944 - DNA, 25 bp, Canis familiaris
ctcctcccacctctgtgtggtgggg

SEQ ID NO: 73945 - DNA, 25 bp, Canis familiaris
ctcctgccctttctggggatgatgg

SEQ ID NO: 73946 - DNA, 25 bp, Canis familiaris
ctccccaggtctctgaggctgaaag

SEQ ID NO: 73947 - DNA, 25 bp, Canis familiaris
ctccgcgaggctgttgcagcaggaa

SEQ ID NO: 73948 - DNA, 25 bp, Canis familiaris
ctcctgctgcaggtctgcggcaggg

SEQ ID NO: 73949 - DNA, 25 bp, Canis familiaris
ctcctgtgcatggtaccgcggagca

SEQ ID NO: 73950 - DNA, 25 bp, Canis familiaris
ctccgtatcaatccctgcggacaag

SEQ ID NO: 73951 - DNA, 25 bp, Canis familiaris
ctcctgccacactctgtggctacaa

SEQ ID NO: 73952 - DNA, 25 bp, Canis familiaris
ctccccaagccctgagtgagcagaa

SEQ ID NO: 73953 - DNA, 25 bp, Canis familiaris
ctccccagagacgctgaggaggtgg

SEQ ID NO: 73954 - DNA, 25 bp, Canis familiaris
ctccccatgtgaccactgagtgtgc

SEQ ID NO: 73955 - DNA, 25 bp, Canis familiaris
ctgctaccagtatcctggatatcgc

SEQ ID NO: 73956 - DNA, 25 bp, Canis familiaris
ctccagctggtttcagggacatcct

SEQ ID NO: 73957 - DNA, 25 bp, Canis familiaris
ctccgtggcttgttggggatttaag

SEQ ID NO: 73958 - DNA, 25 bp, Canis familiaris
ctccgtttacagcagggtttgaagc

SEQ ID NO: 73959 - DNA, 25 bp, Canis familiaris
ctccacacccaacatgggccttgaa

SEQ ID NO: 73960 - DNA, 25 bp, Canis familiaris
ctccactccgaacattcactgttga

SEQ ID NO: 73961 - DNA, 25 bp, Canis familiaris
ctgccaccacgataagctacgtcac

SEQ ID NO: 73962 - DNA, 25 bp, Canis familiaris
ctgccacaaagacactgctacggaa

SEQ ID NO: 73963 - DNA, 25 bp, Canis familiaris
ctccccaagtggcccaagtggaacg

SEQ ID NO: 73964 - DNA, 25 bp, Canis familiaris
ctccccacgaccctagaatggaaca

SEQ ID NO: 73965 - DNA, 25 bp, Canis familiaris
ccccccggatcgcagtatggaaaat

SEQ ID NO: 73966 - DNA, 25 bp, Canis familiaris
ctccccagcccagggtgtagaacaa

SEQ ID NO: 73967 - DNA, 25 bp, Canis familiaris
ctcctaagcctctggctgtcaggtg

SEQ ID NO: 73968 - DNA, 25 bp, Canis familiaris
ctcctcaagcatccggtgtggtagt

SEQ ID NO: 73969 - DNA, 25 bp, Canis familiaris
ctcctgcacagctcctgtgtggata

SEQ ID NO: 73970 - DNA, 25 bp, Canis familiaris
ctcctcacagttgccatgtagaccc

SEQ ID NO: 73971 - DNA, 25 bp, Canis familiaris
ctcctccgttgaggtcattatcccc

SEQ ID NO: 73972 - DNA, 25 bp, Canis familiaris
ctcctgtacttggtgacaaacccca

SEQ ID NO: 73973 - DNA, 25 bp, Canis familiaris
ctccattccctgactgaattacatc

SEQ ID NO: 73974 - DNA, 25 bp, Canis familiaris
ctccattcacttcctatttacaaat

SEQ ID NO: 73975 - DNA, 25 bp, Canis familiaris
ctgccttccatgattccttaaaatc

SEQ ID NO: 73976 - DNA, 25 bp, Canis familiaris
ctcctccctagtacctacagagatg

SEQ ID NO: 73977 - DNA, 25 bp, Canis familiaris
ctcctcatgactcttgtaaccagtg

SEQ ID NO: 73978 - DNA, 25 bp, Canis familiaris
ctcctcactgctgtagtaacctggg

SEQ ID NO: 73979 - DNA, 25 bp, Canis familiaris
ctcctcactggagactacaagtggt

SEQ ID NO: 73980 - DNA, 25 bp, Canis familiaris
ctccatcctgaagacttgacacctt

SEQ ID NO: 73981 - DNA, 25 bp, Canis familiaris
ctgcccctggagaagtgtaacctca

SEQ ID NO: 73982 - DNA, 25 bp, Canis familiaris
ctccgggtctgtttgttactccaga

SEQ ID NO: 73983 - DNA, 25 bp, Canis familiaris
ctcctggtgtctctttttctaatga

SEQ ID NO: 73984 - DNA, 25 bp, Canis familiaris
ctccttttgctcttgttttgctatt

SEQ ID NO: 73985 - DNA, 25 bp, Canis familiaris
ctcctgcttccttgttttttatcag

SEQ ID NO: 73986 - DNA, 25 bp, Canis familiaris
ctcctgctccttttggttgaacaag

SEQ ID NO: 73987 - DNA, 25 bp, Canis familiaris
ctcctctccaggtatctgatcgaac

SEQ ID NO: 73988 - DNA, 25 bp, Canis familiaris
ctccattctgggtatagagcctaca

SEQ ID NO: 73989 - DNA, 25 bp, Canis familiaris
ctccatccctggtctatatgttata

SEQ ID NO: 73990 - DNA, 25 bp, Canis familiaris
ctccatccagcactgagtcatcgtt

SEQ ID NO: 73991 - DNA, 25 bp, Canis familiaris
ctccatgctgccagagtcaagtggg

SEQ ID NO: 73992 - DNA, 25 bp, Canis familiaris
ctccatctgcactgagccatgggga

SEQ ID NO: 73993 - DNA, 25 bp, Canis familiaris
ctcctgcacacacacctgggtgtgt

SEQ ID NO: 73994 - DNA, 25 bp, Canis familiaris
ctcctgatgccagtccttaggtttt

SEQ ID NO: 73995 - DNA, 25 bp, Canis familiaris
ctgccctcacagagcttatggtctc

SEQ ID NO: 73996 - DNA, 25 bp, Canis familiaris
ctgccctcacagagatgtctttcta

SEQ ID NO: 73997 - DNA, 25 bp, Canis familiaris
ctccagctctcacctggtttatgca

SEQ ID NO: 73998 - DNA, 25 bp, Canis familiaris
ctccagcttatgctatgagctttag

SEQ ID NO: 73999 - DNA, 25 bp, Canis familiaris
ctccactcaatccaagcagctagta

SEQ ID NO: 74000 - DNA, 25 bp, Canis familiaris
ctccattcttaccaccatgttaact

SEQ ID NO: 74001 - DNA, 25 bp, Canis familiaris
ctcctacattcccaccatgatagaa

SEQ ID NO: 74002 - DNA, 25 bp, Canis familiaris
ctcctaatacagccccatcgagtaa

SEQ ID NO: 74003 - DNA, 25 bp, Canis familiaris
ctcctgaggaagcccacttggtaat

SEQ ID NO: 74004 - DNA, 25 bp, Canis familiaris
ctcctgagcgcaagtactctgtgtg

SEQ ID NO: 74005 - DNA, 25 bp, Canis familiaris
ctccagagtgggtgctctggctccc

SEQ ID NO: 74006 - DNA, 25 bp, Canis familiaris
ctccgagggagatgctgctgctgac

SEQ ID NO: 74007 - DNA, 25 bp, Canis familiaris
ctgccgggtggtggtgctgaacggc

SEQ ID NO: 74008 - DNA, 25 bp, Canis familiaris
ctgccgtgccggtagttgtacagga

SEQ ID NO: 74009 - DNA, 25 bp, Canis familiaris
ctgcggtgcctgcttgtatgtattg

SEQ ID NO: 74010 - DNA, 25 bp, Canis familiaris
ctgccttgccagccttgcaagtgca

SEQ ID NO: 74011 - DNA, 25 bp, Canis familiaris
ctgcccgccatggctgaactagatc

SEQ ID NO: 74012 - DNA, 25 bp, Canis familiaris
ctccgcaggctctgtactatgatga

SEQ ID NO: 74013 - DNA, 25 bp, Canis familiaris
ctccaaactctaaactatgaggttt

SEQ ID NO: 74014 - DNA, 25 bp, Canis familiaris
ctccaaacacttcactctactattg

SEQ ID NO: 74015 - DNA, 25 bp, Canis familiaris
ccccaaccgtgaggcctacataaat

SEQ ID NO: 74016 - DNA, 25 bp, Canis familiaris
ccgcgcatacccggggtcaataaat

SEQ ID NO: 74017 - DNA, 25 bp, Canis familiaris
cccctaccccggaatgacaaatcag

SEQ ID NO: 74018 - DNA, 25 bp, Canis familiaris
ctcctcttaccctgtggataatgac

SEQ ID NO: 74019 - DNA, 25 bp, Canis familiaris
ctcctctgtacctgggaaatctcag

SEQ ID NO: 74020 - DNA, 25 bp, Canis familiaris
ctcctcgctttctcacgaatatgtc

SEQ ID NO: 74021 - DNA, 25 bp, Canis familiaris
ctcctgcactttgccacaggcatgg

SEQ ID NO: 74022 - DNA, 25 bp, Canis familiaris
ctccagcccttctcagcaggagggc

SEQ ID NO: 74023 - DNA, 25 bp, Canis familiaris
ctccagcccttctcagcaggagggc

SEQ ID NO: 74024 - DNA, 25 bp, Canis familiaris
ctcctgaccccaggcaaggagggcc

SEQ ID NO: 74025 - DNA, 25 bp, Canis familiaris
ctcctgagccccgggaggaggtggg

SEQ ID NO: 74026 - DNA, 25 bp, Canis familiaris
ctcctccaccccagagaggctatag

SEQ ID NO: 74027 - DNA, 25 bp, Canis familiaris
ctcctacacgcgcatcaagaggcca

SEQ ID NO: 74028 - DNA, 25 bp, Canis familiaris
ctcctgtcctggccaagatggctgc

SEQ ID NO: 74029 - DNA, 25 bp, Canis familiaris
ctcctgtccatgtgaaggtgtggag

SEQ ID NO: 74030 - DNA, 25 bp, Canis familiaris
ctcctgtccatgtgaaggtgtggag

SEQ ID NO: 74031 - DNA, 25 bp, Canis familiaris
ctccattccagactgactgcgtgta

SEQ ID NO: 74032 - DNA, 25 bp, Canis familiaris
ctccttaagaggtctgtgttgcaat

SEQ ID NO: 74033 - DNA, 25 bp, Canis familiaris
ctgcctttgaggtttgtcttagaga

SEQ ID NO: 74034 - DNA, 25 bp, Canis familiaris
ctccttgggcagttgttctcaaacc

SEQ ID NO: 74035 - DNA, 25 bp, Canis familiaris
ctccttggtctgttgtgttcatata

SEQ ID NO: 74036 - DNA, 25 bp, Canis familiaris
ctccttgggtcattgtgcttatgat

SEQ ID NO: 74037 - DNA, 25 bp, Canis familiaris
ctccatttggcctttcatgactata

SEQ ID NO: 74038 - DNA, 25 bp, Canis familiaris
ctcctcttgactgcttatagtaaat

SEQ ID NO: 74039 - DNA, 25 bp, Canis familiaris
ctgccaatttcagctttaggaatac

SEQ ID NO: 74040 - DNA, 25 bp, Canis familiaris
ctcctgcatttcactactcgagttc

SEQ ID NO: 74041 - DNA, 25 bp, Canis familiaris
ctcctgctctccaaaacactgagtc

SEQ ID NO: 74042 - DNA, 25 bp, Canis familiaris
ctccggctccacaagagcaggtgcc

SEQ ID NO: 74043 - DNA, 25 bp, Canis familiaris
ctccggctaagcaagctgcagcagg

SEQ ID NO: 74044 - DNA, 25 bp, Canis familiaris
ctcctcgtccagcaccagaggattc

SEQ ID NO: 74045 - DNA, 25 bp, Canis familiaris
ctcctcctccaggacacagatgtaa

SEQ ID NO: 74046 - DNA, 25 bp, Canis familiaris
ctcctcggccacgcaagatataaca

SEQ ID NO: 74047 - DNA, 25 bp, Canis familiaris
ctcctcgacgaagcacaacttacag

SEQ ID NO: 74048 - DNA, 25 bp, Canis familiaris
ctccagctgtggccaccacatagtt

SEQ ID NO: 74049 - DNA, 25 bp, Canis familiaris
ctccagctgtggccaccacatagtt

SEQ ID NO: 74050 - DNA, 25 bp, Canis familiaris
ctccagcggaggtcacaagtcttcg

SEQ ID NO: 74051 - DNA, 25 bp, Canis familiaris
ctccagccagtttacaagccgttgg

SEQ ID NO: 74052 - DNA, 25 bp, Canis familiaris
cgtcagtcggttactactctgtcgt

SEQ ID NO: 74053 - DNA, 25 bp, Canis familiaris
cgtcgtgagtgaaaccacctgcggc

SEQ ID NO: 74054 - DNA, 25 bp, Canis familiaris
ctcctgtggtcaacccacgtggagg

SEQ ID NO: 74055 - DNA, 25 bp, Canis familiaris
ctcctgggtcacaatcctctcagga

SEQ ID NO: 74056 - DNA, 25 bp, Canis familiaris
ctccttggcagcagatgcccttgaa

SEQ ID NO: 74057 - DNA, 25 bp, Canis familiaris
ctcctggtgagcaactgcccagtga

SEQ ID NO: 74058 - DNA, 25 bp, Canis familiaris
ctcctgggatcaccagcacacaggg

SEQ ID NO: 74059 - DNA, 25 bp, Canis familiaris
ctgccagggcttctgccaagggaaa

SEQ ID NO: 74060 - DNA, 25 bp, Canis familiaris
ctgccttgtctacatctgaaaaaaa

SEQ ID NO: 74061 - DNA, 25 bp, Canis familiaris
ctgcttcctccagacgaaaactaca

SEQ ID NO: 74062 - DNA, 25 bp, Canis familiaris
ctggtcctgtaccacgaaacacttt

SEQ ID NO: 74063 - DNA, 25 bp, Canis familiaris
cgttctctgtaccacgtagatcacg

SEQ ID NO: 74064 - DNA, 25 bp, Canis familiaris
cgtccttttcccacagatacaagtc

SEQ ID NO: 74065 - DNA, 25 bp, Canis familiaris
ctccttttggccactttacaagtct

SEQ ID NO: 74066 - DNA, 25 bp, Canis familiaris
ctcctggtgtgacctcggttacaag

SEQ ID NO: 74067 - DNA, 25 bp, Canis familiaris
ctccggattgagggggcttgtcata

SEQ ID NO: 74068 - DNA, 25 bp, Canis familiaris
ctcctggttgtgtggtcttggcaga

SEQ ID NO: 74069 - DNA, 25 bp, Canis familiaris
ctgcctgcgtatcttggtttgtggg

SEQ ID NO: 74070 - DNA, 25 bp, Canis familiaris
ctcctcctatgttctcagtatttgg

SEQ ID NO: 74071 - DNA, 25 bp, Canis familiaris
ctcctcctgagcgcaagtactctgt

SEQ ID NO: 74072 - DNA, 25 bp, Canis familiaris
ctccacgcgcgcgaacggaattgct

SEQ ID NO: 74073 - DNA, 25 bp, Canis familiaris
ctcctcagcccaaacttggttcttg

SEQ ID NO: 74074 - DNA, 25 bp, Canis familiaris
ctgcctagaactattgggtctcagt

SEQ ID NO: 74075 - DNA, 25 bp, Canis familiaris
ctcctcaaagttgtctggtctctgc

SEQ ID NO: 74076 - DNA, 25 bp, Canis familiaris
ctgcctgtaattccagtttttctga

SEQ ID NO: 74077 - DNA, 25 bp, Canis familiaris
ctccttaaccaactgctctggactg

SEQ ID NO: 74078 - DNA, 25 bp, Canis familiaris
ctccttccagctgttttgtgactga

SEQ ID NO: 74079 - DNA, 25 bp, Canis familiaris
ctccttccgaggttttggcatcagt

SEQ ID NO: 74080 - DNA, 25 bp, Canis familiaris
ctcctttccagggtgtgtgtgacag

SEQ ID NO: 74081 - DNA, 25 bp, Canis familiaris
ctgcgtttccaagagatgtggccag

SEQ ID NO: 74082 - DNA, 25 bp, Canis familiaris
ctgctacttcccagggtgagaaaag

SEQ ID NO: 74083 - DNA, 25 bp, Canis familiaris
ctgcgggagttctgggtggacaaca

SEQ ID NO: 74084 - DNA, 25 bp, Canis familiaris
ctgcgggagatgacagctgcggctg

SEQ ID NO: 74085 - DNA, 25 bp, Canis familiaris
ctcctggatgacagctctgctgctg

SEQ ID NO: 74086 - DNA, 25 bp, Canis familiaris
ctccagcctgacacattgcactgaa

SEQ ID NO: 74087 - DNA, 25 bp, Canis familiaris
ctccagccggttgctgagctgagca

SEQ ID NO: 74088 - DNA, 25 bp, Canis familiaris
ctcctccggcttctcactggaggat

SEQ ID NO: 74089 - DNA, 25 bp, Canis familiaris
ctgcctcccggtttcagtgaagtaa

SEQ ID NO: 74090 - DNA, 25 bp, Canis familiaris
ctgcccccaggtttctgaagagtta

SEQ ID NO: 74091 - DNA, 25 bp, Canis familiaris
ctcctcccaaattctctgacaggta

SEQ ID NO: 74092 - DNA, 25 bp, Canis familiaris
ctcctccgaatttccatgactgaaa

SEQ ID NO: 74093 - DNA, 25 bp, Canis familiaris
ctccatctcggcttatgccagacta

SEQ ID NO: 74094 - DNA, 25 bp, Canis familiaris
ctccatctctgtcaagccatgtaac

SEQ ID NO: 74095 - DNA, 25 bp, Canis familiaris
ctccttcagtcctgcgcatatagac

SEQ ID NO: 74096 - DNA, 25 bp, Canis familiaris
ctcctgccagctgcaacacaataac

SEQ ID NO: 74097 - DNA, 25 bp, Canis familiaris
ctcctgccaccttcaataaagacct

SEQ ID NO: 74098 - DNA, 25 bp, Canis familiaris
ctcctccctgcctgaataaagtcat

SEQ ID NO: 74099 - DNA, 25 bp, Canis familiaris
ctcctcccgctggtaataaaatctg

SEQ ID NO: 74100 - DNA, 25 bp, Canis familiaris
ctcctcccgctaacagatcaaaaaa

SEQ ID NO: 74101 - DNA, 25 bp, Canis familiaris
ctccataccctaatcctgaatttca

SEQ ID NO: 74102 - DNA, 25 bp, Canis familiaris
ctccaaccattaatcttattcggag

SEQ ID NO: 74103 - DNA, 25 bp, Canis familiaris
ctccattcctttgttattgcgcgaa

SEQ ID NO: 74104 - DNA, 25 bp, Canis familiaris
ctgccttccttgttgttttgtgaaa

SEQ ID NO: 74105 - DNA, 25 bp, Canis familiaris
ctcctgtccttgaggcccaggaaga

SEQ ID NO: 74106 - DNA, 25 bp, Canis familiaris
ctcctgcccctggggccaaggacag

SEQ ID NO: 74107 - DNA, 25 bp, Canis familiaris
ctcctgggcctgcggacagatgaat

SEQ ID NO: 74108 - DNA, 25 bp, Canis familiaris
ctcctcggctagtgcgacatggttt

SEQ ID NO: 74109 - DNA, 25 bp, Canis familiaris
ctcctcgtgaagacgccacatgagt

SEQ ID NO: 74110 - DNA, 25 bp, Canis familiaris
ctcctcgataagacctcacatgttc

SEQ ID NO: 74111 - DNA, 25 bp, Canis familiaris
ctgccttgtacacactgctgtgtcc

SEQ ID NO: 74112 - DNA, 25 bp, Canis familiaris
ctcctttagccctgatgatttcttt

SEQ ID NO: 74113 - DNA, 25 bp, Canis familiaris
ctcctttaggccttttggatgcttg

SEQ ID NO: 74114 - DNA, 25 bp, Canis familiaris
ctccttctgagagcccttggaggct

SEQ ID NO: 74115 - DNA, 25 bp, Canis familiaris
ctcctgttctgtcaccttggaggca

SEQ ID NO: 74116 - DNA, 25 bp, Canis familiaris
ctccttttggcacccattggaatgg

SEQ ID NO: 74117 - DNA, 25 bp, Canis familiaris
ctcctctgggcctaccattgaagag

SEQ ID NO: 74118 - DNA, 25 bp, Canis familiaris
ctcctctctacctgcttgtgagaga

SEQ ID NO: 74119 - DNA, 25 bp, Canis familiaris
ctcctcagccacctggtgtgtgaga

SEQ ID NO: 74120 - DNA, 25 bp, Canis familiaris
ctcctgcacctgcgtgtggtggata

SEQ ID NO: 74121 - DNA, 25 bp, Canis familiaris
ctcctcagcctcaggggcaggaagc

SEQ ID NO: 74122 - DNA, 25 bp, Canis familiaris
ctcctcacagccagcgtcaaggaag

SEQ ID NO: 74123 - DNA, 25 bp, Canis familiaris
ctcctgccactagggtcagaggtgg

SEQ ID NO: 74124 - DNA, 25 bp, Canis familiaris
ctcctgccctgctgtgtatagatgg

SEQ ID NO: 74125 - DNA, 25 bp, Canis familiaris
ctcctccctgtgctgagagagtgga

SEQ ID NO: 74126 - DNA, 25 bp, Canis familiaris
ctccattttctgcccagaagctggg

SEQ ID NO: 74127 - DNA, 25 bp, Canis familiaris
ctccttctgtctactttagtgcgtg

SEQ ID NO: 74128 - DNA, 25 bp, Canis familiaris
ctccttattctggctgttccatggg

SEQ ID NO: 74129 - DNA, 25 bp, Canis familiaris
ctccttagatctgttcctcacgagc

SEQ ID NO: 74130 - DNA, 25 bp, Canis familiaris
ctccttcaacaccttcttcagtgag

SEQ ID NO: 74131 - DNA, 25 bp, Canis familiaris
ctccttcaacaccttcttcagtgag

SEQ ID NO: 74132 - DNA, 25 bp, Canis familiaris
ctccttcaacaccttcttcagtgag

SEQ ID NO: 74133 - DNA, 25 bp, Canis familiaris
ctccttcaacaccttcttcagtgag

SEQ ID NO: 74134 - DNA, 25 bp, Canis familiaris
ctgccatgtaatccgtatcaacaag

SEQ ID NO: 74135 - DNA, 25 bp, Canis familiaris
ctgccgtattgggccacaagacatg

SEQ ID NO: 74136 - DNA, 25 bp, Canis familiaris
ctgccagaattgttcccatgaatgc

SEQ ID NO: 74137 - DNA, 25 bp, Canis familiaris
ctccagccactgagcagctagaatg

SEQ ID NO: 74138 - DNA, 25 bp, Canis familiaris
ctccaccacgtcagcgatgaagttg

SEQ ID NO: 74139 - DNA, 25 bp, Canis familiaris
ctccttatcctcagctagaatcttc

SEQ ID NO: 74140 - DNA, 25 bp, Canis familiaris
ctcctcctcttgagtacaatcttct

SEQ ID NO: 74141 - DNA, 25 bp, Canis familiaris
ctccacccttattgtccatgtgttt

SEQ ID NO: 74142 - DNA, 25 bp, Canis familiaris
ctccaggctttctgtagatgtgctt

SEQ ID NO: 74143 - DNA, 25 bp, Canis familiaris
ctgctaagtctgtcagggggtgtta

SEQ ID NO: 74144 - DNA, 25 bp, Canis familiaris
ctgccaaggctgtgggcaaggtcat

SEQ ID NO: 74145 - DNA, 25 bp, Canis familiaris
ctgccaaggctgtgggcaaggtcat

SEQ ID NO: 74146 - DNA, 25 bp, Canis familiaris
ctgctaaatgcaccgaggaaggaaa

SEQ ID NO: 74147 - DNA, 25 bp, Canis familiaris
ctgccaaatcaccccttgaggaaag

SEQ ID NO: 74148 - DNA, 25 bp, Canis familiaris
ctccatgaactctgctcttgggaag

SEQ ID NO: 74149 - DNA, 25 bp, Canis familiaris
ctccacaatctctgctttctgaaga

SEQ ID NO: 74150 - DNA, 25 bp, Canis familiaris
ctgcaacagcttccggtactgaaga

SEQ ID NO: 74151 - DNA, 25 bp, Canis familiaris
ctgccacattcacggtgtacgaata

SEQ ID NO: 74152 - DNA, 25 bp, Canis familiaris
ctgccacttcagcttggaaacttat

SEQ ID NO: 74153 - DNA, 25 bp, Canis familiaris
ctcctcagctccttgggaaacatct

SEQ ID NO: 74154 - DNA, 25 bp, Canis familiaris
ctcctcgctctttgagcggacctgt

SEQ ID NO: 74155 - DNA, 25 bp, Canis familiaris
ctgcgccagcttgtgaaggaccgcc

SEQ ID NO: 74156 - DNA, 25 bp, Canis familiaris
ctgcccctgtgcatcaagggagccc

SEQ ID NO: 74157 - DNA, 25 bp, Canis familiaris
ctgctggcttgtattgagtggactg

SEQ ID NO: 74158 - DNA, 25 bp, Canis familiaris
ctgctagattggttttggagacata

SEQ ID NO: 74159 - DNA, 25 bp, Canis familiaris
ctgcccttggccattggtggctaat

SEQ ID NO: 74160 - DNA, 25 bp, Canis familiaris
ctccacctgctcgttgggggtgaac

SEQ ID NO: 74161 - DNA, 25 bp, Canis familiaris
ctccacctgctcgttgggggtgaac

SEQ ID NO: 74162 - DNA, 25 bp, Canis familiaris
ctccacctgctcgttgggggtgaac

SEQ ID NO: 74163 - DNA, 25 bp, Canis familiaris
ctgccccttcacagtggagttggaa

SEQ ID NO: 74164 - DNA, 25 bp, Canis familiaris
ctccagccttcatcttgggtttgat

SEQ ID NO: 74165 - DNA, 25 bp, Canis familiaris
ctccatggtgttttatggcagttta

SEQ ID NO: 74166 - DNA, 25 bp, Canis familiaris
ctcctcctggtctttccagtttaga

SEQ ID NO: 74167 - DNA, 25 bp, Canis familiaris
ctgccctttttttcaattattcaca

SEQ ID NO: 74168 - DNA, 25 bp, Canis familiaris
ctgccctttttttcagttcatagga

SEQ ID NO: 74169 - DNA, 25 bp, Canis familiaris
ctgccttactttttcgctttatgga

SEQ ID NO: 74170 - DNA, 25 bp, Canis familiaris
ctgtttagaccgtctcccattaagg

SEQ ID NO: 74171 - DNA, 25 bp, Canis familiaris
ctgtcatcagaatctgtcggccaaa

SEQ ID NO: 74172 - DNA, 25 bp, Canis familiaris
ctgcccgtatgtggtcatggccaga

SEQ ID NO: 74173 - DNA, 25 bp, Canis familiaris
ctcctctgttgtctcatgagcacac

SEQ ID NO: 74174 - DNA, 25 bp, Canis familiaris
ctcctctgtgagacctcagaccaga

SEQ ID NO: 74175 - DNA, 25 bp, Canis familiaris
ctcctaggaagcctatgccgcgagc

SEQ ID NO: 74176 - DNA, 25 bp, Canis familiaris
ctcctcggtacgagccagtggctga

SEQ ID NO: 74177 - DNA, 25 bp, Canis familiaris
ctcctagcttccaacgacagtggcg

SEQ ID NO: 74178 - DNA, 25 bp, Canis familiaris
ctcctgccttccagaagatgcttcg

SEQ ID NO: 74179 - DNA, 25 bp, Canis familiaris
ctcctgccttctagagagacctggg

SEQ ID NO: 74180 - DNA, 25 bp, Canis familiaris
ctccttcctctaagacagtctggga

SEQ ID NO: 74181 - DNA, 25 bp, Canis familiaris
ctcctttcttacaacgggaacacag

SEQ ID NO: 74182 - DNA, 25 bp, Canis familiaris
cgccgcttttactctgggagtgaag

SEQ ID NO: 74183 - DNA, 25 bp, Canis familiaris
ctgcccaatttatttgctgcgggta

SEQ ID NO: 74184 - DNA, 25 bp, Canis familiaris
ctgcccaatgccacgatgctgaggg

SEQ ID NO: 74185 - DNA, 25 bp, Canis familiaris
ctccatggagccacgtctgcaggag

SEQ ID NO: 74186 - DNA, 25 bp, Canis familiaris
ctcctctggctgagctatctcagga

SEQ ID NO: 74187 - DNA, 25 bp, Canis familiaris
ctccttggcttctttccagaaatgt

SEQ ID NO: 74188 - DNA, 25 bp, Canis familiaris
ctcctctgacttgtgcccagagact

SEQ ID NO: 74189 - DNA, 25 bp, Canis familiaris
ctcctctgctttggggctcagcaga

SEQ ID NO: 74190 - DNA, 25 bp, Canis familiaris
ctcctccctgtgttggccaagaggt

SEQ ID NO: 74191 - DNA, 25 bp, Canis familiaris
ctccagcccttgtgatccagaagag

SEQ ID NO: 74192 - DNA, 25 bp, Canis familiaris
ctccatcccttaagtgtcaccagag

SEQ ID NO: 74193 - DNA, 25 bp, Canis familiaris
ctccagcctttgaagtgcacacaca

SEQ ID NO: 74194 - DNA, 25 bp, Canis familiaris
ctccaccgctagagtgcaagctgca

SEQ ID NO: 74195 - DNA, 25 bp, Canis familiaris
ctcctccgtcagacctggtgatgaa

SEQ ID NO: 74196 - DNA, 25 bp, Canis familiaris
ctccatcacgtattagctgtgtggc

SEQ ID NO: 74197 - DNA, 25 bp, Canis familiaris
ctcctcactcgatcctgatgggtga

SEQ ID NO: 74198 - DNA, 25 bp, Canis familiaris
ctccacagcatcaaccctgggagtg

SEQ ID NO: 74199 - DNA, 25 bp, Canis familiaris
ctccatggctcccatcgtgggagcg

SEQ ID NO: 74200 - DNA, 25 bp, Canis familiaris
ctccatcgagtccatcgagctgtag

SEQ ID NO: 74201 - DNA, 25 bp, Canis familiaris
ctccacgatgtgcaggtggtcgtcg

SEQ ID NO: 74202 - DNA, 25 bp, Canis familiaris
ctccaggcatccctggggtcttggg

SEQ ID NO: 74203 - DNA, 25 bp, Canis familiaris
ctccagggccgtggggtcgaggagg

SEQ ID NO: 74204 - DNA, 25 bp, Canis familiaris
ctgcctgggggtgactgacgatggg

SEQ ID NO: 74205 - DNA, 25 bp, Canis familiaris
ctccagcctgggcgacagagcgaga

SEQ ID NO: 74206 - DNA, 25 bp, Canis familiaris
ctccacacgggccttcagagaggcc

SEQ ID NO: 74207 - DNA, 25 bp, Canis familiaris
ctccacggagtgctaaagacgccca

SEQ ID NO: 74208 - DNA, 25 bp, Canis familiaris
ctgacctgccgtctagaaaaacctg

SEQ ID NO: 74209 - DNA, 25 bp, Canis familiaris
ctgccgcccagacttcaataaaacg

SEQ ID NO: 74210 - DNA, 25 bp, Canis familiaris
ctgccgcccagacttcaataaaacg

SEQ ID NO: 74211 - DNA, 25 bp, Canis familiaris
ctgcctgccaaacctagaaactatg

SEQ ID NO: 74212 - DNA, 25 bp, Canis familiaris
ctccagcacccgctttatatttggg

SEQ ID NO: 74213 - DNA, 25 bp, Canis familiaris
ctccaggccacgtatgtttgttttg

SEQ ID NO: 74214 - DNA, 25 bp, Canis familiaris
ctccttcccgtaacagtcagatttg

SEQ ID NO: 74215 - DNA, 25 bp, Canis familiaris
ctgccttcgaagaactcaatcgatt

SEQ ID NO: 74216 - DNA, 25 bp, Canis familiaris
ctgcacaaccaacactcacagggag

SEQ ID NO: 74217 - DNA, 25 bp, Canis familiaris
ctgcacaggtcatctacccatgaca

SEQ ID NO: 74218 - DNA, 25 bp, Canis familiaris
ctgcaagttgaagaccaatccaacc

SEQ ID NO: 74219 - DNA, 25 bp, Canis familiaris
ctgcgcggtgcaaggaccaagtcaa

SEQ ID NO: 74220 - DNA, 25 bp, Canis familiaris
ctgctggcagttatcgccaagctct

SEQ ID NO: 74221 - DNA, 25 bp, Canis familiaris
ctgctgtagctgttccttaacacca

SEQ ID NO: 74222 - DNA, 25 bp, Canis familiaris
ctcctatgtgttcagttcacccatg

SEQ ID NO: 74223 - DNA, 25 bp, Canis familiaris
ctgccaatggtttagttccagtcta

SEQ ID NO: 74224 - DNA, 25 bp, Canis familiaris
ctccaaggttctgtgtctagtgtgg

SEQ ID NO: 74225 - DNA, 25 bp, Canis familiaris
ctccacagggatacaggttgacttg

SEQ ID NO: 74226 - DNA, 25 bp, Canis familiaris
ctccacatgggcttcttgtttgatt

SEQ ID NO: 74227 - DNA, 25 bp, Canis familiaris
ctccacatcctgtccattatttgtt

SEQ ID NO: 74228 - DNA, 25 bp, Canis familiaris
ctccacttctactgctattatgtta

SEQ ID NO: 74229 - DNA, 25 bp, Canis familiaris
ctgccctttgtagctgaatgtctta

SEQ ID NO: 74230 - DNA, 25 bp, Canis familiaris
ctgctcagcggggagcctatttctt

SEQ ID NO: 74231 - DNA, 25 bp, Canis familiaris
ctgcccgcagacgagttgattttgt

SEQ ID NO: 74232 - DNA, 25 bp, Canis familiaris
ctgcccctatcgactttcgatggta

SEQ ID NO: 74233 - DNA, 25 bp, Canis familiaris
ctgccttgcagtgacttccgaagga

SEQ ID NO: 74234 - DNA, 25 bp, Canis familiaris
ctccatcttgtaagttccccaggaa

SEQ ID NO: 74235 - DNA, 25 bp, Canis familiaris
ctccttctgtaacttacctaaacag

SEQ ID NO: 74236 - DNA, 25 bp, Canis familiaris
ctccttcgtcattcaatcactttaa

SEQ ID NO: 74237 - DNA, 25 bp, Canis familiaris
ctcctatcagctaaacccttattgc

SEQ ID NO: 74238 - DNA, 25 bp, Canis familiaris
ccctaaataaactccatgcttgccc

SEQ ID NO: 74239 - DNA, 25 bp, Canis familiaris
ctcctagtaaaagtccgcagctgtg

SEQ ID NO: 74240 - DNA, 25 bp, Canis familiaris
ctgggcttaaaattcgctgagcttg

SEQ ID NO: 74241 - DNA, 25 bp, Canis familiaris
cgactttaactaccctagcttagat

SEQ ID NO: 74242 - DNA, 25 bp, Canis familiaris
ctcctttgattttctcctggttata

SEQ ID NO: 74243 - DNA, 25 bp, Canis familiaris
ctccacatctgtgtcacactcgtgg

SEQ ID NO: 74244 - DNA, 25 bp, Canis familiaris
ctgcccatcgcatcttaacatgtag

SEQ ID NO: 74245 - DNA, 25 bp, Canis familiaris
ctgccacatctaacctttcatcaga

SEQ ID NO: 74246 - DNA, 25 bp, Canis familiaris
ctcctctgctatgcattttcttcac

SEQ ID NO: 74247 - DNA, 25 bp, Canis familiaris
ctccagtgctagtctgtcttcttat

SEQ ID NO: 74248 - DNA, 25 bp, Canis familiaris
ctgccaactatgcctctatttttgg

SEQ ID NO: 74249 - DNA, 25 bp, Canis familiaris
ctgctcaccctgttgattttttggc

SEQ ID NO: 74250 - DNA, 25 bp, Canis familiaris
ctgctagccctatgttactttgaca

SEQ ID NO: 74251 - DNA, 25 bp, Canis familiaris
ctgctaccctaccaagatcatttta

SEQ ID NO: 74252 - DNA, 25 bp, Canis familiaris
ctccaagcccacacagtattatctg

SEQ ID NO: 74253 - DNA, 25 bp, Canis familiaris
ctcctcagcccacaagctattgatt

SEQ ID NO: 74254 - DNA, 25 bp, Canis familiaris
ctcctagcaccatgaagatcaagat

SEQ ID NO: 74255 - DNA, 25 bp, Canis familiaris
ctgccgcccgggtaatcaagatttt

SEQ ID NO: 74256 - DNA, 25 bp, Canis familiaris
ctgccccgctggaaaatcttgacgt

SEQ ID NO: 74257 - DNA, 25 bp, Canis familiaris
ctgcaccgcggtaaaatcaatcacg

SEQ ID NO: 74258 - DNA, 25 bp, Canis familiaris
ctgccggctgtgaagtaataaagtg

SEQ ID NO: 74259 - DNA, 25 bp, Canis familiaris
ctgccgctgcgacagggacaaagtg

SEQ ID NO: 74260 - DNA, 25 bp, Canis familiaris
ctgcctctggagtaggggagctcag

SEQ ID NO: 74261 - DNA, 25 bp, Canis familiaris
ctcctctgcgaagcagctggtccag

SEQ ID NO: 74262 - DNA, 25 bp, Canis familiaris
ctccttgcacaatcgtcgtgcagca

SEQ ID NO: 74263 - DNA, 25 bp, Canis familiaris
ctccttgcacatcgtcgtgcaagca

SEQ ID NO: 74264 - DNA, 25 bp, Canis familiaris
ctccttagctgcctcaggtgagcag

SEQ ID NO: 74265 - DNA, 25 bp, Canis familiaris
ctccattaccatccactgtgaggtc

SEQ ID NO: 74266 - DNA, 25 bp, Canis familiaris
ctcctttctctgtctctgatcagag

SEQ ID NO: 74267 - DNA, 25 bp, Canis familiaris
ctgccatttctgaactgagacaaaa

SEQ ID NO: 74268 - DNA, 25 bp, Canis familiaris
ctgcccttcttcatgaataaaataa

SEQ ID NO: 74269 - DNA, 25 bp, Canis familiaris
ctgcccatttctacagaaaccagtt

SEQ ID NO: 74270 - DNA, 25 bp, Canis familiaris
ctgccctgctgtaacagctgtacga

SEQ ID NO: 74271 - DNA, 25 bp, Canis familiaris
ctgccttgttggtcactattctgat

SEQ ID NO: 74272 - DNA, 25 bp, Canis familiaris
ctccttgttattttttcatgacttt

SEQ ID NO: 74273 - DNA, 25 bp, Canis familiaris
ctccttatctttttctatctgactt

SEQ ID NO: 74274 - DNA, 25 bp, Canis familiaris
ctccttcccttactgaattacatct

SEQ ID NO: 74275 - DNA, 25 bp, Canis familiaris
ctccttcccttactgaattacatct

SEQ ID NO: 74276 - DNA, 25 bp, Canis familiaris
ctccttcccttactgaattacatct

SEQ ID NO: 74277 - DNA, 25 bp, Canis familiaris
ctgtttccacttttggtatactcta

SEQ ID NO: 74278 - DNA, 25 bp, Canis familiaris
ctgactttacttgtggtgtgaccat

SEQ ID NO: 74279 - DNA, 25 bp, Canis familiaris
ctgactttacttgtggtgtgaccat

SEQ ID NO: 74280 - DNA, 25 bp, Canis familiaris
ctgattggcatactccgtcagttag

SEQ ID NO: 74281 - DNA, 25 bp, Canis familiaris
ctgactggctcagcgtgtgcctacc

SEQ ID NO: 74282 - DNA, 25 bp, Canis familiaris
ctgaatgtccaaagtaccttctgtc

SEQ ID NO: 74283 - DNA, 25 bp, Canis familiaris
ctgcatttccgatgtggtttcgctc

SEQ ID NO: 74284 - DNA, 25 bp, Canis familiaris
ctgcagtccctgtgggtgaagtcct

SEQ ID NO: 74285 - DNA, 25 bp, Canis familiaris
ctgagcgtctgttggtgagggtgtc

SEQ ID NO: 74286 - DNA, 25 bp, Canis familiaris
ctgccactgcttatgtgaggagctg

SEQ ID NO: 74287 - DNA, 25 bp, Canis familiaris
ctccagctgcttgggtaggacccat

SEQ ID NO: 74288 - DNA, 25 bp, Canis familiaris
ctgaagattgatgagtagagcccca

SEQ ID NO: 74289 - DNA, 25 bp, Canis familiaris
ctgcccactgatggcatgctcagct

SEQ ID NO: 74290 - DNA, 25 bp, Canis familiaris
ctgcgagcactgtctgagtctgcat

SEQ ID NO: 74291 - DNA, 25 bp, Canis familiaris
ctgctggcctgaaggctcatctgtc

SEQ ID NO: 74292 - DNA, 25 bp, Canis familiaris
ctgctggtcaaagtcattgcccacg

SEQ ID NO: 74293 - DNA, 25 bp, Canis familiaris
ctgcggctcaagtccaagcagcact

SEQ ID NO: 74294 - DNA, 25 bp, Canis familiaris
ctgcgacatcatggtgctgcaggag

SEQ ID NO: 74295 - DNA, 25 bp, Canis familiaris
ctgccacatgcagtccacagaaggg

SEQ ID NO: 74296 - DNA, 25 bp, Canis familiaris
ctccatgcctctgcaggacagatgg

SEQ ID NO: 74297 - DNA, 25 bp, Canis familiaris
ctgccatccttcctgaaattgggca

SEQ ID NO: 74298 - DNA, 25 bp, Canis familiaris
ctgccgtcactcctgaagtcggaga

SEQ ID NO: 74299 - DNA, 25 bp, Canis familiaris
ctccttcatgggccaagtcggcagg

SEQ ID NO: 74300 - DNA, 25 bp, Canis familiaris
ctccttctgcggcaagaccaagatg

SEQ ID NO: 74301 - DNA, 25 bp, Canis familiaris
ctgccatcttgggtctgaaccaggg

SEQ ID NO: 74302 - DNA, 25 bp, Canis familiaris
ctgccgttagcgactgcgacgttcg

SEQ ID NO: 74303 - DNA, 25 bp, Canis familiaris
ctgccgttagcgactgcgacgttcg

SEQ ID NO: 74304 - DNA, 25 bp, Canis familiaris
ctgccgtttcgtcgaactgtgtgcg

SEQ ID NO: 74305 - DNA, 25 bp, Canis familiaris
ctgcaactgttccgcaaactggggc

SEQ ID NO: 74306 - DNA, 25 bp, Canis familiaris
ctgccttttcgcgtgaattggggtg

SEQ ID NO: 74307 - DNA, 25 bp, Canis familiaris
ctccatttctcggagtctcgggtct

SEQ ID NO: 74308 - DNA, 25 bp, Canis familiaris
ctccttcactccatgttctgggtga

SEQ ID NO: 74309 - DNA, 25 bp, Canis familiaris
ctccttgcacaccacggttgaggta

SEQ ID NO: 74310 - DNA, 25 bp, Canis familiaris
ctcctaccagcgctggatctgggaa

SEQ ID NO: 74311 - DNA, 25 bp, Canis familiaris
ctccttgcacagtggtacgtggcag

SEQ ID NO: 74312 - DNA, 25 bp, Canis familiaris
ctccttgcaagatgcccagcagggg

SEQ ID NO: 74313 - DNA, 25 bp, Canis familiaris
ctgcctctgaaaagctgctcggggg

SEQ ID NO: 74314 - DNA, 25 bp, Canis familiaris
ctgctgccgaacttcattgaagtgg

SEQ ID NO: 74315 - DNA, 25 bp, Canis familiaris
ctgcggcggagggattaatgtggac

SEQ ID NO: 74316 - DNA, 25 bp, Canis familiaris
ctgcaggctaggagacaaagtgaag

SEQ ID NO: 74317 - DNA, 25 bp, Canis familiaris
ctgtcagctcaatatacgaaggaag

SEQ ID NO: 74318 - DNA, 25 bp, Canis familiaris
ctccagccatcatccacgagaggca

SEQ ID NO: 74319 - DNA, 25 bp, Canis familiaris
ctccagccagcctgatccaggagat

SEQ ID NO: 74320 - DNA, 25 bp, Canis familiaris
ctccatgatcgccttcaagctggat

SEQ ID NO: 74321 - DNA, 25 bp, Canis familiaris
ctccagacggatcgctgagctgaca

SEQ ID NO: 74322 - DNA, 25 bp, Canis familiaris
ctgccgagggcacggagctgcaaat

SEQ ID NO: 74323 - DNA, 25 bp, Canis familiaris
ctgcctggtgtgcccgaggatatga

SEQ ID NO: 74324 - DNA, 25 bp, Canis familiaris
ctgccatgaggtccgtcttggatga

SEQ ID NO: 74325 - DNA, 25 bp, Canis familiaris
ctccatgtggctccggtatgtaaag

SEQ ID NO: 74326 - DNA, 25 bp, Canis familiaris
ctccaccgcatccgagtttgaaggt

SEQ ID NO: 74327 - DNA, 25 bp, Canis familiaris
ctccatcaccagggacctgtggggg

SEQ ID NO: 74328 - DNA, 25 bp, Canis familiaris
ctgccccaaccatccgtggatggaa

SEQ ID NO: 74329 - DNA, 25 bp, Canis familiaris
ctccagcccaccttgtttggaaata

SEQ ID NO: 74330 - DNA, 25 bp, Canis familiaris
ctccaccaccgaatctttcaaagaa

SEQ ID NO: 74331 - DNA, 25 bp, Canis familiaris
ctgcctccagatctacttcaaaaga

SEQ ID NO: 74332 - DNA, 25 bp, Canis familiaris
ctgcctcctatataattccacagga

SEQ ID NO: 74333 - DNA, 25 bp, Canis familiaris
ctccttcactaactcattccaagtg

SEQ ID NO: 74334 - DNA, 25 bp, Canis familiaris
ctccttgcactagcgcacgaaggtg

SEQ ID NO: 74335 - DNA, 25 bp, Canis familiaris
ctgccctgacgatggcctggaagtg

SEQ ID NO: 74336 - DNA, 25 bp, Canis familiaris
ctgcctgccaagtgtcctggcaagg

SEQ ID NO: 74337 - DNA, 25 bp, Canis familiaris
ctgtctgccaactgggcttacgtga

SEQ ID NO: 74338 - DNA, 25 bp, Canis familiaris
ctgcttccataccgcagggtgactt

SEQ ID NO: 74339 - DNA, 25 bp, Canis familiaris
ctgcctctctaccatatgtgtaact

SEQ ID NO: 74340 - DNA, 25 bp, Canis familiaris
ctcctatatccgcattgctgatacc

SEQ ID NO: 74341 - DNA, 25 bp, Canis familiaris
ctcctatatcctgcattgctgatgc

SEQ ID NO: 74342 - DNA, 25 bp, Canis familiaris
ctgcctgaacacgaggtctgtgcct

SEQ ID NO: 74343 - DNA, 25 bp, Canis familiaris
ctgctctgagattgttggccttgcc

SEQ ID NO: 74344 - DNA, 25 bp, Canis familiaris
ctgcctgaatctttgccagtctgaa

SEQ ID NO: 74345 - DNA, 25 bp, Canis familiaris
ctccagtactcatttgcaactatca

SEQ ID NO: 74346 - DNA, 25 bp, Canis familiaris
ctccagtggctaattcccactcagc

SEQ ID NO: 74347 - DNA, 25 bp, Canis familiaris
ctccactggtacacacagcagccag

SEQ ID NO: 74348 - DNA, 25 bp, Canis familiaris
ctccatgctgttactccaaccagct

SEQ ID NO: 74349 - DNA, 25 bp, Canis familiaris
ctccttgttgactgcatccaactgc

SEQ ID NO: 74350 - DNA, 25 bp, Canis familiaris
ctccttctgatgtatccaccaaacc

SEQ ID NO: 74351 - DNA, 25 bp, Canis familiaris
ctccttctgttgtacacacacacat

SEQ ID NO: 74352 - DNA, 25 bp, Canis familiaris
ctccttgtgtctggagcagctaccg

SEQ ID NO: 74353 - DNA, 25 bp, Canis familiaris
ctccttgcctctggatgaccaggtc

SEQ ID NO: 74354 - DNA, 25 bp, Canis familiaris
ctgccttctctcttcaaacaggtgc

SEQ ID NO: 74355 - DNA, 25 bp, Canis familiaris
ctccttcctcctgcaacagaatgga

SEQ ID NO: 74356 - DNA, 25 bp, Canis familiaris
ctccaacactcctctgacagtatta

SEQ ID NO: 74357 - DNA, 25 bp, Canis familiaris
ctgagcaaactgttctctgactttt

SEQ ID NO: 74358 - DNA, 25 bp, Canis familiaris
ctgacatgtacattcatctgctcac

SEQ ID NO: 74359 - DNA, 25 bp, Canis familiaris
ctgccagtagcatatgcttgtctca

SEQ ID NO: 74360 - DNA, 25 bp, Canis familiaris
ctgccagtagcatatgcttgtctca

SEQ ID NO: 74361 - DNA, 25 bp, Canis familiaris
ctgctcagtcctgagcactggccca

SEQ ID NO: 74362 - DNA, 25 bp, Canis familiaris
ctccatgtgccagacagctcagagc

SEQ ID NO: 74363 - DNA, 25 bp, Canis familiaris
ctgccagtgtgaggacggaaggact

SEQ ID NO: 74364 - DNA, 25 bp, Canis familiaris
ctgccgggacgtgggtgatggctgc

SEQ ID NO: 74365 - DNA, 25 bp, Canis familiaris
ctgctatgggactattgctgtgatc

SEQ ID NO: 74366 - DNA, 25 bp, Canis familiaris
ctgtctgggtgctactggggaaact

SEQ ID NO: 74367 - DNA, 25 bp, Canis familiaris
ctgccttggctttggtggaaaacat

SEQ ID NO: 74368 - DNA, 25 bp, Canis familiaris
ctgcctttttctgctgcgacaataa

SEQ ID NO: 74369 - DNA, 25 bp, Canis familiaris
ctccttgttacctatagcatcagaa

SEQ ID NO: 74370 - DNA, 25 bp, Canis familiaris
ctgctttgttaatcatcaccctatg

SEQ ID NO: 74371 - DNA, 25 bp, Canis familiaris
ctgcttttttaaactctcacctata

SEQ ID NO: 74372 - DNA, 25 bp, Canis familiaris
ctgcctatcttatatagcccatgcc

SEQ ID NO: 74373 - DNA, 25 bp, Canis familiaris
ctgcctaggaacctgacacctgcag

SEQ ID NO: 74374 - DNA, 25 bp, Canis familiaris
ctccatagagtttgctgacaccatc

SEQ ID NO: 74375 - DNA, 25 bp, Canis familiaris
ctccaagcagagcagtctcactcac

SEQ ID NO: 74376 - DNA, 25 bp, Canis familiaris
ctccagtgaagatgcctcagtcacc

SEQ ID NO: 74377 - DNA, 25 bp, Canis familiaris
ctccagctgggtgctgctcatggag

SEQ ID NO: 74378 - DNA, 25 bp, Canis familiaris
ctccatggggcatgtggctgggctg

SEQ ID NO: 74379 - DNA, 25 bp, Canis familiaris
ctgaacgggaagctcactggcatgg

SEQ ID NO: 74380 - DNA, 25 bp, Canis familiaris
ctgaacgggaagctcactggcatgg

SEQ ID NO: 74381 - DNA, 25 bp, Canis familiaris
ctgaagggagatcctgccctagatc

SEQ ID NO: 74382 - DNA, 25 bp, Canis familiaris
ctccagaggtagctgccctagaggg

SEQ ID NO: 74383 - DNA, 25 bp, Canis familiaris
ctccagggtgagggcctcaggaggg

SEQ ID NO: 74384 - DNA, 25 bp, Canis familiaris
ctccatggcaggtggctctttgggg

SEQ ID NO: 74385 - DNA, 25 bp, Canis familiaris
ctgcaccgaggggggcacttggtgg

SEQ ID NO: 74386 - DNA, 25 bp, Canis familiaris
ctgctccgaggtggacgagccgtag

SEQ ID NO: 74387 - DNA, 25 bp, Canis familiaris
ctgcccgagtctgaaacctgaagat

SEQ ID NO: 74388 - DNA, 25 bp, Canis familiaris
ctccaatggtcccaaacctgcagag

SEQ ID NO: 74389 - DNA, 25 bp, Canis familiaris
ctccaagcaaccgggagcctgacgt

SEQ ID NO: 74390 - DNA, 25 bp, Canis familiaris
ctccaagcacaccgggaaggccgtg

SEQ ID NO: 74391 - DNA, 25 bp, Canis familiaris
ctccaagcagacctgggcaatgtct

SEQ ID NO: 74392 - DNA, 25 bp, Canis familiaris
ctccaaggaactccagctgtctttt

SEQ ID NO: 74393 - DNA, 25 bp, Canis familiaris
ctccagagtatacgagagctttcta

SEQ ID NO: 74394 - DNA, 25 bp, Canis familiaris
ctgccagactcatgtgaggcatctg

SEQ ID NO: 74395 - DNA, 25 bp, Canis familiaris
ctgctatgccctcatggagctgggg

SEQ ID NO: 74396 - DNA, 25 bp, Canis familiaris
ctgctaacctgcgtgaaccgggagc

SEQ ID NO: 74397 - DNA, 25 bp, Canis familiaris
ctgctgaccacgccgaatccggaag

SEQ ID NO: 74398 - DNA, 25 bp, Canis familiaris
ctgccccctgggaagccaagaaggg

SEQ ID NO: 74399 - DNA, 25 bp, Canis familiaris
ctgccccttttcacatcaaagaatg

SEQ ID NO: 74400 - DNA, 25 bp, Canis familiaris
ctgcccttcttctccacagaagaac

SEQ ID NO: 74401 - DNA, 25 bp, Canis familiaris
ctgcccattaatgcccgcaagatga

SEQ ID NO: 74402 - DNA, 25 bp, Canis familiaris
ctgcggcttcaagaccagaagctgc

SEQ ID NO: 74403 - DNA, 25 bp, Canis familiaris
ctgctgagttcttcccaatgagggg

SEQ ID NO: 74404 - DNA, 25 bp, Canis familiaris
ctgcggtttccatccattggaggaa

SEQ ID NO: 74405 - DNA, 25 bp, Canis familiaris
ctgcggtctaccgtgtactgcaacg

SEQ ID NO: 74406 - DNA, 25 bp, Canis familiaris
ctgcggtctagggggcagtgctcag

SEQ ID NO: 74407 - DNA, 25 bp, Canis familiaris
ctgggcctggggttgggcctgaaag

SEQ ID NO: 74408 - DNA, 25 bp, Canis familiaris
ctgcggcactggagaaggcgccata

SEQ ID NO: 74409 - DNA, 25 bp, Canis familiaris
ctgcgtgacggtttgcaggctgcgc

SEQ ID NO: 74410 - DNA, 25 bp, Canis familiaris
ctgcgatatctcgcatttggccgcc

SEQ ID NO: 74411 - DNA, 25 bp, Canis familiaris
ctccagagagcagtgtttgcgcccc

SEQ ID NO: 74412 - DNA, 25 bp, Canis familiaris
ctccaggccaagtcattgctacaac

SEQ ID NO: 74413 - DNA, 25 bp, Canis familiaris
ctgcgagaccaatgcctgctataaa

SEQ ID NO: 74414 - DNA, 25 bp, Canis familiaris
ctgcggagactctgctcttgaacag

SEQ ID NO: 74415 - DNA, 25 bp, Canis familiaris
ctgcggacaccaggatccagacaga

SEQ ID NO: 74416 - DNA, 25 bp, Canis familiaris
ctgcgctgggcatctgagccagaac

SEQ ID NO: 74417 - DNA, 25 bp, Canis familiaris
ctccagatggctctggcactcaacc

SEQ ID NO: 74418 - DNA, 25 bp, Canis familiaris
ctccagaggcatccggcaatcagaa

SEQ ID NO: 74419 - DNA, 25 bp, Canis familiaris
ctgtcaggagccgggcagatcctac

SEQ ID NO: 74420 - DNA, 25 bp, Canis familiaris
ctgccacagcagtgcctgctgatcc

SEQ ID NO: 74421 - DNA, 25 bp, Canis familiaris
ctgccaaagttcttgcattcacgct

SEQ ID NO: 74422 - DNA, 25 bp, Canis familiaris
ctgccattatcaacagtgcgctccc

SEQ ID NO: 74423 - DNA, 25 bp, Canis familiaris
ctgccagctataccagaggtcagga

SEQ ID NO: 74424 - DNA, 25 bp, Canis familiaris
ctgccagcaatatgacaagctgcgg

SEQ ID NO: 74425 - DNA, 25 bp, Canis familiaris
ctgccgcagctgtgcaacgtcggca

SEQ ID NO: 74426 - DNA, 25 bp, Canis familiaris
ctgcccaggcttcaagttggtcagc

SEQ ID NO: 74427 - DNA, 25 bp, Canis familiaris
ctgcccctgctacttagttggtaga

SEQ ID NO: 74428 - DNA, 25 bp, Canis familiaris
ctgcccactcttctgcaattggggg

SEQ ID NO: 74429 - DNA, 25 bp, Canis familiaris
ctgccccttgaggtccaatggaggg

SEQ ID NO: 74430 - DNA, 25 bp, Canis familiaris
ctgcctccttggtctctagaggtac

SEQ ID NO: 74431 - DNA, 25 bp, Canis familiaris
ctgctccccggcttataaatgtcaa

SEQ ID NO: 74432 - DNA, 25 bp, Canis familiaris
ctgctgggccgtctgaaggacgcag

SEQ ID NO: 74433 - DNA, 25 bp, Canis familiaris
ctccagaccatccaagaaggacagc

SEQ ID NO: 74434 - DNA, 25 bp, Canis familiaris
ctccacaccatctcagcaaggaact

SEQ ID NO: 74435 - DNA, 25 bp, Canis familiaris
ctccacccatgctcatgaggaagag

SEQ ID NO: 74436 - DNA, 25 bp, Canis familiaris
ctccacccagcacctttgaagggac

SEQ ID NO: 74437 - DNA, 25 bp, Canis familiaris
ctgccaccccagtcttaatcagtgg

SEQ ID NO: 74438 - DNA, 25 bp, Canis familiaris
cgctaccccacccataatgaaatag

SEQ ID NO: 74439 - DNA, 25 bp, Canis familiaris
ctgctccccactgggtcaggtaaga

SEQ ID NO: 74440 - DNA, 25 bp, Canis familiaris
ctgccttcacctgcaccaggtaaac

SEQ ID NO: 74441 - DNA, 25 bp, Canis familiaris
ctgcctgaaggtggcccgggagatg

SEQ ID NO: 74442 - DNA, 25 bp, Canis familiaris
ctgctcagaggggccacagcagcgg

SEQ ID NO: 74443 - DNA, 25 bp, Canis familiaris
ctgcgatactcggtcatcatgcacg

SEQ ID NO: 74444 - DNA, 25 bp, Canis familiaris
ctccatcactcaaagcatatgccta

SEQ ID NO: 74445 - DNA, 25 bp, Canis familiaris
ctccatcgtgcaccgcaagtgcttc

SEQ ID NO: 74446 - DNA, 25 bp, Canis familiaris
ctccacgcagtgccgcaagatgtac

SEQ ID NO: 74447 - DNA, 25 bp, Canis familiaris
ctgccacctgtgcgacatggagacg

SEQ ID NO: 74448 - DNA, 25 bp, Canis familiaris
ctgccccgtccggagaagcagggcg

SEQ ID NO: 74449 - DNA, 25 bp, Canis familiaris
ctgcctctggctcctgggagaagga

SEQ ID NO: 74450 - DNA, 25 bp, Canis familiaris
ctgccacatggcccagggccgatgg

SEQ ID NO: 74451 - DNA, 25 bp, Canis familiaris
ctgccaggaccaaggagccaatgtg

SEQ ID NO: 74452 - DNA, 25 bp, Canis familiaris
ctgcgcagttccagctgcggacagg

SEQ ID NO: 74453 - DNA, 25 bp, Canis familiaris
ctccagcttcctgcatggctggcag

SEQ ID NO: 74454 - DNA, 25 bp, Canis familiaris
ctccaagtgctctgtggctgtgatg

SEQ ID NO: 74455 - DNA, 25 bp, Canis familiaris
ctccatcgtcatatctggctgattg

SEQ ID NO: 74456 - DNA, 25 bp, Canis familiaris
ctccatgccataattcatagttctt

SEQ ID NO: 74457 - DNA, 25 bp, Canis familiaris
ctccaccttcatagcagcagttatt

SEQ ID NO: 74458 - DNA, 25 bp, Canis familiaris
ctgccaagaggcatgatcacttttg

SEQ ID NO: 74459 - DNA, 25 bp, Canis familiaris
ctgctctgcaggcttaactttttat

SEQ ID NO: 74460 - DNA, 25 bp, Canis familiaris
ctgatccggacaaccctttggtatt

SEQ ID NO: 74461 - DNA, 25 bp, Canis familiaris
ctccacagactcattccttgggtat

SEQ ID NO: 74462 - DNA, 25 bp, Canis familiaris
ctgcgccatggcgttggcgttggcg

SEQ ID NO: 74463 - DNA, 25 bp, Canis familiaris
ctgccactgacgggcagttctctgg

SEQ ID NO: 74464 - DNA, 25 bp, Canis familiaris
ctgctaagacttccacttcttgcaa

SEQ ID NO: 74465 - DNA, 25 bp, Canis familiaris
ctgcccaactgtcaaccttgataaa

SEQ ID NO: 74466 - DNA, 25 bp, Canis familiaris
ctgccaccatcaataaagcctgagt

SEQ ID NO: 74467 - DNA, 25 bp, Canis familiaris
ctccaccacttgtatagagcgcctc

SEQ ID NO: 74468 - DNA, 25 bp, Canis familiaris
ctccactcccgttatgacgggctga

SEQ ID NO: 74469 - DNA, 25 bp, Canis familiaris
ctccactgcccagaaggctgttgga

SEQ ID NO: 74470 - DNA, 25 bp, Canis familiaris
ctccacggcactcaggactttggat

SEQ ID NO: 74471 - DNA, 25 bp, Canis familiaris
ctccactggcctcatatgcatttgg

SEQ ID NO: 74472 - DNA, 25 bp, Canis familiaris
ctccagcagacgcagagatgcagat

SEQ ID NO: 74473 - DNA, 25 bp, Canis familiaris
ctccacatgacccaggcagcaaaag

SEQ ID NO: 74474 - DNA, 25 bp, Canis familiaris
ctccatgctgagtgcagagcccaac

SEQ ID NO: 74475 - DNA, 25 bp, Canis familiaris
ctgcctgtgcagctggtgacgaagc

SEQ ID NO: 74476 - DNA, 25 bp, Canis familiaris
ctgccttgcagacttgcagacctcg

SEQ ID NO: 74477 - DNA, 25 bp, Canis familiaris
ctgccctgcagtgtagactctgggt

SEQ ID NO: 74478 - DNA, 25 bp, Canis familiaris
ctgcctctgcggcagagcaccaggg

SEQ ID NO: 74479 - DNA, 25 bp, Canis familiaris
ctccagtgctggaagacacgtgggg

SEQ ID NO: 74480 - DNA, 25 bp, Canis familiaris
ctccagtccctagcacttgtaggtg

SEQ ID NO: 74481 - DNA, 25 bp, Canis familiaris
ctccagactcctctattctgaagag

SEQ ID NO: 74482 - DNA, 25 bp, Canis familiaris
ctgcctgaccctgtgtagtcaagac

SEQ ID NO: 74483 - DNA, 25 bp, Canis familiaris
ctgcccatcaaggaatctgagatca

SEQ ID NO: 74484 - DNA, 25 bp, Canis familiaris
ctgccctgaagcctgagtgagacac

SEQ ID NO: 74485 - DNA, 25 bp, Canis familiaris
ctgctgtgtgaaccgtggaaacaat

SEQ ID NO: 74486 - DNA, 25 bp, Canis familiaris
ctgacttgagaccagttgaataaaa

SEQ ID NO: 74487 - DNA, 25 bp, Canis familiaris
ctgactttgtcccttgctacaagga

SEQ ID NO: 74488 - DNA, 25 bp, Canis familiaris
ctgatcccttcttttcttcaaagga

SEQ ID NO: 74489 - DNA, 25 bp, Canis familiaris
ctgaactcccatttcctcaagggga

SEQ ID NO: 74490 - DNA, 25 bp, Canis familiaris
ctgaacccggcaatcagctcaaggc

SEQ ID NO: 74491 - DNA, 25 bp, Canis familiaris
ctgacacccgcattaacctgtgtgt

SEQ ID NO: 74492 - DNA, 25 bp, Canis familiaris
ctgcacaaattctaaacctgttttg

SEQ ID NO: 74493 - DNA, 25 bp, Canis familiaris
ctgcacaagtgtttcaacctgtcct

SEQ ID NO: 74494 - DNA, 25 bp, Canis familiaris
ctgcaggaagaaccacgcacgtcac

SEQ ID NO: 74495 - DNA, 25 bp, Canis familiaris
ctgccccagtagccagccagggcag

SEQ ID NO: 74496 - DNA, 25 bp, Canis familiaris
ctgcctccatcttggaaagcctcaa

SEQ ID NO: 74497 - DNA, 25 bp, Canis familiaris
ctgcaccgttatcatgaagtccaat

SEQ ID NO: 74498 - DNA, 25 bp, Canis familiaris
ctgcccgagtgagcaacttccaatt

SEQ ID NO: 74499 - DNA, 25 bp, Canis familiaris
ctgcccagcagtctcaaagtcaaat

SEQ ID NO: 74500 - DNA, 25 bp, Canis familiaris
ctgctccagcctccaaatagtaata

SEQ ID NO: 74501 - DNA, 25 bp, Canis familiaris
ctgctccactcttacaatttctgag

SEQ ID NO: 74502 - DNA, 25 bp, Canis familiaris
ctgcccactgaagacatcacactga

SEQ ID NO: 74503 - DNA, 25 bp, Canis familiaris
cgtctacagagaacccaactggccc

SEQ ID NO: 74504 - DNA, 25 bp, Canis familiaris
ctccagagcctgcacctgcagaaga

SEQ ID NO: 74505 - DNA, 25 bp, Canis familiaris
ctgccgacgccgccggaaagcgtgc

SEQ ID NO: 74506 - DNA, 25 bp, Canis familiaris
ctgaagaggccagcgggcaagccat

SEQ ID NO: 74507 - DNA, 25 bp, Canis familiaris
ctgctggagttgtgggacatccctc

SEQ ID NO: 74508 - DNA, 25 bp, Canis familiaris
ctgctgtgcagaagggaggactccc

SEQ ID NO: 74509 - DNA, 25 bp, Canis familiaris
ctgctgtcagaggacgatgaggtac

SEQ ID NO: 74510 - DNA, 25 bp, Canis familiaris
ctgctgccaagcatggtgaggccca

SEQ ID NO: 74511 - DNA, 25 bp, Canis familiaris
ctgccaccatgaggtgatgccagcc

SEQ ID NO: 74512 - DNA, 25 bp, Canis familiaris
ctgctggccatggtgggtcaccagg

SEQ ID NO: 74513 - DNA, 25 bp, Canis familiaris
ctgcttccggagctgtgatctgagg

SEQ ID NO: 74514 - DNA, 25 bp, Canis familiaris
ctgctctactggcgggacatcaagc

SEQ ID NO: 74515 - DNA, 25 bp, Canis familiaris
ctccaagtgtggctggccatccgag

SEQ ID NO: 74516 - DNA, 25 bp, Canis familiaris
ctccacagggcgcagggctgtgcgg

SEQ ID NO: 74517 - DNA, 25 bp, Canis familiaris
ctccacagggagcagcagctctctg

SEQ ID NO: 74518 - DNA, 25 bp, Canis familiaris
ctccagctgtggtttgcagcgttcc

SEQ ID NO: 74519 - DNA, 25 bp, Canis familiaris
ctgcgctgagggtttgacgattatc

SEQ ID NO: 74520 - DNA, 25 bp, Canis familiaris
ctgcctggaggatttccgtgctact

SEQ ID NO: 74521 - DNA, 25 bp, Canis familiaris
ctgccttagtagtgcgcgtttttac

SEQ ID NO: 74522 - DNA, 25 bp, Canis familiaris
ctgcgctaatgttcggggtcatttt

SEQ ID NO: 74523 - DNA, 25 bp, Canis familiaris
ctgagctacttctgagcggtcagtg

SEQ ID NO: 74524 - DNA, 25 bp, Canis familiaris
ctgacgctcgaccgagggctttagg

SEQ ID NO: 74525 - DNA, 25 bp, Canis familiaris
ctgcaggcattgtgggtgttttcgc

SEQ ID NO: 74526 - DNA, 25 bp, Canis familiaris
ctgaacattggggggttgctggcct

SEQ ID NO: 74527 - DNA, 25 bp, Canis familiaris
ctgacatcaaggccaagtttctaca

SEQ ID NO: 74528 - DNA, 25 bp, Canis familiaris
ctgcaaaagctgccaggattggcca

SEQ ID NO: 74529 - DNA, 25 bp, Canis familiaris
ctgctcatacagggaagcctgagaa

SEQ ID NO: 74530 - DNA, 25 bp, Canis familiaris
ctgctcaagctgccttagtctgaaa

SEQ ID NO: 74531 - DNA, 25 bp, Canis familiaris
ctccacactggagttcatgcatgaa

SEQ ID NO: 74532 - DNA, 25 bp, Canis familiaris
ctgcctctgctgcatttgcaataaa

SEQ ID NO: 74533 - DNA, 25 bp, Canis familiaris
ctgcgccttctctttcaaaaaactt

SEQ ID NO: 74534 - DNA, 25 bp, Canis familiaris
ctgccctgcattttccaaaacaaca

SEQ ID NO: 74535 - DNA, 25 bp, Canis familiaris
ctgccagccttttcacagaaagcca

SEQ ID NO: 74536 - DNA, 25 bp, Canis familiaris
ctgccttgctttggacagtggtcca

SEQ ID NO: 74537 - DNA, 25 bp, Canis familiaris
ctgcttcctaatggactagattcca

SEQ ID NO: 74538 - DNA, 25 bp, Canis familiaris
ctgcctgcctcatttactgacagac

SEQ ID NO: 74539 - DNA, 25 bp, Canis familiaris
ctgccgcttgcacttacgtcaagcc

SEQ ID NO: 74540 - DNA, 25 bp, Canis familiaris
ctgcgctgcgtcattgacatctgca

SEQ ID NO: 74541 - DNA, 25 bp, Canis familiaris
ctgctctggctcctagcaccatgaa

SEQ ID NO: 74542 - DNA, 25 bp, Canis familiaris
ctgcctgtgcttcagctagcattaa

SEQ ID NO: 74543 - DNA, 25 bp, Canis familiaris
ctgcctgagcacaagacccataaga

SEQ ID NO: 74544 - DNA, 25 bp, Canis familiaris
cgcctgagcacaagtaccctatgtg

SEQ ID NO: 74545 - DNA, 25 bp, Canis familiaris
ctgacggccaggtcatcaccattgg

SEQ ID NO: 74546 - DNA, 25 bp, Canis familiaris
ctgacggccaagtcatcactattgg

SEQ ID NO: 74547 - DNA, 25 bp, Canis familiaris
ctgaaggtcacctgcctttgagggg

SEQ ID NO: 74548 - DNA, 25 bp, Canis familiaris
ctgaagagatcatcttcctccgggc

SEQ ID NO: 74549 - DNA, 25 bp, Canis familiaris
ctgcaggacatttttcttaggttgt

SEQ ID NO: 74550 - DNA, 25 bp, Canis familiaris
ctgactgagcaattttttaggtttt

SEQ ID NO: 74551 - DNA, 25 bp, Canis familiaris
ctgccggctttatttaagaccttct

SEQ ID NO: 74552 - DNA, 25 bp, Canis familiaris
ctgcctgcacctgaatcttagaact

SEQ ID NO: 74553 - DNA, 25 bp, Canis familiaris
ctgccatgcccttggtttatcagat

SEQ ID NO: 74554 - DNA, 25 bp, Canis familiaris
ctgctccagccttgtgtttgtaaat

SEQ ID NO: 74555 - DNA, 25 bp, Canis familiaris
ctgcctctgtgttgtgtttgttttt

SEQ ID NO: 74556 - DNA, 25 bp, Canis familiaris
ctgcttcagatttagatttttcatt

SEQ ID NO: 74557 - DNA, 25 bp, Canis familiaris
ctgttaatttggtttcacttttcat

SEQ ID NO: 74558 - DNA, 25 bp, Canis familiaris
ctgttgcctttatcatgtcgttttt

SEQ ID NO: 74559 - DNA, 25 bp, Canis familiaris
ctgtttttgtctccgtagtatttca

SEQ ID NO: 74560 - DNA, 25 bp, Canis familiaris
ctgtttcttgtcccaggttaactgg

SEQ ID NO: 74561 - DNA, 25 bp, Canis familiaris
ctgcttctgcttgcctaagtgattc

SEQ ID NO: 74562 - DNA, 25 bp, Canis familiaris
ctgcttctcttgcctaagtattctt

SEQ ID NO: 74563 - DNA, 25 bp, Canis familiaris
ctgctttctgaggtcggttgttgtc

SEQ ID NO: 74564 - DNA, 25 bp, Canis familiaris
ctgctttctgaggtcggttgttgtc

SEQ ID NO: 74565 - DNA, 25 bp, Canis familiaris
ctgttctcagaatgtctttatttga

SEQ ID NO: 74566 - DNA, 25 bp, Canis familiaris
ctgcttactccatccatgttattta

SEQ ID NO: 74567 - DNA, 25 bp, Canis familiaris
ctgctccagtcctttgagctgtagt

SEQ ID NO: 74568 - DNA, 25 bp, Canis familiaris
ctgcgtcaggtatttgatgctttgt

SEQ ID NO: 74569 - DNA, 25 bp, Canis familiaris
ctgcaggcgactttggagctgttgg

SEQ ID NO: 74570 - DNA, 25 bp, Canis familiaris
ctgcggatgacttcaggcagcctcg

SEQ ID NO: 74571 - DNA, 25 bp, Canis familiaris
ctgcggaagctgcgcaagcaccagg

SEQ ID NO: 74572 - DNA, 25 bp, Canis familiaris
ctgcggaagtgctacaaccaactgc

SEQ ID NO: 74573 - DNA, 25 bp, Canis familiaris
ctgtaacagatcaaacaccggcgct

SEQ ID NO: 74574 - DNA, 25 bp, Canis familiaris
gcgacaacaacctactggggcgctt

SEQ ID NO: 74575 - DNA, 25 bp, Canis familiaris
ctgcacaaaacctctgagcctggca

SEQ ID NO: 74576 - DNA, 25 bp, Canis familiaris
ctgcgagaacggcgtgtgcgtgtgc

SEQ ID NO: 74577 - DNA, 25 bp, Canis familiaris
ctgcgaggacggcgagtgcatctgc

SEQ ID NO: 74578 - DNA, 25 bp, Canis familiaris
ctgcgagaacgacatcgacatcctg

SEQ ID NO: 74579 - DNA, 25 bp, Canis familiaris
ctgcatacacacatgtacgagtccg

SEQ ID NO: 74580 - DNA, 25 bp, Canis familiaris
ctgccactcacatgtaagctgtcca

SEQ ID NO: 74581 - DNA, 25 bp, Canis familiaris
ctgcgcaaccagctgtagtaacagt

SEQ ID NO: 74582 - DNA, 25 bp, Canis familiaris
ctgctgcctcaccagtggcagtaca

SEQ ID NO: 74583 - DNA, 25 bp, Canis familiaris
ctgctgcatgtccctgtgggtgaaa

SEQ ID NO: 74584 - DNA, 25 bp, Canis familiaris
ctgcgcagtccagttgcgacaggca

SEQ ID NO: 74585 - DNA, 25 bp, Canis familiaris
ctgccaggacactctagcaggacac

SEQ ID NO: 74586 - DNA, 25 bp, Canis familiaris
ctgccagcccagtttaagctaccag

SEQ ID NO: 74587 - DNA, 25 bp, Canis familiaris
ctgccagcccggtgatgagctgaca

SEQ ID NO: 74588 - DNA, 25 bp, Canis familiaris
ctgccagacacctcagtcatgtgac

SEQ ID NO: 74589 - DNA, 25 bp, Canis familiaris
ctgccagagtaccctgctgtgcaga

SEQ ID NO: 74590 - DNA, 25 bp, Canis familiaris
ctgccacaaagcacttgtcagagga

SEQ ID NO: 74591 - DNA, 25 bp, Canis familiaris
ctgcaccgagtgcactttaggggcc

SEQ ID NO: 74592 - DNA, 25 bp, Canis familiaris
ctgccccactgtctttagggagaac

SEQ ID NO: 74593 - DNA, 25 bp, Canis familiaris
ctgctccccttccttatgagaggga

SEQ ID NO: 74594 - DNA, 25 bp, Canis familiaris
ctgccctcctctaggtcataagagc

SEQ ID NO: 74595 - DNA, 25 bp, Canis familiaris
ctgccgtcctcattggtcaaaggag

SEQ ID NO: 74596 - DNA, 25 bp, Canis familiaris
ctgccggtgatactggtagttggtg

SEQ ID NO: 74597 - DNA, 25 bp, Canis familiaris
ctgcccagctgcaatctggtttttg

SEQ ID NO: 74598 - DNA, 25 bp, Canis familiaris
ctgcccacccacagttgtttggtgg

SEQ ID NO: 74599 - DNA, 25 bp, Canis familiaris
ctgcccacggcctaactgttaaggg

SEQ ID NO: 74600 - DNA, 25 bp, Canis familiaris
cgtccagggaccactgacggagggg

SEQ ID NO: 74601 - DNA, 25 bp, Canis familiaris
ctgacgggagaagaccacggatggg

SEQ ID NO: 74602 - DNA, 25 bp, Canis familiaris
ctggcagcgaaaagaccccggaagg

SEQ ID NO: 74603 - DNA, 25 bp, Canis familiaris
cggccgggtaagctttggagaggat

SEQ ID NO: 74604 - DNA, 25 bp, Canis familiaris
ctgagcgcgcgagcaaggtttggaa

SEQ ID NO: 74605 - DNA, 25 bp, Canis familiaris
ctgccctggactgctggttaggtac

SEQ ID NO: 74606 - DNA, 25 bp, Canis familiaris
ctgcagtgggtcgcaggcattaggt

SEQ ID NO: 74607 - DNA, 25 bp, Canis familiaris
ctgctgtgggcggcacggatacaag

SEQ ID NO: 74608 - DNA, 25 bp, Canis familiaris
ctgctctgcaagccagacgtgggaa

SEQ ID NO: 74609 - DNA, 25 bp, Canis familiaris
ctgcatctgcaagggtgcgtcggac

SEQ ID NO: 74610 - DNA, 25 bp, Canis familiaris
ctgctcgctacttgtggccgagagc

SEQ ID NO: 74611 - DNA, 25 bp, Canis familiaris
ctgcatgtctactgtgagccagcga

SEQ ID NO: 74612 - DNA, 25 bp, Canis familiaris
cggcctaccggagtgcgtagattgg

SEQ ID NO: 74613 - DNA, 25 bp, Canis familiaris
cggctatggattcgtccgtaatcgg

SEQ ID NO: 74614 - DNA, 25 bp, Canis familiaris
gtcagttcctgtgtccgtaatggga

SEQ ID NO: 74615 - DNA, 25 bp, Canis familiaris
gctaattccttttccttttggagat

SEQ ID NO: 74616 - DNA, 25 bp, Canis familiaris
ctgaatccctgtttcctgaattgtc

SEQ ID NO: 74617 - DNA, 25 bp, Canis familiaris
ctgacttacgatctctagaatttgc

SEQ ID NO: 74618 - DNA, 25 bp, Canis familiaris
ctgctcctagggatctcgcagttct

SEQ ID NO: 74619 - DNA, 25 bp, Canis familiaris
ctgtacctgggaaatctcagtcccc

SEQ ID NO: 74620 - DNA, 25 bp, Canis familiaris
ctgtatcgcttgttaacgttccctg

SEQ ID NO: 74621 - DNA, 25 bp, Canis familiaris
ctgttcctgtttttagcttgaccat

SEQ ID NO: 74622 - DNA, 25 bp, Canis familiaris
ctgcttctttgtcactcgtaattca

SEQ ID NO: 74623 - DNA, 25 bp, Canis familiaris
ctgctatggtttcttcggttcatca

SEQ ID NO: 74624 - DNA, 25 bp, Canis familiaris
ctgctgtgagtgttggttttggaaa

SEQ ID NO: 74625 - DNA, 25 bp, Canis familiaris
ctgcgtgttgccggattcattataa

SEQ ID NO: 74626 - DNA, 25 bp, Canis familiaris
ctgcctgtcatggggcagccatctc

SEQ ID NO: 74627 - DNA, 25 bp, Canis familiaris
ctgactcacatgggcacagctcagt

SEQ ID NO: 74628 - DNA, 25 bp, Canis familiaris
ctgacatactggttcatgtttcctt

SEQ ID NO: 74629 - DNA, 25 bp, Canis familiaris
ctgactactacagtatagttttctc

SEQ ID NO: 74630 - DNA, 25 bp, Canis familiaris
ctgagtcacacggtccagtggtacc

SEQ ID NO: 74631 - DNA, 25 bp, Canis familiaris
ctgcgtgcacctgtgtactggtgtc

SEQ ID NO: 74632 - DNA, 25 bp, Canis familiaris
ctgcgtgagttctgtattggggcct

SEQ ID NO: 74633 - DNA, 25 bp, Canis familiaris
ctgcgtgactattcagattctgtag

SEQ ID NO: 74634 - DNA, 25 bp, Canis familiaris
ctgcggccgactggtttgtatgacc

SEQ ID NO: 74635 - DNA, 25 bp, Canis familiaris
ctgccatccagacttcttttatgtc

SEQ ID NO: 74636 - DNA, 25 bp, Canis familiaris
ctgcgcaccaggatcctgctataac

SEQ ID NO: 74637 - DNA, 25 bp, Canis familiaris
ctgccacgcaaagcacgctgaatga

SEQ ID NO: 74638 - DNA, 25 bp, Canis familiaris
ctgccctactgtggccctaatgaaa

SEQ ID NO: 74639 - DNA, 25 bp, Canis familiaris
ctgctgctttggtgcctcaaataaa

SEQ ID NO: 74640 - DNA, 25 bp, Canis familiaris
ctgcttcaatccttgcccaagaaaa

SEQ ID NO: 74641 - DNA, 25 bp, Canis familiaris
ctgcttgcagtcaccgtcaataaaa

SEQ ID NO: 74642 - DNA, 25 bp, Canis familiaris
ctgcttgaccaagtagtgcaatcat

SEQ ID NO: 74643 - DNA, 25 bp, Canis familiaris
ctgccgagctctacaatggcaattt

SEQ ID NO: 74644 - DNA, 25 bp, Canis familiaris
ctgcctcatgcagtgacctgtgacg

SEQ ID NO: 74645 - DNA, 25 bp, Canis familiaris
ctgcacagcatggtgagcgtgtcca

SEQ ID NO: 74646 - DNA, 25 bp, Canis familiaris
ctgctgatgctgggaggctgtcccg

SEQ ID NO: 74647 - DNA, 25 bp, Canis familiaris
ctgctgagagtccagatgtgccagc

SEQ ID NO: 74648 - DNA, 25 bp, Canis familiaris
ctgctgggcccagtgatgctggata

SEQ ID NO: 74649 - DNA, 25 bp, Canis familiaris
ctgcctggcactggctgatgggcac

SEQ ID NO: 74650 - DNA, 25 bp, Canis familiaris
ctgccgtgctgtgctgtgtgagaaa

SEQ ID NO: 74651 - DNA, 25 bp, Canis familiaris
ctgccactgcaggacgtgtacaaga

SEQ ID NO: 74652 - DNA, 25 bp, Canis familiaris
ctgcacacatcagccagtaccaagc

SEQ ID NO: 74653 - DNA, 25 bp, Canis familiaris
ctgccacatacaccacgaaagacaa

SEQ ID NO: 74654 - DNA, 25 bp, Canis familiaris
ctgctcctgaccaactcaaaagcca

SEQ ID NO: 74655 - DNA, 25 bp, Canis familiaris
ctgctccgacctatagtaaaacagc

SEQ ID NO: 74656 - DNA, 25 bp, Canis familiaris
ctgcctgtcccttctagtaaaataa

SEQ ID NO: 74657 - DNA, 25 bp, Canis familiaris
ctgcctccctcaaggagttaactaa

SEQ ID NO: 74658 - DNA, 25 bp, Canis familiaris
ctgcccccttcattggcattaatct

SEQ ID NO: 74659 - DNA, 25 bp, Canis familiaris
ctgcccacaaccgggcatgtcactg

SEQ ID NO: 74660 - DNA, 25 bp, Canis familiaris
ctgcccacttcctggatgatagcgg

SEQ ID NO: 74661 - DNA, 25 bp, Canis familiaris
ctgcccaccactctggtgattgggc

SEQ ID NO: 74662 - DNA, 25 bp, Canis familiaris
ctgcctccccagcaaggacaggagc

SEQ ID NO: 74663 - DNA, 25 bp, Canis familiaris
ctgccattcccccaagtggagaatg

SEQ ID NO: 74664 - DNA, 25 bp, Canis familiaris
ctgcgtcctcccggagtgggagcag

SEQ ID NO: 74665 - DNA, 25 bp, Canis familiaris
ctgcggcccacggtgggtagcagca

SEQ ID NO: 74666 - DNA, 25 bp, Canis familiaris
ctgcccatcctaggctgggctagcc

SEQ ID NO: 74667 - DNA, 25 bp, Canis familiaris
ctgctccctgcttagtggggagtcg

SEQ ID NO: 74668 - DNA, 25 bp, Canis familiaris
ctgcactggcctttgcaaggggttg

SEQ ID NO: 74669 - DNA, 25 bp, Canis familiaris
ctgcctgcccatgggcacatgggag

SEQ ID NO: 74670 - DNA, 25 bp, Canis familiaris
ctgccacccagaagactgtggatgg

SEQ ID NO: 74671 - DNA, 25 bp, Canis familiaris
ctgccacccagaagactgtggatgg

SEQ ID NO: 74672 - DNA, 25 bp, Canis familiaris
ctgctcctccagaagactgctgatt

SEQ ID NO: 74673 - DNA, 25 bp, Canis familiaris
ctgctgccttcgaagtgtgcgaaca

SEQ ID NO: 74674 - DNA, 25 bp, Canis familiaris
ctgctgtagtcgttttcagtacatt

SEQ ID NO: 74675 - DNA, 25 bp, Canis familiaris
ctgcagtacagggctcttcaaactt

SEQ ID NO: 74676 - DNA, 25 bp, Canis familiaris
ctgcatacatagctcctctcaaaaa

SEQ ID NO: 74677 - DNA, 25 bp, Canis familiaris
ctgcaacatggtccctcgaaacaaa

SEQ ID NO: 74678 - DNA, 25 bp, Canis familiaris
ctgaagctggtgtgccgacaagcca

SEQ ID NO: 74679 - DNA, 25 bp, Canis familiaris
ctgaggtgggctagagcgcctgccc

SEQ ID NO: 74680 - DNA, 25 bp, Canis familiaris
ctgcggtggacgaggcagcgaggca

SEQ ID NO: 74681 - DNA, 25 bp, Canis familiaris
ctgcatggtggagaactctgggcca

SEQ ID NO: 74682 - DNA, 25 bp, Canis familiaris
ctgggtttggacccagggcaccttg

SEQ ID NO: 74683 - DNA, 25 bp, Canis familiaris
ctgcgtgtttggttccagacatccc

SEQ ID NO: 74684 - DNA, 25 bp, Canis familiaris
ctgcgctaccggtgcaatgacacca

SEQ ID NO: 74685 - DNA, 25 bp, Canis familiaris
ctgctgtaccagataaaccccacaa

SEQ ID NO: 74686 - DNA, 25 bp, Canis familiaris
ctgatttccaggaaagtcccctgag

SEQ ID NO: 74687 - DNA, 25 bp, Canis familiaris
ctgcattgccgggacacagtccctg

SEQ ID NO: 74688 - DNA, 25 bp, Canis familiaris
ctgctagccagggaggagtcccgcg

SEQ ID NO: 74689 - DNA, 25 bp, Canis familiaris
ctgcaggccgttgtgaatcccctgc

SEQ ID NO: 74690 - DNA, 25 bp, Canis familiaris
ctgaggctcggatggaaccactctc

SEQ ID NO: 74691 - DNA, 25 bp, Canis familiaris
ctgaagtcggagaagagccccttgc

SEQ ID NO: 74692 - DNA, 25 bp, Canis familiaris
ctgaagatttaccagaccctcgagt

SEQ ID NO: 74693 - DNA, 25 bp, Canis familiaris
ctgaagacttgacaccttcccaagg

SEQ ID NO: 74694 - DNA, 25 bp, Canis familiaris
ctgaatgaatgcgccatcagcctct

SEQ ID NO: 74695 - DNA, 25 bp, Canis familiaris
ctgactgagcagggtctcagcctcc

SEQ ID NO: 74696 - DNA, 25 bp, Canis familiaris
ctgcactatggaagacacctctccc

SEQ ID NO: 74697 - DNA, 25 bp, Canis familiaris
ctgactgtggtttacctgcagccag

SEQ ID NO: 74698 - DNA, 25 bp, Canis familiaris
ctgactgtgacttacacaggagcga

SEQ ID NO: 74699 - DNA, 25 bp, Canis familiaris
ctgcctgcgccatcaacatgatgac

SEQ ID NO: 74700 - DNA, 25 bp, Canis familiaris
ctgctgcatcgaaacatactatact

SEQ ID NO: 74701 - DNA, 25 bp, Canis familiaris
ctgctgctaaaagaattcacacaca

SEQ ID NO: 74702 - DNA, 25 bp, Canis familiaris
ctgctctcttttggcaattcgacca

SEQ ID NO: 74703 - DNA, 25 bp, Canis familiaris
ctgttctttacccatgttaccatgt

SEQ ID NO: 74704 - DNA, 25 bp, Canis familiaris
ctgttcatttagactattaacctct

SEQ ID NO: 74705 - DNA, 25 bp, Canis familiaris
ctgctcctttcagctttgcaagctg

SEQ ID NO: 74706 - DNA, 25 bp, Canis familiaris
ctgccccgtgatgctggtggtgggg

SEQ ID NO: 74707 - DNA, 25 bp, Canis familiaris
ctgccctccatagctagggcggggg

SEQ ID NO: 74708 - DNA, 25 bp, Canis familiaris
ctgccctcttggagagggaggggga

SEQ ID NO: 74709 - DNA, 25 bp, Canis familiaris
ctgccctgtggacaagaggcggcga

SEQ ID NO: 74710 - DNA, 25 bp, Canis familiaris
ctgcgacgtggcccacgatgtgctg

SEQ ID NO: 74711 - DNA, 25 bp, Canis familiaris
ctgcgtcgacatcaacgagtgtgac

SEQ ID NO: 74712 - DNA, 25 bp, Canis familiaris
ctgtgtaattggtttgggtacccag

SEQ ID NO: 74713 - DNA, 25 bp, Canis familiaris
ctggtgaataggtggcccattctcc

SEQ ID NO: 74714 - DNA, 25 bp, Canis familiaris
ctgcgctgaagggaagtgtctattc

SEQ ID NO: 74715 - DNA, 25 bp, Canis familiaris
ctgcctgacggccaagtcatcacta

SEQ ID NO: 74716 - DNA, 25 bp, Canis familiaris
ctgcctgacggccaggtcatcacca

SEQ ID NO: 74717 - DNA, 25 bp, Canis familiaris
ctgcctgacggccaggtcatcacca

SEQ ID NO: 74718 - DNA, 25 bp, Canis familiaris
ctgccattggcccatgtgattcgcc

SEQ ID NO: 74719 - DNA, 25 bp, Canis familiaris
ctgcgatcatgtccaaggattggcc

SEQ ID NO: 74720 - DNA, 25 bp, Canis familiaris
ctgcaatctgctgcaactggtgtgc

SEQ ID NO: 74721 - DNA, 25 bp, Canis familiaris
ctgaatgatggtgctgcggctgtgg

SEQ ID NO: 74722 - DNA, 25 bp, Canis familiaris
ctgctccagagagctgcctgtgtgc

SEQ ID NO: 74723 - DNA, 25 bp, Canis familiaris
ctgcgccaggagctgcgcaagctga

SEQ ID NO: 74724 - DNA, 25 bp, Canis familiaris
ctgctggcggagctgctgcaggaga

SEQ ID NO: 74725 - DNA, 25 bp, Canis familiaris
ctgctcctgggttgggctgagagaa

SEQ ID NO: 74726 - DNA, 25 bp, Canis familiaris
ctgctgccgggttgagtgcacaagg

SEQ ID NO: 74727 - DNA, 25 bp, Canis familiaris
ctgcgacgaggttggcttcaatgct

SEQ ID NO: 74728 - DNA, 25 bp, Canis familiaris
ctgcgcttcgacaagcctatcaagc

SEQ ID NO: 74729 - DNA, 25 bp, Canis familiaris
ctgcgcttcccaagagatgtgccag

SEQ ID NO: 74730 - DNA, 25 bp, Canis familiaris
ctgccctcgccaatgagagagccat

SEQ ID NO: 74731 - DNA, 25 bp, Canis familiaris
ctgcctctcgtcttgagtggacatg

SEQ ID NO: 74732 - DNA, 25 bp, Canis familiaris
ctgccatcatcttcgtggtggccag

SEQ ID NO: 74733 - DNA, 25 bp, Canis familiaris
ctgccatcactgtccttagagtgga

SEQ ID NO: 74734 - DNA, 25 bp, Canis familiaris
ctgcgatcaccccttgagaggtgtt

SEQ ID NO: 74735 - DNA, 25 bp, Canis familiaris
ctgtaccccttagtaagtgcctcta

SEQ ID NO: 74736 - DNA, 25 bp, Canis familiaris
ctgaattccttgtattaagtgcact

SEQ ID NO: 74737 - DNA, 25 bp, Canis familiaris
ctgccttccgttcaaagtgcacatc

SEQ ID NO: 74738 - DNA, 25 bp, Canis familiaris
ctgctttccttttcaacactcaaag

SEQ ID NO: 74739 - DNA, 25 bp, Canis familiaris
ctgcttttttgtacaaacttgtcta

SEQ ID NO: 74740 - DNA, 25 bp, Canis familiaris
cgtttatctcgcttaaagccggtga

SEQ ID NO: 74741 - DNA, 25 bp, Canis familiaris
ctgatttactgcgctgagtaccctg

SEQ ID NO: 74742 - DNA, 25 bp, Canis familiaris
ctgcttctcacgcgtggaatctttg

SEQ ID NO: 74743 - DNA, 25 bp, Canis familiaris
ctgccctgacctttagaaatctggg

SEQ ID NO: 74744 - DNA, 25 bp, Canis familiaris
ctgacctagcctgggaacaatagga

SEQ ID NO: 74745 - DNA, 25 bp, Canis familiaris
ctgaactcccaggtgaaacagagag

SEQ ID NO: 74746 - DNA, 25 bp, Canis familiaris
ctgaagccgccagaagcgacaactg

SEQ ID NO: 74747 - DNA, 25 bp, Canis familiaris
ctgcacacgttcggcgacgagaacg

SEQ ID NO: 74748 - DNA, 25 bp, Canis familiaris
ctgaagcgtgtagcagctccaaagc

SEQ ID NO: 74749 - DNA, 25 bp, Canis familiaris
ctgcaacgtggagtcgcagcagcgc

SEQ ID NO: 74750 - DNA, 25 bp, Canis familiaris
ctgctgtttgaagcgcagcaggtgc

SEQ ID NO: 74751 - DNA, 25 bp, Canis familiaris
ctgcctttgagagcctgtggtttca

SEQ ID NO: 74752 - DNA, 25 bp, Canis familiaris
ctgccttaaagcccttctgttaaag

SEQ ID NO: 74753 - DNA, 25 bp, Canis familiaris
ctgactgtaaatgcccctgttaaag

SEQ ID NO: 74754 - DNA, 25 bp, Canis familiaris
ctgtcctaaggcttcccattaagaa

SEQ ID NO: 74755 - DNA, 25 bp, Canis familiaris
cgatcactgaggccccattattaac

SEQ ID NO: 74756 - DNA, 25 bp, Canis familiaris
ctgccctaggtcctgattttaacca

SEQ ID NO: 74757 - DNA, 25 bp, Canis familiaris
ctgcccgaggcatagttgtgtacac

SEQ ID NO: 74758 - DNA, 25 bp, Canis familiaris
ctgcccccgcaattatttggacaat

SEQ ID NO: 74759 - DNA, 25 bp, Canis familiaris
ctgccccagcccaacatttggaaaa

SEQ ID NO: 74760 - DNA, 25 bp, Canis familiaris
ctgccccaccagagacgaggaggaa

SEQ ID NO: 74761 - DNA, 25 bp, Canis familiaris
ctgcccgcaccgggaaggcgagagc

SEQ ID NO: 74762 - DNA, 25 bp, Canis familiaris
ctgcctgcagaggccgtggaggcgg

SEQ ID NO: 74763 - DNA, 25 bp, Canis familiaris
ctgcctgggtcttgctggaggagtg

SEQ ID NO: 74764 - DNA, 25 bp, Canis familiaris
ctgcttgagttcttgctccaggagg

SEQ ID NO: 74765 - DNA, 25 bp, Canis familiaris
ctgcttcatgtgttttcaagaagag

SEQ ID NO: 74766 - DNA, 25 bp, Canis familiaris
ctgcatcatgcttctctgtatataa

SEQ ID NO: 74767 - DNA, 25 bp, Canis familiaris
ctgcctgctcacccaataaagaaag

SEQ ID NO: 74768 - DNA, 25 bp, Canis familiaris
ctgcccgccagccagaagaagaact

SEQ ID NO: 74769 - DNA, 25 bp, Canis familiaris
ctgcgccccacaaaatgcatatgga

SEQ ID NO: 74770 - DNA, 25 bp, Canis familiaris
ctgcctccacccaaatctctggagg

SEQ ID NO: 74771 - DNA, 25 bp, Canis familiaris
ctggggcaacgaaagcttgggtgct

SEQ ID NO: 74772 - DNA, 25 bp, Canis familiaris
ctgctgcgccaaggttactacgcgg

SEQ ID NO: 74773 - DNA, 25 bp, Canis familiaris
ctgcgatgccctggttaaacacatg

SEQ ID NO: 74774 - DNA, 25 bp, Canis familiaris
ctgcagcaactctgtctctaacaac

SEQ ID NO: 74775 - DNA, 25 bp, Canis familiaris
ctgcacgacatgtggcccacagaac

SEQ ID NO: 74776 - DNA, 25 bp, Canis familiaris
ctgacaacacaggagccaaaaatct

SEQ ID NO: 74777 - DNA, 25 bp, Canis familiaris
ctgaccccacgtccaatttaatttg

SEQ ID NO: 74778 - DNA, 25 bp, Canis familiaris
ctgaccctttgtccaacatggtttt

SEQ ID NO: 74779 - DNA, 25 bp, Canis familiaris
cgtccctttggagtagcactgttat

SEQ ID NO: 74780 - DNA, 25 bp, Canis familiaris
ctgctatcttttcaccaactgtatg

SEQ ID NO: 74781 - DNA, 25 bp, Canis familiaris
ctgctgtcttccctgaaatgacttg

SEQ ID NO: 74782 - DNA, 25 bp, Canis familiaris
ctgcccattggcctgaaaatactca

SEQ ID NO: 74783 - DNA, 25 bp, Canis familiaris
ctgccctctcgacgagagaaggctg

SEQ ID NO: 74784 - DNA, 25 bp, Canis familiaris
ctgctgctcttcgcaagctgacagg

SEQ ID NO: 74785 - DNA, 25 bp, Canis familiaris
ctgcgtcttccctcttcgggaagaa

SEQ ID NO: 74786 - DNA, 25 bp, Canis familiaris
ctgcagcacgtcgcttatattggga

SEQ ID NO: 74787 - DNA, 25 bp, Canis familiaris
ctgagacagggtgctttcgggaagg

SEQ ID NO: 74788 - DNA, 25 bp, Canis familiaris
ctgcaccagtttgtattccctgcaa

SEQ ID NO: 74789 - DNA, 25 bp, Canis familiaris
ctgcaacttttaacttgccctgtga

SEQ ID NO: 74790 - DNA, 25 bp, Canis familiaris
ctgataaaaggaatcttccacttga

SEQ ID NO: 74791 - DNA, 25 bp, Canis familiaris
ctgcaaaatccaagacgtgcacacc

SEQ ID NO: 74792 - DNA, 25 bp, Canis familiaris
ctgcaaagccaagacatgtagccat

SEQ ID NO: 74793 - DNA, 25 bp, Canis familiaris
ctgaaaccactatggggcctggctg

SEQ ID NO: 74794 - DNA, 25 bp, Canis familiaris
ctgacaaccccaaagggacgcgctt

SEQ ID NO: 74795 - DNA, 25 bp, Canis familiaris
ctgaacagagccacagaaggaccgt

SEQ ID NO: 74796 - DNA, 25 bp, Canis familiaris
ctgagacaggtgaggacagcgtcct

SEQ ID NO: 74797 - DNA, 25 bp, Canis familiaris
ctgaagcgagggatgctgctgcggc

SEQ ID NO: 74798 - DNA, 25 bp, Canis familiaris
ctgcctgcgggagtgtatctgcgag

SEQ ID NO: 74799 - DNA, 25 bp, Canis familiaris
ctgccggtgatgttcatattgtgag

SEQ ID NO: 74800 - DNA, 25 bp, Canis familiaris
ctgcccgtgcacttctatgggaaag

SEQ ID NO: 74801 - DNA, 25 bp, Canis familiaris
ctgacgcctgcacctttaagaagga

SEQ ID NO: 74802 - DNA, 25 bp, Canis familiaris
ctgcaatcacttcctttttggtgga

SEQ ID NO: 74803 - DNA, 25 bp, Canis familiaris
ctgagtcttgctctttcggggaaaa

SEQ ID NO: 74804 - DNA, 25 bp, Canis familiaris
ctgacacctctgttttcggggtagt

SEQ ID NO: 74805 - DNA, 25 bp, Canis familiaris
ctgaaattagaaggtcggtggcgag

SEQ ID NO: 74806 - DNA, 25 bp, Canis familiaris
ctgatatttacagattcgagtggtg

SEQ ID NO: 74807 - DNA, 25 bp, Canis familiaris
ctgtttccccatatccagttgtgga

SEQ ID NO: 74808 - DNA, 25 bp, Canis familiaris
ctgttccgacctgtatcaatttaaa

SEQ ID NO: 74809 - DNA, 25 bp, Canis familiaris
ctgttccaacctgtatcatttaaaa

SEQ ID NO: 74810 - DNA, 25 bp, Canis familiaris
ctgcctgtgctacttttacttgtaa

SEQ ID NO: 74811 - DNA, 25 bp, Canis familiaris
ctgcctgtcatacacacatagctgt

SEQ ID NO: 74812 - DNA, 25 bp, Canis familiaris
ctgcacattccagacatcatcaagg

SEQ ID NO: 74813 - DNA, 25 bp, Canis familiaris
ctgcgttacacaactctctatggag

SEQ ID NO: 74814 - DNA, 25 bp, Canis familiaris
ctgcagtttcagattcctttggtgg

SEQ ID NO: 74815 - DNA, 25 bp, Canis familiaris
ctgcgttctctgctacagatcttgc

SEQ ID NO: 74816 - DNA, 25 bp, Canis familiaris
ctgctggtgcctgtgaaggtgctgc

SEQ ID NO: 74817 - DNA, 25 bp, Canis familiaris
ctgctggtcctgtgatgatgggcac

SEQ ID NO: 74818 - DNA, 25 bp, Canis familiaris
ctgctgttcctgtggtgcccatagg

SEQ ID NO: 74819 - DNA, 25 bp, Canis familiaris
ctgcgctacctggaccggtataggg

SEQ ID NO: 74820 - DNA, 25 bp, Canis familiaris
ctgaatcaggccaaccaggataagg

SEQ ID NO: 74821 - DNA, 25 bp, Canis familiaris
ctgaactggcttttctggagatcag

SEQ ID NO: 74822 - DNA, 25 bp, Canis familiaris
ctgcaactggcaaacctgccgacgc

SEQ ID NO: 74823 - DNA, 25 bp, Canis familiaris
ctgccctggcatttcaggacgccag

SEQ ID NO: 74824 - DNA, 25 bp, Canis familiaris
ctgctcctggagacctggacgcaga

SEQ ID NO: 74825 - DNA, 25 bp, Canis familiaris
ctgcatcgtggaagcatttgaccca

SEQ ID NO: 74826 - DNA, 25 bp, Canis familiaris
ctgcattggcgaaggaggcggcggc

SEQ ID NO: 74827 - DNA, 25 bp, Canis familiaris
ctgcctggctaacaaggactgccct

SEQ ID NO: 74828 - DNA, 25 bp, Canis familiaris
ctgcccctcacagagatggagctgc

SEQ ID NO: 74829 - DNA, 25 bp, Canis familiaris
ctgcccctaggatgctgcagcagag

SEQ ID NO: 74830 - DNA, 25 bp, Canis familiaris
ctgccgcccgtattgctgagaagaa

SEQ ID NO: 74831 - DNA, 25 bp, Canis familiaris
ctgcgccacgcaggctatggagaag

SEQ ID NO: 74832 - DNA, 25 bp, Canis familiaris
ctgacacctgctggctagcgaggtt

SEQ ID NO: 74833 - DNA, 25 bp, Canis familiaris
ctgccccagcatggtacgagtgctg

SEQ ID NO: 74834 - DNA, 25 bp, Canis familiaris
ctgctcttcgcaagctgacaggctg

SEQ ID NO: 74835 - DNA, 25 bp, Canis familiaris
ctgctctaagcaacttcgggtgtgg

SEQ ID NO: 74836 - DNA, 25 bp, Canis familiaris
ctgcccaccaacaatctgggccgtg

SEQ ID NO: 74837 - DNA, 25 bp, Canis familiaris
ctgcacctccaagatcggcaggcga

SEQ ID NO: 74838 - DNA, 25 bp, Canis familiaris
ctgacccagactggaactcaggccc

SEQ ID NO: 74839 - DNA, 25 bp, Canis familiaris
ctgacctctgacggaacgggtgctg

SEQ ID NO: 74840 - DNA, 25 bp, Canis familiaris
ctgacagcccagggaaccggggagg

SEQ ID NO: 74841 - DNA, 25 bp, Canis familiaris
cgaagaagacggagtgcggggggcg

SEQ ID NO: 74842 - DNA, 25 bp, Canis familiaris
cgggaaagggcagatccgggtggcg

SEQ ID NO: 74843 - DNA, 25 bp, Canis familiaris
cggggaagaggagagggcgccggcg

SEQ ID NO: 74844 - DNA, 25 bp, Canis familiaris
ctgcgagaaggtcatccagggcgcc

SEQ ID NO: 74845 - DNA, 25 bp, Canis familiaris
ctgcgagacgtggcggacggaggcc

SEQ ID NO: 74846 - DNA, 25 bp, Canis familiaris
ctgctcgggcgagaagcggaggccc

SEQ ID NO: 74847 - DNA, 25 bp, Canis familiaris
ctgacgggtgggctggcaggagcca

SEQ ID NO: 74848 - DNA, 25 bp, Canis familiaris
ctgacggggagacgcgggaggaatc

SEQ ID NO: 74849 - DNA, 25 bp, Canis familiaris
ctgtcggaaagaaggacgaatgtcc

SEQ ID NO: 74850 - DNA, 25 bp, Canis familiaris
ctgaaggcaaagatagatcgtcctt

SEQ ID NO: 74851 - DNA, 25 bp, Canis familiaris
cgttggcaattgatggtcttcctag

SEQ ID NO: 74852 - DNA, 25 bp, Canis familiaris
ctgtttaaatgtggccttttctgtg

SEQ ID NO: 74853 - DNA, 25 bp, Canis familiaris
ctgtttcaaacagctacattacttg

SEQ ID NO: 74854 - DNA, 25 bp, Canis familiaris
ctgtcctaacagacctacattattg

SEQ ID NO: 74855 - DNA, 25 bp, Canis familiaris
ctgtcctgataacatccagaatgtt

SEQ ID NO: 74856 - DNA, 25 bp, Canis familiaris
ctgatacttggaacccagactctcc

SEQ ID NO: 74857 - DNA, 25 bp, Canis familiaris
ctgctaggtggtcaacgactccagg

SEQ ID NO: 74858 - DNA, 25 bp, Canis familiaris
ctgaagagttttccgctgacctcag

SEQ ID NO: 74859 - DNA, 25 bp, Canis familiaris
ctgttggtttcagtgactatcctca

SEQ ID NO: 74860 - DNA, 25 bp, Canis familiaris
ctgcttgagcatttatctagttcca

SEQ ID NO: 74861 - DNA, 25 bp, Canis familiaris
ctgctgcagcagatgttcgagtccg

SEQ ID NO: 74862 - DNA, 25 bp, Canis familiaris
ctgctgcatcagctttgaaatcaca

SEQ ID NO: 74863 - DNA, 25 bp, Canis familiaris
ctgctatcgtccatatcaatcatca

SEQ ID NO: 74864 - DNA, 25 bp, Canis familiaris
ctgctactgttcgtactgtctacag

SEQ ID NO: 74865 - DNA, 25 bp, Canis familiaris
ctgcaactcttggagactctgcttg

SEQ ID NO: 74866 - DNA, 25 bp, Canis familiaris
ctgcccttctaagcttctgatgaga

SEQ ID NO: 74867 - DNA, 25 bp, Canis familiaris
ctgcacttattttctcttcttgaga

SEQ ID NO: 74868 - DNA, 25 bp, Canis familiaris
ctgatctctatcttggtttttaatg

SEQ ID NO: 74869 - DNA, 25 bp, Canis familiaris
ctgagctgccaaaactttttatatc

SEQ ID NO: 74870 - DNA, 25 bp, Canis familiaris
ctgagacctacaccatcatttttgt

SEQ ID NO: 74871 - DNA, 25 bp, Canis familiaris
ctgcaaccgctaccctaatattgag

SEQ ID NO: 74872 - DNA, 25 bp, Canis familiaris
ctgctatggcgtttcctctaacagg

SEQ ID NO: 74873 - DNA, 25 bp, Canis familiaris
ctgctgtgggattctgctcataact

SEQ ID NO: 74874 - DNA, 25 bp, Canis familiaris
ctgctgctttgttatctctaatctc

SEQ ID NO: 74875 - DNA, 25 bp, Canis familiaris
ctgctgcctagtgatcaccgatgac

SEQ ID NO: 74876 - DNA, 25 bp, Canis familiaris
ctgcagccaaatgaccctgtgacta

SEQ ID NO: 74877 - DNA, 25 bp, Canis familiaris
ctgctttattaaccacttcacttgt

SEQ ID NO: 74878 - DNA, 25 bp, Canis familiaris
ctgtttttaaactctcgatattctt

SEQ ID NO: 74879 - DNA, 25 bp, Canis familiaris
ctgatttaaaaatgcctggtttctt

SEQ ID NO: 74880 - DNA, 25 bp, Canis familiaris
ctgcttataatttagccagggtttc

SEQ ID NO: 74881 - DNA, 25 bp, Canis familiaris
ctgagtagagtgcaaccactgggtt

SEQ ID NO: 74882 - DNA, 25 bp, Canis familiaris
ctgagctgacgtccatagcgacatg

SEQ ID NO: 74883 - DNA, 25 bp, Canis familiaris
ctgacatgactgaccaactgaccaa

SEQ ID NO: 74884 - DNA, 25 bp, Canis familiaris
ctgacttctgacaaacagcctctgg

SEQ ID NO: 74885 - DNA, 25 bp, Canis familiaris
ctgcagctgttaaagccacccacag

SEQ ID NO: 74886 - DNA, 25 bp, Canis familiaris
ctgcagctggattacgcaacagtaa

SEQ ID NO: 74887 - DNA, 25 bp, Canis familiaris
ctgcgctggctcacgtaacttgagc

SEQ ID NO: 74888 - DNA, 25 bp, Canis familiaris
ctgctgcgacgatcggtacactgag

SEQ ID NO: 74889 - DNA, 25 bp, Canis familiaris
ctgctggcaagaacggtgaccgcgg

SEQ ID NO: 74890 - DNA, 25 bp, Canis familiaris
ctgttaaagatctgtgtcctcgctc

SEQ ID NO: 74891 - DNA, 25 bp, Canis familiaris
ctgagtaaattatattctctccctt

SEQ ID NO: 74892 - DNA, 25 bp, Canis familiaris
ctgagtacagtttccagtctcatcc

SEQ ID NO: 74893 - DNA, 25 bp, Canis familiaris
ctgaggctcttttccagccttcctt

SEQ ID NO: 74894 - DNA, 25 bp, Canis familiaris
ctgagcgctttttaccacgtctcag

SEQ ID NO: 74895 - DNA, 25 bp, Canis familiaris
ctgaccttgagggaccacctctaga

SEQ ID NO: 74896 - DNA, 25 bp, Canis familiaris
cggccttcagaggcacaaccacagg

SEQ ID NO: 74897 - DNA, 25 bp, Canis familiaris
cgaccttctgactcaaccaagtaaa

SEQ ID NO: 74898 - DNA, 25 bp, Canis familiaris
ctgacctgagtctaaaaccaagtaa

SEQ ID NO: 74899 - DNA, 25 bp, Canis familiaris
ctgcacactgagacccgagaacaag

SEQ ID NO: 74900 - DNA, 25 bp, Canis familiaris
ctgagcaagcgagccgtggccaagg

SEQ ID NO: 74901 - DNA, 25 bp, Canis familiaris
ctgaccaggaggtccggccaagtgc

SEQ ID NO: 74902 - DNA, 25 bp, Canis familiaris
ctgcgtgcaggacgacacggccaag

SEQ ID NO: 74903 - DNA, 25 bp, Canis familiaris
ctgctgtgtctactgatactgctgc

SEQ ID NO: 74904 - DNA, 25 bp, Canis familiaris
ctgctgtgcttatttgtgctgtcca

SEQ ID NO: 74905 - DNA, 25 bp, Canis familiaris
ctgctgacttatttcactgagcata

SEQ ID NO: 74906 - DNA, 25 bp, Canis familiaris
ctgctgacttatttcctgacatata

SEQ ID NO: 74907 - DNA, 25 bp, Canis familiaris
ctgctcgctttgttctggataatca

SEQ ID NO: 74908 - DNA, 25 bp, Canis familiaris
ctgctgctgttttcctgaggacaga

SEQ ID NO: 74909 - DNA, 25 bp, Canis familiaris
ctgctgctgttctgcaactggagca

SEQ ID NO: 74910 - DNA, 25 bp, Canis familiaris
ctgctgttatcccaagccagatcaa

SEQ ID NO: 74911 - DNA, 25 bp, Canis familiaris
ctgctgctggaccacaaccagctgc

SEQ ID NO: 74912 - DNA, 25 bp, Canis familiaris
ctgcttggctgaccaggccagagct

SEQ ID NO: 74913 - DNA, 25 bp, Canis familiaris
ctgtttgaagcgcagcaggtgcatc

SEQ ID NO: 74914 - DNA, 25 bp, Canis familiaris
ctgctgggagacagagctgcttcaa

SEQ ID NO: 74915 - DNA, 25 bp, Canis familiaris
ctgctggaaacagactcgattcata

SEQ ID NO: 74916 - DNA, 25 bp, Canis familiaris
ctgcttgaacttgaccagtgtgaaa

SEQ ID NO: 74917 - DNA, 25 bp, Canis familiaris
cgttttcctaacttgtgtagaatca

SEQ ID NO: 74918 - DNA, 25 bp, Canis familiaris
ctgttttactaccttattagaccat

SEQ ID NO: 74919 - DNA, 25 bp, Canis familiaris
ctgacttgtaccggctgttatgaga

SEQ ID NO: 74920 - DNA, 25 bp, Canis familiaris
ctgagtatgtcgtggagtctactgg

SEQ ID NO: 74921 - DNA, 25 bp, Canis familiaris
ctgagtatgtcgtggagtctactgg

SEQ ID NO: 74922 - DNA, 25 bp, Canis familiaris
ctgcagtcggggaggcgtagctcag

SEQ ID NO: 74923 - DNA, 25 bp, Canis familiaris
ctgcgtctgggggtgaggggccagg

SEQ ID NO: 74924 - DNA, 25 bp, Canis familiaris
ctgcacctgctacgggggagggcag

SEQ ID NO: 74925 - DNA, 25 bp, Canis familiaris
ctgcataatccaaggggaaggccag

SEQ ID NO: 74926 - DNA, 25 bp, Canis familiaris
ctgaaatctcaactgggaccccagc

SEQ ID NO: 74927 - DNA, 25 bp, Canis familiaris
ctgcataaacaattgactcacccca

SEQ ID NO: 74928 - DNA, 25 bp, Canis familiaris
ctgaaacagtatcgagctggcccct

SEQ ID NO: 74929 - DNA, 25 bp, Canis familiaris
ctgcactcgctttggcattgcagcc

SEQ ID NO: 74930 - DNA, 25 bp, Canis familiaris
ctgcatctggctcactgctgagagc

SEQ ID NO: 74931 - DNA, 25 bp, Canis familiaris
ctgagctgctgcacatgctggagtc

SEQ ID NO: 74932 - DNA, 25 bp, Canis familiaris
ctgcagctgcataactggatcgaca

SEQ ID NO: 74933 - DNA, 25 bp, Canis familiaris
ctgcatcatctcactctgcaagaca

SEQ ID NO: 74934 - DNA, 25 bp, Canis familiaris
ctgctctacatcgtgctgacacaga

SEQ ID NO: 74935 - DNA, 25 bp, Canis familiaris
ctgcatccactggtgctgccaaggc

SEQ ID NO: 74936 - DNA, 25 bp, Canis familiaris
ctgctgcaccttgtgcatcttggga

SEQ ID NO: 74937 - DNA, 25 bp, Canis familiaris
ctgctgccctgagcgcagaggcagg

SEQ ID NO: 74938 - DNA, 25 bp, Canis familiaris
ctgctgccctggggacaggtgaggc

SEQ ID NO: 74939 - DNA, 25 bp, Canis familiaris
ctgctgacctgggacaatggacggg

SEQ ID NO: 74940 - DNA, 25 bp, Canis familiaris
ctgcatggaacggatccaggccggg

SEQ ID NO: 74941 - DNA, 25 bp, Canis familiaris
ctgcaggaacgagccgggcggagac

SEQ ID NO: 74942 - DNA, 25 bp, Canis familiaris
ctgcagggcccagacggctggggag

SEQ ID NO: 74943 - DNA, 25 bp, Canis familiaris
ctgcaggtgggctcctggggaacag

SEQ ID NO: 74944 - DNA, 25 bp, Canis familiaris
ctgcaactaggggcgcggggggcag

SEQ ID NO: 74945 - DNA, 25 bp, Canis familiaris
ctggagccacttcaggggtgggctg

SEQ ID NO: 74946 - DNA, 25 bp, Canis familiaris
ctgtagctccttcaggtcaaagacg

SEQ ID NO: 74947 - DNA, 25 bp, Canis familiaris
ctgacagctccttggaggtctgagg

SEQ ID NO: 74948 - DNA, 25 bp, Canis familiaris
ctgctagcccaaggaggatgctgtg

SEQ ID NO: 74949 - DNA, 25 bp, Canis familiaris
ctgcaggccaagtatgagtgatggg

SEQ ID NO: 74950 - DNA, 25 bp, Canis familiaris
ctgcggacgcgcgagagcgaggagc

SEQ ID NO: 74951 - DNA, 25 bp, Canis familiaris
ctgcggctggctgagagccgggctg

SEQ ID NO: 74952 - DNA, 25 bp, Canis familiaris
ctgctgactggggctgagctcagag

SEQ ID NO: 74953 - DNA, 25 bp, Canis familiaris
ctgcgagctgcgagcggcaagatgg

SEQ ID NO: 74954 - DNA, 25 bp, Canis familiaris
ctgcgatgcctcgagctggaagaga

SEQ ID NO: 74955 - DNA, 25 bp, Canis familiaris
ctgctgctgcccatgcaggagaaga

SEQ ID NO: 74956 - DNA, 25 bp, Canis familiaris
ctgcgcatcctcaagcagctggagg

SEQ ID NO: 74957 - DNA, 25 bp, Canis familiaris
ctgctgctgccgcaggtggaggagt

SEQ ID NO: 74958 - DNA, 25 bp, Canis familiaris
ctgctctgaggccgggggatgatgt

SEQ ID NO: 74959 - DNA, 25 bp, Canis familiaris
ctgcgcgggcagctggaggagatga

SEQ ID NO: 74960 - DNA, 25 bp, Canis familiaris
ctgcaggaggcgttctgcaggccta

SEQ ID NO: 74961 - DNA, 25 bp, Canis familiaris
ctgagcggtggctctgagttccatg

SEQ ID NO: 74962 - DNA, 25 bp, Canis familiaris
ctgacggggatgctcacttgtcatt

SEQ ID NO: 74963 - DNA, 25 bp, Canis familiaris
ctgactggtctgtcggtctttatgg

SEQ ID NO: 74964 - DNA, 25 bp, Canis familiaris
ctgactccctgtcgagtcttacgga

SEQ ID NO: 74965 - DNA, 25 bp, Canis familiaris
ctgactctaagcctgatcctgtaag

SEQ ID NO: 74966 - DNA, 25 bp, Canis familiaris
ctgaaccaactctacctgtaaccag

SEQ ID NO: 74967 - DNA, 25 bp, Canis familiaris
ctgaactcaacctagtttccaactg

SEQ ID NO: 74968 - DNA, 25 bp, Canis familiaris
ctgagactcaccgaggtttggtccc

SEQ ID NO: 74969 - DNA, 25 bp, Canis familiaris
cgtactcacaacctgctcttaggaa

SEQ ID NO: 74970 - DNA, 25 bp, Canis familiaris
ctgctatgccacacctactaaagac

SEQ ID NO: 74971 - DNA, 25 bp, Canis familiaris
ctgcttggctcctctagccaaagtc

SEQ ID NO: 74972 - DNA, 25 bp, Canis familiaris
ctgctctgtgctttcgaaccaaagt

SEQ ID NO: 74973 - DNA, 25 bp, Canis familiaris
ctgctcccttgggcaaccaatggga

SEQ ID NO: 74974 - DNA, 25 bp, Canis familiaris
ctgtcccaattcccctatatgaggg

SEQ ID NO: 74975 - DNA, 25 bp, Canis familiaris
gctgtccgattcacacgtataacga

SEQ ID NO: 74976 - DNA, 25 bp, Canis familiaris
ctgctcctcttcacactggaaattg

SEQ ID NO: 74977 - DNA, 25 bp, Canis familiaris
ctgctccacctcaatcagggtagag

SEQ ID NO: 74978 - DNA, 25 bp, Canis familiaris
ctgcacttccacaacctggtgaaag

SEQ ID NO: 74979 - DNA, 25 bp, Canis familiaris
ctgcaccccagctacagctgagtgc

SEQ ID NO: 74980 - DNA, 25 bp, Canis familiaris
ctgctcccagcacacatggcagagg

SEQ ID NO: 74981 - DNA, 25 bp, Canis familiaris
ctgctgcccgcagaatggcttggat

SEQ ID NO: 74982 - DNA, 25 bp, Canis familiaris
ctgctctcaggaaagtggtgtggtc

SEQ ID NO: 74983 - DNA, 25 bp, Canis familiaris
ctgctcttaagcaagctgcggttgt

SEQ ID NO: 74984 - DNA, 25 bp, Canis familiaris
ctgtcctagcgcttgctgaagtcat

SEQ ID NO: 74985 - DNA, 25 bp, Canis familiaris
ctgaccgagcgtggctacagcttca

SEQ ID NO: 74986 - DNA, 25 bp, Canis familiaris
ctgacacggcttgcagacacggtaa

SEQ ID NO: 74987 - DNA, 25 bp, Canis familiaris
ctgaacgggccattgaacaagtatt

SEQ ID NO: 74988 - DNA, 25 bp, Canis familiaris
ctgcagactgtggccacagaacaca

SEQ ID NO: 74989 - DNA, 25 bp, Canis familiaris
ctgcgtggtctcgcagagacgccac

SEQ ID NO: 74990 - DNA, 25 bp, Canis familiaris
ctgcgtgtggctcccgaggagcacc

SEQ ID NO: 74991 - DNA, 25 bp, Canis familiaris
ctgcattgggctccttatatggagc

SEQ ID NO: 74992 - DNA, 25 bp, Canis familiaris
ctgcattgggctcctcttagggagc

SEQ ID NO: 74993 - DNA, 25 bp, Canis familiaris
ctgcactgggctccccatagggagc

SEQ ID NO: 74994 - DNA, 25 bp, Canis familiaris
ctgacggactacctcatgaagatcc

SEQ ID NO: 74995 - DNA, 25 bp, Canis familiaris
ctgacggactacctcatgaagatcc

SEQ ID NO: 74996 - DNA, 25 bp, Canis familiaris
ctgaaagacctcgtgcgatttccgt

SEQ ID NO: 74997 - DNA, 25 bp, Canis familiaris
ctgacacatacccggattttccagg

SEQ ID NO: 74998 - DNA, 25 bp, Canis familiaris
cgatcagataccgtcgtagttccga

SEQ ID NO: 74999 - DNA, 25 bp, Canis familiaris
cgatcagataccgtcgtagttccga

SEQ ID NO: 75000 - DNA, 25 bp, Canis familiaris
cccagtaactagctgcagaccctga

SEQ ID NO: 75001 - DNA, 25 bp, Canis familiaris
cccaggaaccctggatgagccctga

SEQ ID NO: 75002 - DNA, 25 bp, Canis familiaris
ctgaaggaatccgggtacccacaat

SEQ ID NO: 75003 - DNA, 25 bp, Canis familiaris
ctgcaatgtggatctgttttcccca

SEQ ID NO: 75004 - DNA, 25 bp, Canis familiaris
ctgttggttactttattttcctgat

SEQ ID NO: 75005 - DNA, 25 bp, Canis familiaris
ctgctatgtccttatttattttttg

SEQ ID NO: 75006 - DNA, 25 bp, Canis familiaris
ctgctatgttttctctggttcatca

SEQ ID NO: 75007 - DNA, 25 bp, Canis familiaris
ctgctttgttatctctaatctcaaa

SEQ ID NO: 75008 - DNA, 25 bp, Canis familiaris
ctgctttagaagctgctcagtccca

SEQ ID NO: 75009 - DNA, 25 bp, Canis familiaris
ctgacttatatccctatcattccca

SEQ ID NO: 75010 - DNA, 25 bp, Canis familiaris
ctgcatttttgccacatttctccag

SEQ ID NO: 75011 - DNA, 25 bp, Canis familiaris
ctgcagaatgttctcaacaaccagc

SEQ ID NO: 75012 - DNA, 25 bp, Canis familiaris
ctgaaatgggcttcagatccacccc

SEQ ID NO: 75013 - DNA, 25 bp, Canis familiaris
ctgacactgggttggcaccagaccc

SEQ ID NO: 75014 - DNA, 25 bp, Canis familiaris
ctgatagcttagagctccacgaccc

SEQ ID NO: 75015 - DNA, 25 bp, Canis familiaris
ctgagagcttctacctctaagtctg

SEQ ID NO: 75016 - DNA, 25 bp, Canis familiaris
ctgagctgttccagcttcggcctgc

SEQ ID NO: 75017 - DNA, 25 bp, Canis familiaris
ctgctggagtccagtggaggcctcc

SEQ ID NO: 75018 - DNA, 25 bp, Canis familiaris
ctgcagagagtccaggggcaacctg

SEQ ID NO: 75019 - DNA, 25 bp, Canis familiaris
ctgcaagaggagccagggcagcttc

SEQ ID NO: 75020 - DNA, 25 bp, Canis familiaris
ctgctggggaggaggcctgctcccc

SEQ ID NO: 75021 - DNA, 25 bp, Canis familiaris
ctgctgggagggacacttcgtctcc

SEQ ID NO: 75022 - DNA, 25 bp, Canis familiaris
ctgctataggtgtgtcttcggttct

SEQ ID NO: 75023 - DNA, 25 bp, Canis familiaris
ctgctcttgaggttttgctcttttt

SEQ ID NO: 75024 - DNA, 25 bp, Canis familiaris
ctgagtgctagtgccttacttttct

SEQ ID NO: 75025 - DNA, 25 bp, Canis familiaris
ctgcggtggttcattcctttcagcc

SEQ ID NO: 75026 - DNA, 25 bp, Canis familiaris
ctgtcaaggcttatcccttcatggc

SEQ ID NO: 75027 - DNA, 25 bp, Canis familiaris
ctgaacggtgtcacgacttgacccc

SEQ ID NO: 75028 - DNA, 25 bp, Canis familiaris
ctgaagaactggtgcgagctggcac

SEQ ID NO: 75029 - DNA, 25 bp, Canis familiaris
ctggaacgtggctggacgtcaacgg

SEQ ID NO: 75030 - DNA, 25 bp, Canis familiaris
cggaaaggacggtgcttctgactgg

SEQ ID NO: 75031 - DNA, 25 bp, Canis familiaris
ctgagcaccaggtggtctcctctga

SEQ ID NO: 75032 - DNA, 25 bp, Canis familiaris
ctgagaaaagattgtgtcctgccat

SEQ ID NO: 75033 - DNA, 25 bp, Canis familiaris
ctgcggaaattcttgtgcgcacact

SEQ ID NO: 75034 - DNA, 25 bp, Canis familiaris
ctgcggaaattcttgtgcgcacact

SEQ ID NO: 75035 - DNA, 25 bp, Canis familiaris
ctgcagtggactgcagtcgccacct

SEQ ID NO: 75036 - DNA, 25 bp, Canis familiaris
ctgcacggagctgggcatccgcacc

SEQ ID NO: 75037 - DNA, 25 bp, Canis familiaris
ctgcacggagcttagaccatctgag

SEQ ID NO: 75038 - DNA, 25 bp, Canis familiaris
ctgcatcccgggaagcacatcgagt

SEQ ID NO: 75039 - DNA, 25 bp, Canis familiaris
ctgctcccgaggatgacaccttggg

SEQ ID NO: 75040 - DNA, 25 bp, Canis familiaris
ctgctacctagtcttacacagtgtg

SEQ ID NO: 75041 - DNA, 25 bp, Canis familiaris
ctgctgacactttcatttcacactg

SEQ ID NO: 75042 - DNA, 25 bp, Canis familiaris
ctgctgggtgtccattgccatatcg

SEQ ID NO: 75043 - DNA, 25 bp, Canis familiaris
ctgctggtgtttcctccagatgcag

SEQ ID NO: 75044 - DNA, 25 bp, Canis familiaris
ctgctgcagtcttgtttccaggtgt

SEQ ID NO: 75045 - DNA, 25 bp, Canis familiaris
ctgctgagtgcttttacttctgttg

SEQ ID NO: 75046 - DNA, 25 bp, Canis familiaris
ctgctaagccatgggactaggtatg

SEQ ID NO: 75047 - DNA, 25 bp, Canis familiaris
ctgcttagccagagccaaatgtctc

SEQ ID NO: 75048 - DNA, 25 bp, Canis familiaris
ctgctgtacgacacaatccattgcc

SEQ ID NO: 75049 - DNA, 25 bp, Canis familiaris
ctgcaataaactggccccatgtggc

SEQ ID NO: 75050 - DNA, 25 bp, Canis familiaris
ctgctgtagaacgtcaccttgttct

SEQ ID NO: 75051 - DNA, 25 bp, Canis familiaris
ctgctgggaaccctagctctgtaaa

SEQ ID NO: 75052 - DNA, 25 bp, Canis familiaris
ctgctgggattccagtaattggaga

SEQ ID NO: 75053 - DNA, 25 bp, Canis familiaris
ctgctggagccccagccaatgggag

SEQ ID NO: 75054 - DNA, 25 bp, Canis familiaris
ctgctgggccacgagaccatgaagg

SEQ ID NO: 75055 - DNA, 25 bp, Canis familiaris
ctgcataggcacctggactcagacc

SEQ ID NO: 75056 - DNA, 25 bp, Canis familiaris
ctgcaatgtgacaggtgccagccca

SEQ ID NO: 75057 - DNA, 25 bp, Canis familiaris
ctgcattggattcttcagcagcccc

SEQ ID NO: 75058 - DNA, 25 bp, Canis familiaris
ctgaaggatactctcagcccatcat

SEQ ID NO: 75059 - DNA, 25 bp, Canis familiaris
ctgaaagatattcccttatcatcat

SEQ ID NO: 75060 - DNA, 25 bp, Canis familiaris
ctgagggaattcgacattgtccacc

SEQ ID NO: 75061 - DNA, 25 bp, Canis familiaris
ctgagctcgataccaaaggagacac

SEQ ID NO: 75062 - DNA, 25 bp, Canis familiaris
ctgagcagctcatcacaggcaagga

SEQ ID NO: 75063 - DNA, 25 bp, Canis familiaris
ctgagccacaacgagatccggcaca

SEQ ID NO: 75064 - DNA, 25 bp, Canis familiaris
ctgaggcacaacggtccgggactac

SEQ ID NO: 75065 - DNA, 25 bp, Canis familiaris
ctgaggccgaagatcgggctgcctg

SEQ ID NO: 75066 - DNA, 25 bp, Canis familiaris
ctgagccccgagaaccaaggtgcta

SEQ ID NO: 75067 - DNA, 25 bp, Canis familiaris
ctgagccccgagaaccaaggtgcta

SEQ ID NO: 75068 - DNA, 25 bp, Canis familiaris
ctgagccccgagaaccaaggtgcta

SEQ ID NO: 75069 - DNA, 25 bp, Canis familiaris
ctgagccccgagaaccaaggtgcta

SEQ ID NO: 75070 - DNA, 25 bp, Canis familiaris
ctgaggcccgtgaggacatggctgc

SEQ ID NO: 75071 - DNA, 25 bp, Canis familiaris
ctgacctccgacaaggacatgtacc

SEQ ID NO: 75072 - DNA, 25 bp, Canis familiaris
ctgctcgctccgtcgagtaattact

SEQ ID NO: 75073 - DNA, 25 bp, Canis familiaris
ctgcaccctcagtgactgaagatgc

SEQ ID NO: 75074 - DNA, 25 bp, Canis familiaris
ctgcaccgtcaatgagctctacacg

SEQ ID NO: 75075 - DNA, 25 bp, Canis familiaris
ctgacacgatccattgccaatccag

SEQ ID NO: 75076 - DNA, 25 bp, Canis familiaris
ctggcacggccacttgtaatgccca

SEQ ID NO: 75077 - DNA, 25 bp, Canis familiaris
ctggggctccatctgtcaatttagc

SEQ ID NO: 75078 - DNA, 25 bp, Canis familiaris
ctgcagttacctcttcatttttaaa

SEQ ID NO: 75079 - DNA, 25 bp, Canis familiaris
ctgcagtaacctctccgtggagaat

SEQ ID NO: 75080 - DNA, 25 bp, Canis familiaris
ctgcttaccccactgcaaggggagt

SEQ ID NO: 75081 - DNA, 25 bp, Canis familiaris
ctgcattgacccgaatcacacttta

SEQ ID NO: 75082 - DNA, 25 bp, Canis familiaris
ctgctctcagctaaagtaccgctta

SEQ ID NO: 75083 - DNA, 25 bp, Canis familiaris
ctgctattgatcaggctatccctta

SEQ ID NO: 75084 - DNA, 25 bp, Canis familiaris
ctgctacatgcaaggactacaccat

SEQ ID NO: 75085 - DNA, 25 bp, Canis familiaris
ctgcaagccattggaatacccatcc

SEQ ID NO: 75086 - DNA, 25 bp, Canis familiaris
ctgcacccactggcattagccagcc

SEQ ID NO: 75087 - DNA, 25 bp, Canis familiaris
ctgcatccaactgcaagacgccagc

SEQ ID NO: 75088 - DNA, 25 bp, Canis familiaris
ctgactcagacttgcaggacccagc

SEQ ID NO: 75089 - DNA, 25 bp, Canis familiaris
ctgagcagcggcaattggtcctagc

SEQ ID NO: 75090 - DNA, 25 bp, Canis familiaris
ctgagcgtgtgccactagacctcag

SEQ ID NO: 75091 - DNA, 25 bp, Canis familiaris
ctgcaggcgtcactaagaccgctga

SEQ ID NO: 75092 - DNA, 25 bp, Canis familiaris
ctgctcggtgcccaatgggtgcgaa

SEQ ID NO: 75093 - DNA, 25 bp, Canis familiaris
ctgctctaggccacagggttgagag

SEQ ID NO: 75094 - DNA, 25 bp, Canis familiaris
ctgctctctaccacggtgttaagct

SEQ ID NO: 75095 - DNA, 25 bp, Canis familiaris
ctgatcactttcacggggattcacc

SEQ ID NO: 75096 - DNA, 25 bp, Canis familiaris
ctgacaccgtcactggacggattca

SEQ ID NO: 75097 - DNA, 25 bp, Canis familiaris
ctgacctcagtttgtacttgattgt

SEQ ID NO: 75098 - DNA, 25 bp, Canis familiaris
ctgactcggtctttcttttgtgata

SEQ ID NO: 75099 - DNA, 25 bp, Canis familiaris
ctgatacgtttacttttttgtagcg

SEQ ID NO: 75100 - DNA, 25 bp, Canis familiaris
ctgcttctgtcctggttattggtag

SEQ ID NO: 75101 - DNA, 25 bp, Canis familiaris
ctgacctgggcgggcttattttgag

SEQ ID NO: 75102 - DNA, 25 bp, Canis familiaris
ctgacctgacctgatgtccattcat

SEQ ID NO: 75103 - DNA, 25 bp, Canis familiaris
ctgacctgacctgatgtccattcat

SEQ ID NO: 75104 - DNA, 25 bp, Canis familiaris
ctgacctgacctgatgtccattcat

SEQ ID NO: 75105 - DNA, 25 bp, Canis familiaris
ctgacctgacctgatgtccattcat

SEQ ID NO: 75106 - DNA, 25 bp, Canis familiaris
ctgacctgacctgatgtccattcat

SEQ ID NO: 75107 - DNA, 25 bp, Canis familiaris
ctgacctgacctgatgtccattcat

SEQ ID NO: 75108 - DNA, 25 bp, Canis familiaris
ctgacctgacctgatgtccattcat

SEQ ID NO: 75109 - DNA, 25 bp, Canis familiaris
ctgacctgacctgatgtccattcat

SEQ ID NO: 75110 - DNA, 25 bp, Canis familiaris
ctgacctgacctgatgtccattcat

SEQ ID NO: 75111 - DNA, 25 bp, Canis familiaris
ctgacctgacctgatgtccattcat

SEQ ID NO: 75112 - DNA, 25 bp, Canis familiaris
ctgacctgacctgatgtccattcat

SEQ ID NO: 75113 - DNA, 25 bp, Canis familiaris
ctgacctgacctgatgtccattcat

SEQ ID NO: 75114 - DNA, 25 bp, Canis familiaris
ctgatgcattgctcattattcccaa

SEQ ID NO: 75115 - DNA, 25 bp, Canis familiaris
ctgctcatgtgctttttttcaaata

SEQ ID NO: 75116 - DNA, 25 bp, Canis familiaris
ctgttcaattataatctccaaggag

SEQ ID NO: 75117 - DNA, 25 bp, Canis familiaris
ctgttcctgacatttcccatagggt

SEQ ID NO: 75118 - DNA, 25 bp, Canis familiaris
ctgctttctacttccacgtagggga

SEQ ID NO: 75119 - DNA, 25 bp, Canis familiaris
ctgctctccccttaactaagtgagg

SEQ ID NO: 75120 - DNA, 25 bp, Canis familiaris
ctgctccccctacaggtggagacag

SEQ ID NO: 75121 - DNA, 25 bp, Canis familiaris
ctgctcacccccatagtgaacagaa

SEQ ID NO: 75122 - DNA, 25 bp, Canis familiaris
ctgctccgcttcccggagagatcaa

SEQ ID NO: 75123 - DNA, 25 bp, Canis familiaris
ctgtttcttagctgtgaggtcattt

SEQ ID NO: 75124 - DNA, 25 bp, Canis familiaris
ctgtattttcaaagtgagagacacc

SEQ ID NO: 75125 - DNA, 25 bp, Canis familiaris
ctgagtatctacttggtaagaagct

SEQ ID NO: 75126 - DNA, 25 bp, Canis familiaris
ctgattactaccagtcattacatat

SEQ ID NO: 75127 - DNA, 25 bp, Canis familiaris
ctgttactctccatgactaactgtg

SEQ ID NO: 75128 - DNA, 25 bp, Canis familiaris
ctgaacactccgctgaatattctcc

SEQ ID NO: 75129 - DNA, 25 bp, Canis familiaris
ctgaatcacctggccaggccatatg

SEQ ID NO: 75130 - DNA, 25 bp, Canis familiaris
ctgcagatcagccggaagaactatg

SEQ ID NO: 75131 - DNA, 25 bp, Canis familiaris
ctgcagatcctgggcaagaccttgc

SEQ ID NO: 75132 - DNA, 25 bp, Canis familiaris
ctgcaggccagaaagcagcacctcc

SEQ ID NO: 75133 - DNA, 25 bp, Canis familiaris
ctgcaggccagaaagcagcacctcc

SEQ ID NO: 75134 - DNA, 25 bp, Canis familiaris
ctgcaggctgagtaccaggctctgc

SEQ ID NO: 75135 - DNA, 25 bp, Canis familiaris
ctgcacgcgcgctacactgactggc

SEQ ID NO: 75136 - DNA, 25 bp, Canis familiaris
ctgcacgcgcgctacactgactggc

SEQ ID NO: 75137 - DNA, 25 bp, Canis familiaris
ctgcaagcagtgtctcaatgaggtc

SEQ ID NO: 75138 - DNA, 25 bp, Canis familiaris
ctgcatcaactgctgcaaggtgcta

SEQ ID NO: 75139 - DNA, 25 bp, Canis familiaris
ctgctcaactgctaggcgtggcatt

SEQ ID NO: 75140 - DNA, 25 bp, Canis familiaris
ctgaagacgaagccagtgtgactca

SEQ ID NO: 75141 - DNA, 25 bp, Canis familiaris
ctgcttaagatcacctgtactgacc

SEQ ID NO: 75142 - DNA, 25 bp, Canis familiaris
ctgcacgaggagtacactggtccca

SEQ ID NO: 75143 - DNA, 25 bp, Canis familiaris
ctgaagcaggactccggcttcctgc

SEQ ID NO: 75144 - DNA, 25 bp, Canis familiaris
ctgaagaagacacgcggtgggcccg

SEQ ID NO: 75145 - DNA, 25 bp, Canis familiaris
ctgagcaagtggtgacgtggtccct

SEQ ID NO: 75146 - DNA, 25 bp, Canis familiaris
ctgagggcggggtgtgtggccctct

SEQ ID NO: 75147 - DNA, 25 bp, Canis familiaris
ctgaggaaggagctggttcccctgc

SEQ ID NO: 75148 - DNA, 25 bp, Canis familiaris
ctgtaaagtgctctgaggtctcccc

SEQ ID NO: 75149 - DNA, 25 bp, Canis familiaris
ctgacccagctctttgggtttgccc

SEQ ID NO: 75150 - DNA, 25 bp, Canis familiaris
ctgattccatgtctgggatgacttc

SEQ ID NO: 75151 - DNA, 25 bp, Canis familiaris
ctgcattccagggcgctgtcatatc

SEQ ID NO: 75152 - DNA, 25 bp, Canis familiaris
ctgcttcaaggggcgtcaatcagaa

SEQ ID NO: 75153 - DNA, 25 bp, Canis familiaris
ctgttgaaaggtggcattcataata

SEQ ID NO: 75154 - DNA, 25 bp, Canis familiaris
ctgaaagcacaggtggcatatgcga

SEQ ID NO: 75155 - DNA, 25 bp, Canis familiaris
ctgacaacctgactgagcaagccat

SEQ ID NO: 75156 - DNA, 25 bp, Canis familiaris
ctgagagtccagatgtgccagccat

SEQ ID NO: 75157 - DNA, 25 bp, Canis familiaris
ctgagttggcagaggtagcctaacc

SEQ ID NO: 75158 - DNA, 25 bp, Canis familiaris
ctgattctgtggatacccgtattcc

SEQ ID NO: 75159 - DNA, 25 bp, Canis familiaris
ctgattctggaagcaacgttctttc

SEQ ID NO: 75160 - DNA, 25 bp, Canis familiaris
cgtggtggcaagaaccgacgctgtt

SEQ ID NO: 75161 - DNA, 25 bp, Canis familiaris
ctgagtgtgtacatagcccacctgt

SEQ ID NO: 75162 - DNA, 25 bp, Canis familiaris
ctgatcagaaacatagcgctacctt

SEQ ID NO: 75163 - DNA, 25 bp, Canis familiaris
ctgactggagaaaatgggaccatct

SEQ ID NO: 75164 - DNA, 25 bp, Canis familiaris
ctgagtagaggaccaggtgtccact

SEQ ID NO: 75165 - DNA, 25 bp, Canis familiaris
ctgacgaggcgggcagtgtgtacgc

SEQ ID NO: 75166 - DNA, 25 bp, Canis familiaris
ctgcacgaggcgcatgagttctcca

SEQ ID NO: 75167 - DNA, 25 bp, Canis familiaris
ctgcacttggctgtgtgttcactac

SEQ ID NO: 75168 - DNA, 25 bp, Canis familiaris
ctgctcattctcggtagcttgtcta

SEQ ID NO: 75169 - DNA, 25 bp, Canis familiaris
ctgctcttctgtctgtctgagctta

SEQ ID NO: 75170 - DNA, 25 bp, Canis familiaris
ctgacatctcttctctcataaatac

SEQ ID NO: 75171 - DNA, 25 bp, Canis familiaris
ctgcattccctcatctacaagatgc

SEQ ID NO: 75172 - DNA, 25 bp, Canis familiaris
ctgctactcagtagtcccaagtgag

SEQ ID NO: 75173 - DNA, 25 bp, Canis familiaris
ctgctcatccagtttcacacataag

SEQ ID NO: 75174 - DNA, 25 bp, Canis familiaris
ctgcttcatgcagttgccaacattc

SEQ ID NO: 75175 - DNA, 25 bp, Canis familiaris
ctgctttgcagctattgcactagtc

SEQ ID NO: 75176 - DNA, 25 bp, Canis familiaris
ctgctttcatgatgtcactggatgt

SEQ ID NO: 75177 - DNA, 25 bp, Canis familiaris
ctgcttcctgatgtatcgttgtggc

SEQ ID NO: 75178 - DNA, 25 bp, Canis familiaris
ctgcattctctaactcatactgtga

SEQ ID NO: 75179 - DNA, 25 bp, Canis familiaris
ctgcttggctgtggctcatatctta

SEQ ID NO: 75180 - DNA, 25 bp, Canis familiaris
ctgactgtgctgtcctgattgttgc

SEQ ID NO: 75181 - DNA, 25 bp, Canis familiaris
ctgactgtcaccttcatgttgcaga

SEQ ID NO: 75182 - DNA, 25 bp, Canis familiaris
ctgctctctgattcttcatgttgat

SEQ ID NO: 75183 - DNA, 25 bp, Canis familiaris
ctgcttgcagctctgtgctggtttg

SEQ ID NO: 75184 - DNA, 25 bp, Canis familiaris
ctgcatagagtgctgtctgcatttt

SEQ ID NO: 75185 - DNA, 25 bp, Canis familiaris
ctgcatagagtgctgtctgcatttt

SEQ ID NO: 75186 - DNA, 25 bp, Canis familiaris
ctgtacagataatatcatttgggcg

SEQ ID NO: 75187 - DNA, 25 bp, Canis familiaris
ctgtacaatcgtttcatcattcggc

SEQ ID NO: 75188 - DNA, 25 bp, Canis familiaris
ctgaatcactggtttgtcatagctg

SEQ ID NO: 75189 - DNA, 25 bp, Canis familiaris
ctgaaccgtgctggctttgaggcct

SEQ ID NO: 75190 - DNA, 25 bp, Canis familiaris
ctgagatcctgttaccctgaggtct

SEQ ID NO: 75191 - DNA, 25 bp, Canis familiaris
ctgaatctccattagccatctcgga

SEQ ID NO: 75192 - DNA, 25 bp, Canis familiaris
ctgcttcccattgctcatcatgggc

SEQ ID NO: 75193 - DNA, 25 bp, Canis familiaris
tcttgggacgggcctacatggatct

SEQ ID NO: 75194 - DNA, 25 bp, Canis familiaris
ctgctcttccgaaggtccagagttc

SEQ ID NO: 75195 - DNA, 25 bp, Canis familiaris
ctgtctatatagttatggccggatt

SEQ ID NO: 75196 - DNA, 25 bp, Canis familiaris
ctgtctagcatttaatgtactggtt

SEQ ID NO: 75197 - DNA, 25 bp, Canis familiaris
ctgacgagttttaatcttggatatc

SEQ ID NO: 75198 - DNA, 25 bp, Canis familiaris
ctgttgatttttctcgcttattcga

SEQ ID NO: 75199 - DNA, 25 bp, Canis familiaris
ctgttttttgttacgtatgaacgct

SEQ ID NO: 75200 - DNA, 25 bp, Canis familiaris
ctgctttctgtttgtttgttttcct

SEQ ID NO: 75201 - DNA, 25 bp, Canis familiaris
ctgttgattttttatgggtttgcct

SEQ ID NO: 75202 - DNA, 25 bp, Canis familiaris
ctgtatttcgttctggggttccagc

SEQ ID NO: 75203 - DNA, 25 bp, Canis familiaris
ctgttttgtttgcctggggtgggag

SEQ ID NO: 75204 - DNA, 25 bp, Canis familiaris
ctgttgttaaagcctgggagttagt

SEQ ID NO: 75205 - DNA, 25 bp, Canis familiaris
ctgcatcatatataacctggggtcc

SEQ ID NO: 75206 - DNA, 25 bp, Canis familiaris
ctgacatgatattgacactcttgtt

SEQ ID NO: 75207 - DNA, 25 bp, Canis familiaris
ctgacagatggccacactctttaga

SEQ ID NO: 75208 - DNA, 25 bp, Canis familiaris
ctgaagatactctaccatgaatata

SEQ ID NO: 75209 - DNA, 25 bp, Canis familiaris
ctgcacaaactggccactgatcaaa

SEQ ID NO: 75210 - DNA, 25 bp, Canis familiaris
ctgcaccagacaccacagtgtccac

SEQ ID NO: 75211 - DNA, 25 bp, Canis familiaris
ctgcaacatccaccaagtgtgccac

SEQ ID NO: 75212 - DNA, 25 bp, Canis familiaris
ctgatttgctgacagcgttgcccgc

SEQ ID NO: 75213 - DNA, 25 bp, Canis familiaris
ctgaatatatgaccacgctcacccg

SEQ ID NO: 75214 - DNA, 25 bp, Canis familiaris
ctgcaatggaagccggtcccagcag

SEQ ID NO: 75215 - DNA, 25 bp, Canis familiaris
ctgctagtgcacacgggtcctgcag

SEQ ID NO: 75216 - DNA, 25 bp, Canis familiaris
ctgcatggtcacaatagggtccctg

SEQ ID NO: 75217 - DNA, 25 bp, Canis familiaris
ctgcagagccacttttggtccaagc

SEQ ID NO: 75218 - DNA, 25 bp, Canis familiaris
ctgcagacccaggatagagtcccac

SEQ ID NO: 75219 - DNA, 25 bp, Canis familiaris
ctgcagcccctggatgagatgtttc

SEQ ID NO: 75220 - DNA, 25 bp, Canis familiaris
cgcatcgcccaggaaattggtttcc

SEQ ID NO: 75221 - DNA, 25 bp, Canis familiaris
ctgcatctgcctgagctagtggggt

SEQ ID NO: 75222 - DNA, 25 bp, Canis familiaris
ctgcatctcactgctgggggcagat

SEQ ID NO: 75223 - DNA, 25 bp, Canis familiaris
ctgacacagcccagtggagcagcac

SEQ ID NO: 75224 - DNA, 25 bp, Canis familiaris
ctgtcacgcggagatgggagccttc

SEQ ID NO: 75225 - DNA, 25 bp, Canis familiaris
ctgacacctgggaatggcagccacc

SEQ ID NO: 75226 - DNA, 25 bp, Canis familiaris
ctgacagctaggaaagccagtgcaa

SEQ ID NO: 75227 - DNA, 25 bp, Canis familiaris
ctgacaggagcgggagctgcggaaa

SEQ ID NO: 75228 - DNA, 25 bp, Canis familiaris
ctgcaacacagggccgtgctggaga

SEQ ID NO: 75229 - DNA, 25 bp, Canis familiaris
ctgtcacaaaggcttctgggggctc

SEQ ID NO: 75230 - DNA, 25 bp, Canis familiaris
ctgtaaccttggtatccactgggcc

SEQ ID NO: 75231 - DNA, 25 bp, Canis familiaris
ctgatacctttatcattcctgggac

SEQ ID NO: 75232 - DNA, 25 bp, Canis familiaris
ctgttttcttttatccaaggaatgc

SEQ ID NO: 75233 - DNA, 25 bp, Canis familiaris
cgttatcctttggctaccaaggaca

SEQ ID NO: 75234 - DNA, 25 bp, Canis familiaris
ggttggtccttcgtaacaacggatg

SEQ ID NO: 75235 - DNA, 25 bp, Canis familiaris
cggtggtcccctgaaagactgtggg

SEQ ID NO: 75236 - DNA, 25 bp, Canis familiaris
ctggggcaccccacagggagggtga

SEQ ID NO: 75237 - DNA, 25 bp, Canis familiaris
ctgggacccaacactggcttgggag

SEQ ID NO: 75238 - DNA, 25 bp, Canis familiaris
ctgggacccaaatctgggggcctcg

SEQ ID NO: 75239 - DNA, 25 bp, Canis familiaris
ttgggaaaagactatcgggggaatg

SEQ ID NO: 75240 - DNA, 25 bp, Canis familiaris
ctgggcacaaaattctcacgggggg

SEQ ID NO: 75241 - DNA, 25 bp, Canis familiaris
cggcggacacaatgtccagcggagt

SEQ ID NO: 75242 - DNA, 25 bp, Canis familiaris
cggctccatgactaagatctacggg

SEQ ID NO: 75243 - DNA, 25 bp, Canis familiaris
ctgactcctgactcagaacacgctc

SEQ ID NO: 75244 - DNA, 25 bp, Canis familiaris
ctgagatcctcgcacagagatgggc

SEQ ID NO: 75245 - DNA, 25 bp, Canis familiaris
ctgcagtcctagcaggagaaagatg

SEQ ID NO: 75246 - DNA, 25 bp, Canis familiaris
ctgcttcctcagctggaaaggaggg

SEQ ID NO: 75247 - DNA, 25 bp, Canis familiaris
ctgatgcccatatctcggaagccag

SEQ ID NO: 75248 - DNA, 25 bp, Canis familiaris
ctgatgactataagcgaggaaaaat

SEQ ID NO: 75249 - DNA, 25 bp, Canis familiaris
cgatgtgcttgctggcagccaacga

SEQ ID NO: 75250 - DNA, 25 bp, Canis familiaris
cgagtgctatttcaccaacgggacg

SEQ ID NO: 75251 - DNA, 25 bp, Canis familiaris
cggcatggacttcttcaacgacgcc

SEQ ID NO: 75252 - DNA, 25 bp, Canis familiaris
cgtgctgaacgtctcttagttctcc

SEQ ID NO: 75253 - DNA, 25 bp, Canis familiaris
ctgtagaacgtcaccttgttctagt

SEQ ID NO: 75254 - DNA, 25 bp, Canis familiaris
ctgtaacactacaatcctacttcgg

SEQ ID NO: 75255 - DNA, 25 bp, Canis familiaris
cgaagacaccagctcttacttctgc

SEQ ID NO: 75256 - DNA, 25 bp, Canis familiaris
ctgactgtcactgagtttacttcgt

SEQ ID NO: 75257 - DNA, 25 bp, Canis familiaris
ctgaattcttgcattcttacccgtc

SEQ ID NO: 75258 - DNA, 25 bp, Canis familiaris
ctgaattattgtttttgctctcccc

SEQ ID NO: 75259 - DNA, 25 bp, Canis familiaris
ctgtttctgtgttttcctatgcact

SEQ ID NO: 75260 - DNA, 25 bp, Canis familiaris
ctgtttagctttttttctccatcaa

SEQ ID NO: 75261 - DNA, 25 bp, Canis familiaris
ctgatttacgtgagacctgtgtcca

SEQ ID NO: 75262 - DNA, 25 bp, Canis familiaris
ctgcatgtattggctgtggtcctgt

SEQ ID NO: 75263 - DNA, 25 bp, Canis familiaris
ctgcagtatctgcgtttatctcata

SEQ ID NO: 75264 - DNA, 25 bp, Canis familiaris
ctgcagcttctcccttaatgagcaa

SEQ ID NO: 75265 - DNA, 25 bp, Canis familiaris
ctgcatgtttgcgccgagcatgcgc

SEQ ID NO: 75266 - DNA, 25 bp, Canis familiaris
ctgagtcatttgtcacaggcatccc

SEQ ID NO: 75267 - DNA, 25 bp, Canis familiaris
ctgagttttaaccagcattctccgc

SEQ ID NO: 75268 - DNA, 25 bp, Canis familiaris
ctgagttatatttctagctccccgc

SEQ ID NO: 75269 - DNA, 25 bp, Canis familiaris
ctgactgaaacttggtgctccctag

SEQ ID NO: 75270 - DNA, 25 bp, Canis familiaris
ctgcagtactacatgggcttggccg

SEQ ID NO: 75271 - DNA, 25 bp, Canis familiaris
ctgcaggactgaccgggcttgcagc

SEQ ID NO: 75272 - DNA, 25 bp, Canis familiaris
ctgactactgtccagggcattgcag

SEQ ID NO: 75273 - DNA, 25 bp, Canis familiaris
ctgagtcactgagggggtctgcatg

SEQ ID NO: 75274 - DNA, 25 bp, Canis familiaris
ctgatgccctggtctggagtgtctg

SEQ ID NO: 75275 - DNA, 25 bp, Canis familiaris
ctgagcagctgctggtcgggtttgc

SEQ ID NO: 75276 - DNA, 25 bp, Canis familiaris
ctgagcctagggtgcttttggcctc

SEQ ID NO: 75277 - DNA, 25 bp, Canis familiaris
gctggcttggatctcgtttttaacc

SEQ ID NO: 75278 - DNA, 25 bp, Canis familiaris
ctgcactgtagtctccatatatgtt

SEQ ID NO: 75279 - DNA, 25 bp, Canis familiaris
ctgcattggagtctcctcactgttg

SEQ ID NO: 75280 - DNA, 25 bp, Canis familiaris
ctgcttggtgtagaccattcttgcg

SEQ ID NO: 75281 - DNA, 25 bp, Canis familiaris
ctgcttgagtttaagccattttcaa

SEQ ID NO: 75282 - DNA, 25 bp, Canis familiaris
ctgcttgagatcatttccttctccc

SEQ ID NO: 75283 - DNA, 25 bp, Canis familiaris
ctgaagatgctcaattgccttcccc

SEQ ID NO: 75284 - DNA, 25 bp, Canis familiaris
ctgagatggccatgctcagtacccc

SEQ ID NO: 75285 - DNA, 25 bp, Canis familiaris
ctgagtgcagtgggttgtagccccc

SEQ ID NO: 75286 - DNA, 25 bp, Canis familiaris
ctgcactgctgtgtttgtggctcaa

SEQ ID NO: 75287 - DNA, 25 bp, Canis familiaris
ctgcaaggtgctatgagggccgcgc

SEQ ID NO: 75288 - DNA, 25 bp, Canis familiaris
ctgagggctcaagtgtggagcccgg

SEQ ID NO: 75289 - DNA, 25 bp, Canis familiaris
ctgaggcggccgacggagaacgtgg

SEQ ID NO: 75290 - DNA, 25 bp, Canis familiaris
ctgacgtgccgcctggagaaacctg

SEQ ID NO: 75291 - DNA, 25 bp, Canis familiaris
ctgcatttcccccaagaaccagcag

SEQ ID NO: 75292 - DNA, 25 bp, Canis familiaris
ctgattttcccactgacattccagc

SEQ ID NO: 75293 - DNA, 25 bp, Canis familiaris
ctgttgcttccgggagttgaaccag

SEQ ID NO: 75294 - DNA, 25 bp, Canis familiaris
ctgttgctccaccttatttaactga

SEQ ID NO: 75295 - DNA, 25 bp, Canis familiaris
ctgaccattccacaatatctaactt

SEQ ID NO: 75296 - DNA, 25 bp, Canis familiaris
ctgaactccgtcctttctaaattca

SEQ ID NO: 75297 - DNA, 25 bp, Canis familiaris
ctgaagtctcctttttctatttctc

SEQ ID NO: 75298 - DNA, 25 bp, Canis familiaris
ctgaagtcttcaaattttcccctct

SEQ ID NO: 75299 - DNA, 25 bp, Canis familiaris
ctgtcagcttgttaatcttgttcct

SEQ ID NO: 75300 - DNA, 25 bp, Canis familiaris
ctgtagccgtcggatctggtctttc

SEQ ID NO: 75301 - DNA, 25 bp, Canis familiaris
ctgcatcaccccagaagtgttagcc

SEQ ID NO: 75302 - DNA, 25 bp, Canis familiaris
ctgcagccccacgggcagtggggtc

SEQ ID NO: 75303 - DNA, 25 bp, Canis familiaris
ctgagcccctggcaggtgggggccg

SEQ ID NO: 75304 - DNA, 25 bp, Canis familiaris
ctgacctccttgcaggggagcgagc

SEQ ID NO: 75305 - DNA, 25 bp, Canis familiaris
ctgtccttttgcttgggtgacgggg

SEQ ID NO: 75306 - DNA, 25 bp, Canis familiaris
ctgtttgttgtcctggggtggatgg

SEQ ID NO: 75307 - DNA, 25 bp, Canis familiaris
ctgcatctggtttcctggggaggag

SEQ ID NO: 75308 - DNA, 25 bp, Canis familiaris
ctgcatctggtttcctggggaggag

SEQ ID NO: 75309 - DNA, 25 bp, Canis familiaris
ctgcaccaggtgaccagggagagga

SEQ ID NO: 75310 - DNA, 25 bp, Canis familiaris
ctgcacctggagatctgtctgaagg

SEQ ID NO: 75311 - DNA, 25 bp, Canis familiaris
ctgagcctgccgaagtgtcgaagtg

SEQ ID NO: 75312 - DNA, 25 bp, Canis familiaris
ctgagccactcaggtgttcttagtt

SEQ ID NO: 75313 - DNA, 25 bp, Canis familiaris
ctgagctgcccggtttgcagtgaga

SEQ ID NO: 75314 - DNA, 25 bp, Canis familiaris
ctgaggccagggctgcctctgaaac

SEQ ID NO: 75315 - DNA, 25 bp, Canis familiaris
ctgtccaagggccagtcctgaagac

SEQ ID NO: 75316 - DNA, 25 bp, Canis familiaris
ctgtacaaggttcctacagccacag

SEQ ID NO: 75317 - DNA, 25 bp, Canis familiaris
ctgtacaatgactgtccaggcccag

SEQ ID NO: 75318 - DNA, 25 bp, Canis familiaris
ctgttcaggaggatccagtcccatg

SEQ ID NO: 75319 - DNA, 25 bp, Canis familiaris
ctgtagggcagtgtcacatccccag

SEQ ID NO: 75320 - DNA, 25 bp, Canis familiaris
ctgtaggggggggatccccacatct

SEQ ID NO: 75321 - DNA, 25 bp, Canis familiaris
ctgtcggggaagtcaacccctcagc

SEQ ID NO: 75322 - DNA, 25 bp, Canis familiaris
ctgtcctggtgaaaactaccccatg

SEQ ID NO: 75323 - DNA, 25 bp, Canis familiaris
ctgactccacgaaaaccaacaccag

SEQ ID NO: 75324 - DNA, 25 bp, Canis familiaris
ctgacttcacaacgaagccaccagc

SEQ ID NO: 75325 - DNA, 25 bp, Canis familiaris
ctgacagtgaaatcacagcccacac

SEQ ID NO: 75326 - DNA, 25 bp, Canis familiaris
ctgaagtacatctcagactcacgcc

SEQ ID NO: 75327 - DNA, 25 bp, Canis familiaris
ctgaagaagccacaagtccgcggcg

SEQ ID NO: 75328 - DNA, 25 bp, Canis familiaris
ctgaagtcaccacaggtaggcgccc

SEQ ID NO: 75329 - DNA, 25 bp, Canis familiaris
ctgaagatccgctgaggtgggcgcg

SEQ ID NO: 75330 - DNA, 25 bp, Canis familiaris
ctgaagatttatggagagctgtggc

SEQ ID NO: 75331 - DNA, 25 bp, Canis familiaris
ctgagagtgttagatgcctgtgccc

SEQ ID NO: 75332 - DNA, 25 bp, Canis familiaris
ctgagaagtaaaatgcctaacccgc

SEQ ID NO: 75333 - DNA, 25 bp, Canis familiaris
ctgagaaggaagatgcctcctccct

SEQ ID NO: 75334 - DNA, 25 bp, Canis familiaris
ctgagagcagcagcagttcttcctc

SEQ ID NO: 75335 - DNA, 25 bp, Canis familiaris
ctgatgtgtgcacagcaccgaggcc

SEQ ID NO: 75336 - DNA, 25 bp, Canis familiaris
ctgatgcttccatcaccaatgtgcc

SEQ ID NO: 75337 - DNA, 25 bp, Canis familiaris
ctgcagcacagccagtaccaagacc

SEQ ID NO: 75338 - DNA, 25 bp, Canis familiaris
ctgagaagcaaaatgcccaacccgc

SEQ ID NO: 75339 - DNA, 25 bp, Canis familiaris
ctgagagagagaaagcccctacccg

SEQ ID NO: 75340 - DNA, 25 bp, Canis familiaris
ctgagggaggcttgccttcaacacc

SEQ ID NO: 75341 - DNA, 25 bp, Canis familiaris
ctgaggttacggttatccacatcgc

SEQ ID NO: 75342 - DNA, 25 bp, Canis familiaris
ctgcagtgtttctgttttccttcta

SEQ ID NO: 75343 - DNA, 25 bp, Canis familiaris
ctgcagttgttcactttcaggcttc

SEQ ID NO: 75344 - DNA, 25 bp, Canis familiaris
ctgcaccttgctcttgttgaggttc

SEQ ID NO: 75345 - DNA, 25 bp, Canis familiaris
ctgcaccttgggcagcatctgacgt

SEQ ID NO: 75346 - DNA, 25 bp, Canis familiaris
ctgacctctctgggatcactgagga

SEQ ID NO: 75347 - DNA, 25 bp, Canis familiaris
ctgacctcctagagactgagtgtcc

SEQ ID NO: 75348 - DNA, 25 bp, Canis familiaris
ctgactctgctttgatagttggtgt

SEQ ID NO: 75349 - DNA, 25 bp, Canis familiaris
ctgttcgattggaccgagctgctgg

SEQ ID NO: 75350 - DNA, 25 bp, Canis familiaris
ctgtttttgaaatgtctgtggagtt

SEQ ID NO: 75351 - DNA, 25 bp, Canis familiaris
ctgtttttgtttttgctttattctg

SEQ ID NO: 75352 - DNA, 25 bp, Canis familiaris
tctgatttcggtataggttcttttt

SEQ ID NO: 75353 - DNA, 25 bp, Canis familiaris
ctgtttcggggttgtcattgttgga

SEQ ID NO: 75354 - DNA, 25 bp, Canis familiaris
ctgttggaggatgtggtttgtttga

SEQ ID NO: 75355 - DNA, 25 bp, Canis familiaris
ctgtgtcagggctaggttttctttc

SEQ ID NO: 75356 - DNA, 25 bp, Canis familiaris
ctgtccagtgtcctggttttcctta

SEQ ID NO: 75357 - DNA, 25 bp, Canis familiaris
ctgaagcagcagcttgagttattcc

SEQ ID NO: 75358 - DNA, 25 bp, Canis familiaris
ctgaagcagcttctgctcttgtctc

SEQ ID NO: 75359 - DNA, 25 bp, Canis familiaris
ctgaaagtgccactgccattgctgt

SEQ ID NO: 75360 - DNA, 25 bp, Canis familiaris
ctgaatggctgacctgacctgatgt

SEQ ID NO: 75361 - DNA, 25 bp, Canis familiaris
ctgaatggctgacctgacctgatgt

SEQ ID NO: 75362 - DNA, 25 bp, Canis familiaris
ctgaggcagctacctgcacacaagt

SEQ ID NO: 75363 - DNA, 25 bp, Canis familiaris
ctgaacatgcaaattacaaagctta

SEQ ID NO: 75364 - DNA, 25 bp, Canis familiaris
ctgcacaccaagatacagatcatca

SEQ ID NO: 75365 - DNA, 25 bp, Canis familiaris
ctgagaccaagcacgctgaccagaa

SEQ ID NO: 75366 - DNA, 25 bp, Canis familiaris
ctgagcaaggagcacaggcgccagc

SEQ ID NO: 75367 - DNA, 25 bp, Canis familiaris
ctgatctggagacacagcgccaggt

SEQ ID NO: 75368 - DNA, 25 bp, Canis familiaris
ctgagctgtgtacccagcagagcac

SEQ ID NO: 75369 - DNA, 25 bp, Canis familiaris
ctgactcattacctgcggcagcagg

SEQ ID NO: 75370 - DNA, 25 bp, Canis familiaris
ctgaagcaggacctgcgctgcgacg

SEQ ID NO: 75371 - DNA, 25 bp, Canis familiaris
ctgagagagagagtgcatgagcatg

SEQ ID NO: 75372 - DNA, 25 bp, Canis familiaris
ctgcagccacagcagcgtgcagact

SEQ ID NO: 75373 - DNA, 25 bp, Canis familiaris
ctgcactccagcctgggcgacagag

SEQ ID NO: 75374 - DNA, 25 bp, Canis familiaris
ctgtcttcacctgtgctgaaagctg

SEQ ID NO: 75375 - DNA, 25 bp, Canis familiaris
ctgagtcccgctcggtcaaagtgaa

SEQ ID NO: 75376 - DNA, 25 bp, Canis familiaris
ctgactcccttatttcaagcacaga

SEQ ID NO: 75377 - DNA, 25 bp, Canis familiaris
ctgactccacaatttccgagctgtg

SEQ ID NO: 75378 - DNA, 25 bp, Canis familiaris
ctgtctcgatgcctgattcggacgg

SEQ ID NO: 75379 - DNA, 25 bp, Canis familiaris
ctgttcgagccgttttagctgggtg

SEQ ID NO: 75380 - DNA, 25 bp, Canis familiaris
ctgattcgatcgggtgtttcgcggc

SEQ ID NO: 75381 - DNA, 25 bp, Canis familiaris
ctgaatctaccgatcttgtctcgac

SEQ ID NO: 75382 - DNA, 25 bp, Canis familiaris
ctgacttaccccagagtgcatatac

SEQ ID NO: 75383 - DNA, 25 bp, Canis familiaris
ctgactcttccgtggcatgtattat

SEQ ID NO: 75384 - DNA, 25 bp, Canis familiaris
ctgacacttccactttgagcaaata

SEQ ID NO: 75385 - DNA, 25 bp, Canis familiaris
ctgacactttcacttttgcagattg

SEQ ID NO: 75386 - DNA, 25 bp, Canis familiaris
ctgaacatttcagagctatgagaat

SEQ ID NO: 75387 - DNA, 25 bp, Canis familiaris
ctgagcacattgttccgtatggact

SEQ ID NO: 75388 - DNA, 25 bp, Canis familiaris
ctgagcacctgtaccactagggctc

SEQ ID NO: 75389 - DNA, 25 bp, Canis familiaris
ctgagcattttaccactgcaagcct

SEQ ID NO: 75390 - DNA, 25 bp, Canis familiaris
ctgagcactatttcacttcactgtc

SEQ ID NO: 75391 - DNA, 25 bp, Canis familiaris
ctgaggtgaaaccttcctctccagt

SEQ ID NO: 75392 - DNA, 25 bp, Canis familiaris
cgccggaaagcgtgccaatcaacat

SEQ ID NO: 75393 - DNA, 25 bp, Canis familiaris
cggcggaaacgtcaactgcaaccag

SEQ ID NO: 75394 - DNA, 25 bp, Canis familiaris
ccgtaaagacctctatgccaacaca

SEQ ID NO: 75395 - DNA, 25 bp, Canis familiaris
cggcggcaggacattttgcctcaaa

SEQ ID NO: 75396 - DNA, 25 bp, Canis familiaris
ctgacctgcaggacatttttcttag

SEQ ID NO: 75397 - DNA, 25 bp, Canis familiaris
ctgaccagcagaggctcatctttgc

SEQ ID NO: 75398 - DNA, 25 bp, Canis familiaris
ctgacccatcaggcgagttcatgtt

SEQ ID NO: 75399 - DNA, 25 bp, Canis familiaris
ctgaccccactcgagattacttcag

SEQ ID NO: 75400 - DNA, 25 bp, Canis familiaris
ctgacccaactgatatagccccagg

SEQ ID NO: 75401 - DNA, 25 bp, Canis familiaris
ctgagtccaactcatgaacctggcc

SEQ ID NO: 75402 - DNA, 25 bp, Canis familiaris
gctggaagaactcaaacgggcaaca

SEQ ID NO: 75403 - DNA, 25 bp, Canis familiaris
ctgtaagtactttgaagctagtgaa

SEQ ID NO: 75404 - DNA, 25 bp, Canis familiaris
ctgtaaaccttaatcagcccagcca

SEQ ID NO: 75405 - DNA, 25 bp, Canis familiaris
ctgaagacatctgtttagcaagaac

SEQ ID NO: 75406 - DNA, 25 bp, Canis familiaris
ctgaagatcactggcatatagaaag

SEQ ID NO: 75407 - DNA, 25 bp, Canis familiaris
ctgaagaccccaatagcagcaggcc

SEQ ID NO: 75408 - DNA, 25 bp, Canis familiaris
ctgacggactccaatatcgtggcca

SEQ ID NO: 75409 - DNA, 25 bp, Canis familiaris
ctgaaggaagccctcacttggcacc

SEQ ID NO: 75410 - DNA, 25 bp, Canis familiaris
ctgaagcagcccgcatattaggcgc

SEQ ID NO: 75411 - DNA, 25 bp, Canis familiaris
ctgaaagcccgcctagaagctgatg

SEQ ID NO: 75412 - DNA, 25 bp, Canis familiaris
ctgacaaccatcctcatagggtgag

SEQ ID NO: 75413 - DNA, 25 bp, Canis familiaris
ctgtcagactaccatatcccgatag

SEQ ID NO: 75414 - DNA, 25 bp, Canis familiaris
ctgagccatccagagatcccagtat

SEQ ID NO: 75415 - DNA, 25 bp, Canis familiaris
ctgagccctcagagaacagcatgcc

SEQ ID NO: 75416 - DNA, 25 bp, Canis familiaris
ctgagccccaatgaccaatacaagt

SEQ ID NO: 75417 - DNA, 25 bp, Canis familiaris
ctgatccccaaggcaccaatatgat

SEQ ID NO: 75418 - DNA, 25 bp, Canis familiaris
ctgagcccatcctccgaaagataga

SEQ ID NO: 75419 - DNA, 25 bp, Canis familiaris
ctgatgcctccctttgaagaatcta

SEQ ID NO: 75420 - DNA, 25 bp, Canis familiaris
ctgtctgcttcgtgtaaaacccgac

SEQ ID NO: 75421 - DNA, 25 bp, Canis familiaris
ctgtctcggcgggcaagaaggtctc

SEQ ID NO: 75422 - DNA, 25 bp, Canis familiaris
ctgtttgggcccaagggagtgaaca

SEQ ID NO: 75423 - DNA, 25 bp, Canis familiaris
ctgttcttggctctaccggtagaac

SEQ ID NO: 75424 - DNA, 25 bp, Canis familiaris
ctgacccggctgcatgaccggtatg

SEQ ID NO: 75425 - DNA, 25 bp, Canis familiaris
ctgtaacggcgttgactggcgtcag

SEQ ID NO: 75426 - DNA, 25 bp, Canis familiaris
ctgaaacggtgctgatctgtggaaa

SEQ ID NO: 75427 - DNA, 25 bp, Canis familiaris
ctgaatatcggggtcattgccaatg

SEQ ID NO: 75428 - DNA, 25 bp, Canis familiaris
ctgaaacatgaagctcatctcccct

SEQ ID NO: 75429 - DNA, 25 bp, Canis familiaris
ctgaagacatcagccacattacacc

SEQ ID NO: 75430 - DNA, 25 bp, Canis familiaris
ctgagagacccagaaaaccaccagc

SEQ ID NO: 75431 - DNA, 25 bp, Canis familiaris
ctgaggagcctcaaaaaccacccag

SEQ ID NO: 75432 - DNA, 25 bp, Canis familiaris
ctgaacagcctctgaaggtaatgcc

SEQ ID NO: 75433 - DNA, 25 bp, Canis familiaris
cgcataagcttatatcaggaacgga

SEQ ID NO: 75434 - DNA, 25 bp, Canis familiaris
ctgatgaaggttgtaagagaaggat

SEQ ID NO: 75435 - DNA, 25 bp, Canis familiaris
ctgaacatgtttgtccgcaggggca

SEQ ID NO: 75436 - DNA, 25 bp, Canis familiaris
ctgtacatttgggtcctctagagtc

SEQ ID NO: 75437 - DNA, 25 bp, Canis familiaris
ctgttctggaaagccttcagcagca

SEQ ID NO: 75438 - DNA, 25 bp, Canis familiaris
ctgttcgtgaacactgagacagacg

SEQ ID NO: 75439 - DNA, 25 bp, Canis familiaris
ctgttcctgggcaaccccagaggaa

SEQ ID NO: 75440 - DNA, 25 bp, Canis familiaris
ctgttcggggttgccatgttggaat

SEQ ID NO: 75441 - DNA, 25 bp, Canis familiaris
cgtcttggtagtttctggtgggatt

SEQ ID NO: 75442 - DNA, 25 bp, Canis familiaris
ctgtcctttttttctgctgatgggt

SEQ ID NO: 75443 - DNA, 25 bp, Canis familiaris
ctgagatcattgactttttcttggg

SEQ ID NO: 75444 - DNA, 25 bp, Canis familiaris
ctgagatctcgacttttcttggggc

SEQ ID NO: 75445 - DNA, 25 bp, Canis familiaris
ctgagatttgctctcacctcagggg

SEQ ID NO: 75446 - DNA, 25 bp, Canis familiaris
ctgagcatttccatgacacttagga

SEQ ID NO: 75447 - DNA, 25 bp, Canis familiaris
ctgtcttgccatcctccaaatagga

SEQ ID NO: 75448 - DNA, 25 bp, Canis familiaris
ctgtgctatgttgctctagacttcg

SEQ ID NO: 75449 - DNA, 25 bp, Canis familiaris
ctgtctcttctgaccttagtttggt

SEQ ID NO: 75450 - DNA, 25 bp, Canis familiaris
ctgttgtctctaacccgatttatga

SEQ ID NO: 75451 - DNA, 25 bp, Canis familiaris
ctgattgatactttccccttgagaa

SEQ ID NO: 75452 - DNA, 25 bp, Canis familiaris
ctgaaatactcatttttttggaatg

SEQ ID NO: 75453 - DNA, 25 bp, Canis familiaris
ctgtaatcccagcactttgggaggc

SEQ ID NO: 75454 - DNA, 25 bp, Canis familiaris
ctgtaatcccagctactcgggaggc

SEQ ID NO: 75455 - DNA, 25 bp, Canis familiaris
ctgtttccacagatgacccgtgtac

SEQ ID NO: 75456 - DNA, 25 bp, Canis familiaris
ctgttgaccaatatacccagtgatg

SEQ ID NO: 75457 - DNA, 25 bp, Canis familiaris
ctgagaacctgtatgtgcccttaga

SEQ ID NO: 75458 - DNA, 25 bp, Canis familiaris
ctgaggagccgcagtcgcggtcaag

SEQ ID NO: 75459 - DNA, 25 bp, Canis familiaris
ctgggacatcatcagtacggtccgg

SEQ ID NO: 75460 - DNA, 25 bp, Canis familiaris
ctgaggacaatgcgcttttgcccag

SEQ ID NO: 75461 - DNA, 25 bp, Canis familiaris
ctgagctcagccaggaagtatccga

SEQ ID NO: 75462 - DNA, 25 bp, Canis familiaris
ctgagctctgccaagcgttacatcg

SEQ ID NO: 75463 - DNA, 25 bp, Canis familiaris
ctgatcgctgccaatgcactcgatc

SEQ ID NO: 75464 - DNA, 25 bp, Canis familiaris
ctgatgctgctgtcaacaaggctcc

SEQ ID NO: 75465 - DNA, 25 bp, Canis familiaris
ctgatgggtcatgaattgggctttg

SEQ ID NO: 75466 - DNA, 25 bp, Canis familiaris
ctgaggccctgccaaatgggcatgt

SEQ ID NO: 75467 - DNA, 25 bp, Canis familiaris
ctgagtgctcacatacaggggagta

SEQ ID NO: 75468 - DNA, 25 bp, Canis familiaris
ctgactgccactacatcgatggtga

SEQ ID NO: 75469 - DNA, 25 bp, Canis familiaris
ctgagcgcaagtactctgtgtggat

SEQ ID NO: 75470 - DNA, 25 bp, Canis familiaris
ctgactgaattccttttggcatgcg

SEQ ID NO: 75471 - DNA, 25 bp, Canis familiaris
ctgactgagcagacgcttcgtggct

SEQ ID NO: 75472 - DNA, 25 bp, Canis familiaris
ctggcaagcatgtgcccagggcagt

SEQ ID NO: 75473 - DNA, 25 bp, Canis familiaris
ctgtacacaggggcctgggagccag

SEQ ID NO: 75474 - DNA, 25 bp, Canis familiaris
ctgtcccagggggtggtgcaggagc

SEQ ID NO: 75475 - DNA, 25 bp, Canis familiaris
ctgtcccaggagcacgtggtgcggt

SEQ ID NO: 75476 - DNA, 25 bp, Canis familiaris
ctgtcgccagctgcgaaggcggcag

SEQ ID NO: 75477 - DNA, 25 bp, Canis familiaris
ctgtccctggtggaattgggccctg

SEQ ID NO: 75478 - DNA, 25 bp, Canis familiaris
cgtgccgtcggtcatcgggacggac

SEQ ID NO: 75479 - DNA, 25 bp, Canis familiaris
ctgtgggcaaggacctcggaactgg

SEQ ID NO: 75480 - DNA, 25 bp, Canis familiaris
ctggggtggagtgtagggcattggt

SEQ ID NO: 75481 - DNA, 25 bp, Canis familiaris
ctggaggggaggtttcgagcagtcg

SEQ ID NO: 75482 - DNA, 25 bp, Canis familiaris
ctggaggggagggacctagcctctc

SEQ ID NO: 75483 - DNA, 25 bp, Canis familiaris
ctgagagggacggtgacctgggctc

SEQ ID NO: 75484 - DNA, 25 bp, Canis familiaris
ctgaagggtgcctaacgtttgcctc

SEQ ID NO: 75485 - DNA, 25 bp, Canis familiaris
ctgaccggctgccagaccggtatgc

SEQ ID NO: 75486 - DNA, 25 bp, Canis familiaris
ctgacagggctgcagacagggtatg

SEQ ID NO: 75487 - DNA, 25 bp, Canis familiaris
ctgtcaggctctccaaagacgactt

SEQ ID NO: 75488 - DNA, 25 bp, Canis familiaris
ctgaaagccttcgaatactgtatta

SEQ ID NO: 75489 - DNA, 25 bp, Canis familiaris
cgaaagcatttgccaagaatgtttt

SEQ ID NO: 75490 - DNA, 25 bp, Canis familiaris
cgacgagttctgccgcaagtttcgt

SEQ ID NO: 75491 - DNA, 25 bp, Canis familiaris
ctggctcaaattcccactgtttttt

SEQ ID NO: 75492 - DNA, 25 bp, Canis familiaris
ctgaccataagattccacgcttttg

SEQ ID NO: 75493 - DNA, 25 bp, Canis familiaris
ctgaccatgataagaccctcttgtt

SEQ ID NO: 75494 - DNA, 25 bp, Canis familiaris
ctgtccgaatagacccatcggtccc

SEQ ID NO: 75495 - DNA, 25 bp, Canis familiaris
cggccgattgagaacaacctccgcg

SEQ ID NO: 75496 - DNA, 25 bp, Canis familiaris
ctgaacgttcaaaccaagctcacgg

SEQ ID NO: 75497 - DNA, 25 bp, Canis familiaris
ctgaacgttttctcaacccagagca

SEQ ID NO: 75498 - DNA, 25 bp, Canis familiaris
cgagtacctttctgaaccacgacag

SEQ ID NO: 75499 - DNA, 25 bp, Canis familiaris
cggggtctcttctagaacgactgga

SEQ ID NO: 75500 - DNA, 25 bp, Canis familiaris
ctgaggccttttttattctgcacat

SEQ ID NO: 75501 - DNA, 25 bp, Canis familiaris
ctgattgccttttaagcctcagctc

SEQ ID NO: 75502 - DNA, 25 bp, Canis familiaris
ctgttctttgtctacttctcagcag

SEQ ID NO: 75503 - DNA, 25 bp, Canis familiaris
ctgagtttctgttgatttgctaccc

SEQ ID NO: 75504 - DNA, 25 bp, Canis familiaris
ctgacttttctggttttactaccat

SEQ ID NO: 75505 - DNA, 25 bp, Canis familiaris
ctgacatctttctgtgttttctgat

SEQ ID NO: 75506 - DNA, 25 bp, Canis familiaris
ctgagccctgaagttgtttttattt

SEQ ID NO: 75507 - DNA, 25 bp, Canis familiaris
ctgaccatccattcattttctttat

SEQ ID NO: 75508 - DNA, 25 bp, Canis familiaris
ctgaccccctgtatgtcgatatcta

SEQ ID NO: 75509 - DNA, 25 bp, Canis familiaris
ctgacacccctacattcatatattg

SEQ ID NO: 75510 - DNA, 25 bp, Canis familiaris
ctgaagcaacttcccattctaacgc

SEQ ID NO: 75511 - DNA, 25 bp, Canis familiaris
ctgatgaaatcttgcccaactaccc

SEQ ID NO: 75512 - DNA, 25 bp, Canis familiaris
ctgagaagatatagcccaaccccgc

SEQ ID NO: 75513 - DNA, 25 bp, Canis familiaris
ctgatgcacacaaggaccacactct

SEQ ID NO: 75514 - DNA, 25 bp, Canis familiaris
ctgatgaaagcacgacacctgtgtt

SEQ ID NO: 75515 - DNA, 25 bp, Canis familiaris
ctgtaagaccaagccgtattccaaa

SEQ ID NO: 75516 - DNA, 25 bp, Canis familiaris
ctgttaaccatgtaccagtgatgac

SEQ ID NO: 75517 - DNA, 25 bp, Canis familiaris
ctgtctaaccagagtcgctggcctc

SEQ ID NO: 75518 - DNA, 25 bp, Canis familiaris
ctgttcaacccactgaggggcttcc

SEQ ID NO: 75519 - DNA, 25 bp, Canis familiaris
ctgttgaacaccacgggtaatcata

SEQ ID NO: 75520 - DNA, 25 bp, Canis familiaris
ctgttgaggtccacctgatgctaaa

SEQ ID NO: 75521 - DNA, 25 bp, Canis familiaris
ctgtccaactccaccgaataaaata

SEQ ID NO: 75522 - DNA, 25 bp, Canis familiaris
ctgtcccaaccatcaccaaaaatat

SEQ ID NO: 75523 - DNA, 25 bp, Canis familiaris
ctgatccaaatctaacactccaata

SEQ ID NO: 75524 - DNA, 25 bp, Canis familiaris
ctgagccatgtaaccaacttcaaca

SEQ ID NO: 75525 - DNA, 25 bp, Canis familiaris
ctgagttgtttctgactcgacaatc

SEQ ID NO: 75526 - DNA, 25 bp, Canis familiaris
ctgacttggacatggccctgaaatc

SEQ ID NO: 75527 - DNA, 25 bp, Canis familiaris
ctgaaaggcagctggtacgagcaag

SEQ ID NO: 75528 - DNA, 25 bp, Canis familiaris
ctggtcattcagtcggtacttccat

SEQ ID NO: 75529 - DNA, 25 bp, Canis familiaris
ctggtggtcaggcagttttccaagc

SEQ ID NO: 75530 - DNA, 25 bp, Canis familiaris
ctgagtggtcttaagctgctcttcc

SEQ ID NO: 75531 - DNA, 25 bp, Canis familiaris
ctgagggtttgaagtgcgttggcca

SEQ ID NO: 75532 - DNA, 25 bp, Canis familiaris
ctggccttgaactgggcttggcctc

SEQ ID NO: 75533 - DNA, 25 bp, Canis familiaris
ctggccttgaaaaagatttggccct

SEQ ID NO: 75534 - DNA, 25 bp, Canis familiaris
ctgtccggaaatagcaactctgggc

SEQ ID NO: 75535 - DNA, 25 bp, Canis familiaris
ctgtcccagtagttcttccagggca

SEQ ID NO: 75536 - DNA, 25 bp, Canis familiaris
ctgtgtatagtccatttcccaggtc

SEQ ID NO: 75537 - DNA, 25 bp, Canis familiaris
ctgtttcactggttatgcggcggat

SEQ ID NO: 75538 - DNA, 25 bp, Canis familiaris
ctgagtgaaggtcttgcgagtgttt

SEQ ID NO: 75539 - DNA, 25 bp, Canis familiaris
ctgaggaagggcccctgatgctgtc

SEQ ID NO: 75540 - DNA, 25 bp, Canis familiaris
ctgaggagagggaccagctgctgcc

SEQ ID NO: 75541 - DNA, 25 bp, Canis familiaris
ctgaggacgaggagctgctgcgagc

SEQ ID NO: 75542 - DNA, 25 bp, Canis familiaris
ctgaggaccaggttgtctcctgcga

SEQ ID NO: 75543 - DNA, 25 bp, Canis familiaris
ctgagccaatattgcatctgttcca

SEQ ID NO: 75544 - DNA, 25 bp, Canis familiaris
ctgagacttgattattgcttcccgt

SEQ ID NO: 75545 - DNA, 25 bp, Canis familiaris
ctgatgactttatcagcattccccc

SEQ ID NO: 75546 - DNA, 25 bp, Canis familiaris
ctgtacatttattctttgtgccccc

SEQ ID NO: 75547 - DNA, 25 bp, Canis familiaris
ctgtacatatccaaacgagtccctg

SEQ ID NO: 75548 - DNA, 25 bp, Canis familiaris
ctgtttgctccttactgaattccaa

SEQ ID NO: 75549 - DNA, 25 bp, Canis familiaris
ctgttagaccagtaccacatctcga

SEQ ID NO: 75550 - DNA, 25 bp, Canis familiaris
ctgtttgtgacctccaagctcaagg

SEQ ID NO: 75551 - DNA, 25 bp, Canis familiaris
ctgttttgaccagagaggccaaggt

SEQ ID NO: 75552 - DNA, 25 bp, Canis familiaris
ctggttgggcccggggctgaagaag

SEQ ID NO: 75553 - DNA, 25 bp, Canis familiaris
ctggttaggcctttcagttgtaaat

SEQ ID NO: 75554 - DNA, 25 bp, Canis familiaris
ctgggtttgtccgcatgttgtaatt

SEQ ID NO: 75555 - DNA, 25 bp, Canis familiaris
ctgggtttgtccgcatgttgtaatt

SEQ ID NO: 75556 - DNA, 25 bp, Canis familiaris
ctgtttttccctgtatatcgcaaat

SEQ ID NO: 75557 - DNA, 25 bp, Canis familiaris
ctgtttcaatcccctgtttacaaat

SEQ ID NO: 75558 - DNA, 25 bp, Canis familiaris
ctgttagcacatgtactttttagac

SEQ ID NO: 75559 - DNA, 25 bp, Canis familiaris
ctgtatatgctaactccgttgctct

SEQ ID NO: 75560 - DNA, 25 bp, Canis familiaris
ctgtgatttagagcttttctgcccg

SEQ ID NO: 75561 - DNA, 25 bp, Canis familiaris
ctggcaattggatctttacccgtga

SEQ ID NO: 75562 - DNA, 25 bp, Canis familiaris
cggctttgagactttataactttgg

SEQ ID NO: 75563 - DNA, 25 bp, Canis familiaris
ctggtattactcgtgcgtacacgtt

SEQ ID NO: 75564 - DNA, 25 bp, Canis familiaris
ctggatatctatctgtgcctacgtc

SEQ ID NO: 75565 - DNA, 25 bp, Canis familiaris
ctgttcatacatttgtgctgcccgt

SEQ ID NO: 75566 - DNA, 25 bp, Canis familiaris
ctgatatatagcttggatctggcca

SEQ ID NO: 75567 - DNA, 25 bp, Canis familiaris
ctgttagcagctagatctgggcaca

SEQ ID NO: 75568 - DNA, 25 bp, Canis familiaris
ctgttaggccagcctgaggccacgt

SEQ ID NO: 75569 - DNA, 25 bp, Canis familiaris
ctgatctagtgcccatctagtgccc

SEQ ID NO: 75570 - DNA, 25 bp, Canis familiaris
ctgactcagagcagcagctcagaag

SEQ ID NO: 75571 - DNA, 25 bp, Canis familiaris
ctgacaccatcaagcagctgagcca

SEQ ID NO: 75572 - DNA, 25 bp, Canis familiaris
ctgagccgcatcctgtctgagatgc

SEQ ID NO: 75573 - DNA, 25 bp, Canis familiaris
ctgtcacatctgctctcaatgcatg

SEQ ID NO: 75574 - DNA, 25 bp, Canis familiaris
ctgattcctggaatgccatctggga

SEQ ID NO: 75575 - DNA, 25 bp, Canis familiaris
ctgagtcctggaaccggcagaagga

SEQ ID NO: 75576 - DNA, 25 bp, Canis familiaris
ctgagtcctggaaccggcagaagga

SEQ ID NO: 75577 - DNA, 25 bp, Canis familiaris
ctgagtcctggaaccggcagaagga

SEQ ID NO: 75578 - DNA, 25 bp, Canis familiaris
ctgagtcctggaaccggcagaagga

SEQ ID NO: 75579 - DNA, 25 bp, Canis familiaris
ctgagtcctggaaccggcagaagga

SEQ ID NO: 75580 - DNA, 25 bp, Canis familiaris
ctgagtcctggaaccggcagaagga

SEQ ID NO: 75581 - DNA, 25 bp, Canis familiaris
ctgagtcctggaaccggcagaagga

SEQ ID NO: 75582 - DNA, 25 bp, Canis familiaris
ctgagtcctggaaccggcagaagga

SEQ ID NO: 75583 - DNA, 25 bp, Canis familiaris
ctgatgtccctatgccttatgcaag

SEQ ID NO: 75584 - DNA, 25 bp, Canis familiaris
ctgacaccagtagcttatgataagc

SEQ ID NO: 75585 - DNA, 25 bp, Canis familiaris
ctgacaccgaccgtggatagaccca

SEQ ID NO: 75586 - DNA, 25 bp, Canis familiaris
ctgacgcctgacaagtggaaatctc

SEQ ID NO: 75587 - DNA, 25 bp, Canis familiaris
ctgactcctaaactgatgaaggttg

SEQ ID NO: 75588 - DNA, 25 bp, Canis familiaris
ctgagccacctcaagcggacggtgg

SEQ ID NO: 75589 - DNA, 25 bp, Canis familiaris
ctgaccaggtgcaagagggcgtgct

SEQ ID NO: 75590 - DNA, 25 bp, Canis familiaris
ctgatgctggagccgtggggcggct

SEQ ID NO: 75591 - DNA, 25 bp, Canis familiaris
ctgagctcgcatgtgcggggggtgg

SEQ ID NO: 75592 - DNA, 25 bp, Canis familiaris
ctgagcccatcttgcagtttgtttc

SEQ ID NO: 75593 - DNA, 25 bp, Canis familiaris
ctgacccctagccatgatatgattc

SEQ ID NO: 75594 - DNA, 25 bp, Canis familiaris
ctgacccctagccatgatatgattc

SEQ ID NO: 75595 - DNA, 25 bp, Canis familiaris
ctgacgcccaactatttgataataa

SEQ ID NO: 75596 - DNA, 25 bp, Canis familiaris
ctgggacccctagtggtataaattg

SEQ ID NO: 75597 - DNA, 25 bp, Canis familiaris
ctgggccccgggtggcataaagtgg

SEQ ID NO: 75598 - DNA, 25 bp, Canis familiaris
ctgggcggctggccgccggaatagg

SEQ ID NO: 75599 - DNA, 25 bp, Canis familiaris
ctgaggggtcgcgctgagagaagag

SEQ ID NO: 75600 - DNA, 25 bp, Canis familiaris
ctgagcggagccgtgtccaataaag

SEQ ID NO: 75601 - DNA, 25 bp, Canis familiaris
ctgaggccccagctaaatcaagaga

SEQ ID NO: 75602 - DNA, 25 bp, Canis familiaris
ctgaccccgacagtagacagggaga

SEQ ID NO: 75603 - DNA, 25 bp, Canis familiaris
ctgagccccgatcgtgggggagggg

SEQ ID NO: 75604 - DNA, 25 bp, Canis familiaris
ctgacccctcagagccagggggtgg

SEQ ID NO: 75605 - DNA, 25 bp, Canis familiaris
ctgaccttcccaagctagtggaggg

SEQ ID NO: 75606 - DNA, 25 bp, Canis familiaris
ctgaccatctctccagtgtttggag

SEQ ID NO: 75607 - DNA, 25 bp, Canis familiaris
ctgagcctgtgcagggtgcttggga

SEQ ID NO: 75608 - DNA, 25 bp, Canis familiaris
ctgagcctttgcagcctttaagatt

SEQ ID NO: 75609 - DNA, 25 bp, Canis familiaris
cggccgtgatgctccaataaagtct

SEQ ID NO: 75610 - DNA, 25 bp, Canis familiaris
ctgtccgtgtgtcctgcaataaatt

SEQ ID NO: 75611 - DNA, 25 bp, Canis familiaris
ctgtcctgctagatggaacatagat

SEQ ID NO: 75612 - DNA, 25 bp, Canis familiaris
ctgtctcccctccgaagaagatcgg

SEQ ID NO: 75613 - DNA, 25 bp, Canis familiaris
ctgtccccatcgcagggacacacgg

SEQ ID NO: 75614 - DNA, 25 bp, Canis familiaris
ctgtcacccacattggtggaaacag

SEQ ID NO: 75615 - DNA, 25 bp, Canis familiaris
ctgtcatcacctttgggggactgct

SEQ ID NO: 75616 - DNA, 25 bp, Canis familiaris
ctgaccaccccattgtggagacgct

SEQ ID NO: 75617 - DNA, 25 bp, Canis familiaris
ctgaccacaagttagatgttactga

SEQ ID NO: 75618 - DNA, 25 bp, Canis familiaris
ctgaccagcacgagggttgatcttt

SEQ ID NO: 75619 - DNA, 25 bp, Canis familiaris
ctgtcggcctctttgagttgttttt

SEQ ID NO: 75620 - DNA, 25 bp, Canis familiaris
ctgtagccgtgtttgcactcagttt

SEQ ID NO: 75621 - DNA, 25 bp, Canis familiaris
ctgtttcgactattgcgtttgttca

SEQ ID NO: 75622 - DNA, 25 bp, Canis familiaris
ctgttctctgacacatgacctttac

SEQ ID NO: 75623 - DNA, 25 bp, Canis familiaris
ctgtgactgggagcaaccttgcaaa

SEQ ID NO: 75624 - DNA, 25 bp, Canis familiaris
cgtgcatcgggtacaatagtcccaa

SEQ ID NO: 75625 - DNA, 25 bp, Canis familiaris
ctgtacttggtgacaaaccccaatg

SEQ ID NO: 75626 - DNA, 25 bp, Canis familiaris
cgtagcgtgcgtaataaccggaagc

SEQ ID NO: 75627 - DNA, 25 bp, Canis familiaris
ctgtccctgtgtacataaccctggg

SEQ ID NO: 75628 - DNA, 25 bp, Canis familiaris
ctgtcccatgggacagcacacacac

SEQ ID NO: 75629 - DNA, 25 bp, Canis familiaris
ctgagcgccatgtgtcatcacagac

SEQ ID NO: 75630 - DNA, 25 bp, Canis familiaris
ctgagcctcagatcacacagcagag

SEQ ID NO: 75631 - DNA, 25 bp, Canis familiaris
ctgagccttggtgccatagagccgt

SEQ ID NO: 75632 - DNA, 25 bp, Canis familiaris
cggtgctgatggacctcaaagccct

SEQ ID NO: 75633 - DNA, 25 bp, Canis familiaris
ctgaggtgtgtgacacacagacaga

SEQ ID NO: 75634 - DNA, 25 bp, Canis familiaris
ctgaggtgacatgcctcagccctag

SEQ ID NO: 75635 - DNA, 25 bp, Canis familiaris
ctgaggggcagtgggaccctggcag

SEQ ID NO: 75636 - DNA, 25 bp, Canis familiaris
ctgaggaggccaggcaaaactgccg

SEQ ID NO: 75637 - DNA, 25 bp, Canis familiaris
ctgtctgaagaagccacaagtccgc

SEQ ID NO: 75638 - DNA, 25 bp, Canis familiaris
ctgtcggaaggaggccaatgtcccc

SEQ ID NO: 75639 - DNA, 25 bp, Canis familiaris
ctgggaaacatcaccagttcctcca

SEQ ID NO: 75640 - DNA, 25 bp, Canis familiaris
ctggaggaatctgcccaattttctc

SEQ ID NO: 75641 - DNA, 25 bp, Canis familiaris
ctgaggggaatcgcacctctttcac

SEQ ID NO: 75642 - DNA, 25 bp, Canis familiaris
cgtgggtcagatcacacttttcttt

SEQ ID NO: 75643 - DNA, 25 bp, Canis familiaris
ctgtggtctacaaaaatgttgtttg

SEQ ID NO: 75644 - DNA, 25 bp, Canis familiaris
ctgtcagttacattaaggtctttct

SEQ ID NO: 75645 - DNA, 25 bp, Canis familiaris
ctgtcgtgcttctttgaggttttca

SEQ ID NO: 75646 - DNA, 25 bp, Canis familiaris
ctgttatttcatttagagttctcta

SEQ ID NO: 75647 - DNA, 25 bp, Canis familiaris
ctgtttttattccatgtgtgcctct

SEQ ID NO: 75648 - DNA, 25 bp, Canis familiaris
ctgttctttcatagcaatgttcctc

SEQ ID NO: 75649 - DNA, 25 bp, Canis familiaris
ctgtgatagtttagaaatatcccca

SEQ ID NO: 75650 - DNA, 25 bp, Canis familiaris
ctgagatcagttccgagagatcatc

SEQ ID NO: 75651 - DNA, 25 bp, Canis familiaris
ctgatgggtgtgcgagagctctgca

SEQ ID NO: 75652 - DNA, 25 bp, Canis familiaris
ctgattggtgagtgatccctgcggc

SEQ ID NO: 75653 - DNA, 25 bp, Canis familiaris
ctgataggtgtctgcactcatctcg

SEQ ID NO: 75654 - DNA, 25 bp, Canis familiaris
ctgagtgagccctcctcactcagcc

SEQ ID NO: 75655 - DNA, 25 bp, Canis familiaris
ctgatgaagcctaccttattggccg

SEQ ID NO: 75656 - DNA, 25 bp, Canis familiaris
ctgtaagcctgcaggtcaatcgcgg

SEQ ID NO: 75657 - DNA, 25 bp, Canis familiaris
ctgtaagtgtgccagcgtccataca

SEQ ID NO: 75658 - DNA, 25 bp, Canis familiaris
ctgtacagtatggtggctccactcg

SEQ ID NO: 75659 - DNA, 25 bp, Canis familiaris
ctgtacaggttgtcacagccgtctg

SEQ ID NO: 75660 - DNA, 25 bp, Canis familiaris
ctgtagcaggtgttcctgtccagct

SEQ ID NO: 75661 - DNA, 25 bp, Canis familiaris
ctgtaggagagattggtgtccctct

SEQ ID NO: 75662 - DNA, 25 bp, Canis familiaris
ctgagagcgggactgaatcgccttt

SEQ ID NO: 75663 - DNA, 25 bp, Canis familiaris
ctgaggggttttcagcctcttgtgc

SEQ ID NO: 75664 - DNA, 25 bp, Canis familiaris
ctgggggcattatttacctcaggcc

SEQ ID NO: 75665 - DNA, 25 bp, Canis familiaris
cgaggggctttgagacctattcctt

SEQ ID NO: 75666 - DNA, 25 bp, Canis familiaris
ctggggaccttgggaccagaatcgc

SEQ ID NO: 75667 - DNA, 25 bp, Canis familiaris
ctggttaccctgagagccagaccca

SEQ ID NO: 75668 - DNA, 25 bp, Canis familiaris
ctggataaccctatgggcctaccgc

SEQ ID NO: 75669 - DNA, 25 bp, Canis familiaris
ctggtcaaccactttaccactagca

SEQ ID NO: 75670 - DNA, 25 bp, Canis familiaris
ctggatttcacggattacacgtaat

SEQ ID NO: 75671 - DNA, 25 bp, Canis familiaris
ctgtcgcttacagctgtcgacagta

SEQ ID NO: 75672 - DNA, 25 bp, Canis familiaris
ctggagttacattcgttgaaggcac

SEQ ID NO: 75673 - DNA, 25 bp, Canis familiaris
cgggttcaccacgtgtgggaacttg

SEQ ID NO: 75674 - DNA, 25 bp, Canis familiaris
cgggttccaacattggcccaagtat

SEQ ID NO: 75675 - DNA, 25 bp, Canis familiaris
ctggggaccaacaaactcaatgcgt

SEQ ID NO: 75676 - DNA, 25 bp, Canis familiaris
ctgtggcttccaataaacctgtctg

SEQ ID NO: 75677 - DNA, 25 bp, Canis familiaris
ctgtccttgaagatatacctgtgca

SEQ ID NO: 75678 - DNA, 25 bp, Canis familiaris
ctgtaccatattctatcctgtgtgc

SEQ ID NO: 75679 - DNA, 25 bp, Canis familiaris
ctgtcccacatattatacctttctt

SEQ ID NO: 75680 - DNA, 25 bp, Canis familiaris
ctgtcccactattgtcctattcagt

SEQ ID NO: 75681 - DNA, 25 bp, Canis familiaris
ctgatcttacttcatccaatctaat

SEQ ID NO: 75682 - DNA, 25 bp, Canis familiaris
ctgatctgtcaaatgctttcttctt

SEQ ID NO: 75683 - DNA, 25 bp, Canis familiaris
ctgtatgtgctgtcgctgtgttttt

SEQ ID NO: 75684 - DNA, 25 bp, Canis familiaris
ctgtttctctcagtggtagccttgc

SEQ ID NO: 75685 - DNA, 25 bp, Canis familiaris
ctgtttcctcaaggtagtctatgcc

SEQ ID NO: 75686 - DNA, 25 bp, Canis familiaris
ctgatggtgcttcacgtcattcgtg

SEQ ID NO: 75687 - DNA, 25 bp, Canis familiaris
ctgaggatccttactcatcactttg

SEQ ID NO: 75688 - DNA, 25 bp, Canis familiaris
ctgatgaacagatttctacaattgt

SEQ ID NO: 75689 - DNA, 25 bp, Canis familiaris
ctgtgagaagaccaccactattcgt

SEQ ID NO: 75690 - DNA, 25 bp, Canis familiaris
ctggcgagagacatctataaccggg

SEQ ID NO: 75691 - DNA, 25 bp, Canis familiaris
ctggcgagaagcatctataaccggg

SEQ ID NO: 75692 - DNA, 25 bp, Canis familiaris
cggcggaacaacatggagatggtgg

SEQ ID NO: 75693 - DNA, 25 bp, Canis familiaris
cggaggagggaattgaaattgtgaa

SEQ ID NO: 75694 - DNA, 25 bp, Canis familiaris
ctgggtgggtggtctcttatttgaa

SEQ ID NO: 75695 - DNA, 25 bp, Canis familiaris
ctgggtgttggcttccagttttggc

SEQ ID NO: 75696 - DNA, 25 bp, Canis familiaris
ctgaggctttggttccacagtgggg

SEQ ID NO: 75697 - DNA, 25 bp, Canis familiaris
ctgagggctttgctcgagctgtgcg

SEQ ID NO: 75698 - DNA, 25 bp, Canis familiaris
ctgagggcagtttagaggctctatg

SEQ ID NO: 75699 - DNA, 25 bp, Canis familiaris
ctgaggccatgattaagagggacgg

SEQ ID NO: 75700 - DNA, 25 bp, Canis familiaris
ctgatggacatgttcagggatcgcc

SEQ ID NO: 75701 - DNA, 25 bp, Canis familiaris
ctgagcgaagcaagcacgcgaccca

SEQ ID NO: 75702 - DNA, 25 bp, Canis familiaris
ctgagtgcaagagccatgtaccaat

SEQ ID NO: 75703 - DNA, 25 bp, Canis familiaris
ctgaggaggacgccatgctggcact

SEQ ID NO: 75704 - DNA, 25 bp, Canis familiaris
ctgagcagggaccccgatgatgcga

SEQ ID NO: 75705 - DNA, 25 bp, Canis familiaris
ctgtcgggacaaacgtgacaaccgt

SEQ ID NO: 75706 - DNA, 25 bp, Canis familiaris
ctgttgagccactggccaaaaccgt

SEQ ID NO: 75707 - DNA, 25 bp, Canis familiaris
ctgtctggccccagtcaacatagtc

SEQ ID NO: 75708 - DNA, 25 bp, Canis familiaris
ctgtccactcctgagatccagaagt

SEQ ID NO: 75709 - DNA, 25 bp, Canis familiaris
ctgtctcccgatgaaaacatatctt

SEQ ID NO: 75710 - DNA, 25 bp, Canis familiaris
ctgtctcccgatgaaaacatatctt

SEQ ID NO: 75711 - DNA, 25 bp, Canis familiaris
ctgtctcccgatgaaaacatatctt

SEQ ID NO: 75712 - DNA, 25 bp, Canis familiaris
ctgtccgccaacaaagtcaagccat

SEQ ID NO: 75713 - DNA, 25 bp, Canis familiaris
ctgggctcctaaaagcatcaacttt

SEQ ID NO: 75714 - DNA, 25 bp, Canis familiaris
ctgggtgtcaaatctgtagtctatt

SEQ ID NO: 75715 - DNA, 25 bp, Canis familiaris
ctgggatatccgacgcttttctagt

SEQ ID NO: 75716 - DNA, 25 bp, Canis familiaris
cggtaccagcctgcttttttgtaca

SEQ ID NO: 75717 - DNA, 25 bp, Canis familiaris
ctgttacaccactgcctttggtaac

SEQ ID NO: 75718 - DNA, 25 bp, Canis familiaris
ctgttcgagccaaggcctttggatt

SEQ ID NO: 75719 - DNA, 25 bp, Canis familiaris
ctgttccaccaaggaccttcatgca

SEQ ID NO: 75720 - DNA, 25 bp, Canis familiaris
ctgtgccaggccagtagcctttaga

SEQ ID NO: 75721 - DNA, 25 bp, Canis familiaris
ctgttcagactcagacagatctctg

SEQ ID NO: 75722 - DNA, 25 bp, Canis familiaris
ctgattctctccaacatcatgcatc

SEQ ID NO: 75723 - DNA, 25 bp, Canis familiaris
ctgatgatctgctgtactcattccc

SEQ ID NO: 75724 - DNA, 25 bp, Canis familiaris
ctgagtctgacggggatgctcactt

SEQ ID NO: 75725 - DNA, 25 bp, Canis familiaris
ctgagctgaacgggaagctcactgg

SEQ ID NO: 75726 - DNA, 25 bp, Canis familiaris
ctgtcagaactccagagagccacgc

SEQ ID NO: 75727 - DNA, 25 bp, Canis familiaris
ctgtcaggacactctagccaggaca

SEQ ID NO: 75728 - DNA, 25 bp, Canis familiaris
ctgagggacagctctgcctcaagct

SEQ ID NO: 75729 - DNA, 25 bp, Canis familiaris
ctgagcgagtactacatcctcactg

SEQ ID NO: 75730 - DNA, 25 bp, Canis familiaris
ctgatgctggatgagacctgtcttg

SEQ ID NO: 75731 - DNA, 25 bp, Canis familiaris
ctgtctgcaaaaaccatgtctggca

SEQ ID NO: 75732 - DNA, 25 bp, Canis familiaris
ctgtgccaaataattttctgccacc

SEQ ID NO: 75733 - DNA, 25 bp, Canis familiaris
ctgtgctctttaaacttcttcaact

SEQ ID NO: 75734 - DNA, 25 bp, Canis familiaris
ctgtcgcctgtaaaacttatctcac

SEQ ID NO: 75735 - DNA, 25 bp, Canis familiaris
ctgtcgccagttgtgcacttttaca

SEQ ID NO: 75736 - DNA, 25 bp, Canis familiaris
ctgtactgccttgtcacttttaata

SEQ ID NO: 75737 - DNA, 25 bp, Canis familiaris
ctgttctctttgactctttttttat

SEQ ID NO: 75738 - DNA, 25 bp, Canis familiaris
ctgtttgttgttggttattttgata

SEQ ID NO: 75739 - DNA, 25 bp, Canis familiaris
ctgtggtttcgctgttattaattga

SEQ ID NO: 75740 - DNA, 25 bp, Canis familiaris
cgggtttcgtgtccactaagttgtg

SEQ ID NO: 75741 - DNA, 25 bp, Canis familiaris
ctgggttgactttgccttgaagtta

SEQ ID NO: 75742 - DNA, 25 bp, Canis familiaris
ctgtagtttccttcctaggacttgt

SEQ ID NO: 75743 - DNA, 25 bp, Canis familiaris
ctggagtttaccccaaggactacat

SEQ ID NO: 75744 - DNA, 25 bp, Canis familiaris
ctgtgatatttaccccaagagttta

SEQ ID NO: 75745 - DNA, 25 bp, Canis familiaris
ctgtgcaagcatcaccaccataagc

SEQ ID NO: 75746 - DNA, 25 bp, Canis familiaris
ctgtgcaacatgtaccaggatggac

SEQ ID NO: 75747 - DNA, 25 bp, Canis familiaris
ctgatgtccgtgttcgtgaggagct

SEQ ID NO: 75748 - DNA, 25 bp, Canis familiaris
ctgatgctcccgtcactggagtgag

SEQ ID NO: 75749 - DNA, 25 bp, Canis familiaris
ctgatgttgtggacgtggcagtaga

SEQ ID NO: 75750 - DNA, 25 bp, Canis familiaris
ctgtattgggctttctgcatggagt

SEQ ID NO: 75751 - DNA, 25 bp, Canis familiaris
ctgttctggcggcattgtgggctta

SEQ ID NO: 75752 - DNA, 25 bp, Canis familiaris
ctgtcttcacagctttggagaattt

SEQ ID NO: 75753 - DNA, 25 bp, Canis familiaris
ctgtcaggcccgactgtggagaata

SEQ ID NO: 75754 - DNA, 25 bp, Canis familiaris
ctgagcggccttgctctgagaggta

SEQ ID NO: 75755 - DNA, 25 bp, Canis familiaris
ctgttgcccttcttgtcagggtagg

SEQ ID NO: 75756 - DNA, 25 bp, Canis familiaris
ctgtgttcacctttgtcggggaggt

SEQ ID NO: 75757 - DNA, 25 bp, Canis familiaris
ctgtctctccctgacatcggggaga

SEQ ID NO: 75758 - DNA, 25 bp, Canis familiaris
ctgtttccctgtgctctgggagaat

SEQ ID NO: 75759 - DNA, 25 bp, Canis familiaris
ctgtaatgcccttttgtggaagaat

SEQ ID NO: 75760 - DNA, 25 bp, Canis familiaris
ctgtctcatgctgttttgagggaag

SEQ ID NO: 75761 - DNA, 25 bp, Canis familiaris
ctgttgctcgccactaggatggagg

SEQ ID NO: 75762 - DNA, 25 bp, Canis familiaris
cgtctgccttcagttcatgtcatga

SEQ ID NO: 75763 - DNA, 25 bp, Canis familiaris
ctgttccttcattttgtcaggtgcc

SEQ ID NO: 75764 - DNA, 25 bp, Canis familiaris
ctgtctactaattggctctaaccct

SEQ ID NO: 75765 - DNA, 25 bp, Canis familiaris
ctgttactgccttgtgtgagacacc

SEQ ID NO: 75766 - DNA, 25 bp, Canis familiaris
ctgtaatcagcctgtgtagaccccc

SEQ ID NO: 75767 - DNA, 25 bp, Canis familiaris
ctgtcaacccctggaagatcctacg

SEQ ID NO: 75768 - DNA, 25 bp, Canis familiaris
ctgttacctccttgaaagattcact

SEQ ID NO: 75769 - DNA, 25 bp, Canis familiaris
ctgttgaccactcaagctatgtgtc

SEQ ID NO: 75770 - DNA, 25 bp, Canis familiaris
ctgttgcaccacacaaggctttgcc

SEQ ID NO: 75771 - DNA, 25 bp, Canis familiaris
ctgtccacatggatcaagcctgttt

SEQ ID NO: 75772 - DNA, 25 bp, Canis familiaris
ctgtcaccagagatcaaggcttgct

SEQ ID NO: 75773 - DNA, 25 bp, Canis familiaris
ctgtacaacagtgggatgctcttta

SEQ ID NO: 75774 - DNA, 25 bp, Canis familiaris
ctgatccccaccgatatttttaggt

SEQ ID NO: 75775 - DNA, 25 bp, Canis familiaris
ctgatcaatccacccaaggtgtttg

SEQ ID NO: 75776 - DNA, 25 bp, Canis familiaris
ctgatcaatcccaagcaggtgtttg

SEQ ID NO: 75777 - DNA, 25 bp, Canis familiaris
ctgatgctggcccagagggttctgg

SEQ ID NO: 75778 - DNA, 25 bp, Canis familiaris
ctgagggcgacatgcaggttcacag

SEQ ID NO: 75779 - DNA, 25 bp, Canis familiaris
ctgtgaacgatctgcaggtccagcg

SEQ ID NO: 75780 - DNA, 25 bp, Canis familiaris
ctgtgactcagagccacggctaacc

SEQ ID NO: 75781 - DNA, 25 bp, Canis familiaris
ctgtaaggacacccggtatcccaag

SEQ ID NO: 75782 - DNA, 25 bp, Canis familiaris
ctgtaaaggcagccgaggaatccaa

SEQ ID NO: 75783 - DNA, 25 bp, Canis familiaris
ctgtaaacatcaccacggaggtgaa

SEQ ID NO: 75784 - DNA, 25 bp, Canis familiaris
ctgagacccctcgaaggagtctaag

SEQ ID NO: 75785 - DNA, 25 bp, Canis familiaris
ctgagacccctcgtgaggttaccta

SEQ ID NO: 75786 - DNA, 25 bp, Canis familiaris
ctgagacccctcgtgaggttaccta

SEQ ID NO: 75787 - DNA, 25 bp, Canis familiaris
ctgagaccctcatgtgattcctcac

SEQ ID NO: 75788 - DNA, 25 bp, Canis familiaris
ctgatgatccactcagtttgcctct

SEQ ID NO: 75789 - DNA, 25 bp, Canis familiaris
ctgattgcagtttcagtctctccca

SEQ ID NO: 75790 - DNA, 25 bp, Canis familiaris
ctgttggtgtagttctctcatcagc

SEQ ID NO: 75791 - DNA, 25 bp, Canis familiaris
ctgtcatggatttgcttatactact

SEQ ID NO: 75792 - DNA, 25 bp, Canis familiaris
ctgatcaggatgagcctctactccc

SEQ ID NO: 75793 - DNA, 25 bp, Canis familiaris
ctgatccatcagaggttgatcttcc

SEQ ID NO: 75794 - DNA, 25 bp, Canis familiaris
ctgtctatcgtgctgtgtcatttca

SEQ ID NO: 75795 - DNA, 25 bp, Canis familiaris
ctggcttcatgcaattgttacttca

SEQ ID NO: 75796 - DNA, 25 bp, Canis familiaris
ctgttgctccctagcagtacattca

SEQ ID NO: 75797 - DNA, 25 bp, Canis familiaris
ctgttacgcctacgttgctgatcat

SEQ ID NO: 75798 - DNA, 25 bp, Canis familiaris
ctgttcccccggatgtggatgtgag

SEQ ID NO: 75799 - DNA, 25 bp, Canis familiaris
ctgtttacccggctgcattgtggga

SEQ ID NO: 75800 - DNA, 25 bp, Canis familiaris
ctgttctacctcggtgtgtgtgtgt

SEQ ID NO: 75801 - DNA, 25 bp, Canis familiaris
ctgttttgttcctgctgattgcttg

SEQ ID NO: 75802 - DNA, 25 bp, Canis familiaris
ctgttatgtttctattgcttttgta

SEQ ID NO: 75803 - DNA, 25 bp, Canis familiaris
ctgttttctgtgttctcttattcta

SEQ ID NO: 75804 - DNA, 25 bp, Canis familiaris
ctgtctttcctgtgatctgtattca

SEQ ID NO: 75805 - DNA, 25 bp, Canis familiaris
ctgtcttctgccattcatttatacc

SEQ ID NO: 75806 - DNA, 25 bp, Canis familiaris
ctgttttgtcagaacttaaatggaa

SEQ ID NO: 75807 - DNA, 25 bp, Canis familiaris
ctgtttgctgtaatatgcttgaaat

SEQ ID NO: 75808 - DNA, 25 bp, Canis familiaris
ctgatgtgtgcttttgtctaagtat

SEQ ID NO: 75809 - DNA, 25 bp, Canis familiaris
ctgatgtgatgcctgttgagtcaga

SEQ ID NO: 75810 - DNA, 25 bp, Canis familiaris
ctgttgctcattttaccagaagacc

SEQ ID NO: 75811 - DNA, 25 bp, Canis familiaris
ctgtgatgtgttttacccagcacct

SEQ ID NO: 75812 - DNA, 25 bp, Canis familiaris
ctggatgacatttccagccgcatct

SEQ ID NO: 75813 - DNA, 25 bp, Canis familiaris
ctgatgatacacaaactcgcgctct

SEQ ID NO: 75814 - DNA, 25 bp, Canis familiaris
ctgtgtacaagctcctgtgcatatg

SEQ ID NO: 75815 - DNA, 25 bp, Canis familiaris
ctgtatactggcatcctgtttgtga

SEQ ID NO: 75816 - DNA, 25 bp, Canis familiaris
ctgatatacttaagccttgttgatt

SEQ ID NO: 75817 - DNA, 25 bp, Canis familiaris
ctgatttcttagcacatttcttagg

SEQ ID NO: 75818 - DNA, 25 bp, Canis familiaris
ctgtgttgtgcttgcgactttgcat

SEQ ID NO: 75819 - DNA, 25 bp, Canis familiaris
ctgttctgtgtccatgcagcttgga

SEQ ID NO: 75820 - DNA, 25 bp, Canis familiaris
ctgtgctcaaggctgcagcttcagt

SEQ ID NO: 75821 - DNA, 25 bp, Canis familiaris
ctgttggatgtgctgcagctggcag

SEQ ID NO: 75822 - DNA, 25 bp, Canis familiaris
ctgttggggtgtggatcgagctgat

SEQ ID NO: 75823 - DNA, 25 bp, Canis familiaris
ctgtgtgggtgttgctgagtgattc

SEQ ID NO: 75824 - DNA, 25 bp, Canis familiaris
ctgtctcagtgagtagtaagtttga

SEQ ID NO: 75825 - DNA, 25 bp, Canis familiaris
ctgtactctgagtgtcatcgacttg

SEQ ID NO: 75826 - DNA, 25 bp, Canis familiaris
ctgtacctgagtttcctcatctata

SEQ ID NO: 75827 - DNA, 25 bp, Canis familiaris
ctggtcgcgagattaactattcaag

SEQ ID NO: 75828 - DNA, 25 bp, Canis familiaris
ctgtacgggacatcatctatggcaa

SEQ ID NO: 75829 - DNA, 25 bp, Canis familiaris
ctgtacgtgtacatcatctatggca

SEQ ID NO: 75830 - DNA, 25 bp, Canis familiaris
ctgatgactgtatctctctctaggt

SEQ ID NO: 75831 - DNA, 25 bp, Canis familiaris
ctgttcatctatacacttccagtgt

SEQ ID NO: 75832 - DNA, 25 bp, Canis familiaris
ctgttcctgctgagagtccagatgt

SEQ ID NO: 75833 - DNA, 25 bp, Canis familiaris
ctgtgtcctgattgagagtcctgag

SEQ ID NO: 75834 - DNA, 25 bp, Canis familiaris
ctgtcacctgacaatggctactggg

SEQ ID NO: 75835 - DNA, 25 bp, Canis familiaris
ctgtccgtgcaaaggtcctgggagc

SEQ ID NO: 75836 - DNA, 25 bp, Canis familiaris
ctgatgcgggtctgggactggggta

SEQ ID NO: 75837 - DNA, 25 bp, Canis familiaris
ctgtgcagggcctgtgggtgggacg

SEQ ID NO: 75838 - DNA, 25 bp, Canis familiaris
ctgagggcgcttgggaggtggggcc

SEQ ID NO: 75839 - DNA, 25 bp, Canis familiaris
cggggcctttactggggagatcagc

SEQ ID NO: 75840 - DNA, 25 bp, Canis familiaris
ctgttggccttttttgtgggaccag

SEQ ID NO: 75841 - DNA, 25 bp, Canis familiaris
ctggtccgtgtattctttgggtcca

SEQ ID NO: 75842 - DNA, 25 bp, Canis familiaris
ctggccccagtaggcctgggattcc

SEQ ID NO: 75843 - DNA, 25 bp, Canis familiaris
ctggtcaacaacggccggaatccgc

SEQ ID NO: 75844 - DNA, 25 bp, Canis familiaris
ctgggccaaagcagcctaaaccgct

SEQ ID NO: 75845 - DNA, 25 bp, Canis familiaris
ttaagcctcgacacgtgtaacacgt

SEQ ID NO: 75846 - DNA, 25 bp, Canis familiaris
ctgttccctgacactgatgtacatc

SEQ ID NO: 75847 - DNA, 25 bp, Canis familiaris
ctgattctcattttcctgatgtcaa

SEQ ID NO: 75848 - DNA, 25 bp, Canis familiaris
ctgatccctcattactctgatctag

SEQ ID NO: 75849 - DNA, 25 bp, Canis familiaris
ctgtcacactcagtaccttctatgc

SEQ ID NO: 75850 - DNA, 25 bp, Canis familiaris
ctgtgcacagccagaccattcagat

SEQ ID NO: 75851 - DNA, 25 bp, Canis familiaris
ctgattcactcagaccattcagtct

SEQ ID NO: 75852 - DNA, 25 bp, Canis familiaris
ctgagtgcccaggagctatccagtg

SEQ ID NO: 75853 - DNA, 25 bp, Canis familiaris
ctgaggcagcaaggactattaagta

SEQ ID NO: 75854 - DNA, 25 bp, Canis familiaris
tgtcttactatgcacaggacagcct

SEQ ID NO: 75855 - DNA, 25 bp, Canis familiaris
ctgtgtctcataggtctgtaatttg

SEQ ID NO: 75856 - DNA, 25 bp, Canis familiaris
ctgaggcgctgaggtggattccgtg

SEQ ID NO: 75857 - DNA, 25 bp, Canis familiaris
ctgaggctgtgcgggacattcccag

SEQ ID NO: 75858 - DNA, 25 bp, Canis familiaris
ctgtggatctcgcaaattcgtcgcc

SEQ ID NO: 75859 - DNA, 25 bp, Canis familiaris
ctgtttcttcgattcattcgtgctg

SEQ ID NO: 75860 - DNA, 25 bp, Canis familiaris
ctgtcctttctgttatccagcatgg

SEQ ID NO: 75861 - DNA, 25 bp, Canis familiaris
ctgtcctgcttgcttgtaacatacc

SEQ ID NO: 75862 - DNA, 25 bp, Canis familiaris
ctgtccctctgactggaaaacagac

SEQ ID NO: 75863 - DNA, 25 bp, Canis familiaris
ctgtccctgttgggccacaaacagc

SEQ ID NO: 75864 - DNA, 25 bp, Canis familiaris
ctgtcgcctgttctcaggagctaca

SEQ ID NO: 75865 - DNA, 25 bp, Canis familiaris
ctgtcgacgttaatctgaaggagaa

SEQ ID NO: 75866 - DNA, 25 bp, Canis familiaris
ctgtagacgaccgatgctgccagaa

SEQ ID NO: 75867 - DNA, 25 bp, Canis familiaris
ctgtgtccagacggttccagaagcc

SEQ ID NO: 75868 - DNA, 25 bp, Canis familiaris
ctgttccacccaagttatgaggccc

SEQ ID NO: 75869 - DNA, 25 bp, Canis familiaris
ctgtacccccatatagtcagggccc

SEQ ID NO: 75870 - DNA, 25 bp, Canis familiaris
ctgtcactccctcataagctaaggc

SEQ ID NO: 75871 - DNA, 25 bp, Canis familiaris
cggccatcaggtcacaatgtagggc

SEQ ID NO: 75872 - DNA, 25 bp, Canis familiaris
cggaagcggtgtgcgaattgggccc

SEQ ID NO: 75873 - DNA, 25 bp, Canis familiaris
ctgagggtccttgagaataagcccc

SEQ ID NO: 75874 - DNA, 25 bp, Canis familiaris
ctgggagtgccgaggagtaaccgtc

SEQ ID NO: 75875 - DNA, 25 bp, Canis familiaris
ctgaggagggcgaggggggcgcctg

SEQ ID NO: 75876 - DNA, 25 bp, Canis familiaris
ctgaggagcccgctgaggagcggcg

SEQ ID NO: 75877 - DNA, 25 bp, Canis familiaris
ctgaggagaagcgcgagggcgccga

SEQ ID NO: 75878 - DNA, 25 bp, Canis familiaris
ctgtgagaataagagcaaggcggtg

SEQ ID NO: 75879 - DNA, 25 bp, Canis familiaris
tctgattaaaatgggaaacgggttg

SEQ ID NO: 75880 - DNA, 25 bp, Canis familiaris
ctgttacatagcatcagaaacgggt

SEQ ID NO: 75881 - DNA, 25 bp, Canis familiaris
ctgatcttttcaacacaaatcggtg

SEQ ID NO: 75882 - DNA, 25 bp, Canis familiaris
ctgtccttccagccaaggactggga

SEQ ID NO: 75883 - DNA, 25 bp, Canis familiaris
ctgttccccgcttgggagctgggga

SEQ ID NO: 75884 - DNA, 25 bp, Canis familiaris
ctgtctcctccgatggacgggaagt

SEQ ID NO: 75885 - DNA, 25 bp, Canis familiaris
ctgttccgacctgggtctggacaaa

SEQ ID NO: 75886 - DNA, 25 bp, Canis familiaris
ctgttctgcttccttggtataaata

SEQ ID NO: 75887 - DNA, 25 bp, Canis familiaris
ctgtgttccacggggtacaaattct

SEQ ID NO: 75888 - DNA, 25 bp, Canis familiaris
cgggtctacgcgggaacaacgtcag

SEQ ID NO: 75889 - DNA, 25 bp, Canis familiaris
ctgggagttccggatacatcccgtc

SEQ ID NO: 75890 - DNA, 25 bp, Canis familiaris
ctgtgggtttgaggatccatccctg

SEQ ID NO: 75891 - DNA, 25 bp, Canis familiaris
ctgtgtaaatagatcccatccctgc

SEQ ID NO: 75892 - DNA, 25 bp, Canis familiaris
ctgtgataaatgttacccttccctg

SEQ ID NO: 75893 - DNA, 25 bp, Canis familiaris
ctgtaagaagcaacaacctctcctc

SEQ ID NO: 75894 - DNA, 25 bp, Canis familiaris
ctgtcaatatggaaacacccttcct

SEQ ID NO: 75895 - DNA, 25 bp, Canis familiaris
ctggcaattggctaatcctccattg

SEQ ID NO: 75896 - DNA, 25 bp, Canis familiaris
ctgtcaggggatttgtctctctctg

SEQ ID NO: 75897 - DNA, 25 bp, Canis familiaris
ctgtgaaggggtctcctctgtgatc

SEQ ID NO: 75898 - DNA, 25 bp, Canis familiaris
ctgtttgtgtttctgtcttctacta

SEQ ID NO: 75899 - DNA, 25 bp, Canis familiaris
ctgtatttggctttttctttaatag

SEQ ID NO: 75900 - DNA, 25 bp, Canis familiaris
ctgtgagtttgctttcttctttagc

SEQ ID NO: 75901 - DNA, 25 bp, Canis familiaris
ctgtggttgtgtgtctgtggtaagc

SEQ ID NO: 75902 - DNA, 25 bp, Canis familiaris
ctgtggatccagttgtcaaggcaaa

SEQ ID NO: 75903 - DNA, 25 bp, Canis familiaris
ctgtgtcttccacttcaacgggaac

SEQ ID NO: 75904 - DNA, 25 bp, Canis familiaris
ctggtctttctggatacagggtacc

SEQ ID NO: 75905 - DNA, 25 bp, Canis familiaris
cggattattgctgcaactggcaaac

SEQ ID NO: 75906 - DNA, 25 bp, Canis familiaris
ctgtggctatttgggactccgaggc

SEQ ID NO: 75907 - DNA, 25 bp, Canis familiaris
ctgtcggatgcggggtctacgacgg

SEQ ID NO: 75908 - DNA, 25 bp, Canis familiaris
ctgtggacacccagttcatcgacga

SEQ ID NO: 75909 - DNA, 25 bp, Canis familiaris
ctgatcgcacacgctttgtttggat

SEQ ID NO: 75910 - DNA, 25 bp, Canis familiaris
ctgtctcacctactttgtctggaat

SEQ ID NO: 75911 - DNA, 25 bp, Canis familiaris
ctgtgctcactttcaagtgtcctaa

SEQ ID NO: 75912 - DNA, 25 bp, Canis familiaris
ctgtgcagctcatggtagaccctaa

SEQ ID NO: 75913 - DNA, 25 bp, Canis familiaris
ctgtcagctgcaaggtactctggtg

SEQ ID NO: 75914 - DNA, 25 bp, Canis familiaris
ctggacttaggatcctggactgccc

SEQ ID NO: 75915 - DNA, 25 bp, Canis familiaris
ctgggttgggtagtctgatcccctc

SEQ ID NO: 75916 - DNA, 25 bp, Canis familiaris
ctgggctgtggggtttgctgtaccc

SEQ ID NO: 75917 - DNA, 25 bp, Canis familiaris
ctgttgctgagtcttttctgttgcc

SEQ ID NO: 75918 - DNA, 25 bp, Canis familiaris
ctgtttggcttgattttgcctcgcc

SEQ ID NO: 75919 - DNA, 25 bp, Canis familiaris
ctgttgggtctgttttgtggtctcc

SEQ ID NO: 75920 - DNA, 25 bp, Canis familiaris
ctgttgggcttgtttatggctccta

SEQ ID NO: 75921 - DNA, 25 bp, Canis familiaris
ctgtctggcgtatggtagcccttca

SEQ ID NO: 75922 - DNA, 25 bp, Canis familiaris
ctgtctgtatgccaagtgtatccct

SEQ ID NO: 75923 - DNA, 25 bp, Canis familiaris
ctgttttcaagatttggcctctgag

SEQ ID NO: 75924 - DNA, 25 bp, Canis familiaris
ctgtcttcatcttttgggctaccag

SEQ ID NO: 75925 - DNA, 25 bp, Canis familiaris
ctgtcttatccttcagggcttgagg

SEQ ID NO: 75926 - DNA, 25 bp, Canis familiaris
ctgggttcactttgagtcgtgcggg

SEQ ID NO: 75927 - DNA, 25 bp, Canis familiaris
ctgggttgggcaaagccagtccggt

SEQ ID NO: 75928 - DNA, 25 bp, Canis familiaris
ctgtggtctgggagcaaagtctttg

SEQ ID NO: 75929 - DNA, 25 bp, Canis familiaris
cgagtgtccaggtgaaacgttgtaa

SEQ ID NO: 75930 - DNA, 25 bp, Canis familiaris
ctggtgttgcggcgaagtccagtgt

SEQ ID NO: 75931 - DNA, 25 bp, Canis familiaris
ctggtggtccgaccaagtccacgaa

SEQ ID NO: 75932 - DNA, 25 bp, Canis familiaris
ctgtgtgctgtcagggaagtccccg

SEQ ID NO: 75933 - DNA, 25 bp, Canis familiaris
ctggtgtaccaggcgaagctggccg

SEQ ID NO: 75934 - DNA, 25 bp, Canis familiaris
ctggtacagccaccaaactgacctg

SEQ ID NO: 75935 - DNA, 25 bp, Canis familiaris
cgagcatccccaaagttctacaatg

SEQ ID NO: 75936 - DNA, 25 bp, Canis familiaris
cgaaaccactacatactccaattaa

SEQ ID NO: 75937 - DNA, 25 bp, Canis familiaris
cctcaacgacaacctacttcacgtg

SEQ ID NO: 75938 - DNA, 25 bp, Canis familiaris
cgtagacgatccagtggttcctgtg

SEQ ID NO: 75939 - DNA, 25 bp, Canis familiaris
ctgtaaactctctgggtttctgcat

SEQ ID NO: 75940 - DNA, 25 bp, Canis familiaris
ctgtaagacctctgagctgttcctc

SEQ ID NO: 75941 - DNA, 25 bp, Canis familiaris
ctggaacggctcagagcccatcctg

SEQ ID NO: 75942 - DNA, 25 bp, Canis familiaris
ctgtcaggggtcagcatggtccagt

SEQ ID NO: 75943 - DNA, 25 bp, Canis familiaris
ctgtcaatgtgagccccagtcctgt

SEQ ID NO: 75944 - DNA, 25 bp, Canis familiaris
ctgtcgtgtgagggtccagactgga

SEQ ID NO: 75945 - DNA, 25 bp, Canis familiaris
ctgttcagtgcagtggtcccagatg

SEQ ID NO: 75946 - DNA, 25 bp, Canis familiaris
ctgtctcagtgggcagctacaagca

SEQ ID NO: 75947 - DNA, 25 bp, Canis familiaris
ctgtcacagccgcttgacaatgcag

SEQ ID NO: 75948 - DNA, 25 bp, Canis familiaris
ctgtcacatgccctgtgtcacagaa

SEQ ID NO: 75949 - DNA, 25 bp, Canis familiaris
ctgtgcagagccttttacagactat

SEQ ID NO: 75950 - DNA, 25 bp, Canis familiaris
ctgtgcaggtcacttttgagaatct

SEQ ID NO: 75951 - DNA, 25 bp, Canis familiaris
ctgtctgcccagctgtgtgagaagc

SEQ ID NO: 75952 - DNA, 25 bp, Canis familiaris
ctgttcagcaggctgttggaagcca

SEQ ID NO: 75953 - DNA, 25 bp, Canis familiaris
ctgttggcaggggtgggatggcgcc

SEQ ID NO: 75954 - DNA, 25 bp, Canis familiaris
ctgttccagagggaagagtgtcctc

SEQ ID NO: 75955 - DNA, 25 bp, Canis familiaris
ctgttgcgtggggaaaccagcctgc

SEQ ID NO: 75956 - DNA, 25 bp, Canis familiaris
ctgtgggtggggacaggacatccag

SEQ ID NO: 75957 - DNA, 25 bp, Canis familiaris
ctgtgggtgaagtcctgcaacttca

SEQ ID NO: 75958 - DNA, 25 bp, Canis familiaris
ctgtgggggagtaccccttccacag

SEQ ID NO: 75959 - DNA, 25 bp, Canis familiaris
ctggaggaggagatcccccagttcg

SEQ ID NO: 75960 - DNA, 25 bp, Canis familiaris
ctgtgggagggttgtcccgcaaacg

SEQ ID NO: 75961 - DNA, 25 bp, Canis familiaris
ctggggacagagctgtcccccaccc

SEQ ID NO: 75962 - DNA, 25 bp, Canis familiaris
ctgggtgaaagagctccggcagcac

SEQ ID NO: 75963 - DNA, 25 bp, Canis familiaris
gctgcaactggcaaacctgccgacg

SEQ ID NO: 75964 - DNA, 25 bp, Canis familiaris
ctgttgctggcagagcacagcccac

SEQ ID NO: 75965 - DNA, 25 bp, Canis familiaris
ctgtatgtggacgcaggcccagaga

SEQ ID NO: 75966 - DNA, 25 bp, Canis familiaris
ctgtgtcaaactgcgagccctgaca

SEQ ID NO: 75967 - DNA, 25 bp, Canis familiaris
ctgtcccatagcacaatcatgccca

SEQ ID NO: 75968 - DNA, 25 bp, Canis familiaris
ctgtcctctatcataagtcgccaga

SEQ ID NO: 75969 - DNA, 25 bp, Canis familiaris
ctgatactgtacatagagtcatcta

SEQ ID NO: 75970 - DNA, 25 bp, Canis familiaris
ctgtaagataccaatatgtttttcc

SEQ ID NO: 75971 - DNA, 25 bp, Canis familiaris
ctgtagagataccatatgtttttcc

SEQ ID NO: 75972 - DNA, 25 bp, Canis familiaris
ctggaagcaacgttctttccattca

SEQ ID NO: 75973 - DNA, 25 bp, Canis familiaris
ctggaccaattaagtttgccttgaa

SEQ ID NO: 75974 - DNA, 25 bp, Canis familiaris
ctggtccactttatttccttattat

SEQ ID NO: 75975 - DNA, 25 bp, Canis familiaris
ctggggaggtttgagacctttctca

SEQ ID NO: 75976 - DNA, 25 bp, Canis familiaris
ctgggtgaagttctctgggcttccg

SEQ ID NO: 75977 - DNA, 25 bp, Canis familiaris
ctggcgaatgagatcctctggggcc

SEQ ID NO: 75978 - DNA, 25 bp, Canis familiaris
ctgggaaataacctcgcagtcagcc

SEQ ID NO: 75979 - DNA, 25 bp, Canis familiaris
ctggggacataacgatctcacatca

SEQ ID NO: 75980 - DNA, 25 bp, Canis familiaris
ctgggtccaaaaatggccagaccat

SEQ ID NO: 75981 - DNA, 25 bp, Canis familiaris
ctgtggtttctgccattggccatga

SEQ ID NO: 75982 - DNA, 25 bp, Canis familiaris
ctgtcatttcttcatctgctggaaa

SEQ ID NO: 75983 - DNA, 25 bp, Canis familiaris
ctgtctttgcgtctgtcacgaatag

SEQ ID NO: 75984 - DNA, 25 bp, Canis familiaris
ctgtgtcttcgtttcttcagataag

SEQ ID NO: 75985 - DNA, 25 bp, Canis familiaris
ctgtgcctttgggtctctagagtaa

SEQ ID NO: 75986 - DNA, 25 bp, Canis familiaris
ctgtgccttaagtagtatggagaaa

SEQ ID NO: 75987 - DNA, 25 bp, Canis familiaris
ctggtcgaccagtgcttggcaagaa

SEQ ID NO: 75988 - DNA, 25 bp, Canis familiaris
ctgggccctgcaaactgggacgaag

SEQ ID NO: 75989 - DNA, 25 bp, Canis familiaris
ctggtggggcaatgtgggacgtttc

SEQ ID NO: 75990 - DNA, 25 bp, Canis familiaris
ctggtttggttcagggagccttcca

SEQ ID NO: 75991 - DNA, 25 bp, Canis familiaris
ctggtgcctggttttgtattccttt

SEQ ID NO: 75992 - DNA, 25 bp, Canis familiaris
ctggtgcctggttttgtattccttt

SEQ ID NO: 75993 - DNA, 25 bp, Canis familiaris
ctggtgcctggttttgtattccttt

SEQ ID NO: 75994 - DNA, 25 bp, Canis familiaris
ctggtgcctggttttgtattccttt

SEQ ID NO: 75995 - DNA, 25 bp, Canis familiaris
ctggtgcctggttttgtattccttt

SEQ ID NO: 75996 - DNA, 25 bp, Canis familiaris
ctggggagagtggccgtttgcactg

SEQ ID NO: 75997 - DNA, 25 bp, Canis familiaris
ctgggattgaaggccctttgcctgc

SEQ ID NO: 75998 - DNA, 25 bp, Canis familiaris
ctgggtggcgcagcggtttggcgcc

SEQ ID NO: 75999 - DNA, 25 bp, Canis familiaris
ctgggtggcgcagcggtttggcgcc

SEQ ID NO: 76000 - DNA, 25 bp, Canis familiaris
ctgtggtctggaccaggcagttggc

SEQ ID NO: 76001 - DNA, 25 bp, Canis familiaris
ctgttctgcttgttaggcactctgg

SEQ ID NO: 76002 - DNA, 25 bp, Canis familiaris
ctgttgccctgattatgaactctat

SEQ ID NO: 76003 - DNA, 25 bp, Canis familiaris
ctgtggccaatttcatctaccgttt

SEQ ID NO: 76004 - DNA, 25 bp, Canis familiaris
ctgtgggcaaggtcatccctgagct

SEQ ID NO: 76005 - DNA, 25 bp, Canis familiaris
ctgtgggcaaggtcatcccagagct

SEQ ID NO: 76006 - DNA, 25 bp, Canis familiaris
ctgtggatcaacacacaccaagaac

SEQ ID NO: 76007 - DNA, 25 bp, Canis familiaris
ctgttgttcactcagcactcagaga

SEQ ID NO: 76008 - DNA, 25 bp, Canis familiaris
ctgtgtgttcactacggcatgatgt

SEQ ID NO: 76009 - DNA, 25 bp, Canis familiaris
ctgtgatgcaaagtatgtgatgtat

SEQ ID NO: 76010 - DNA, 25 bp, Canis familiaris
ctgtggctcagttcatgtggatcat

SEQ ID NO: 76011 - DNA, 25 bp, Canis familiaris
ctgtgcccagtgcctgaagttcaag

SEQ ID NO: 76012 - DNA, 25 bp, Canis familiaris
ctgttctcagctcctagcgtaagga

SEQ ID NO: 76013 - DNA, 25 bp, Canis familiaris
ctgtctgccccaggaggtaggtacg

SEQ ID NO: 76014 - DNA, 25 bp, Canis familiaris
ctgtctccacctagtgcctaggaaa

SEQ ID NO: 76015 - DNA, 25 bp, Canis familiaris
ctgttgccccgggccgagagaagtc

SEQ ID NO: 76016 - DNA, 25 bp, Canis familiaris
ctggtgaagccatgaacgtgcaagg

SEQ ID NO: 76017 - DNA, 25 bp, Canis familiaris
ctggtgccagccaatgtactaccac

SEQ ID NO: 76018 - DNA, 25 bp, Canis familiaris
ctgttgccagctatgttctgatccc

SEQ ID NO: 76019 - DNA, 25 bp, Canis familiaris
cgtatgctcctaagattcgtctcgc

SEQ ID NO: 76020 - DNA, 25 bp, Canis familiaris
ctgtatcccttgcttagtatctgta

SEQ ID NO: 76021 - DNA, 25 bp, Canis familiaris
ctgtctcctcttgctgaatatattt

SEQ ID NO: 76022 - DNA, 25 bp, Canis familiaris
ctgtcatctgtctttatgatttcat

SEQ ID NO: 76023 - DNA, 25 bp, Canis familiaris
ctgtccatgttgtctattgtgtatt

SEQ ID NO: 76024 - DNA, 25 bp, Canis familiaris
ctgtcactgctacccaatgtgtcag

SEQ ID NO: 76025 - DNA, 25 bp, Canis familiaris
ctgtcaggcttcttcagtgtgtgaa

SEQ ID NO: 76026 - DNA, 25 bp, Canis familiaris
ctgtcggctgcgcaagtgctatgaa

SEQ ID NO: 76027 - DNA, 25 bp, Canis familiaris
ctgtgctggtcatgaactgcttcaa

SEQ ID NO: 76028 - DNA, 25 bp, Canis familiaris
ctggcggatgcatccctacttaaaa

SEQ ID NO: 76029 - DNA, 25 bp, Canis familiaris
cgtggctgacatacagtccgttaga

SEQ ID NO: 76030 - DNA, 25 bp, Canis familiaris
ctgggctgaaaggcgggcttaaatc

SEQ ID NO: 76031 - DNA, 25 bp, Canis familiaris
ccggtgaaaagtgacccaatgactt

SEQ ID NO: 76032 - DNA, 25 bp, Canis familiaris
cctggtcaaccactttaccactagc

SEQ ID NO: 76033 - DNA, 25 bp, Canis familiaris
ctgggtgcataccagtcttaccaat

SEQ ID NO: 76034 - DNA, 25 bp, Canis familiaris
ctgtccgcaaggttcatgtgaccaa

SEQ ID NO: 76035 - DNA, 25 bp, Canis familiaris
ctgtcccgagcctatcattatgtaa

SEQ ID NO: 76036 - DNA, 25 bp, Canis familiaris
ctgtcccgatgctctttcagaaaac

SEQ ID NO: 76037 - DNA, 25 bp, Canis familiaris
ctgtcccgagcatcagtgtctcaaa

SEQ ID NO: 76038 - DNA, 25 bp, Canis familiaris
ctgtcctcaaagtggcatctcaaca

SEQ ID NO: 76039 - DNA, 25 bp, Canis familiaris
ctggtttctggcttggcctgaagca

SEQ ID NO: 76040 - DNA, 25 bp, Canis familiaris
ctggtttctgcccaggaagggcatg

SEQ ID NO: 76041 - DNA, 25 bp, Canis familiaris
ctggggcttctccaaacagatggtg

SEQ ID NO: 76042 - DNA, 25 bp, Canis familiaris
ctgtgtgggcccaaatacccggaat

SEQ ID NO: 76043 - DNA, 25 bp, Canis familiaris
cgggcttgcccttatgaacccgaat

SEQ ID NO: 76044 - DNA, 25 bp, Canis familiaris
ctgggatatgccctgagctgaactc

SEQ ID NO: 76045 - DNA, 25 bp, Canis familiaris
ctggggagcccaatcaggactggag

SEQ ID NO: 76046 - DNA, 25 bp, Canis familiaris
ctggggaccctgatggcaggggccg

SEQ ID NO: 76047 - DNA, 25 bp, Canis familiaris
cgtggagaaccgtgttggctccgca

SEQ ID NO: 76048 - DNA, 25 bp, Canis familiaris
ctgtgggataccctgtggtgtgccc

SEQ ID NO: 76049 - DNA, 25 bp, Canis familiaris
ctgtgtggggcaggcgtggggcctg

SEQ ID NO: 76050 - DNA, 25 bp, Canis familiaris
ctgtgatgtggggcctgggggcctg

SEQ ID NO: 76051 - DNA, 25 bp, Canis familiaris
ctgtcatgggaggcctactggtagg

SEQ ID NO: 76052 - DNA, 25 bp, Canis familiaris
ctgtatgccagacactatgctagta

SEQ ID NO: 76053 - DNA, 25 bp, Canis familiaris
ctgtcatccgactgcaatcacagga

SEQ ID NO: 76054 - DNA, 25 bp, Canis familiaris
ctgtctcttactcccaatcagtgaa

SEQ ID NO: 76055 - DNA, 25 bp, Canis familiaris
ctgtcttctattccaccataattac

SEQ ID NO: 76056 - DNA, 25 bp, Canis familiaris
ctggctccattaacctaaatgtagc

SEQ ID NO: 76057 - DNA, 25 bp, Canis familiaris
ctgtgttcctcaaccataacttcag

SEQ ID NO: 76058 - DNA, 25 bp, Canis familiaris
ctgtgctttcgaaccaaagtgcccc

SEQ ID NO: 76059 - DNA, 25 bp, Canis familiaris
ctggcttgtctctgcaaacagtgtc

SEQ ID NO: 76060 - DNA, 25 bp, Canis familiaris
ctgtgtatgggcctaaaaggtccct

SEQ ID NO: 76061 - DNA, 25 bp, Canis familiaris
ctgtgtttggttggacacggtcctc

SEQ ID NO: 76062 - DNA, 25 bp, Canis familiaris
ctgtgtttggttggacacggtcctc

SEQ ID NO: 76063 - DNA, 25 bp, Canis familiaris
ctgtttgtgggagggctggtgtccg

SEQ ID NO: 76064 - DNA, 25 bp, Canis familiaris
ctggttgtgggacgcacttggacga

SEQ ID NO: 76065 - DNA, 25 bp, Canis familiaris
ctgggattgggcttcagtgtgagaa

SEQ ID NO: 76066 - DNA, 25 bp, Canis familiaris
ctgtggactgctggttctggtatcc

SEQ ID NO: 76067 - DNA, 25 bp, Canis familiaris
ctgtgagagcacaggcttctgtccc

SEQ ID NO: 76068 - DNA, 25 bp, Canis familiaris
ctgtgaagccttgggtcaggcaccc

SEQ ID NO: 76069 - DNA, 25 bp, Canis familiaris
ctgggagaccatggagtcacgccac

SEQ ID NO: 76070 - DNA, 25 bp, Canis familiaris
ctgtgtgatgcccatggatggcatt

SEQ ID NO: 76071 - DNA, 25 bp, Canis familiaris
ctgtgctgatgtccatgtgtgggat

SEQ ID NO: 76072 - DNA, 25 bp, Canis familiaris
ctgtctgcattttcttggagaaatt

SEQ ID NO: 76073 - DNA, 25 bp, Canis familiaris
ctgttcatggtactctggctcaaag

SEQ ID NO: 76074 - DNA, 25 bp, Canis familiaris
ctgttcacggacctactctaagtaa

SEQ ID NO: 76075 - DNA, 25 bp, Canis familiaris
ctgtcttcaggtctagctctaacta

SEQ ID NO: 76076 - DNA, 25 bp, Canis familiaris
ctgtttagcgtctcagagcaaagga

SEQ ID NO: 76077 - DNA, 25 bp, Canis familiaris
ctgtcttctggagcctgctgagaag

SEQ ID NO: 76078 - DNA, 25 bp, Canis familiaris
ctgttcacacatgtcctgcgaaaga

SEQ ID NO: 76079 - DNA, 25 bp, Canis familiaris
ctggtcccatgagcccggaagaatg

SEQ ID NO: 76080 - DNA, 25 bp, Canis familiaris
ctgtgtcctttacactggaagccac

SEQ ID NO: 76081 - DNA, 25 bp, Canis familiaris
cggcattcgttatacggaagatgat

SEQ ID NO: 76082 - DNA, 25 bp, Canis familiaris
cggacccgtggttcaaaagtgcatt

SEQ ID NO: 76083 - DNA, 25 bp, Canis familiaris
cggaacccggtcacagaagatgact

SEQ ID NO: 76084 - DNA, 25 bp, Canis familiaris
cggttccccgacatcgagaaggtgt

SEQ ID NO: 76085 - DNA, 25 bp, Canis familiaris
ctgtgctttccccaactataaagtt

SEQ ID NO: 76086 - DNA, 25 bp, Canis familiaris
ctgtcttcctcagcaagtcattaag

SEQ ID NO: 76087 - DNA, 25 bp, Canis familiaris
ctggtgcttctctcaagctttatga

SEQ ID NO: 76088 - DNA, 25 bp, Canis familiaris
ctgtggctgtcttgacgttttcaga

SEQ ID NO: 76089 - DNA, 25 bp, Canis familiaris
ctgggtgtctgttcctttttgacaa

SEQ ID NO: 76090 - DNA, 25 bp, Canis familiaris
ctggggttcttttgtttctcagaat

SEQ ID NO: 76091 - DNA, 25 bp, Canis familiaris
ctggggttgcatctttctgtaattt

SEQ ID NO: 76092 - DNA, 25 bp, Canis familiaris
ctgggttcttggtattcgctattac

SEQ ID NO: 76093 - DNA, 25 bp, Canis familiaris
gctctttcgtttgacttctttacgg

SEQ ID NO: 76094 - DNA, 25 bp, Canis familiaris
ctgttacagtttcgacttcgttaat

SEQ ID NO: 76095 - DNA, 25 bp, Canis familiaris
ctgtcccgatttctcttttatgatt

SEQ ID NO: 76096 - DNA, 25 bp, Canis familiaris
ctgtcccaatttctcttgtatgagt

SEQ ID NO: 76097 - DNA, 25 bp, Canis familiaris
cgggaataggtcttttgtatcgtat

SEQ ID NO: 76098 - DNA, 25 bp, Canis familiaris
cgtgaaattgttgtttgtacgtgta

SEQ ID NO: 76099 - DNA, 25 bp, Canis familiaris
ctggtcaactttgtgtcttcaggct

SEQ ID NO: 76100 - DNA, 25 bp, Canis familiaris
cggtcgaacttgactatctagagga

SEQ ID NO: 76101 - DNA, 25 bp, Canis familiaris
ctgtgtctgaacctgcttatttgag

SEQ ID NO: 76102 - DNA, 25 bp, Canis familiaris
ctgtgcctgacaagccagttcattg

SEQ ID NO: 76103 - DNA, 25 bp, Canis familiaris
ctgtgtggaccaccatgaatctcaa

SEQ ID NO: 76104 - DNA, 25 bp, Canis familiaris
ctgtgggacagacaaactatgcagc

SEQ ID NO: 76105 - DNA, 25 bp, Canis familiaris
ctgtttgagctgcaaaagctgccag

SEQ ID NO: 76106 - DNA, 25 bp, Canis familiaris
ctgtagaggctccagctcaagtgcc

SEQ ID NO: 76107 - DNA, 25 bp, Canis familiaris
ctgtagaggctcttgattggtcaaa

SEQ ID NO: 76108 - DNA, 25 bp, Canis familiaris
ctgtaggctctgctgtagggcacac

SEQ ID NO: 76109 - DNA, 25 bp, Canis familiaris
ctgtgtggctctgtgtcgggaaaga

SEQ ID NO: 76110 - DNA, 25 bp, Canis familiaris
ctgtcggccggtggcagggatgaag

SEQ ID NO: 76111 - DNA, 25 bp, Canis familiaris
ctgtctggctggctggcagggaagg

SEQ ID NO: 76112 - DNA, 25 bp, Canis familiaris
ctgtctcacagccctgagatcgtga

SEQ ID NO: 76113 - DNA, 25 bp, Canis familiaris
ctgtctgatccgacgcagacgacgc

SEQ ID NO: 76114 - DNA, 25 bp, Canis familiaris
ctgtctgatctctcggactgcgagg

SEQ ID NO: 76115 - DNA, 25 bp, Canis familiaris
ctgtgctgtcgctgtgaacgcaacg

SEQ ID NO: 76116 - DNA, 25 bp, Canis familiaris
ctgtcctgctcttggaagccaacga

SEQ ID NO: 76117 - DNA, 25 bp, Canis familiaris
ctgtttctgctgggagcagccaaag

SEQ ID NO: 76118 - DNA, 25 bp, Canis familiaris
ctgtctgtctggggaacttctgagt

SEQ ID NO: 76119 - DNA, 25 bp, Canis familiaris
ctgtcctccgggaaatctctgattt

SEQ ID NO: 76120 - DNA, 25 bp, Canis familiaris
ctggatccgggaaaacattgtctta

SEQ ID NO: 76121 - DNA, 25 bp, Canis familiaris
ctggaaggaggtcaacaggttggag

SEQ ID NO: 76122 - DNA, 25 bp, Canis familiaris
ctggatggggggtacgggtctgcag

SEQ ID NO: 76123 - DNA, 25 bp, Canis familiaris
ctgtggggggcaagatcgtgggctc

SEQ ID NO: 76124 - DNA, 25 bp, Canis familiaris
ctggtgacacggggcacagttggcc

SEQ ID NO: 76125 - DNA, 25 bp, Canis familiaris
ctggggctcagggatgactgtgctc

SEQ ID NO: 76126 - DNA, 25 bp, Canis familiaris
ctgggtacgtgattgaagtctttat

SEQ ID NO: 76127 - DNA, 25 bp, Canis familiaris
cggcagaacttgaagggttactgac

SEQ ID NO: 76128 - DNA, 25 bp, Canis familiaris
ctggcacaattctcagggttacaga

SEQ ID NO: 76129 - DNA, 25 bp, Canis familiaris
ctgtgacattgtttggatcgcttag

SEQ ID NO: 76130 - DNA, 25 bp, Canis familiaris
ctgtacactgacttgagaccagttg

SEQ ID NO: 76131 - DNA, 25 bp, Canis familiaris
ctgtacaccatcaggaatcgtgttg

SEQ ID NO: 76132 - DNA, 25 bp, Canis familiaris
ctgtacccactgtgattctgttctc

SEQ ID NO: 76133 - DNA, 25 bp, Canis familiaris
ctgtcagcgccaggaagtaccttca

SEQ ID NO: 76134 - DNA, 25 bp, Canis familiaris
ctggggccgacaaggccctacacaa

SEQ ID NO: 76135 - DNA, 25 bp, Canis familiaris
ctgggcccaaaaggccagggcgcca

SEQ ID NO: 76136 - DNA, 25 bp, Canis familiaris
ctgggccttcagtggcacaaagcga

SEQ ID NO: 76137 - DNA, 25 bp, Canis familiaris
ctggcagccttcctcaaaaagtctg

SEQ ID NO: 76138 - DNA, 25 bp, Canis familiaris
ctgggccttttatagaactcatggt

SEQ ID NO: 76139 - DNA, 25 bp, Canis familiaris
ctgggcctttatacttaactccaat

SEQ ID NO: 76140 - DNA, 25 bp, Canis familiaris
ctggtgctgctcataacctgaactc

SEQ ID NO: 76141 - DNA, 25 bp, Canis familiaris
ttggttgtttaatttgaaggtcctg

SEQ ID NO: 76142 - DNA, 25 bp, Canis familiaris
ctggctcttttgcaattaacgtctt

SEQ ID NO: 76143 - DNA, 25 bp, Canis familiaris
ctgtctttgtatcttgatctcacgt

SEQ ID NO: 76144 - DNA, 25 bp, Canis familiaris
ctgtggtttatggtagcttccctta

SEQ ID NO: 76145 - DNA, 25 bp, Canis familiaris
ctgtcgttctaaattgttggtctgt

SEQ ID NO: 76146 - DNA, 25 bp, Canis familiaris
ctgtcattattctcttttgctttta

SEQ ID NO: 76147 - DNA, 25 bp, Canis familiaris
ctgtatttcttagcactgtctttta

SEQ ID NO: 76148 - DNA, 25 bp, Canis familiaris
ctgtatttccacccagttctgggta

SEQ ID NO: 76149 - DNA, 25 bp, Canis familiaris
cggttctccattcagttctatttat

SEQ ID NO: 76150 - DNA, 25 bp, Canis familiaris
cggtgtgcttttcaatactactcct

SEQ ID NO: 76151 - DNA, 25 bp, Canis familiaris
ctggaggttttccaaagcctcacct

SEQ ID NO: 76152 - DNA, 25 bp, Canis familiaris
ctgggtacctacataagacttccta

SEQ ID NO: 76153 - DNA, 25 bp, Canis familiaris
cgtggtacccaaattacactgccct

SEQ ID NO: 76154 - DNA, 25 bp, Canis familiaris
ctggcgtacccaacttaattgcttc

SEQ ID NO: 76155 - DNA, 25 bp, Canis familiaris
ctgggtacccacctcagtgaaatat

SEQ ID NO: 76156 - DNA, 25 bp, Canis familiaris
ctgtggaacccactcaagggagata

SEQ ID NO: 76157 - DNA, 25 bp, Canis familiaris
ctgtgtggtatacctcaagaggaat

SEQ ID NO: 76158 - DNA, 25 bp, Canis familiaris
ctgggtgtatttgaagaagatgcta

SEQ ID NO: 76159 - DNA, 25 bp, Canis familiaris
ctggaaggtacccaagatagaggag

SEQ ID NO: 76160 - DNA, 25 bp, Canis familiaris
cctgaagttactgaacaatggagaa

SEQ ID NO: 76161 - DNA, 25 bp, Canis familiaris
cccacagaaactcatcacaaaaacg

SEQ ID NO: 76162 - DNA, 25 bp, Canis familiaris
cgaccataactcctcaataaaaagg

SEQ ID NO: 76163 - DNA, 25 bp, Canis familiaris
ctggatacaaccacccaaaaaggct

SEQ ID NO: 76164 - DNA, 25 bp, Canis familiaris
ctggtgaaacacccctcttaaagtg

SEQ ID NO: 76165 - DNA, 25 bp, Canis familiaris
ctggggaagccccctcgagaagagg

SEQ ID NO: 76166 - DNA, 25 bp, Canis familiaris
ctgggactgcaggggtggggaagag

SEQ ID NO: 76167 - DNA, 25 bp, Canis familiaris
ctggggctgacggtttgcgtctaga

SEQ ID NO: 76168 - DNA, 25 bp, Canis familiaris
ctggggttaagtgtgtgtgtggaaa

SEQ ID NO: 76169 - DNA, 25 bp, Canis familiaris
ctgtggagtttatggcgtggtgggt

SEQ ID NO: 76170 - DNA, 25 bp, Canis familiaris
ctgggagacacttgacgagggattg

SEQ ID NO: 76171 - DNA, 25 bp, Canis familiaris
ctggccatgagaggaactgaggtac

SEQ ID NO: 76172 - DNA, 25 bp, Canis familiaris
ctggccatggagtacgtcaacgact

SEQ ID NO: 76173 - DNA, 25 bp, Canis familiaris
ctggccaaggtcatccatgacaact

SEQ ID NO: 76174 - DNA, 25 bp, Canis familiaris
ctgtccaagtgcaatggcgctgctc

SEQ ID NO: 76175 - DNA, 25 bp, Canis familiaris
ctgtcctcagtggtgtgtgcaggcg

SEQ ID NO: 76176 - DNA, 25 bp, Canis familiaris
ctggcactcattggggatgcggccc

SEQ ID NO: 76177 - DNA, 25 bp, Canis familiaris
ctgtagttttgcagttggctcccag

SEQ ID NO: 76178 - DNA, 25 bp, Canis familiaris
ctgtggttttcagtgtatggctctg

SEQ ID NO: 76179 - DNA, 25 bp, Canis familiaris
ctgggtgttatgagtaggcctggaa

SEQ ID NO: 76180 - DNA, 25 bp, Canis familiaris
cggagtccaatgagttaccggatac

SEQ ID NO: 76181 - DNA, 25 bp, Canis familiaris
ctggccccaaggcttaggccgaatc

SEQ ID NO: 76182 - DNA, 25 bp, Canis familiaris
ctggcacccagctgggtgcccctag

SEQ ID NO: 76183 - DNA, 25 bp, Canis familiaris
ctggcatggccttccgtgttcctac

SEQ ID NO: 76184 - DNA, 25 bp, Canis familiaris
ctgtgtttctattcagtctgtcctg

SEQ ID NO: 76185 - DNA, 25 bp, Canis familiaris
ctgtcctcatgcattaggcttgcct

SEQ ID NO: 76186 - DNA, 25 bp, Canis familiaris
ctgtcctcacttagcattatatcct

SEQ ID NO: 76187 - DNA, 25 bp, Canis familiaris
ctgtctcacacagatgcactgacac

SEQ ID NO: 76188 - DNA, 25 bp, Canis familiaris
ctgtccacaaggggctgcaacacag

SEQ ID NO: 76189 - DNA, 25 bp, Canis familiaris
ctgtactcaaagagctggtccaggg

SEQ ID NO: 76190 - DNA, 25 bp, Canis familiaris
ctggttgcgaagagcggagtgcggg

SEQ ID NO: 76191 - DNA, 25 bp, Canis familiaris
cggtcctgagaaacggagactggga

SEQ ID NO: 76192 - DNA, 25 bp, Canis familiaris
ctgggcctgaagatcgaggatttct

SEQ ID NO: 76193 - DNA, 25 bp, Canis familiaris
ctggcccataaggaccacaggtttt

SEQ ID NO: 76194 - DNA, 25 bp, Canis familiaris
cggcacttagaggaggttatttctt

SEQ ID NO: 76195 - DNA, 25 bp, Canis familiaris
cggaaaatacagcgtttcttgtctc

SEQ ID NO: 76196 - DNA, 25 bp, Canis familiaris
cggaccctacatcattttttatctt

SEQ ID NO: 76197 - DNA, 25 bp, Canis familiaris
ctgtacgccaacacagtgctgtctg

SEQ ID NO: 76198 - DNA, 25 bp, Canis familiaris
cgtacccggcatcttgtgttgggac

SEQ ID NO: 76199 - DNA, 25 bp, Canis familiaris
cgtgacgacccactttcgttgtggg

SEQ ID NO: 76200 - DNA, 25 bp, Canis familiaris
ctggtatgaaccatttagtttggag

SEQ ID NO: 76201 - DNA, 25 bp, Canis familiaris
ctgtgtttagtaatttacacttgga

SEQ ID NO: 76202 - DNA, 25 bp, Canis familiaris
ctggtcccatgtctattactttgga

SEQ ID NO: 76203 - DNA, 25 bp, Canis familiaris
ctggtcaccaggattccctgttggt

SEQ ID NO: 76204 - DNA, 25 bp, Canis familiaris
cggataaccagtggtccctttgagc

SEQ ID NO: 76205 - DNA, 25 bp, Canis familiaris
ctggatacccagagcgtccattcag

SEQ ID NO: 76206 - DNA, 25 bp, Canis familiaris
ctggaactgcacaaactggccactg

SEQ ID NO: 76207 - DNA, 25 bp, Canis familiaris
ctgtgatactgcacactggtccact

SEQ ID NO: 76208 - DNA, 25 bp, Canis familiaris
ctgtgacaagctgcacgtggatccc

SEQ ID NO: 76209 - DNA, 25 bp, Canis familiaris
ctgtgacagcagtgcagcagtcgac

SEQ ID NO: 76210 - DNA, 25 bp, Canis familiaris
ctgtgacagacatggctggctgccg

SEQ ID NO: 76211 - DNA, 25 bp, Canis familiaris
ctgtccaggaggtctggctggccaa

SEQ ID NO: 76212 - DNA, 25 bp, Canis familiaris
ctgtaatcaggatttggctgtccaa

SEQ ID NO: 76213 - DNA, 25 bp, Canis familiaris
ctggagaaccaattggcttcccacc

SEQ ID NO: 76214 - DNA, 25 bp, Canis familiaris
ctggaaggccttcggcctactatcc

SEQ ID NO: 76215 - DNA, 25 bp, Canis familiaris
ctgggagtgttttgagacttttctc

SEQ ID NO: 76216 - DNA, 25 bp, Canis familiaris
ctgggagtgttttgagacttttctc

SEQ ID NO: 76217 - DNA, 25 bp, Canis familiaris
ctgtaagcttacatggcctatttgt

SEQ ID NO: 76218 - DNA, 25 bp, Canis familiaris
cgtaccaatgtctgcagttacaatg

SEQ ID NO: 76219 - DNA, 25 bp, Canis familiaris
ctgtgcctgcagattccagtttcaa

SEQ ID NO: 76220 - DNA, 25 bp, Canis familiaris
ctgtggatgagaatggccggatgaa

SEQ ID NO: 76221 - DNA, 25 bp, Canis familiaris
ctgtgtatgtgtacgcttgtatata

SEQ ID NO: 76222 - DNA, 25 bp, Canis familiaris
ctgtggcatctgtcacctttgatga

SEQ ID NO: 76223 - DNA, 25 bp, Canis familiaris
ctgtccactgcatccttcagaaagt

SEQ ID NO: 76224 - DNA, 25 bp, Canis familiaris
ctgtccaatgatgttgccaagtctt

SEQ ID NO: 76225 - DNA, 25 bp, Canis familiaris
cgaccaatgtctgtaaagtgctctg

SEQ ID NO: 76226 - DNA, 25 bp, Canis familiaris
ctggcccaggccatcaagggtatgc

SEQ ID NO: 76227 - DNA, 25 bp, Canis familiaris
ctggacactaccatggcgggtgtgg

SEQ ID NO: 76228 - DNA, 25 bp, Canis familiaris
ctggatagtccgagggggcgttggc

SEQ ID NO: 76229 - DNA, 25 bp, Canis familiaris
cgtctttccgcagagggggttggat

SEQ ID NO: 76230 - DNA, 25 bp, Canis familiaris
cgtgtccccagaacagcggggtttg

SEQ ID NO: 76231 - DNA, 25 bp, Canis familiaris
ctggaccccagagaaggaactcttc

SEQ ID NO: 76232 - DNA, 25 bp, Canis familiaris
ctggaacccacagaggaacagcccg

SEQ ID NO: 76233 - DNA, 25 bp, Canis familiaris
ctggaaaccaaacttgaaccaagtg

SEQ ID NO: 76234 - DNA, 25 bp, Canis familiaris
cgcgacaacctacctggaaacacag

SEQ ID NO: 76235 - DNA, 25 bp, Canis familiaris
cgggcccctaggcaaaacagcagag

SEQ ID NO: 76236 - DNA, 25 bp, Canis familiaris
cggtcgttctggaaaagaaagctgg

SEQ ID NO: 76237 - DNA, 25 bp, Canis familiaris
ctggggtttggtagattgaatcatc

SEQ ID NO: 76238 - DNA, 25 bp, Canis familiaris
ctgtgcggtttcgtcactgtataca

SEQ ID NO: 76239 - DNA, 25 bp, Canis familiaris
ctggggggctcttcacaaaacaagg

SEQ ID NO: 76240 - DNA, 25 bp, Canis familiaris
ctggccgggatcttcaacagtacca

SEQ ID NO: 76241 - DNA, 25 bp, Canis familiaris
ctggcctggggcctaagaattaagg

SEQ ID NO: 76242 - DNA, 25 bp, Canis familiaris
ctgtccttcgagctggggttaacac

SEQ ID NO: 76243 - DNA, 25 bp, Canis familiaris
ctgtccttcgagctggggttaacac

SEQ ID NO: 76244 - DNA, 25 bp, Canis familiaris
ctgtccttcgagtctggggtaagca

SEQ ID NO: 76245 - DNA, 25 bp, Canis familiaris
ctgtccttggaggctctgggggaag

SEQ ID NO: 76246 - DNA, 25 bp, Canis familiaris
ctgtctcttgggccatgtgtgacca

SEQ ID NO: 76247 - DNA, 25 bp, Canis familiaris
ctgtccatgtgaaggtgtggagcga

SEQ ID NO: 76248 - DNA, 25 bp, Canis familiaris
ctgtcctgtgcactttctgagatgc

SEQ ID NO: 76249 - DNA, 25 bp, Canis familiaris
ctgtccgtgctttgtctatgtggga

SEQ ID NO: 76250 - DNA, 25 bp, Canis familiaris
ctgtcctccctgtaatatgtgtaga

SEQ ID NO: 76251 - DNA, 25 bp, Canis familiaris
ctgtctccccagtaaatataatata

SEQ ID NO: 76252 - DNA, 25 bp, Canis familiaris
ctgtctccacagtacacaaaaataa

SEQ ID NO: 76253 - DNA, 25 bp, Canis familiaris
ctgtctctatcactcagccggagac

SEQ ID NO: 76254 - DNA, 25 bp, Canis familiaris
ctgtcgcctctgcagctgaggaatc

SEQ ID NO: 76255 - DNA, 25 bp, Canis familiaris
ctgtcgctcactcatcatgatggta

SEQ ID NO: 76256 - DNA, 25 bp, Canis familiaris
ctgtcctgccctagatgggtgacct

SEQ ID NO: 76257 - DNA, 25 bp, Canis familiaris
ctgtccaccctactgtgagagactc

SEQ ID NO: 76258 - DNA, 25 bp, Canis familiaris
ctgtgaccggctgctgagtgagagc

SEQ ID NO: 76259 - DNA, 25 bp, Canis familiaris
ctgtgatccaggagtgagctctcgc

SEQ ID NO: 76260 - DNA, 25 bp, Canis familiaris
ctggcaccgagcatgcatgcatgtt

SEQ ID NO: 76261 - DNA, 25 bp, Canis familiaris
ctggcattgctgacacgatgcacca

SEQ ID NO: 76262 - DNA, 25 bp, Canis familiaris
ctgtgacaggtcctgtatccacgcc

SEQ ID NO: 76263 - DNA, 25 bp, Canis familiaris
ctggacacatccattacacacttcc

SEQ ID NO: 76264 - DNA, 25 bp, Canis familiaris
ctgtggcacactctgtacatttggg

SEQ ID NO: 76265 - DNA, 25 bp, Canis familiaris
ctgtggcctcttttcaagattcagg

SEQ ID NO: 76266 - DNA, 25 bp, Canis familiaris
ctgggccacaaaacaagtctcaaga

SEQ ID NO: 76267 - DNA, 25 bp, Canis familiaris
ctggcccacaacgtacagaccagga

SEQ ID NO: 76268 - DNA, 25 bp, Canis familiaris
ctgtgtctacaaaccacagacaatg

SEQ ID NO: 76269 - DNA, 25 bp, Canis familiaris
ctggtcatactaataaatgcccatg

SEQ ID NO: 76270 - DNA, 25 bp, Canis familiaris
ctgggcaatttctatatcaggacag

SEQ ID NO: 76271 - DNA, 25 bp, Canis familiaris
cgggactgtacaccatcaggaatcg

SEQ ID NO: 76272 - DNA, 25 bp, Canis familiaris
ctgggccttccaacatgggcaatgg

SEQ ID NO: 76273 - DNA, 25 bp, Canis familiaris
ctgggccaactctgggccctgagag

SEQ ID NO: 76274 - DNA, 25 bp, Canis familiaris
ctgggcaaaccaggggcactctgga

SEQ ID NO: 76275 - DNA, 25 bp, Canis familiaris
cggcgcgagttcgggtaggccgaga

SEQ ID NO: 76276 - DNA, 25 bp, Canis familiaris
ctgtgcggggtgtgtgtcagagctc

SEQ ID NO: 76277 - DNA, 25 bp, Canis familiaris
ctgggggaaatggttcagacctttg

SEQ ID NO: 76278 - DNA, 25 bp, Canis familiaris
ctggaggaaattgttcagccacatt

SEQ ID NO: 76279 - DNA, 25 bp, Canis familiaris
ctggagggaattctctcgcttttct

SEQ ID NO: 76280 - DNA, 25 bp, Canis familiaris
ctggggcgaatgagacgacttgtcc

SEQ ID NO: 76281 - DNA, 25 bp, Canis familiaris
ctgtgttcgaagtcgtcgtctttct

SEQ ID NO: 76282 - DNA, 25 bp, Canis familiaris
ctggttcggagaagtcagccttgcc

SEQ ID NO: 76283 - DNA, 25 bp, Canis familiaris
ctggtctggacacagtgcccgtgtc

SEQ ID NO: 76284 - DNA, 25 bp, Canis familiaris
ctggtgtggatcttgattgcctcgt

SEQ ID NO: 76285 - DNA, 25 bp, Canis familiaris
ctggtttgcttttgggccatggtag

SEQ ID NO: 76286 - DNA, 25 bp, Canis familiaris
ctgtgttctctttgtcgacaacgtg

SEQ ID NO: 76287 - DNA, 25 bp, Canis familiaris
ctgtgtctcttgtgtacacagactc

SEQ ID NO: 76288 - DNA, 25 bp, Canis familiaris
ctgtctctctctgtgtgactatcat

SEQ ID NO: 76289 - DNA, 25 bp, Canis familiaris
ctgtctctcctggtggtatatcgac

SEQ ID NO: 76290 - DNA, 25 bp, Canis familiaris
ctgtctcatcttcatgggctgggac

SEQ ID NO: 76291 - DNA, 25 bp, Canis familiaris
ctgtctgcagggctgggtcaggagc

SEQ ID NO: 76292 - DNA, 25 bp, Canis familiaris
ctgtgctggctcagtggctgccagg

SEQ ID NO: 76293 - DNA, 25 bp, Canis familiaris
ctgtgctggtctttgacttcaggcc

SEQ ID NO: 76294 - DNA, 25 bp, Canis familiaris
ctggaggatctctgactcacaggct

SEQ ID NO: 76295 - DNA, 25 bp, Canis familiaris
ctgtgatggatcggctgcttcacgc

SEQ ID NO: 76296 - DNA, 25 bp, Canis familiaris
ctggagcatgtccatgcatcctcca

SEQ ID NO: 76297 - DNA, 25 bp, Canis familiaris
ctgggcatgttcgacatccagcact

SEQ ID NO: 76298 - DNA, 25 bp, Canis familiaris
ctggtgagtggcgttgccaccttgg

SEQ ID NO: 76299 - DNA, 25 bp, Canis familiaris
ctgtgtggatcggtggctccatctt

SEQ ID NO: 76300 - DNA, 25 bp, Canis familiaris
ctggggcacagagtttcctctttgt

SEQ ID NO: 76301 - DNA, 25 bp, Canis familiaris
ctgggtccaatggctggcccagttg

SEQ ID NO: 76302 - DNA, 25 bp, Canis familiaris
ctgggactctgtggaagccaagttc

SEQ ID NO: 76303 - DNA, 25 bp, Canis familiaris
ctggtggccgtgggcgaactgttaa

SEQ ID NO: 76304 - DNA, 25 bp, Canis familiaris
ctggggcggggtcaacgtgtaacag

SEQ ID NO: 76305 - DNA, 25 bp, Canis familiaris
ctggacccgggtcaggcggaaacag

SEQ ID NO: 76306 - DNA, 25 bp, Canis familiaris
ctggtcccgccgagcggaggagaac

SEQ ID NO: 76307 - DNA, 25 bp, Canis familiaris
ctggtctaccccaaaggaataagat

SEQ ID NO: 76308 - DNA, 25 bp, Canis familiaris
ctggtctccaccattacctaaagta

SEQ ID NO: 76309 - DNA, 25 bp, Canis familiaris
ctgggtctaagccgctaccaaaagg

SEQ ID NO: 76310 - DNA, 25 bp, Canis familiaris
ctgggctttccgttacaaagatgag

SEQ ID NO: 76311 - DNA, 25 bp, Canis familiaris
ctgggctctttccatatatcaccaa

SEQ ID NO: 76312 - DNA, 25 bp, Canis familiaris
ctgggttctgaacttgtcatccaag

SEQ ID NO: 76313 - DNA, 25 bp, Canis familiaris
ctggggatccaatatgaccccagca

SEQ ID NO: 76314 - DNA, 25 bp, Canis familiaris
ctgggcctgaaatcaaccctcatca

SEQ ID NO: 76315 - DNA, 25 bp, Canis familiaris
ctgtggtctccaaatcagaacctaa

SEQ ID NO: 76316 - DNA, 25 bp, Canis familiaris
ctgtgactcgcttagctcaaaccta

SEQ ID NO: 76317 - DNA, 25 bp, Canis familiaris
ctgtgacccatctctgataacattt

SEQ ID NO: 76318 - DNA, 25 bp, Canis familiaris
ctggacgacatctccaaactctgtg

SEQ ID NO: 76319 - DNA, 25 bp, Canis familiaris
ctgtgcaaacaatctcaagagctgc

SEQ ID NO: 76320 - DNA, 25 bp, Canis familiaris
ctgtctgaagcagcctgaacgagca

SEQ ID NO: 76321 - DNA, 25 bp, Canis familiaris
ctgtcgtgcatgaccctgacaagaa

SEQ ID NO: 76322 - DNA, 25 bp, Canis familiaris
ctgtctgtgtctctcatgaataaat

SEQ ID NO: 76323 - DNA, 25 bp, Canis familiaris
ctgtgtatctctcacgaatgaatat

SEQ ID NO: 76324 - DNA, 25 bp, Canis familiaris
ctgtgttgcaattatctgaatggac

SEQ ID NO: 76325 - DNA, 25 bp, Canis familiaris
ctggtgagcaactatgtgaactaca

SEQ ID NO: 76326 - DNA, 25 bp, Canis familiaris
ctgtggagcccattgtagccatgag

SEQ ID NO: 76327 - DNA, 25 bp, Canis familiaris
ctgtgagatgcagccagtcctggag

SEQ ID NO: 76328 - DNA, 25 bp, Canis familiaris
ctgtgatggagcctcacaccgagtc

SEQ ID NO: 76329 - DNA, 25 bp, Canis familiaris
ctgtgtgacaagcccaaggaccgtc

SEQ ID NO: 76330 - DNA, 25 bp, Canis familiaris
ctggctgacaagtgcacgggtcttc

SEQ ID NO: 76331 - DNA, 25 bp, Canis familiaris
ctggcaagccagttcaatgagttag

SEQ ID NO: 76332 - DNA, 25 bp, Canis familiaris
ctgtggaggctgttcactcacttag

SEQ ID NO: 76333 - DNA, 25 bp, Canis familiaris
ctggtggtggtttctagcagatgag

SEQ ID NO: 76334 - DNA, 25 bp, Canis familiaris
ctgggcaaggtattcctgcaggatg

SEQ ID NO: 76335 - DNA, 25 bp, Canis familiaris
ctggcagcactgttgtatccgagtt

SEQ ID NO: 76336 - DNA, 25 bp, Canis familiaris
ctgggacagcttcctcaaagtctgg

SEQ ID NO: 76337 - DNA, 25 bp, Canis familiaris
ctgtggacaccaaagaggagacgag

SEQ ID NO: 76338 - DNA, 25 bp, Canis familiaris
ctgtgagacccttctggggacaagg

SEQ ID NO: 76339 - DNA, 25 bp, Canis familiaris
ctgtgcgacacagatgctggagagc

SEQ ID NO: 76340 - DNA, 25 bp, Canis familiaris
ctgggacacagcacttgagactttc

SEQ ID NO: 76341 - DNA, 25 bp, Canis familiaris
ctggtgaacatgggccgtgcactac

SEQ ID NO: 76342 - DNA, 25 bp, Canis familiaris
ctgggcatcagggtgcctgtgcagc

SEQ ID NO: 76343 - DNA, 25 bp, Canis familiaris
cggatcacggcaatgcggctgcact

SEQ ID NO: 76344 - DNA, 25 bp, Canis familiaris
ctggatgagcgccaatggtgcccaa

SEQ ID NO: 76345 - DNA, 25 bp, Canis familiaris
ctgtgggcgacacttgcccagcaga

SEQ ID NO: 76346 - DNA, 25 bp, Canis familiaris
ctggggtagtgctgcccagaactgc

SEQ ID NO: 76347 - DNA, 25 bp, Canis familiaris
ctggggctaaatccgcagcaaactg

SEQ ID NO: 76348 - DNA, 25 bp, Canis familiaris
ctgtgttctaacccggcaatgaata

SEQ ID NO: 76349 - DNA, 25 bp, Canis familiaris
ctgtgtcccgtgcacggaaaataca

SEQ ID NO: 76350 - DNA, 25 bp, Canis familiaris
ctgtgtctccgtttcctgaaatata

SEQ ID NO: 76351 - DNA, 25 bp, Canis familiaris
ctggtattccaattccttatttaat

SEQ ID NO: 76352 - DNA, 25 bp, Canis familiaris
ctggctttctgggtcttttatttgt

SEQ ID NO: 76353 - DNA, 25 bp, Canis familiaris
ctggtgttccaggtgtttctttggc

SEQ ID NO: 76354 - DNA, 25 bp, Canis familiaris
ctggggtctagctgtttttgattcc

SEQ ID NO: 76355 - DNA, 25 bp, Canis familiaris
ctgtgggcgccgcagtttttgaaac

SEQ ID NO: 76356 - DNA, 25 bp, Canis familiaris
ctggtagggcccccttgtatataag

SEQ ID NO: 76357 - DNA, 25 bp, Canis familiaris
ctggtccccaaccactagttgataa

SEQ ID NO: 76358 - DNA, 25 bp, Canis familiaris
ctgggatccctagagattttcataa

SEQ ID NO: 76359 - DNA, 25 bp, Canis familiaris
ctgtgcccacgctggagatttgatc

SEQ ID NO: 76360 - DNA, 25 bp, Canis familiaris
ctggtccacctcatgaatcctgagt

SEQ ID NO: 76361 - DNA, 25 bp, Canis familiaris
ctggtctcagtctctatactcggag

SEQ ID NO: 76362 - DNA, 25 bp, Canis familiaris
ctgtgctgtccctgtatgcctctgg

SEQ ID NO: 76363 - DNA, 25 bp, Canis familiaris
ctgtgctatccctgtacgcctctgg

SEQ ID NO: 76364 - DNA, 25 bp, Canis familiaris
ctgtgccacctgggaatcccttaaa

SEQ ID NO: 76365 - DNA, 25 bp, Canis familiaris
ctgtccacccacaatatccaggaaa

SEQ ID NO: 76366 - DNA, 25 bp, Canis familiaris
ctgtccctcaaggcttccagagaag

SEQ ID NO: 76367 - DNA, 25 bp, Canis familiaris
ctgtgccctcaaaccatctaggaag

SEQ ID NO: 76368 - DNA, 25 bp, Canis familiaris
ctgtccctgcacagcggtatgtgag

SEQ ID NO: 76369 - DNA, 25 bp, Canis familiaris
ctgtccctcctcttgttattgggag

SEQ ID NO: 76370 - DNA, 25 bp, Canis familiaris
ctggctcttgtcattgttactaggg

SEQ ID NO: 76371 - DNA, 25 bp, Canis familiaris
ctggcctgttcaggagattagtaag

SEQ ID NO: 76372 - DNA, 25 bp, Canis familiaris
ctggcctttactggatccctaaagc

SEQ ID NO: 76373 - DNA, 25 bp, Canis familiaris
ctggacttttcaggactactcaaac

SEQ ID NO: 76374 - DNA, 25 bp, Canis familiaris
ctggatttcccaggatttcttaatc

SEQ ID NO: 76375 - DNA, 25 bp, Canis familiaris
ctgtgattcctggtggtttctttca

SEQ ID NO: 76376 - DNA, 25 bp, Canis familiaris
ctgtgattccttaatgtattttggg

SEQ ID NO: 76377 - DNA, 25 bp, Canis familiaris
ctgtgtcttttcatggaatagatag

SEQ ID NO: 76378 - DNA, 25 bp, Canis familiaris
ctgtggcttctgacttctagaagac

SEQ ID NO: 76379 - DNA, 25 bp, Canis familiaris
ctgggttctgattggctcagtagcc

SEQ ID NO: 76380 - DNA, 25 bp, Canis familiaris
ctggcctccgactactagacatggc

SEQ ID NO: 76381 - DNA, 25 bp, Canis familiaris
ctgggccacgactcaagaaggactg

SEQ ID NO: 76382 - DNA, 25 bp, Canis familiaris
ctgggaccccggcagaaggaatatt

SEQ ID NO: 76383 - DNA, 25 bp, Canis familiaris
ctgtgcgaggccggggaggaggagt

SEQ ID NO: 76384 - DNA, 25 bp, Canis familiaris
ctgtgcgctggcaacagcaagagcg

SEQ ID NO: 76385 - DNA, 25 bp, Canis familiaris
ctgtgcagctcgagaaggacgtgag

SEQ ID NO: 76386 - DNA, 25 bp, Canis familiaris
ctgtgcagccagggcaggcccaggc

SEQ ID NO: 76387 - DNA, 25 bp, Canis familiaris
ctgtgagggagattgcgccgaggca

SEQ ID NO: 76388 - DNA, 25 bp, Canis familiaris
ctgggaggagcatctgccaaggggg

SEQ ID NO: 76389 - DNA, 25 bp, Canis familiaris
ctgggcaggcagtgtgctgttggtt

SEQ ID NO: 76390 - DNA, 25 bp, Canis familiaris
ctgtggtgagctttggtgattgtgt

SEQ ID NO: 76391 - DNA, 25 bp, Canis familiaris
ctgtgggactactgctgggtgtgca

SEQ ID NO: 76392 - DNA, 25 bp, Canis familiaris
ctgggagactcgtcggagtccgcat

SEQ ID NO: 76393 - DNA, 25 bp, Canis familiaris
ctgtgggactcttagacatgaccaa

SEQ ID NO: 76394 - DNA, 25 bp, Canis familiaris
ctgggcgagtcccaggtgaccaggg

SEQ ID NO: 76395 - DNA, 25 bp, Canis familiaris
ctgggcgaggaggaggtgcagcggc

SEQ ID NO: 76396 - DNA, 25 bp, Canis familiaris
ctgggaggagggatggtgctggctg

SEQ ID NO: 76397 - DNA, 25 bp, Canis familiaris
ctgggagccagggttgggcaagatg

SEQ ID NO: 76398 - DNA, 25 bp, Canis familiaris
ctgggtgggagcttgtggcgaagat

SEQ ID NO: 76399 - DNA, 25 bp, Canis familiaris
ctgtggatggcccctctggaaagct

SEQ ID NO: 76400 - DNA, 25 bp, Canis familiaris
ctgtgctgctggaggcttggacagg

SEQ ID NO: 76401 - DNA, 25 bp, Canis familiaris
ctgtgctgcagggtggttggagggg

SEQ ID NO: 76402 - DNA, 25 bp, Canis familiaris
ctgtgctgagagctcggtctgaggc

SEQ ID NO: 76403 - DNA, 25 bp, Canis familiaris
ctgtgtgagagcaattcgtggagga

SEQ ID NO: 76404 - DNA, 25 bp, Canis familiaris
ctgtgacacagctccgtgagagaga

SEQ ID NO: 76405 - DNA, 25 bp, Canis familiaris
ctgtgaggagcacgccaggagcgac

SEQ ID NO: 76406 - DNA, 25 bp, Canis familiaris
ctgtgacttacacaggagcgactcc

SEQ ID NO: 76407 - DNA, 25 bp, Canis familiaris
ctgtgaagtacaccaaggctcccta

SEQ ID NO: 76408 - DNA, 25 bp, Canis familiaris
ctgtggagaagcccaaggcctcatc

SEQ ID NO: 76409 - DNA, 25 bp, Canis familiaris
ctgtgaggccatgccaaggtcgcac

SEQ ID NO: 76410 - DNA, 25 bp, Canis familiaris
ctgtgacccatttagaagtggcctc

SEQ ID NO: 76411 - DNA, 25 bp, Canis familiaris
ctgtgacaaatttagtggccatcct

SEQ ID NO: 76412 - DNA, 25 bp, Canis familiaris
ctgtgaacctgtttttcctcatcag

SEQ ID NO: 76413 - DNA, 25 bp, Canis familiaris
ctgtgacaactatatatttctaaaa

SEQ ID NO: 76414 - DNA, 25 bp, Canis familiaris
ctgtgatcccgatgattggctttga

SEQ ID NO: 76415 - DNA, 25 bp, Canis familiaris
ctgtgacccatgtactcggttgtag

SEQ ID NO: 76416 - DNA, 25 bp, Canis familiaris
ctgtgagccaagaagaagtttgtca

SEQ ID NO: 76417 - DNA, 25 bp, Canis familiaris
ctgtgacccagcgaatctttcacca

SEQ ID NO: 76418 - DNA, 25 bp, Canis familiaris
ctgggctgctgttgactcaacctaa

SEQ ID NO: 76419 - DNA, 25 bp, Canis familiaris
ctgggtggtcaacccacgacacaac

SEQ ID NO: 76420 - DNA, 25 bp, Canis familiaris
ctgtggggtgaggctccacacagcc

SEQ ID NO: 76421 - DNA, 25 bp, Canis familiaris
ctggtgagttgagcccacaggagac

SEQ ID NO: 76422 - DNA, 25 bp, Canis familiaris
ctgtgggccttgctcagagcggaga

SEQ ID NO: 76423 - DNA, 25 bp, Canis familiaris
ctggtggcctgtaccagagggactc

SEQ ID NO: 76424 - DNA, 25 bp, Canis familiaris
cgagtactcctatcgagggcactct

SEQ ID NO: 76425 - DNA, 25 bp, Canis familiaris
ctggtcatcttcaaaatggggactc

SEQ ID NO: 76426 - DNA, 25 bp, Canis familiaris
ctggtctcacgcagttgtggtcaat

SEQ ID NO: 76427 - DNA, 25 bp, Canis familiaris
ctggttgaactggatttggctatat

SEQ ID NO: 76428 - DNA, 25 bp, Canis familiaris
ctgtgtggaacaggtgcttcgccat

SEQ ID NO: 76429 - DNA, 25 bp, Canis familiaris
ctggtggttgcagtgactatcctca

SEQ ID NO: 76430 - DNA, 25 bp, Canis familiaris
ctggtgggtacaggaatctgccatc

SEQ ID NO: 76431 - DNA, 25 bp, Canis familiaris
ctgggaggctgagaattcactgctc

SEQ ID NO: 76432 - DNA, 25 bp, Canis familiaris
ctgggatggaggccaggctcactgc

SEQ ID NO: 76433 - DNA, 25 bp, Canis familiaris
ctgggggaatgctgtcagctctgcc

SEQ ID NO: 76434 - DNA, 25 bp, Canis familiaris
ctggtgggtcgctgatggtctaagc

SEQ ID NO: 76435 - DNA, 25 bp, Canis familiaris
ctggtggagtcctgctgtgtgacaa

SEQ ID NO: 76436 - DNA, 25 bp, Canis familiaris
ctgtgtgcgttcatggggctaggac

SEQ ID NO: 76437 - DNA, 25 bp, Canis familiaris
ctggtcgtaccacgggcattgtgat

SEQ ID NO: 76438 - DNA, 25 bp, Canis familiaris
ctggccgaacccagtgatctggcaa

SEQ ID NO: 76439 - DNA, 25 bp, Canis familiaris
ctggcaaacaccaaacttcatggag

SEQ ID NO: 76440 - DNA, 25 bp, Canis familiaris
ctggcaacaccaccatctttagtgt

SEQ ID NO: 76441 - DNA, 25 bp, Canis familiaris
ctgtgcccaccgtaatttggttctg

SEQ ID NO: 76442 - DNA, 25 bp, Canis familiaris
ctgtgccttcctttgcatttagttt

SEQ ID NO: 76443 - DNA, 25 bp, Canis familiaris
ctggcgttcccagtgtttgagtgtc

SEQ ID NO: 76444 - DNA, 25 bp, Canis familiaris
ctgtgcgtttccgtttatgaaagac

SEQ ID NO: 76445 - DNA, 25 bp, Canis familiaris
ctgtgtgtttctgccaccataaaac

SEQ ID NO: 76446 - DNA, 25 bp, Canis familiaris
ctgtgtggtgctttccagaataaag

SEQ ID NO: 76447 - DNA, 25 bp, Canis familiaris
ctgtgtgtgtgcatatgaatgcata

SEQ ID NO: 76448 - DNA, 25 bp, Canis familiaris
ctgtgtgcatctctcatgaatgaaa

SEQ ID NO: 76449 - DNA, 25 bp, Canis familiaris
ctgtgtgtctctcctgaataaatac

SEQ ID NO: 76450 - DNA, 25 bp, Canis familiaris
ctgtgtgtcctccaatccaaacaca

SEQ ID NO: 76451 - DNA, 25 bp, Canis familiaris
ctggcttgcagaaaatccagaaaat

SEQ ID NO: 76452 - DNA, 25 bp, Canis familiaris
ctgtgctacctgaagacatagtaaa

SEQ ID NO: 76453 - DNA, 25 bp, Canis familiaris
ctggcttcctgcacaaattctaaac

SEQ ID NO: 76454 - DNA, 25 bp, Canis familiaris
ctggtcccattggcgactttgagaa

SEQ ID NO: 76455 - DNA, 25 bp, Canis familiaris
ctggtttcactggcctgtttgaagg

SEQ ID NO: 76456 - DNA, 25 bp, Canis familiaris
ctggtctgtacctacctgtggaagg

SEQ ID NO: 76457 - DNA, 25 bp, Canis familiaris
ctgtgctgctggaccaacaagctcg

SEQ ID NO: 76458 - DNA, 25 bp, Canis familiaris
ctgtgtgtggctgtacagtctgcgc

SEQ ID NO: 76459 - DNA, 25 bp, Canis familiaris
ctgtgctgagttgtgtagtccgaat

SEQ ID NO: 76460 - DNA, 25 bp, Canis familiaris
ctgtgatggtgggtgtggtgtgtga

SEQ ID NO: 76461 - DNA, 25 bp, Canis familiaris
ctgtgaggagctgggggtgtctggc

SEQ ID NO: 76462 - DNA, 25 bp, Canis familiaris
ctgtgtggtgtcggtggtatcgtga

SEQ ID NO: 76463 - DNA, 25 bp, Canis familiaris
ctgtgcaggcatccctattgtacat

SEQ ID NO: 76464 - DNA, 25 bp, Canis familiaris
ctgtgaggctgacgcccttatcaaa

SEQ ID NO: 76465 - DNA, 25 bp, Canis familiaris
ctgtgtggctggccaagcttctaca

SEQ ID NO: 76466 - DNA, 25 bp, Canis familiaris
ctgtgtgagctgaccaagttgccca

SEQ ID NO: 76467 - DNA, 25 bp, Canis familiaris
ctggatcatggaaccacgctgtcca

SEQ ID NO: 76468 - DNA, 25 bp, Canis familiaris
ctgtgagcatgctaaccggtgcttg

SEQ ID NO: 76469 - DNA, 25 bp, Canis familiaris
ctgggcatgaaatcggtgcccccca

SEQ ID NO: 76470 - DNA, 25 bp, Canis familiaris
ctgggtggagtgtggaccctccaaa

SEQ ID NO: 76471 - DNA, 25 bp, Canis familiaris
ctgggatggagcaggtcacgggcca

SEQ ID NO: 76472 - DNA, 25 bp, Canis familiaris
cggactctagctaggtccgcgggga

SEQ ID NO: 76473 - DNA, 25 bp, Canis familiaris
ctgtgctactccaggtcctgggagg

SEQ ID NO: 76474 - DNA, 25 bp, Canis familiaris
ctggtgaaccaggtgtttgggcaag

SEQ ID NO: 76475 - DNA, 25 bp, Canis familiaris
ctgggtaacacttgctgttgctcgc

SEQ ID NO: 76476 - DNA, 25 bp, Canis familiaris
ctgtgggctgccatgttgatggccg

SEQ ID NO: 76477 - DNA, 25 bp, Canis familiaris
ctgggaggtcttctgaggagctgca

SEQ ID NO: 76478 - DNA, 25 bp, Canis familiaris
ctgggcatctttttctgagtactga

SEQ ID NO: 76479 - DNA, 25 bp, Canis familiaris
ctggagccatttggctctggggggc

SEQ ID NO: 76480 - DNA, 25 bp, Canis familiaris
ctgtgactatgcccctttggggccc

SEQ ID NO: 76481 - DNA, 25 bp, Canis familiaris
ctggacgaccaactaccagtggccc

SEQ ID NO: 76482 - DNA, 25 bp, Canis familiaris
cggatgccccagatactgcctgggg

SEQ ID NO: 76483 - DNA, 25 bp, Canis familiaris
cggatccccagttgcaggttaaggc

SEQ ID NO: 76484 - DNA, 25 bp, Canis familiaris
ctggacctcacactttggctaaaga

SEQ ID NO: 76485 - DNA, 25 bp, Canis familiaris
ctgtgactcttcttgtggcattaaa

SEQ ID NO: 76486 - DNA, 25 bp, Canis familiaris
ctgtggcttcctggtggcataaagc

SEQ ID NO: 76487 - DNA, 25 bp, Canis familiaris
ctgtgacgctcgagtggctcagaac

SEQ ID NO: 76488 - DNA, 25 bp, Canis familiaris
ctgtgacactctggagagagcaaaa

SEQ ID NO: 76489 - DNA, 25 bp, Canis familiaris
ctggcacctgcaacatcgaggaata

SEQ ID NO: 76490 - DNA, 25 bp, Canis familiaris
ctgggcgccaacagaggcaaagagg

SEQ ID NO: 76491 - DNA, 25 bp, Canis familiaris
ctggccccccattcaagaaatcggc

SEQ ID NO: 76492 - DNA, 25 bp, Canis familiaris
ctggtccccaatgcaaggtgactgg

SEQ ID NO: 76493 - DNA, 25 bp, Canis familiaris
ctggtcccatttcctagagtgggga

SEQ ID NO: 76494 - DNA, 25 bp, Canis familiaris
ctgtgtctgtctgttctaagtgtgg

SEQ ID NO: 76495 - DNA, 25 bp, Canis familiaris
ctggttgtgctcctcttatgtggag

SEQ ID NO: 76496 - DNA, 25 bp, Canis familiaris
ctggtttctagacttgtgctgatcg

SEQ ID NO: 76497 - DNA, 25 bp, Canis familiaris
cggatctttagaatttgcagtcagc

SEQ ID NO: 76498 - DNA, 25 bp, Canis familiaris
ctggactcttgaacacattcctgcc

SEQ ID NO: 76499 - DNA, 25 bp, Canis familiaris
ctggagtcgatcaactctaggctcc

SEQ ID NO: 76500 - DNA, 25 bp, Canis familiaris
ctgggtcgtagggtagctccatttt

SEQ ID NO: 76501 - DNA, 25 bp, Canis familiaris
ctgggtttgggagtgctgcccacat

SEQ ID NO: 76502 - DNA, 25 bp, Canis familiaris
ctggagatcgagtgatcttgcccca

SEQ ID NO: 76503 - DNA, 25 bp, Canis familiaris
ctgggagcgctgttttagcaccaga

SEQ ID NO: 76504 - DNA, 25 bp, Canis familiaris
cgggcacgatgccctagaactcgac

SEQ ID NO: 76505 - DNA, 25 bp, Canis familiaris
ctggcatacgatagctgtaaaacga

SEQ ID NO: 76506 - DNA, 25 bp, Canis familiaris
cggtgcactgatcgctgccaatgca

SEQ ID NO: 76507 - DNA, 25 bp, Canis familiaris
ctgggagcaatgcctgctttgcaca

SEQ ID NO: 76508 - DNA, 25 bp, Canis familiaris
ctggaataagcgctttgaaaagaaa

SEQ ID NO: 76509 - DNA, 25 bp, Canis familiaris
ctggactaatggcttttatctatgc

SEQ ID NO: 76510 - DNA, 25 bp, Canis familiaris
ctggacctggtgttcaatgttctac

SEQ ID NO: 76511 - DNA, 25 bp, Canis familiaris
ctggaggcccagggcaagtcctacc

SEQ ID NO: 76512 - DNA, 25 bp, Canis familiaris
ctggaggcccaagaaggcccaactc

SEQ ID NO: 76513 - DNA, 25 bp, Canis familiaris
ctggggacctaggatcgagtcccac

SEQ ID NO: 76514 - DNA, 25 bp, Canis familiaris
ctggagacccgggatcgaatcccac

SEQ ID NO: 76515 - DNA, 25 bp, Canis familiaris
ctggggcacaccacaagaatctccc

SEQ ID NO: 76516 - DNA, 25 bp, Canis familiaris
ctggtgccactctggaaaggcccaa

SEQ ID NO: 76517 - DNA, 25 bp, Canis familiaris
ctggttaacaagtgccggcccagat

SEQ ID NO: 76518 - DNA, 25 bp, Canis familiaris
ctggttaaagacacccaggccatga

SEQ ID NO: 76519 - DNA, 25 bp, Canis familiaris
ctggtttcagagacatcctgctgcg

SEQ ID NO: 76520 - DNA, 25 bp, Canis familiaris
ctggttccatcagtcatcagctagc

SEQ ID NO: 76521 - DNA, 25 bp, Canis familiaris
ctggcccatcatgtcatagccatgt

SEQ ID NO: 76522 - DNA, 25 bp, Canis familiaris
ctggcgcagtcggtagagcacgaga

SEQ ID NO: 76523 - DNA, 25 bp, Canis familiaris
ctggtcctggcgtcacagccagaga

SEQ ID NO: 76524 - DNA, 25 bp, Canis familiaris
ctggtcgttcggtgtcatggacccg

SEQ ID NO: 76525 - DNA, 25 bp, Canis familiaris
ctgggtgcccggtgtgcatgggaag

SEQ ID NO: 76526 - DNA, 25 bp, Canis familiaris
ctgggctcccggaggagcggggagc

SEQ ID NO: 76527 - DNA, 25 bp, Canis familiaris
ctgggacctcagctgggaggggggg

SEQ ID NO: 76528 - DNA, 25 bp, Canis familiaris
ctgggacctcacagagccagggagt

SEQ ID NO: 76529 - DNA, 25 bp, Canis familiaris
cggcaaattcaacggcacagtcaag

SEQ ID NO: 76530 - DNA, 25 bp, Canis familiaris
ctggcaaagtcaccagtcttgccca

SEQ ID NO: 76531 - DNA, 25 bp, Canis familiaris
ctggagaaggcgccagtcggagctg

SEQ ID NO: 76532 - DNA, 25 bp, Canis familiaris
ctgggatgaatgcaagtcctgcctg

SEQ ID NO: 76533 - DNA, 25 bp, Canis familiaris
ctggcgaaatgccaccacttgttgc

SEQ ID NO: 76534 - DNA, 25 bp, Canis familiaris
ctggggcagggaggtgtctgttgct

SEQ ID NO: 76535 - DNA, 25 bp, Canis familiaris
ctggtggagggggagcctcttgcac

SEQ ID NO: 76536 - DNA, 25 bp, Canis familiaris
ctgtggggtggggggtcaagccaag

SEQ ID NO: 76537 - DNA, 25 bp, Canis familiaris
ctggggaatgggctgttacgaaaga

SEQ ID NO: 76538 - DNA, 25 bp, Canis familiaris
ctggggaatgggctgatttacaaaa

SEQ ID NO: 76539 - DNA, 25 bp, Canis familiaris
ctgggtgaatgccaattattaacac

SEQ ID NO: 76540 - DNA, 25 bp, Canis familiaris
ctgggtcagcagcacataatgtcac

SEQ ID NO: 76541 - DNA, 25 bp, Canis familiaris
ctgtgtgatagcccactggatggca

SEQ ID NO: 76542 - DNA, 25 bp, Canis familiaris
ctgtgtcttagccacatgagaggag

SEQ ID NO: 76543 - DNA, 25 bp, Canis familiaris
ctgtgttcctgcccagagatggagg

SEQ ID NO: 76544 - DNA, 25 bp, Canis familiaris
ctgtggtgacttcgcccatggaggg

SEQ ID NO: 76545 - DNA, 25 bp, Canis familiaris
ctggggcctctgggccattgagaca

SEQ ID NO: 76546 - DNA, 25 bp, Canis familiaris
ctgggacatcctggggcatccagaa

SEQ ID NO: 76547 - DNA, 25 bp, Canis familiaris
ctgggcagcagctggtggccaggaa

SEQ ID NO: 76548 - DNA, 25 bp, Canis familiaris
ctgggacctggagttggagctgaac

SEQ ID NO: 76549 - DNA, 25 bp, Canis familiaris
ctgtgggctcatcattgtgggtgta

SEQ ID NO: 76550 - DNA, 25 bp, Canis familiaris
ctggcgtgatcaacattttgttaag

SEQ ID NO: 76551 - DNA, 25 bp, Canis familiaris
ctggacatgctctcttttggtagag

SEQ ID NO: 76552 - DNA, 25 bp, Canis familiaris
ctggatctctccttaactgcgggag

SEQ ID NO: 76553 - DNA, 25 bp, Canis familiaris
ctggagcttccgtaactgcatgggt

SEQ ID NO: 76554 - DNA, 25 bp, Canis familiaris
ctggtgctgtgcacattatcctggc

SEQ ID NO: 76555 - DNA, 25 bp, Canis familiaris
ctgtggctgtgagcatgctaaccgg

SEQ ID NO: 76556 - DNA, 25 bp, Canis familiaris
ctgtggttgggggcaactcggcagg

SEQ ID NO: 76557 - DNA, 25 bp, Canis familiaris
ctggagtcggcgcgcaaagcgaaag

SEQ ID NO: 76558 - DNA, 25 bp, Canis familiaris
ctgggtggtggaggggagtgtcaaa

SEQ ID NO: 76559 - DNA, 25 bp, Canis familiaris
ctgggggctctagggaagctgcgaa

SEQ ID NO: 76560 - DNA, 25 bp, Canis familiaris
ctggggaatgaagggatcgctgctg

SEQ ID NO: 76561 - DNA, 25 bp, Canis familiaris
ctgggtgacaaactcagtgcctcta

SEQ ID NO: 76562 - DNA, 25 bp, Canis familiaris
ctggatttataactcagccatttaa

SEQ ID NO: 76563 - DNA, 25 bp, Canis familiaris
ctggattttcatctcggctttgaga

SEQ ID NO: 76564 - DNA, 25 bp, Canis familiaris
ctggtgttttcttgcatggtttgga

SEQ ID NO: 76565 - DNA, 25 bp, Canis familiaris
ctgtggcttggcctttggttttgaa

SEQ ID NO: 76566 - DNA, 25 bp, Canis familiaris
ctggccttaggtttggttatgttgg

SEQ ID NO: 76567 - DNA, 25 bp, Canis familiaris
cggcctgtcgtgattgtttgtttta

SEQ ID NO: 76568 - DNA, 25 bp, Canis familiaris
ctggcctgtattgtctattttctag

SEQ ID NO: 76569 - DNA, 25 bp, Canis familiaris
ctggatctggatgaaccactttcta

SEQ ID NO: 76570 - DNA, 25 bp, Canis familiaris
ctggatctggatgaagccatttcta

SEQ ID NO: 76571 - DNA, 25 bp, Canis familiaris
ctggttgagccatagcgtaatgtat

SEQ ID NO: 76572 - DNA, 25 bp, Canis familiaris
ctggcccagccagagctataattat

SEQ ID NO: 76573 - DNA, 25 bp, Canis familiaris
cggctccccctagtatgatgagtct

SEQ ID NO: 76574 - DNA, 25 bp, Canis familiaris
cggccccccatcttggggtatggag

SEQ ID NO: 76575 - DNA, 25 bp, Canis familiaris
cggccctggccacagggtacaggat

SEQ ID NO: 76576 - DNA, 25 bp, Canis familiaris
cggcccagggctaagccaacgaggt

SEQ ID NO: 76577 - DNA, 25 bp, Canis familiaris
cgggcaacggcaaaggaaatcaggg

SEQ ID NO: 76578 - DNA, 25 bp, Canis familiaris
cggccagacgtccgggaacactggc

SEQ ID NO: 76579 - DNA, 25 bp, Canis familiaris
cggaatgacgccgggggcagccggc

SEQ ID NO: 76580 - DNA, 25 bp, Canis familiaris
ctggaggaggggagggcctctgggc

SEQ ID NO: 76581 - DNA, 25 bp, Canis familiaris
ctgggagaagggcgctgccctgagg

SEQ ID NO: 76582 - DNA, 25 bp, Canis familiaris
ctgggtggggagtccagcccaagag

SEQ ID NO: 76583 - DNA, 25 bp, Canis familiaris
ctgtgtgggggagccatggccccaa

SEQ ID NO: 76584 - DNA, 25 bp, Canis familiaris
ctggggtggccaggaaggcctgcca

SEQ ID NO: 76585 - DNA, 25 bp, Canis familiaris
ctggggctgtggaaaccagcctgct

SEQ ID NO: 76586 - DNA, 25 bp, Canis familiaris
ctggggctctggctctcacactctc

SEQ ID NO: 76587 - DNA, 25 bp, Canis familiaris
ctggggctctggctctcacactctc

SEQ ID NO: 76588 - DNA, 25 bp, Canis familiaris
ctgtggggctggatcacccacacgc

SEQ ID NO: 76589 - DNA, 25 bp, Canis familiaris
ctgtgggttggaatggaccagacat

SEQ ID NO: 76590 - DNA, 25 bp, Canis familiaris
ctggtggccggaatagaccgctatc

SEQ ID NO: 76591 - DNA, 25 bp, Canis familiaris
ctggagcctcggaatggagtcccac

SEQ ID NO: 76592 - DNA, 25 bp, Canis familiaris
ctggaacataggatgggcccgatgc

SEQ ID NO: 76593 - DNA, 25 bp, Canis familiaris
ctggagaaattcaaggacccggcct

SEQ ID NO: 76594 - DNA, 25 bp, Canis familiaris
ctggacggattcaggaggccggcac

SEQ ID NO: 76595 - DNA, 25 bp, Canis familiaris
ctggggagtgtgtgtgagggacgca

SEQ ID NO: 76596 - DNA, 25 bp, Canis familiaris
ctgggtagtggatttggctctccgt

SEQ ID NO: 76597 - DNA, 25 bp, Canis familiaris
ctgggctactggttgaggcctaccc

SEQ ID NO: 76598 - DNA, 25 bp, Canis familiaris
ctggagctgactgtgaggcatctgc

SEQ ID NO: 76599 - DNA, 25 bp, Canis familiaris
ctggacaggtagaggcatctgcccc

SEQ ID NO: 76600 - DNA, 25 bp, Canis familiaris
ctggaggaccaaggtgatctggccc

SEQ ID NO: 76601 - DNA, 25 bp, Canis familiaris
ctggggcccaagttgcagtgagcag

SEQ ID NO: 76602 - DNA, 25 bp, Canis familiaris
ctggggccatcatagcagcaacagc

SEQ ID NO: 76603 - DNA, 25 bp, Canis familiaris
ctgggatgacctcacagccaagcat

SEQ ID NO: 76604 - DNA, 25 bp, Canis familiaris
ctggtagagcctctgagcccaaatc

SEQ ID NO: 76605 - DNA, 25 bp, Canis familiaris
ctgggagaggctcctgcatgcccag

SEQ ID NO: 76606 - DNA, 25 bp, Canis familiaris
ctgggcaagactttggccgcagcgt

SEQ ID NO: 76607 - DNA, 25 bp, Canis familiaris
ctgggcttcatcattggccaagcag

SEQ ID NO: 76608 - DNA, 25 bp, Canis familiaris
ctggtgcttccctatgtgggcagag

SEQ ID NO: 76609 - DNA, 25 bp, Canis familiaris
ctgtggtgtgtgggagtggggagca

SEQ ID NO: 76610 - DNA, 25 bp, Canis familiaris
ctgggagtgtgcggactgtgggcgc

SEQ ID NO: 76611 - DNA, 25 bp, Canis familiaris
ctggactgcaggcgactttggagct

SEQ ID NO: 76612 - DNA, 25 bp, Canis familiaris
ctggtcagcagtcaggtttcagcca

SEQ ID NO: 76613 - DNA, 25 bp, Canis familiaris
ctgggctgagtgcagtgctaaactg

SEQ ID NO: 76614 - DNA, 25 bp, Canis familiaris
ctgggctgatggcctgggcagaagc

SEQ ID NO: 76615 - DNA, 25 bp, Canis familiaris
ctggtgcagctgctctggagaacag

SEQ ID NO: 76616 - DNA, 25 bp, Canis familiaris
ctggtggatctgttgggacctgcag

SEQ ID NO: 76617 - DNA, 25 bp, Canis familiaris
ctgggtatctgacaccacagcatca

SEQ ID NO: 76618 - DNA, 25 bp, Canis familiaris
ctgggtcctgaggcaggccagagaa

SEQ ID NO: 76619 - DNA, 25 bp, Canis familiaris
ctggtgtgcctgctgcagggcagca

SEQ ID NO: 76620 - DNA, 25 bp, Canis familiaris
ctggtgctgccaaggctgtgggcaa

SEQ ID NO: 76621 - DNA, 25 bp, Canis familiaris
ctggtctcgaagcgatgcatgcaag

SEQ ID NO: 76622 - DNA, 25 bp, Canis familiaris
ctggtccatggcacgtcatgcaaag

SEQ ID NO: 76623 - DNA, 25 bp, Canis familiaris
ctggtagctgtggccctaggataat

SEQ ID NO: 76624 - DNA, 25 bp, Canis familiaris
ctggtgtcttcaccaccatggagaa

SEQ ID NO: 76625 - DNA, 25 bp, Canis familiaris
ctggtgtgcttctcatgtacgaatc

SEQ ID NO: 76626 - DNA, 25 bp, Canis familiaris
ctgggctgttcatcctggagaatgc

SEQ ID NO: 76627 - DNA, 25 bp, Canis familiaris
ctggagggtatttgatggaagcatc

SEQ ID NO: 76628 - DNA, 25 bp, Canis familiaris
ctgggtgttgttttgggaccccatg

SEQ ID NO: 76629 - DNA, 25 bp, Canis familiaris
ctggggccttgttttggacagacct

SEQ ID NO: 76630 - DNA, 25 bp, Canis familiaris
cggagccactaactttgtccagacc

SEQ ID NO: 76631 - DNA, 25 bp, Canis familiaris
ctggttcacatatcaatttgccccc

SEQ ID NO: 76632 - DNA, 25 bp, Canis familiaris
ctggtccctgatggcagtcttgggc

SEQ ID NO: 76633 - DNA, 25 bp, Canis familiaris
cggtacctgtcgatgttgtgcgttc

SEQ ID NO: 76634 - DNA, 25 bp, Canis familiaris
ctggtaacatatcgttctttccttg

SEQ ID NO: 76635 - DNA, 25 bp, Canis familiaris
ctggtaaccataaatctgatcttct

SEQ ID NO: 76636 - DNA, 25 bp, Canis familiaris
ctgggctgacccaaatgtgctttct

SEQ ID NO: 76637 - DNA, 25 bp, Canis familiaris
ctgtggctgcctctagtgaattatg

SEQ ID NO: 76638 - DNA, 25 bp, Canis familiaris
ctgtggctgcccagcacaaactgag

SEQ ID NO: 76639 - DNA, 25 bp, Canis familiaris
ctgtggcgccatctgagaacaaggt

SEQ ID NO: 76640 - DNA, 25 bp, Canis familiaris
ctgtggcccatccaggaatgaccaa

SEQ ID NO: 76641 - DNA, 25 bp, Canis familiaris
ctggagccgactccagacaaccact

SEQ ID NO: 76642 - DNA, 25 bp, Canis familiaris
ctggtggccgtgccaacatcaccag

SEQ ID NO: 76643 - DNA, 25 bp, Canis familiaris
ctgggcgccagtgacattccagatg

SEQ ID NO: 76644 - DNA, 25 bp, Canis familiaris
ctgggagccgcaggactacgagatg

SEQ ID NO: 76645 - DNA, 25 bp, Canis familiaris
ctgggaccaggatccatcagagcgg

SEQ ID NO: 76646 - DNA, 25 bp, Canis familiaris
ctgggatctaaatgccatgctggca

SEQ ID NO: 76647 - DNA, 25 bp, Canis familiaris
ctgggattggctttgccatcatgac

SEQ ID NO: 76648 - DNA, 25 bp, Canis familiaris
ctgggtcagagcttcatcttcatga

SEQ ID NO: 76649 - DNA, 25 bp, Canis familiaris
ctgggtcagctgttcatttgttcac

SEQ ID NO: 76650 - DNA, 25 bp, Canis familiaris
ctgggtcaggagccactgtgtaccc

SEQ ID NO: 76651 - DNA, 25 bp, Canis familiaris
ctgtggcctccagactgtgaagccc

SEQ ID NO: 76652 - DNA, 25 bp, Canis familiaris
ctgtggccacacaggctgtacaggt

SEQ ID NO: 76653 - DNA, 25 bp, Canis familiaris
ctgggcccctggccttgaaaattgc

SEQ ID NO: 76654 - DNA, 25 bp, Canis familiaris
ctgggccccgggaagaactgagatc

SEQ ID NO: 76655 - DNA, 25 bp, Canis familiaris
ctgggccttcgggaaaccattggtg

SEQ ID NO: 76656 - DNA, 25 bp, Canis familiaris
cgggctttcagggccaacctgaagg

SEQ ID NO: 76657 - DNA, 25 bp, Canis familiaris
ctgggcatttgccgttaaccctagg

SEQ ID NO: 76658 - DNA, 25 bp, Canis familiaris
ctggtgcatttgcgttgtttcttca

SEQ ID NO: 76659 - DNA, 25 bp, Canis familiaris
ctgtggctttgtcttgttctataga

SEQ ID NO: 76660 - DNA, 25 bp, Canis familiaris
ctgggcttggtgttgtttctggaag

SEQ ID NO: 76661 - DNA, 25 bp, Canis familiaris
ctgggcttggcgaggttgatgcgga

SEQ ID NO: 76662 - DNA, 25 bp, Canis familiaris
ctgggctattgtaagcgtgtagaac

SEQ ID NO: 76663 - DNA, 25 bp, Canis familiaris
ctggctgaattgttagctggccgtg

SEQ ID NO: 76664 - DNA, 25 bp, Canis familiaris
ctggctggtggttcagtgtctgcag

SEQ ID NO: 76665 - DNA, 25 bp, Canis familiaris
ctggtaggtgtaactgctctagttg

SEQ ID NO: 76666 - DNA, 25 bp, Canis familiaris
ctggatgaaggtccctgcctttaat

SEQ ID NO: 76667 - DNA, 25 bp, Canis familiaris
cggaaagagctcaccgtgtctatat

SEQ ID NO: 76668 - DNA, 25 bp, Canis familiaris
cggccagaaagtcaccatgtctatt

SEQ ID NO: 76669 - DNA, 25 bp, Canis familiaris
cgggcaacaagtgcaaaccctgtga

SEQ ID NO: 76670 - DNA, 25 bp, Canis familiaris
cgggacctgacggactacctcatga

SEQ ID NO: 76671 - DNA, 25 bp, Canis familiaris
ctggggattgacccactgatcccag

SEQ ID NO: 76672 - DNA, 25 bp, Canis familiaris
ctgggagctggtgcctggctcccag

SEQ ID NO: 76673 - DNA, 25 bp, Canis familiaris
ctgggaggggctggatggctcccgc

SEQ ID NO: 76674 - DNA, 25 bp, Canis familiaris
ctgggaagaggcctgtagctcgcta

SEQ ID NO: 76675 - DNA, 25 bp, Canis familiaris
ctgggaatgaagctagttccaagct

SEQ ID NO: 76676 - DNA, 25 bp, Canis familiaris
ctgtggccaaggctggtctccacag

SEQ ID NO: 76677 - DNA, 25 bp, Canis familiaris
ctggcccagagcggtggcctaaacc

SEQ ID NO: 76678 - DNA, 25 bp, Canis familiaris
ctgggcctggcaaggagcctcaaga

SEQ ID NO: 76679 - DNA, 25 bp, Canis familiaris
ctgggcactggctgagcagctcaga

SEQ ID NO: 76680 - DNA, 25 bp, Canis familiaris
ctgggaggagcactacagccagggc

SEQ ID NO: 76681 - DNA, 25 bp, Canis familiaris
cggtaggagccgtcatcaattgtgc

SEQ ID NO: 76682 - DNA, 25 bp, Canis familiaris
ctgggcaggtccaagtcaacttcac

SEQ ID NO: 76683 - DNA, 25 bp, Canis familiaris
ctgggacgcccattgtgataaagac

SEQ ID NO: 76684 - DNA, 25 bp, Canis familiaris
ctggaatacgcctctgagaaagaga

SEQ ID NO: 76685 - DNA, 25 bp, Canis familiaris
cgaactagtctctcggatttagacg

SEQ ID NO: 76686 - DNA, 25 bp, Canis familiaris
gcgacaattttcctaggtttaatct

SEQ ID NO: 76687 - DNA, 25 bp, Canis familiaris
cgacaattttcctaggtttaatctg

SEQ ID NO: 76688 - DNA, 25 bp, Canis familiaris
cgcaacatgggttaaggctttcttg

SEQ ID NO: 76689 - DNA, 25 bp, Canis familiaris
cggacatgaggacagacggtttctg

SEQ ID NO: 76690 - DNA, 25 bp, Canis familiaris
cggccgcggaatctcggtattgtgg

SEQ ID NO: 76691 - DNA, 25 bp, Canis familiaris
cggccacaggttcccaacagtggta

SEQ ID NO: 76692 - DNA, 25 bp, Canis familiaris
ctggttcagtttcagtacggcgtga

SEQ ID NO: 76693 - DNA, 25 bp, Canis familiaris
ctggcttggtttccacataaggttt

SEQ ID NO: 76694 - DNA, 25 bp, Canis familiaris
ctggtatttttggcaaacttttatg

SEQ ID NO: 76695 - DNA, 25 bp, Canis familiaris
ctggatcttttttcagaactccgtt

SEQ ID NO: 76696 - DNA, 25 bp, Canis familiaris
ctggctctttgtttactactccatg

SEQ ID NO: 76697 - DNA, 25 bp, Canis familiaris
ctggtattgtgttgctaccctacag

SEQ ID NO: 76698 - DNA, 25 bp, Canis familiaris
ctggctcatggggagctacacgcca

SEQ ID NO: 76699 - DNA, 25 bp, Canis familiaris
ctggctatcgaggtgaacgcatcaa

SEQ ID NO: 76700 - DNA, 25 bp, Canis familiaris
ctggcctcggtcgagaccatattct

SEQ ID NO: 76701 - DNA, 25 bp, Canis familiaris
ctgggctaatgaaggacctgttctg

SEQ ID NO: 76702 - DNA, 25 bp, Canis familiaris
cggcgctaaggatgactctggtcag

SEQ ID NO: 76703 - DNA, 25 bp, Canis familiaris
cgggaagggcttgcttgggcaggaa

SEQ ID NO: 76704 - DNA, 25 bp, Canis familiaris
cgggaaggtttctgtgactgggagc

SEQ ID NO: 76705 - DNA, 25 bp, Canis familiaris
ctgggttggtgttcggtgacatggg

SEQ ID NO: 76706 - DNA, 25 bp, Canis familiaris
ctgggtgtcctgattgagtgtctga

SEQ ID NO: 76707 - DNA, 25 bp, Canis familiaris
ctggttgaccccatgagaccatgaa

SEQ ID NO: 76708 - DNA, 25 bp, Canis familiaris
ctggtctgacctcctagagactgag

SEQ ID NO: 76709 - DNA, 25 bp, Canis familiaris
ctggtatgccctggtacaagttgga

SEQ ID NO: 76710 - DNA, 25 bp, Canis familiaris
ctggtatgttattgagagcggttat

SEQ ID NO: 76711 - DNA, 25 bp, Canis familiaris
ctggttgttttatggaactgtggcc

SEQ ID NO: 76712 - DNA, 25 bp, Canis familiaris
cggctggtttgcgaagaagacggag

SEQ ID NO: 76713 - DNA, 25 bp, Canis familiaris
ctggcttggttggaagaaaggagca

SEQ ID NO: 76714 - DNA, 25 bp, Canis familiaris
ctggcctgggtccctgaaacaggaa

SEQ ID NO: 76715 - DNA, 25 bp, Canis familiaris
ctggctccgggtcctataaaagtag

SEQ ID NO: 76716 - DNA, 25 bp, Canis familiaris
cggtcacgaagtcatttaaaggagg

SEQ ID NO: 76717 - DNA, 25 bp, Canis familiaris
tcctggggaagtccgttaaggtgag

SEQ ID NO: 76718 - DNA, 25 bp, Canis familiaris
cgtggcgctatttccctaaagggat

SEQ ID NO: 76719 - DNA, 25 bp, Canis familiaris
cggcttcttttcctctgtaagaggt

SEQ ID NO: 76720 - DNA, 25 bp, Canis familiaris
ctggattttttgtcctgtaattggg

SEQ ID NO: 76721 - DNA, 25 bp, Canis familiaris
cggaattttattttgctgagttgtt

SEQ ID NO: 76722 - DNA, 25 bp, Canis familiaris
cggaattttattttgctgagttgtt

SEQ ID NO: 76723 - DNA, 25 bp, Canis familiaris
cggactcatttaaatgtaaggttca

SEQ ID NO: 76724 - DNA, 25 bp, Canis familiaris
cgaggccctgtaattggaatgagtc

SEQ ID NO: 76725 - DNA, 25 bp, Canis familiaris
ctggaccctctttgcaggcaaaatc

SEQ ID NO: 76726 - DNA, 25 bp, Canis familiaris
ctggagctcccttaggaaaagttct

SEQ ID NO: 76727 - DNA, 25 bp, Canis familiaris
ctggggcctctctcatgaagacaga

SEQ ID NO: 76728 - DNA, 25 bp, Canis familiaris
ctggtcaggtctttgatttgtctga

SEQ ID NO: 76729 - DNA, 25 bp, Canis familiaris
ctggtctgtcctttatatctgtcaa

SEQ ID NO: 76730 - DNA, 25 bp, Canis familiaris
ctgggtgttcctgtcactgtgacaa

SEQ ID NO: 76731 - DNA, 25 bp, Canis familiaris
ctggttcctactgtcactgtgataa

SEQ ID NO: 76732 - DNA, 25 bp, Canis familiaris
ctggtgacgtttgggacattgacaa

SEQ ID NO: 76733 - DNA, 25 bp, Canis familiaris
cgtctccgtttggtccatgaacaga

SEQ ID NO: 76734 - DNA, 25 bp, Canis familiaris
cgtcggcgtattgctttgaagaaac

SEQ ID NO: 76735 - DNA, 25 bp, Canis familiaris
cgtgcacctatttatatttttgaaa

SEQ ID NO: 76736 - DNA, 25 bp, Canis familiaris
ctggcaactttttttttgaggagct

SEQ ID NO: 76737 - DNA, 25 bp, Canis familiaris
ctggccattttgatattttctggag

SEQ ID NO: 76738 - DNA, 25 bp, Canis familiaris
ctggccgttctggtcaatgactcgg

SEQ ID NO: 76739 - DNA, 25 bp, Canis familiaris
ctggctcggaggctccagagtgggt

SEQ ID NO: 76740 - DNA, 25 bp, Canis familiaris
cgtgctcagatgtgcacctctagtg

SEQ ID NO: 76741 - DNA, 25 bp, Canis familiaris
cggccaggtcatcaccattggcaat

SEQ ID NO: 76742 - DNA, 25 bp, Canis familiaris
cggctggagaaggagcctcggccac

SEQ ID NO: 76743 - DNA, 25 bp, Canis familiaris
ccctgggggtagacctgccccagat

SEQ ID NO: 76744 - DNA, 25 bp, Canis familiaris
cgattagggtattagcctgccccag

SEQ ID NO: 76745 - DNA, 25 bp, Canis familiaris
ctggggcgtctttagcgtcaaccag

SEQ ID NO: 76746 - DNA, 25 bp, Canis familiaris
ctgggtctgctgattaggttcctga

SEQ ID NO: 76747 - DNA, 25 bp, Canis familiaris
ctgggtttgattcactggagcctgc

SEQ ID NO: 76748 - DNA, 25 bp, Canis familiaris
ctggttttgatgagcgctgagggcg

SEQ ID NO: 76749 - DNA, 25 bp, Canis familiaris
ctggttctgtttgcacagggggccg

SEQ ID NO: 76750 - DNA, 25 bp, Canis familiaris
ctggcatctgcgcttccagagtgag

SEQ ID NO: 76751 - DNA, 25 bp, Canis familiaris
ctggtcacgtgcgcgcagaatgagg

SEQ ID NO: 76752 - DNA, 25 bp, Canis familiaris
ctggacttgtgccctggagatagct

SEQ ID NO: 76753 - DNA, 25 bp, Canis familiaris
ctggttggtgcttgggcagatccta

SEQ ID NO: 76754 - DNA, 25 bp, Canis familiaris
ctggcctctgtcttaagcaattcta

SEQ ID NO: 76755 - DNA, 25 bp, Canis familiaris
cggcttctggcgagagacatctata

SEQ ID NO: 76756 - DNA, 25 bp, Canis familiaris
cggcttctggcgagagacatctata

SEQ ID NO: 76757 - DNA, 25 bp, Canis familiaris
cggcttctgactaaatacatctata

SEQ ID NO: 76758 - DNA, 25 bp, Canis familiaris
ctggctcggcatggtaaacactgga

SEQ ID NO: 76759 - DNA, 25 bp, Canis familiaris
ctggtcttgagttagaaagggtctg

SEQ ID NO: 76760 - DNA, 25 bp, Canis familiaris
cggatttggtcgtattgggcgcctg

SEQ ID NO: 76761 - DNA, 25 bp, Canis familiaris
ctggaggtggttggatcggtgggtg

SEQ ID NO: 76762 - DNA, 25 bp, Canis familiaris
ctggaggaggtcagccggtggtaga

SEQ ID NO: 76763 - DNA, 25 bp, Canis familiaris
ctgggtgatgcaggcctgcacaggt

SEQ ID NO: 76764 - DNA, 25 bp, Canis familiaris
ctgggtgtcagcggccaatggtatt

SEQ ID NO: 76765 - DNA, 25 bp, Canis familiaris
ctgggtatccgcacagtggctgtct

SEQ ID NO: 76766 - DNA, 25 bp, Canis familiaris
cggcggttcacaacgagactgtaag

SEQ ID NO: 76767 - DNA, 25 bp, Canis familiaris
cgtggttgtaccagggtgtccaggg

SEQ ID NO: 76768 - DNA, 25 bp, Canis familiaris
cggacgtaagtctcagggtccaggg

SEQ ID NO: 76769 - DNA, 25 bp, Canis familiaris
cggaagaagaggcggcggtctcggg

SEQ ID NO: 76770 - DNA, 25 bp, Canis familiaris
cggatagaccggcgtagtttctcag

SEQ ID NO: 76771 - DNA, 25 bp, Canis familiaris
ctggatcacccgcaggaatttctcc

SEQ ID NO: 76772 - DNA, 25 bp, Canis familiaris
ctggctaccaaaaggaattagatca

SEQ ID NO: 76773 - DNA, 25 bp, Canis familiaris
ctggctaccaaaagggaaaagatca

SEQ ID NO: 76774 - DNA, 25 bp, Canis familiaris
ctggcccctacacggctaaaacaga

SEQ ID NO: 76775 - DNA, 25 bp, Canis familiaris
cggcccgcttgcaggttgaagaagc

SEQ ID NO: 76776 - DNA, 25 bp, Canis familiaris
cggcagccagttaagctgtaaaacg

SEQ ID NO: 76777 - DNA, 25 bp, Canis familiaris
cggcacgccagttagctgtaaaacg

SEQ ID NO: 76778 - DNA, 25 bp, Canis familiaris
cggacggcgtgccacgctcaaaaaa

SEQ ID NO: 76779 - DNA, 25 bp, Canis familiaris
cggacgtcgcttctgctaaaataaa

SEQ ID NO: 76780 - DNA, 25 bp, Canis familiaris
cggccgtttgttcctattaattatg

SEQ ID NO: 76781 - DNA, 25 bp, Canis familiaris
ctggcctttttttcttcagagcttg

SEQ ID NO: 76782 - DNA, 25 bp, Canis familiaris
ctgggatatctttttcttctgtgca

SEQ ID NO: 76783 - DNA, 25 bp, Canis familiaris
ctgggattctttttctagggatgta

SEQ ID NO: 76784 - DNA, 25 bp, Canis familiaris
ctggtgtccttgtcttttggtgatg

SEQ ID NO: 76785 - DNA, 25 bp, Canis familiaris
ctggttcatgtttcctttgtttgtt

SEQ ID NO: 76786 - DNA, 25 bp, Canis familiaris
ctgggtattttgaagttgtgttgta

SEQ ID NO: 76787 - DNA, 25 bp, Canis familiaris
cgggtattcttgaaactctctggtt

SEQ ID NO: 76788 - DNA, 25 bp, Canis familiaris
ctggcttctatctgaagaacctgta

SEQ ID NO: 76789 - DNA, 25 bp, Canis familiaris
ctggcatgtctacagaacaagccca

SEQ ID NO: 76790 - DNA, 25 bp, Canis familiaris
ctggagttctcttaaagcagcccct

SEQ ID NO: 76791 - DNA, 25 bp, Canis familiaris
cggagtatctattagctgtgagccc

SEQ ID NO: 76792 - DNA, 25 bp, Canis familiaris
cggcatgttcctcactgataactgt

SEQ ID NO: 76793 - DNA, 25 bp, Canis familiaris
ctggcttacctcactctaagtgtag

SEQ ID NO: 76794 - DNA, 25 bp, Canis familiaris
ctggctaacctgcactcgaagtgag

SEQ ID NO: 76795 - DNA, 25 bp, Canis familiaris
ctggtcagaaagcagctgccaagtg

SEQ ID NO: 76796 - DNA, 25 bp, Canis familiaris
ctggggagaagccgtaccagtgcca

SEQ ID NO: 76797 - DNA, 25 bp, Canis familiaris
cgggaacaactgggccaaggccact

SEQ ID NO: 76798 - DNA, 25 bp, Canis familiaris
tcagggaactactcaccaaggaaag

SEQ ID NO: 76799 - DNA, 25 bp, Canis familiaris
cgggataagaagccaaaagtggatg

SEQ ID NO: 76800 - DNA, 25 bp, Canis familiaris
cggcttgaaaggacaaagaatttgg

SEQ ID NO: 76801 - DNA, 25 bp, Canis familiaris
ctggctaaaaccggaaatcatttgg

SEQ ID NO: 76802 - DNA, 25 bp, Canis familiaris
cggtgaagatccctccaagaatttg

SEQ ID NO: 76803 - DNA, 25 bp, Canis familiaris
ctggggagacccaaacagcgtattg

SEQ ID NO: 76804 - DNA, 25 bp, Canis familiaris
ctgggggccccaaaagagccagcag

SEQ ID NO: 76805 - DNA, 25 bp, Canis familiaris
ctgggggtaccaagatcggcaagcc

SEQ ID NO: 76806 - DNA, 25 bp, Canis familiaris
ctgggtggttcctgagctcagaggt

SEQ ID NO: 76807 - DNA, 25 bp, Canis familiaris
ctgggtggcttagctggttgggtgt

SEQ ID NO: 76808 - DNA, 25 bp, Canis familiaris
ctggggtctcttgctgtttggagag

SEQ ID NO: 76809 - DNA, 25 bp, Canis familiaris
ctgggggtgctaactacgtggcagg

SEQ ID NO: 76810 - DNA, 25 bp, Canis familiaris
ctggaagtgtgtgcccactgggcag

SEQ ID NO: 76811 - DNA, 25 bp, Canis familiaris
ctggcaaatctgacttccacgtgtc

SEQ ID NO: 76812 - DNA, 25 bp, Canis familiaris
ctggcaacatagactatcccacgac

SEQ ID NO: 76813 - DNA, 25 bp, Canis familiaris
ctggcagcctagatgatctccatgc

SEQ ID NO: 76814 - DNA, 25 bp, Canis familiaris
ctggccatcttcgtgatctgccagc

SEQ ID NO: 76815 - DNA, 25 bp, Canis familiaris
ctggccatgctgctctttgagcagg

SEQ ID NO: 76816 - DNA, 25 bp, Canis familiaris
ctggctgctggaggctttgacaggc

SEQ ID NO: 76817 - DNA, 25 bp, Canis familiaris
cgcgtccgaggtgtgaagaccaaca

SEQ ID NO: 76818 - DNA, 25 bp, Canis familiaris
gggaacctggtgctaaaccattcgt

SEQ ID NO: 76819 - DNA, 25 bp, Canis familiaris
ctggaaccagggcctttaccagtct

SEQ ID NO: 76820 - DNA, 25 bp, Canis familiaris
ctggacactcacaggcgttcaccag

SEQ ID NO: 76821 - DNA, 25 bp, Canis familiaris
ctggattccattcttttcaccagca

SEQ ID NO: 76822 - DNA, 25 bp, Canis familiaris
ctggtctcctgggtgttgtcaccag

SEQ ID NO: 76823 - DNA, 25 bp, Canis familiaris
cggcctctcatgactcatattgtcc

SEQ ID NO: 76824 - DNA, 25 bp, Canis familiaris
ctggcctcttgctgcatatggtgtg

SEQ ID NO: 76825 - DNA, 25 bp, Canis familiaris
cggctgcatcaactgctgcaaggtg

SEQ ID NO: 76826 - DNA, 25 bp, Canis familiaris
ctggtgatcgtggccaaggcagccc

SEQ ID NO: 76827 - DNA, 25 bp, Canis familiaris
ctggaatcggggcagaggcccggcg

SEQ ID NO: 76828 - DNA, 25 bp, Canis familiaris
ctggacttggctggccgggacctga

SEQ ID NO: 76829 - DNA, 25 bp, Canis familiaris
ctggacctggctggccgggacctga

SEQ ID NO: 76830 - DNA, 25 bp, Canis familiaris
ctggcacctagctccgggtgccagt

SEQ ID NO: 76831 - DNA, 25 bp, Canis familiaris
ctggacctagcagcccagagtctag

SEQ ID NO: 76832 - DNA, 25 bp, Canis familiaris
ctggaactccccgagaagtcttttg

SEQ ID NO: 76833 - DNA, 25 bp, Canis familiaris
ctggaagcccaccttgaattttgta

SEQ ID NO: 76834 - DNA, 25 bp, Canis familiaris
cggagcccaacgccaaattttgctc

SEQ ID NO: 76835 - DNA, 25 bp, Canis familiaris
ctggcaccgaacccagagtttctcc

SEQ ID NO: 76836 - DNA, 25 bp, Canis familiaris
cgagcccaggccagggattttgctc

SEQ ID NO: 76837 - DNA, 25 bp, Canis familiaris
ctggtccctgccagggagctttgat

SEQ ID NO: 76838 - DNA, 25 bp, Canis familiaris
ctggtgatctcgccaggtgggtttg

SEQ ID NO: 76839 - DNA, 25 bp, Canis familiaris
ctggtgactcgccaggtgggtgtgg

SEQ ID NO: 76840 - DNA, 25 bp, Canis familiaris
cggcgaggccgggatgagttgggag

SEQ ID NO: 76841 - DNA, 25 bp, Canis familiaris
ctggggccaggtccaatgtggggag

SEQ ID NO: 76842 - DNA, 25 bp, Canis familiaris
ctggtacactggtgacctggggagc

SEQ ID NO: 76843 - DNA, 25 bp, Canis familiaris
ctggtacctggtgttctgagacgag

SEQ ID NO: 76844 - DNA, 25 bp, Canis familiaris
ctggtaccgtattataccgatgcaa

SEQ ID NO: 76845 - DNA, 25 bp, Canis familiaris
cggtacctgtaagaccaagccgtat

SEQ ID NO: 76846 - DNA, 25 bp, Canis familiaris
cgcaacaccgtaacacaccaagcgg

SEQ ID NO: 76847 - DNA, 25 bp, Canis familiaris
cgagactgccggaaacccagttggg

SEQ ID NO: 76848 - DNA, 25 bp, Canis familiaris
cggacactcggttggactcaggtgg

SEQ ID NO: 76849 - DNA, 25 bp, Canis familiaris
ctggccaccaagctgggctaagtgg

SEQ ID NO: 76850 - DNA, 25 bp, Canis familiaris
ctggcccctgaatgaggcccaggtc

SEQ ID NO: 76851 - DNA, 25 bp, Canis familiaris
ctggctcaacggaggctccgggtcc

SEQ ID NO: 76852 - DNA, 25 bp, Canis familiaris
ctggtaaaggtgacccctgcaagtc

SEQ ID NO: 76853 - DNA, 25 bp, Canis familiaris
ctggtacaagcttaccttctctgtt

SEQ ID NO: 76854 - DNA, 25 bp, Canis familiaris
cgaggaaaatgatgcctcttttgct

SEQ ID NO: 76855 - DNA, 25 bp, Canis familiaris
ctggagtgtttttggccatttctgt

SEQ ID NO: 76856 - DNA, 25 bp, Canis familiaris
ctggaactattgccggtcttaatgt

SEQ ID NO: 76857 - DNA, 25 bp, Canis familiaris
ctggaagccttgtccaaattaattg

SEQ ID NO: 76858 - DNA, 25 bp, Canis familiaris
ctggaactttcacagaatcaaaatg

SEQ ID NO: 76859 - DNA, 25 bp, Canis familiaris
ctggaactgtttcctcaagcaaagg

SEQ ID NO: 76860 - DNA, 25 bp, Canis familiaris
ctggtacccaatcccaatcagaagg

SEQ ID NO: 76861 - DNA, 25 bp, Canis familiaris
ctggaacccacactcaaacgaataa

SEQ ID NO: 76862 - DNA, 25 bp, Canis familiaris
ctggatctcattgcagccaaaggat

SEQ ID NO: 76863 - DNA, 25 bp, Canis familiaris
ctggctctcagctcactaaatgtct

SEQ ID NO: 76864 - DNA, 25 bp, Canis familiaris
ctggctcagcagctgcaccagagtt

SEQ ID NO: 76865 - DNA, 25 bp, Canis familiaris
ctggcatcagccttgcttgcaaggt

SEQ ID NO: 76866 - DNA, 25 bp, Canis familiaris
ctggaccagcctctgaaggttattg

SEQ ID NO: 76867 - DNA, 25 bp, Canis familiaris
ctggactcccctaagggttgtggca

SEQ ID NO: 76868 - DNA, 25 bp, Canis familiaris
ctggcctcctttaggccttttggat

SEQ ID NO: 76869 - DNA, 25 bp, Canis familiaris
cggtccagtttcaccattttcatga

SEQ ID NO: 76870 - DNA, 25 bp, Canis familiaris
cggtccgtatccggcgacggactag

SEQ ID NO: 76871 - DNA, 25 bp, Canis familiaris
cggccggttcctgccaggagaagaa

SEQ ID NO: 76872 - DNA, 25 bp, Canis familiaris
cggcccgagtccgagtaggcaaagg

SEQ ID NO: 76873 - DNA, 25 bp, Canis familiaris
cgtcgccgtgtaccaaaaatccagg

SEQ ID NO: 76874 - DNA, 25 bp, Canis familiaris
cgtgctggggtacaagcagaccctg

SEQ ID NO: 76875 - DNA, 25 bp, Canis familiaris
cggctttggtgactctagataacct

SEQ ID NO: 76876 - DNA, 25 bp, Canis familiaris
cggatcctttggccacagataacca

SEQ ID NO: 76877 - DNA, 25 bp, Canis familiaris
cggcccaatgggaacaataggaagg

SEQ ID NO: 76878 - DNA, 25 bp, Canis familiaris
cggcccggcggtgaagatcgccgtg

SEQ ID NO: 76879 - DNA, 25 bp, Canis familiaris
cggcggcgggatgaaagatgcagtc

SEQ ID NO: 76880 - DNA, 25 bp, Canis familiaris
ctggcggggcgtgaacgttgtcaag

SEQ ID NO: 76881 - DNA, 25 bp, Canis familiaris
cgaccgggccagggacagggtagag

SEQ ID NO: 76882 - DNA, 25 bp, Canis familiaris
cgacctcggggtgaggtagtgacga

SEQ ID NO: 76883 - DNA, 25 bp, Canis familiaris
cgtccttggggatgggggcagaagg

SEQ ID NO: 76884 - DNA, 25 bp, Canis familiaris
ccctcttgagggcggggaaacaatg

SEQ ID NO: 76885 - DNA, 25 bp, Canis familiaris
ccgccctaggggtgacggaacactg

SEQ ID NO: 76886 - DNA, 25 bp, Canis familiaris
cggccgagggtgcttgagccgaacc

SEQ ID NO: 76887 - DNA, 25 bp, Canis familiaris
cggccgagggtgcttgagccgaacc

SEQ ID NO: 76888 - DNA, 25 bp, Canis familiaris
cgtcctggtggacactggacgtccc

SEQ ID NO: 76889 - DNA, 25 bp, Canis familiaris
cggcctcctggacaaggtgggccgc

SEQ ID NO: 76890 - DNA, 25 bp, Canis familiaris
ctggactccatgcaccaaggtcatg

SEQ ID NO: 76891 - DNA, 25 bp, Canis familiaris
cggcaatatcatcaccacacgcact

SEQ ID NO: 76892 - DNA, 25 bp, Canis familiaris
cgtcaatcacatcgacgtagaactc

SEQ ID NO: 76893 - DNA, 25 bp, Canis familiaris
cggcaatgcacgcacacttaatcct

SEQ ID NO: 76894 - DNA, 25 bp, Canis familiaris
ctggcatcatctgtaccattggacc

SEQ ID NO: 76895 - DNA, 25 bp, Canis familiaris
ctggccacctttgcattggagggaa

SEQ ID NO: 76896 - DNA, 25 bp, Canis familiaris
ctggctccctatgccaagggtggca

SEQ ID NO: 76897 - DNA, 25 bp, Canis familiaris
cggctccggcatgtgcaaggccggc

SEQ ID NO: 76898 - DNA, 25 bp, Canis familiaris
cggctccggcatgtgcaaggccggc

SEQ ID NO: 76899 - DNA, 25 bp, Canis familiaris
cggctccagtcaggtgcacgagaag

SEQ ID NO: 76900 - DNA, 25 bp, Canis familiaris
cggccagcatacgctcatcgtggcc

SEQ ID NO: 76901 - DNA, 25 bp, Canis familiaris
cggccagcatcacatttttcagtcc

SEQ ID NO: 76902 - DNA, 25 bp, Canis familiaris
ctggtcgccatggttttgtattcct

SEQ ID NO: 76903 - DNA, 25 bp, Canis familiaris
ctggcattgccttttttgacatttt

SEQ ID NO: 76904 - DNA, 25 bp, Canis familiaris
ctggctccactatcatttggctttt

SEQ ID NO: 76905 - DNA, 25 bp, Canis familiaris
ctggccacacttgctttgtgactta

SEQ ID NO: 76906 - DNA, 25 bp, Canis familiaris
ctggctccagtaggctaatgacact

SEQ ID NO: 76907 - DNA, 25 bp, Canis familiaris
ctggctcagcgtgtgcctaccctgc

SEQ ID NO: 76908 - DNA, 25 bp, Canis familiaris
ctggccgctgctgaactcggccagc

SEQ ID NO: 76909 - DNA, 25 bp, Canis familiaris
ctggccactgatgaaaagtgacccc

SEQ ID NO: 76910 - DNA, 25 bp, Canis familiaris
cggccattgtgccaaacagtgcttc

SEQ ID NO: 76911 - DNA, 25 bp, Canis familiaris
cggccaggagccttgagggctgttg

SEQ ID NO: 76912 - DNA, 25 bp, Canis familiaris
ctggccagaggccaaggtcagccgg

SEQ ID NO: 76913 - DNA, 25 bp, Canis familiaris
cggccaggatccaaggtgaacaaga

SEQ ID NO: 76914 - DNA, 25 bp, Canis familiaris
ctggccagagatccacgggaagccc

SEQ ID NO: 76915 - DNA, 25 bp, Canis familiaris
ctggtcagagatacctggcctggtc

SEQ ID NO: 76916 - DNA, 25 bp, Canis familiaris
cgcgtgcaaggttttcgcggcacaa

SEQ ID NO: 76917 - DNA, 25 bp, Canis familiaris
ctggtgcaggagcagttccaggccg

SEQ ID NO: 76918 - DNA, 25 bp, Canis familiaris
ctggtgtggacatgtggctcaccca

SEQ ID NO: 76919 - DNA, 25 bp, Canis familiaris
ctggcttgtgaagggcttgctccca

SEQ ID NO: 76920 - DNA, 25 bp, Canis familiaris
ctggttgctaagcagccattgccca

SEQ ID NO: 76921 - DNA, 25 bp, Canis familiaris
ctggtgcttaagcctggatagcccc

SEQ ID NO: 76922 - DNA, 25 bp, Canis familiaris
ctggtgctttagtatcgcagtcctc

SEQ ID NO: 76923 - DNA, 25 bp, Canis familiaris
ctggtcatttagtaggtgccatgcc

SEQ ID NO: 76924 - DNA, 25 bp, Canis familiaris
cggtcatttgattcgaggcctcgat

SEQ ID NO: 76925 - DNA, 25 bp, Canis familiaris
cggtatttgatgtacccgttcaaag

SEQ ID NO: 76926 - DNA, 25 bp, Canis familiaris
ctggtatcttgtcactccttgtgac

SEQ ID NO: 76927 - DNA, 25 bp, Canis familiaris
ctggccatccgtgaatccattgaga

SEQ ID NO: 76928 - DNA, 25 bp, Canis familiaris
ctggactcctgtgagtgccttgagc

SEQ ID NO: 76929 - DNA, 25 bp, Canis familiaris
ctggagccgtggggcggctctgagc

SEQ ID NO: 76930 - DNA, 25 bp, Canis familiaris
ctggagtgtttggagctgtggctgg

SEQ ID NO: 76931 - DNA, 25 bp, Canis familiaris
ctggagcgcttgaaggtcatgtgtg

SEQ ID NO: 76932 - DNA, 25 bp, Canis familiaris
ctggagagcttcaaggtcagcctgc

SEQ ID NO: 76933 - DNA, 25 bp, Canis familiaris
ctggtcagcttttgtgtcagtcaca

SEQ ID NO: 76934 - DNA, 25 bp, Canis familiaris
ctggtgctgaggtgtgtgacacaca

SEQ ID NO: 76935 - DNA, 25 bp, Canis familiaris
ctggtgctagattattgctcgccca

SEQ ID NO: 76936 - DNA, 25 bp, Canis familiaris
ctggtgaagaggttgccatgcgcaa

SEQ ID NO: 76937 - DNA, 25 bp, Canis familiaris
ctggtgcaggagcagctgctggcca

SEQ ID NO: 76938 - DNA, 25 bp, Canis familiaris
ctggcccagagctatagctggcgca

SEQ ID NO: 76939 - DNA, 25 bp, Canis familiaris
ctggctctcagttcacaatgcctca

SEQ ID NO: 76940 - DNA, 25 bp, Canis familiaris
ctggcactgctctcagaagccatcc

SEQ ID NO: 76941 - DNA, 25 bp, Canis familiaris
ctggatctgctgtttgaagcgcagc

SEQ ID NO: 76942 - DNA, 25 bp, Canis familiaris
cggcgctctggaagaagcccggaaa

SEQ ID NO: 76943 - DNA, 25 bp, Canis familiaris
ctggctgccaggtgtagcctgtgga

SEQ ID NO: 76944 - DNA, 25 bp, Canis familiaris
ctggctcctgaatgtcacggggaca

SEQ ID NO: 76945 - DNA, 25 bp, Canis familiaris
ctggtctgaggacttccggggaaga

SEQ ID NO: 76946 - DNA, 25 bp, Canis familiaris
cggatctaatgacttttggcccaac

SEQ ID NO: 76947 - DNA, 25 bp, Canis familiaris
gcggtttgaacttgcttggccggac

SEQ ID NO: 76948 - DNA, 25 bp, Canis familiaris
cggagcttacactcaattgccagga

SEQ ID NO: 76949 - DNA, 25 bp, Canis familiaris
cggactttccaatgttcgtacaact

SEQ ID NO: 76950 - DNA, 25 bp, Canis familiaris
cggccatctgctgcagaggttcgat

SEQ ID NO: 76951 - DNA, 25 bp, Canis familiaris
ctggaagctctggagatggtccctg

SEQ ID NO: 76952 - DNA, 25 bp, Canis familiaris
ctggcacctgtgcaggcctacctgc

SEQ ID NO: 76953 - DNA, 25 bp, Canis familiaris
ctggcttcatggcaggcttaccaga

SEQ ID NO: 76954 - DNA, 25 bp, Canis familiaris
ctggctgaagccaacgtatcccaaa

SEQ ID NO: 76955 - DNA, 25 bp, Canis familiaris
ctggagaatgccaacgtgctggccc

SEQ ID NO: 76956 - DNA, 25 bp, Canis familiaris
ctggagagagccaagtccaagcccg

SEQ ID NO: 76957 - DNA, 25 bp, Canis familiaris
cggaaaccatgacaaagccaggacc

SEQ ID NO: 76958 - DNA, 25 bp, Canis familiaris
ctggccaaccgtcagcagggcaaga

SEQ ID NO: 76959 - DNA, 25 bp, Canis familiaris
cggccttctcagccataaggcgcaa

SEQ ID NO: 76960 - DNA, 25 bp, Canis familiaris
ctggtctttaggggaggcacactga

SEQ ID NO: 76961 - DNA, 25 bp, Canis familiaris
ctggattttgcaattagtggatact

SEQ ID NO: 76962 - DNA, 25 bp, Canis familiaris
ctggatatatcaagactgagttgat

SEQ ID NO: 76963 - DNA, 25 bp, Canis familiaris
ctggagatccagaatctgaggatga

SEQ ID NO: 76964 - DNA, 25 bp, Canis familiaris
ctggagaccatggcttgatggacaa

SEQ ID NO: 76965 - DNA, 25 bp, Canis familiaris
ctggagaatatgagatgcttggaga

SEQ ID NO: 76966 - DNA, 25 bp, Canis familiaris
ctggaggagatgagcagccgggccc

SEQ ID NO: 76967 - DNA, 25 bp, Canis familiaris
ctggaggagatgagcagccgggccc

SEQ ID NO: 76968 - DNA, 25 bp, Canis familiaris
ctggaggagatgagcagccgggccc

SEQ ID NO: 76969 - DNA, 25 bp, Canis familiaris
cggacacaatgtccagcggagtccc

SEQ ID NO: 76970 - DNA, 25 bp, Canis familiaris
ctggaagactgtgaagtcagtcatc

SEQ ID NO: 76971 - DNA, 25 bp, Canis familiaris
ctggaagctcgtgaagtcagtcatc

SEQ ID NO: 76972 - DNA, 25 bp, Canis familiaris
ctggaagctgtgaaagtccgtcatc

SEQ ID NO: 76973 - DNA, 25 bp, Canis familiaris
ctggaggctggatttgtacgcttcc

SEQ ID NO: 76974 - DNA, 25 bp, Canis familiaris
ctggagtctggggcctaagtctgcc

SEQ ID NO: 76975 - DNA, 25 bp, Canis familiaris
ctggagatctaggccttgggctctg

SEQ ID NO: 76976 - DNA, 25 bp, Canis familiaris
ctggaaccaggcctggggccatttg

SEQ ID NO: 76977 - DNA, 25 bp, Canis familiaris
cggaaccagggtgcaaggcattcgt

SEQ ID NO: 76978 - DNA, 25 bp, Canis familiaris
cggaaccatggctccaacagttttg

SEQ ID NO: 76979 - DNA, 25 bp, Canis familiaris
ctggacaacttcgacacccagttca

SEQ ID NO: 76980 - DNA, 25 bp, Canis familiaris
ctggaaactgtggccgttggtctcc

SEQ ID NO: 76981 - DNA, 25 bp, Canis familiaris
ctggaggggaggggctggtgtccct

SEQ ID NO: 76982 - DNA, 25 bp, Canis familiaris
ctggagtgggagggttggctgcccc

SEQ ID NO: 76983 - DNA, 25 bp, Canis familiaris
ctggaggaggcggtgcactccatgc

SEQ ID NO: 76984 - DNA, 25 bp, Canis familiaris
ctggctgtacctggtcatctacagt

SEQ ID NO: 76985 - DNA, 25 bp, Canis familiaris
ctggcactcacaatcaggactaagt

SEQ ID NO: 76986 - DNA, 25 bp, Canis familiaris
ctggcattgctcatcaacctgaagg

SEQ ID NO: 76987 - DNA, 25 bp, Canis familiaris
ctggatcctcatccatgaccgaaga

SEQ ID NO: 76988 - DNA, 25 bp, Canis familiaris
ctggagccctacaacctgaaagctc

SEQ ID NO: 76989 - DNA, 25 bp, Canis familiaris
ctggacccagaaaccttacagatca

SEQ ID NO: 76990 - DNA, 25 bp, Canis familiaris
ctggccaacagacaccttgactgaa

SEQ ID NO: 76991 - DNA, 25 bp, Canis familiaris
cgaccacactggcacttgttttgaa

SEQ ID NO: 76992 - DNA, 25 bp, Canis familiaris
cgaggacacggccgtttatttatgt

SEQ ID NO: 76993 - DNA, 25 bp, Canis familiaris
cgagggccagcagggttttttctag

SEQ ID NO: 76994 - DNA, 25 bp, Canis familiaris
gcgaacccacgcagttttattcggt

SEQ ID NO: 76995 - DNA, 25 bp, Canis familiaris
cgtcacccacgcaggtgtttttcaa

SEQ ID NO: 76996 - DNA, 25 bp, Canis familiaris
ctggaccgcctcaaggtgtttgatg

SEQ ID NO: 76997 - DNA, 25 bp, Canis familiaris
ctggaccgcctcaaggtgtttgatg

SEQ ID NO: 76998 - DNA, 25 bp, Canis familiaris
ctggaccgcctcaaggtgtttgatg

SEQ ID NO: 76999 - DNA, 25 bp, Canis familiaris
cggactacctcatgaagatcctgac

SEQ ID NO: 77000 - DNA, 25 bp, Canis familiaris
cggcaagcacgcaactaaatcctga

SEQ ID NO: 77001 - DNA, 25 bp, Canis familiaris
cggcaagcacgcaactaaatcctga

SEQ ID NO: 77002 - DNA, 25 bp, Canis familiaris
cgtggatcctgaaaaaatccgacag

SEQ ID NO: 77003 - DNA, 25 bp, Canis familiaris
cgaggatgccttttacaactcccag

SEQ ID NO: 77004 - DNA, 25 bp, Canis familiaris
cgaattgcgattttcctagaccacg

SEQ ID NO: 77005 - DNA, 25 bp, Canis familiaris
cgtagccgtctctcttagagtcaag

SEQ ID NO: 77006 - DNA, 25 bp, Canis familiaris
gcgagagccgacgagtttcgagtcc

SEQ ID NO: 77007 - DNA, 25 bp, Canis familiaris
ctggatcccagccagtgtggcgagt

SEQ ID NO: 77008 - DNA, 25 bp, Canis familiaris
ctggatttgctccaggggcttttgg

SEQ ID NO: 77009 - DNA, 25 bp, Canis familiaris
ctggcttggtgccagggtcttgctg

SEQ ID NO: 77010 - DNA, 25 bp, Canis familiaris
ctggatatgttgcagtattatttga

SEQ ID NO: 77011 - DNA, 25 bp, Canis familiaris
ctggattgttgtagtttgcttagaa

SEQ ID NO: 77012 - DNA, 25 bp, Canis familiaris
ctggctctgggtacttttctaggaa

SEQ ID NO: 77013 - DNA, 25 bp, Canis familiaris
ctggactccctactatgttctagga

SEQ ID NO: 77014 - DNA, 25 bp, Canis familiaris
ctggagcccagtgtggcttctcagg

SEQ ID NO: 77015 - DNA, 25 bp, Canis familiaris
ctggatgcccagtcttgtttggtgg

SEQ ID NO: 77016 - DNA, 25 bp, Canis familiaris
ctggagggcagctgtcttgtgcagt

SEQ ID NO: 77017 - DNA, 25 bp, Canis familiaris
ctggaggagcacgagtgcctgtcgg

SEQ ID NO: 77018 - DNA, 25 bp, Canis familiaris
cggaagaccctggtgctgatcgggg

SEQ ID NO: 77019 - DNA, 25 bp, Canis familiaris
ctggccagacccagggtagggcggg

SEQ ID NO: 77020 - DNA, 25 bp, Canis familiaris
ctggcccctctcagggtaggaggat

SEQ ID NO: 77021 - DNA, 25 bp, Canis familiaris
cggcctcttctgaggggcagtggga

SEQ ID NO: 77022 - DNA, 25 bp, Canis familiaris
cggccgtctcctggagacgcagggg

SEQ ID NO: 77023 - DNA, 25 bp, Canis familiaris
ctggcctgcctgccaagagagccag

SEQ ID NO: 77024 - DNA, 25 bp, Canis familiaris
cggctctcagcggagcaggcccaac

SEQ ID NO: 77025 - DNA, 25 bp, Canis familiaris
cggcctgggcatcgagagcgcccag

SEQ ID NO: 77026 - DNA, 25 bp, Canis familiaris
cggcgatgtcgacggactcaaacgg

SEQ ID NO: 77027 - DNA, 25 bp, Canis familiaris
ctggctgaggtgaaggactacgatg

SEQ ID NO: 77028 - DNA, 25 bp, Canis familiaris
ctggcagggccaagtgagtaggaat

SEQ ID NO: 77029 - DNA, 25 bp, Canis familiaris
cggcaggcccacagctgggaatatg

SEQ ID NO: 77030 - DNA, 25 bp, Canis familiaris
ctggaggctcccttgggacaagcag

SEQ ID NO: 77031 - DNA, 25 bp, Canis familiaris
ctggttctcctctggcagacagaag

SEQ ID NO: 77032 - DNA, 25 bp, Canis familiaris
ctggcccaggtctggctggaagggt

SEQ ID NO: 77033 - DNA, 25 bp, Canis familiaris
ctggccgagggcaggctggaaggat

SEQ ID NO: 77034 - DNA, 25 bp, Canis familiaris
ctggccagggacatctgccgaagga

SEQ ID NO: 77035 - DNA, 25 bp, Canis familiaris
cgagaaggagacactgcccggagaa

SEQ ID NO: 77036 - DNA, 25 bp, Canis familiaris
cggagaaggacaatcagacggacaa

SEQ ID NO: 77037 - DNA, 25 bp, Canis familiaris
cggagccggaagccaagaagagcaa

SEQ ID NO: 77038 - DNA, 25 bp, Canis familiaris
ctggcccggaggtccaaggcagaag

SEQ ID NO: 77039 - DNA, 25 bp, Canis familiaris
ctggcggcccagggtcaaggtagga

SEQ ID NO: 77040 - DNA, 25 bp, Canis familiaris
ctggcgagccgaccggaacgaaatg

SEQ ID NO: 77041 - DNA, 25 bp, Canis familiaris
ctggaggccggcgtggagaggatca

SEQ ID NO: 77042 - DNA, 25 bp, Canis familiaris
ctggaggccggtgggagcaggcagg

SEQ ID NO: 77043 - DNA, 25 bp, Canis familiaris
ctggacgccggtccgagaacgagag

SEQ ID NO: 77044 - DNA, 25 bp, Canis familiaris
ctggacaccgtgcagcgggacaaga

SEQ ID NO: 77045 - DNA, 25 bp, Canis familiaris
cggaaccagatccgggatgcccgaa

SEQ ID NO: 77046 - DNA, 25 bp, Canis familiaris
cggcgcgccaaatgaagcacccgaa

SEQ ID NO: 77047 - DNA, 25 bp, Canis familiaris
ctggcggccatgcggaaagcggccg

SEQ ID NO: 77048 - DNA, 25 bp, Canis familiaris
ctggaggccatgtggcacacactcc

SEQ ID NO: 77049 - DNA, 25 bp, Canis familiaris
ctggacagcctgaaagcgcaagccc

SEQ ID NO: 77050 - DNA, 25 bp, Canis familiaris
ctggagcacctgcagtccaagtaca

SEQ ID NO: 77051 - DNA, 25 bp, Canis familiaris
ctggaccctggaacaacatgctgaa

SEQ ID NO: 77052 - DNA, 25 bp, Canis familiaris
ctggaaccgagacaacatcgcctgc

SEQ ID NO: 77053 - DNA, 25 bp, Canis familiaris
cggaacacaggaaacgacggcatgg

SEQ ID NO: 77054 - DNA, 25 bp, Canis familiaris
ctggacaacagggagaatgcaagga

SEQ ID NO: 77055 - DNA, 25 bp, Canis familiaris
ctggaaacagctcatcgatccggca

SEQ ID NO: 77056 - DNA, 25 bp, Canis familiaris
cggttggctaactcagcaaggcagt

SEQ ID NO: 77057 - DNA, 25 bp, Canis familiaris
cggattgtgtacgaccccagaagtc

SEQ ID NO: 77058 - DNA, 25 bp, Canis familiaris
cggtaagttccagctccaatagcgt

SEQ ID NO: 77059 - DNA, 25 bp, Canis familiaris
cggaaatggtttcccgcagaacctg

SEQ ID NO: 77060 - DNA, 25 bp, Canis familiaris
cggtgacggggtcacccacactgtg

SEQ ID NO: 77061 - DNA, 25 bp, Canis familiaris
cggctgacgtggcggtcatgaacca

SEQ ID NO: 77062 - DNA, 25 bp, Canis familiaris
ctggcttcgtggaggatgctggacc

SEQ ID NO: 77063 - DNA, 25 bp, Canis familiaris
cggcttcgggatggactggctgccg

SEQ ID NO: 77064 - DNA, 25 bp, Canis familiaris
cggcgtggggaaactggcagacagt

SEQ ID NO: 77065 - DNA, 25 bp, Canis familiaris
ccggaggagggaattgaaattgtga

SEQ ID NO: 77066 - DNA, 25 bp, Canis familiaris
ctggctggggggatgtaatattgca

SEQ ID NO: 77067 - DNA, 25 bp, Canis familiaris
ctggctgggggtagacttaataaag

SEQ ID NO: 77068 - DNA, 25 bp, Canis familiaris
ctggatgagcggctctactgcgaga

SEQ ID NO: 77069 - DNA, 25 bp, Canis familiaris
ctggcagagcaggaaccctcttgca

SEQ ID NO: 77070 - DNA, 25 bp, Canis familiaris
ctggagagagcaaaacttctgtccc

SEQ ID NO: 77071 - DNA, 25 bp, Canis familiaris
cggacatgagctacagacccgtccc

SEQ ID NO: 77072 - DNA, 25 bp, Canis familiaris
cggatcatgatgccaacctcttacg

SEQ ID NO: 77073 - DNA, 25 bp, Canis familiaris
ctggcgcgatggaacccagccaggt

SEQ ID NO: 77074 - DNA, 25 bp, Canis familiaris
ctggcccagaaacccagccaggatg

SEQ ID NO: 77075 - DNA, 25 bp, Canis familiaris
ctggcttccagatccaggccaggac

SEQ ID NO: 77076 - DNA, 25 bp, Canis familiaris
cggcattcaagctccaaggctgtga

SEQ ID NO: 77077 - DNA, 25 bp, Canis familiaris
cggcattaatccgtttatgtgatgt

SEQ ID NO: 77078 - DNA, 25 bp, Canis familiaris
cgctttcaaacgatttttgttccat

SEQ ID NO: 77079 - DNA, 25 bp, Canis familiaris
cgctttgaaaagaaatttgtccttg

SEQ ID NO: 77080 - DNA, 25 bp, Canis familiaris
ggccttgaaaaagatttggccctgg

SEQ ID NO: 77081 - DNA, 25 bp, Canis familiaris
gagcttttaaaatattaggtcacat

SEQ ID NO: 77082 - DNA, 25 bp, Canis familiaris
cgcttttataacattcatcgaacct

SEQ ID NO: 77083 - DNA, 25 bp, Canis familiaris
cggttttggataagtcccagagccg

SEQ ID NO: 77084 - DNA, 25 bp, Canis familiaris
cggttcattggtccaagcccagagg

SEQ ID NO: 77085 - DNA, 25 bp, Canis familiaris
cggattcccatttcaacaccaggaa

SEQ ID NO: 77086 - DNA, 25 bp, Canis familiaris
ctggctacctcacttcgaaagggga

SEQ ID NO: 77087 - DNA, 25 bp, Canis familiaris
cggctacccacaatccaaaggaagg

SEQ ID NO: 77088 - DNA, 25 bp, Canis familiaris
cggctagccctaggccaatgaggga

SEQ ID NO: 77089 - DNA, 25 bp, Canis familiaris
cggtatcggccaggatcgtggggag

SEQ ID NO: 77090 - DNA, 25 bp, Canis familiaris
cggatacatggctcgtttagtaatg

SEQ ID NO: 77091 - DNA, 25 bp, Canis familiaris
ctggcaactcggacgtgtatgaaaa

SEQ ID NO: 77092 - DNA, 25 bp, Canis familiaris
ctggcaactccgacgtgtatgagaa

SEQ ID NO: 77093 - DNA, 25 bp, Canis familiaris
cggcaccagaagccctttgatgcaa

SEQ ID NO: 77094 - DNA, 25 bp, Canis familiaris
cggcctcgggaactgtcgtgaaata

SEQ ID NO: 77095 - DNA, 25 bp, Canis familiaris
ccgtccaaggtatttcggtgactga

SEQ ID NO: 77096 - DNA, 25 bp, Canis familiaris
cctgtaatctcgtaattcgggaccg

SEQ ID NO: 77097 - DNA, 25 bp, Canis familiaris
cgattgaatacctgatttgggcccc

SEQ ID NO: 77098 - DNA, 25 bp, Canis familiaris
gctacggaatactgtttgggcccaa

SEQ ID NO: 77099 - DNA, 25 bp, Canis familiaris
ccctggttactgagttctggcccag

SEQ ID NO: 77100 - DNA, 25 bp, Canis familiaris
ccgggttatctgattccactcccga

SEQ ID NO: 77101 - DNA, 25 bp, Canis familiaris
ctggaggtttgtatctccattcccc

SEQ ID NO: 77102 - DNA, 25 bp, Canis familiaris
ctggaagatttgatgcccacggccc

SEQ ID NO: 77103 - DNA, 25 bp, Canis familiaris
ctggaattttgcagctatccccatc

SEQ ID NO: 77104 - DNA, 25 bp, Canis familiaris
ctggagaggggcaaccagccccatc

SEQ ID NO: 77105 - DNA, 25 bp, Canis familiaris
ctggcgtgcaaactcaggacccgcc

SEQ ID NO: 77106 - DNA, 25 bp, Canis familiaris
cggttgcaaactgctgaccacgccg

SEQ ID NO: 77107 - DNA, 25 bp, Canis familiaris
cggttgaattggtcgatccacggtc

SEQ ID NO: 77108 - DNA, 25 bp, Canis familiaris
cggttgaagtgtggttccggtcctg

SEQ ID NO: 77109 - DNA, 25 bp, Canis familiaris
cggtcagaagggatcctgggtcaag

SEQ ID NO: 77110 - DNA, 25 bp, Canis familiaris
cggccagaagcttttcgttggtgca

SEQ ID NO: 77111 - DNA, 25 bp, Canis familiaris
cggttaagcatgtgcttttggctca

SEQ ID NO: 77112 - DNA, 25 bp, Canis familiaris
ctggcccataattagtgttgtgcac

SEQ ID NO: 77113 - DNA, 25 bp, Canis familiaris
ctggctcctgactatgatgctttgg

SEQ ID NO: 77114 - DNA, 25 bp, Canis familiaris
ctggctgcctgttagttgatgggtt

SEQ ID NO: 77115 - DNA, 25 bp, Canis familiaris
ctggctgatgctgaggctttgtcct

SEQ ID NO: 77116 - DNA, 25 bp, Canis familiaris
ctggctgttctttgctttgtccagg

SEQ ID NO: 77117 - DNA, 25 bp, Canis familiaris
ctggctttgcattggcatcgtgggg

SEQ ID NO: 77118 - DNA, 25 bp, Canis familiaris
ctggccggactggattctggggccg

SEQ ID NO: 77119 - DNA, 25 bp, Canis familiaris
ctggcctggacctcagtgggaggcg

SEQ ID NO: 77120 - DNA, 25 bp, Canis familiaris
cggcccgacatcacgtggatgaagg

SEQ ID NO: 77121 - DNA, 25 bp, Canis familiaris
cggcccagacgaccgggtcgagagg

SEQ ID NO: 77122 - DNA, 25 bp, Canis familiaris
ctggcccagtttcctgggaaaagag

SEQ ID NO: 77123 - DNA, 25 bp, Canis familiaris
ctggccttgtttctggctcagaagc

SEQ ID NO: 77124 - DNA, 25 bp, Canis familiaris
ctggacgtatttatggctccacctc

SEQ ID NO: 77125 - DNA, 25 bp, Canis familiaris
ctggaggttctgttagacccacttc

SEQ ID NO: 77126 - DNA, 25 bp, Canis familiaris
ctggagtgctcagcctgagacccag

SEQ ID NO: 77127 - DNA, 25 bp, Canis familiaris
ctggagagcctccaggaacccagag

SEQ ID NO: 77128 - DNA, 25 bp, Canis familiaris
cggaaccatcctaaatttagtggag

SEQ ID NO: 77129 - DNA, 25 bp, Canis familiaris
cggataccctctaagcacattaagg

SEQ ID NO: 77130 - DNA, 25 bp, Canis familiaris
cggaatcccctttgcaagtggtgat

SEQ ID NO: 77131 - DNA, 25 bp, Canis familiaris
ctggacagctccagtggctagtggg

SEQ ID NO: 77132 - DNA, 25 bp, Canis familiaris
ctggaagtcacttgctttgctgtgg

SEQ ID NO: 77133 - DNA, 25 bp, Canis familiaris
ctggcaagtggatgtcttcgtgaca

SEQ ID NO: 77134 - DNA, 25 bp, Canis familiaris
ctggccgtggagttcttggagagcg

SEQ ID NO: 77135 - DNA, 25 bp, Canis familiaris
ctggactctgatggtgtcttccaag

SEQ ID NO: 77136 - DNA, 25 bp, Canis familiaris
ctggagtcagacctgatccagccgg

SEQ ID NO: 77137 - DNA, 25 bp, Canis familiaris
ctggagatcgatagcagcatcccca

SEQ ID NO: 77138 - DNA, 25 bp, Canis familiaris
ctggaaggtgagccagctctcagcc

SEQ ID NO: 77139 - DNA, 25 bp, Canis familiaris
cggcaagtgggcgagctgtgccagc

SEQ ID NO: 77140 - DNA, 25 bp, Canis familiaris
ctggccactggaggagcttctacag

SEQ ID NO: 77141 - DNA, 25 bp, Canis familiaris
cgtgtacgtggagtctataaagcag

SEQ ID NO: 77142 - DNA, 25 bp, Canis familiaris
cggaactgaggccatgattaagagg

SEQ ID NO: 77143 - DNA, 25 bp, Canis familiaris
cggccacaagagccagactcggagc

SEQ ID NO: 77144 - DNA, 25 bp, Canis familiaris
cgggaaaggagccagctcgcaagtt

SEQ ID NO: 77145 - DNA, 25 bp, Canis familiaris
cggagaacgtggcgtccacgacttt

SEQ ID NO: 77146 - DNA, 25 bp, Canis familiaris
cggaacactgggctgcattccgagc

SEQ ID NO: 77147 - DNA, 25 bp, Canis familiaris
ctggaaagggtgaatgtttgccctg

SEQ ID NO: 77148 - DNA, 25 bp, Canis familiaris
cggaccagagcgaaagcatttgcca

SEQ ID NO: 77149 - DNA, 25 bp, Canis familiaris
ctggcacagccaggacaacttccaa

SEQ ID NO: 77150 - DNA, 25 bp, Canis familiaris
ctggacagcacagacttcaccagca

SEQ ID NO: 77151 - DNA, 25 bp, Canis familiaris
ctggaccatcaggccgtaaacttca

SEQ ID NO: 77152 - DNA, 25 bp, Canis familiaris
cggaggcaccctggaaaactctcca

SEQ ID NO: 77153 - DNA, 25 bp, Canis familiaris
cgggtccctgctggaggactttaag

SEQ ID NO: 77154 - DNA, 25 bp, Canis familiaris
cggttgcaccagagcggacttgtaa

SEQ ID NO: 77155 - DNA, 25 bp, Canis familiaris
cggcctggccagaggccaaggtcag

SEQ ID NO: 77156 - DNA, 25 bp, Canis familiaris
cggactcccggggtcagatgacacg

SEQ ID NO: 77157 - DNA, 25 bp, Canis familiaris
cggcctgcccatcatgggctggaac

SEQ ID NO: 77158 - DNA, 25 bp, Canis familiaris
ctggccgctacaacagacgtggaca

SEQ ID NO: 77159 - DNA, 25 bp, Canis familiaris
cggtcccatcaatgacggatgccgg

SEQ ID NO: 77160 - DNA, 25 bp, Canis familiaris
cggctcctgcatgaagaccgtggcc

SEQ ID NO: 77161 - DNA, 25 bp, Canis familiaris
cggtcactcaaaaggtgaagaccca

SEQ ID NO: 77162 - DNA, 25 bp, Canis familiaris
cgcgaactaagttggaaatcaccag

SEQ ID NO: 77163 - DNA, 25 bp, Canis familiaris
ctggaagcacgagtgggagaagcac

SEQ ID NO: 77164 - DNA, 25 bp, Canis familiaris
ctggcagagaaactggggggcagtg

SEQ ID NO: 77165 - DNA, 25 bp, Canis familiaris
ctggagagccagctgacccaggagg

SEQ ID NO: 77166 - DNA, 25 bp, Canis familiaris
ctggagaaacctgccaagtatgatg

SEQ ID NO: 77167 - DNA, 25 bp, Canis familiaris
cggcgcaagacggaccagagcgaaa

SEQ ID NO: 77168 - DNA, 25 bp, Canis familiaris
ctggagcgagactgagccagcacgg

SEQ ID NO: 77169 - DNA, 25 bp, Canis familiaris
ctggacagagaggaggccccagggc

SEQ ID NO: 77170 - DNA, 25 bp, Canis familiaris
cggaaaggcgaggcacctttggccg

SEQ ID NO: 77171 - DNA, 25 bp, Canis familiaris
ctggaacagggagggatacctggcc

SEQ ID NO: 77172 - DNA, 25 bp, Canis familiaris
ctggagcagaggcaggtgttcccca

SEQ ID NO: 77173 - DNA, 25 bp, Canis familiaris
cgaggtggagggcttctttgccaca

SEQ ID NO: 77174 - DNA, 25 bp, Canis familiaris
ctggcgatgcggcggcgttattccc

SEQ ID NO: 77175 - DNA, 25 bp, Canis familiaris
cgtgcgtgcacagagctgggtatcc

SEQ ID NO: 77176 - DNA, 25 bp, Canis familiaris
ctggactgaagctgtgaggaaccct

SEQ ID NO: 77177 - DNA, 25 bp, Canis familiaris
cgggggacagtgtggaactcttcat

SEQ ID NO: 77178 - DNA, 25 bp, Canis familiaris
cgggggacagcgtgaacagctacgg

SEQ ID NO: 77179 - DNA, 25 bp, Canis familiaris
cgcggagcccgagggcgaagtaccg

SEQ ID NO: 77180 - DNA, 25 bp, Canis familiaris
cggcctgcaccgtcggaaagtgagt

SEQ ID NO: 77181 - DNA, 25 bp, Canis familiaris
cggcccccggcagaagagggtgagc

SEQ ID NO: 77182 - DNA, 25 bp, Canis familiaris
ctggccccactgcagtaaacaggca

SEQ ID NO: 77183 - DNA, 25 bp, Canis familiaris
ctggccacaactgagacacagcaca

SEQ ID NO: 77184 - DNA, 25 bp, Canis familiaris
ctggcgcacgactggcacaaatata

SEQ ID NO: 77185 - DNA, 25 bp, Canis familiaris
ctggctggcgcagtcagtacaacat

SEQ ID NO: 77186 - DNA, 25 bp, Canis familiaris
cggctggctgagctgtgtcaagctg

SEQ ID NO: 77187 - DNA, 25 bp, Canis familiaris
cggcctgtcaagtctgtcaagatgg

SEQ ID NO: 77188 - DNA, 25 bp, Canis familiaris
ctggcaagtacgtgtgcaacggcac

SEQ ID NO: 77189 - DNA, 25 bp, Canis familiaris
ctggcaggtccaggcggaagggagc

SEQ ID NO: 77190 - DNA, 25 bp, Canis familiaris
ctggcacgtcctccgaggaggtggc

SEQ ID NO: 77191 - DNA, 25 bp, Canis familiaris
ctggactgtgccctgaagaggcggg

SEQ ID NO: 77192 - DNA, 25 bp, Canis familiaris
ctggactgtgccctgaagaggcggg

SEQ ID NO: 77193 - DNA, 25 bp, Canis familiaris
ctggacctgccggtgaacgaggcga

SEQ ID NO: 77194 - DNA, 25 bp, Canis familiaris
ctggactctggcggtgtaagggaca

SEQ ID NO: 77195 - DNA, 25 bp, Canis familiaris
cggaatctgtcggtgtgtgacggca

SEQ ID NO: 77196 - DNA, 25 bp, Canis familiaris
ctggccctgtcggtggtgagccaga

SEQ ID NO: 77197 - DNA, 25 bp, Canis familiaris
ctggcaggcctgggcttgggcctga

SEQ ID NO: 77198 - DNA, 25 bp, Canis familiaris
ctggcaggcccaagaggatgtccgt

SEQ ID NO: 77199 - DNA, 25 bp, Canis familiaris
ctggctagcccaaaggaggatctgt

SEQ ID NO: 77200 - DNA, 25 bp, Canis familiaris
ctggcttccaacagggagtctgctg

SEQ ID NO: 77201 - DNA, 25 bp, Canis familiaris
ctggcctctcagatgggggttctgt

SEQ ID NO: 77202 - DNA, 25 bp, Canis familiaris
ctggcctctcagctgggaggggatt

SEQ ID NO: 77203 - DNA, 25 bp, Canis familiaris
ctggctgccgagctggaggtggaga

SEQ ID NO: 77204 - DNA, 25 bp, Canis familiaris
ctggccaggcagtggtgctggtggt

SEQ ID NO: 77205 - DNA, 25 bp, Canis familiaris
ctggcacaggttggcgtaggtgttg

SEQ ID NO: 77206 - DNA, 25 bp, Canis familiaris
cggccgtgctggccgtaggtttgcc

SEQ ID NO: 77207 - DNA, 25 bp, Canis familiaris
cggctcgctgctcagagatagctat

SEQ ID NO: 77208 - DNA, 25 bp, Canis familiaris
cggccactgctgcagaggacgatga

SEQ ID NO: 77209 - DNA, 25 bp, Canis familiaris
cggcctcatgctcaagctgaagtgg

SEQ ID NO: 77210 - DNA, 25 bp, Canis familiaris
ctggcgcccttgagctgagtgggca

SEQ ID NO: 77211 - DNA, 25 bp, Canis familiaris
ctggcccgtggcaagtgggggcagg

SEQ ID NO: 77212 - DNA, 25 bp, Canis familiaris
cggctccggaggatggggaggtgta

SEQ ID NO: 77213 - DNA, 25 bp, Canis familiaris
cggtccgggcgtctgtaaagtagat

SEQ ID NO: 77214 - DNA, 25 bp, Canis familiaris
cgggcttagggtgtgctaggttcaa

SEQ ID NO: 77215 - DNA, 25 bp, Canis familiaris
cggacttcgacggagttcaggtgtc

SEQ ID NO: 77216 - DNA, 25 bp, Canis familiaris
cgggtacatcaccgggtcagttggg

SEQ ID NO: 77217 - DNA, 25 bp, Canis familiaris
cgccggacaggctggcggtgttggg

SEQ ID NO: 77218 - DNA, 25 bp, Canis familiaris
cccggaaggacagcagcttctcgga

SEQ ID NO: 77219 - DNA, 25 bp, Canis familiaris
cgccggagacgagccgagcaccggc

SEQ ID NO: 77220 - DNA, 25 bp, Canis familiaris
ctggcaggagaggagcacccagccc

SEQ ID NO: 77221 - DNA, 25 bp, Canis familiaris
ctggcgggacatagcagggagcccc

SEQ ID NO: 77222 - DNA, 25 bp, Canis familiaris
ctggctgttgttgcaatggaccaca

SEQ ID NO: 77223 - DNA, 25 bp, Canis familiaris
cggcatgttgtccacagtgtgtcca

SEQ ID NO: 77224 - DNA, 25 bp, Canis familiaris
ctggcattgttgctgattctgttcc

SEQ ID NO: 77225 - DNA, 25 bp, Canis familiaris
ctggcatcgacatgtctgcctttgc

SEQ ID NO: 77226 - DNA, 25 bp, Canis familiaris
ctggcagagatgtgtctggcatcag

SEQ ID NO: 77227 - DNA, 25 bp, Canis familiaris
ctggcagccagcagctgctgtgcac

SEQ ID NO: 77228 - DNA, 25 bp, Canis familiaris
ctggcagaagctggcctgtctgctc

SEQ ID NO: 77229 - DNA, 25 bp, Canis familiaris
ctggcgaggaagtctctctgcacag

SEQ ID NO: 77230 - DNA, 25 bp, Canis familiaris
ctggaaggaatactactggcatcta

SEQ ID NO: 77231 - DNA, 25 bp, Canis familiaris
ctggaagagtattctgaggccctac

SEQ ID NO: 77232 - DNA, 25 bp, Canis familiaris
cggaaagtttcgaagccgtgcccag

SEQ ID NO: 77233 - DNA, 25 bp, Canis familiaris
cgggtagatggtgagagccgtcccc

SEQ ID NO: 77234 - DNA, 25 bp, Canis familiaris
cggagttctagagtgaagccccctc

SEQ ID NO: 77235 - DNA, 25 bp, Canis familiaris
cggatgttcatattggtagccgaaa

SEQ ID NO: 77236 - DNA, 25 bp, Canis familiaris
cggagatgtctaggggcaccatgaa

SEQ ID NO: 77237 - DNA, 25 bp, Canis familiaris
ctggaattctcaaggctgggaaact

SEQ ID NO: 77238 - DNA, 25 bp, Canis familiaris
ctggcattctctaagcagctggtat

SEQ ID NO: 77239 - DNA, 25 bp, Canis familiaris
ctggcattgccgacaggatgcagaa

SEQ ID NO: 77240 - DNA, 25 bp, Canis familiaris
ctggctctgctccagttcagcagaa

SEQ ID NO: 77241 - DNA, 25 bp, Canis familiaris
ctggcctccgagagccaggatcttc

SEQ ID NO: 77242 - DNA, 25 bp, Canis familiaris
ctggcctacgagaagcgcgtgagcg

SEQ ID NO: 77243 - DNA, 25 bp, Canis familiaris
cggcctggatcgacggcgtgatggc

SEQ ID NO: 77244 - DNA, 25 bp, Canis familiaris
cggcctgtgactttgtcggcaggac

SEQ ID NO: 77245 - DNA, 25 bp, Canis familiaris
cggccaggcccagtagggcagagac

SEQ ID NO: 77246 - DNA, 25 bp, Canis familiaris
cggcgggaccagaagtggcatgata

SEQ ID NO: 77247 - DNA, 25 bp, Canis familiaris
cggctgggaccagttatgtggcatg

SEQ ID NO: 77248 - DNA, 25 bp, Canis familiaris
cggcccatcagcgagttcagggtgt

SEQ ID NO: 77249 - DNA, 25 bp, Canis familiaris
ctggctgcccaggaggtcatgaagg

SEQ ID NO: 77250 - DNA, 25 bp, Canis familiaris
ctggcacaccagggctgtagcaagc

SEQ ID NO: 77251 - DNA, 25 bp, Canis familiaris
ctggctgcaccgggcagtagtgcac

SEQ ID NO: 77252 - DNA, 25 bp, Canis familiaris
ctggctgcaggcgggtgtggtcagc

SEQ ID NO: 77253 - DNA, 25 bp, Canis familiaris
ctggctcaggcaaggtggttgtgaa

SEQ ID NO: 77254 - DNA, 25 bp, Canis familiaris
ctggcttccaggggcaatctgatca

SEQ ID NO: 77255 - DNA, 25 bp, Canis familiaris
ctggcttcaaatcctgacttgccac

SEQ ID NO: 77256 - DNA, 25 bp, Canis familiaris
ctggcctgtaattctcaatcagcct

SEQ ID NO: 77257 - DNA, 25 bp, Canis familiaris
ctggcctgcaatacttgtatagaat

SEQ ID NO: 77258 - DNA, 25 bp, Canis familiaris
cggaccgagatgccttatcacaatc

SEQ ID NO: 77259 - DNA, 25 bp, Canis familiaris
ctggcaccgtgccagcttgtgcaaa

SEQ ID NO: 77260 - DNA, 25 bp, Canis familiaris
ctggcaaatggctagcctcatgaaa

SEQ ID NO: 77261 - DNA, 25 bp, Canis familiaris
ctggccagtatgcacgctgcagaaa

SEQ ID NO: 77262 - DNA, 25 bp, Canis familiaris
ctggcctgttgtccgagaggacacc

SEQ ID NO: 77263 - DNA, 25 bp, Canis familiaris
cggcctgttgaacgaggagcagccc

SEQ ID NO: 77264 - DNA, 25 bp, Canis familiaris
cggctcaggtactgcagcaaggtgc

SEQ ID NO: 77265 - DNA, 25 bp, Canis familiaris
ctggccgaggacatcatgcggcttc

SEQ ID NO: 77266 - DNA, 25 bp, Canis familiaris
ctggcatggagggttcctggatgtt

SEQ ID NO: 77267 - DNA, 25 bp, Canis familiaris
cggagaaggaatgcctccgttcccg

SEQ ID NO: 77268 - DNA, 25 bp, Canis familiaris
cgggaagaaagcgccgagtcgccac

SEQ ID NO: 77269 - DNA, 25 bp, Canis familiaris
cggaacgaagaggaccaggccagcc

SEQ ID NO: 77270 - DNA, 25 bp, Canis familiaris
cggacaccgagagagccatgagacc

SEQ ID NO: 77271 - DNA, 25 bp, Canis familiaris
cggtacactgagtgatgcctggcct

SEQ ID NO: 77272 - DNA, 25 bp, Canis familiaris
cggctcaaccagtggtggacttttt

SEQ ID NO: 77273 - DNA, 25 bp, Canis familiaris
ctggcctaccaatgtggggccattg

SEQ ID NO: 77274 - DNA, 25 bp, Canis familiaris
ctggcctggcaggaagatggggcga

SEQ ID NO: 77275 - DNA, 25 bp, Canis familiaris
ctggccagcacggacgagaagcgag

SEQ ID NO: 77276 - DNA, 25 bp, Canis familiaris
ctggccgccatggagaagaagacag

SEQ ID NO: 77277 - DNA, 25 bp, Canis familiaris
ctggccccagcaaggatgaagatca

SEQ ID NO: 77278 - DNA, 25 bp, Canis familiaris
ctggcacccagcacaatgaagatca

SEQ ID NO: 77279 - DNA, 25 bp, Canis familiaris
cggccgcgatctcaacaagagcatc

SEQ ID NO: 77280 - DNA, 25 bp, Canis familiaris
ctggccttgtgtcacacacagcagt

SEQ ID NO: 77281 - DNA, 25 bp, Canis familiaris
ctggccatttgcaaccatacggatg

SEQ ID NO: 77282 - DNA, 25 bp, Canis familiaris
ctggcacatgggaacctctcagtaa

SEQ ID NO: 77283 - DNA, 25 bp, Canis familiaris
ctggcacgtaataggcgctcaataa

SEQ ID NO: 77284 - DNA, 25 bp, Canis familiaris
ctggcttgtgaatccgctcaataaa

SEQ ID NO: 77285 - DNA, 25 bp, Canis familiaris
ctggctgtcgaatccatgctctatg

SEQ ID NO: 77286 - DNA, 25 bp, Canis familiaris
ctggcattagcatccgtgcttatgg

SEQ ID NO: 77287 - DNA, 25 bp, Canis familiaris
ctggcactcacatcctgtgcattaa

SEQ ID NO: 77288 - DNA, 25 bp, Canis familiaris
ctggcctctacatctgcatgaataa

SEQ ID NO: 77289 - DNA, 25 bp, Canis familiaris
ctggctcctcacagagcaggacagg

SEQ ID NO: 77290 - DNA, 25 bp, Canis familiaris
ctggccctcaaggagctgggctgga

SEQ ID NO: 77291 - DNA, 25 bp, Canis familiaris
ctggcgcacccagggggagaggaat

SEQ ID NO: 77292 - DNA, 25 bp, Canis familiaris
cggccccaagggacagggtcatcat

SEQ ID NO: 77293 - DNA, 25 bp, Canis familiaris
cggccccactgggtcaagggcaaca

SEQ ID NO: 77294 - DNA, 25 bp, Canis familiaris
cggcccctctgggaagatgtggcgt

SEQ ID NO: 77295 - DNA, 25 bp, Canis familiaris
cgggcccattagggggtgcagctat

SEQ ID NO: 77296 - DNA, 25 bp, Canis familiaris
cggctcccctaggaggtgtgacatc

SEQ ID NO: 77297 - DNA, 25 bp, Canis familiaris
cggcacccctgtggatgagttggac

SEQ ID NO: 77298 - DNA, 25 bp, Canis familiaris
cggccctccagtcatgttggggcaa

SEQ ID NO: 77299 - DNA, 25 bp, Canis familiaris
cggccttccttctgttgaaggccca

SEQ ID NO: 77300 - DNA, 25 bp, Canis familiaris
cggcctgtcttttgggtgcttggcc

SEQ ID NO: 77301 - DNA, 25 bp, Canis familiaris
cgtgacgtcgtgaggagcgctttaa

SEQ ID NO: 77302 - DNA, 25 bp, Canis familiaris
cggtcagcggttttgatcgttttca

SEQ ID NO: 77303 - DNA, 25 bp, Canis familiaris
cggagcaaagttcgatcacgttttc

SEQ ID NO: 77304 - DNA, 25 bp, Canis familiaris
cggagaaatgcccagtacactttat

SEQ ID NO: 77305 - DNA, 25 bp, Canis familiaris
cggtaacgtctgtctagcatttaat

SEQ ID NO: 77306 - DNA, 25 bp, Canis familiaris
cgtgtgaacttttccagaacctatt

SEQ ID NO: 77307 - DNA, 25 bp, Canis familiaris
cgggaactggctccaagaacgttct

SEQ ID NO: 77308 - DNA, 25 bp, Canis familiaris
gcgggaactggctccaagaacgttc

SEQ ID NO: 77309 - DNA, 25 bp, Canis familiaris
cgggaagcttgtcatcaatggaaat

SEQ ID NO: 77310 - DNA, 25 bp, Canis familiaris
cgggaagcctgtgatgacttcaagc

SEQ ID NO: 77311 - DNA, 25 bp, Canis familiaris
ctggcagaaggctgaatattccaat

SEQ ID NO: 77312 - DNA, 25 bp, Canis familiaris
cgtgtaaggattgttcccaatacta

SEQ ID NO: 77313 - DNA, 25 bp, Canis familiaris
cggaagaagttcctgtcctatctga

SEQ ID NO: 77314 - DNA, 25 bp, Canis familiaris
ctggccaaagtctgtgccaaccgca

SEQ ID NO: 77315 - DNA, 25 bp, Canis familiaris
cggcactcgtgttggaccaaccaga

SEQ ID NO: 77316 - DNA, 25 bp, Canis familiaris
cggcactggagaaggcgccatactc

SEQ ID NO: 77317 - DNA, 25 bp, Canis familiaris
cggcatcgtggagggcctcatgacc

SEQ ID NO: 77318 - DNA, 25 bp, Canis familiaris
cgtgtcagtggtggacctgacctgc

SEQ ID NO: 77319 - DNA, 25 bp, Canis familiaris
cggagcggggaaactgatgtctgcc

SEQ ID NO: 77320 - DNA, 25 bp, Canis familiaris
cggaggcgggcaacctggaggcccg

SEQ ID NO: 77321 - DNA, 25 bp, Canis familiaris
cggagggggaggtcgcgaaagctcg

SEQ ID NO: 77322 - DNA, 25 bp, Canis familiaris
cgagtcaggggctcgcacgaaagcc

SEQ ID NO: 77323 - DNA, 25 bp, Canis familiaris
cggcttggagaggggccgctaacct

SEQ ID NO: 77324 - DNA, 25 bp, Canis familiaris
cgaccttggactgttcgtaacctgc

SEQ ID NO: 77325 - DNA, 25 bp, Canis familiaris
cgaacgggcaagtgttggacaccgg

SEQ ID NO: 77326 - DNA, 25 bp, Canis familiaris
cggatcgtgcgaacgggtggaccag

SEQ ID NO: 77327 - DNA, 25 bp, Canis familiaris
cggaccggaatgccagggttccagg

SEQ ID NO: 77328 - DNA, 25 bp, Canis familiaris
cggcccggcagaggcaggcgggccc

SEQ ID NO: 77329 - DNA, 25 bp, Canis familiaris
cggaccaggaaggcatgaccgccgc

SEQ ID NO: 77330 - DNA, 25 bp, Canis familiaris
cggagtcggaagatgaaggccagtt

SEQ ID NO: 77331 - DNA, 25 bp, Canis familiaris
cggaatgctgggatcgaggctcagg

SEQ ID NO: 77332 - DNA, 25 bp, Canis familiaris
cggatctgtcgtgacagacctctcg

SEQ ID NO: 77333 - DNA, 25 bp, Canis familiaris
cggcatcatctcgggatcaagccct

SEQ ID NO: 77334 - DNA, 25 bp, Canis familiaris
cggacatgtcatggtgaatggccct

SEQ ID NO: 77335 - DNA, 25 bp, Canis familiaris
cggcctgcatgaggatgacgagacc

SEQ ID NO: 77336 - DNA, 25 bp, Canis familiaris
cggcctgcatgaggatgacgagacc

SEQ ID NO: 77337 - DNA, 25 bp, Canis familiaris
ctggctgctgagctgaaccaactgc

SEQ ID NO: 77338 - DNA, 25 bp, Canis familiaris
ctggctgtggatcaacacacaccaa

SEQ ID NO: 77339 - DNA, 25 bp, Canis familiaris
ctggcgggtggactacaccctgagc

SEQ ID NO: 77340 - DNA, 25 bp, Canis familiaris
cggcggatgggacatccgtcgtgga

SEQ ID NO: 77341 - DNA, 25 bp, Canis familiaris
cggggatgggacaaagctttcttca

SEQ ID NO: 77342 - DNA, 25 bp, Canis familiaris
cggcaagtggtgacagggcttgttg

SEQ ID NO: 77343 - DNA, 25 bp, Canis familiaris
cggaggtttgaatgtgcgtgcttgt

SEQ ID NO: 77344 - DNA, 25 bp, Canis familiaris
cggatggatcttttcgggcttttgg

SEQ ID NO: 77345 - DNA, 25 bp, Canis familiaris
gcgtttacttcctggagcttttgtt

SEQ ID NO: 77346 - DNA, 25 bp, Canis familiaris
cgtttccccagatcaagcttttaat

SEQ ID NO: 77347 - DNA, 25 bp, Canis familiaris
ctggcattgctctcaatgacaactt

SEQ ID NO: 77348 - DNA, 25 bp, Canis familiaris
ctggcttgctttactctgaacattt

SEQ ID NO: 77349 - DNA, 25 bp, Canis familiaris
ctggcttgttcagtgcttgacctta

SEQ ID NO: 77350 - DNA, 25 bp, Canis familiaris
ctggcttttaggggcactatggaca

SEQ ID NO: 77351 - DNA, 25 bp, Canis familiaris
cggttttggcacacagtaggcacac

SEQ ID NO: 77352 - DNA, 25 bp, Canis familiaris
cggatgtagggagcctggagaaacc

SEQ ID NO: 77353 - DNA, 25 bp, Canis familiaris
cggttgggaaggtctaatataagca

SEQ ID NO: 77354 - DNA, 25 bp, Canis familiaris
cgggtgggaggttctataataagca

SEQ ID NO: 77355 - DNA, 25 bp, Canis familiaris
cggagtgggttctgtgtcaaacgcc

SEQ ID NO: 77356 - DNA, 25 bp, Canis familiaris
cgggatgttttgggttcacaaggct

SEQ ID NO: 77357 - DNA, 25 bp, Canis familiaris
cgtggcttgttggggatttaagtga

SEQ ID NO: 77358 - DNA, 25 bp, Canis familiaris
cgggcttttcctcttggatggatga

SEQ ID NO: 77359 - DNA, 25 bp, Canis familiaris
cggctttttcctcgtgggatgtatg

SEQ ID NO: 77360 - DNA, 25 bp, Canis familiaris
ccgttatattatgtgggagtgtagg

SEQ ID NO: 77361 - DNA, 25 bp, Canis familiaris
cgcgttccatttctgcaaaagtcaa

SEQ ID NO: 77362 - DNA, 25 bp, Canis familiaris
cgggagcctttactgtcaaattcta

SEQ ID NO: 77363 - DNA, 25 bp, Canis familiaris
cgggctgccctaatggtaacatttt

SEQ ID NO: 77364 - DNA, 25 bp, Canis familiaris
cgaggcccctctcaaatacaattta

SEQ ID NO: 77365 - DNA, 25 bp, Canis familiaris
cggggcggctctcaataaattgtcc

SEQ ID NO: 77366 - DNA, 25 bp, Canis familiaris
cgtgctcccctagaaaacattgtcg

SEQ ID NO: 77367 - DNA, 25 bp, Canis familiaris
cggctgcccagtctaacaaagaaac

SEQ ID NO: 77368 - DNA, 25 bp, Canis familiaris
cggactctcttgctaccaaataata

SEQ ID NO: 77369 - DNA, 25 bp, Canis familiaris
cgcggtctcggtaaccaagaacact

SEQ ID NO: 77370 - DNA, 25 bp, Canis familiaris
cggcggcttggtgactctagataac

SEQ ID NO: 77371 - DNA, 25 bp, Canis familiaris
cggcgagtgtttgtcattagaagat

SEQ ID NO: 77372 - DNA, 25 bp, Canis familiaris
cggagaggatttactgagatttata

SEQ ID NO: 77373 - DNA, 25 bp, Canis familiaris
cgggacttttccaaatgtctgtgac

SEQ ID NO: 77374 - DNA, 25 bp, Canis familiaris
cggacctgttgtggccatggtctgg

SEQ ID NO: 77375 - DNA, 25 bp, Canis familiaris
cggacgtcttgggccaactggtccg

SEQ ID NO: 77376 - DNA, 25 bp, Canis familiaris
cggcacagtcaaggccgagaatggg

SEQ ID NO: 77377 - DNA, 25 bp, Canis familiaris
cggccagatctggagcccaggatgg

SEQ ID NO: 77378 - DNA, 25 bp, Canis familiaris
cggccagacttcccaatgatgtggt

SEQ ID NO: 77379 - DNA, 25 bp, Canis familiaris
cggcgaacattcacacagacagcta

SEQ ID NO: 77380 - DNA, 25 bp, Canis familiaris
cggcggacttgtgatcggcctgcat

SEQ ID NO: 77381 - DNA, 25 bp, Canis familiaris
cggcaaacttctaacgtgcctcgca

SEQ ID NO: 77382 - DNA, 25 bp, Canis familiaris
cgtgcaaggttttcgcggcacaact

SEQ ID NO: 77383 - DNA, 25 bp, Canis familiaris
cgttacttcttacgcgttcataatt

SEQ ID NO: 77384 - DNA, 25 bp, Canis familiaris
tcgtctactatttaccggaccgttg

SEQ ID NO: 77385 - DNA, 25 bp, Canis familiaris
cgtgcgcctttctgccggacgcgag

SEQ ID NO: 77386 - DNA, 25 bp, Canis familiaris
cgtggggttcttggaggacggactg

SEQ ID NO: 77387 - DNA, 25 bp, Canis familiaris
cggcccgtgtttggcgagggccacg

SEQ ID NO: 77388 - DNA, 25 bp, Canis familiaris
cgggcctggttggcaacgatggcac

SEQ ID NO: 77389 - DNA, 25 bp, Canis familiaris
cggcccaggtgggcacagggaggca

SEQ ID NO: 77390 - DNA, 25 bp, Canis familiaris
cggctccggtatgtgcaaggcgggc

SEQ ID NO: 77391 - DNA, 25 bp, Canis familiaris
cggcctttgtgtctgcaagaggggt

SEQ ID NO: 77392 - DNA, 25 bp, Canis familiaris
cgtgcctttgttccgcaaggagggg

SEQ ID NO: 77393 - DNA, 25 bp, Canis familiaris
cgtggaggagttcaccagggtggag

SEQ ID NO: 77394 - DNA, 25 bp, Canis familiaris
cgtcgtggagttgaccctttggatg

SEQ ID NO: 77395 - DNA, 25 bp, Canis familiaris
cgtcggtgtcgtggaccgtgttgac

SEQ ID NO: 77396 - DNA, 25 bp, Canis familiaris
cggcagtttctaaaccgggatgaca

SEQ ID NO: 77397 - DNA, 25 bp, Canis familiaris
cggaactttcgacgcggggagagca

SEQ ID NO: 77398 - DNA, 25 bp, Canis familiaris
cgtgaattttgcaaacaggggagga

SEQ ID NO: 77399 - DNA, 25 bp, Canis familiaris
cgaatgtagttaaaagggatgtgga

SEQ ID NO: 77400 - DNA, 25 bp, Canis familiaris
cggctgtattaatcacgcgatgttg

SEQ ID NO: 77401 - DNA, 25 bp, Canis familiaris
cggccttgtactcatgcaggacttg

SEQ ID NO: 77402 - DNA, 25 bp, Canis familiaris
cggactgttactgagctgcgtttta

SEQ ID NO: 77403 - DNA, 25 bp, Canis familiaris
ctggccttatactttgtggttactt

SEQ ID NO: 77404 - DNA, 25 bp, Canis familiaris
cgggctgttcagtcttacgttaaat

SEQ ID NO: 77405 - DNA, 25 bp, Canis familiaris
cgtggcctacggctactattatgac

SEQ ID NO: 77406 - DNA, 25 bp, Canis familiaris
cggagagtacggcctgatggttctg

SEQ ID NO: 77407 - DNA, 25 bp, Canis familiaris
cggagcattgactggggctttctgc

SEQ ID NO: 77408 - DNA, 25 bp, Canis familiaris
cggagcattgactggtctgtgtctg

SEQ ID NO: 77409 - DNA, 25 bp, Canis familiaris
cggaatcaccaggggctgctgttga

SEQ ID NO: 77410 - DNA, 25 bp, Canis familiaris
cggctcatcccagatggctgtgggg

SEQ ID NO: 77411 - DNA, 25 bp, Canis familiaris
cggctcatcccagatggctgtgggg

SEQ ID NO: 77412 - DNA, 25 bp, Canis familiaris
cggccactccacaatgagctgtgac

SEQ ID NO: 77413 - DNA, 25 bp, Canis familiaris
cggaccagtacaaggcgtacctcca

SEQ ID NO: 77414 - DNA, 25 bp, Canis familiaris
cggagtaggatcagagtgaaccccc

SEQ ID NO: 77415 - DNA, 25 bp, Canis familiaris
cggagcctggcagaaggaaaccttc

SEQ ID NO: 77416 - DNA, 25 bp, Canis familiaris
cgtggccccaaatggaaaccaatca

SEQ ID NO: 77417 - DNA, 25 bp, Canis familiaris
cgtacgcccgtagcagagaactaat

SEQ ID NO: 77418 - DNA, 25 bp, Canis familiaris
cgtacctcccaagccagagaaatcc

SEQ ID NO: 77419 - DNA, 25 bp, Canis familiaris
cgtatcctctgtatcaccagcaaaa

SEQ ID NO: 77420 - DNA, 25 bp, Canis familiaris
cgtgacctcattaacttggccaaga

SEQ ID NO: 77421 - DNA, 25 bp, Canis familiaris
cggacggactgaacttgacctgtga

SEQ ID NO: 77422 - DNA, 25 bp, Canis familiaris
cggagcgtgatattactgcttcctt

SEQ ID NO: 77423 - DNA, 25 bp, Canis familiaris
cggaagacagattgtcctctcctgt

SEQ ID NO: 77424 - DNA, 25 bp, Canis familiaris
cggaaacaattgttcacgccggtca

SEQ ID NO: 77425 - DNA, 25 bp, Canis familiaris
cgggaaacttgtcatcaacgggaag

SEQ ID NO: 77426 - DNA, 25 bp, Canis familiaris
cgggttgacgggcatcagagccggg

SEQ ID NO: 77427 - DNA, 25 bp, Canis familiaris
ctggcgttacagcgcaacagcagcc

SEQ ID NO: 77428 - DNA, 25 bp, Canis familiaris
cggagttcactggaatactgcatcc

SEQ ID NO: 77429 - DNA, 25 bp, Canis familiaris
cggagatgttccggatgacgcaccc

SEQ ID NO: 77430 - DNA, 25 bp, Canis familiaris
cgggacctgattggctactgatccg

SEQ ID NO: 77431 - DNA, 25 bp, Canis familiaris
cggagacacatcatgtcccgtctcg

SEQ ID NO: 77432 - DNA, 25 bp, Canis familiaris
cgggatcattttggcctcagtgtcc

SEQ ID NO: 77433 - DNA, 25 bp, Canis familiaris
cggttatttaggtccagcagctaca

SEQ ID NO: 77434 - DNA, 25 bp, Canis familiaris
cggtagagtccaagagtcaggtaac

SEQ ID NO: 77435 - DNA, 25 bp, Canis familiaris
cggtggagtacttaccaggagcaac

SEQ ID NO: 77436 - DNA, 25 bp, Canis familiaris
cggggggaacaatagggcaccaatg

SEQ ID NO: 77437 - DNA, 25 bp, Canis familiaris
cggcggtcgacgagaaggtgcaggc

SEQ ID NO: 77438 - DNA, 25 bp, Canis familiaris
cgggcggaacgggaaatcagcagga

SEQ ID NO: 77439 - DNA, 25 bp, Canis familiaris
cggcggagaaccgctactactgcga

SEQ ID NO: 77440 - DNA, 25 bp, Canis familiaris
cggtggagaaccatccgctagtcaa

SEQ ID NO: 77441 - DNA, 25 bp, Canis familiaris
cgggggactcaatcaagtagcctcc

SEQ ID NO: 77442 - DNA, 25 bp, Canis familiaris
cggagggcaacaaggacagcttcca

SEQ ID NO: 77443 - DNA, 25 bp, Canis familiaris
cggaggatgaactggatcgacgccc

SEQ ID NO: 77444 - DNA, 25 bp, Canis familiaris
cggcaggtgaggtggcacctggccc

SEQ ID NO: 77445 - DNA, 25 bp, Canis familiaris
ctggccgtaggtttgccttgtgtca

SEQ ID NO: 77446 - DNA, 25 bp, Canis familiaris
cgaccgggtgtactacgtgagtgag

SEQ ID NO: 77447 - DNA, 25 bp, Canis familiaris
cggagcgggtgcggtatctgatgag

SEQ ID NO: 77448 - DNA, 25 bp, Canis familiaris
cggcaggatcgacgcgcttctgtat

SEQ ID NO: 77449 - DNA, 25 bp, Canis familiaris
cggcaggatcgacgcgcttctgtat

SEQ ID NO: 77450 - DNA, 25 bp, Canis familiaris
cggcggatgctgctgctcttcgcaa

SEQ ID NO: 77451 - DNA, 25 bp, Canis familiaris
cggcctcatgcgtgacttcgaaggc

SEQ ID NO: 77452 - DNA, 25 bp, Canis familiaris
cggccttgaccttttcagcaagtgg

SEQ ID NO: 77453 - DNA, 25 bp, Canis familiaris
cggcgtttcctgttgctagagaatc

SEQ ID NO: 77454 - DNA, 25 bp, Canis familiaris
cggcttctgagccatgcacgtaggc

SEQ ID NO: 77455 - DNA, 25 bp, Canis familiaris
cggccctacttggcttgaactactt

SEQ ID NO: 77456 - DNA, 25 bp, Canis familiaris
ctggccccacgtgtcagaattttga

SEQ ID NO: 77457 - DNA, 25 bp, Canis familiaris
ctggcccccctggggatagttgtga

SEQ ID NO: 77458 - DNA, 25 bp, Canis familiaris
cggccccggcagaggtagtggtggg

SEQ ID NO: 77459 - DNA, 25 bp, Canis familiaris
cggccccccaggtgctatgggggag

SEQ ID NO: 77460 - DNA, 25 bp, Canis familiaris
ctggccttccctcttggagggggag

SEQ ID NO: 77461 - DNA, 25 bp, Canis familiaris
gggcttctacctctttgtggaagga

SEQ ID NO: 77462 - DNA, 25 bp, Canis familiaris
cggcttctactccagtgtttggtgg

SEQ ID NO: 77463 - DNA, 25 bp, Canis familiaris
cggctcctggtccagtacaaggccg

SEQ ID NO: 77464 - DNA, 25 bp, Canis familiaris
cgtgttctgcggcagtaagccccgc

SEQ ID NO: 77465 - DNA, 25 bp, Canis familiaris
cggttcacggcgttgcaagttgccc

SEQ ID NO: 77466 - DNA, 25 bp, Canis familiaris
cggactacgtggtctagcaggccga

SEQ ID NO: 77467 - DNA, 25 bp, Canis familiaris
cggcaggtgccaagtctagtggtgg

SEQ ID NO: 77468 - DNA, 25 bp, Canis familiaris
cggcacgagcccattcagggcaggg

SEQ ID NO: 77469 - DNA, 25 bp, Canis familiaris
cggccacaccctgtgagggagattg

SEQ ID NO: 77470 - DNA, 25 bp, Canis familiaris
cggccacatcccatgtaacatgagt

SEQ ID NO: 77471 - DNA, 25 bp, Canis familiaris
cggccagatcgcgtgggacattgtg

SEQ ID NO: 77472 - DNA, 25 bp, Canis familiaris
cggcacgagctattgggagctttcc

SEQ ID NO: 77473 - DNA, 25 bp, Canis familiaris
cggcacacagcctggtggagttccg

SEQ ID NO: 77474 - DNA, 25 bp, Canis familiaris
cggcacgagcgacggaggagtaggc

SEQ ID NO: 77475 - DNA, 25 bp, Canis familiaris
cggcatcggcgtctgggacgcagac

SEQ ID NO: 77476 - DNA, 25 bp, Canis familiaris
cggcaagatcggaggcgccgcagaa

SEQ ID NO: 77477 - DNA, 25 bp, Canis familiaris
cggcaggactgtcttggtgcggaag

SEQ ID NO: 77478 - DNA, 25 bp, Canis familiaris
cggcgtgggagaagctgggccggag

SEQ ID NO: 77479 - DNA, 25 bp, Canis familiaris
cggcctggagcagcttgggccgggg

SEQ ID NO: 77480 - DNA, 25 bp, Canis familiaris
cggctcagggcagcattgggacgga

SEQ ID NO: 77481 - DNA, 25 bp, Canis familiaris
cggccaaggacatcgatggacgcga

SEQ ID NO: 77482 - DNA, 25 bp, Canis familiaris
cggccttggtcatcgggagcagatg

SEQ ID NO: 77483 - DNA, 25 bp, Canis familiaris
cggcccgagtcatcatcgagaagta

SEQ ID NO: 77484 - DNA, 25 bp, Canis familiaris
cggcctggcggattccagagaactg

SEQ ID NO: 77485 - DNA, 25 bp, Canis familiaris
cgggtgccggcattcacaagaagtg

SEQ ID NO: 77486 - DNA, 25 bp, Canis familiaris
cgggctcccggaacaatacgtgagg

SEQ ID NO: 77487 - DNA, 25 bp, Canis familiaris
cggcgctccgggagcagaagcgcag

SEQ ID NO: 77488 - DNA, 25 bp, Canis familiaris
cggcccacaggaaaggcgaccagcc

SEQ ID NO: 77489 - DNA, 25 bp, Canis familiaris
ctggccaagggttgaggccctcagc

SEQ ID NO: 77490 - DNA, 25 bp, Canis familiaris
ctggccaagacgaagtttcctcact

SEQ ID NO: 77491 - DNA, 25 bp, Canis familiaris
cggacaccaagaagttcctctgctc

SEQ ID NO: 77492 - DNA, 25 bp, Canis familiaris
cggagtgaacaaattccctgtgccc

SEQ ID NO: 77493 - DNA, 25 bp, Canis familiaris
cggagtggattggttggtctggtct

SEQ ID NO: 77494 - DNA, 25 bp, Canis familiaris
cggcggctttggtgactctagataa

SEQ ID NO: 77495 - DNA, 25 bp, Canis familiaris
cggcggcttgcttttacattgagaa

SEQ ID NO: 77496 - DNA, 25 bp, Canis familiaris
cggggctgagccatttataagagat

SEQ ID NO: 77497 - DNA, 25 bp, Canis familiaris
cggagccccacagtctgtaaagaga

SEQ ID NO: 77498 - DNA, 25 bp, Canis familiaris
cggaggccgacaggcagttcactaa

SEQ ID NO: 77499 - DNA, 25 bp, Canis familiaris
cggcaagcacccagcatttttaact

SEQ ID NO: 77500 - DNA, 25 bp, Canis familiaris
cggtcaccaccaacacattttaaat

SEQ ID NO: 77501 - DNA, 25 bp, Canis familiaris
cggtcaccaccaacacattttaaat

SEQ ID NO: 77502 - DNA, 25 bp, Canis familiaris
cgtataccacgctaacctgtatcaa

SEQ ID NO: 77503 - DNA, 25 bp, Canis familiaris
cgttgccacaaggaaaggtatatct

SEQ ID NO: 77504 - DNA, 25 bp, Canis familiaris
cgatggccaccacagatttgctgtt

SEQ ID NO: 77505 - DNA, 25 bp, Canis familiaris
cgggatcacctctgattctatgaat

SEQ ID NO: 77506 - DNA, 25 bp, Canis familiaris
cggtgccaccattctaagcatgatg

SEQ ID NO: 77507 - DNA, 25 bp, Canis familiaris
cggtgccacgcatcttcatgaaggg

SEQ ID NO: 77508 - DNA, 25 bp, Canis familiaris
cggctctaggatcctccagaaatgg

SEQ ID NO: 77509 - DNA, 25 bp, Canis familiaris
cggccggaagcccgagggcatggat

SEQ ID NO: 77510 - DNA, 25 bp, Canis familiaris
cggcgcggagaagcgcagcggaggt

SEQ ID NO: 77511 - DNA, 25 bp, Canis familiaris
cggcgggagcaggagcacatgctga

SEQ ID NO: 77512 - DNA, 25 bp, Canis familiaris
cggcctctgagtgagcactgtggcc

SEQ ID NO: 77513 - DNA, 25 bp, Canis familiaris
cggccctgatgggcaacgtggtcct

SEQ ID NO: 77514 - DNA, 25 bp, Canis familiaris
cggtcctagggcaacggtgatcaaa

SEQ ID NO: 77515 - DNA, 25 bp, Canis familiaris
cggtgccaagctgggacgagctgac

SEQ ID NO: 77516 - DNA, 25 bp, Canis familiaris
cggtgccaactgcgacaccaagtgc

SEQ ID NO: 77517 - DNA, 25 bp, Canis familiaris
cgattgcgaccgccaaaccaaacaa

SEQ ID NO: 77518 - DNA, 25 bp, Canis familiaris
cgatctcgttcccccaaagaaaatg

SEQ ID NO: 77519 - DNA, 25 bp, Canis familiaris
cgtcatttgtccccatcagtaagaa

SEQ ID NO: 77520 - DNA, 25 bp, Canis familiaris
cggtatttcctccagagtatacgag

SEQ ID NO: 77521 - DNA, 25 bp, Canis familiaris
cggctatttgtccagggctgaaagc

SEQ ID NO: 77522 - DNA, 25 bp, Canis familiaris
cggttctgcagtcagggctagggat

SEQ ID NO: 77523 - DNA, 25 bp, Canis familiaris
cgtgttctggtccattcagtgggga

SEQ ID NO: 77524 - DNA, 25 bp, Canis familiaris
cggtctcaggtacttcagcctggga

SEQ ID NO: 77525 - DNA, 25 bp, Canis familiaris
cggcttggtgtaccagctggatggg

SEQ ID NO: 77526 - DNA, 25 bp, Canis familiaris
cggctctggggacagcatagcagga

SEQ ID NO: 77527 - DNA, 25 bp, Canis familiaris
cggccgccaagagcagcatgaaggt

SEQ ID NO: 77528 - DNA, 25 bp, Canis familiaris
cggcgtggaagacagcagccaggct

SEQ ID NO: 77529 - DNA, 25 bp, Canis familiaris
cggcttcagaaacgaggcacaggtg

SEQ ID NO: 77530 - DNA, 25 bp, Canis familiaris
gcggctcaaaaaaatgtacaggctt

SEQ ID NO: 77531 - DNA, 25 bp, Canis familiaris
cgtccagcaaacagcaggccatggc

SEQ ID NO: 77532 - DNA, 25 bp, Canis familiaris
cgtgaagcacaagaccggatgaccc

SEQ ID NO: 77533 - DNA, 25 bp, Canis familiaris
cggatcgacaagccacaggtggtcc

SEQ ID NO: 77534 - DNA, 25 bp, Canis familiaris
cggacccatacgtctgactgaggac

SEQ ID NO: 77535 - DNA, 25 bp, Canis familiaris
cggcaccagccaggtcagaagggac

SEQ ID NO: 77536 - DNA, 25 bp, Canis familiaris
cggcccagaccactgaggagagagc

SEQ ID NO: 77537 - DNA, 25 bp, Canis familiaris
cggcactcaactccgaggagggccg

SEQ ID NO: 77538 - DNA, 25 bp, Canis familiaris
cggcctcacagtacggccagagctc

SEQ ID NO: 77539 - DNA, 25 bp, Canis familiaris
cggtcatcatcacccctgaagaccg

SEQ ID NO: 77540 - DNA, 25 bp, Canis familiaris
cggctaccatgaagtctggcaactc

SEQ ID NO: 77541 - DNA, 25 bp, Canis familiaris
cggccaccatgaagtctggcaactc

SEQ ID NO: 77542 - DNA, 25 bp, Canis familiaris
cgtggaccaatgcagcattccacct

SEQ ID NO: 77543 - DNA, 25 bp, Canis familiaris
gctggtaccaacgtgtaactccgtt

SEQ ID NO: 77544 - DNA, 25 bp, Canis familiaris
cggtaggaatgcgtatttgcccgat

SEQ ID NO: 77545 - DNA, 25 bp, Canis familiaris
cgggggcattcgtattgcgccgcta

SEQ ID NO: 77546 - DNA, 25 bp, Canis familiaris
cggggagatccgtagatacctgtca

SEQ ID NO: 77547 - DNA, 25 bp, Canis familiaris
cggagcaggcccaacgattctcgtc

SEQ ID NO: 77548 - DNA, 25 bp, Canis familiaris
cggacaggcacgagctgtgctgctg

SEQ ID NO: 77549 - DNA, 25 bp, Canis familiaris
cggacggacgagactggcagagacc

SEQ ID NO: 77550 - DNA, 25 bp, Canis familiaris
cggggagcagctgtcggaatgcacc

SEQ ID NO: 77551 - DNA, 25 bp, Canis familiaris
cggggacctctggatggcagtccct

SEQ ID NO: 77552 - DNA, 25 bp, Canis familiaris
cggaggaacccagtgctgctgttcc

SEQ ID NO: 77553 - DNA, 25 bp, Canis familiaris
agacctactcgggcaccgaggtcgt

SEQ ID NO: 77554 - DNA, 25 bp, Canis familiaris
cggaaacatcagggaccaagccgcg

SEQ ID NO: 77555 - DNA, 25 bp, Canis familiaris
cgtgtaacatcacgtaacccgcagg

SEQ ID NO: 77556 - DNA, 25 bp, Canis familiaris
cggacagacagacatgcaaacacca

SEQ ID NO: 77557 - DNA, 25 bp, Canis familiaris
cggatgctgagataagccaaccccc

SEQ ID NO: 77558 - DNA, 25 bp, Canis familiaris
cggcgctgaaggatggcgacacccg

SEQ ID NO: 77559 - DNA, 25 bp, Canis familiaris
cgggagatggagaaggcccacccga

SEQ ID NO: 77560 - DNA, 25 bp, Canis familiaris
cggaaagaagcaagtgacccccagc

SEQ ID NO: 77561 - DNA, 25 bp, Canis familiaris
cggtcaaggagaacatggcccgcct

SEQ ID NO: 77562 - DNA, 25 bp, Canis familiaris
cggttcctgcagaactacaccgtgc

SEQ ID NO: 77563 - DNA, 25 bp, Canis familiaris
cgtgttgaatgcttactatacctta

SEQ ID NO: 77564 - DNA, 25 bp, Canis familiaris
cgtttggcttgtgctgacacgtttg

SEQ ID NO: 77565 - DNA, 25 bp, Canis familiaris
cggactggctgtagtctgacgcgtg

SEQ ID NO: 77566 - DNA, 25 bp, Canis familiaris
cggcaagggtctctgagcgcattgc

SEQ ID NO: 77567 - DNA, 25 bp, Canis familiaris
cgtgaggaagctccgtgaggcggct

SEQ ID NO: 77568 - DNA, 25 bp, Canis familiaris
cgtggccattctctggaggaggtca

SEQ ID NO: 77569 - DNA, 25 bp, Canis familiaris
cggggattccatcggggagtgacga

SEQ ID NO: 77570 - DNA, 25 bp, Canis familiaris
cggaagattcttggccaggagggtg

SEQ ID NO: 77571 - DNA, 25 bp, Canis familiaris
cggaggagtcattgccgtgggggtc

SEQ ID NO: 77572 - DNA, 25 bp, Canis familiaris
cgggcagcagaagacgtttcgcgtt

SEQ ID NO: 77573 - DNA, 25 bp, Canis familiaris
cggctgcaaagtgaggcttctgggt

SEQ ID NO: 77574 - DNA, 25 bp, Canis familiaris
cggctggaagtgagctgctgctccc

SEQ ID NO: 77575 - DNA, 25 bp, Canis familiaris
cggcggcagcagaagggcatctcgc

SEQ ID NO: 77576 - DNA, 25 bp, Canis familiaris
cggcatgtgcaaggccggcttcgcg

SEQ ID NO: 77577 - DNA, 25 bp, Canis familiaris
cggctgctgtcatcggcagcctggt

SEQ ID NO: 77578 - DNA, 25 bp, Canis familiaris
cggctcttgacacttagccgctgtc

SEQ ID NO: 77579 - DNA, 25 bp, Canis familiaris
cgtgatcttaatgtagccctagcca

SEQ ID NO: 77580 - DNA, 25 bp, Canis familiaris
cgtgttaagttttccatgtctgcca

SEQ ID NO: 77581 - DNA, 25 bp, Canis familiaris
cggtctcaaggaatcaccgtctcca

SEQ ID NO: 77582 - DNA, 25 bp, Canis familiaris
cggtctgaggcagtgtcccgtataa

SEQ ID NO: 77583 - DNA, 25 bp, Canis familiaris
cgtagagagacaggtggccgccaga

SEQ ID NO: 77584 - DNA, 25 bp, Canis familiaris
cggaggctgagaggctgcagcggcc

SEQ ID NO: 77585 - DNA, 25 bp, Canis familiaris
cggagagggatgcctgagttccggc

SEQ ID NO: 77586 - DNA, 25 bp, Canis familiaris
cggcaggatgggcaagtgtcgcggc

SEQ ID NO: 77587 - DNA, 25 bp, Canis familiaris
cggctggttggccgaggtggtggcg

SEQ ID NO: 77588 - DNA, 25 bp, Canis familiaris
cggaggccatggaaggaggtggggc

SEQ ID NO: 77589 - DNA, 25 bp, Canis familiaris
cggaggccgatgtcggggtgcaacg

SEQ ID NO: 77590 - DNA, 25 bp, Canis familiaris
cggcaggtgcggtgctttagcacat

SEQ ID NO: 77591 - DNA, 25 bp, Canis familiaris
cggctggcctggtgtcgataaaaac

SEQ ID NO: 77592 - DNA, 25 bp, Canis familiaris
cggatagtcttgtgatcgtatcaga

SEQ ID NO: 77593 - DNA, 25 bp, Canis familiaris
cggcgagtcgtgtgacgagctggag

SEQ ID NO: 77594 - DNA, 25 bp, Canis familiaris
cggcgacgaggaggaaggcgcgggc

SEQ ID NO: 77595 - DNA, 25 bp, Canis familiaris
cggcacgagcggggacagagccggg

SEQ ID NO: 77596 - DNA, 25 bp, Canis familiaris
cggcagccaggagctacagaccaag

SEQ ID NO: 77597 - DNA, 25 bp, Canis familiaris
cgctggccatggagtacgtcaacga

SEQ ID NO: 77598 - DNA, 25 bp, Canis familiaris
cggagccattgctttaggtcatccc

SEQ ID NO: 77599 - DNA, 25 bp, Canis familiaris
cgggccaactttttcatcattgcag

SEQ ID NO: 77600 - DNA, 25 bp, Canis familiaris
cggccctacatggggtcatcattgg

SEQ ID NO: 77601 - DNA, 25 bp, Canis familiaris
cggcgcaccatctttgtgtgtattg

SEQ ID NO: 77602 - DNA, 25 bp, Canis familiaris
cggcaacacactgtgatgtacacct

SEQ ID NO: 77603 - DNA, 25 bp, Canis familiaris
cgtgcaacaacttggatgaatctcc

SEQ ID NO: 77604 - DNA, 25 bp, Canis familiaris
cggaagaagccgtatgactgtgcac

SEQ ID NO: 77605 - DNA, 25 bp, Canis familiaris
cggaagaagctgcagtgacgcctcc

SEQ ID NO: 77606 - DNA, 25 bp, Canis familiaris
cggacggagcagcggaggctgtcgg

SEQ ID NO: 77607 - DNA, 25 bp, Canis familiaris
cggtgggagctcagtaagccttggc

SEQ ID NO: 77608 - DNA, 25 bp, Canis familiaris
cgggggtggaaggaacctctgcatc

SEQ ID NO: 77609 - DNA, 25 bp, Canis familiaris
cgtggaggttgacccaatgcttcac

SEQ ID NO: 77610 - DNA, 25 bp, Canis familiaris
cgggaggatttgtcgtctttcacgg

SEQ ID NO: 77611 - DNA, 25 bp, Canis familiaris
cggggtgtggctttgatccttagcc

SEQ ID NO: 77612 - DNA, 25 bp, Canis familiaris
cgtgggtggagttcgggtttgccag

SEQ ID NO: 77613 - DNA, 25 bp, Canis familiaris
cgggtctgggactggggtatgcccg

SEQ ID NO: 77614 - DNA, 25 bp, Canis familiaris
gcgggacctggagcgaggtttctcc

SEQ ID NO: 77615 - DNA, 25 bp, Canis familiaris
cggtgaccgcggtgagactggtcct

SEQ ID NO: 77616 - DNA, 25 bp, Canis familiaris
cggaacctcgcgtagaccaggtagc

SEQ ID NO: 77617 - DNA, 25 bp, Canis familiaris
cgtgaacagcttctggaccagttga

SEQ ID NO: 77618 - DNA, 25 bp, Canis familiaris
cggacaagctgcatttagcgagtct

SEQ ID NO: 77619 - DNA, 25 bp, Canis familiaris
cggacagagctcctgtgtatggcgc

SEQ ID NO: 77620 - DNA, 25 bp, Canis familiaris
cggatggagtcccatatctggctcc

SEQ ID NO: 77621 - DNA, 25 bp, Canis familiaris
cggtgatgacttgctcatcatcccc

SEQ ID NO: 77622 - DNA, 25 bp, Canis familiaris
cggacaatgctggcgcttctctcgt

SEQ ID NO: 77623 - DNA, 25 bp, Canis familiaris
cggaaggatgtccttcctctctcag

SEQ ID NO: 77624 - DNA, 25 bp, Canis familiaris
cggatgagttgcaatttccctcggg

SEQ ID NO: 77625 - DNA, 25 bp, Canis familiaris
cggttgttgaatagtctcgtgggac

SEQ ID NO: 77626 - DNA, 25 bp, Canis familiaris
cggttgggaattccccattggagct

SEQ ID NO: 77627 - DNA, 25 bp, Canis familiaris
cgttcgaagaaccctacatatgtga

SEQ ID NO: 77628 - DNA, 25 bp, Canis familiaris
tcgttcccagaaaactaattatggc

SEQ ID NO: 77629 - DNA, 25 bp, Canis familiaris
cgtctgccctatcaactttcgatgg

SEQ ID NO: 77630 - DNA, 25 bp, Canis familiaris
cgatcacgtatacacctattatggg

SEQ ID NO: 77631 - DNA, 25 bp, Canis familiaris
cgtcacgtactctgacattttgtga

SEQ ID NO: 77632 - DNA, 25 bp, Canis familiaris
cgtccgtgtcttgtctttattgagg

SEQ ID NO: 77633 - DNA, 25 bp, Canis familiaris
cgtccagggttcgttgtgtttgatt

SEQ ID NO: 77634 - DNA, 25 bp, Canis familiaris
cggtcgtggactctttggtgatgat

SEQ ID NO: 77635 - DNA, 25 bp, Canis familiaris
cggacacggatagttttggctgatg

SEQ ID NO: 77636 - DNA, 25 bp, Canis familiaris
cggatccagtcatcttttcctgatg

SEQ ID NO: 77637 - DNA, 25 bp, Canis familiaris
cggaagaatcaagaggcttctgcag

SEQ ID NO: 77638 - DNA, 25 bp, Canis familiaris
cggggactcaaattgtcttctcgag

SEQ ID NO: 77639 - DNA, 25 bp, Canis familiaris
cggggcgctgcatagagtgctgtct

SEQ ID NO: 77640 - DNA, 25 bp, Canis familiaris
cgcttgggtcaacagggtcctagct

SEQ ID NO: 77641 - DNA, 25 bp, Canis familiaris
cggaagggaagccggagcccttgct

SEQ ID NO: 77642 - DNA, 25 bp, Canis familiaris
cgtaaggaaaggagcagccgccatg

SEQ ID NO: 77643 - DNA, 25 bp, Canis familiaris
cggattgcgcagcaggttgcgccgc

SEQ ID NO: 77644 - DNA, 25 bp, Canis familiaris
cggcactgccagaggaagcgctgcc

SEQ ID NO: 77645 - DNA, 25 bp, Canis familiaris
cggttgagcaaggctgggctgctgc

SEQ ID NO: 77646 - DNA, 25 bp, Canis familiaris
cggcttcagcgactcggagagtgca

SEQ ID NO: 77647 - DNA, 25 bp, Canis familiaris
cggctgggggtggagatgggcaaag

SEQ ID NO: 77648 - DNA, 25 bp, Canis familiaris
cggctcctgggctggatgtgtgaaa

SEQ ID NO: 77649 - DNA, 25 bp, Canis familiaris
gcggtacgtgggtggtgtgtaagcc

SEQ ID NO: 77650 - DNA, 25 bp, Canis familiaris
cggtaggtgcggtgctattctgatc

SEQ ID NO: 77651 - DNA, 25 bp, Canis familiaris
cgggacgcttgccatagctatttgt

SEQ ID NO: 77652 - DNA, 25 bp, Canis familiaris
cggtgcctgcttgtatgtattgatg

SEQ ID NO: 77653 - DNA, 25 bp, Canis familiaris
cgggcctgtgtgatgcccatggatg

SEQ ID NO: 77654 - DNA, 25 bp, Canis familiaris
cgggccattgccatcgctgcaggcg

SEQ ID NO: 77655 - DNA, 25 bp, Canis familiaris
cggaaactgatgactctggatggct

SEQ ID NO: 77656 - DNA, 25 bp, Canis familiaris
cggagagcctggctatggtgtgctg

SEQ ID NO: 77657 - DNA, 25 bp, Canis familiaris
cgggcccagagccatctgggtctga

SEQ ID NO: 77658 - DNA, 25 bp, Canis familiaris
cgggtcagaggcccatggggatacg

SEQ ID NO: 77659 - DNA, 25 bp, Canis familiaris
cggcggaggagcccaggatggagac

SEQ ID NO: 77660 - DNA, 25 bp, Canis familiaris
cggctggccgtgggcaggaagagga

SEQ ID NO: 77661 - DNA, 25 bp, Canis familiaris
cggtcgcctctggcagcgaaaagac

SEQ ID NO: 77662 - DNA, 25 bp, Canis familiaris
cggtcagtgtctggcggcaaacgac

SEQ ID NO: 77663 - DNA, 25 bp, Canis familiaris
cggtcagatgcaatcggaccaagag

SEQ ID NO: 77664 - DNA, 25 bp, Canis familiaris
cggctcacatctttgtacttgggag

SEQ ID NO: 77665 - DNA, 25 bp, Canis familiaris
cggctcagactcttctggttgggaa

SEQ ID NO: 77666 - DNA, 25 bp, Canis familiaris
cggctgcgacttcgggagatggaga

SEQ ID NO: 77667 - DNA, 25 bp, Canis familiaris
cggcggcacgctggagaactgcgtg

SEQ ID NO: 77668 - DNA, 25 bp, Canis familiaris
cggggcatcctaagacatgtccaag

SEQ ID NO: 77669 - DNA, 25 bp, Canis familiaris
cggtggcagaaatatttgccacagg

SEQ ID NO: 77670 - DNA, 25 bp, Canis familiaris
cggcggcggacacaatgtccagcgg

SEQ ID NO: 77671 - DNA, 25 bp, Canis familiaris
cgggagcgagatgaagaggaagagg

SEQ ID NO: 77672 - DNA, 25 bp, Canis familiaris
cgtgaaccagcacccagatgggggg

SEQ ID NO: 77673 - DNA, 25 bp, Canis familiaris
cggaagcgcagagccgacgggaagc

SEQ ID NO: 77674 - DNA, 25 bp, Canis familiaris
cggaacggaccccatcatgacgttc

SEQ ID NO: 77675 - DNA, 25 bp, Canis familiaris
cgattccggatcgcaacatgggtta

SEQ ID NO: 77676 - DNA, 25 bp, Canis familiaris
cgttccagagtttctccaggtttat

SEQ ID NO: 77677 - DNA, 25 bp, Canis familiaris
cgtctccaggtgacaacccagatgt

SEQ ID NO: 77678 - DNA, 25 bp, Canis familiaris
cggcttcaccgaatacttcagcatg

SEQ ID NO: 77679 - DNA, 25 bp, Canis familiaris
cggcttcacatcacaagggcagctg

SEQ ID NO: 77680 - DNA, 25 bp, Canis familiaris
cggctaccacatccaaggaaggcag

SEQ ID NO: 77681 - DNA, 25 bp, Canis familiaris
cggattcccggatggagagtcagat

SEQ ID NO: 77682 - DNA, 25 bp, Canis familiaris
cggacttcacaggagggagaccagg

SEQ ID NO: 77683 - DNA, 25 bp, Canis familiaris
cggaccatcaaggagaccgcacgga

SEQ ID NO: 77684 - DNA, 25 bp, Canis familiaris
cgggaagcgcaggaagcccgaggac

SEQ ID NO: 77685 - DNA, 25 bp, Canis familiaris
cggagaccacagaagacccgagtga

SEQ ID NO: 77686 - DNA, 25 bp, Canis familiaris
cgggcttccagaagccgccgaagac

SEQ ID NO: 77687 - DNA, 25 bp, Canis familiaris
cgtgacttcgaaggcacgttccaac

SEQ ID NO: 77688 - DNA, 25 bp, Canis familiaris
cgggcccagaattgccatttccatc

SEQ ID NO: 77689 - DNA, 25 bp, Canis familiaris
cggtctggaaactgcagttcctcaa

SEQ ID NO: 77690 - DNA, 25 bp, Canis familiaris
cgttcggaggacccagtgttaggag

SEQ ID NO: 77691 - DNA, 25 bp, Canis familiaris
cgtccacgggaggcctggttaatcg

SEQ ID NO: 77692 - DNA, 25 bp, Canis familiaris
cggggttgtgagatcttgcccgtca

SEQ ID NO: 77693 - DNA, 25 bp, Canis familiaris
ccagtaggttggattcctaagttct

SEQ ID NO: 77694 - DNA, 25 bp, Canis familiaris
ccaagggttaccacgctaacttctg

SEQ ID NO: 77695 - DNA, 25 bp, Canis familiaris
tcaaaaggtttctcctgtaatcttt

SEQ ID NO: 77696 - DNA, 25 bp, Canis familiaris
taaaaggggtggcacattactctac

SEQ ID NO: 77697 - DNA, 25 bp, Canis familiaris
tagaccgagggggacctgttcacta

SEQ ID NO: 77698 - DNA, 25 bp, Canis familiaris
cgacttccggaggaacttgatcctc

SEQ ID NO: 77699 - DNA, 25 bp, Canis familiaris
cggttccggattccgggatctgcta

SEQ ID NO: 77700 - DNA, 25 bp, Canis familiaris
cggtgatgcgggttgtctgtagtcc

SEQ ID NO: 77701 - DNA, 25 bp, Canis familiaris
cggtgtctgaggttttctcttttag

SEQ ID NO: 77702 - DNA, 25 bp, Canis familiaris
cggtgccggggatcattcttatgga

SEQ ID NO: 77703 - DNA, 25 bp, Canis familiaris
cgggccctggggatctgaagaggaa

SEQ ID NO: 77704 - DNA, 25 bp, Canis familiaris
cgggaccttggtttgtgaattgcga

SEQ ID NO: 77705 - DNA, 25 bp, Canis familiaris
cgggattcaatggatccgtgaaatc

SEQ ID NO: 77706 - DNA, 25 bp, Canis familiaris
cggggaaggagtccctgaatctctg

SEQ ID NO: 77707 - DNA, 25 bp, Canis familiaris
cggtgggagaagaccgcgatcctcc

SEQ ID NO: 77708 - DNA, 25 bp, Canis familiaris
cggaggtggcaaccatcgaatcgct

SEQ ID NO: 77709 - DNA, 25 bp, Canis familiaris
cgtgggtgtacacctaatacgtcct

SEQ ID NO: 77710 - DNA, 25 bp, Canis familiaris
cggttatgaacaaaaatacgatact

SEQ ID NO: 77711 - DNA, 25 bp, Canis familiaris
tcggttatgaacaaaaatacgatac

SEQ ID NO: 77712 - DNA, 25 bp, Canis familiaris
cgtgcatttatcagatcaaaaccaa

SEQ ID NO: 77713 - DNA, 25 bp, Canis familiaris
cggcttgctctcagaacacaaacag

SEQ ID NO: 77714 - DNA, 25 bp, Canis familiaris
cggcttctccacacattcataaagt

SEQ ID NO: 77715 - DNA, 25 bp, Canis familiaris
cggcactgctccgttcaatatcaag

SEQ ID NO: 77716 - DNA, 25 bp, Canis familiaris
cgtgcatttatggtatcgttctgat

SEQ ID NO: 77717 - DNA, 25 bp, Canis familiaris
cgttatttcgtattttcatttccat

SEQ ID NO: 77718 - DNA, 25 bp, Canis familiaris
cgtaattattggctctacattcctc

SEQ ID NO: 77719 - DNA, 25 bp, Canis familiaris
cgtgattatttgtcgttctttcctc

SEQ ID NO: 77720 - DNA, 25 bp, Canis familiaris
cgtattcattggtccttgcggtttg

SEQ ID NO: 77721 - DNA, 25 bp, Canis familiaris
cggttactaaccactctctattgtg

SEQ ID NO: 77722 - DNA, 25 bp, Canis familiaris
cctttcctagagcaccggttagtga

SEQ ID NO: 77723 - DNA, 25 bp, Canis familiaris
cggtatcccagacatacggtataca

SEQ ID NO: 77724 - DNA, 25 bp, Canis familiaris
cgggatctcctgccgtaaggtaaag

SEQ ID NO: 77725 - DNA, 25 bp, Canis familiaris
cggtggggctccgaagggtgagaag

SEQ ID NO: 77726 - DNA, 25 bp, Canis familiaris
cgggtgtggcccgtaggatgctaag

SEQ ID NO: 77727 - DNA, 25 bp, Canis familiaris
cggagcttgtccggaagattgcaaa

SEQ ID NO: 77728 - DNA, 25 bp, Canis familiaris
cggatgactccccgagatacgagaa

SEQ ID NO: 77729 - DNA, 25 bp, Canis familiaris
cggcatacgccagcgctgtaggaat

SEQ ID NO: 77730 - DNA, 25 bp, Canis familiaris
cggcaactccacgtgttcggagaat

SEQ ID NO: 77731 - DNA, 25 bp, Canis familiaris
cgtagactcagttcttctcggaaga

SEQ ID NO: 77732 - DNA, 25 bp, Canis familiaris
cgtagtatcggagttcactggaata

SEQ ID NO: 77733 - DNA, 25 bp, Canis familiaris
cgtaccagtgccagtactgcgaata

SEQ ID NO: 77734 - DNA, 25 bp, Canis familiaris
cggcacgaggccagagtctgaggtc

SEQ ID NO: 77735 - DNA, 25 bp, Canis familiaris
cggtcagcaccgtggtgtgaggccc

SEQ ID NO: 77736 - DNA, 25 bp, Canis familiaris
cggaacatgcctgggttgtacccgc

SEQ ID NO: 77737 - DNA, 25 bp, Canis familiaris
cggacgggtttgatgtactccgccg

SEQ ID NO: 77738 - DNA, 25 bp, Canis familiaris
cggcacgaggtttttcatctgcacc

SEQ ID NO: 77739 - DNA, 25 bp, Canis familiaris
cggcacgaggtgaagttgaatcaac

SEQ ID NO: 77740 - DNA, 25 bp, Canis familiaris
cggtcaggggtacggatcatatcat

SEQ ID NO: 77741 - DNA, 25 bp, Canis familiaris
cgggatggaggcaaaggtgcaactg

SEQ ID NO: 77742 - DNA, 25 bp, Canis familiaris
cggtgtctaggccgaggccaactgc

SEQ ID NO: 77743 - DNA, 25 bp, Canis familiaris
cgttttctccggtagccaattgtga

SEQ ID NO: 77744 - DNA, 25 bp, Canis familiaris
cggtggtcccggtgggatgttcaga

SEQ ID NO: 77745 - DNA, 25 bp, Canis familiaris
cggtggtaccgggttaagtcagcag

SEQ ID NO: 77746 - DNA, 25 bp, Canis familiaris
cgtgctggtaccaacgtgtaactcc

SEQ ID NO: 77747 - DNA, 25 bp, Canis familiaris
cgatcttaaggcactttacccagcg

SEQ ID NO: 77748 - DNA, 25 bp, Canis familiaris
cggtggaaggcgttttgagaccaga

SEQ ID NO: 77749 - DNA, 25 bp, Canis familiaris
cggtggtcagggattcggagcttga

SEQ ID NO: 77750 - DNA, 25 bp, Canis familiaris
cggtgatcctgggtttcggagtgtg

SEQ ID NO: 77751 - DNA, 25 bp, Canis familiaris
cggtactagggttgctgctggtgtt

SEQ ID NO: 77752 - DNA, 25 bp, Canis familiaris
cggtttcggactctgatggtgtttc

SEQ ID NO: 77753 - DNA, 25 bp, Canis familiaris
cggtttctggactctgatggtgtct

SEQ ID NO: 77754 - DNA, 25 bp, Canis familiaris
cggtgttcagattttggtggtgtca

SEQ ID NO: 77755 - DNA, 25 bp, Canis familiaris
cggtttcagtactttgtgagggcag

SEQ ID NO: 77756 - DNA, 25 bp, Canis familiaris
cgggttcctctctgagcgagcggac

SEQ ID NO: 77757 - DNA, 25 bp, Canis familiaris
cgttggctaccgggaggacggcatc

SEQ ID NO: 77758 - DNA, 25 bp, Canis familiaris
cggtggctacttgctgggaagtgcc

SEQ ID NO: 77759 - DNA, 25 bp, Canis familiaris
cgggagcccagtgtgggcggatcca

SEQ ID NO: 77760 - DNA, 25 bp, Canis familiaris
cgggagttctgggtggacaacacca

SEQ ID NO: 77761 - DNA, 25 bp, Canis familiaris
cgttggtcttggaaggaccaagaca

SEQ ID NO: 77762 - DNA, 25 bp, Canis familiaris
cgtaggttcggaagacgccagggcg

SEQ ID NO: 77763 - DNA, 25 bp, Canis familiaris
cggggactcggagatcgagctggtg

SEQ ID NO: 77764 - DNA, 25 bp, Canis familiaris
cggagtgatctccggacatccaggg

SEQ ID NO: 77765 - DNA, 25 bp, Canis familiaris
cgggcaagtgttggacaccggagtc

SEQ ID NO: 77766 - DNA, 25 bp, Canis familiaris
cgggaaccttgtacaccgatcatga

SEQ ID NO: 77767 - DNA, 25 bp, Canis familiaris
cggaaaccttggccgcacagatgtc

SEQ ID NO: 77768 - DNA, 25 bp, Canis familiaris
cggagagtccgtgtcgagatgcttc

SEQ ID NO: 77769 - DNA, 25 bp, Canis familiaris
cggagtgggagtgcccagagctcca

SEQ ID NO: 77770 - DNA, 25 bp, Canis familiaris
cgggggaggttcccgatgagccaag

SEQ ID NO: 77771 - DNA, 25 bp, Canis familiaris
cggggtgaggtagtgacgaagtata

SEQ ID NO: 77772 - DNA, 25 bp, Canis familiaris
cggtggcgatgacgacgacgacgta

SEQ ID NO: 77773 - DNA, 25 bp, Canis familiaris
cgtgtgtgctgattgcaacctcgac

SEQ ID NO: 77774 - DNA, 25 bp, Canis familiaris
cgtgtgtgcagtccagacctatact

SEQ ID NO: 77775 - DNA, 25 bp, Canis familiaris
cgtcagctgatggccaagcctgaga

SEQ ID NO: 77776 - DNA, 25 bp, Canis familiaris
cggactagtgacaagctctgctgac

SEQ ID NO: 77777 - DNA, 25 bp, Canis familiaris
cggaacactggcatcatctgtacca

SEQ ID NO: 77778 - DNA, 25 bp, Canis familiaris
cggacctcatgtcctactgtgagga

SEQ ID NO: 77779 - DNA, 25 bp, Canis familiaris
cggaactgcagtccgacatcatcgc

SEQ ID NO: 77780 - DNA, 25 bp, Canis familiaris
cggattctagtgcccactatccggt

SEQ ID NO: 77781 - DNA, 25 bp, Canis familiaris
cgcgtacctgtgagagttgccgggg

SEQ ID NO: 77782 - DNA, 25 bp, Canis familiaris
cgtgaacatttgagggtgcgcgcga

SEQ ID NO: 77783 - DNA, 25 bp, Canis familiaris
cggaaatttggtcaatggcccaact

SEQ ID NO: 77784 - DNA, 25 bp, Canis familiaris
cggtgaaaatggagaacagcccacc

SEQ ID NO: 77785 - DNA, 25 bp, Canis familiaris
cgtggagaaaggcaaccgcaccgcc

SEQ ID NO: 77786 - DNA, 25 bp, Canis familiaris
cgggcagaacagaaaacgaagtcca

SEQ ID NO: 77787 - DNA, 25 bp, Canis familiaris
cggtgatgcagagacagatgacgaa

SEQ ID NO: 77788 - DNA, 25 bp, Canis familiaris
cggtcagcagatcccagtgaagggt

SEQ ID NO: 77789 - DNA, 25 bp, Canis familiaris
cggatcagaggataggagcaccagt

SEQ ID NO: 77790 - DNA, 25 bp, Canis familiaris
cggtcggtctgacgaggacctgtcc

SEQ ID NO: 77791 - DNA, 25 bp, Canis familiaris
cggtcggagcactgaggacacagcc

SEQ ID NO: 77792 - DNA, 25 bp, Canis familiaris
cggatcacgcccggagtagaagcgc

SEQ ID NO: 77793 - DNA, 25 bp, Canis familiaris
cgtgcagcacccagagaacggggcc

SEQ ID NO: 77794 - DNA, 25 bp, Canis familiaris
cgtggcagctttgtgtacggatcct

SEQ ID NO: 77795 - DNA, 25 bp, Canis familiaris
cgggctgctacagctacacgagtcc

SEQ ID NO: 77796 - DNA, 25 bp, Canis familiaris
cggacgtgatcgggcacacggttct

SEQ ID NO: 77797 - DNA, 25 bp, Canis familiaris
cggacgcgaccatgtcggaggtgct

SEQ ID NO: 77798 - DNA, 25 bp, Canis familiaris
cgaatggctacagaccaaaggtccc

SEQ ID NO: 77799 - DNA, 25 bp, Canis familiaris
cgggagtaccagctcaacgactccg

SEQ ID NO: 77800 - DNA, 25 bp, Canis familiaris
cgtggtgaaacgggaccgctctacg

SEQ ID NO: 77801 - DNA, 25 bp, Canis familiaris
cggaggaaagtcactctcgtctttg

SEQ ID NO: 77802 - DNA, 25 bp, Canis familiaris
cggagaacacctgtatctcgtattc

SEQ ID NO: 77803 - DNA, 25 bp, Canis familiaris
cgggaacaggccctgacttgttggc

SEQ ID NO: 77804 - DNA, 25 bp, Canis familiaris
cgggaccagctgtactacgagtgct

SEQ ID NO: 77805 - DNA, 25 bp, Canis familiaris
cgggatcatgcgcaggatcaaggtg

SEQ ID NO: 77806 - DNA, 25 bp, Canis familiaris
cggagatcagctccatcgacgagtt

SEQ ID NO: 77807 - DNA, 25 bp, Canis familiaris
cggagacaggttggacaagatctga

SEQ ID NO: 77808 - DNA, 25 bp, Canis familiaris
cggagaaggtcaggaagcctctgcc

SEQ ID NO: 77809 - DNA, 25 bp, Canis familiaris
cggagagcatgatccgtgaccttgc

SEQ ID NO: 77810 - DNA, 25 bp, Canis familiaris
cggagaggcaggtctgaggccttcc

SEQ ID NO: 77811 - DNA, 25 bp, Canis familiaris
cggggccaagagggtcatcatctct

SEQ ID NO: 77812 - DNA, 25 bp, Canis familiaris
cgggcgcaaaaggagctgacaatca

SEQ ID NO: 77813 - DNA, 25 bp, Canis familiaris
cgggcgcaaaggagccgacatcatg

SEQ ID NO: 77814 - DNA, 25 bp, Canis familiaris
cgggccaaaggttgctgagcagctc

SEQ ID NO: 77815 - DNA, 25 bp, Canis familiaris
cggtggctacagaggcggcagtacc

SEQ ID NO: 77816 - DNA, 25 bp, Canis familiaris
cgtgggcatcccaggctggggagtc

SEQ ID NO: 77817 - DNA, 25 bp, Canis familiaris
cgtccgccctccagtagagggtcac

SEQ ID NO: 77818 - DNA, 25 bp, Canis familiaris
cgtcccccatcgagaggactatctc

SEQ ID NO: 77819 - DNA, 25 bp, Canis familiaris
cgtctcactcccatggagtcactaa

SEQ ID NO: 77820 - DNA, 25 bp, Canis familiaris
cgtccattccacagttgtaaatgct

SEQ ID NO: 77821 - DNA, 25 bp, Canis familiaris
cgtcacctcaacattatgaaaagtt

SEQ ID NO: 77822 - DNA, 25 bp, Canis familiaris
cgttcagtcagcaatgttgagaaag

SEQ ID NO: 77823 - DNA, 25 bp, Canis familiaris
cgtcatcgtcattactgtgccaagt

SEQ ID NO: 77824 - DNA, 25 bp, Canis familiaris
cctgcttgtatgtattgatgcacag

SEQ ID NO: 77825 - DNA, 25 bp, Canis familiaris
cgtgctctacagtgtgatgaccctc

SEQ ID NO: 77826 - DNA, 25 bp, Canis familiaris
cgtccaacagatcgacgcggactcc

SEQ ID NO: 77827 - DNA, 25 bp, Canis familiaris
cgtgccaatcaacatgctggtgaag

SEQ ID NO: 77828 - DNA, 25 bp, Canis familiaris
cgtgcactctgctatgtcatcagtg

SEQ ID NO: 77829 - DNA, 25 bp, Canis familiaris
cgtgcctatccaacacagtcttaaa

SEQ ID NO: 77830 - DNA, 25 bp, Canis familiaris
cgtgctcttctcctatagtagtaga

SEQ ID NO: 77831 - DNA, 25 bp, Canis familiaris
cgtgccttatccatgtatatgtagc

SEQ ID NO: 77832 - DNA, 25 bp, Canis familiaris
cgtgcccatcatcctggttgggaac

SEQ ID NO: 77833 - DNA, 25 bp, Canis familiaris
cggggttgtcattgttggatgccaa

SEQ ID NO: 77834 - DNA, 25 bp, Canis familiaris
cgggagtagacttcttttctataca

SEQ ID NO: 77835 - DNA, 25 bp, Canis familiaris
cgtggcggcgacgacccattcgaac

SEQ ID NO: 77836 - DNA, 25 bp, Canis familiaris
cggggggaatgcggcaattaatcag

SEQ ID NO: 77837 - DNA, 25 bp, Canis familiaris
cgggggggatgcgtgcatttatcag

SEQ ID NO: 77838 - DNA, 25 bp, Canis familiaris
cggaggtgaagtcggtggagatgca

SEQ ID NO: 77839 - DNA, 25 bp, Canis familiaris
cgggatcgaagaatggtgtgagaca

SEQ ID NO: 77840 - DNA, 25 bp, Canis familiaris
cgggcatcgccgaaggagggcaaca

SEQ ID NO: 77841 - DNA, 25 bp, Canis familiaris
cggacgcgcgagagcgaggagcagc

SEQ ID NO: 77842 - DNA, 25 bp, Canis familiaris
cggacctgggggctgagtgcaggcc

SEQ ID NO: 77843 - DNA, 25 bp, Canis familiaris
cggaaatggtggttccacgctggcc

SEQ ID NO: 77844 - DNA, 25 bp, Canis familiaris
cggaaagcgtgccaatcaacatgct

SEQ ID NO: 77845 - DNA, 25 bp, Canis familiaris
cggaaagcgtgccaatcaacatgct

SEQ ID NO: 77846 - DNA, 25 bp, Canis familiaris
cggaaagtcgcacccagagatgaag

SEQ ID NO: 77847 - DNA, 25 bp, Canis familiaris
cggtggccttgctccaggagaagca

SEQ ID NO: 77848 - DNA, 25 bp, Canis familiaris
cgtgggcacgatgtagctcggaggc

SEQ ID NO: 77849 - DNA, 25 bp, Canis familiaris
cgtggaccgtcgtgtttgggatgag

SEQ ID NO: 77850 - DNA, 25 bp, Canis familiaris
cgggcccgtagtcggtgaaggtgtg

SEQ ID NO: 77851 - DNA, 25 bp, Canis familiaris
cgtggcccgttgtgttgggtttgag

SEQ ID NO: 77852 - DNA, 25 bp, Canis familiaris
cgacctccatttgttccgggtggag

SEQ ID NO: 77853 - DNA, 25 bp, Canis familiaris
cgactctacggtcttcctaggtcga

SEQ ID NO: 77854 - DNA, 25 bp, Canis familiaris
cgtccaacggtccgactcataggat

SEQ ID NO: 77855 - DNA, 25 bp, Canis familiaris
cgtggctacagcttcaccaccacag

SEQ ID NO: 77856 - DNA, 25 bp, Canis familiaris
cgggtggagatcctccaagcacgtc

SEQ ID NO: 77857 - DNA, 25 bp, Canis familiaris
cggggctggcattgctctcaatgac

SEQ ID NO: 77858 - DNA, 25 bp, Canis familiaris
cggttgcagtgtctctgagtgacaa

SEQ ID NO: 77859 - DNA, 25 bp, Canis familiaris
cggtttctgctgatgctgattgaca

SEQ ID NO: 77860 - DNA, 25 bp, Canis familiaris
cggttgatcctggtgctggtgcacc

SEQ ID NO: 77861 - DNA, 25 bp, Canis familiaris
cggactgcaccggtgtcgatgtccg

SEQ ID NO: 77862 - DNA, 25 bp, Canis familiaris
cggaggctccagagtgggtgctctg

SEQ ID NO: 77863 - DNA, 25 bp, Canis familiaris
cggtggctccatcttggcctcactg

SEQ ID NO: 77864 - DNA, 25 bp, Canis familiaris
cgtgaggacctgataggcactcctg

SEQ ID NO: 77865 - DNA, 25 bp, Canis familiaris
cggagagacagggtcttgcactctt

SEQ ID NO: 77866 - DNA, 25 bp, Canis familiaris
cggagaagcagggcgttcactcttc

SEQ ID NO: 77867 - DNA, 25 bp, Canis familiaris
cgggaggggggatgcacatcacatc

SEQ ID NO: 77868 - DNA, 25 bp, Canis familiaris
cgtgatcgagggtgaccaccgcacg

SEQ ID NO: 77869 - DNA, 25 bp, Canis familiaris
cggatgctgggctcaatcccaggac

SEQ ID NO: 77870 - DNA, 25 bp, Canis familiaris
cggagctgtgagtgctactccgcca

SEQ ID NO: 77871 - DNA, 25 bp, Canis familiaris
cggagctggacgagcagctgggccc

SEQ ID NO: 77872 - DNA, 25 bp, Canis familiaris
cggagctgctgcaggagaggcgtgc

SEQ ID NO: 77873 - DNA, 25 bp, Canis familiaris
cggagatcatgcaagctggtggctg

SEQ ID NO: 77874 - DNA, 25 bp, Canis familiaris
cggtgtcatcgagctgtgtggatat

SEQ ID NO: 77875 - DNA, 25 bp, Canis familiaris
cggattacatgtgcttggcgattaa

SEQ ID NO: 77876 - DNA, 25 bp, Canis familiaris
cgcgattgatcagatttcggaagaa

SEQ ID NO: 77877 - DNA, 25 bp, Canis familiaris
cgtagctccaggattcggactgggt

SEQ ID NO: 77878 - DNA, 25 bp, Canis familiaris
cgtgccgaaggttccgagcacaggc

SEQ ID NO: 77879 - DNA, 25 bp, Canis familiaris
cgtccagagtgagcccggaagggcg

SEQ ID NO: 77880 - DNA, 25 bp, Canis familiaris
cggtcatagtgcacagccggcaagc

SEQ ID NO: 77881 - DNA, 25 bp, Canis familiaris
cggtcggctgctgagaggtgcaaag

SEQ ID NO: 77882 - DNA, 25 bp, Canis familiaris
cgtgtttggctcagacctgcaagag

SEQ ID NO: 77883 - DNA, 25 bp, Canis familiaris
cggttcgtgccaagatacatccata

SEQ ID NO: 77884 - DNA, 25 bp, Canis familiaris
cggagacagtccaagtagcagcccc

SEQ ID NO: 77885 - DNA, 25 bp, Canis familiaris
cggagccgcgcgagatatggcccgc

SEQ ID NO: 77886 - DNA, 25 bp, Canis familiaris
cggagacgcgcttggatgtgagccc

SEQ ID NO: 77887 - DNA, 25 bp, Canis familiaris
cggagatcgagctggtgtccgagga

SEQ ID NO: 77888 - DNA, 25 bp, Canis familiaris
cgggattgactcctgtggttcagaa

SEQ ID NO: 77889 - DNA, 25 bp, Canis familiaris
cgtggaggaccgttgacttaagagt

SEQ ID NO: 77890 - DNA, 25 bp, Canis familiaris
cgtcgtaaacggcactctaaggttg

SEQ ID NO: 77891 - DNA, 25 bp, Canis familiaris
cgtcttgaaatggcgcgtcccaaga

SEQ ID NO: 77892 - DNA, 25 bp, Canis familiaris
cgacggaaatgtccggtctcgtcac

SEQ ID NO: 77893 - DNA, 25 bp, Canis familiaris
cggggaatatttgcttctcgtgccc

SEQ ID NO: 77894 - DNA, 25 bp, Canis familiaris
cggggaaacctgatgttctgcccgc

SEQ ID NO: 77895 - DNA, 25 bp, Canis familiaris
cggaggcaaagagctggtcctaccc

SEQ ID NO: 77896 - DNA, 25 bp, Canis familiaris
cggagcgctgagaagacggtcgaac

SEQ ID NO: 77897 - DNA, 25 bp, Canis familiaris
cggggctttggactggtggaacagg

SEQ ID NO: 77898 - DNA, 25 bp, Canis familiaris
cgggtttagcagccggtgacggcgg

SEQ ID NO: 77899 - DNA, 25 bp, Canis familiaris
cgggtgttgacgcgatgtgatggtc

SEQ ID NO: 77900 - DNA, 25 bp, Canis familiaris
cgtgtagagtacccgtgttggctct

SEQ ID NO: 77901 - DNA, 25 bp, Canis familiaris
cggtgctgagtatgtcgtggagtct

SEQ ID NO: 77902 - DNA, 25 bp, Canis familiaris
cggtgatggtttacacgtgtgcatt

SEQ ID NO: 77903 - DNA, 25 bp, Canis familiaris
cgtggaggttattctgcagctgggt

SEQ ID NO: 77904 - DNA, 25 bp, Canis familiaris
cgtgccagtcatcaacagcatgggc

SEQ ID NO: 77905 - DNA, 25 bp, Canis familiaris
cgtgcacagccacatgaccaacacg

SEQ ID NO: 77906 - DNA, 25 bp, Canis familiaris
cgtccatcgcaaatgcttctagatc

SEQ ID NO: 77907 - DNA, 25 bp, Canis familiaris
cgttatcacaaagatgttgtcctgt

SEQ ID NO: 77908 - DNA, 25 bp, Canis familiaris
cgggagcgccgaggatgtgagtcct

SEQ ID NO: 77909 - DNA, 25 bp, Canis familiaris
cggtccgccaaggcaggagtcatct

SEQ ID NO: 77910 - DNA, 25 bp, Canis familiaris
cgggggccaatgaggatgatctgat

SEQ ID NO: 77911 - DNA, 25 bp, Canis familiaris
cggggagcatcttgccaggagtgtg

SEQ ID NO: 77912 - DNA, 25 bp, Canis familiaris
cggtgttgcatcgatacaggcaggt

SEQ ID NO: 77913 - DNA, 25 bp, Canis familiaris
cgtgacattcaggagccaggtggtc

SEQ ID NO: 77914 - DNA, 25 bp, Canis familiaris
cgtactctcagctccatggaactaa

SEQ ID NO: 77915 - DNA, 25 bp, Canis familiaris
cgtggcctcccgaggaagtgcgagt

SEQ ID NO: 77916 - DNA, 25 bp, Canis familiaris
cgtgtcctgcctggttaaggggaga

SEQ ID NO: 77917 - DNA, 25 bp, Canis familiaris
cgtgtaccctgtatcagggtggcca

SEQ ID NO: 77918 - DNA, 25 bp, Canis familiaris
cgttgaacctgtctcaactggtgga

SEQ ID NO: 77919 - DNA, 25 bp, Canis familiaris
cgtggaatccttccatagagtagag

SEQ ID NO: 77920 - DNA, 25 bp, Canis familiaris
cgggcttgcacactccaaagaaagg

SEQ ID NO: 77921 - DNA, 25 bp, Canis familiaris
cggtgcttccacccttataagggag

SEQ ID NO: 77922 - DNA, 25 bp, Canis familiaris
cggtgtaccccaatgccaaagtgga

SEQ ID NO: 77923 - DNA, 25 bp, Canis familiaris
cgggtcaccattatgcccaaagaca

SEQ ID NO: 77924 - DNA, 25 bp, Canis familiaris
cgggctaccagaattgtctaataag

SEQ ID NO: 77925 - DNA, 25 bp, Canis familiaris
cgggtccctagacttctatgtgaag

SEQ ID NO: 77926 - DNA, 25 bp, Canis familiaris
cgtcgtccacatcgtcagttttaag

SEQ ID NO: 77927 - DNA, 25 bp, Canis familiaris
cgtagctccccgaatgggcttaaga

SEQ ID NO: 77928 - DNA, 25 bp, Canis familiaris
cgcaactcctcgagaaggtccaaaa

SEQ ID NO: 77929 - DNA, 25 bp, Canis familiaris
cccaactcttcataatttcctcaaa

SEQ ID NO: 77930 - DNA, 25 bp, Canis familiaris
cccagttttcaatagatttccatcc

SEQ ID NO: 77931 - DNA, 25 bp, Canis familiaris
gcaaaattaaacacgtttccactag

SEQ ID NO: 77932 - DNA, 25 bp, Canis familiaris
gagataaaaccctcctttaagcttg

SEQ ID NO: 77933 - DNA, 25 bp, Canis familiaris
cgtgatattactgcttcctttaagt

SEQ ID NO: 77934 - DNA, 25 bp, Canis familiaris
cgtaaagacccttgggtcgaggcag

SEQ ID NO: 77935 - DNA, 25 bp, Canis familiaris
cgtagaacctacagggctcatggcc

SEQ ID NO: 77936 - DNA, 25 bp, Canis familiaris
cgtataactttcaaggtgctccgcc

SEQ ID NO: 77937 - DNA, 25 bp, Canis familiaris
cgtcagcgatctttaagcggttccc

SEQ ID NO: 77938 - DNA, 25 bp, Canis familiaris
cgtctgccattgctttgaggtctgc

SEQ ID NO: 77939 - DNA, 25 bp, Canis familiaris
cgtctccatccagttatgatcggtc

SEQ ID NO: 77940 - DNA, 25 bp, Canis familiaris
cgtcatgccacgggagaatgccagc

SEQ ID NO: 77941 - DNA, 25 bp, Canis familiaris
cgtgcaggcaccagagttccgtgca

SEQ ID NO: 77942 - DNA, 25 bp, Canis familiaris
cgtggtcatcctggagggcatggtg

SEQ ID NO: 77943 - DNA, 25 bp, Canis familiaris
cgggtcatcgtccccgataagtaca

SEQ ID NO: 77944 - DNA, 25 bp, Canis familiaris
cgttgtccttgcccattaagaaact

SEQ ID NO: 77945 - DNA, 25 bp, Canis familiaris
cgttgggtttcctgtgaggagcctg

SEQ ID NO: 77946 - DNA, 25 bp, Canis familiaris
cgtgtgctgggtgctctttgaaagc

SEQ ID NO: 77947 - DNA, 25 bp, Canis familiaris
cgtgggggcagaggaattcaaaggg

SEQ ID NO: 77948 - DNA, 25 bp, Canis familiaris
cgttgaaggcacagaatcaccaagg

SEQ ID NO: 77949 - DNA, 25 bp, Canis familiaris
cggtgtaggcacagctctcctattg

SEQ ID NO: 77950 - DNA, 25 bp, Canis familiaris
cgggataagaatactggcctgaatg

SEQ ID NO: 77951 - DNA, 25 bp, Canis familiaris
cgggccaagtacctggacgacagaa

SEQ ID NO: 77952 - DNA, 25 bp, Canis familiaris
cgggatcaatgtatagcggcgcacg

SEQ ID NO: 77953 - DNA, 25 bp, Canis familiaris
cgggtcacatacacaatatccacgc

SEQ ID NO: 77954 - DNA, 25 bp, Canis familiaris
cgggtacagactgagcgaccacagc

SEQ ID NO: 77955 - DNA, 25 bp, Canis familiaris
cggaggaagacaggacctcccgcgc

SEQ ID NO: 77956 - DNA, 25 bp, Canis familiaris
cggatggagaccttgaactcttgcc

SEQ ID NO: 77957 - DNA, 25 bp, Canis familiaris
cggatgccggatttgaacctccgta

SEQ ID NO: 77958 - DNA, 25 bp, Canis familiaris
cgaagccggtgatgaacctcaagcc

SEQ ID NO: 77959 - DNA, 25 bp, Canis familiaris
cgggccgagtggcagactttaccga

SEQ ID NO: 77960 - DNA, 25 bp, Canis familiaris
gaggcccggattggggttagaccag

SEQ ID NO: 77961 - DNA, 25 bp, Canis familiaris
cgtgacggacttggtgttctaggcc

SEQ ID NO: 77962 - DNA, 25 bp, Canis familiaris
cgtaggcggttccgtgttaggcagc

SEQ ID NO: 77963 - DNA, 25 bp, Canis familiaris
cggaggctgtggagctggttaccag

SEQ ID NO: 77964 - DNA, 25 bp, Canis familiaris
cgtggaagcggcgctggttatcctc

SEQ ID NO: 77965 - DNA, 25 bp, Canis familiaris
cgggtcagcgttgctggtagtcctg

SEQ ID NO: 77966 - DNA, 25 bp, Canis familiaris
cgggtcgtgcatagctatgaggagt

SEQ ID NO: 77967 - DNA, 25 bp, Canis familiaris
cgggtgcggcttctggcgagaagca

SEQ ID NO: 77968 - DNA, 25 bp, Canis familiaris
cggtctgcgaccaggagcctggaga

SEQ ID NO: 77969 - DNA, 25 bp, Canis familiaris
cggtcatcgaggacatgctggccgt

SEQ ID NO: 77970 - DNA, 25 bp, Canis familiaris
cgggcatcgaaggagggcacgtgat

SEQ ID NO: 77971 - DNA, 25 bp, Canis familiaris
cgggcagctggaggatgatgatgca

SEQ ID NO: 77972 - DNA, 25 bp, Canis familiaris
cgggccattgcaggcgatgagcaca

SEQ ID NO: 77973 - DNA, 25 bp, Canis familiaris
cgggcgatgtaccagtacaggcccc

SEQ ID NO: 77974 - DNA, 25 bp, Canis familiaris
cgggcgggggactcatggagcccgc

SEQ ID NO: 77975 - DNA, 25 bp, Canis familiaris
cgggaggctgggaatgccagggccc

SEQ ID NO: 77976 - DNA, 25 bp, Canis familiaris
cgggatgtaggacatctcgacccgc

SEQ ID NO: 77977 - DNA, 25 bp, Canis familiaris
cgggtggagtgagacctactgcgtc

SEQ ID NO: 77978 - DNA, 25 bp, Canis familiaris
cgcggttgagtgtacacctttgggt

SEQ ID NO: 77979 - DNA, 25 bp, Canis familiaris
gccgtgtttaaatctcttcgttttg

SEQ ID NO: 77980 - DNA, 25 bp, Canis familiaris
cgcccttctaagtgttcacgtttag

SEQ ID NO: 77981 - DNA, 25 bp, Canis familiaris
cgtccttctaaatgctctttgttgt

SEQ ID NO: 77982 - DNA, 25 bp, Canis familiaris
cgttctcttgacaaacacgttgtct

SEQ ID NO: 77983 - DNA, 25 bp, Canis familiaris
cggattcttgaaaagccgtccctga

SEQ ID NO: 77984 - DNA, 25 bp, Canis familiaris
cggttcttattcacaacaccactga

SEQ ID NO: 77985 - DNA, 25 bp, Canis familiaris
cgtgttatatttctaatcctactta

SEQ ID NO: 77986 - DNA, 25 bp, Canis familiaris
cggttatattgtctttgggagttct

SEQ ID NO: 77987 - DNA, 25 bp, Canis familiaris
gctggttatttacttacggggctct

SEQ ID NO: 77988 - DNA, 25 bp, Canis familiaris
cggtatcatttaccggagggttctg

SEQ ID NO: 77989 - DNA, 25 bp, Canis familiaris
cgtgttatctaccacggacggtcgc

SEQ ID NO: 77990 - DNA, 25 bp, Canis familiaris
cgggggctgcggtggacgaggcagc

SEQ ID NO: 77991 - DNA, 25 bp, Canis familiaris
cgggaggaggagcagttcggcgtgc

SEQ ID NO: 77992 - DNA, 25 bp, Canis familiaris
cgtggagtcggagggtctcaggggg

SEQ ID NO: 77993 - DNA, 25 bp, Canis familiaris
cgaggacccgcgggtccaatggcgg

SEQ ID NO: 77994 - DNA, 25 bp, Canis familiaris
cggtgcccacgcggcgtgggcgggc

SEQ ID NO: 77995 - DNA, 25 bp, Canis familiaris
cgtgttccctgagagtgggggcgct

SEQ ID NO: 77996 - DNA, 25 bp, Canis familiaris
cgttttcctcaatcggtgttcagta

SEQ ID NO: 77997 - DNA, 25 bp, Canis familiaris
cggtatccctacttcattagattca

SEQ ID NO: 77998 - DNA, 25 bp, Canis familiaris
cggtgtgaccccttatatgattttc

SEQ ID NO: 77999 - DNA, 25 bp, Canis familiaris
cgtcttactccttttgatttcttga

SEQ ID NO: 78000 - DNA, 25 bp, Canis familiaris
cgtcttcccgtgtatatgttattgt

SEQ ID NO: 78001 - DNA, 25 bp, Canis familiaris
cgtttctttccatatgttatttcca

SEQ ID NO: 78002 - DNA, 25 bp, Canis familiaris
cgtttctttccatatttatcttcga

SEQ ID NO: 78003 - DNA, 25 bp, Canis familiaris
cgttttctatcctcaaccaaaggat

SEQ ID NO: 78004 - DNA, 25 bp, Canis familiaris
cgttcttctatacccaactgtatca

SEQ ID NO: 78005 - DNA, 25 bp, Canis familiaris
cgtcccttcaaccaagaattctgaa

SEQ ID NO: 78006 - DNA, 25 bp, Canis familiaris
cgtcctctgtcatccagcagagatt

SEQ ID NO: 78007 - DNA, 25 bp, Canis familiaris
cgtggcagtgtctcctgagtgacaa

SEQ ID NO: 78008 - DNA, 25 bp, Canis familiaris
cgggcggccttcctggagaaggaga

SEQ ID NO: 78009 - DNA, 25 bp, Canis familiaris
cgtaccctttgcctggaggagtcaa

SEQ ID NO: 78010 - DNA, 25 bp, Canis familiaris
cgtaccaattgctctgggtaacaca

SEQ ID NO: 78011 - DNA, 25 bp, Canis familiaris
cgttcgtgttctgcggcagtaagcc

SEQ ID NO: 78012 - DNA, 25 bp, Canis familiaris
cgtacggatcgtccgcgaggacatg

SEQ ID NO: 78013 - DNA, 25 bp, Canis familiaris
cgtccggactgtcccagaagtcaca

SEQ ID NO: 78014 - DNA, 25 bp, Canis familiaris
cgatcctgggtcgccaggatggcgc

SEQ ID NO: 78015 - DNA, 25 bp, Canis familiaris
cgagcagactttgcccaggcctgcc

SEQ ID NO: 78016 - DNA, 25 bp, Canis familiaris
cggtgacttgtttacacagcctctc

SEQ ID NO: 78017 - DNA, 25 bp, Canis familiaris
cgggacttgatttcagtacctctca

SEQ ID NO: 78018 - DNA, 25 bp, Canis familiaris
cgggacgtgatgatcgtgcccggca

SEQ ID NO: 78019 - DNA, 25 bp, Canis familiaris
cgggacttgatcctgggtcttcagg

SEQ ID NO: 78020 - DNA, 25 bp, Canis familiaris
cggtactgttagccagggtccaggg

SEQ ID NO: 78021 - DNA, 25 bp, Canis familiaris
cggtctctgtgtcgaggggggaggg

SEQ ID NO: 78022 - DNA, 25 bp, Canis familiaris
cgggcaggtgtcgatggggggaacg

SEQ ID NO: 78023 - DNA, 25 bp, Canis familiaris
cgggccgttctctcgtgggagacgc

SEQ ID NO: 78024 - DNA, 25 bp, Canis familiaris
cggggtgagtcctctggagagcaga

SEQ ID NO: 78025 - DNA, 25 bp, Canis familiaris
cgggagaggaccccgtggagagcac

SEQ ID NO: 78026 - DNA, 25 bp, Canis familiaris
gggggaaaagccagtgggagcctgg

SEQ ID NO: 78027 - DNA, 25 bp, Canis familiaris
ggagaaaagggtctggggcctctgg

SEQ ID NO: 78028 - DNA, 25 bp, Canis familiaris
cgtgttaagggtagtgtcggcggcg

SEQ ID NO: 78029 - DNA, 25 bp, Canis familiaris
cgtcgtacacgacggcttcgagggt

SEQ ID NO: 78030 - DNA, 25 bp, Canis familiaris
cgtcgtcgacaacggctccggcatg

SEQ ID NO: 78031 - DNA, 25 bp, Canis familiaris
cgttctggatgctcgcaaccgaatg

SEQ ID NO: 78032 - DNA, 25 bp, Canis familiaris
cgtgttggttgggcacacggctgat

SEQ ID NO: 78033 - DNA, 25 bp, Canis familiaris
cgtgtgtgtgttcaacggggtccac

SEQ ID NO: 78034 - DNA, 25 bp, Canis familiaris
cgatttgataactccgggttctaca

SEQ ID NO: 78035 - DNA, 25 bp, Canis familiaris
tcgttgtaaggagaagggtgtaaga

SEQ ID NO: 78036 - DNA, 25 bp, Canis familiaris
cggtctactgcacaaagggttaggt

SEQ ID NO: 78037 - DNA, 25 bp, Canis familiaris
cgggattctgacttagaggcgttca

SEQ ID NO: 78038 - DNA, 25 bp, Canis familiaris
cgggaagctcactggcatggccttc

SEQ ID NO: 78039 - DNA, 25 bp, Canis familiaris
cgggtcactccatcgatgttcttct

SEQ ID NO: 78040 - DNA, 25 bp, Canis familiaris
cgaggtcaccaaccagtttctcaaa

SEQ ID NO: 78041 - DNA, 25 bp, Canis familiaris
cggtgtaccagactcagcactttaa

SEQ ID NO: 78042 - DNA, 25 bp, Canis familiaris
cgtgtcatacctatggcatctttcc

SEQ ID NO: 78043 - DNA, 25 bp, Canis familiaris
cgtgtatgacgctgggcacgttgag

SEQ ID NO: 78044 - DNA, 25 bp, Canis familiaris
cggtgctcagcgggggcaaggctga

SEQ ID NO: 78045 - DNA, 25 bp, Canis familiaris
cggtggcaccagaggtagtgcgacg

SEQ ID NO: 78046 - DNA, 25 bp, Canis familiaris
cggtggccgctgtgctgaagcggag

SEQ ID NO: 78047 - DNA, 25 bp, Canis familiaris
cggttccgctgccctgaggcactct

SEQ ID NO: 78048 - DNA, 25 bp, Canis familiaris
ccgtacctgcagcggggactttgtt

SEQ ID NO: 78049 - DNA, 25 bp, Canis familiaris
cccatagccgacagggtgacttacc

SEQ ID NO: 78050 - DNA, 25 bp, Canis familiaris
cccatatgccgtcagggtgacttcc

SEQ ID NO: 78051 - DNA, 25 bp, Canis familiaris
tccccgggtaagggtacgcatcctg

SEQ ID NO: 78052 - DNA, 25 bp, Canis familiaris
ccctccggaaacagctacgacagct

SEQ ID NO: 78053 - DNA, 25 bp, Canis familiaris
cgtccacggcaaaccgacagaaccg

SEQ ID NO: 78054 - DNA, 25 bp, Canis familiaris
cgtcatccggctcaaagggaatccg

SEQ ID NO: 78055 - DNA, 25 bp, Canis familiaris
cgtctcccgtcagcggaggaagcac

SEQ ID NO: 78056 - DNA, 25 bp, Canis familiaris
cgtccaccttgatcggtcgaagaag

SEQ ID NO: 78057 - DNA, 25 bp, Canis familiaris
cgtacccacatatcaggtcctatgt

SEQ ID NO: 78058 - DNA, 25 bp, Canis familiaris
cgtgaccaaaatgtggctcccatgg

SEQ ID NO: 78059 - DNA, 25 bp, Canis familiaris
cgtgtaaatactctgttcctcatcc

SEQ ID NO: 78060 - DNA, 25 bp, Canis familiaris
cgggaaccactgaatggtcctctcc

SEQ ID NO: 78061 - DNA, 25 bp, Canis familiaris
cgggaaccctgttcacagacattcc

SEQ ID NO: 78062 - DNA, 25 bp, Canis familiaris
cggtgaactccggaccagacaccga

SEQ ID NO: 78063 - DNA, 25 bp, Canis familiaris
cgtggcaactccgagcggcaatgac

SEQ ID NO: 78064 - DNA, 25 bp, Canis familiaris
cgtaaatctgccgaagtgccatctc

SEQ ID NO: 78065 - DNA, 25 bp, Canis familiaris
cgtagagtcccaagagtgccgtaac

SEQ ID NO: 78066 - DNA, 25 bp, Canis familiaris
cgtggagtctactggtgtcttcacc

SEQ ID NO: 78067 - DNA, 25 bp, Canis familiaris
cgtggagtccactggcgtcttcacc

SEQ ID NO: 78068 - DNA, 25 bp, Canis familiaris
cgtggagtccactggcgtcttcacc

SEQ ID NO: 78069 - DNA, 25 bp, Canis familiaris
cgtggtgtccacggacgacactgtc

SEQ ID NO: 78070 - DNA, 25 bp, Canis familiaris
cgtgttgtccacaaacaacctggca

SEQ ID NO: 78071 - DNA, 25 bp, Canis familiaris
cgggtgctcaacaaaccaggaggag

SEQ ID NO: 78072 - DNA, 25 bp, Canis familiaris
cggggctgaaacacctggcaagaaa

SEQ ID NO: 78073 - DNA, 25 bp, Canis familiaris
cggggcttttgcatgcctggagaac

SEQ ID NO: 78074 - DNA, 25 bp, Canis familiaris
cgtggtgatgttacattcctatgaa

SEQ ID NO: 78075 - DNA, 25 bp, Canis familiaris
gcggttggccataagatcccgactt

SEQ ID NO: 78076 - DNA, 25 bp, Canis familiaris
cgggtgtgccatccagtgccgggtc

SEQ ID NO: 78077 - DNA, 25 bp, Canis familiaris
gctgttgggccccatggctagggcc

SEQ ID NO: 78078 - DNA, 25 bp, Canis familiaris
cgtggaggtcctcactgaggtgcca

SEQ ID NO: 78079 - DNA, 25 bp, Canis familiaris
cgtggaggacttcagtggttcgagg

SEQ ID NO: 78080 - DNA, 25 bp, Canis familiaris
cggtgggatgttcagaggtggccgc

SEQ ID NO: 78081 - DNA, 25 bp, Canis familiaris
cggtcagttggtcgatctggtggcc

SEQ ID NO: 78082 - DNA, 25 bp, Canis familiaris
cgtgtcgggcgatgacgttggcgcc

SEQ ID NO: 78083 - DNA, 25 bp, Canis familiaris
cgtgcccctggatgaccttgtgggc

SEQ ID NO: 78084 - DNA, 25 bp, Canis familiaris
cgacccctggctttgccaagtgggg

SEQ ID NO: 78085 - DNA, 25 bp, Canis familiaris
cgtccgctctggattgttgagtttg

SEQ ID NO: 78086 - DNA, 25 bp, Canis familiaris
cgtgccgtcgggtggagagtatagt

SEQ ID NO: 78087 - DNA, 25 bp, Canis familiaris
cgtcctctggggtcttgaagttaat

SEQ ID NO: 78088 - DNA, 25 bp, Canis familiaris
cgtgccttgttgttcctaaatatcc

SEQ ID NO: 78089 - DNA, 25 bp, Canis familiaris
cgtcttttgttgactctagataacc

SEQ ID NO: 78090 - DNA, 25 bp, Canis familiaris
cgtgcttctgtgctgcactgtgaac

SEQ ID NO: 78091 - DNA, 25 bp, Canis familiaris
cgtgctttgcactcacttaacaatg

SEQ ID NO: 78092 - DNA, 25 bp, Canis familiaris
cgtcgtatacaaacttcacctttat

SEQ ID NO: 78093 - DNA, 25 bp, Canis familiaris
cgtgcgtacacgttattagcctttt

SEQ ID NO: 78094 - DNA, 25 bp, Canis familiaris
cgtggcaaccgtataatcatattat

SEQ ID NO: 78095 - DNA, 25 bp, Canis familiaris
cgtggacatccgcaaagacctgtac

SEQ ID NO: 78096 - DNA, 25 bp, Canis familiaris
cgtcgtccaacctgagaccatggac

SEQ ID NO: 78097 - DNA, 25 bp, Canis familiaris
cgtagtccagggctgtgcagccggg

SEQ ID NO: 78098 - DNA, 25 bp, Canis familiaris
cgtttccaagagatgtggccagggc

SEQ ID NO: 78099 - DNA, 25 bp, Canis familiaris
cgttgccctcggagatgggcaccgc

SEQ ID NO: 78100 - DNA, 25 bp, Canis familiaris
cgttgccctcggagatgggcaccgc

SEQ ID NO: 78101 - DNA, 25 bp, Canis familiaris
cggtgctcctggttggcaaagaccc

SEQ ID NO: 78102 - DNA, 25 bp, Canis familiaris
cggtctccgttgactacaacaccgc

SEQ ID NO: 78103 - DNA, 25 bp, Canis familiaris
cgggctctttcggctacaagaagcc

SEQ ID NO: 78104 - DNA, 25 bp, Canis familiaris
cggtctttcatctatctctcaaaga

SEQ ID NO: 78105 - DNA, 25 bp, Canis familiaris
cgtggctttcattctttctaaattt

SEQ ID NO: 78106 - DNA, 25 bp, Canis familiaris
cgggactctctatgtttgatatgtt

SEQ ID NO: 78107 - DNA, 25 bp, Canis familiaris
cgtgtaattccatgctcctatatgc

SEQ ID NO: 78108 - DNA, 25 bp, Canis familiaris
cgttcaagttcttgtgccagctcac

SEQ ID NO: 78109 - DNA, 25 bp, Canis familiaris
cgtacacatgttcgcgacgatctct

SEQ ID NO: 78110 - DNA, 25 bp, Canis familiaris
cgtctccatatgcgtgataaattaa

SEQ ID NO: 78111 - DNA, 25 bp, Canis familiaris
cgtcatccagatgcttcctttataa

SEQ ID NO: 78112 - DNA, 25 bp, Canis familiaris
cgtgccacattgctatccttggaaa

SEQ ID NO: 78113 - DNA, 25 bp, Canis familiaris
cgtgcgccctgtggagtttggaaaa

SEQ ID NO: 78114 - DNA, 25 bp, Canis familiaris
cgtgtgcgcgtgtgcagttggaagc

SEQ ID NO: 78115 - DNA, 25 bp, Canis familiaris
cgggagcgcagcaggcttatacgcc

SEQ ID NO: 78116 - DNA, 25 bp, Canis familiaris
cggtgagagcaggccagctgagacc

SEQ ID NO: 78117 - DNA, 25 bp, Canis familiaris
cgggatagcagctgcaaggactctc

SEQ ID NO: 78118 - DNA, 25 bp, Canis familiaris
cgggacagcgatacacggcagaatt

SEQ ID NO: 78119 - DNA, 25 bp, Canis familiaris
cgggcctcggcaacaggctgaattt

SEQ ID NO: 78120 - DNA, 25 bp, Canis familiaris
cgggccttctcagaggctgacatgg

SEQ ID NO: 78121 - DNA, 25 bp, Canis familiaris
cgggcgcttctcatagcggaacagt

SEQ ID NO: 78122 - DNA, 25 bp, Canis familiaris
cgggctctgtggatggtgtgcaccg

SEQ ID NO: 78123 - DNA, 25 bp, Canis familiaris
cgggccaggggctggatgaccgata

SEQ ID NO: 78124 - DNA, 25 bp, Canis familiaris
cgagggcgagggtggaaccgatctc

SEQ ID NO: 78125 - DNA, 25 bp, Canis familiaris
cgaggcacgaggcacggaaactaac

SEQ ID NO: 78126 - DNA, 25 bp, Canis familiaris
cgggcacagaggcacacgtcgtgcc

SEQ ID NO: 78127 - DNA, 25 bp, Canis familiaris
cgggcacaagactcattctctgtcc

SEQ ID NO: 78128 - DNA, 25 bp, Canis familiaris
cgggatcaaagtctgttctggcggc

SEQ ID NO: 78129 - DNA, 25 bp, Canis familiaris
cgggatcaaagtctgttctggcggc

SEQ ID NO: 78130 - DNA, 25 bp, Canis familiaris
cgggatgaaagatgcagtccgggcg

SEQ ID NO: 78131 - DNA, 25 bp, Canis familiaris
cgtggtgatttatggcgcgggggga

SEQ ID NO: 78132 - DNA, 25 bp, Canis familiaris
cgtggtggacgatttggccggaagg

SEQ ID NO: 78133 - DNA, 25 bp, Canis familiaris
cggtgatggacaaactgcgcctgga

SEQ ID NO: 78134 - DNA, 25 bp, Canis familiaris
cgtggtgcgaaatcattggtggcaa

SEQ ID NO: 78135 - DNA, 25 bp, Canis familiaris
cgtgggtgtagaccattctgtggga

SEQ ID NO: 78136 - DNA, 25 bp, Canis familiaris
cgtgggaacagcttcttcttaggaa

SEQ ID NO: 78137 - DNA, 25 bp, Canis familiaris
cgtggagaaagctgccccatatgga

SEQ ID NO: 78138 - DNA, 25 bp, Canis familiaris
cgatcaagaaaatcccgaagaaggt

SEQ ID NO: 78139 - DNA, 25 bp, Canis familiaris
gcgtaggacaacacccggaaatttg

SEQ ID NO: 78140 - DNA, 25 bp, Canis familiaris
cgttgtgaccacacctcggaataaa

SEQ ID NO: 78141 - DNA, 25 bp, Canis familiaris
cgtttatcccttatccaacacaaga

SEQ ID NO: 78142 - DNA, 25 bp, Canis familiaris
cccttgatacccactaaatccaaat

SEQ ID NO: 78143 - DNA, 25 bp, Canis familiaris
ccatttagggacactaaaggacagt

SEQ ID NO: 78144 - DNA, 25 bp, Canis familiaris
gccatttagggacactaaaggacag

SEQ ID NO: 78145 - DNA, 25 bp, Canis familiaris
gcctcttttggacattaaaggtcga

SEQ ID NO: 78146 - DNA, 25 bp, Canis familiaris
gaccgttatggccgggaaagggctg

SEQ ID NO: 78147 - DNA, 25 bp, Canis familiaris
cgccggttgggctggctatagggct

SEQ ID NO: 78148 - DNA, 25 bp, Canis familiaris
cgtcgtgttgggtccgattgatcgc

SEQ ID NO: 78149 - DNA, 25 bp, Canis familiaris
cgttgctttaggtatccgtgatccc

SEQ ID NO: 78150 - DNA, 25 bp, Canis familiaris
cgttcatgttaggctgtcttgtaca

SEQ ID NO: 78151 - DNA, 25 bp, Canis familiaris
cgttctattactcgtttaatccact

SEQ ID NO: 78152 - DNA, 25 bp, Canis familiaris
cgtttcttcacagggaccaatccct

SEQ ID NO: 78153 - DNA, 25 bp, Canis familiaris
cgtctccctctgatgaaacgactcc

SEQ ID NO: 78154 - DNA, 25 bp, Canis familiaris
cgtcttctctgtcatggacacgtct

SEQ ID NO: 78155 - DNA, 25 bp, Canis familiaris
cgttcttgcttggattgatgccgtc

SEQ ID NO: 78156 - DNA, 25 bp, Canis familiaris
cgtctgcatttccgatgtggtttcg

SEQ ID NO: 78157 - DNA, 25 bp, Canis familiaris
cgtcgcattttggtgtactcctaga

SEQ ID NO: 78158 - DNA, 25 bp, Canis familiaris
cgtcggtcgtgcagtactctgaaga

SEQ ID NO: 78159 - DNA, 25 bp, Canis familiaris
gttccgttgtcttgaacccaggaca

SEQ ID NO: 78160 - DNA, 25 bp, Canis familiaris
cgtggcagctggtttatacccagga

SEQ ID NO: 78161 - DNA, 25 bp, Canis familiaris
cgggtcatggagtacatcagccgcc

SEQ ID NO: 78162 - DNA, 25 bp, Canis familiaris
cgggatctccgatatgcatcccgca

SEQ ID NO: 78163 - DNA, 25 bp, Canis familiaris
cgggtctcacagggatatccgcgtc

SEQ ID NO: 78164 - DNA, 25 bp, Canis familiaris
cgtcttctcaacggaagggcctcaa

SEQ ID NO: 78165 - DNA, 25 bp, Canis familiaris
cgcctttacactggaaccggcttct

SEQ ID NO: 78166 - DNA, 25 bp, Canis familiaris
cgccgcgatagacaaacagggcttc

SEQ ID NO: 78167 - DNA, 25 bp, Canis familiaris
cgtcgctaatattatagccagggct

SEQ ID NO: 78168 - DNA, 25 bp, Canis familiaris
cgtgctgtccaagatcagcctgggc

SEQ ID NO: 78169 - DNA, 25 bp, Canis familiaris
cgtgtgtccaagagaggctgcggcc

SEQ ID NO: 78170 - DNA, 25 bp, Canis familiaris
cgggctgcccaggaatttcaggccc

SEQ ID NO: 78171 - DNA, 25 bp, Canis familiaris
cgtggtcagccgggagtttggcacc

SEQ ID NO: 78172 - DNA, 25 bp, Canis familiaris
cgtggaccgcgcggggaagagcacg

SEQ ID NO: 78173 - DNA, 25 bp, Canis familiaris
cgtggagcaccggggcaaaggccgg

SEQ ID NO: 78174 - DNA, 25 bp, Canis familiaris
cgggatcatggctgtggccacaggc

SEQ ID NO: 78175 - DNA, 25 bp, Canis familiaris
cgggatcatgccctaagctgaaagc

SEQ ID NO: 78176 - DNA, 25 bp, Canis familiaris
cgtgctgcacagcctagtcagtgaa

SEQ ID NO: 78177 - DNA, 25 bp, Canis familiaris
cgtgccaactgctgctgcattaaac

SEQ ID NO: 78178 - DNA, 25 bp, Canis familiaris
cgtggcatacactgagattaccctt

SEQ ID NO: 78179 - DNA, 25 bp, Canis familiaris
cgggaactctgcaatttaacactgt

SEQ ID NO: 78180 - DNA, 25 bp, Canis familiaris
cgagaaaccaccttataacctcaag

SEQ ID NO: 78181 - DNA, 25 bp, Canis familiaris
gcgaaaagcctaggtataatcctac

SEQ ID NO: 78182 - DNA, 25 bp, Canis familiaris
cgaaaagcctaggtataatcctact

SEQ ID NO: 78183 - DNA, 25 bp, Canis familiaris
cgggatggccgggtcaacatccctc

SEQ ID NO: 78184 - DNA, 25 bp, Canis familiaris
cgggctggaagaaggaggctccctc

SEQ ID NO: 78185 - DNA, 25 bp, Canis familiaris
cgggctggcagctgtgtagggccct

SEQ ID NO: 78186 - DNA, 25 bp, Canis familiaris
cgggcgacgtgtggtcgaggcccga

SEQ ID NO: 78187 - DNA, 25 bp, Canis familiaris
cggggattgtgacttgcagggtccg

SEQ ID NO: 78188 - DNA, 25 bp, Canis familiaris
cgtgggattccacttgagtcttccc

SEQ ID NO: 78189 - DNA, 25 bp, Canis familiaris
cggggataccctgggtggtgcagca

SEQ ID NO: 78190 - DNA, 25 bp, Canis familiaris
cgggaggaagacggagctggctgcc

SEQ ID NO: 78191 - DNA, 25 bp, Canis familiaris
cgtggaggtcagagagggcagcgcc

SEQ ID NO: 78192 - DNA, 25 bp, Canis familiaris
cgggagctctcagagacagcaccac

SEQ ID NO: 78193 - DNA, 25 bp, Canis familiaris
cgggcagatcaagagacacccgcgc

SEQ ID NO: 78194 - DNA, 25 bp, Canis familiaris
cgggcgagaagcggaggcccgtggg

SEQ ID NO: 78195 - DNA, 25 bp, Canis familiaris
cggggagagagaggtggcccgcggg

SEQ ID NO: 78196 - DNA, 25 bp, Canis familiaris
cgggcaagagtgtgtgtgcgccccg

SEQ ID NO: 78197 - DNA, 25 bp, Canis familiaris
cgggtagaggcatcagtcctcaccc

SEQ ID NO: 78198 - DNA, 25 bp, Canis familiaris
cgggtgggcaaggctgtcacacccc

SEQ ID NO: 78199 - DNA, 25 bp, Canis familiaris
cgttcatgggaacctgatcataacc

SEQ ID NO: 78200 - DNA, 25 bp, Canis familiaris
cgtctcagggagatctactcacctc

SEQ ID NO: 78201 - DNA, 25 bp, Canis familiaris
cgtccaggttgaacagacgccgctc

SEQ ID NO: 78202 - DNA, 25 bp, Canis familiaris
cgtccaggttgaacagacgccgctc

SEQ ID NO: 78203 - DNA, 25 bp, Canis familiaris
cgtccaggttgaacagacgccgctc

SEQ ID NO: 78204 - DNA, 25 bp, Canis familiaris
cgacccagttgctgaagggactctg

SEQ ID NO: 78205 - DNA, 25 bp, Canis familiaris
cgggagcagttctgcaggggtcgcc

SEQ ID NO: 78206 - DNA, 25 bp, Canis familiaris
cgtgaacattttgagggtggcgcgc

SEQ ID NO: 78207 - DNA, 25 bp, Canis familiaris
cgtgaaagctctgtagcggggcgtg

SEQ ID NO: 78208 - DNA, 25 bp, Canis familiaris
cgtggaagctctgtcgagcctggac

SEQ ID NO: 78209 - DNA, 25 bp, Canis familiaris
cgtgaaagcttctggctgtcggagc

SEQ ID NO: 78210 - DNA, 25 bp, Canis familiaris
cgtggcaactttgtgctacgagatc

SEQ ID NO: 78211 - DNA, 25 bp, Canis familiaris
cgtgggcagctacaatgctacggac

SEQ ID NO: 78212 - DNA, 25 bp, Canis familiaris
cgtgctggagacccattggacggag

SEQ ID NO: 78213 - DNA, 25 bp, Canis familiaris
cgtgcatcggaactatagtgcctgc

SEQ ID NO: 78214 - DNA, 25 bp, Canis familiaris
cgatgccaagaagaagctgctgctc

SEQ ID NO: 78215 - DNA, 25 bp, Canis familiaris
cgtggatcgtaggcaagcacctctg

SEQ ID NO: 78216 - DNA, 25 bp, Canis familiaris
cgggcctgctgaagcctgccgcctg

SEQ ID NO: 78217 - DNA, 25 bp, Canis familiaris
cgggatcagagaagacatccgcaag

SEQ ID NO: 78218 - DNA, 25 bp, Canis familiaris
cgggagcagagcagtgcccggatca

SEQ ID NO: 78219 - DNA, 25 bp, Canis familiaris
cgaggtggagcatatcccggaggag

SEQ ID NO: 78220 - DNA, 25 bp, Canis familiaris
cgtcgggagaggaccccgtggagag

SEQ ID NO: 78221 - DNA, 25 bp, Canis familiaris
cgaggggagtggagctcgctggtga

SEQ ID NO: 78222 - DNA, 25 bp, Canis familiaris
cgggaggagtgtgtcttcatgtgga

SEQ ID NO: 78223 - DNA, 25 bp, Canis familiaris
cgggcaggaggtgttggagctggcg

SEQ ID NO: 78224 - DNA, 25 bp, Canis familiaris
cgggcggcaggtgttgggagagcgc

SEQ ID NO: 78225 - DNA, 25 bp, Canis familiaris
cgtggcgcacggagtgggggaggac

SEQ ID NO: 78226 - DNA, 25 bp, Canis familiaris
cgggcagaggccagtggggatagcg

SEQ ID NO: 78227 - DNA, 25 bp, Canis familiaris
cgggctgaaggcaggcgctagaccg

SEQ ID NO: 78228 - DNA, 25 bp, Canis familiaris
cgggtgcggctgagagcgtgaggcc

SEQ ID NO: 78229 - DNA, 25 bp, Canis familiaris
cgggcagtggtgacagggctgctgg

SEQ ID NO: 78230 - DNA, 25 bp, Canis familiaris
cgggcctgaggcagcagtggctgcg

SEQ ID NO: 78231 - DNA, 25 bp, Canis familiaris
cgggccagtggctgctgaggcagcg

SEQ ID NO: 78232 - DNA, 25 bp, Canis familiaris
cgtgaccatgtggcatcctggtccc

SEQ ID NO: 78233 - DNA, 25 bp, Canis familiaris
cgtgaccattgctgcttgtgtgcac

SEQ ID NO: 78234 - DNA, 25 bp, Canis familiaris
cgtaccatccagtttgtggactggt

SEQ ID NO: 78235 - DNA, 25 bp, Canis familiaris
cgtcacgacgattctattcttcggc

SEQ ID NO: 78236 - DNA, 25 bp, Canis familiaris
cgtcacttgtgatttggtttgggat

SEQ ID NO: 78237 - DNA, 25 bp, Canis familiaris
cgtcctgtatgtttgggttctttca

SEQ ID NO: 78238 - DNA, 25 bp, Canis familiaris
cgtccgtttaatggtgatgccttac

SEQ ID NO: 78239 - DNA, 25 bp, Canis familiaris
cgcatccgaccttatcagaagcttt

SEQ ID NO: 78240 - DNA, 25 bp, Canis familiaris
cgatcccacactcaatgaaccattc

SEQ ID NO: 78241 - DNA, 25 bp, Canis familiaris
cgtacgcaacgtggatgtacctacc

SEQ ID NO: 78242 - DNA, 25 bp, Canis familiaris
cgtacgtagcagagcagctccctcg

SEQ ID NO: 78243 - DNA, 25 bp, Canis familiaris
cgtccgtgtgcacttgatgcaaccc

SEQ ID NO: 78244 - DNA, 25 bp, Canis familiaris
cgtatgtgggagtgtgccacgccgt

SEQ ID NO: 78245 - DNA, 25 bp, Canis familiaris
cgtcagggtgacttccctggtcacc

SEQ ID NO: 78246 - DNA, 25 bp, Canis familiaris
cgtgggagctgacttctactgtgtc

SEQ ID NO: 78247 - DNA, 25 bp, Canis familiaris
cgtgggcagtgttgttcacaggcct

SEQ ID NO: 78248 - DNA, 25 bp, Canis familiaris
cgtgatgagcgtgttctggggcttc

SEQ ID NO: 78249 - DNA, 25 bp, Canis familiaris
cgtatgagcaggtcccacgggatta

SEQ ID NO: 78250 - DNA, 25 bp, Canis familiaris
cgtagatgcagtgcaccctggctac

SEQ ID NO: 78251 - DNA, 25 bp, Canis familiaris
cgatagtacgcggcgcgctggttgc

SEQ ID NO: 78252 - DNA, 25 bp, Canis familiaris
cgtgaacactgaggcactgggcggc

SEQ ID NO: 78253 - DNA, 25 bp, Canis familiaris
cgtggcacacttggacatgggaagt

SEQ ID NO: 78254 - DNA, 25 bp, Canis familiaris
cgggccctggtgcatgagagagatg

SEQ ID NO: 78255 - DNA, 25 bp, Canis familiaris
cgggcaccggctgcaagcagagaag

SEQ ID NO: 78256 - DNA, 25 bp, Canis familiaris
cgggaactggcggacagctggatcg

SEQ ID NO: 78257 - DNA, 25 bp, Canis familiaris
cgcgggcacagtctcacagtaacgc

SEQ ID NO: 78258 - DNA, 25 bp, Canis familiaris
cgggacagatgtccttcactttcgc

SEQ ID NO: 78259 - DNA, 25 bp, Canis familiaris
cgggttgtgtacatcagtttctctg

SEQ ID NO: 78260 - DNA, 25 bp, Canis familiaris
cgtaatgtctgatcctcacttttgc

SEQ ID NO: 78261 - DNA, 25 bp, Canis familiaris
cgtaggctttgtgtcctttagctgc

SEQ ID NO: 78262 - DNA, 25 bp, Canis familiaris
gcgtctgaattttgttcctttggtc

SEQ ID NO: 78263 - DNA, 25 bp, Canis familiaris
cgtttaatggtgatgccttacgtgc

SEQ ID NO: 78264 - DNA, 25 bp, Canis familiaris
cgttgtacggtaacccagtgcactg

SEQ ID NO: 78265 - DNA, 25 bp, Canis familiaris
cgttcgcacgaggaagcccttgaat

SEQ ID NO: 78266 - DNA, 25 bp, Canis familiaris
cgtcacgcgcaggtgacggccttag

SEQ ID NO: 78267 - DNA, 25 bp, Canis familiaris
cgtacgctacgccaatggtttatgg

SEQ ID NO: 78268 - DNA, 25 bp, Canis familiaris
cgttcgcagacccaagtttactaat

SEQ ID NO: 78269 - DNA, 25 bp, Canis familiaris
cgagtcggcccgaggttatctagag

SEQ ID NO: 78270 - DNA, 25 bp, Canis familiaris
cgtgacggccaattcggattgttga

SEQ ID NO: 78271 - DNA, 25 bp, Canis familiaris
cgtgaagttccttcgcttatcttgg

SEQ ID NO: 78272 - DNA, 25 bp, Canis familiaris
cgtatcgttcgtttttgtctatgtt

SEQ ID NO: 78273 - DNA, 25 bp, Canis familiaris
cgtatcgttccgcctgggcgggatt

SEQ ID NO: 78274 - DNA, 25 bp, Canis familiaris
cgtgtggttccgcacgtgtgcggtc

SEQ ID NO: 78275 - DNA, 25 bp, Canis familiaris
cgtgtggcgccaaaacgtgtggagg

SEQ ID NO: 78276 - DNA, 25 bp, Canis familiaris
cgtgtggcgccgagaaggggaaccg

SEQ ID NO: 78277 - DNA, 25 bp, Canis familiaris
cgtgcagggcggaggagacggcccc

SEQ ID NO: 78278 - DNA, 25 bp, Canis familiaris
cgtaggggaggaggatgctgcggca

SEQ ID NO: 78279 - DNA, 25 bp, Canis familiaris
cgtagtggggtggacagcgcagacg

SEQ ID NO: 78280 - DNA, 25 bp, Canis familiaris
cgtggtggtgggtaagctgcagcct

SEQ ID NO: 78281 - DNA, 25 bp, Canis familiaris
cgtggggctgcccagaacatcatcc

SEQ ID NO: 78282 - DNA, 25 bp, Canis familiaris
cgtgctgtgatgggccacgaccatc

SEQ ID NO: 78283 - DNA, 25 bp, Canis familiaris
cgatgtgtgatttcaccgaggacca

SEQ ID NO: 78284 - DNA, 25 bp, Canis familiaris
cgtcctgttacaccaagagcggcat

SEQ ID NO: 78285 - DNA, 25 bp, Canis familiaris
cgttcatttaaggaggcgctggcaa

SEQ ID NO: 78286 - DNA, 25 bp, Canis familiaris
cgtttgtatagtccatgccctgaac

SEQ ID NO: 78287 - DNA, 25 bp, Canis familiaris
cgtttgtacctctgccactgaggat

SEQ ID NO: 78288 - DNA, 25 bp, Canis familiaris
cgttctgtaccagttacacggctgc

SEQ ID NO: 78289 - DNA, 25 bp, Canis familiaris
cgggctgtgcaacatgtaccaggat

SEQ ID NO: 78290 - DNA, 25 bp, Canis familiaris
cgggccaacacattctcacaagtga

SEQ ID NO: 78291 - DNA, 25 bp, Canis familiaris
cgaaccagcataattccacacgtca

SEQ ID NO: 78292 - DNA, 25 bp, Canis familiaris
cgatgaccaggaaatccacgtctat

SEQ ID NO: 78293 - DNA, 25 bp, Canis familiaris
cgatgcctgggaaggtcatagacat

SEQ ID NO: 78294 - DNA, 25 bp, Canis familiaris
cgggctgcgtgaatgcgtgagcacc

SEQ ID NO: 78295 - DNA, 25 bp, Canis familiaris
cgggctgcaggaattcggcacgaga

SEQ ID NO: 78296 - DNA, 25 bp, Canis familiaris
cgggctgctgggaccaggactatga

SEQ ID NO: 78297 - DNA, 25 bp, Canis familiaris
cgtggtgtggtgaatgtgtgagaag

SEQ ID NO: 78298 - DNA, 25 bp, Canis familiaris
cgtgatggtgcgcatgggccagaag

SEQ ID NO: 78299 - DNA, 25 bp, Canis familiaris
cgtgatgaatcatcagcacccaaag

SEQ ID NO: 78300 - DNA, 25 bp, Canis familiaris
cgtggagaaacaccctcaaggctgg

SEQ ID NO: 78301 - DNA, 25 bp, Canis familiaris
cgaggaattcccagtaagtgcggct

SEQ ID NO: 78302 - DNA, 25 bp, Canis familiaris
cgggcaattctggaaggaagggcgc

SEQ ID NO: 78303 - DNA, 25 bp, Canis familiaris
cgggccctgctggagagggaggcgg

SEQ ID NO: 78304 - DNA, 25 bp, Canis familiaris
cgggccacctgcagaggagacggtg

SEQ ID NO: 78305 - DNA, 25 bp, Canis familiaris
cgtggccatcctcaggtggaaagtg

SEQ ID NO: 78306 - DNA, 25 bp, Canis familiaris
cgtggccccgagcaatgtgaaatcc

SEQ ID NO: 78307 - DNA, 25 bp, Canis familiaris
cgtggcatcgcccagatgttggaaa

SEQ ID NO: 78308 - DNA, 25 bp, Canis familiaris
cgtggaccacggctctgagaggata

SEQ ID NO: 78309 - DNA, 25 bp, Canis familiaris
cgtgtccacgagcgcatctgaagga

SEQ ID NO: 78310 - DNA, 25 bp, Canis familiaris
cgagaccaccagcacaaagaggccc

SEQ ID NO: 78311 - DNA, 25 bp, Canis familiaris
cgatgaccacgatcccatagcggtc

SEQ ID NO: 78312 - DNA, 25 bp, Canis familiaris
gcgttcccgaacctgaaggagttca

SEQ ID NO: 78313 - DNA, 25 bp, Canis familiaris
ggtctccctggacaacggggtccag

SEQ ID NO: 78314 - DNA, 25 bp, Canis familiaris
cctcttccttgacaactacgggttg

SEQ ID NO: 78315 - DNA, 25 bp, Canis familiaris
cccttccaaacctctgcacagggtg

SEQ ID NO: 78316 - DNA, 25 bp, Canis familiaris
ccgtttacgaaaggctgccctggca

SEQ ID NO: 78317 - DNA, 25 bp, Canis familiaris
cgaatttgaagatatggtggccgaa

SEQ ID NO: 78318 - DNA, 25 bp, Canis familiaris
cgaatttgaagatatggtggccgaa

SEQ ID NO: 78319 - DNA, 25 bp, Canis familiaris
cgtttctgcaatttggggacctgaa

SEQ ID NO: 78320 - DNA, 25 bp, Canis familiaris
cgttccgcctgggcgggattctgac

SEQ ID NO: 78321 - DNA, 25 bp, Canis familiaris
cgtccagcccgggtgtaaacagact

SEQ ID NO: 78322 - DNA, 25 bp, Canis familiaris
cgaccccggaggactacgagaagca

SEQ ID NO: 78323 - DNA, 25 bp, Canis familiaris
cgatccggcctaagaaatccgaaca

SEQ ID NO: 78324 - DNA, 25 bp, Canis familiaris
cgtgccgcctggagaaacctgccaa

SEQ ID NO: 78325 - DNA, 25 bp, Canis familiaris
cgtgtccacataaaaaaccagctaa

SEQ ID NO: 78326 - DNA, 25 bp, Canis familiaris
cgttcactcatggaaaatagcgatc

SEQ ID NO: 78327 - DNA, 25 bp, Canis familiaris
cgtccaccaagaccctaggatactg

SEQ ID NO: 78328 - DNA, 25 bp, Canis familiaris
cgtggtgtgtgtatacgtggcttgt

SEQ ID NO: 78329 - DNA, 25 bp, Canis familiaris
cgtggggtgtgaaagcccgtatctg

SEQ ID NO: 78330 - DNA, 25 bp, Canis familiaris
cgctttggtgttagacccagtccgt

SEQ ID NO: 78331 - DNA, 25 bp, Canis familiaris
cgctgtctgggtttacccttagctt

SEQ ID NO: 78332 - DNA, 25 bp, Canis familiaris
gcatattctgttgttaaccctaccc

SEQ ID NO: 78333 - DNA, 25 bp, Canis familiaris
ccaccggtgactgaactaccacctc

SEQ ID NO: 78334 - DNA, 25 bp, Canis familiaris
ccctgacgggcaaaactatcaccct

SEQ ID NO: 78335 - DNA, 25 bp, Canis familiaris
cgttgttgaggcagaccttgcactc

SEQ ID NO: 78336 - DNA, 25 bp, Canis familiaris
cgttattcgagacgacttctgagtc

SEQ ID NO: 78337 - DNA, 25 bp, Canis familiaris
cgttactggagttacattcgttgaa

SEQ ID NO: 78338 - DNA, 25 bp, Canis familiaris
cgttccagctggtaacttcgtaaat

SEQ ID NO: 78339 - DNA, 25 bp, Canis familiaris
cgttcctgcttgtgtatcttgtaaa

SEQ ID NO: 78340 - DNA, 25 bp, Canis familiaris
cgtggcctgcctttaatatgtgaat

SEQ ID NO: 78341 - DNA, 25 bp, Canis familiaris
cgtggaggctcatatcctatagaat

SEQ ID NO: 78342 - DNA, 25 bp, Canis familiaris
cgaggctgctgcaggtcctacaaag

SEQ ID NO: 78343 - DNA, 25 bp, Canis familiaris
gggtttggggctgtcacgtatgaac

SEQ ID NO: 78344 - DNA, 25 bp, Canis familiaris
gcaggctttgggtgtttcctgggtc

SEQ ID NO: 78345 - DNA, 25 bp, Canis familiaris
cgtgctttattgtgcatcttccttg

SEQ ID NO: 78346 - DNA, 25 bp, Canis familiaris
cgtgcatttatcatgtctttccatc

SEQ ID NO: 78347 - DNA, 25 bp, Canis familiaris
cgtgcattatcaacatcatattcag

SEQ ID NO: 78348 - DNA, 25 bp, Canis familiaris
cgtcatctactactgccattgcaga

SEQ ID NO: 78349 - DNA, 25 bp, Canis familiaris
cgtcagtcctcactcacaaaaactg

SEQ ID NO: 78350 - DNA, 25 bp, Canis familiaris
cgtggtcagccacctcagtaaaatt

SEQ ID NO: 78351 - DNA, 25 bp, Canis familiaris
cgtccatcacccggagtcaaaggag

SEQ ID NO: 78352 - DNA, 25 bp, Canis familiaris
cgtcgtcttcctgggattcaaggag

SEQ ID NO: 78353 - DNA, 25 bp, Canis familiaris
cgtttaacgccacgctgtcaagtga

SEQ ID NO: 78354 - DNA, 25 bp, Canis familiaris
cgttgtcaaccccagtgtaatggac

SEQ ID NO: 78355 - DNA, 25 bp, Canis familiaris
cgttgtaggtgtaactgtcactgga

SEQ ID NO: 78356 - DNA, 25 bp, Canis familiaris
tcgttttcagtacattgtagggcag

SEQ ID NO: 78357 - DNA, 25 bp, Canis familiaris
cgatgttacttccctttcatgtggg

SEQ ID NO: 78358 - DNA, 25 bp, Canis familiaris
cgttgtcctgtaaccgtatgcggag

SEQ ID NO: 78359 - DNA, 25 bp, Canis familiaris
cgttgtcctcgtcccaagatgagga

SEQ ID NO: 78360 - DNA, 25 bp, Canis familiaris
cgtgtgtccttgtctgttaaagtga

SEQ ID NO: 78361 - DNA, 25 bp, Canis familiaris
cgtgctggcttggcccttaaatgga

SEQ ID NO: 78362 - DNA, 25 bp, Canis familiaris
gcggtagttgctgctttagtactgg

SEQ ID NO: 78363 - DNA, 25 bp, Canis familiaris
ccgaggttctccactaatcacaagg

SEQ ID NO: 78364 - DNA, 25 bp, Canis familiaris
ccattggtttccagtaccctatgtg

SEQ ID NO: 78365 - DNA, 25 bp, Canis familiaris
cgttggggatcaacggaccctctgt

SEQ ID NO: 78366 - DNA, 25 bp, Canis familiaris
cgtagttggatcttgggagcggtcg

SEQ ID NO: 78367 - DNA, 25 bp, Canis familiaris
cgtagttggatcttgggagcgggcg

SEQ ID NO: 78368 - DNA, 25 bp, Canis familiaris
cgtagttggatcttgggagcgggcg

SEQ ID NO: 78369 - DNA, 25 bp, Canis familiaris
cgtcagcctaactgcctgaggaagg

SEQ ID NO: 78370 - DNA, 25 bp, Canis familiaris
cgtcaccgcctctggttgaaataac

SEQ ID NO: 78371 - DNA, 25 bp, Canis familiaris
cgtacctcctgcagtgttaacgacc

SEQ ID NO: 78372 - DNA, 25 bp, Canis familiaris
cgttcctcctgttgttattgttgtc

SEQ ID NO: 78373 - DNA, 25 bp, Canis familiaris
cgtgtttcagatcttttcttcctgc

SEQ ID NO: 78374 - DNA, 25 bp, Canis familiaris
cgtgtgggaacttgtttctgcccgc

SEQ ID NO: 78375 - DNA, 25 bp, Canis familiaris
cgtgcggaagaaagtcgctctccac

SEQ ID NO: 78376 - DNA, 25 bp, Canis familiaris
cgtgggaggaattgcttctgccctc

SEQ ID NO: 78377 - DNA, 25 bp, Canis familiaris
cgtgaggggagcaactgcccctccc

SEQ ID NO: 78378 - DNA, 25 bp, Canis familiaris
cgtggatgaaggaacgaccaggcct

SEQ ID NO: 78379 - DNA, 25 bp, Canis familiaris
cgtggagggaggttcagccagggtg

SEQ ID NO: 78380 - DNA, 25 bp, Canis familiaris
cgtgtaggtgcagcacgcagccagg

SEQ ID NO: 78381 - DNA, 25 bp, Canis familiaris
cgtctacatctctcctagtatggag

SEQ ID NO: 78382 - DNA, 25 bp, Canis familiaris
cgttccatctcttgcactatgaaga

SEQ ID NO: 78383 - DNA, 25 bp, Canis familiaris
cgtcatctcatcttaactattaccg

SEQ ID NO: 78384 - DNA, 25 bp, Canis familiaris
cgtcctcgcggatgcagttgacgcc

SEQ ID NO: 78385 - DNA, 25 bp, Canis familiaris
cgctccatccagttagacgggctga

SEQ ID NO: 78386 - DNA, 25 bp, Canis familiaris
cgtcctccctgctgaaagcagctga

SEQ ID NO: 78387 - DNA, 25 bp, Canis familiaris
cgttcagttctggaaaagatgctgg

SEQ ID NO: 78388 - DNA, 25 bp, Canis familiaris
cgtgtctttgtcctaaggtctcagc

SEQ ID NO: 78389 - DNA, 25 bp, Canis familiaris
cgttgctttggtccaagacccacaa

SEQ ID NO: 78390 - DNA, 25 bp, Canis familiaris
cgtatgtctggttctcaattcccac

SEQ ID NO: 78391 - DNA, 25 bp, Canis familiaris
cgttcttggaacacatgtgccgcct

SEQ ID NO: 78392 - DNA, 25 bp, Canis familiaris
cgtcagctttgctaactatctgccc

SEQ ID NO: 78393 - DNA, 25 bp, Canis familiaris
cgtgacttatgcacaggacggctca

SEQ ID NO: 78394 - DNA, 25 bp, Canis familiaris
cgtgaactactgtggcctggagacc

SEQ ID NO: 78395 - DNA, 25 bp, Canis familiaris
cgtgggtcacagggtccaggagacc

SEQ ID NO: 78396 - DNA, 25 bp, Canis familiaris
cgaggtgtcagtgttctgggaaccc

SEQ ID NO: 78397 - DNA, 25 bp, Canis familiaris
cgtggatgatcatgttatctcccaa

SEQ ID NO: 78398 - DNA, 25 bp, Canis familiaris
cgtgggacagaggttccccacggct

SEQ ID NO: 78399 - DNA, 25 bp, Canis familiaris
cgtggtgacgtggttcccaaagatg

SEQ ID NO: 78400 - DNA, 25 bp, Canis familiaris
cgtagtgatcctggattccctccag

SEQ ID NO: 78401 - DNA, 25 bp, Canis familiaris
cgtcgcgatgtgtgatttcaccgag

SEQ ID NO: 78402 - DNA, 25 bp, Canis familiaris
cgtggcaagtgcctgtgttccacgg

SEQ ID NO: 78403 - DNA, 25 bp, Canis familiaris
cgtggcacaccaaggcgtgcacacg

SEQ ID NO: 78404 - DNA, 25 bp, Canis familiaris
cgtgggcatctttgggctgtgcacg

SEQ ID NO: 78405 - DNA, 25 bp, Canis familiaris
cgatgattgcagcatttccttgccg

SEQ ID NO: 78406 - DNA, 25 bp, Canis familiaris
cgtgcttggcatatgtggtcttcgt

SEQ ID NO: 78407 - DNA, 25 bp, Canis familiaris
cgtccaggattcttggttactgtgc

SEQ ID NO: 78408 - DNA, 25 bp, Canis familiaris
cgtctacgatgccctgggctacgtg

SEQ ID NO: 78409 - DNA, 25 bp, Canis familiaris
cgtgtagcagcacgttcgtcgactg

SEQ ID NO: 78410 - DNA, 25 bp, Canis familiaris
cgtggtgcagggtatcgggatcagt

SEQ ID NO: 78411 - DNA, 25 bp, Canis familiaris
cgtgcgtgagcggctcagtcggaag

SEQ ID NO: 78412 - DNA, 25 bp, Canis familiaris
cgtgttagcagcacgtcgttcgact

SEQ ID NO: 78413 - DNA, 25 bp, Canis familiaris
cgtgatatatccacgacgtctccat

SEQ ID NO: 78414 - DNA, 25 bp, Canis familiaris
cgttgtatccaactacgcagtccag

SEQ ID NO: 78415 - DNA, 25 bp, Canis familiaris
cgatgagtcccgagactgaaccagc

SEQ ID NO: 78416 - DNA, 25 bp, Canis familiaris
cgtgtttcctgcagcctgaagcagg

SEQ ID NO: 78417 - DNA, 25 bp, Canis familiaris
cgtgtttttgttctacacgcgcgct

SEQ ID NO: 78418 - DNA, 25 bp, Canis familiaris
cgtgtattctttgggtccagcagcc

SEQ ID NO: 78419 - DNA, 25 bp, Canis familiaris
cgtgtatatgttattgtgaagccca

SEQ ID NO: 78420 - DNA, 25 bp, Canis familiaris
cgtatagtgtctacgtcttaccctc

SEQ ID NO: 78421 - DNA, 25 bp, Canis familiaris
cgtgtggtgtcaacgggtccacgtc

SEQ ID NO: 78422 - DNA, 25 bp, Canis familiaris
cgttgggacagaccaactatgcagc

SEQ ID NO: 78423 - DNA, 25 bp, Canis familiaris
cgagggagacacaccacgtagctcc

SEQ ID NO: 78424 - DNA, 25 bp, Canis familiaris
cgattggtcaatctctacggactcc

SEQ ID NO: 78425 - DNA, 25 bp, Canis familiaris
cgtattggagacatgtgtccgactc

SEQ ID NO: 78426 - DNA, 25 bp, Canis familiaris
cgttggatgaggatgtgcccgtccc

SEQ ID NO: 78427 - DNA, 25 bp, Canis familiaris
cgatctgtgggacctggccaagtcc

SEQ ID NO: 78428 - DNA, 25 bp, Canis familiaris
cgtgctgctggacaaggctcagacc

SEQ ID NO: 78429 - DNA, 25 bp, Canis familiaris
cgtcatgaggcacaagggggctccc

SEQ ID NO: 78430 - DNA, 25 bp, Canis familiaris
cgtcatcccattcagcatggggccc

SEQ ID NO: 78431 - DNA, 25 bp, Canis familiaris
cgtcaccacctccagagattgggtc

SEQ ID NO: 78432 - DNA, 25 bp, Canis familiaris
cgtgacttcccatgagatgctgaga

SEQ ID NO: 78433 - DNA, 25 bp, Canis familiaris
cgtgaccctccaggactgtaaggat

SEQ ID NO: 78434 - DNA, 25 bp, Canis familiaris
cgtcaccagtcagagcccaaagtgt

SEQ ID NO: 78435 - DNA, 25 bp, Canis familiaris
cgtggacttcaccttcaacaagttc

SEQ ID NO: 78436 - DNA, 25 bp, Canis familiaris
cgtgggcattcaccctagcaaggtg

SEQ ID NO: 78437 - DNA, 25 bp, Canis familiaris
cgtttgacataccgtcgtaggctgt

SEQ ID NO: 78438 - DNA, 25 bp, Canis familiaris
cgaaaactagcgtatcctgtggatt

SEQ ID NO: 78439 - DNA, 25 bp, Canis familiaris
cgtgaagacgggcacctgtggtgtg

SEQ ID NO: 78440 - DNA, 25 bp, Canis familiaris
cgtgcaaaagcagagcccgtggctg

SEQ ID NO: 78441 - DNA, 25 bp, Canis familiaris
cgtggaagacagcagccaggctgcg

SEQ ID NO: 78442 - DNA, 25 bp, Canis familiaris
cgtggacatgaaccgccggaaccag

SEQ ID NO: 78443 - DNA, 25 bp, Canis familiaris
cgtggacatgcaacggtgcggactc

SEQ ID NO: 78444 - DNA, 25 bp, Canis familiaris
cgtgacactgagaccgagcggttgc

SEQ ID NO: 78445 - DNA, 25 bp, Canis familiaris
cgatgacagcgaagacggccttccg

SEQ ID NO: 78446 - DNA, 25 bp, Canis familiaris
cgtgtccatgcaggacgaggccttc

SEQ ID NO: 78447 - DNA, 25 bp, Canis familiaris
cgtgtccctggaagatggtcatctg

SEQ ID NO: 78448 - DNA, 25 bp, Canis familiaris
cgtgtccactagttgtggaacgttg

SEQ ID NO: 78449 - DNA, 25 bp, Canis familiaris
cgtgatgccctagtctgctgggatc

SEQ ID NO: 78450 - DNA, 25 bp, Canis familiaris
cgtgtgcccacaggttgtgtgcaca

SEQ ID NO: 78451 - DNA, 25 bp, Canis familiaris
cgtgccctccaggtgtgggcaatcc

SEQ ID NO: 78452 - DNA, 25 bp, Canis familiaris
cgtcagactacagaagctggagctc

SEQ ID NO: 78453 - DNA, 25 bp, Canis familiaris
cgtccgctcaatgcacagtaagcca

SEQ ID NO: 78454 - DNA, 25 bp, Canis familiaris
cgtacgccaagttcgaccagtacag

SEQ ID NO: 78455 - DNA, 25 bp, Canis familiaris
cgtacccaacttaattgcttcgagc

SEQ ID NO: 78456 - DNA, 25 bp, Canis familiaris
cgaaactccctgttattcgtcgtgc

SEQ ID NO: 78457 - DNA, 25 bp, Canis familiaris
cgtaagccgtcgtaaacggcactct

SEQ ID NO: 78458 - DNA, 25 bp, Canis familiaris
cgttgcagcggcgagtggaaccgac

SEQ ID NO: 78459 - DNA, 25 bp, Canis familiaris
cgtggagggcagcgtgcagaacggc

SEQ ID NO: 78460 - DNA, 25 bp, Canis familiaris
cgtggagctagaggggcagcagccg

SEQ ID NO: 78461 - DNA, 25 bp, Canis familiaris
cgtgtggttgactgtgatcgccatg

SEQ ID NO: 78462 - DNA, 25 bp, Canis familiaris
cgtgtggtatatggcgattcgtcat

SEQ ID NO: 78463 - DNA, 25 bp, Canis familiaris
cgtgggaaatgcaacatgtggtgaa

SEQ ID NO: 78464 - DNA, 25 bp, Canis familiaris
cgtggtgcgaatcagtggtggcaat

SEQ ID NO: 78465 - DNA, 25 bp, Canis familiaris
cgtgcctgcagaacccaagtggcat

SEQ ID NO: 78466 - DNA, 25 bp, Canis familiaris
cgtgctctgagtactggagagaagg

SEQ ID NO: 78467 - DNA, 25 bp, Canis familiaris
cgtgcctcgtcaggcgtgatgaggg

SEQ ID NO: 78468 - DNA, 25 bp, Canis familiaris
cgtgcaccgcaagtgcttctaggcg

SEQ ID NO: 78469 - DNA, 25 bp, Canis familiaris
cgtgcaggcctggctgtgtgtaggc

SEQ ID NO: 78470 - DNA, 25 bp, Canis familiaris
cgtgcaggttacctttcattgttta

SEQ ID NO: 78471 - DNA, 25 bp, Canis familiaris
cgagaggaagccgtttctgtgcgtt

SEQ ID NO: 78472 - DNA, 25 bp, Canis familiaris
cgatgcgataagacagcccactggg

SEQ ID NO: 78473 - DNA, 25 bp, Canis familiaris
gcgatcggattgcacagctcatttg

SEQ ID NO: 78474 - DNA, 25 bp, Canis familiaris
cgtcgtgaatcacagccactgtgac

SEQ ID NO: 78475 - DNA, 25 bp, Canis familiaris
cgtgcgtgacacagagcgagaggaa

SEQ ID NO: 78476 - DNA, 25 bp, Canis familiaris
cgtgggcaagcgcagaggcggaaac

SEQ ID NO: 78477 - DNA, 25 bp, Canis familiaris
cgtgagcccgagcagcggggagacc

SEQ ID NO: 78478 - DNA, 25 bp, Canis familiaris
cgtgcccctgatgcggtgtgggggc

SEQ ID NO: 78479 - DNA, 25 bp, Canis familiaris
cgtcccacatgtgtcggctggggat

SEQ ID NO: 78480 - DNA, 25 bp, Canis familiaris
cgtcccaagtgcctgggcttggtgt

SEQ ID NO: 78481 - DNA, 25 bp, Canis familiaris
cgtcaccaactgggacgacatggag

SEQ ID NO: 78482 - DNA, 25 bp, Canis familiaris
cgtcaccaactgggacgacatggag

SEQ ID NO: 78483 - DNA, 25 bp, Canis familiaris
cgtcaccagttgggccagacagaca

SEQ ID NO: 78484 - DNA, 25 bp, Canis familiaris
cgtgccaacgtggggacacgacagc

SEQ ID NO: 78485 - DNA, 25 bp, Canis familiaris
cgtgctgaacgtggagcctgcttaa

SEQ ID NO: 78486 - DNA, 25 bp, Canis familiaris
cgtctgccactgcaggacgtgtaca

SEQ ID NO: 78487 - DNA, 25 bp, Canis familiaris
cgtgcatgcgacggagatagctctt

SEQ ID NO: 78488 - DNA, 25 bp, Canis familiaris
cgatgcatgcaagaagcttgccctg

SEQ ID NO: 78489 - DNA, 25 bp, Canis familiaris
cgtctcagagacctgtgtctcctgg

SEQ ID NO: 78490 - DNA, 25 bp, Canis familiaris
cgtccacacctgatgtatccgtgag

SEQ ID NO: 78491 - DNA, 25 bp, Canis familiaris
cgtccaccacaaatgcttctagatg

SEQ ID NO: 78492 - DNA, 25 bp, Canis familiaris
cgatgccctacagcactgcaaaatg

SEQ ID NO: 78493 - DNA, 25 bp, Canis familiaris
cgatgccctacagcactgcaaaatg

SEQ ID NO: 78494 - DNA, 25 bp, Canis familiaris
cgtctctccgtctctgataaataat

SEQ ID NO: 78495 - DNA, 25 bp, Canis familiaris
cgtgttccgtgctgtgggattgagt

SEQ ID NO: 78496 - DNA, 25 bp, Canis familiaris
cgtgttgatcctcgaggggcactag

SEQ ID NO: 78497 - DNA, 25 bp, Canis familiaris
cgtgtctgtcctcagacgttctgag

SEQ ID NO: 78498 - DNA, 25 bp, Canis familiaris
cgtacgtctccatacgttcgattaa

SEQ ID NO: 78499 - DNA, 25 bp, Canis familiaris
cgtgggttcaatttggcttcgttca

SEQ ID NO: 78500 - DNA, 25 bp, Canis familiaris
cgagggttcctttgcgcataccctc

SEQ ID NO: 78501 - DNA, 25 bp, Canis familiaris
cgacgaattcttgtggctaccaacc

SEQ ID NO: 78502 - DNA, 25 bp, Canis familiaris
cgatggtagtcgccgtgcctaccat

SEQ ID NO: 78503 - DNA, 25 bp, Canis familiaris
cgatgggatgccgggaggccccatc

SEQ ID NO: 78504 - DNA, 25 bp, Canis familiaris
cgtcactatgacgaggacgccgcca

SEQ ID NO: 78505 - DNA, 25 bp, Canis familiaris
cgtcactatgacgaggacgccgcca

SEQ ID NO: 78506 - DNA, 25 bp, Canis familiaris
cgtcactatgacgaggacgccgcca

SEQ ID NO: 78507 - DNA, 25 bp, Canis familiaris
gcgtcactatgacgaggaccgccgc

SEQ ID NO: 78508 - DNA, 25 bp, Canis familiaris
cgatcacctgatggacgcaccaggc

SEQ ID NO: 78509 - DNA, 25 bp, Canis familiaris
cgtgaccatcattgatgccccagga

SEQ ID NO: 78510 - DNA, 25 bp, Canis familiaris
cgtgaaatcaagccctgcatcaggc

SEQ ID NO: 78511 - DNA, 25 bp, Canis familiaris
cgtaagactcagactcctgcagcac

SEQ ID NO: 78512 - DNA, 25 bp, Canis familiaris
cgaaatgactgcgctccgagaagag

SEQ ID NO: 78513 - DNA, 25 bp, Canis familiaris
cgtcgccctggacttcgagcaagag

SEQ ID NO: 78514 - DNA, 25 bp, Canis familiaris
cgtcctccgtgtactcaggatcaag

SEQ ID NO: 78515 - DNA, 25 bp, Canis familiaris
cgtcctactttcccggacagtgaga

SEQ ID NO: 78516 - DNA, 25 bp, Canis familiaris
cgtccgagcttctagcacggatcgg

SEQ ID NO: 78517 - DNA, 25 bp, Canis familiaris
cgtcgggtgcgctaagtgactcagt

SEQ ID NO: 78518 - DNA, 25 bp, Canis familiaris
cgatgcggcggcgttattcccatga

SEQ ID NO: 78519 - DNA, 25 bp, Canis familiaris
cgatgcggcggcgttattcccatga

SEQ ID NO: 78520 - DNA, 25 bp, Canis familiaris
cgtgcagagggtctacaccctgcag

SEQ ID NO: 78521 - DNA, 25 bp, Canis familiaris
cgtgagcaatggcaccatcacgccg

SEQ ID NO: 78522 - DNA, 25 bp, Canis familiaris
cgtgagactcagccgctgtctcgcc

SEQ ID NO: 78523 - DNA, 25 bp, Canis familiaris
cgtgaatcacagccactgtgacccc

SEQ ID NO: 78524 - DNA, 25 bp, Canis familiaris
cgtagactgatgtcaccatgtcccc

SEQ ID NO: 78525 - DNA, 25 bp, Canis familiaris
cgtcgaagtgggagaccccttctat

SEQ ID NO: 78526 - DNA, 25 bp, Canis familiaris
gcgatcgaagtacaggaccaccgga

SEQ ID NO: 78527 - DNA, 25 bp, Canis familiaris
cgatcgaagtacaggaccaccggat

SEQ ID NO: 78528 - DNA, 25 bp, Canis familiaris
cgtcaaagaactgggcacgcacctc

SEQ ID NO: 78529 - DNA, 25 bp, Canis familiaris
cgttcagaagatcggaccgcctctc

SEQ ID NO: 78530 - DNA, 25 bp, Canis familiaris
cgatctggaaacttatctctgcctc

SEQ ID NO: 78531 - DNA, 25 bp, Canis familiaris
cgtgcaggtagcgttttgctgcctc

SEQ ID NO: 78532 - DNA, 25 bp, Canis familiaris
cgtgcaggttgggtcttctgtatga

SEQ ID NO: 78533 - DNA, 25 bp, Canis familiaris
cgcataacgtgggttttggatagga

SEQ ID NO: 78534 - DNA, 25 bp, Canis familiaris
ccgactcgttcgtggggtcggtgct

SEQ ID NO: 78535 - DNA, 25 bp, Canis familiaris
ccgattgggtggtgtgggtgttgtt

SEQ ID NO: 78536 - DNA, 25 bp, Canis familiaris
cgtgtctggggcagggaggtgtctg

SEQ ID NO: 78537 - DNA, 25 bp, Canis familiaris
cgttccgtgtagattgatgcgtttc

SEQ ID NO: 78538 - DNA, 25 bp, Canis familiaris
cgtctcccattatcttgtgtgttgt

SEQ ID NO: 78539 - DNA, 25 bp, Canis familiaris
cgtaagcacttacctggtggctttc

SEQ ID NO: 78540 - DNA, 25 bp, Canis familiaris
cgatagacaatgtgcccgtggttcc

SEQ ID NO: 78541 - DNA, 25 bp, Canis familiaris
cgtaagcactcaagcctcaaggatg

SEQ ID NO: 78542 - DNA, 25 bp, Canis familiaris
cgtcaagatactagcccagcgaagg

SEQ ID NO: 78543 - DNA, 25 bp, Canis familiaris
cgtcttcatcacacctcctgaagag

SEQ ID NO: 78544 - DNA, 25 bp, Canis familiaris
cgtctctatcctctctctagaggaa

SEQ ID NO: 78545 - DNA, 25 bp, Canis familiaris
cgtgcatttcctactctaaacttaa

SEQ ID NO: 78546 - DNA, 25 bp, Canis familiaris
cgtgctgacccattctaaatactta

SEQ ID NO: 78547 - DNA, 25 bp, Canis familiaris
cgtcgcagagcctcttacagactat

SEQ ID NO: 78548 - DNA, 25 bp, Canis familiaris
cgacgagctgccatttgacaacttt

SEQ ID NO: 78549 - DNA, 25 bp, Canis familiaris
cgtccagctccaaactgacgtcttc

SEQ ID NO: 78550 - DNA, 25 bp, Canis familiaris
cgtccagatcaaacctggagctttt

SEQ ID NO: 78551 - DNA, 25 bp, Canis familiaris
cgtccaacataccggcgagtgtgtt

SEQ ID NO: 78552 - DNA, 25 bp, Canis familiaris
cgtccaccaccctcaagatgatgga

SEQ ID NO: 78553 - DNA, 25 bp, Canis familiaris
cgtccaccaccacagggtatggtat

SEQ ID NO: 78554 - DNA, 25 bp, Canis familiaris
cgtccccactgcttcagtgtttggg

SEQ ID NO: 78555 - DNA, 25 bp, Canis familiaris
cgtttccctcctatgttagtggtat

SEQ ID NO: 78556 - DNA, 25 bp, Canis familiaris
cgtcccccctccatgaggagagggt

SEQ ID NO: 78557 - DNA, 25 bp, Canis familiaris
cgtcctcctcctcttattggagaga

SEQ ID NO: 78558 - DNA, 25 bp, Canis familiaris
cgttctccagccaggacttggtgag

SEQ ID NO: 78559 - DNA, 25 bp, Canis familiaris
cgttctcagccctgagcctagaaga

SEQ ID NO: 78560 - DNA, 25 bp, Canis familiaris
cgtccttacctgggcctagatgagg

SEQ ID NO: 78561 - DNA, 25 bp, Canis familiaris
cgaccataaacgatgccgactggcg

SEQ ID NO: 78562 - DNA, 25 bp, Canis familiaris
cgactacaactatttccagaacgga

SEQ ID NO: 78563 - DNA, 25 bp, Canis familiaris
cccttcccctttgagaagcctgagg

SEQ ID NO: 78564 - DNA, 25 bp, Canis familiaris
cccacggcccttaaggacacattgg

SEQ ID NO: 78565 - DNA, 25 bp, Canis familiaris
cccacgttcctttagtgacctagat

SEQ ID NO: 78566 - DNA, 25 bp, Canis familiaris
cccacgcaaactcaagttccctgag

SEQ ID NO: 78567 - DNA, 25 bp, Canis familiaris
ccggttcaacgccaagtttgccgtg

SEQ ID NO: 78568 - DNA, 25 bp, Canis familiaris
cgactttaaccggcgttatggagat

SEQ ID NO: 78569 - DNA, 25 bp, Canis familiaris
cgagtttatcccactgcttgaaagt

SEQ ID NO: 78570 - DNA, 25 bp, Canis familiaris
cgtttccatcccatcggtcaaatgg

SEQ ID NO: 78571 - DNA, 25 bp, Canis familiaris
cgcttatagatccctgagaagtaaa

SEQ ID NO: 78572 - DNA, 25 bp, Canis familiaris
cgtgttcaatctccagagccacatc

SEQ ID NO: 78573 - DNA, 25 bp, Canis familiaris
cgtagagtcattccagagctcctct

SEQ ID NO: 78574 - DNA, 25 bp, Canis familiaris
cgtatggacttggaagcccttctag

SEQ ID NO: 78575 - DNA, 25 bp, Canis familiaris
cgtctggagttgtacagatctggtc

SEQ ID NO: 78576 - DNA, 25 bp, Canis familiaris
cgtctgggcttcaaacatgccttcc

SEQ ID NO: 78577 - DNA, 25 bp, Canis familiaris
cgtctggaggtcgagactggctccc

SEQ ID NO: 78578 - DNA, 25 bp, Canis familiaris
cgtgctggacctggtcctggagctc

SEQ ID NO: 78579 - DNA, 25 bp, Canis familiaris
cgagtgtttgtcctccagtatttac

SEQ ID NO: 78580 - DNA, 25 bp, Canis familiaris
cgatttcctgtgctactgtatgtat

SEQ ID NO: 78581 - DNA, 25 bp, Canis familiaris
cgttgagcctttcacttgttacaac

SEQ ID NO: 78582 - DNA, 25 bp, Canis familiaris
cgttgatccgtttgctcttgattac

SEQ ID NO: 78583 - DNA, 25 bp, Canis familiaris
cgtctacagcctgggccttgattaa

SEQ ID NO: 78584 - DNA, 25 bp, Canis familiaris
cgtctactggtcccatgtctattac

SEQ ID NO: 78585 - DNA, 25 bp, Canis familiaris
cgtctacggtctgtgtagctctgtc

SEQ ID NO: 78586 - DNA, 25 bp, Canis familiaris
cgtcccagcatgttttgtatcttat

SEQ ID NO: 78587 - DNA, 25 bp, Canis familiaris
cgtcctcaggcatcttggactggag

SEQ ID NO: 78588 - DNA, 25 bp, Canis familiaris
cgacactatgtgtttcagaacgaga

SEQ ID NO: 78589 - DNA, 25 bp, Canis familiaris
cgacatctacaagatccgggagatc

SEQ ID NO: 78590 - DNA, 25 bp, Canis familiaris
cgagcgctacgaggacgggaagttc

SEQ ID NO: 78591 - DNA, 25 bp, Canis familiaris
cgagcagtcaaggaaagcgtaacgt

SEQ ID NO: 78592 - DNA, 25 bp, Canis familiaris
ccagcaggaaaataggtagactact

SEQ ID NO: 78593 - DNA, 25 bp, Canis familiaris
cccagccaccaatagaattacccta

SEQ ID NO: 78594 - DNA, 25 bp, Canis familiaris
cccaggacgaaagagtctcatcacc

SEQ ID NO: 78595 - DNA, 25 bp, Canis familiaris
ccggagggaaggcagtctgtcccgc

SEQ ID NO: 78596 - DNA, 25 bp, Canis familiaris
ccggacggataacaattcacaccag

SEQ ID NO: 78597 - DNA, 25 bp, Canis familiaris
cgcaaccggaccattattcacactc

SEQ ID NO: 78598 - DNA, 25 bp, Canis familiaris
cgatcccttgattttcttatacctc

SEQ ID NO: 78599 - DNA, 25 bp, Canis familiaris
cgtacctgtgtctcttgtgtacaca

SEQ ID NO: 78600 - DNA, 25 bp, Canis familiaris
cgttctctgttgctcattttaccag

SEQ ID NO: 78601 - DNA, 25 bp, Canis familiaris
cgtttgcttgtacctgttggaccac

SEQ ID NO: 78602 - DNA, 25 bp, Canis familiaris
cgtgcttggtctgggtgggaaaaca

SEQ ID NO: 78603 - DNA, 25 bp, Canis familiaris
cgtttggagctctggggacgacaag

SEQ ID NO: 78604 - DNA, 25 bp, Canis familiaris
cgtttgccctatagtggccaggcgc

SEQ ID NO: 78605 - DNA, 25 bp, Canis familiaris
cgttacccgaactgcatcaggcgtg

SEQ ID NO: 78606 - DNA, 25 bp, Canis familiaris
cgtccacccggaaggacagcagctt

SEQ ID NO: 78607 - DNA, 25 bp, Canis familiaris
cgtccaaccaactgctgcaagcagc

SEQ ID NO: 78608 - DNA, 25 bp, Canis familiaris
cgtccacatggcacgtcagcaagac

SEQ ID NO: 78609 - DNA, 25 bp, Canis familiaris
cgtcatcctgtcaaatatagcaagc

SEQ ID NO: 78610 - DNA, 25 bp, Canis familiaris
cgactgccgtgacatcattcagcgc

SEQ ID NO: 78611 - DNA, 25 bp, Canis familiaris
cgacgcctgcggctacgattgcgtc

SEQ ID NO: 78612 - DNA, 25 bp, Canis familiaris
cgactactgattactaccacgcgtc

SEQ ID NO: 78613 - DNA, 25 bp, Canis familiaris
cgagatcgatgtgagcaacccgcag

SEQ ID NO: 78614 - DNA, 25 bp, Canis familiaris
cgatattgtgacttcaacccttgcc

SEQ ID NO: 78615 - DNA, 25 bp, Canis familiaris
cgaattgattctgcagatccctcgt

SEQ ID NO: 78616 - DNA, 25 bp, Canis familiaris
cgatatttgttccggttcctgtatc

SEQ ID NO: 78617 - DNA, 25 bp, Canis familiaris
cgagatttttccaaggttctttctg

SEQ ID NO: 78618 - DNA, 25 bp, Canis familiaris
cgagattttcacatcaacctctttc

SEQ ID NO: 78619 - DNA, 25 bp, Canis familiaris
cgaatctttgtataaactgtttttg

SEQ ID NO: 78620 - DNA, 25 bp, Canis familiaris
gcgaatttctttctaaagtattttg

SEQ ID NO: 78621 - DNA, 25 bp, Canis familiaris
gcgttttattgcatttaggttaagt

SEQ ID NO: 78622 - DNA, 25 bp, Canis familiaris
cgagctgttttgacttttattaaag

SEQ ID NO: 78623 - DNA, 25 bp, Canis familiaris
cgagcagtttatctgggtggtccca

SEQ ID NO: 78624 - DNA, 25 bp, Canis familiaris
cgcaggtcctagagagggggtcacc

SEQ ID NO: 78625 - DNA, 25 bp, Canis familiaris
cgagtttctacgaggtgggcacagc

SEQ ID NO: 78626 - DNA, 25 bp, Canis familiaris
cgagtactcgccacgaggggagcgc

SEQ ID NO: 78627 - DNA, 25 bp, Canis familiaris
cgagccctgcggaagggggactcgg

SEQ ID NO: 78628 - DNA, 25 bp, Canis familiaris
cgaggacgacgacagggacgtggcg

SEQ ID NO: 78629 - DNA, 25 bp, Canis familiaris
cgagggcccgagctgtagactcggt

SEQ ID NO: 78630 - DNA, 25 bp, Canis familiaris
cgagggccgaagtgcgagcacctgg

SEQ ID NO: 78631 - DNA, 25 bp, Canis familiaris
cgtgaagcccaacggcgagaagccg

SEQ ID NO: 78632 - DNA, 25 bp, Canis familiaris
cgtcaagcccggaacgtgtagccgt

SEQ ID NO: 78633 - DNA, 25 bp, Canis familiaris
cgtccagcccggaagcagtgacaag

SEQ ID NO: 78634 - DNA, 25 bp, Canis familiaris
cgtctggcccggctgagtgaaaagc

SEQ ID NO: 78635 - DNA, 25 bp, Canis familiaris
cgatcccctcgatctggtgaaaagc

SEQ ID NO: 78636 - DNA, 25 bp, Canis familiaris
cgactcccttaagctgtaacaggtg

SEQ ID NO: 78637 - DNA, 25 bp, Canis familiaris
tcaacacgtgttattttaaatcggg

SEQ ID NO: 78638 - DNA, 25 bp, Canis familiaris
cctacttgttttatttaactgtgcg

SEQ ID NO: 78639 - DNA, 25 bp, Canis familiaris
cgtagtttctttttttcagctctgg

SEQ ID NO: 78640 - DNA, 25 bp, Canis familiaris
cgtagctactttttcttgttgcatc

SEQ ID NO: 78641 - DNA, 25 bp, Canis familiaris
cgaccatgacttccaatgctttgac

SEQ ID NO: 78642 - DNA, 25 bp, Canis familiaris
cgtcctgagtcagcagggctctggc

SEQ ID NO: 78643 - DNA, 25 bp, Canis familiaris
cgtctcgagtcaccagggttgatct

SEQ ID NO: 78644 - DNA, 25 bp, Canis familiaris
cgttcaggctcagtgcacgagcttt

SEQ ID NO: 78645 - DNA, 25 bp, Canis familiaris
cgtccacgctagacactgggtacac

SEQ ID NO: 78646 - DNA, 25 bp, Canis familiaris
cgtcggcccagcaagtggtggatca

SEQ ID NO: 78647 - DNA, 25 bp, Canis familiaris
cgttggcaccaccactggtgtagaa

SEQ ID NO: 78648 - DNA, 25 bp, Canis familiaris
cgtattgcgccgctagaggtgaaat

SEQ ID NO: 78649 - DNA, 25 bp, Canis familiaris
cgtattgcgccgctagaggtgaaat

SEQ ID NO: 78650 - DNA, 25 bp, Canis familiaris
cgtcactggtgccctgaatggtacg

SEQ ID NO: 78651 - DNA, 25 bp, Canis familiaris
cgagccggggccaagagtttcaggt

SEQ ID NO: 78652 - DNA, 25 bp, Canis familiaris
cgacgagaacccagagctgttccag

SEQ ID NO: 78653 - DNA, 25 bp, Canis familiaris
cgaagcgtagcagccgggctttcag

SEQ ID NO: 78654 - DNA, 25 bp, Canis familiaris
cgtaaggtgcaattcgggctggctc

SEQ ID NO: 78655 - DNA, 25 bp, Canis familiaris
cgacagggtgacttaccctggtcac

SEQ ID NO: 78656 - DNA, 25 bp, Canis familiaris
cgacttggtgtatatccctttgcag

SEQ ID NO: 78657 - DNA, 25 bp, Canis familiaris
cgatttccgtgttgattcctttgat

SEQ ID NO: 78658 - DNA, 25 bp, Canis familiaris
cgattccggaatagttcttttgatc

SEQ ID NO: 78659 - DNA, 25 bp, Canis familiaris
cgaggccggaattttgtgtgggaca

SEQ ID NO: 78660 - DNA, 25 bp, Canis familiaris
cgaggttggagagtattgtgtttgt

SEQ ID NO: 78661 - DNA, 25 bp, Canis familiaris
cgagggatggtgttctcgtgttcct

SEQ ID NO: 78662 - DNA, 25 bp, Canis familiaris
gcgggagaggttccctttaaccatg

SEQ ID NO: 78663 - DNA, 25 bp, Canis familiaris
gggatgaaagtttccgggaattgag

SEQ ID NO: 78664 - DNA, 25 bp, Canis familiaris
gcttagaaagtttcggctcgactta

SEQ ID NO: 78665 - DNA, 25 bp, Canis familiaris
cctaggaaaattctgcggactttgt

SEQ ID NO: 78666 - DNA, 25 bp, Canis familiaris
cctggggaaattctcctggtttgca

SEQ ID NO: 78667 - DNA, 25 bp, Canis familiaris
cctaggggaaccacatccctgtatc

SEQ ID NO: 78668 - DNA, 25 bp, Canis familiaris
cccaggggggccacaagtgagtcac

SEQ ID NO: 78669 - DNA, 25 bp, Canis familiaris
cccggattttccagggatcacatca

SEQ ID NO: 78670 - DNA, 25 bp, Canis familiaris
cccaacatcttcgcctgggtttaca

SEQ ID NO: 78671 - DNA, 25 bp, Canis familiaris
ccctgacaacccactggggggacag

SEQ ID NO: 78672 - DNA, 25 bp, Canis familiaris
cctacacctcccacgggaatggagc

SEQ ID NO: 78673 - DNA, 25 bp, Canis familiaris
tcctaaacccccagtagttgtcagg

SEQ ID NO: 78674 - DNA, 25 bp, Canis familiaris
ccatggtgacccacgggtttgtcgg

SEQ ID NO: 78675 - DNA, 25 bp, Canis familiaris
cgaggctatcccaatcggacctcga

SEQ ID NO: 78676 - DNA, 25 bp, Canis familiaris
cgaggtgttcgaatcttccttcagg

SEQ ID NO: 78677 - DNA, 25 bp, Canis familiaris
cgtttgtgtcgagtcagatccttaa

SEQ ID NO: 78678 - DNA, 25 bp, Canis familiaris
cgtttgatcctagggaccctggacg

SEQ ID NO: 78679 - DNA, 25 bp, Canis familiaris
cgtatgttcctggggatctggtcag

SEQ ID NO: 78680 - DNA, 25 bp, Canis familiaris
cgttctctcgtgggagacgcaggca

SEQ ID NO: 78681 - DNA, 25 bp, Canis familiaris
cgttgctgtcgattaagaccggagc

SEQ ID NO: 78682 - DNA, 25 bp, Canis familiaris
cgttggctcgagcggaccgagatgc

SEQ ID NO: 78683 - DNA, 25 bp, Canis familiaris
cgttgtctgaggcactgaccaaccc

SEQ ID NO: 78684 - DNA, 25 bp, Canis familiaris
cgagtccatggggaaatccagaccc

SEQ ID NO: 78685 - DNA, 25 bp, Canis familiaris
cgttgccaagttgagtgatcgcccc

SEQ ID NO: 78686 - DNA, 25 bp, Canis familiaris
cgttcagaagcttacctgaggcccc

SEQ ID NO: 78687 - DNA, 25 bp, Canis familiaris
gctgtttaattttttgtggccacct

SEQ ID NO: 78688 - DNA, 25 bp, Canis familiaris
gctgctttaggaaaatttatcccgt

SEQ ID NO: 78689 - DNA, 25 bp, Canis familiaris
cgtttagtcaaactctttccaccag

SEQ ID NO: 78690 - DNA, 25 bp, Canis familiaris
cgttaagggaggaagttatattcag

SEQ ID NO: 78691 - DNA, 25 bp, Canis familiaris
cgtctgactgaggacgggttaaata

SEQ ID NO: 78692 - DNA, 25 bp, Canis familiaris
cgatctttctggagggtcataacaa

SEQ ID NO: 78693 - DNA, 25 bp, Canis familiaris
cgatcttcctggagggtcatcagca

SEQ ID NO: 78694 - DNA, 25 bp, Canis familiaris
cgtattcccagttgtggtctcagca

SEQ ID NO: 78695 - DNA, 25 bp, Canis familiaris
cgtcactgacctcgtggagtacagc

SEQ ID NO: 78696 - DNA, 25 bp, Canis familiaris
cgtcagtcatcctgtgtgttcacat

SEQ ID NO: 78697 - DNA, 25 bp, Canis familiaris
cgtaaagcgtagtctgtctccatga

SEQ ID NO: 78698 - DNA, 25 bp, Canis familiaris
cgtatatagcatcagaacgtcacat

SEQ ID NO: 78699 - DNA, 25 bp, Canis familiaris
cgtcaaggtcattgcacacggcaaa

SEQ ID NO: 78700 - DNA, 25 bp, Canis familiaris
cgatcaacgacaacacaaacagcag

SEQ ID NO: 78701 - DNA, 25 bp, Canis familiaris
cgatgaacaagctcaaggccaggaa

SEQ ID NO: 78702 - DNA, 25 bp, Canis familiaris
cgtacaggagcagcagggtcagggc

SEQ ID NO: 78703 - DNA, 25 bp, Canis familiaris
cgtcacgggcaacgacagtctggag

SEQ ID NO: 78704 - DNA, 25 bp, Canis familiaris
cgtccgctgtttggaggtgctggag

SEQ ID NO: 78705 - DNA, 25 bp, Canis familiaris
cgtccgttgatgttccgtaggacca

SEQ ID NO: 78706 - DNA, 25 bp, Canis familiaris
cgttcgtctggagcactgtactgac

SEQ ID NO: 78707 - DNA, 25 bp, Canis familiaris
cgtctgctttggtgactgctagata

SEQ ID NO: 78708 - DNA, 25 bp, Canis familiaris
cgtctgtttaattacaccagcatcg

SEQ ID NO: 78709 - DNA, 25 bp, Canis familiaris
cgatctggtgctaatgttctgccct

SEQ ID NO: 78710 - DNA, 25 bp, Canis familiaris
cgacaggattatacttactcagctg

SEQ ID NO: 78711 - DNA, 25 bp, Canis familiaris
cgtcacgctgaatatatgaccacgc

SEQ ID NO: 78712 - DNA, 25 bp, Canis familiaris
cgatctctgtggttctatgacccag

SEQ ID NO: 78713 - DNA, 25 bp, Canis familiaris
cgtctctggtgtagctgatgatccg

SEQ ID NO: 78714 - DNA, 25 bp, Canis familiaris
cgatcacggcatagtgctgctcatc

SEQ ID NO: 78715 - DNA, 25 bp, Canis familiaris
cgatacaggcaggtgctggcattgt

SEQ ID NO: 78716 - DNA, 25 bp, Canis familiaris
cgattaggaggtaacatgtgtaccc

SEQ ID NO: 78717 - DNA, 25 bp, Canis familiaris
cgttgggaggtcatcgctgaacccc

SEQ ID NO: 78718 - DNA, 25 bp, Canis familiaris
cgtagtggcagtaatcatgctgtga

SEQ ID NO: 78719 - DNA, 25 bp, Canis familiaris
cgtcgtgggctgttaggtggctgag

SEQ ID NO: 78720 - DNA, 25 bp, Canis familiaris
cgtcgtgagcggctgggggtggacg

SEQ ID NO: 78721 - DNA, 25 bp, Canis familiaris
cgtcaggacgtgcagggcggaggag

SEQ ID NO: 78722 - DNA, 25 bp, Canis familiaris
cgtcgcagaaggcgggcaggcaggc

SEQ ID NO: 78723 - DNA, 25 bp, Canis familiaris
cgtccctgtgggctgagcatggggc

SEQ ID NO: 78724 - DNA, 25 bp, Canis familiaris
cgtcctctcaggggcatgatcaggg

SEQ ID NO: 78725 - DNA, 25 bp, Canis familiaris
cgtccgtcatgtggtctgaaggagc

SEQ ID NO: 78726 - DNA, 25 bp, Canis familiaris
cgatccggcactggtcatgaaacac

SEQ ID NO: 78727 - DNA, 25 bp, Canis familiaris
cgtctatcgcaggagtgctgaaaca

SEQ ID NO: 78728 - DNA, 25 bp, Canis familiaris
cgagtatgcgctcaggcagctacac

SEQ ID NO: 78729 - DNA, 25 bp, Canis familiaris
cgcatgctgataccatataactacc

SEQ ID NO: 78730 - DNA, 25 bp, Canis familiaris
cgttgacatccgtaaagacctctat

SEQ ID NO: 78731 - DNA, 25 bp, Canis familiaris
cgattattgctccaaaggattttat

SEQ ID NO: 78732 - DNA, 25 bp, Canis familiaris
cgtccattgctccacagtgagactt

SEQ ID NO: 78733 - DNA, 25 bp, Canis familiaris
cgtccattgctggacgcggtgctcg

SEQ ID NO: 78734 - DNA, 25 bp, Canis familiaris
cgtccattccagctgctgggctagc

SEQ ID NO: 78735 - DNA, 25 bp, Canis familiaris
cgttcaccacagccatctgtggggc

SEQ ID NO: 78736 - DNA, 25 bp, Canis familiaris
cgtctctccacattacagctgtgga

SEQ ID NO: 78737 - DNA, 25 bp, Canis familiaris
cgtctctgccatggtccaggatgaa

SEQ ID NO: 78738 - DNA, 25 bp, Canis familiaris
cgtcttccatgcccttggaaaccaa

SEQ ID NO: 78739 - DNA, 25 bp, Canis familiaris
cgtcgtacgcccgtagcagagaact

SEQ ID NO: 78740 - DNA, 25 bp, Canis familiaris
cgatctgtagtcacgttcagaacat

SEQ ID NO: 78741 - DNA, 25 bp, Canis familiaris
cgttgctggatctgctgtttgaagc

SEQ ID NO: 78742 - DNA, 25 bp, Canis familiaris
cgagttgttcatagcctttgtagct

SEQ ID NO: 78743 - DNA, 25 bp, Canis familiaris
cgttcaggctcaaacttcacaagct

SEQ ID NO: 78744 - DNA, 25 bp, Canis familiaris
cgttcacgtcaggaaccacgacatc

SEQ ID NO: 78745 - DNA, 25 bp, Canis familiaris
cgtacacggatcgagagccacttcc

SEQ ID NO: 78746 - DNA, 25 bp, Canis familiaris
cgcaatcctggtcgctagaagcttc

SEQ ID NO: 78747 - DNA, 25 bp, Canis familiaris
cgataccggtgcatcgtacatctcg

SEQ ID NO: 78748 - DNA, 25 bp, Canis familiaris
cgtaccgggcgatgcttgtgcctga

SEQ ID NO: 78749 - DNA, 25 bp, Canis familiaris
cgtatccgtgtgcggttgtccagaa

SEQ ID NO: 78750 - DNA, 25 bp, Canis familiaris
cgtatcgcgtgatggttcaggctgc

SEQ ID NO: 78751 - DNA, 25 bp, Canis familiaris
cgttctctatgctggattatgatct

SEQ ID NO: 78752 - DNA, 25 bp, Canis familiaris
cgtctgctaagcagccattagcatc

SEQ ID NO: 78753 - DNA, 25 bp, Canis familiaris
cgtctacaagagcagcattgatctc

SEQ ID NO: 78754 - DNA, 25 bp, Canis familiaris
cgtcgcacatcgaacaggatatctc

SEQ ID NO: 78755 - DNA, 25 bp, Canis familiaris
cgttcgcatcgcccaggaaattggt

SEQ ID NO: 78756 - DNA, 25 bp, Canis familiaris
cgttctccccgctaacaatgagttt

SEQ ID NO: 78757 - DNA, 25 bp, Canis familiaris
cgtcctcctgccttaaaatactgct

SEQ ID NO: 78758 - DNA, 25 bp, Canis familiaris
cgtccgcaatgcttaaatatacctt

SEQ ID NO: 78759 - DNA, 25 bp, Canis familiaris
cgttcatgcataacttgaaagagcc

SEQ ID NO: 78760 - DNA, 25 bp, Canis familiaris
cgttcgctgaccctgtaagatttgg

SEQ ID NO: 78761 - DNA, 25 bp, Canis familiaris
cgagtgaggacgcctccaagttctg

SEQ ID NO: 78762 - DNA, 25 bp, Canis familiaris
cgaccagtgaagtccaatggttcga

SEQ ID NO: 78763 - DNA, 25 bp, Canis familiaris
cgaccaagtgacagcaatgctgttt

SEQ ID NO: 78764 - DNA, 25 bp, Canis familiaris
cgagccaagtctctcgttgtggtcc

SEQ ID NO: 78765 - DNA, 25 bp, Canis familiaris
cgaggtaatccaggcgttctcggcc

SEQ ID NO: 78766 - DNA, 25 bp, Canis familiaris
cgaggacgacgaggcgtcgcgggct

SEQ ID NO: 78767 - DNA, 25 bp, Canis familiaris
cgatcgatgcgttgcacaggaccgg

SEQ ID NO: 78768 - DNA, 25 bp, Canis familiaris
cgatcgatgcgttgcacaggaccgg

SEQ ID NO: 78769 - DNA, 25 bp, Canis familiaris
cgtcgaggcgatccagtgacgggcc

SEQ ID NO: 78770 - DNA, 25 bp, Canis familiaris
cgatgctgagggtgggaggggccgg

SEQ ID NO: 78771 - DNA, 25 bp, Canis familiaris
cgatcgaggtctactgtggggaaca

SEQ ID NO: 78772 - DNA, 25 bp, Canis familiaris
cgtacatggatcacgccagtgggaa

SEQ ID NO: 78773 - DNA, 25 bp, Canis familiaris
cgatgtcattacaggcacaggtatt

SEQ ID NO: 78774 - DNA, 25 bp, Canis familiaris
cgatttctacgaaccgagatcacat

SEQ ID NO: 78775 - DNA, 25 bp, Canis familiaris
cgatcggcagacatacccagagcca

SEQ ID NO: 78776 - DNA, 25 bp, Canis familiaris
cgacgtcaggcacatcctgacccag

SEQ ID NO: 78777 - DNA, 25 bp, Canis familiaris
cgactgttggccatcagtggcccca

SEQ ID NO: 78778 - DNA, 25 bp, Canis familiaris
cgacggtagctactactgtcgctca

SEQ ID NO: 78779 - DNA, 25 bp, Canis familiaris
cgagcccatcagcgaagttcagtga

SEQ ID NO: 78780 - DNA, 25 bp, Canis familiaris
cgagccccatgtcaagtgctgagta

SEQ ID NO: 78781 - DNA, 25 bp, Canis familiaris
cgcacttcttcaagcaactcggtac

SEQ ID NO: 78782 - DNA, 25 bp, Canis familiaris
cgatttcttcgccaagcgcaagaga

SEQ ID NO: 78783 - DNA, 25 bp, Canis familiaris
cgactgctcttccgaaggtccagag

SEQ ID NO: 78784 - DNA, 25 bp, Canis familiaris
cgtctctttcgagctgtttgcagac

SEQ ID NO: 78785 - DNA, 25 bp, Canis familiaris
cgacctcttcagtagcttctggaac

SEQ ID NO: 78786 - DNA, 25 bp, Canis familiaris
cgcctattccaggatttctctagag

SEQ ID NO: 78787 - DNA, 25 bp, Canis familiaris
cgttcttcagcctgttcttacagtc

SEQ ID NO: 78788 - DNA, 25 bp, Canis familiaris
cgcttatctagcacgtacgtacgtc

SEQ ID NO: 78789 - DNA, 25 bp, Canis familiaris
cgctttccagtcgggaaacctgtcg

SEQ ID NO: 78790 - DNA, 25 bp, Canis familiaris
cgcctttctctgggtatgaaccatt

SEQ ID NO: 78791 - DNA, 25 bp, Canis familiaris
cgctttggcgtgggtatgaagccag

SEQ ID NO: 78792 - DNA, 25 bp, Canis familiaris
cgtctctgggtgtcctaagacctgt

SEQ ID NO: 78793 - DNA, 25 bp, Canis familiaris
cgtcttagtgtccgtagtgatcctg

SEQ ID NO: 78794 - DNA, 25 bp, Canis familiaris
cgtttggtgcttctcagatttctga

SEQ ID NO: 78795 - DNA, 25 bp, Canis familiaris
cgttttctgtctccaaggtcattga

SEQ ID NO: 78796 - DNA, 25 bp, Canis familiaris
cgaactgtctttgatagccctgata

SEQ ID NO: 78797 - DNA, 25 bp, Canis familiaris
cgagcatcgtgctgttgaagcgcct

SEQ ID NO: 78798 - DNA, 25 bp, Canis familiaris
cgatgccttcttgtgaggctctctg

SEQ ID NO: 78799 - DNA, 25 bp, Canis familiaris
cgatcctcgtcaggtgcaggtcagc

SEQ ID NO: 78800 - DNA, 25 bp, Canis familiaris
cgatcgctcatggggtgggtacggg

SEQ ID NO: 78801 - DNA, 25 bp, Canis familiaris
cgtctcctcgagttgcggacggagg

SEQ ID NO: 78802 - DNA, 25 bp, Canis familiaris
cgtctcctcgagctgtggaggggca

SEQ ID NO: 78803 - DNA, 25 bp, Canis familiaris
cgtctcctggagacgcagggggctg

SEQ ID NO: 78804 - DNA, 25 bp, Canis familiaris
cgttagtggagagccgagggaccct

SEQ ID NO: 78805 - DNA, 25 bp, Canis familiaris
cgctttccaagtggcccagggaaca

SEQ ID NO: 78806 - DNA, 25 bp, Canis familiaris
cgcatacccggggccaatgaacacc

SEQ ID NO: 78807 - DNA, 25 bp, Canis familiaris
cgaagttccagggcacatggtacct

SEQ ID NO: 78808 - DNA, 25 bp, Canis familiaris
cgagaggtccaagtaatcgtccgcc

SEQ ID NO: 78809 - DNA, 25 bp, Canis familiaris
cgagggacgcctataggcatgcccc

SEQ ID NO: 78810 - DNA, 25 bp, Canis familiaris
cgagggaagggctttgactggccgc

SEQ ID NO: 78811 - DNA, 25 bp, Canis familiaris
cgaggtactggtgtttgctgagcgg

SEQ ID NO: 78812 - DNA, 25 bp, Canis familiaris
cgagtgcatacgttttcattcccgg

SEQ ID NO: 78813 - DNA, 25 bp, Canis familiaris
cgcatgctaatcgctttttaccgcc

SEQ ID NO: 78814 - DNA, 25 bp, Canis familiaris
cgatgtaaagaaatattttgcctgc

SEQ ID NO: 78815 - DNA, 25 bp, Canis familiaris
cgatgtgaccagttgttgttacctc

SEQ ID NO: 78816 - DNA, 25 bp, Canis familiaris
cgagatcagcggcttgttttgccct

SEQ ID NO: 78817 - DNA, 25 bp, Canis familiaris
cgatggcaagggtgtccttcgccag

SEQ ID NO: 78818 - DNA, 25 bp, Canis familiaris
cgagaaagactctttccttccaggc

SEQ ID NO: 78819 - DNA, 25 bp, Canis familiaris
cgcaggtagactattcgttccacga

SEQ ID NO: 78820 - DNA, 25 bp, Canis familiaris
cgagatgtggaaaaccagctccccg

SEQ ID NO: 78821 - DNA, 25 bp, Canis familiaris
cgatgacgattaaatctcggccccc

SEQ ID NO: 78822 - DNA, 25 bp, Canis familiaris
cgaagcgagtgtcttcgacgcctac

SEQ ID NO: 78823 - DNA, 25 bp, Canis familiaris
cgacctggtggaattcaagtgcccc

SEQ ID NO: 78824 - DNA, 25 bp, Canis familiaris
cgagtctgagtggcttttacatccc

SEQ ID NO: 78825 - DNA, 25 bp, Canis familiaris
cgagtcatgatggtgcctcgtctcg

SEQ ID NO: 78826 - DNA, 25 bp, Canis familiaris
cgaaaggccatggccgagccggttc

SEQ ID NO: 78827 - DNA, 25 bp, Canis familiaris
cgttgagtgaatctcaggcgcagcg

SEQ ID NO: 78828 - DNA, 25 bp, Canis familiaris
cgtagactcgatcatcaggcgacgc

SEQ ID NO: 78829 - DNA, 25 bp, Canis familiaris
cgtagatctcgtcgaaatccgccat

SEQ ID NO: 78830 - DNA, 25 bp, Canis familiaris
cgatgaactcgctgaagtccacttc

SEQ ID NO: 78831 - DNA, 25 bp, Canis familiaris
cgaggaaagttgtgtccctgtcatg

SEQ ID NO: 78832 - DNA, 25 bp, Canis familiaris
cgaggagagaaatgtgaccgcttag

SEQ ID NO: 78833 - DNA, 25 bp, Canis familiaris
cgaaggaggcgatctgacccaaagc

SEQ ID NO: 78834 - DNA, 25 bp, Canis familiaris
cgagagggacacactgaccctggtc

SEQ ID NO: 78835 - DNA, 25 bp, Canis familiaris
cgaggggccatatgcagacagcctg

SEQ ID NO: 78836 - DNA, 25 bp, Canis familiaris
cgaggtcctaagcctgacccaaagc

SEQ ID NO: 78837 - DNA, 25 bp, Canis familiaris
cgatgagatcgccaaggctcaggcc

SEQ ID NO: 78838 - DNA, 25 bp, Canis familiaris
cgatggacatggacatgagccccct

SEQ ID NO: 78839 - DNA, 25 bp, Canis familiaris
cgagcgcagggtaatcctgcccgtc

SEQ ID NO: 78840 - DNA, 25 bp, Canis familiaris
cgatgccgggatcaaagtctgttct

SEQ ID NO: 78841 - DNA, 25 bp, Canis familiaris
cgaggcagaggccggaaacttactg

SEQ ID NO: 78842 - DNA, 25 bp, Canis familiaris
gcgggaagtccagaagattgctaga

SEQ ID NO: 78843 - DNA, 25 bp, Canis familiaris
cgaggaagctccaaaggtatgcgaa

SEQ ID NO: 78844 - DNA, 25 bp, Canis familiaris
cgagaaatgcctcacggctatcgtg

SEQ ID NO: 78845 - DNA, 25 bp, Canis familiaris
cgagaagcattgctacccttggacc

SEQ ID NO: 78846 - DNA, 25 bp, Canis familiaris
cgagaagacatgaccagcccatttg

SEQ ID NO: 78847 - DNA, 25 bp, Canis familiaris
cgagcttcaattccagagtcacttt

SEQ ID NO: 78848 - DNA, 25 bp, Canis familiaris
cgagatccaagtcgtggtacctgag

SEQ ID NO: 78849 - DNA, 25 bp, Canis familiaris
cgagtccggggagctgagactggcc

SEQ ID NO: 78850 - DNA, 25 bp, Canis familiaris
cgatgcccagtgtagcacctgatac

SEQ ID NO: 78851 - DNA, 25 bp, Canis familiaris
cgatgtcacgtattgccaagagctt

SEQ ID NO: 78852 - DNA, 25 bp, Canis familiaris
cgaggatctgaagtgccgggtgctg

SEQ ID NO: 78853 - DNA, 25 bp, Canis familiaris
cgatggtgtggaggatctccgctgc

SEQ ID NO: 78854 - DNA, 25 bp, Canis familiaris
cgaggagtgagaggtcgttcgactg

SEQ ID NO: 78855 - DNA, 25 bp, Canis familiaris
cgagggacaggttccattcgtgcat

SEQ ID NO: 78856 - DNA, 25 bp, Canis familiaris
cgatgcgggcaagtgagccttcctg

SEQ ID NO: 78857 - DNA, 25 bp, Canis familiaris
cgaggggagggcgtcagatcgcttc

SEQ ID NO: 78858 - DNA, 25 bp, Canis familiaris
cgagatgaggggtccaaccacttcc

SEQ ID NO: 78859 - DNA, 25 bp, Canis familiaris
cgagaacgaggtgcactcgcgcatc

SEQ ID NO: 78860 - DNA, 25 bp, Canis familiaris
cgaagacgggatactgctcagcaag

SEQ ID NO: 78861 - DNA, 25 bp, Canis familiaris
cgattcaacctgtgtgctgcgaagg

SEQ ID NO: 78862 - DNA, 25 bp, Canis familiaris
cgatcacataagcacgtgggaaatg

SEQ ID NO: 78863 - DNA, 25 bp, Canis familiaris
cgaacaacagcaacgtcttgaacag

SEQ ID NO: 78864 - DNA, 25 bp, Canis familiaris
cgaggaaagcctggagcctgacgag

SEQ ID NO: 78865 - DNA, 25 bp, Canis familiaris
cgattacaagcggaggcgctgccgc

SEQ ID NO: 78866 - DNA, 25 bp, Canis familiaris
cgttaccactgagtgtgccgtgcgt

SEQ ID NO: 78867 - DNA, 25 bp, Canis familiaris
cgtatccctcatttgtgcacagacg

SEQ ID NO: 78868 - DNA, 25 bp, Canis familiaris
cgtagccatctactctgagcaggac

SEQ ID NO: 78869 - DNA, 25 bp, Canis familiaris
cgtagccatccaggctgtgctgtcc

SEQ ID NO: 78870 - DNA, 25 bp, Canis familiaris
cgttgctatccaggctgtgctatcc

SEQ ID NO: 78871 - DNA, 25 bp, Canis familiaris
cgttgctatccaggctgtgctatcc

SEQ ID NO: 78872 - DNA, 25 bp, Canis familiaris
cgttcatctctcatgctagcatgtc

SEQ ID NO: 78873 - DNA, 25 bp, Canis familiaris
cgtcttgttcttcacagtgcttgtt

SEQ ID NO: 78874 - DNA, 25 bp, Canis familiaris
cgtcattttctttcagtgtctttat

SEQ ID NO: 78875 - DNA, 25 bp, Canis familiaris
cgctttttctggtatggacattcta

SEQ ID NO: 78876 - DNA, 25 bp, Canis familiaris
cgccttctacgatatcgacttcttg

SEQ ID NO: 78877 - DNA, 25 bp, Canis familiaris
cgaggtcttgccagtcgacctcgtt

SEQ ID NO: 78878 - DNA, 25 bp, Canis familiaris
cgaggtttgcacatgtgctgcctcc

SEQ ID NO: 78879 - DNA, 25 bp, Canis familiaris
cgagtcctcgagctgtgaggctccg

SEQ ID NO: 78880 - DNA, 25 bp, Canis familiaris
cgtcatcggcggcgaggagctgccg

SEQ ID NO: 78881 - DNA, 25 bp, Canis familiaris
cgtcaaggcgcgggacaagctctac

SEQ ID NO: 78882 - DNA, 25 bp, Canis familiaris
cgtagaccaggggtccatgctgctc

SEQ ID NO: 78883 - DNA, 25 bp, Canis familiaris
cgtcagatgccagtggcttcagccc

SEQ ID NO: 78884 - DNA, 25 bp, Canis familiaris
cgtagataatgcctctgatcaccct

SEQ ID NO: 78885 - DNA, 25 bp, Canis familiaris
cgatgaaatgtcgctgcagcagcat

SEQ ID NO: 78886 - DNA, 25 bp, Canis familiaris
cgatgagtgatgtctgctccaggca

SEQ ID NO: 78887 - DNA, 25 bp, Canis familiaris
cgagaggacctgtctcgtcttatcc

SEQ ID NO: 78888 - DNA, 25 bp, Canis familiaris
cgagtggaggcacctgcagtttgcc

SEQ ID NO: 78889 - DNA, 25 bp, Canis familiaris
cgaggagcacgtgcagagtgtggac

SEQ ID NO: 78890 - DNA, 25 bp, Canis familiaris
cgagcggttgatggaagttgaacag

SEQ ID NO: 78891 - DNA, 25 bp, Canis familiaris
cgagccgacatggcccagtttaagc

SEQ ID NO: 78892 - DNA, 25 bp, Canis familiaris
cgagagcgactgggacacggtgacg

SEQ ID NO: 78893 - DNA, 25 bp, Canis familiaris
cgagatcgaggggtacggggcgtcg

SEQ ID NO: 78894 - DNA, 25 bp, Canis familiaris
cgatgctggcgctgagtacgtcgtg

SEQ ID NO: 78895 - DNA, 25 bp, Canis familiaris
cgaatggctcattaaatcagttatg

SEQ ID NO: 78896 - DNA, 25 bp, Canis familiaris
cgcaagcgcctgaagcaatcctaag

SEQ ID NO: 78897 - DNA, 25 bp, Canis familiaris
gcgacagggatggagaccctagggt

SEQ ID NO: 78898 - DNA, 25 bp, Canis familiaris
gcggttgagtgtacacctttgggtc

SEQ ID NO: 78899 - DNA, 25 bp, Canis familiaris
cgactctagaggacctggttcaggt

SEQ ID NO: 78900 - DNA, 25 bp, Canis familiaris
cgaattgagggtccgtgtcttcagt

SEQ ID NO: 78901 - DNA, 25 bp, Canis familiaris
cgattggggggattgtccttctgtt

SEQ ID NO: 78902 - DNA, 25 bp, Canis familiaris
cgttcgggcgtaatggccttggaag

SEQ ID NO: 78903 - DNA, 25 bp, Canis familiaris
cgttctggccagggtgcttttggaa

SEQ ID NO: 78904 - DNA, 25 bp, Canis familiaris
cgtttgatgctgggggtgtggggag

SEQ ID NO: 78905 - DNA, 25 bp, Canis familiaris
cgaacgagcgccgaggcgtggggaa

SEQ ID NO: 78906 - DNA, 25 bp, Canis familiaris
cgaacgagcgccgaggcgtggggaa

SEQ ID NO: 78907 - DNA, 25 bp, Canis familiaris
cgaggaaggccggaggtgtctgggt

SEQ ID NO: 78908 - DNA, 25 bp, Canis familiaris
cgagtcagcgtcggggtttgtgggt

SEQ ID NO: 78909 - DNA, 25 bp, Canis familiaris
cgagcacagtggtggtttggtagtt

SEQ ID NO: 78910 - DNA, 25 bp, Canis familiaris
cgacaagctgtccgagtcgggcttc

SEQ ID NO: 78911 - DNA, 25 bp, Canis familiaris
cgcacaacgtcgaccatcggtcagt

SEQ ID NO: 78912 - DNA, 25 bp, Canis familiaris
cgacaacctagacacggtcgcaacc

SEQ ID NO: 78913 - DNA, 25 bp, Canis familiaris
cgaaggccgagatccggtcggccac

SEQ ID NO: 78914 - DNA, 25 bp, Canis familiaris
cgaagggcgagtcgccgtctggagc

SEQ ID NO: 78915 - DNA, 25 bp, Canis familiaris
cgcaaggggcttcaacctggaggag

SEQ ID NO: 78916 - DNA, 25 bp, Canis familiaris
cgaggttggcttcaatgctgatgaa

SEQ ID NO: 78917 - DNA, 25 bp, Canis familiaris
cgagactctggcatgctaactagtt

SEQ ID NO: 78918 - DNA, 25 bp, Canis familiaris
cgagcgtccgcatgctaatcgcttt

SEQ ID NO: 78919 - DNA, 25 bp, Canis familiaris
cgactggagccacccagatcgtagt

SEQ ID NO: 78920 - DNA, 25 bp, Canis familiaris
gctacgaactacccgacgggcaggt

SEQ ID NO: 78921 - DNA, 25 bp, Canis familiaris
cgacgaatattacaacgcggcagca

SEQ ID NO: 78922 - DNA, 25 bp, Canis familiaris
cgacgatctcgtcggcaacgtggga

SEQ ID NO: 78923 - DNA, 25 bp, Canis familiaris
cgacttcttgcttgtacatacgggg

SEQ ID NO: 78924 - DNA, 25 bp, Canis familiaris
cgacttcgcgctcttcaagcgcgtg

SEQ ID NO: 78925 - DNA, 25 bp, Canis familiaris
cgagctttgagggtgtcacggccat

SEQ ID NO: 78926 - DNA, 25 bp, Canis familiaris
cgagcttgtagtctctaccattctc

SEQ ID NO: 78927 - DNA, 25 bp, Canis familiaris
cgacaatgtcagagaccccgttacg

SEQ ID NO: 78928 - DNA, 25 bp, Canis familiaris
cgagcaagaaatcgaccccgtcatg

SEQ ID NO: 78929 - DNA, 25 bp, Canis familiaris
cgagcctgaaaacttcttgtgtatg

SEQ ID NO: 78930 - DNA, 25 bp, Canis familiaris
cgagggagaaggctccgtgctgcag

SEQ ID NO: 78931 - DNA, 25 bp, Canis familiaris
cgaggagagttgtgttgagtgtaga

SEQ ID NO: 78932 - DNA, 25 bp, Canis familiaris
cgaggtgctgggtgggagcttgtgg

SEQ ID NO: 78933 - DNA, 25 bp, Canis familiaris
cgagactcggcgtggccagatactg

SEQ ID NO: 78934 - DNA, 25 bp, Canis familiaris
cgaaccgaggactagccgtaggaca

SEQ ID NO: 78935 - DNA, 25 bp, Canis familiaris
cgagcacggatgcaaagcccaagcc

SEQ ID NO: 78936 - DNA, 25 bp, Canis familiaris
cgatagctgcaggaaagccccaggc

SEQ ID NO: 78937 - DNA, 25 bp, Canis familiaris
cgatactggctatgtgctgccacgg

SEQ ID NO: 78938 - DNA, 25 bp, Canis familiaris
cgaactcttatcgtgcggtcgaggg

SEQ ID NO: 78939 - DNA, 25 bp, Canis familiaris
cgcaattcttgggggggacagttgc

SEQ ID NO: 78940 - DNA, 25 bp, Canis familiaris
cgaagtccagtgtgggaacaggtct

SEQ ID NO: 78941 - DNA, 25 bp, Canis familiaris
cgaggtctactgtggggaacacaga

SEQ ID NO: 78942 - DNA, 25 bp, Canis familiaris
cgaggcctccaagaaggagatcaaa

SEQ ID NO: 78943 - DNA, 25 bp, Canis familiaris
cgagattcccctgcatcagaaataa

SEQ ID NO: 78944 - DNA, 25 bp, Canis familiaris
cgagagcacctcttactggagaaaa

SEQ ID NO: 78945 - DNA, 25 bp, Canis familiaris
cgaggccccgatgtggaactgagaa

SEQ ID NO: 78946 - DNA, 25 bp, Canis familiaris
cgagtccgccgaactggatgtagcc

SEQ ID NO: 78947 - DNA, 25 bp, Canis familiaris
cgaaccagccaaccttggttccttg

SEQ ID NO: 78948 - DNA, 25 bp, Canis familiaris
cgacacgaccaacgggtgagtcctc

SEQ ID NO: 78949 - DNA, 25 bp, Canis familiaris
cgacctcagtgatggggctggtggc

SEQ ID NO: 78950 - DNA, 25 bp, Canis familiaris
cgagcaccggaagaagaagtggacg

SEQ ID NO: 78951 - DNA, 25 bp, Canis familiaris
cgaactcaacaagaacatggaaggg

SEQ ID NO: 78952 - DNA, 25 bp, Canis familiaris
cgaacgagacaagaatccccggcgg

SEQ ID NO: 78953 - DNA, 25 bp, Canis familiaris
cgaactatactaaaatcccccagcg

SEQ ID NO: 78954 - DNA, 25 bp, Canis familiaris
cgaactattccagcgattgatccca

SEQ ID NO: 78955 - DNA, 25 bp, Canis familiaris
cgacccattcgaacgtctgccctat

SEQ ID NO: 78956 - DNA, 25 bp, Canis familiaris
cgataactttgtcctgatcggctct

SEQ ID NO: 78957 - DNA, 25 bp, Canis familiaris
cgatccaccggattcgatcgtccag

SEQ ID NO: 78958 - DNA, 25 bp, Canis familiaris
cgaccacgcgaggactggactcgag

SEQ ID NO: 78959 - DNA, 25 bp, Canis familiaris
cgaacccgggagcagacatctcaga

SEQ ID NO: 78960 - DNA, 25 bp, Canis familiaris
cgattccggatgtagggagcctgga

SEQ ID NO: 78961 - DNA, 25 bp, Canis familiaris
cgatgtccaggactacgcagaccat

SEQ ID NO: 78962 - DNA, 25 bp, Canis familiaris
cgcgtcatacaagtgtagacaccat

SEQ ID NO: 78963 - DNA, 25 bp, Canis familiaris
cgctccaacaagatgaaagaaacta

SEQ ID NO: 78964 - DNA, 25 bp, Canis familiaris
cgatgggatgtccccgggaatctcg

SEQ ID NO: 78965 - DNA, 25 bp, Canis familiaris
cgaggggtgcccagggagaggcagc

SEQ ID NO: 78966 - DNA, 25 bp, Canis familiaris
cgaggaggtgcctttaccttggagc

SEQ ID NO: 78967 - DNA, 25 bp, Canis familiaris
gcgagttggattttaaccagtaatg

SEQ ID NO: 78968 - DNA, 25 bp, Canis familiaris
cgagctcgtttagtgaaccgtcaga

SEQ ID NO: 78969 - DNA, 25 bp, Canis familiaris
cgagccgcctggataccgcagctag

SEQ ID NO: 78970 - DNA, 25 bp, Canis familiaris
cgacgacgtggtggacaccctgagg

SEQ ID NO: 78971 - DNA, 25 bp, Canis familiaris
cgcctacaggtgaggcctcctatat

SEQ ID NO: 78972 - DNA, 25 bp, Canis familiaris
cgcttgaggggaggtgtctaatttc

SEQ ID NO: 78973 - DNA, 25 bp, Canis familiaris
cgttggggtgaggccctcacttcag

SEQ ID NO: 78974 - DNA, 25 bp, Canis familiaris
cgttggtgggaccccgatgtactga

SEQ ID NO: 78975 - DNA, 25 bp, Canis familiaris
cctgggtggcccagtcggtaaagcg

SEQ ID NO: 78976 - DNA, 25 bp, Canis familiaris
ccgagttgaccaatggttgggaaat

SEQ ID NO: 78977 - DNA, 25 bp, Canis familiaris
cgagaggctgacaacatccttggta

SEQ ID NO: 78978 - DNA, 25 bp, Canis familiaris
cgagactgtcaccaccttaagatga

SEQ ID NO: 78979 - DNA, 25 bp, Canis familiaris
cgagttgtcagcgctttcagtgata

SEQ ID NO: 78980 - DNA, 25 bp, Canis familiaris
cgagtgtgtcaagcagatctgcctg

SEQ ID NO: 78981 - DNA, 25 bp, Canis familiaris
cgaggttaacgcgttgcagcctttg

SEQ ID NO: 78982 - DNA, 25 bp, Canis familiaris
cgttttaaggtgcctgctgccatta

SEQ ID NO: 78983 - DNA, 25 bp, Canis familiaris
cgtttcatcattcggcgtgcgaatt

SEQ ID NO: 78984 - DNA, 25 bp, Canis familiaris
cgtttcatcattcggcgtgcgaatt

SEQ ID NO: 78985 - DNA, 25 bp, Canis familiaris
cgaggatccattggagggcaagtct

SEQ ID NO: 78986 - DNA, 25 bp, Canis familiaris
cgctcgtcgcttgtcaggaatgtat

SEQ ID NO: 78987 - DNA, 25 bp, Canis familiaris
cgatctgattttctggcgagatgtg

SEQ ID NO: 78988 - DNA, 25 bp, Canis familiaris
cgatcgcatcttgtgtcgctgaagc

SEQ ID NO: 78989 - DNA, 25 bp, Canis familiaris
cgacgcagaatagggactgaagctg

SEQ ID NO: 78990 - DNA, 25 bp, Canis familiaris
cgatctgcacaacaggggcgagcgc

SEQ ID NO: 78991 - DNA, 25 bp, Canis familiaris
cgatctgaagagggccgggacttgc

SEQ ID NO: 78992 - DNA, 25 bp, Canis familiaris
cgttggtgagcggcgcggaggatgg

SEQ ID NO: 78993 - DNA, 25 bp, Canis familiaris
cgttgtggactcgctggacattgag

SEQ ID NO: 78994 - DNA, 25 bp, Canis familiaris
cgttctggtcttcctgggagagatg

SEQ ID NO: 78995 - DNA, 25 bp, Canis familiaris
cgttgctgtgtcagccagggtcacg

SEQ ID NO: 78996 - DNA, 25 bp, Canis familiaris
cgttgtctggctggcttggtgccag

SEQ ID NO: 78997 - DNA, 25 bp, Canis familiaris
cgacgagctcgcggtcgagtcaatg

SEQ ID NO: 78998 - DNA, 25 bp, Canis familiaris
cgacaacggctccggcatgtgcaag

SEQ ID NO: 78999 - DNA, 25 bp, Canis familiaris
cgatacatctgacccaactgacaac

SEQ ID NO: 79000 - DNA, 25 bp, Canis familiaris
cgtatattctccgaagctaccacag

SEQ ID NO: 79001 - DNA, 25 bp, Canis familiaris
cgagttcaaacccagcaaccacatg

SEQ ID NO: 79002 - DNA, 25 bp, Canis familiaris
cgaggccgaaatgaggaccagtgga

SEQ ID NO: 79003 - DNA, 25 bp, Canis familiaris
cgatgggctggatttgggccacagg

SEQ ID NO: 79004 - DNA, 25 bp, Canis familiaris
cgattggggaattggcgtcgcgggg

SEQ ID NO: 79005 - DNA, 25 bp, Canis familiaris
cgacggggacaagctgaggacggcg

SEQ ID NO: 79006 - DNA, 25 bp, Canis familiaris
cgaccgggcaatcttgggaagggag

SEQ ID NO: 79007 - DNA, 25 bp, Canis familiaris
cgaccctcgaatctttcaaagccga

SEQ ID NO: 79008 - DNA, 25 bp, Canis familiaris
cgacccccaccgagatcaaagtcgt

SEQ ID NO: 79009 - DNA, 25 bp, Canis familiaris
cgattttccaccctaattagcagcc

SEQ ID NO: 79010 - DNA, 25 bp, Canis familiaris
cgagtttccaccttataacacctgc

SEQ ID NO: 79011 - DNA, 25 bp, Canis familiaris
cgaggaccagagggctaaatccctg

SEQ ID NO: 79012 - DNA, 25 bp, Canis familiaris
cgagaacgggagcctaagcttcctg

SEQ ID NO: 79013 - DNA, 25 bp, Canis familiaris
cgagaccagggtctgcaacttcttc

SEQ ID NO: 79014 - DNA, 25 bp, Canis familiaris
cgaaagcacggtagtgaacactccc

SEQ ID NO: 79015 - DNA, 25 bp, Canis familiaris
cgtattgcaaggacatggcgcagca

SEQ ID NO: 79016 - DNA, 25 bp, Canis familiaris
cgttacagcgcaacagcagcctgca

SEQ ID NO: 79017 - DNA, 25 bp, Canis familiaris
cgttgagcagccgcagcaggtagcg

SEQ ID NO: 79018 - DNA, 25 bp, Canis familiaris
cgttgagcagccgcagcaggtagcg

SEQ ID NO: 79019 - DNA, 25 bp, Canis familiaris
cgatctcacagcaccatgtttacag

SEQ ID NO: 79020 - DNA, 25 bp, Canis familiaris
cgatctcacagcaccatgtttacag

SEQ ID NO: 79021 - DNA, 25 bp, Canis familiaris
gctgattcatccaccaggttttgat

SEQ ID NO: 79022 - DNA, 25 bp, Canis familiaris
cgatcctccttgacgagttttgttt

SEQ ID NO: 79023 - DNA, 25 bp, Canis familiaris
cgttcacctctgcccagaaaggata

SEQ ID NO: 79024 - DNA, 25 bp, Canis familiaris
cgttcccagctgcccaggaaggcag

SEQ ID NO: 79025 - DNA, 25 bp, Canis familiaris
cgctgtccaacttgtcggaagccag

SEQ ID NO: 79026 - DNA, 25 bp, Canis familiaris
cgagcaccaaatggcggatgacgcc

SEQ ID NO: 79027 - DNA, 25 bp, Canis familiaris
cgatggtaaactcgactgactccct

SEQ ID NO: 79028 - DNA, 25 bp, Canis familiaris
cgatctctataaatggcttacctcc

SEQ ID NO: 79029 - DNA, 25 bp, Canis familiaris
cgatgctcttagctgagtgtcccgc

SEQ ID NO: 79030 - DNA, 25 bp, Canis familiaris
cgatgctcttagctgagtgtcccgc

SEQ ID NO: 79031 - DNA, 25 bp, Canis familiaris
cgatgctctgtacctgagcttcacg

SEQ ID NO: 79032 - DNA, 25 bp, Canis familiaris
cgagcactaagtctgctctccgatc

SEQ ID NO: 79033 - DNA, 25 bp, Canis familiaris
cgagcactaagtctgctctccgatc

SEQ ID NO: 79034 - DNA, 25 bp, Canis familiaris
cgagcattgaacaagctgtccccac

SEQ ID NO: 79035 - DNA, 25 bp, Canis familiaris
cgagtcgaactaggctgcccaaagc

SEQ ID NO: 79036 - DNA, 25 bp, Canis familiaris
cgatgtggagatcagcctctcccaa

SEQ ID NO: 79037 - DNA, 25 bp, Canis familiaris
cgatgaggagggggcttctgacgca

SEQ ID NO: 79038 - DNA, 25 bp, Canis familiaris
cgatggaatgggtgtgggcgctcgt

SEQ ID NO: 79039 - DNA, 25 bp, Canis familiaris
cgaggcgggcagtgtgtacgcaggt

SEQ ID NO: 79040 - DNA, 25 bp, Canis familiaris
cgaggagccggagggctatccgtgt

SEQ ID NO: 79041 - DNA, 25 bp, Canis familiaris
cgagaggctcagtcctttatctcag

SEQ ID NO: 79042 - DNA, 25 bp, Canis familiaris
cgatgccctgaggctcttttccagc

SEQ ID NO: 79043 - DNA, 25 bp, Canis familiaris
cgactccgagcatttcgtgctcgcc

SEQ ID NO: 79044 - DNA, 25 bp, Canis familiaris
cgactactatgcaagccgagttccc

SEQ ID NO: 79045 - DNA, 25 bp, Canis familiaris
cgactccatccaatgtcgtttcttc

SEQ ID NO: 79046 - DNA, 25 bp, Canis familiaris
cgagcgccactgaagatctggtgtc

SEQ ID NO: 79047 - DNA, 25 bp, Canis familiaris
cgaggatcacaggcagcactcagat

SEQ ID NO: 79048 - DNA, 25 bp, Canis familiaris
cgatgatcatcaggttcactcaacg

SEQ ID NO: 79049 - DNA, 25 bp, Canis familiaris
cgatttcccatgaccaaactgacag

SEQ ID NO: 79050 - DNA, 25 bp, Canis familiaris
cgagttcaccaagtccattgctaag

SEQ ID NO: 79051 - DNA, 25 bp, Canis familiaris
cgaggacccacagtacttgtccagt

SEQ ID NO: 79052 - DNA, 25 bp, Canis familiaris
cgttccctcacatttttgagccatt

SEQ ID NO: 79053 - DNA, 25 bp, Canis familiaris
cgattcactctaatattatatggcc

SEQ ID NO: 79054 - DNA, 25 bp, Canis familiaris
cgaatcctttatattatggaccgaa

SEQ ID NO: 79055 - DNA, 25 bp, Canis familiaris
cgaatccatgttttagtgctatcac

SEQ ID NO: 79056 - DNA, 25 bp, Canis familiaris
cgaattctgctcagcggtttagcgc

SEQ ID NO: 79057 - DNA, 25 bp, Canis familiaris
cgacacttctgatcggttctacgtc

SEQ ID NO: 79058 - DNA, 25 bp, Canis familiaris
cgagacctgcaggaggcgttctgca

SEQ ID NO: 79059 - DNA, 25 bp, Canis familiaris
cgagatgtgccagatcgctgacgtc

SEQ ID NO: 79060 - DNA, 25 bp, Canis familiaris
cgaggtgctcaggatcctggggaac

SEQ ID NO: 79061 - DNA, 25 bp, Canis familiaris
cgttggccatcagttcagggagaac

SEQ ID NO: 79062 - DNA, 25 bp, Canis familiaris
cgttgacctcctggtggacgaactg

SEQ ID NO: 79063 - DNA, 25 bp, Canis familiaris
cgcttgccattgaccgggaagacac

SEQ ID NO: 79064 - DNA, 25 bp, Canis familiaris
cgcgtacgagtcaggtaatacactt

SEQ ID NO: 79065 - DNA, 25 bp, Canis familiaris
cgttatcaagtgcgtgtactgccct

SEQ ID NO: 79066 - DNA, 25 bp, Canis familiaris
cgttcgtcatggcgatgtttgagca

SEQ ID NO: 79067 - DNA, 25 bp, Canis familiaris
cgttcagccacccgagattgagcaa

SEQ ID NO: 79068 - DNA, 25 bp, Canis familiaris
cgttcacctccaagcatttcatgaa

SEQ ID NO: 79069 - DNA, 25 bp, Canis familiaris
cgttcacctccaagcatttcatgaa

SEQ ID NO: 79070 - DNA, 25 bp, Canis familiaris
gcagtaccctacagcctaaagaggc

SEQ ID NO: 79071 - DNA, 25 bp, Canis familiaris
cgaatccctatagccaaacatggtc

SEQ ID NO: 79072 - DNA, 25 bp, Canis familiaris
cgactgtgtatgggcctaaaaggtc

SEQ ID NO: 79073 - DNA, 25 bp, Canis familiaris
cgttgtgctatggagagtactaggg

SEQ ID NO: 79074 - DNA, 25 bp, Canis familiaris
cgttgtgtttggtttcttgagagtt

SEQ ID NO: 79075 - DNA, 25 bp, Canis familiaris
cgatggtttagggtgtcggcgtgtc

SEQ ID NO: 79076 - DNA, 25 bp, Canis familiaris
cgagagtaagggacgtcgggctcct

SEQ ID NO: 79077 - DNA, 25 bp, Canis familiaris
cgagtgggaaggacttggcgcgccc

SEQ ID NO: 79078 - DNA, 25 bp, Canis familiaris
cgaggcaggaagaggggccgcagcc

SEQ ID NO: 79079 - DNA, 25 bp, Canis familiaris
cgaggactacgaagacgagccgcgc

SEQ ID NO: 79080 - DNA, 25 bp, Canis familiaris
cgaggaggacatccgggacctcgca

SEQ ID NO: 79081 - DNA, 25 bp, Canis familiaris
cgaggcagctgattacggaacccac

SEQ ID NO: 79082 - DNA, 25 bp, Canis familiaris
cgatgttcttcttcggatcacgccc

SEQ ID NO: 79083 - DNA, 25 bp, Canis familiaris
cgatgttactgcacaagagcactgc

SEQ ID NO: 79084 - DNA, 25 bp, Canis familiaris
cgatcctgagctgactgcaagaccc

SEQ ID NO: 79085 - DNA, 25 bp, Canis familiaris
cgatcagccctgtttgcatagagcc

SEQ ID NO: 79086 - DNA, 25 bp, Canis familiaris
cgacgttcgatcttgcatggagcaa

SEQ ID NO: 79087 - DNA, 25 bp, Canis familiaris
cgagcctttggcttgggtcatgatc

SEQ ID NO: 79088 - DNA, 25 bp, Canis familiaris
cgaccctaacaatggtagatctatt

SEQ ID NO: 79089 - DNA, 25 bp, Canis familiaris
cgaccctaacaatggaacatctatt

SEQ ID NO: 79090 - DNA, 25 bp, Canis familiaris
cgaccctactcagggaccagcagaa

SEQ ID NO: 79091 - DNA, 25 bp, Canis familiaris
cgagaactttctggagaccacttaa

SEQ ID NO: 79092 - DNA, 25 bp, Canis familiaris
cgagaaacctctgagaccattccca

SEQ ID NO: 79093 - DNA, 25 bp, Canis familiaris
cgagaggactctcctaaacgtccca

SEQ ID NO: 79094 - DNA, 25 bp, Canis familiaris
cgttgtgaattcctgtaagttccct

SEQ ID NO: 79095 - DNA, 25 bp, Canis familiaris
cgcacgggcacaagttcaagttccc

SEQ ID NO: 79096 - DNA, 25 bp, Canis familiaris
cgcattgccaaaagtctcatgctct

SEQ ID NO: 79097 - DNA, 25 bp, Canis familiaris
cgatatgccttgggtatgattctta

SEQ ID NO: 79098 - DNA, 25 bp, Canis familiaris
cgatatcctctgacgtatcatcttt

SEQ ID NO: 79099 - DNA, 25 bp, Canis familiaris
cgagacgtgatgacggatccttcct

SEQ ID NO: 79100 - DNA, 25 bp, Canis familiaris
cgagatggtgatccgagaaaggcac

SEQ ID NO: 79101 - DNA, 25 bp, Canis familiaris
cgagatggagtcccgtatcaggctc

SEQ ID NO: 79102 - DNA, 25 bp, Canis familiaris
cgaggccatgttcagttcgagcgcc

SEQ ID NO: 79103 - DNA, 25 bp, Canis familiaris
cgaatgccaggccaagtacggcgcc

SEQ ID NO: 79104 - DNA, 25 bp, Canis familiaris
cgcaggccggtctgatagtggctgg

SEQ ID NO: 79105 - DNA, 25 bp, Canis familiaris
cgaggacatttctgtgcagtggctg

SEQ ID NO: 79106 - DNA, 25 bp, Canis familiaris
cgagggtttccgaatctggctagga

SEQ ID NO: 79107 - DNA, 25 bp, Canis familiaris
cgaaggtaatgccctactgcgggcg

SEQ ID NO: 79108 - DNA, 25 bp, Canis familiaris
cgaagctgatattggaccctgggcc

SEQ ID NO: 79109 - DNA, 25 bp, Canis familiaris
cgatgatctgatgaggaccttggac

SEQ ID NO: 79110 - DNA, 25 bp, Canis familiaris
cgttcgcagttgcagcgattgcaac

SEQ ID NO: 79111 - DNA, 25 bp, Canis familiaris
cgttggagcctggggttgcatgact

SEQ ID NO: 79112 - DNA, 25 bp, Canis familiaris
cgttggaggtcagggttgtcccgca

SEQ ID NO: 79113 - DNA, 25 bp, Canis familiaris
cgacagcgacgtgggggagtaccgg

SEQ ID NO: 79114 - DNA, 25 bp, Canis familiaris
cgacagcgacgtgggggagtaccgg

SEQ ID NO: 79115 - DNA, 25 bp, Canis familiaris
cgacagcgacgtgggggagtaccgg

SEQ ID NO: 79116 - DNA, 25 bp, Canis familiaris
cgacagcgacgtgggggagtaccgg

SEQ ID NO: 79117 - DNA, 25 bp, Canis familiaris
cgacagcgacgtgggggagtaccgg

SEQ ID NO: 79118 - DNA, 25 bp, Canis familiaris
cgacagcgacgtgggggagtaccgg

SEQ ID NO: 79119 - DNA, 25 bp, Canis familiaris
cgacagcgacgtgggggagtaccgg

SEQ ID NO: 79120 - DNA, 25 bp, Canis familiaris
cgacagcgacgtgggggagtaccgg

SEQ ID NO: 79121 - DNA, 25 bp, Canis familiaris
cgacagcgacgtgggggagtaccgg

SEQ ID NO: 79122 - DNA, 25 bp, Canis familiaris
cgacagcgacgtgggggagtaccgg

SEQ ID NO: 79123 - DNA, 25 bp, Canis familiaris
cgacagcgacgtgggggagtaccgg

SEQ ID NO: 79124 - DNA, 25 bp, Canis familiaris
cgacaatactctggtggcggtgaaa

SEQ ID NO: 79125 - DNA, 25 bp, Canis familiaris
cgaactgcatcaggcgtggcaggcg

SEQ ID NO: 79126 - DNA, 25 bp, Canis familiaris
cgatcgtgctcaccatcgagatgtg

SEQ ID NO: 79127 - DNA, 25 bp, Canis familiaris
cgacgatccaccagttgctgaggtc

SEQ ID NO: 79128 - DNA, 25 bp, Canis familiaris
cgacccccacgagtgtctaagtcgt

SEQ ID NO: 79129 - DNA, 25 bp, Canis familiaris
cgaccccacacgagatcacaagtcg

SEQ ID NO: 79130 - DNA, 25 bp, Canis familiaris
cgatcttccaagctgtacacacaac

SEQ ID NO: 79131 - DNA, 25 bp, Canis familiaris
cgacttcctggacaccatcaagaca

SEQ ID NO: 79132 - DNA, 25 bp, Canis familiaris
cgagcttccgtattgccttaataaa

SEQ ID NO: 79133 - DNA, 25 bp, Canis familiaris
cgatcttctcgtaagcacatccaga

SEQ ID NO: 79134 - DNA, 25 bp, Canis familiaris
cgatcttctcgtaagcacatccaga

SEQ ID NO: 79135 - DNA, 25 bp, Canis familiaris
cgttggctagctaaatagctgcaaa

SEQ ID NO: 79136 - DNA, 25 bp, Canis familiaris
gcgaaggcattctggaagctgaaag

SEQ ID NO: 79137 - DNA, 25 bp, Canis familiaris
cgataacagtcatgtggagatgaaa

SEQ ID NO: 79138 - DNA, 25 bp, Canis familiaris
cgatcaaagatccagggcgtccatc

SEQ ID NO: 79139 - DNA, 25 bp, Canis familiaris
cgagcaggaatattggtgtgtacac

SEQ ID NO: 79140 - DNA, 25 bp, Canis familiaris
cgagctcggttccggaatacactct

SEQ ID NO: 79141 - DNA, 25 bp, Canis familiaris
cgaggggtatgctggcatcacacct

SEQ ID NO: 79142 - DNA, 25 bp, Canis familiaris
cgaacggaatgctcaaccactgatc

SEQ ID NO: 79143 - DNA, 25 bp, Canis familiaris
cgaaagtgaatgtgtacgccgaccc

SEQ ID NO: 79144 - DNA, 25 bp, Canis familiaris
cgcaaaggcagcaggctaccggacg

SEQ ID NO: 79145 - DNA, 25 bp, Canis familiaris
cgaaacagcagcaggctaccgactc

SEQ ID NO: 79146 - DNA, 25 bp, Canis familiaris
cgagacacacgctgtgaagcgcgcc

SEQ ID NO: 79147 - DNA, 25 bp, Canis familiaris
gcggaagaccacatgaactgccaga

SEQ ID NO: 79148 - DNA, 25 bp, Canis familiaris
cgcaaggaccacatggcgctcaagg

SEQ ID NO: 79149 - DNA, 25 bp, Canis familiaris
cgacagggccgaggtgcagtgtaag

SEQ ID NO: 79150 - DNA, 25 bp, Canis familiaris
cgaccacgccaggcttcttgataag

SEQ ID NO: 79151 - DNA, 25 bp, Canis familiaris
cgaccaagtcgctctctggtagaga

SEQ ID NO: 79152 - DNA, 25 bp, Canis familiaris
gctgaccacgccgaatccggaagaa

SEQ ID NO: 79153 - DNA, 25 bp, Canis familiaris
gagtcccggggaggccataagaatg

SEQ ID NO: 79154 - DNA, 25 bp, Canis familiaris
cgagtccggggaggctatatagaag

SEQ ID NO: 79155 - DNA, 25 bp, Canis familiaris
cgaggaggtgggtcagctcttgcag

SEQ ID NO: 79156 - DNA, 25 bp, Canis familiaris
cgagagggtgcacacacatgacttg

SEQ ID NO: 79157 - DNA, 25 bp, Canis familiaris
cgaaggggcgcagcagcagcgcctc

SEQ ID NO: 79158 - DNA, 25 bp, Canis familiaris
cgatagagagactagcactggcccc

SEQ ID NO: 79159 - DNA, 25 bp, Canis familiaris
cgaggagagcaggatctctgtgccc

SEQ ID NO: 79160 - DNA, 25 bp, Canis familiaris
cgaggagcagaggcagactgtccca

SEQ ID NO: 79161 - DNA, 25 bp, Canis familiaris
cgagcagcgcaaaggttgatccaga

SEQ ID NO: 79162 - DNA, 25 bp, Canis familiaris
cgaagcctcaagctggacgcagagt

SEQ ID NO: 79163 - DNA, 25 bp, Canis familiaris
cgagctgtccaacgaggagcgcaac

SEQ ID NO: 79164 - DNA, 25 bp, Canis familiaris
cgagatcggaagccaggggcaccgg

SEQ ID NO: 79165 - DNA, 25 bp, Canis familiaris
cgaatcgtaatgaggcgtgcgccgc

SEQ ID NO: 79166 - DNA, 25 bp, Canis familiaris
cgagatagtggtcagcacctgcggc

SEQ ID NO: 79167 - DNA, 25 bp, Canis familiaris
cgatgaagtcgtcagctttgtgccg

SEQ ID NO: 79168 - DNA, 25 bp, Canis familiaris
cgagagcagctcctgaacttctagc

SEQ ID NO: 79169 - DNA, 25 bp, Canis familiaris
cgagaacgctggcatttctgccggg

SEQ ID NO: 79170 - DNA, 25 bp, Canis familiaris
cgagaagctgggcaagtccgtggtg

SEQ ID NO: 79171 - DNA, 25 bp, Canis familiaris
cgaggggttgcagagtgtcctggtg

SEQ ID NO: 79172 - DNA, 25 bp, Canis familiaris
cgagctgggtggcgcaggtttggcg

SEQ ID NO: 79173 - DNA, 25 bp, Canis familiaris
cgagtgcggtgatctcaggttcggt

SEQ ID NO: 79174 - DNA, 25 bp, Canis familiaris
cgactggcgctgtgctcagtctatg

SEQ ID NO: 79175 - DNA, 25 bp, Canis familiaris
cgagtggcctgttgccttatttcac

SEQ ID NO: 79176 - DNA, 25 bp, Canis familiaris
cgaggctaggatggcctcttttccc

SEQ ID NO: 79177 - DNA, 25 bp, Canis familiaris
cgagccgcaggatgccttatgcgtc

SEQ ID NO: 79178 - DNA, 25 bp, Canis familiaris
cgatgaggtggattccctctgcggt

SEQ ID NO: 79179 - DNA, 25 bp, Canis familiaris
cgacggctgagatccctggaagttg

SEQ ID NO: 79180 - DNA, 25 bp, Canis familiaris
cgacgactgtcgttccgaaggactg

SEQ ID NO: 79181 - DNA, 25 bp, Canis familiaris
cgagccaatgagcttccggagctgt

SEQ ID NO: 79182 - DNA, 25 bp, Canis familiaris
cgaggcaggagcctctcggagacct

SEQ ID NO: 79183 - DNA, 25 bp, Canis familiaris
cgaggcaacagcttgctaggacccc

SEQ ID NO: 79184 - DNA, 25 bp, Canis familiaris
cgacgacctcatcctagagattgag

SEQ ID NO: 79185 - DNA, 25 bp, Canis familiaris
cgatgcccctatcgcggagaagaga

SEQ ID NO: 79186 - DNA, 25 bp, Canis familiaris
cgatcccatctaccgagagttgaga

SEQ ID NO: 79187 - DNA, 25 bp, Canis familiaris
cgaccagcctacgtggttctggaca

SEQ ID NO: 79188 - DNA, 25 bp, Canis familiaris
cgaattctgttcgtgacttgtggaa

SEQ ID NO: 79189 - DNA, 25 bp, Canis familiaris
cgaccacgtctcgatgagctgggag

SEQ ID NO: 79190 - DNA, 25 bp, Canis familiaris
cgaggcacgtgcactgcactgttgg

SEQ ID NO: 79191 - DNA, 25 bp, Canis familiaris
cgattccaggctgctgatcgttcag

SEQ ID NO: 79192 - DNA, 25 bp, Canis familiaris
cgatgtccgccagtatgttgttaga

SEQ ID NO: 79193 - DNA, 25 bp, Canis familiaris
cgatgtccgccagtatgttgttaga

SEQ ID NO: 79194 - DNA, 25 bp, Canis familiaris
cgatgtccgccagtatgttgttaga

SEQ ID NO: 79195 - DNA, 25 bp, Canis familiaris
cgatgtccgccagtatgttgttaga

SEQ ID NO: 79196 - DNA, 25 bp, Canis familiaris
cgcatgtctgtgacctttggtagtc

SEQ ID NO: 79197 - DNA, 25 bp, Canis familiaris
cgaggctgtctacttcatggtgaat

SEQ ID NO: 79198 - DNA, 25 bp, Canis familiaris
cgcaaatgccctctctggtgacatt

SEQ ID NO: 79199 - DNA, 25 bp, Canis familiaris
cgctcagtgccatgcgttcgctgaa

SEQ ID NO: 79200 - DNA, 25 bp, Canis familiaris
cccactgtaagtttcctaatttatg

SEQ ID NO: 79201 - DNA, 25 bp, Canis familiaris
cccctataattatcgctattccaac

SEQ ID NO: 79202 - DNA, 25 bp, Canis familiaris
ccggctatgaaatggctttcccacc

SEQ ID NO: 79203 - DNA, 25 bp, Canis familiaris
ccgttatgtgcaccgaatgttccac

SEQ ID NO: 79204 - DNA, 25 bp, Canis familiaris
cgactttggagctgttggtgccact

SEQ ID NO: 79205 - DNA, 25 bp, Canis familiaris
gccactttaactttaggtctataca

SEQ ID NO: 79206 - DNA, 25 bp, Canis familiaris
cgacttccacaccattagcggttga

SEQ ID NO: 79207 - DNA, 25 bp, Canis familiaris
gcgactccgccacaggaagtttatt

SEQ ID NO: 79208 - DNA, 25 bp, Canis familiaris
cgacatccgcacgaaggagcagatc

SEQ ID NO: 79209 - DNA, 25 bp, Canis familiaris
cgatagatcgcagcgagggagctgc

SEQ ID NO: 79210 - DNA, 25 bp, Canis familiaris
cgatatgactgctgctacgctactc

SEQ ID NO: 79211 - DNA, 25 bp, Canis familiaris
cgactgaggattctgcgtagccgag

SEQ ID NO: 79212 - DNA, 25 bp, Canis familiaris
cgagtgaggacacacctgtacggct

SEQ ID NO: 79213 - DNA, 25 bp, Canis familiaris
cgagtgaggagctaacctggtccca

SEQ ID NO: 79214 - DNA, 25 bp, Canis familiaris
cgacatggggctagatcctggtctc

SEQ ID NO: 79215 - DNA, 25 bp, Canis familiaris
cgacatgttcctaggttgtatctgg

SEQ ID NO: 79216 - DNA, 25 bp, Canis familiaris
cgaatgttcctttgttaaatcccag

SEQ ID NO: 79217 - DNA, 25 bp, Canis familiaris
cgatggtgttctttgttttttgctc

SEQ ID NO: 79218 - DNA, 25 bp, Canis familiaris
cgatgaccgtgcaggtgttttctcc

SEQ ID NO: 79219 - DNA, 25 bp, Canis familiaris
cgatggcacttctgggtcatgtttt

SEQ ID NO: 79220 - DNA, 25 bp, Canis familiaris
cgatggcacttgctatggtttcctc

SEQ ID NO: 79221 - DNA, 25 bp, Canis familiaris
cgaggactttctagcagtttctgcc

SEQ ID NO: 79222 - DNA, 25 bp, Canis familiaris
cgacaacggtcttggtcatatctcc

SEQ ID NO: 79223 - DNA, 25 bp, Canis familiaris
cgcccacggacctgaatgttacaaa

SEQ ID NO: 79224 - DNA, 25 bp, Canis familiaris
cgacctcggacctgagtccatgtga

SEQ ID NO: 79225 - DNA, 25 bp, Canis familiaris
cgatcctggagatcgggctctcggt

SEQ ID NO: 79226 - DNA, 25 bp, Canis familiaris
cgatcctggagacccgggatcgaat

SEQ ID NO: 79227 - DNA, 25 bp, Canis familiaris
cgacatgaacagccctcgaggatcg

SEQ ID NO: 79228 - DNA, 25 bp, Canis familiaris
cgcactgtatcaagcgtcagactac

SEQ ID NO: 79229 - DNA, 25 bp, Canis familiaris
cgcaagctgacaggctgtgaaatat

SEQ ID NO: 79230 - DNA, 25 bp, Canis familiaris
cgcagcttgaagccgtccaactgca

SEQ ID NO: 79231 - DNA, 25 bp, Canis familiaris
cgacgaggagctcaacacagctgct

SEQ ID NO: 79232 - DNA, 25 bp, Canis familiaris
cgagcgaggtgtcaaaagcccgggc

SEQ ID NO: 79233 - DNA, 25 bp, Canis familiaris
cgaggagggctcttttatgcccctg

SEQ ID NO: 79234 - DNA, 25 bp, Canis familiaris
cgaagctgtcagatttttccctctg

SEQ ID NO: 79235 - DNA, 25 bp, Canis familiaris
cgaaggcttgggagttgacctctct

SEQ ID NO: 79236 - DNA, 25 bp, Canis familiaris
cgaaggtctggtgcgtctggcaccg

SEQ ID NO: 79237 - DNA, 25 bp, Canis familiaris
cgaaggtttgagtcgcctgaaccgg

SEQ ID NO: 79238 - DNA, 25 bp, Canis familiaris
cgaagggtgggatgggatggccggg

SEQ ID NO: 79239 - DNA, 25 bp, Canis familiaris
cgaaggagtctaaggggtggcaggg

SEQ ID NO: 79240 - DNA, 25 bp, Canis familiaris
cgagaggcgggagtttgggggatgg

SEQ ID NO: 79241 - DNA, 25 bp, Canis familiaris
cgaggtcgtggaggtcctgggagag

SEQ ID NO: 79242 - DNA, 25 bp, Canis familiaris
cgaggactgcggaagtcgtcggtga

SEQ ID NO: 79243 - DNA, 25 bp, Canis familiaris
cgaggaccgtgtgcggttcgtgagt

SEQ ID NO: 79244 - DNA, 25 bp, Canis familiaris
cgaggaccctgcacgcagcttccag

SEQ ID NO: 79245 - DNA, 25 bp, Canis familiaris
cgagtaccagctgattgactgcgcc

SEQ ID NO: 79246 - DNA, 25 bp, Canis familiaris
cgaggaccagcagataatcccaccc

SEQ ID NO: 79247 - DNA, 25 bp, Canis familiaris
cgagaaccagcgtctagagtccgac

SEQ ID NO: 79248 - DNA, 25 bp, Canis familiaris
cgacagacaaccctaggtcgctgga

SEQ ID NO: 79249 - DNA, 25 bp, Canis familiaris
cgacagagaagacagacggccaggg

SEQ ID NO: 79250 - DNA, 25 bp, Canis familiaris
cgacaagatgaacagtccaccgcgc

SEQ ID NO: 79251 - DNA, 25 bp, Canis familiaris
cgagcaggatggtggtgacccggtc

SEQ ID NO: 79252 - DNA, 25 bp, Canis familiaris
cgagaggatgtccgtgtatcccagt

SEQ ID NO: 79253 - DNA, 25 bp, Canis familiaris
cgagagtgcgagcagtgacgcccag

SEQ ID NO: 79254 - DNA, 25 bp, Canis familiaris
cgagagtctgcccagatacacacac

SEQ ID NO: 79255 - DNA, 25 bp, Canis familiaris
cgagagtccggggagcacatcatcg

SEQ ID NO: 79256 - DNA, 25 bp, Canis familiaris
gcgaagtcacggagtccaatgagtt

SEQ ID NO: 79257 - DNA, 25 bp, Canis familiaris
cgacatgtaaagtgttgaagacgat

SEQ ID NO: 79258 - DNA, 25 bp, Canis familiaris
cgaatgtctacgtgttgcaaatgaa

SEQ ID NO: 79259 - DNA, 25 bp, Canis familiaris
cgagtgtttcgtgcgtgcacagagc

SEQ ID NO: 79260 - DNA, 25 bp, Canis familiaris
cgagtcccacgggcgggagaggaag

SEQ ID NO: 79261 - DNA, 25 bp, Canis familiaris
cgagtccatcctcggggaggggacg

SEQ ID NO: 79262 - DNA, 25 bp, Canis familiaris
cgagaggccccttggtgggctaacg

SEQ ID NO: 79263 - DNA, 25 bp, Canis familiaris
cgaggctcccgctagtgcgggacag

SEQ ID NO: 79264 - DNA, 25 bp, Canis familiaris
cgaggcccagagcaagcggggcatc

SEQ ID NO: 79265 - DNA, 25 bp, Canis familiaris
cgaggcccagagcaagagaggtatc

SEQ ID NO: 79266 - DNA, 25 bp, Canis familiaris
cgagagcgccgagagcgatgggcat

SEQ ID NO: 79267 - DNA, 25 bp, Canis familiaris
cgaggccaccaaagccaggatctct

SEQ ID NO: 79268 - DNA, 25 bp, Canis familiaris
cgacgacaccagcgtcagtgtcctt

SEQ ID NO: 79269 - DNA, 25 bp, Canis familiaris
cgaggagatccacacacagttcctg

SEQ ID NO: 79270 - DNA, 25 bp, Canis familiaris
cgaacattcacacagacagctagtc

SEQ ID NO: 79271 - DNA, 25 bp, Canis familiaris
cgaccttccagcacagggagtctgg

SEQ ID NO: 79272 - DNA, 25 bp, Canis familiaris
cgaccctctcagactagcggaaagg

SEQ ID NO: 79273 - DNA, 25 bp, Canis familiaris
cgagactcttctgtagatgtaaata

SEQ ID NO: 79274 - DNA, 25 bp, Canis familiaris
cgagactcttctgtatatgtataat

SEQ ID NO: 79275 - DNA, 25 bp, Canis familiaris
cgagatctttctttcatggtaatgt

SEQ ID NO: 79276 - DNA, 25 bp, Canis familiaris
cgaatgttctgattacttgtttctc

SEQ ID NO: 79277 - DNA, 25 bp, Canis familiaris
cgagtgaatctatacatgtgtctga

SEQ ID NO: 79278 - DNA, 25 bp, Canis familiaris
cgagtcagatccttaatatatgtat

SEQ ID NO: 79279 - DNA, 25 bp, Canis familiaris
cgaggagatcactcccatgctggat

SEQ ID NO: 79280 - DNA, 25 bp, Canis familiaris
cgagaaggcacattccaaggacatc

SEQ ID NO: 79281 - DNA, 25 bp, Canis familiaris
cgagatatgaggaacccaggtacca

SEQ ID NO: 79282 - DNA, 25 bp, Canis familiaris
cgagaatggctactcctcggtacga

SEQ ID NO: 79283 - DNA, 25 bp, Canis familiaris
cgacgtggctcacactgtggtgtcg

SEQ ID NO: 79284 - DNA, 25 bp, Canis familiaris
cgagcaggtgatcttcgtggtgcgc

SEQ ID NO: 79285 - DNA, 25 bp, Canis familiaris
cgagagagctgcctggtggggtggc

SEQ ID NO: 79286 - DNA, 25 bp, Canis familiaris
cgagagcatgagtggctgctgggtg

SEQ ID NO: 79287 - DNA, 25 bp, Canis familiaris
cgagagcgatgggcatctctcggga

SEQ ID NO: 79288 - DNA, 25 bp, Canis familiaris
cgaaggatatgccacctcggttttc

SEQ ID NO: 79289 - DNA, 25 bp, Canis familiaris
ccaagtcaagattcccggtttattg

SEQ ID NO: 79290 - DNA, 25 bp, Canis familiaris
cgcaagataagcgccggagggtttg

SEQ ID NO: 79291 - DNA, 25 bp, Canis familiaris
gcgactgaacgtgttcggggttggc

SEQ ID NO: 79292 - DNA, 25 bp, Canis familiaris
cgactgaagctgaggagccgcggtc

SEQ ID NO: 79293 - DNA, 25 bp, Canis familiaris
cgagtgcagatctgggacacggcgg

SEQ ID NO: 79294 - DNA, 25 bp, Canis familiaris
cgaggcgttgaaggtactggcggct

SEQ ID NO: 79295 - DNA, 25 bp, Canis familiaris
cgagggtcgatcgagtggcgagtgg

SEQ ID NO: 79296 - DNA, 25 bp, Canis familiaris
cgagcggtggcacagtagcgactta

SEQ ID NO: 79297 - DNA, 25 bp, Canis familiaris
cgaggactggcagactagctttttt

SEQ ID NO: 79298 - DNA, 25 bp, Canis familiaris
cgaggagtcctttttgttgttcttg

SEQ ID NO: 79299 - DNA, 25 bp, Canis familiaris
cgagtgcgactcttttggtgttttt

SEQ ID NO: 79300 - DNA, 25 bp, Canis familiaris
cgacagcctcagctttggtttctgt

SEQ ID NO: 79301 - DNA, 25 bp, Canis familiaris
ccaccaacagggtgtccttcttact

SEQ ID NO: 79302 - DNA, 25 bp, Canis familiaris
ccagaaacagggtgtcctgcttttt

SEQ ID NO: 79303 - DNA, 25 bp, Canis familiaris
cctaaaaggcacactacgttctctg

SEQ ID NO: 79304 - DNA, 25 bp, Canis familiaris
cctaaaaggtccctagtgtagtgtg

SEQ ID NO: 79305 - DNA, 25 bp, Canis familiaris
cctagaattaaccccgggactcatg

SEQ ID NO: 79306 - DNA, 25 bp, Canis familiaris
ccctaaaaccctccatgggtgtcat

SEQ ID NO: 79307 - DNA, 25 bp, Canis familiaris
ccgctacaaactccagtgggactcc

SEQ ID NO: 79308 - DNA, 25 bp, Canis familiaris
ccgagacagaacctctttgggccgg

SEQ ID NO: 79309 - DNA, 25 bp, Canis familiaris
ccttaagaccccatgagactccagg

SEQ ID NO: 79310 - DNA, 25 bp, Canis familiaris
tccttaaccccctggttcacaggag

SEQ ID NO: 79311 - DNA, 25 bp, Canis familiaris
cccagaacccccaggttcaagtatg

SEQ ID NO: 79312 - DNA, 25 bp, Canis familiaris
ccaaagacccctcagtttcaaagtg

SEQ ID NO: 79313 - DNA, 25 bp, Canis familiaris
ccaaagtaccaatacttgcttaagg

SEQ ID NO: 79314 - DNA, 25 bp, Canis familiaris
ccaaatgtaaaccgacacctgaaag

SEQ ID NO: 79315 - DNA, 25 bp, Canis familiaris
cgctatttaacacggcctccgagat

SEQ ID NO: 79316 - DNA, 25 bp, Canis familiaris
cgcaactaaatcctggaatgcagga

SEQ ID NO: 79317 - DNA, 25 bp, Canis familiaris
cgctattaccatggtagaatccggt

SEQ ID NO: 79318 - DNA, 25 bp, Canis familiaris
tcgttttgtaggagaatatggtgtc

SEQ ID NO: 79319 - DNA, 25 bp, Canis familiaris
cgccttatgggggccaaaggtgtcg

SEQ ID NO: 79320 - DNA, 25 bp, Canis familiaris
cgagcctatgggcccaacatgaggg

SEQ ID NO: 79321 - DNA, 25 bp, Canis familiaris
cgagaatgagggtcctttgggaaag

SEQ ID NO: 79322 - DNA, 25 bp, Canis familiaris
cgagaatgtggcgtcgctctgaggc

SEQ ID NO: 79323 - DNA, 25 bp, Canis familiaris
cgaggagggagtggtcatgggcccg

SEQ ID NO: 79324 - DNA, 25 bp, Canis familiaris
cgagagggagagggtccacacccag

SEQ ID NO: 79325 - DNA, 25 bp, Canis familiaris
cgagagctagaactggtctacgccc

SEQ ID NO: 79326 - DNA, 25 bp, Canis familiaris
cgagtgtagacgggctgttgcgctc

SEQ ID NO: 79327 - DNA, 25 bp, Canis familiaris
cgaatgcttgatgaagcttgtgagc

SEQ ID NO: 79328 - DNA, 25 bp, Canis familiaris
cgctttgagggatgctctgtgcgcg

SEQ ID NO: 79329 - DNA, 25 bp, Canis familiaris
cgctgttcacgaggagctattgcca

SEQ ID NO: 79330 - DNA, 25 bp, Canis familiaris
cgcaagtgcctcgggctttcaaaaa

SEQ ID NO: 79331 - DNA, 25 bp, Canis familiaris
cgacgagactctggatgttaaggaa

SEQ ID NO: 79332 - DNA, 25 bp, Canis familiaris
cgaggaggctcttagtgctctcaga

SEQ ID NO: 79333 - DNA, 25 bp, Canis familiaris
cgagaagcgccttggagtctggaga

SEQ ID NO: 79334 - DNA, 25 bp, Canis familiaris
cgaggaggcacaatgagacttgaaa

SEQ ID NO: 79335 - DNA, 25 bp, Canis familiaris
cgagcaggtgaaatcgcagtcgaaa

SEQ ID NO: 79336 - DNA, 25 bp, Canis familiaris
cgagggtgcaagacactttgctccg

SEQ ID NO: 79337 - DNA, 25 bp, Canis familiaris
cgcatgagaacaagcccttggcctc

SEQ ID NO: 79338 - DNA, 25 bp, Canis familiaris
cgagcagatacacggaggtgtcggg

SEQ ID NO: 79339 - DNA, 25 bp, Canis familiaris
cgagacaacctgacggattgcggcc

SEQ ID NO: 79340 - DNA, 25 bp, Canis familiaris
cgagacagtatttcggtgccggcac

SEQ ID NO: 79341 - DNA, 25 bp, Canis familiaris
cgagcacgtttactgtgtgtcccaa

SEQ ID NO: 79342 - DNA, 25 bp, Canis familiaris
cgaagtgtttactctgatcctgaca

SEQ ID NO: 79343 - DNA, 25 bp, Canis familiaris
cgaaggattccattcctggctgtac

SEQ ID NO: 79344 - DNA, 25 bp, Canis familiaris
cgaagtattcagtaccgctcagtat

SEQ ID NO: 79345 - DNA, 25 bp, Canis familiaris
cgaagttatggatatctcattgctt

SEQ ID NO: 79346 - DNA, 25 bp, Canis familiaris
cgaaaaagctgctgtccttgctgcc

SEQ ID NO: 79347 - DNA, 25 bp, Canis familiaris
cgaaaaaagacactgccgatgcccc

SEQ ID NO: 79348 - DNA, 25 bp, Canis familiaris
cgaattggaagaactgctcgcagta

SEQ ID NO: 79349 - DNA, 25 bp, Canis familiaris
cgcatgtcgggactgggctgcgagt

SEQ ID NO: 79350 - DNA, 25 bp, Canis familiaris
cgctactggtacccagctaggtgcc

SEQ ID NO: 79351 - DNA, 25 bp, Canis familiaris
cgctacctgtcccagctgaaggacg

SEQ ID NO: 79352 - DNA, 25 bp, Canis familiaris
cgcagtttgtctgagctgaaggaaa

SEQ ID NO: 79353 - DNA, 25 bp, Canis familiaris
cgcgatgatgttggctttgaatgaa

SEQ ID NO: 79354 - DNA, 25 bp, Canis familiaris
cgcaatgattcagctcgctgaggaa

SEQ ID NO: 79355 - DNA, 25 bp, Canis familiaris
cgagatctataccgcttgggaaacg

SEQ ID NO: 79356 - DNA, 25 bp, Canis familiaris
cgagtttgcagccgcgtgggaactc

SEQ ID NO: 79357 - DNA, 25 bp, Canis familiaris
cgagatatggcccgcgctggagttt

SEQ ID NO: 79358 - DNA, 25 bp, Canis familiaris
cgcaatagcgacgcgctggcgttac

SEQ ID NO: 79359 - DNA, 25 bp, Canis familiaris
cgactggcgatgcggcggcgttatt

SEQ ID NO: 79360 - DNA, 25 bp, Canis familiaris
cgactgggacacggtgacggtgctg

SEQ ID NO: 79361 - DNA, 25 bp, Canis familiaris
cgacgcggactcaagatggcggcgc

SEQ ID NO: 79362 - DNA, 25 bp, Canis familiaris
cgacgcggacaaggtggtggacaag

SEQ ID NO: 79363 - DNA, 25 bp, Canis familiaris
cgagctgtagactcggtgctggacg

SEQ ID NO: 79364 - DNA, 25 bp, Canis familiaris
cgagctgtagaggctccagctcaag

SEQ ID NO: 79365 - DNA, 25 bp, Canis familiaris
cgagctgaaggcctccatcaaaaag

SEQ ID NO: 79366 - DNA, 25 bp, Canis familiaris
cgactacaagactcagcaaacacga

SEQ ID NO: 79367 - DNA, 25 bp, Canis familiaris
cgagatacgagaaggcaggaacagg

SEQ ID NO: 79368 - DNA, 25 bp, Canis familiaris
cgaaggctatgaaagcggattcatg

SEQ ID NO: 79369 - DNA, 25 bp, Canis familiaris
cgaaggagcagatcgtggagatgct

SEQ ID NO: 79370 - DNA, 25 bp, Canis familiaris
cgagaagcacaattcaggggcttga

SEQ ID NO: 79371 - DNA, 25 bp, Canis familiaris
cgagacactccagctgtggtttgca

SEQ ID NO: 79372 - DNA, 25 bp, Canis familiaris
cgacccacacacaggctgtgtctca

SEQ ID NO: 79373 - DNA, 25 bp, Canis familiaris
cgacctcacctgggagcttgttaga

SEQ ID NO: 79374 - DNA, 25 bp, Canis familiaris
cgacccacggtgtgtgtgaattgaa

SEQ ID NO: 79375 - DNA, 25 bp, Canis familiaris
cgacttcacgtttaatggattttca

SEQ ID NO: 79376 - DNA, 25 bp, Canis familiaris
cgacctcacttttaggaatgtctct

SEQ ID NO: 79377 - DNA, 25 bp, Canis familiaris
cgacctgttttgtcatcgatgatgg

SEQ ID NO: 79378 - DNA, 25 bp, Canis familiaris
cgaccagcatctctggctttgtgag

SEQ ID NO: 79379 - DNA, 25 bp, Canis familiaris
cgcaaactgcgtaccttttatgaga

SEQ ID NO: 79380 - DNA, 25 bp, Canis familiaris
cgcttcagccctactttttaatggg

SEQ ID NO: 79381 - DNA, 25 bp, Canis familiaris
cgctaccccaaggtgtcctgagggt

SEQ ID NO: 79382 - DNA, 25 bp, Canis familiaris
cgaattctccccgagtacgagatag

SEQ ID NO: 79383 - DNA, 25 bp, Canis familiaris
cgaattctggccttggccaggaagg

SEQ ID NO: 79384 - DNA, 25 bp, Canis familiaris
cgaattggtggagtggccggcatcg

SEQ ID NO: 79385 - DNA, 25 bp, Canis familiaris
cgaaagctatggatgagtctgttgc

SEQ ID NO: 79386 - DNA, 25 bp, Canis familiaris
cgaagcggctccagattctgcttct

SEQ ID NO: 79387 - DNA, 25 bp, Canis familiaris
cgaggtgaccacttatttgctctcc

SEQ ID NO: 79388 - DNA, 25 bp, Canis familiaris
cgcacgtgttcataatttgcactgc

SEQ ID NO: 79389 - DNA, 25 bp, Canis familiaris
cgagcttgctctgaagacgtcctcg

SEQ ID NO: 79390 - DNA, 25 bp, Canis familiaris
cgagctgtgcttgcaaggacttcat

SEQ ID NO: 79391 - DNA, 25 bp, Canis familiaris
cgagctctgccttacaggatttctg

SEQ ID NO: 79392 - DNA, 25 bp, Canis familiaris
cgagctcttgcttcaacagtgtttg

SEQ ID NO: 79393 - DNA, 25 bp, Canis familiaris
cgagttcgtcacaaagcatgccttc

SEQ ID NO: 79394 - DNA, 25 bp, Canis familiaris
cgagaccgctactatagttcatcct

SEQ ID NO: 79395 - DNA, 25 bp, Canis familiaris
cgagccatcagtatattcctgcacc

SEQ ID NO: 79396 - DNA, 25 bp, Canis familiaris
cgagcctcgaggcagtgcctgagct

SEQ ID NO: 79397 - DNA, 25 bp, Canis familiaris
cgagccggaaagcctgacatgagcc

SEQ ID NO: 79398 - DNA, 25 bp, Canis familiaris
cgagcacgaggtaccgcagtggctc

SEQ ID NO: 79399 - DNA, 25 bp, Canis familiaris
cgagccgggaagggctgtgtgcctc

SEQ ID NO: 79400 - DNA, 25 bp, Canis familiaris
cgagtgcgtgtgtgagtgcgtgtgc

SEQ ID NO: 79401 - DNA, 25 bp, Canis familiaris
cgagctgcggcacttggttatccgc

SEQ ID NO: 79402 - DNA, 25 bp, Canis familiaris
cgacggtcactaggcgtgacgcggc

SEQ ID NO: 79403 - DNA, 25 bp, Canis familiaris
cgagtggtcagcaagtgctgccccg

SEQ ID NO: 79404 - DNA, 25 bp, Canis familiaris
cgaggggcacaggcagtgcagcccg

SEQ ID NO: 79405 - DNA, 25 bp, Canis familiaris
cgagcagctggccagtctggagtcc

SEQ ID NO: 79406 - DNA, 25 bp, Canis familiaris
cgagctcatgatccactgctggaag

SEQ ID NO: 79407 - DNA, 25 bp, Canis familiaris
cgaggataccacttggagagggcaa

SEQ ID NO: 79408 - DNA, 25 bp, Canis familiaris
cgaccatccccacgtgagtgggaca

SEQ ID NO: 79409 - DNA, 25 bp, Canis familiaris
cgagccttacccctggggagagcaa

SEQ ID NO: 79410 - DNA, 25 bp, Canis familiaris
cgaacttgactatctagaggaagta

SEQ ID NO: 79411 - DNA, 25 bp, Canis familiaris
cgaacttgactatctagaggaagta

SEQ ID NO: 79412 - DNA, 25 bp, Canis familiaris
cgacacttgagtcgtcttagaaagt

SEQ ID NO: 79413 - DNA, 25 bp, Canis familiaris
cgacctgtacgtgctggagcaactt

SEQ ID NO: 79414 - DNA, 25 bp, Canis familiaris
cgacctgtgaccgcatcaagcagtc

SEQ ID NO: 79415 - DNA, 25 bp, Canis familiaris
cgacgcgctggcgttacagcgcaac

SEQ ID NO: 79416 - DNA, 25 bp, Canis familiaris
cgacccggctgtgagatggcagcac

SEQ ID NO: 79417 - DNA, 25 bp, Canis familiaris
cgacctcttcttaaatacacattcc

SEQ ID NO: 79418 - DNA, 25 bp, Canis familiaris
cgaccttatcttcatcttcagaggc

SEQ ID NO: 79419 - DNA, 25 bp, Canis familiaris
cgagccattcttccttgtatcaagg

SEQ ID NO: 79420 - DNA, 25 bp, Canis familiaris
cgaccagtttcctttctgactgatg

SEQ ID NO: 79421 - DNA, 25 bp, Canis familiaris
cgacggttccttctctgatgagatg

SEQ ID NO: 79422 - DNA, 25 bp, Canis familiaris
cgcaccgtagccatctactctgagc

SEQ ID NO: 79423 - DNA, 25 bp, Canis familiaris
cgctcacgacacgactgcgagcttg

SEQ ID NO: 79424 - DNA, 25 bp, Canis familiaris
cgcatctcagagactgacctgcgcc

SEQ ID NO: 79425 - DNA, 25 bp, Canis familiaris
cgcttcggtgtgtcttagactcgtg

SEQ ID NO: 79426 - DNA, 25 bp, Canis familiaris
cgctggacgacgtcattcagaccgg

SEQ ID NO: 79427 - DNA, 25 bp, Canis familiaris
cgcattacgacgggctaacctgcga

SEQ ID NO: 79428 - DNA, 25 bp, Canis familiaris
cgagcccgacagggccaacttggtg

SEQ ID NO: 79429 - DNA, 25 bp, Canis familiaris
cgacttcgacgcggacaaggtggtg

SEQ ID NO: 79430 - DNA, 25 bp, Canis familiaris
cgacttcgacctgctcaagttcgac

SEQ ID NO: 79431 - DNA, 25 bp, Canis familiaris
cgacttcctcttgaacagtgtgctg

SEQ ID NO: 79432 - DNA, 25 bp, Canis familiaris
cgacgtccgctgttgaagcaggtcc

SEQ ID NO: 79433 - DNA, 25 bp, Canis familiaris
cgcatcgtcgcacatcgaacaggat

SEQ ID NO: 79434 - DNA, 25 bp, Canis familiaris
cgctgccattgacccagaatcgaat

SEQ ID NO: 79435 - DNA, 25 bp, Canis familiaris
cgctggctctgagtggctgagactg

SEQ ID NO: 79436 - DNA, 25 bp, Canis familiaris
cgcatgtgtcgcagttggcagagta

SEQ ID NO: 79437 - DNA, 25 bp, Canis familiaris
ccatgcatgtctaagtacgcacggc

SEQ ID NO: 79438 - DNA, 25 bp, Canis familiaris
cgcagctgctctaagcaacttcggg

SEQ ID NO: 79439 - DNA, 25 bp, Canis familiaris
cgcgatcctggagacccgggatcga

SEQ ID NO: 79440 - DNA, 25 bp, Canis familiaris
cgcgatcctggagatcccgggatcg

SEQ ID NO: 79441 - DNA, 25 bp, Canis familiaris
cgcttcctgaagatccgctgaggtg

SEQ ID NO: 79442 - DNA, 25 bp, Canis familiaris
cgcttcctgaagatgcccatcaaca

SEQ ID NO: 79443 - DNA, 25 bp, Canis familiaris
cgcaccttgtcatgtaccatcaata

SEQ ID NO: 79444 - DNA, 25 bp, Canis familiaris
cgcactttccagacctactgaatca

SEQ ID NO: 79445 - DNA, 25 bp, Canis familiaris
cgacatctatccctccaagtggatt

SEQ ID NO: 79446 - DNA, 25 bp, Canis familiaris
cgagctccagaccatccaagaagga

SEQ ID NO: 79447 - DNA, 25 bp, Canis familiaris
cgagttggcacttctggataatgaa

SEQ ID NO: 79448 - DNA, 25 bp, Canis familiaris
cgcagtggcacagattggatgacag

SEQ ID NO: 79449 - DNA, 25 bp, Canis familiaris
cgcatgtggcccatttggccatggt

SEQ ID NO: 79450 - DNA, 25 bp, Canis familiaris
cgcatgtctccgatgctttgtatca

SEQ ID NO: 79451 - DNA, 25 bp, Canis familiaris
cgagtgctcgagatgttggtcccac

SEQ ID NO: 79452 - DNA, 25 bp, Canis familiaris
cgagtgctgttgatgtgggctctcc

SEQ ID NO: 79453 - DNA, 25 bp, Canis familiaris
cgagtctggggtaagcactgtcacc

SEQ ID NO: 79454 - DNA, 25 bp, Canis familiaris
cgagctgtgggttaacactgtgcac

SEQ ID NO: 79455 - DNA, 25 bp, Canis familiaris
cgcatgtgtgtgcgaaccggtctcg

SEQ ID NO: 79456 - DNA, 25 bp, Canis familiaris
cgcagatgttttcatcacttcctcc

SEQ ID NO: 79457 - DNA, 25 bp, Canis familiaris
cgcaggtatctttcacaattcagcc

SEQ ID NO: 79458 - DNA, 25 bp, Canis familiaris
cgagagctcttcacgaatatcaccc

SEQ ID NO: 79459 - DNA, 25 bp, Canis familiaris
cgagtctgtagttggacacacaccc

SEQ ID NO: 79460 - DNA, 25 bp, Canis familiaris
cgagtgatgaggttcgcaagaacct

SEQ ID NO: 79461 - DNA, 25 bp, Canis familiaris
cgagtcaagtgtgcgaggaacgcgg

SEQ ID NO: 79462 - DNA, 25 bp, Canis familiaris
cgaagaggtggccgggccggctgtg

SEQ ID NO: 79463 - DNA, 25 bp, Canis familiaris
cgaagagagtgggggtctccgcgat

SEQ ID NO: 79464 - DNA, 25 bp, Canis familiaris
cgaagtactggtggcaggcggccgt

SEQ ID NO: 79465 - DNA, 25 bp, Canis familiaris
cgaagtactgtggctaggtcccatc

SEQ ID NO: 79466 - DNA, 25 bp, Canis familiaris
cgcggattttggcaggctgcaccac

SEQ ID NO: 79467 - DNA, 25 bp, Canis familiaris
cgcggaaatggctgagatctgagtc

SEQ ID NO: 79468 - DNA, 25 bp, Canis familiaris
cgcggttcacgagatgcacgagttt

SEQ ID NO: 79469 - DNA, 25 bp, Canis familiaris
cgctgggtccgagatgaccgccagc

SEQ ID NO: 79470 - DNA, 25 bp, Canis familiaris
cgctgatgaccccggacaccgacga

SEQ ID NO: 79471 - DNA, 25 bp, Canis familiaris
cgctggacctcatagcccagcagat

SEQ ID NO: 79472 - DNA, 25 bp, Canis familiaris
cgacgacccaaagtacacagatcag

SEQ ID NO: 79473 - DNA, 25 bp, Canis familiaris
cgacgacatccaacaatcacactgg

SEQ ID NO: 79474 - DNA, 25 bp, Canis familiaris
cgacgcagatgcgacaaagccccag

SEQ ID NO: 79475 - DNA, 25 bp, Canis familiaris
cgagcaagtcacgaatactccggct

SEQ ID NO: 79476 - DNA, 25 bp, Canis familiaris
cgaacagtcgctgaacggcgtgcat

SEQ ID NO: 79477 - DNA, 25 bp, Canis familiaris
cgagagagcccagaactcgcatcga

SEQ ID NO: 79478 - DNA, 25 bp, Canis familiaris
cgagaggagccggtgccggcactga

SEQ ID NO: 79479 - DNA, 25 bp, Canis familiaris
cgagaggagccaggtggggccagct

SEQ ID NO: 79480 - DNA, 25 bp, Canis familiaris
cgagaagtgccagctgctgttccgc

SEQ ID NO: 79481 - DNA, 25 bp, Canis familiaris
cgagcaaggagcgtgtctctctccg

SEQ ID NO: 79482 - DNA, 25 bp, Canis familiaris
cgagcacggcatcgtcaccaactgg

SEQ ID NO: 79483 - DNA, 25 bp, Canis familiaris
cgacattgagattgccacctacagg

SEQ ID NO: 79484 - DNA, 25 bp, Canis familiaris
cgacattgagattgccacctacagg

SEQ ID NO: 79485 - DNA, 25 bp, Canis familiaris
cgacctggtggctagcagccaacgg

SEQ ID NO: 79486 - DNA, 25 bp, Canis familiaris
cgacctcgtagcaacagcaatacca

SEQ ID NO: 79487 - DNA, 25 bp, Canis familiaris
cgaccatcagtatcacagcgacagc

SEQ ID NO: 79488 - DNA, 25 bp, Canis familiaris
cgagagcaagtaccacacgactgcg

SEQ ID NO: 79489 - DNA, 25 bp, Canis familiaris
cgcagcgatttaacaccgcctgcag

SEQ ID NO: 79490 - DNA, 25 bp, Canis familiaris
cgaaattgataacccctgctgtgtg

SEQ ID NO: 79491 - DNA, 25 bp, Canis familiaris
cgagcgatggatttccgtctctggt

SEQ ID NO: 79492 - DNA, 25 bp, Canis familiaris
cgcagcaggtgcatcgccagcattt

SEQ ID NO: 79493 - DNA, 25 bp, Canis familiaris
cgaatggcagcagcgccagcagttc

SEQ ID NO: 79494 - DNA, 25 bp, Canis familiaris
cgagatgccatgtgaccgtgtctct

SEQ ID NO: 79495 - DNA, 25 bp, Canis familiaris
cgagctgcctgacggccaggtcatc

SEQ ID NO: 79496 - DNA, 25 bp, Canis familiaris
cgcagtgagctgtgaccaggagccc

SEQ ID NO: 79497 - DNA, 25 bp, Canis familiaris
cgcagctagacggagctcagggcgc

SEQ ID NO: 79498 - DNA, 25 bp, Canis familiaris
cgcagggacagtgctcgcatgtgcg

SEQ ID NO: 79499 - DNA, 25 bp, Canis familiaris
cgcaaggacgtgaccctgcggaagc

SEQ ID NO: 79500 - DNA, 25 bp, Canis familiaris
cgagcaggggttccctgcagccaag

SEQ ID NO: 79501 - DNA, 25 bp, Canis familiaris
cgcagcggcaagttcacctgcaacg

SEQ ID NO: 79502 - DNA, 25 bp, Canis familiaris
cgctggagtcgatcaactctaggct

SEQ ID NO: 79503 - DNA, 25 bp, Canis familiaris
cgcaggcctcttaaactacatagct

SEQ ID NO: 79504 - DNA, 25 bp, Canis familiaris
cgcacgcacttccacaaaagaactg

SEQ ID NO: 79505 - DNA, 25 bp, Canis familiaris
cgcctgaccccaaaactgtacagta

SEQ ID NO: 79506 - DNA, 25 bp, Canis familiaris
cgcactgtgtcctttacactggaag

SEQ ID NO: 79507 - DNA, 25 bp, Canis familiaris
cgcagtagtcgtagtccctgcggcc

SEQ ID NO: 79508 - DNA, 25 bp, Canis familiaris
cgcatttcctgtaatctgctctgag

SEQ ID NO: 79509 - DNA, 25 bp, Canis familiaris
cgcattttggtgtactcctagataa

SEQ ID NO: 79510 - DNA, 25 bp, Canis familiaris
cgctgtgtttgttggttctagaaga

SEQ ID NO: 79511 - DNA, 25 bp, Canis familiaris
cgcttgccctcattaggttggatga

SEQ ID NO: 79512 - DNA, 25 bp, Canis familiaris
cgctttcccaaccaagctgtgatgt

SEQ ID NO: 79513 - DNA, 25 bp, Canis familiaris
cgcaagtttcgtggatggcttgatg

SEQ ID NO: 79514 - DNA, 25 bp, Canis familiaris
cgcaagtttcgtctggattgcccac

SEQ ID NO: 79515 - DNA, 25 bp, Canis familiaris
cgcaaactggggctaaatccgcagc

SEQ ID NO: 79516 - DNA, 25 bp, Canis familiaris
cgaaatgtcgtgacgaagtccgccc

SEQ ID NO: 79517 - DNA, 25 bp, Canis familiaris
cgaaagggggtgacagtgcctgcac

SEQ ID NO: 79518 - DNA, 25 bp, Canis familiaris
cgaagaggaggactgaacccaccct

SEQ ID NO: 79519 - DNA, 25 bp, Canis familiaris
cgaagaggaggactgaacccaccct

SEQ ID NO: 79520 - DNA, 25 bp, Canis familiaris
ccgtgaaaggtgcaaggcccggcgc

SEQ ID NO: 79521 - DNA, 25 bp, Canis familiaris
ccggaattcccgggatgaacgagcg

SEQ ID NO: 79522 - DNA, 25 bp, Canis familiaris
cgagagaagtctgccggcaaagggg

SEQ ID NO: 79523 - DNA, 25 bp, Canis familiaris
cgagagggcgtggcgggaaaggctg

SEQ ID NO: 79524 - DNA, 25 bp, Canis familiaris
cgaagcgggcggcgctgaacgcccg

SEQ ID NO: 79525 - DNA, 25 bp, Canis familiaris
tcgggaaggcctgagggaagcccgc

SEQ ID NO: 79526 - DNA, 25 bp, Canis familiaris
cgacgaggtccggggtgagtggccg

SEQ ID NO: 79527 - DNA, 25 bp, Canis familiaris
cgagccaggaagtttggttgtggac

SEQ ID NO: 79528 - DNA, 25 bp, Canis familiaris
cgcagccgtatctgtttggcgggac

SEQ ID NO: 79529 - DNA, 25 bp, Canis familiaris
ccagaaggactcctacgtgggcgac

SEQ ID NO: 79530 - DNA, 25 bp, Canis familiaris
cgcagccaggtggtctacgtggtgg

SEQ ID NO: 79531 - DNA, 25 bp, Canis familiaris
cgacagtggtgtgccatcgtggtgc

SEQ ID NO: 79532 - DNA, 25 bp, Canis familiaris
cgacatcttctttccactggagtga

SEQ ID NO: 79533 - DNA, 25 bp, Canis familiaris
cgagcagtgctatacccaggagtag

SEQ ID NO: 79534 - DNA, 25 bp, Canis familiaris
cgctggtggtcatcagccagggcaa

SEQ ID NO: 79535 - DNA, 25 bp, Canis familiaris
cgcggctggtttgcgaagaagacgg

SEQ ID NO: 79536 - DNA, 25 bp, Canis familiaris
cgcttcggttgagcaggatgactgc

SEQ ID NO: 79537 - DNA, 25 bp, Canis familiaris
cgcttcgtggtggcacctagcagtc

SEQ ID NO: 79538 - DNA, 25 bp, Canis familiaris
cgcttcaggaggtccctctgatgct

SEQ ID NO: 79539 - DNA, 25 bp, Canis familiaris
cgctgtcgaaagtccgttgcgcgga

SEQ ID NO: 79540 - DNA, 25 bp, Canis familiaris
cgctccgaagggcaggcccggagcc

SEQ ID NO: 79541 - DNA, 25 bp, Canis familiaris
cgctccgtggggtgcgggggagcag

SEQ ID NO: 79542 - DNA, 25 bp, Canis familiaris
ccgcacggtgaatctggggggaaag

SEQ ID NO: 79543 - DNA, 25 bp, Canis familiaris
cgagcacagtggacaacggggggcc

SEQ ID NO: 79544 - DNA, 25 bp, Canis familiaris
cgaagcgcatggagactcggggggc

SEQ ID NO: 79545 - DNA, 25 bp, Canis familiaris
cgagacgctgagagagccggcattg

SEQ ID NO: 79546 - DNA, 25 bp, Canis familiaris
cgagcaccagaggcagagcctggcc

SEQ ID NO: 79547 - DNA, 25 bp, Canis familiaris
cgagcccagaggtgcctggaaacct

SEQ ID NO: 79548 - DNA, 25 bp, Canis familiaris
cgaccggcgtatcgacggaacgcgt

SEQ ID NO: 79549 - DNA, 25 bp, Canis familiaris
cgacacgggtctcacagggatatcc

SEQ ID NO: 79550 - DNA, 25 bp, Canis familiaris
cgagaagcggttcgacgaggccatc

SEQ ID NO: 79551 - DNA, 25 bp, Canis familiaris
cgaattgttgttcggggtgccagca

SEQ ID NO: 79552 - DNA, 25 bp, Canis familiaris
cgactcacttttcgggttgctagcg

SEQ ID NO: 79553 - DNA, 25 bp, Canis familiaris
cgactcctgacttgggggtttctga

SEQ ID NO: 79554 - DNA, 25 bp, Canis familiaris
cgacttctgctttgtggcttgtttt

SEQ ID NO: 79555 - DNA, 25 bp, Canis familiaris
cgcagctcgagcacagtggtggttt

SEQ ID NO: 79556 - DNA, 25 bp, Canis familiaris
cgcccaggtaggggtgcgtactggc

SEQ ID NO: 79557 - DNA, 25 bp, Canis familiaris
cgacgagagtgggcctgtcggtcgg

SEQ ID NO: 79558 - DNA, 25 bp, Canis familiaris
cgaccacatctggggcctgggtcgg

SEQ ID NO: 79559 - DNA, 25 bp, Canis familiaris
cgaccccggatcggtgtggtgggtg

SEQ ID NO: 79560 - DNA, 25 bp, Canis familiaris
cgagcctggccgactgtgtatggct

SEQ ID NO: 79561 - DNA, 25 bp, Canis familiaris
cgcagctgtggctgtcttgacgttt

SEQ ID NO: 79562 - DNA, 25 bp, Canis familiaris
cgcacaggtaggtcctgcacagctc

SEQ ID NO: 79563 - DNA, 25 bp, Canis familiaris
cgcaagagtaggggggcgtctccga

SEQ ID NO: 79564 - DNA, 25 bp, Canis familiaris
cgagaaggagcggcaggcggctctc

SEQ ID NO: 79565 - DNA, 25 bp, Canis familiaris
cgagccgtgccggcaagtatgcttc

SEQ ID NO: 79566 - DNA, 25 bp, Canis familiaris
cgagcgttgccaggagagcgacgac

SEQ ID NO: 79567 - DNA, 25 bp, Canis familiaris
cgagcgcaagcggcgcgtggagctg

SEQ ID NO: 79568 - DNA, 25 bp, Canis familiaris
cgagccaagccggtggtgagcgatg

SEQ ID NO: 79569 - DNA, 25 bp, Canis familiaris
cgacccgcctgctggagcaggtgag

SEQ ID NO: 79570 - DNA, 25 bp, Canis familiaris
cgacccagagtcccagcaagggagg

SEQ ID NO: 79571 - DNA, 25 bp, Canis familiaris
cgagcccaagtgcggcgaggaggcg

SEQ ID NO: 79572 - DNA, 25 bp, Canis familiaris
cgacgagaacgggcacggggagcag

SEQ ID NO: 79573 - DNA, 25 bp, Canis familiaris
cgcatccgaaggacctctggggaga

SEQ ID NO: 79574 - DNA, 25 bp, Canis familiaris
cgaccgcaaggactacgtgtgaggg

SEQ ID NO: 79575 - DNA, 25 bp, Canis familiaris
cgacctcacggaccgcgtgaaggtg

SEQ ID NO: 79576 - DNA, 25 bp, Canis familiaris
cgacccggagatcctggagagcagg

SEQ ID NO: 79577 - DNA, 25 bp, Canis familiaris
cgaccatgcggaccagtgggacgga

SEQ ID NO: 79578 - DNA, 25 bp, Canis familiaris
cgagccgctgtgccaagtgtggcaa

SEQ ID NO: 79579 - DNA, 25 bp, Canis familiaris
cgagcgtgcgtgacttgataggccc

SEQ ID NO: 79580 - DNA, 25 bp, Canis familiaris
cgacgtcagtcagttgatggtgaac

SEQ ID NO: 79581 - DNA, 25 bp, Canis familiaris
cgactgtacccacgatgaggacgca

SEQ ID NO: 79582 - DNA, 25 bp, Canis familiaris
cgcacttcaccttcaagggatctgc

SEQ ID NO: 79583 - DNA, 25 bp, Canis familiaris
cgactggcacccggagctaggtgcc

SEQ ID NO: 79584 - DNA, 25 bp, Canis familiaris
cgacgtgcccacgagcgtggagggc

SEQ ID NO: 79585 - DNA, 25 bp, Canis familiaris
cgagcgctgccgtaaggaaaggagc

SEQ ID NO: 79586 - DNA, 25 bp, Canis familiaris
cgagcccctgatggagccagaaggg

SEQ ID NO: 79587 - DNA, 25 bp, Canis familiaris
cgcaccacttgaggatgccatcgcg

SEQ ID NO: 79588 - DNA, 25 bp, Canis familiaris
cgaaagcggcaggatcgacgcgctt

SEQ ID NO: 79589 - DNA, 25 bp, Canis familiaris
cgaaagttcagtacgatgcccttcc

SEQ ID NO: 79590 - DNA, 25 bp, Canis familiaris
cgaaatatctaaatctgtgccccca

SEQ ID NO: 79591 - DNA, 25 bp, Canis familiaris
cgacaggcactagtaagtccctcca

SEQ ID NO: 79592 - DNA, 25 bp, Canis familiaris
cgacagacacactatgtataccccc

SEQ ID NO: 79593 - DNA, 25 bp, Canis familiaris
cgccgaccaaggtgacaccagcacg

SEQ ID NO: 79594 - DNA, 25 bp, Canis familiaris
cgcacggccgggtgtagacgatgcc

SEQ ID NO: 79595 - DNA, 25 bp, Canis familiaris
cgcacgcccgttagggagaccagta

SEQ ID NO: 79596 - DNA, 25 bp, Canis familiaris
cgaccctcgttgacggagcaaggtt

SEQ ID NO: 79597 - DNA, 25 bp, Canis familiaris
cgaccatccacattgacgagatcaa

SEQ ID NO: 79598 - DNA, 25 bp, Canis familiaris
cgcacactacaatttcagtataagt

SEQ ID NO: 79599 - DNA, 25 bp, Canis familiaris
cgccctcaaagtcgcaggcaaacct

SEQ ID NO: 79600 - DNA, 25 bp, Canis familiaris
cgcaatcgcagtacaccaggtgtga

SEQ ID NO: 79601 - DNA, 25 bp, Canis familiaris
cgaacacctggctggagtgctgaag

SEQ ID NO: 79602 - DNA, 25 bp, Canis familiaris
cgcaaaggggcgctgaggcagaaaa

SEQ ID NO: 79603 - DNA, 25 bp, Canis familiaris
cgacgacgtgtccattaatcaaaag

SEQ ID NO: 79604 - DNA, 25 bp, Canis familiaris
cgaccaggttcgttcactcatggaa

SEQ ID NO: 79605 - DNA, 25 bp, Canis familiaris
cgaccaggtgaaggcccagctggaa

SEQ ID NO: 79606 - DNA, 25 bp, Canis familiaris
cccatagtggaatgccaccacggca

SEQ ID NO: 79607 - DNA, 25 bp, Canis familiaris
cgcgtgaaggtgtggaccagcggcc

SEQ ID NO: 79608 - DNA, 25 bp, Canis familiaris
cgcgggagcggtatgacgagttgtc

SEQ ID NO: 79609 - DNA, 25 bp, Canis familiaris
cgcgggggggatgcgtgcatttatc

SEQ ID NO: 79610 - DNA, 25 bp, Canis familiaris
cgcggggggaattgcgtgcattaat

SEQ ID NO: 79611 - DNA, 25 bp, Canis familiaris
ccgaggggctgtgtgggccaagttt

SEQ ID NO: 79612 - DNA, 25 bp, Canis familiaris
cgctggggacagacggtggcaaaaa

SEQ ID NO: 79613 - DNA, 25 bp, Canis familiaris
cgctgtgtgtgcaacactggcttcg

SEQ ID NO: 79614 - DNA, 25 bp, Canis familiaris
cgcaggcatgtacatctgcctgggc

SEQ ID NO: 79615 - DNA, 25 bp, Canis familiaris
cgcgggacagcgacgcagatgcgac

SEQ ID NO: 79616 - DNA, 25 bp, Canis familiaris
cgcaggaacatcatcaacgcggccc

SEQ ID NO: 79617 - DNA, 25 bp, Canis familiaris
cgcaggaaatcttccattcttccct

SEQ ID NO: 79618 - DNA, 25 bp, Canis familiaris
cgcactgaatctaccgatcttgtct

SEQ ID NO: 79619 - DNA, 25 bp, Canis familiaris
cgcttaagcctcaatgacttttaca

SEQ ID NO: 79620 - DNA, 25 bp, Canis familiaris
cgcttaaagccggtgatgcttataa

SEQ ID NO: 79621 - DNA, 25 bp, Canis familiaris
cgctcaaaactcggtgatcatagtt

SEQ ID NO: 79622 - DNA, 25 bp, Canis familiaris
cgctgagacagtccttgttcactct

SEQ ID NO: 79623 - DNA, 25 bp, Canis familiaris
cgagctagagttttgctccctcgaa

SEQ ID NO: 79624 - DNA, 25 bp, Canis familiaris
cgactgcagcaatatggctccggcg

SEQ ID NO: 79625 - DNA, 25 bp, Canis familiaris
cgagcgcaggcatatttccacagcc

SEQ ID NO: 79626 - DNA, 25 bp, Canis familiaris
cgcagcgtggagtactaccagagca

SEQ ID NO: 79627 - DNA, 25 bp, Canis familiaris
cgctcagttagccaaagtcgatcaa

SEQ ID NO: 79628 - DNA, 25 bp, Canis familiaris
cgctggttagcaccgcaggtgtaga

SEQ ID NO: 79629 - DNA, 25 bp, Canis familiaris
cgctggttagcaccgcaggtgtaga

SEQ ID NO: 79630 - DNA, 25 bp, Canis familiaris
cgctgtttacagtactcggtgaggt

SEQ ID NO: 79631 - DNA, 25 bp, Canis familiaris
cgcttctagtttctcttgtacagta

SEQ ID NO: 79632 - DNA, 25 bp, Canis familiaris
cgaatcttatgttgttcctgtcctg

SEQ ID NO: 79633 - DNA, 25 bp, Canis familiaris
cgcacacttgattcatgttggcttc

SEQ ID NO: 79634 - DNA, 25 bp, Canis familiaris
cgacgctttgtcaatgttgtgccca

SEQ ID NO: 79635 - DNA, 25 bp, Canis familiaris
cgacctgttgaccaatatacccagt

SEQ ID NO: 79636 - DNA, 25 bp, Canis familiaris
cgaccgatgctgccagaaaagccca

SEQ ID NO: 79637 - DNA, 25 bp, Canis familiaris
cgacctggctcaggggaaccacagt

SEQ ID NO: 79638 - DNA, 25 bp, Canis familiaris
cgacccagacatcaagaaccacgtg

SEQ ID NO: 79639 - DNA, 25 bp, Canis familiaris
cgaacacagactggaaggcccggcg

SEQ ID NO: 79640 - DNA, 25 bp, Canis familiaris
cgaagacgacgaggaggacgcgggc

SEQ ID NO: 79641 - DNA, 25 bp, Canis familiaris
cgacggaactgactgagggccgggc

SEQ ID NO: 79642 - DNA, 25 bp, Canis familiaris
cgacaagctggccatcgaggagccg

SEQ ID NO: 79643 - DNA, 25 bp, Canis familiaris
cgaccacggcttcgtggtctgcgcc

SEQ ID NO: 79644 - DNA, 25 bp, Canis familiaris
cgcagcccggcagagggcatcagtg

SEQ ID NO: 79645 - DNA, 25 bp, Canis familiaris
cgcacacccgcgacagggatggaga

SEQ ID NO: 79646 - DNA, 25 bp, Canis familiaris
cgcacatttgccccagatggtggat

SEQ ID NO: 79647 - DNA, 25 bp, Canis familiaris
cccacttccagccaacagggtttgg

SEQ ID NO: 79648 - DNA, 25 bp, Canis familiaris
cccaattccttgctcatggttaatg

SEQ ID NO: 79649 - DNA, 25 bp, Canis familiaris
cgcgccttctgtttgtaggctttat

SEQ ID NO: 79650 - DNA, 25 bp, Canis familiaris
tcccttgcctggtgtaacttccaaa

SEQ ID NO: 79651 - DNA, 25 bp, Canis familiaris
cgctcttccgagtgtaaatcccaaa

SEQ ID NO: 79652 - DNA, 25 bp, Canis familiaris
ccatgcaagccgcggtaaattccca

SEQ ID NO: 79653 - DNA, 25 bp, Canis familiaris
ccatggacctggagtacctatttca

SEQ ID NO: 79654 - DNA, 25 bp, Canis familiaris
cgcaggctgctcagaagataccgtg

SEQ ID NO: 79655 - DNA, 25 bp, Canis familiaris
cgcaggcagacgccaagttccggcg

SEQ ID NO: 79656 - DNA, 25 bp, Canis familiaris
cgacccatctcgtagtttcgtggtg

SEQ ID NO: 79657 - DNA, 25 bp, Canis familiaris
cgactccatccatgcgatttttgtg

SEQ ID NO: 79658 - DNA, 25 bp, Canis familiaris
cgcacacaatccttcgagtacttgt

SEQ ID NO: 79659 - DNA, 25 bp, Canis familiaris
cgcagaccatcatcatcggggtgcg

SEQ ID NO: 79660 - DNA, 25 bp, Canis familiaris
cgcaggcccaaccagtggggctgga

SEQ ID NO: 79661 - DNA, 25 bp, Canis familiaris
cgcttcgcccgcaaaggggcgctga

SEQ ID NO: 79662 - DNA, 25 bp, Canis familiaris
cgctcctgcacttgagaggggtgac

SEQ ID NO: 79663 - DNA, 25 bp, Canis familiaris
cgctttgaggtccagggtctgcagc

SEQ ID NO: 79664 - DNA, 25 bp, Canis familiaris
cgctttgtggaatggatttgtctct

SEQ ID NO: 79665 - DNA, 25 bp, Canis familiaris
cgctctggtgaaatacatttcttta

SEQ ID NO: 79666 - DNA, 25 bp, Canis familiaris
cgctgctgggagagatcccctggct

SEQ ID NO: 79667 - DNA, 25 bp, Canis familiaris
cgctcgtggagactacttccgtgct

SEQ ID NO: 79668 - DNA, 25 bp, Canis familiaris
cgcagccatgagtatgctcagcttc

SEQ ID NO: 79669 - DNA, 25 bp, Canis familiaris
cgcagcgagggagctgctctgctac

SEQ ID NO: 79670 - DNA, 25 bp, Canis familiaris
cgcagctgggcttcctgcagctgca

SEQ ID NO: 79671 - DNA, 25 bp, Canis familiaris
cgctgctgcggcagcatatgcagcc

SEQ ID NO: 79672 - DNA, 25 bp, Canis familiaris
cgctgcgtgcacagaatcattacac

SEQ ID NO: 79673 - DNA, 25 bp, Canis familiaris
cgctgaacggcgtgcattatcaaca

SEQ ID NO: 79674 - DNA, 25 bp, Canis familiaris
cgctggtcgtgttcagcttgacctc

SEQ ID NO: 79675 - DNA, 25 bp, Canis familiaris
cgctggtgcagggatcgttacccga

SEQ ID NO: 79676 - DNA, 25 bp, Canis familiaris
cgcggcatgcgggtcgtgcatagct

SEQ ID NO: 79677 - DNA, 25 bp, Canis familiaris
cgctgagctccagcacgtgctggga

SEQ ID NO: 79678 - DNA, 25 bp, Canis familiaris
cgctgccctgagacactattccagc

SEQ ID NO: 79679 - DNA, 25 bp, Canis familiaris
cgcaggagctgactgcactttccac

SEQ ID NO: 79680 - DNA, 25 bp, Canis familiaris
cgcaacagcagcctgcagctggatt

SEQ ID NO: 79681 - DNA, 25 bp, Canis familiaris
cgcacatccacaagtctctgattgg

SEQ ID NO: 79682 - DNA, 25 bp, Canis familiaris
cgcacgcgcacatgtatctatgcat

SEQ ID NO: 79683 - DNA, 25 bp, Canis familiaris
cgcggagcagcactgcttcttgatg

SEQ ID NO: 79684 - DNA, 25 bp, Canis familiaris
cgcatcaatcagctcattcggcagc

SEQ ID NO: 79685 - DNA, 25 bp, Canis familiaris
cgctatcacatgctgagcctgggag

SEQ ID NO: 79686 - DNA, 25 bp, Canis familiaris
cgctgacatctgcatgagactcgct

SEQ ID NO: 79687 - DNA, 25 bp, Canis familiaris
cgctaagcatggcaatcgctctgtc

SEQ ID NO: 79688 - DNA, 25 bp, Canis familiaris
cgctaagcatggcaatcgctctgtc

SEQ ID NO: 79689 - DNA, 25 bp, Canis familiaris
cgcagaccatatcaaagctcagctc

SEQ ID NO: 79690 - DNA, 25 bp, Canis familiaris
cgcgatgcctcttcaaggtgcatgc

SEQ ID NO: 79691 - DNA, 25 bp, Canis familiaris
cgctgacccttgatatgcttgttta

SEQ ID NO: 79692 - DNA, 25 bp, Canis familiaris
cgctactaccgattggatggtttag

SEQ ID NO: 79693 - DNA, 25 bp, Canis familiaris
cgctacctccaaaggtggtcctgag

SEQ ID NO: 79694 - DNA, 25 bp, Canis familiaris
cgcgcacccacttgggaggtactgt

SEQ ID NO: 79695 - DNA, 25 bp, Canis familiaris
cccattctcgtccggacggactgtt

SEQ ID NO: 79696 - DNA, 25 bp, Canis familiaris
gcggttccgttgcaaaggactttca

SEQ ID NO: 79697 - DNA, 25 bp, Canis familiaris
cgcacttcctttcaaagccaacttc

SEQ ID NO: 79698 - DNA, 25 bp, Canis familiaris
cgcaatccgcttttaacacacatac

SEQ ID NO: 79699 - DNA, 25 bp, Canis familiaris
cgcaacctgtccgagatacacaata

SEQ ID NO: 79700 - DNA, 25 bp, Canis familiaris
cgcaaactggatggaatattactca

SEQ ID NO: 79701 - DNA, 25 bp, Canis familiaris
cgcaatatcagattcgggagacctc

SEQ ID NO: 79702 - DNA, 25 bp, Canis familiaris
cgcagatggcgctaggcgtgtacgt

SEQ ID NO: 79703 - DNA, 25 bp, Canis familiaris
cgcaggtgcgagcgtgcgtgacttg

SEQ ID NO: 79704 - DNA, 25 bp, Canis familiaris
cgcagggcatgctggagcgagactg

SEQ ID NO: 79705 - DNA, 25 bp, Canis familiaris
cgcattcttccgcagcatagactgg

SEQ ID NO: 79706 - DNA, 25 bp, Canis familiaris
cgcttctctcgtcggcggacttgtg

SEQ ID NO: 79707 - DNA, 25 bp, Canis familiaris
cgcattcctggctgcccagaaagag

SEQ ID NO: 79708 - DNA, 25 bp, Canis familiaris
cgcttcctgtcccaaaaactgagct

SEQ ID NO: 79709 - DNA, 25 bp, Canis familiaris
cgctcgtatctctcatcaaaaatgg

SEQ ID NO: 79710 - DNA, 25 bp, Canis familiaris
cgcttgttcctgccttaaagatgtg

SEQ ID NO: 79711 - DNA, 25 bp, Canis familiaris
cgcttgcttcttggattccatggca

SEQ ID NO: 79712 - DNA, 25 bp, Canis familiaris
cgacagctttgtggacctcagtgac

SEQ ID NO: 79713 - DNA, 25 bp, Canis familiaris
cgacagtctggaggaggcggtgcac

SEQ ID NO: 79714 - DNA, 25 bp, Canis familiaris
cgaagttgtgggaagcagtgctgca

SEQ ID NO: 79715 - DNA, 25 bp, Canis familiaris
cgacagttcggcggatctgagctgc

SEQ ID NO: 79716 - DNA, 25 bp, Canis familiaris
cgacgtatcgagggccagagagcca

SEQ ID NO: 79717 - DNA, 25 bp, Canis familiaris
cgcacactgtaacacggagaccacc

SEQ ID NO: 79718 - DNA, 25 bp, Canis familiaris
cctcgttcacgtcaggaaccacgac

SEQ ID NO: 79719 - DNA, 25 bp, Canis familiaris
cgctctttcttgccaagccaaggca

SEQ ID NO: 79720 - DNA, 25 bp, Canis familiaris
cgctctttgccttaggagaccgcag

SEQ ID NO: 79721 - DNA, 25 bp, Canis familiaris
cgctacctcctatgtgcgaactacc

SEQ ID NO: 79722 - DNA, 25 bp, Canis familiaris
cgccgtccgctatttggaaagaagc

SEQ ID NO: 79723 - DNA, 25 bp, Canis familiaris
cgctcgttctgtctcgtgtaaagac

SEQ ID NO: 79724 - DNA, 25 bp, Canis familiaris
cgctacattcttcacgtgggatatt

SEQ ID NO: 79725 - DNA, 25 bp, Canis familiaris
cctaccttgtcctgtggacttcatt

SEQ ID NO: 79726 - DNA, 25 bp, Canis familiaris
cccaccggtcaatgtgaattgaatt

SEQ ID NO: 79727 - DNA, 25 bp, Canis familiaris
cgacaccagaccatcttacttaatt

SEQ ID NO: 79728 - DNA, 25 bp, Canis familiaris
cgaactccaccttgctaaactagtt

SEQ ID NO: 79729 - DNA, 25 bp, Canis familiaris
cgaaataacgtctcaatcctcagct

SEQ ID NO: 79730 - DNA, 25 bp, Canis familiaris
tcctaaaaccttgaacttcactggt

SEQ ID NO: 79731 - DNA, 25 bp, Canis familiaris
ccctggaacttttgaacttcactgg

SEQ ID NO: 79732 - DNA, 25 bp, Canis familiaris
cgctggagagaccgttggacttaag

SEQ ID NO: 79733 - DNA, 25 bp, Canis familiaris
cgctgctgtgattccgttttttgaa

SEQ ID NO: 79734 - DNA, 25 bp, Canis familiaris
cgctccatgagctctgttaattctg

SEQ ID NO: 79735 - DNA, 25 bp, Canis familiaris
cgcatcaatggctgtgccattcagt

SEQ ID NO: 79736 - DNA, 25 bp, Canis familiaris
cgcacagtggctgtctactcggagc

SEQ ID NO: 79737 - DNA, 25 bp, Canis familiaris
cgcacaggcagctcctgcctgagga

SEQ ID NO: 79738 - DNA, 25 bp, Canis familiaris
cgaagagctgcaacgctcatctgcg

SEQ ID NO: 79739 - DNA, 25 bp, Canis familiaris
cgaacacacaacgtcttggagcgcc

SEQ ID NO: 79740 - DNA, 25 bp, Canis familiaris
cgaacatcatcactctggtcggacg

SEQ ID NO: 79741 - DNA, 25 bp, Canis familiaris
cgaacatttgtgggtcgaggtgaaa

SEQ ID NO: 79742 - DNA, 25 bp, Canis familiaris
cgaaccttggccacagggctgagtc

SEQ ID NO: 79743 - DNA, 25 bp, Canis familiaris
cgaagcttggagctccagagactga

SEQ ID NO: 79744 - DNA, 25 bp, Canis familiaris
cgaactagtgcgaatcaccagagtg

SEQ ID NO: 79745 - DNA, 25 bp, Canis familiaris
cgctgttggtggaaacacagtggca

SEQ ID NO: 79746 - DNA, 25 bp, Canis familiaris
cgctgtcggagccagaatacgtaca

SEQ ID NO: 79747 - DNA, 25 bp, Canis familiaris
cgctctggtgaatgcatgttctgta

SEQ ID NO: 79748 - DNA, 25 bp, Canis familiaris
cgctctggattgttgagtttgctcc

SEQ ID NO: 79749 - DNA, 25 bp, Canis familiaris
cgctcggttgtcaagtctttgtgct

SEQ ID NO: 79750 - DNA, 25 bp, Canis familiaris
cgcattggttgtcacttcactatga

SEQ ID NO: 79751 - DNA, 25 bp, Canis familiaris
cgactatctcttcacattagccaga

SEQ ID NO: 79752 - DNA, 25 bp, Canis familiaris
cgactactgcttccactgcaaaaaa

SEQ ID NO: 79753 - DNA, 25 bp, Canis familiaris
cgaagcacgttgcacgtgaacacag

SEQ ID NO: 79754 - DNA, 25 bp, Canis familiaris
cgaagacgtgtgctgggaccataga

SEQ ID NO: 79755 - DNA, 25 bp, Canis familiaris
cgaaagcttgggtgcttccatcagc

SEQ ID NO: 79756 - DNA, 25 bp, Canis familiaris
cgaacagcactttgttttctacagt

SEQ ID NO: 79757 - DNA, 25 bp, Canis familiaris
cgaagctgcctttgtgtttgtgtca

SEQ ID NO: 79758 - DNA, 25 bp, Canis familiaris
cgacatgcaacgtggtcctggacac

SEQ ID NO: 79759 - DNA, 25 bp, Canis familiaris
cgacagcaacgtggttcctggacac

SEQ ID NO: 79760 - DNA, 25 bp, Canis familiaris
cgaagacaatggggtgcccgacacc

SEQ ID NO: 79761 - DNA, 25 bp, Canis familiaris
cgcagacacagtctgggcccgagaa

SEQ ID NO: 79762 - DNA, 25 bp, Canis familiaris
cgcaaggtggactggctcactgaga

SEQ ID NO: 79763 - DNA, 25 bp, Canis familiaris
cgaagtctacacggagtcctgcagc

SEQ ID NO: 79764 - DNA, 25 bp, Canis familiaris
cgacaccgacagggatatcctcagc

SEQ ID NO: 79765 - DNA, 25 bp, Canis familiaris
cgacacgcaacagtggtctctggac

SEQ ID NO: 79766 - DNA, 25 bp, Canis familiaris
cgcacatcgaacaggatatctcgaa

SEQ ID NO: 79767 - DNA, 25 bp, Canis familiaris
cgcacttgccacaaggtcttcaggc

SEQ ID NO: 79768 - DNA, 25 bp, Canis familiaris
cgcctgaccagcagaggctcatctt

SEQ ID NO: 79769 - DNA, 25 bp, Canis familiaris
cgctgctactaccgaggtgttgtgc

SEQ ID NO: 79770 - DNA, 25 bp, Canis familiaris
cgcatcttctacctcaagctggagg

SEQ ID NO: 79771 - DNA, 25 bp, Canis familiaris
cgctctcgtacgcaacgtggagtac

SEQ ID NO: 79772 - DNA, 25 bp, Canis familiaris
cgcgacgaagctcaacctaagatga

SEQ ID NO: 79773 - DNA, 25 bp, Canis familiaris
cgctggaaaatcttgacgtaagaga

SEQ ID NO: 79774 - DNA, 25 bp, Canis familiaris
cgctgaatatatacaggtatgtaaa

SEQ ID NO: 79775 - DNA, 25 bp, Canis familiaris
cgaaggaatctctgtatagaatcag

SEQ ID NO: 79776 - DNA, 25 bp, Canis familiaris
cgaacgagactctggcatgctaact

SEQ ID NO: 79777 - DNA, 25 bp, Canis familiaris
cgaacgagactctggcatgctaact

SEQ ID NO: 79778 - DNA, 25 bp, Canis familiaris
cgcaaaggcacttgggccaacctgc

SEQ ID NO: 79779 - DNA, 25 bp, Canis familiaris
cgacagaggacctgtggacctctcc

SEQ ID NO: 79780 - DNA, 25 bp, Canis familiaris
cgacaaggagtgcgtctacttctgc

SEQ ID NO: 79781 - DNA, 25 bp, Canis familiaris
cgcagaaaagtccacctatgttgtc

SEQ ID NO: 79782 - DNA, 25 bp, Canis familiaris
cgaagagagactggtcctctgtctg

SEQ ID NO: 79783 - DNA, 25 bp, Canis familiaris
cgaagcagagtctgctcacagcccg

SEQ ID NO: 79784 - DNA, 25 bp, Canis familiaris
cgacagagaacatcatcgcctcggc

SEQ ID NO: 79785 - DNA, 25 bp, Canis familiaris
cgcacagcaggcggaaggcactcgg

SEQ ID NO: 79786 - DNA, 25 bp, Canis familiaris
cgacgaggcccagagcaagagaggc

SEQ ID NO: 79787 - DNA, 25 bp, Canis familiaris
cgacgaggcccagagcaagcggggc

SEQ ID NO: 79788 - DNA, 25 bp, Canis familiaris
cgacaaggccctacacaagctggcg

SEQ ID NO: 79789 - DNA, 25 bp, Canis familiaris
cgacaaagtgtctacccagtccaga

SEQ ID NO: 79790 - DNA, 25 bp, Canis familiaris
cgcacacgtagagaccttatccagg

SEQ ID NO: 79791 - DNA, 25 bp, Canis familiaris
cgcagcggtagagatcaccttgcct

SEQ ID NO: 79792 - DNA, 25 bp, Canis familiaris
cgcaggcgtaaggcatacacctctc

SEQ ID NO: 79793 - DNA, 25 bp, Canis familiaris
cgaaggtagcagacagaccagccct

SEQ ID NO: 79794 - DNA, 25 bp, Canis familiaris
cgaagagaaggaccagccacctctc

SEQ ID NO: 79795 - DNA, 25 bp, Canis familiaris
cgacagagacaccaagagtcccctc

SEQ ID NO: 79796 - DNA, 25 bp, Canis familiaris
cgacagagacaccaagagtcccctc

SEQ ID NO: 79797 - DNA, 25 bp, Canis familiaris
cgcacgcagcacagcagaacatcac

SEQ ID NO: 79798 - DNA, 25 bp, Canis familiaris
cgcatcagagaaaatgtggcacagc

SEQ ID NO: 79799 - DNA, 25 bp, Canis familiaris
cgccatgagccaaaggcagccgctc

SEQ ID NO: 79800 - DNA, 25 bp, Canis familiaris
cgacatggccaaacgcaccaagaag

SEQ ID NO: 79801 - DNA, 25 bp, Canis familiaris
cgactcgtcatcacgggatcagtag

SEQ ID NO: 79802 - DNA, 25 bp, Canis familiaris
cgcttggtatcgcctgaaatcgcta

SEQ ID NO: 79803 - DNA, 25 bp, Canis familiaris
cgctcgcagtacgactacactgacc

SEQ ID NO: 79804 - DNA, 25 bp, Canis familiaris
cgctgcaagtcctgacacacataca

SEQ ID NO: 79805 - DNA, 25 bp, Canis familiaris
cgctcaaagcttaacaacaagcccc

SEQ ID NO: 79806 - DNA, 25 bp, Canis familiaris
cgcccagtgttttaaccagtccact

SEQ ID NO: 79807 - DNA, 25 bp, Canis familiaris
cgctgggctttttaaaagtggagct

SEQ ID NO: 79808 - DNA, 25 bp, Canis familiaris
cgctgggcttcactaagagtggttg

SEQ ID NO: 79809 - DNA, 25 bp, Canis familiaris
ccgaggttcccactgggggatggca

SEQ ID NO: 79810 - DNA, 25 bp, Canis familiaris
cccagccttccctgggaggtgcgag

SEQ ID NO: 79811 - DNA, 25 bp, Canis familiaris
cgcgggcgtacctcaagaggcagga

SEQ ID NO: 79812 - DNA, 25 bp, Canis familiaris
cgcggtgcaggaccagtcaaagtca

SEQ ID NO: 79813 - DNA, 25 bp, Canis familiaris
cgcgggcggaggttgtaagtcacag

SEQ ID NO: 79814 - DNA, 25 bp, Canis familiaris
cgacagggggggctgtagtgccaac

SEQ ID NO: 79815 - DNA, 25 bp, Canis familiaris
cgaaggccggtccttggaggccaag

SEQ ID NO: 79816 - DNA, 25 bp, Canis familiaris
cgaagccgtggggcagggaggccag

SEQ ID NO: 79817 - DNA, 25 bp, Canis familiaris
cgaagcgcgtgagctactggacgcc

SEQ ID NO: 79818 - DNA, 25 bp, Canis familiaris
cgaacgccagcagctagaaaccctg

SEQ ID NO: 79819 - DNA, 25 bp, Canis familiaris
cgcagcaccaaaactaggacctccg

SEQ ID NO: 79820 - DNA, 25 bp, Canis familiaris
cgcataccttaaatagaacctcatc

SEQ ID NO: 79821 - DNA, 25 bp, Canis familiaris
cgcatcccactgttggaaaccttct

SEQ ID NO: 79822 - DNA, 25 bp, Canis familiaris
cgcatccccggtggtgaaatgtcag

SEQ ID NO: 79823 - DNA, 25 bp, Canis familiaris
cgcagccaccatgccgtaagatgaa

SEQ ID NO: 79824 - DNA, 25 bp, Canis familiaris
cgaatccttcccttcaggataatta

SEQ ID NO: 79825 - DNA, 25 bp, Canis familiaris
cgaactcttccctggaataatcttg

SEQ ID NO: 79826 - DNA, 25 bp, Canis familiaris
cgaaggcttcctctgtgtatttgcc

SEQ ID NO: 79827 - DNA, 25 bp, Canis familiaris
cgaagccagctcctggtggtcatta

SEQ ID NO: 79828 - DNA, 25 bp, Canis familiaris
cgcaagccgagcggttggccataag

SEQ ID NO: 79829 - DNA, 25 bp, Canis familiaris
cgaacccagccaatatgtccaaata

SEQ ID NO: 79830 - DNA, 25 bp, Canis familiaris
cgcaagtcacagaattatttgaaaa

SEQ ID NO: 79831 - DNA, 25 bp, Canis familiaris
cgcgtggccgtctgatatttaaagt

SEQ ID NO: 79832 - DNA, 25 bp, Canis familiaris
cgcggggcagcatcttttttaaagg

SEQ ID NO: 79833 - DNA, 25 bp, Canis familiaris
cgcgtccggcaattcatttttaatt

SEQ ID NO: 79834 - DNA, 25 bp, Canis familiaris
ccctcatcagggttatggtgtctcg

SEQ ID NO: 79835 - DNA, 25 bp, Canis familiaris
cccaatccgagtttcgatctcacaa

SEQ ID NO: 79836 - DNA, 25 bp, Canis familiaris
cccaatccaacataccaaacaaaag

SEQ ID NO: 79837 - DNA, 25 bp, Canis familiaris
cccaatccaacataccaaacaacag

SEQ ID NO: 79838 - DNA, 25 bp, Canis familiaris
cgccaaacaatataccttcaaagcc

SEQ ID NO: 79839 - DNA, 25 bp, Canis familiaris
cgccatttctagtcgttttcaaagc

SEQ ID NO: 79840 - DNA, 25 bp, Canis familiaris
cccgttcgagtcgttgggctacaag

SEQ ID NO: 79841 - DNA, 25 bp, Canis familiaris
ccgctggaaaatcttgacgtaagag

SEQ ID NO: 79842 - DNA, 25 bp, Canis familiaris
cccaggtagactgtccacgttgagt

SEQ ID NO: 79843 - DNA, 25 bp, Canis familiaris
cccctgcttgactcagttggttgag

SEQ ID NO: 79844 - DNA, 25 bp, Canis familiaris
gcacccctatactcgacgagtttta

SEQ ID NO: 79845 - DNA, 25 bp, Canis familiaris
ccccactaccaagaccacagtgtaa

SEQ ID NO: 79846 - DNA, 25 bp, Canis familiaris
cgcttcaccacctacgaaatcaggg

SEQ ID NO: 79847 - DNA, 25 bp, Canis familiaris
cgctctaccaggttgcgttgtctga

SEQ ID NO: 79848 - DNA, 25 bp, Canis familiaris
cgcttgacaagatcgcctttgtgcc

SEQ ID NO: 79849 - DNA, 25 bp, Canis familiaris
cccgagaagacctcttcttccaggc

SEQ ID NO: 79850 - DNA, 25 bp, Canis familiaris
cccaggaattctcagcttgctttag

SEQ ID NO: 79851 - DNA, 25 bp, Canis familiaris
cccaggttttgtatgaaggctaggt

SEQ ID NO: 79852 - DNA, 25 bp, Canis familiaris
ccttgtttttgtgtatttctccgtg

SEQ ID NO: 79853 - DNA, 25 bp, Canis familiaris
cctaatttcggagctactttccacg

SEQ ID NO: 79854 - DNA, 25 bp, Canis familiaris
cgctaatgttcggggtcattttaca

SEQ ID NO: 79855 - DNA, 25 bp, Canis familiaris
cgcattattctcctgcaggatcact

SEQ ID NO: 79856 - DNA, 25 bp, Canis familiaris
cgcactcttgatggtgagagtctcc

SEQ ID NO: 79857 - DNA, 25 bp, Canis familiaris
cgcagcacctgtctgagcagttaga

SEQ ID NO: 79858 - DNA, 25 bp, Canis familiaris
cgcagctgcaggggctacagttgca

SEQ ID NO: 79859 - DNA, 25 bp, Canis familiaris
cgcactgggcgtgaagtctgcttaa

SEQ ID NO: 79860 - DNA, 25 bp, Canis familiaris
cgcactgggcgtacaacaacaataa

SEQ ID NO: 79861 - DNA, 25 bp, Canis familiaris
cgccctgaggatactactaccataa

SEQ ID NO: 79862 - DNA, 25 bp, Canis familiaris
cgcgcctgtaatcccagctactcgg

SEQ ID NO: 79863 - DNA, 25 bp, Canis familiaris
cgcgctcttcaagcgcgtggtgcgc

SEQ ID NO: 79864 - DNA, 25 bp, Canis familiaris
cgcagtgctatcttcggcgatcagg

SEQ ID NO: 79865 - DNA, 25 bp, Canis familiaris
cgcggcgacctctggaaggaaggta

SEQ ID NO: 79866 - DNA, 25 bp, Canis familiaris
cgcctcgatacgctggaaaaagtgc

SEQ ID NO: 79867 - DNA, 25 bp, Canis familiaris
cgcctggtcaccgtggacaatgggg

SEQ ID NO: 79868 - DNA, 25 bp, Canis familiaris
cgctgggatctctgtggaagctcgg

SEQ ID NO: 79869 - DNA, 25 bp, Canis familiaris
cgcaaagacatctgcgtgggccgcc

SEQ ID NO: 79870 - DNA, 25 bp, Canis familiaris
cgcagaggatcgtgcgtgtgtccct

SEQ ID NO: 79871 - DNA, 25 bp, Canis familiaris
cgcacggagctgatggagctggccc

SEQ ID NO: 79872 - DNA, 25 bp, Canis familiaris
cgcagggcagtgatggccgtggccc

SEQ ID NO: 79873 - DNA, 25 bp, Canis familiaris
cgcaagtactgtgggcgtggagtcc

SEQ ID NO: 79874 - DNA, 25 bp, Canis familiaris
cgcacggagtgggggaggaccggcg

SEQ ID NO: 79875 - DNA, 25 bp, Canis familiaris
cgcatcggagttcgagggggccggg

SEQ ID NO: 79876 - DNA, 25 bp, Canis familiaris
cgcatgctggggtcattgggggagg

SEQ ID NO: 79877 - DNA, 25 bp, Canis familiaris
cgctgtgggtgtctacgtgtgtgcg

SEQ ID NO: 79878 - DNA, 25 bp, Canis familiaris
cgcttgggtggctcaagtcagtgaa

SEQ ID NO: 79879 - DNA, 25 bp, Canis familiaris
cgcctgtgggtgtgcgaggggtaat

SEQ ID NO: 79880 - DNA, 25 bp, Canis familiaris
gccacgggttgcacgactacgtgaa

SEQ ID NO: 79881 - DNA, 25 bp, Canis familiaris
cccggccctatagacgaatttactg

SEQ ID NO: 79882 - DNA, 25 bp, Canis familiaris
ccctgcccctaagaaaactcacagt

SEQ ID NO: 79883 - DNA, 25 bp, Canis familiaris
cgcgaccccgagaataaacttacag

SEQ ID NO: 79884 - DNA, 25 bp, Canis familiaris
cgccaacgcctcgtacaaacttagg

SEQ ID NO: 79885 - DNA, 25 bp, Canis familiaris
cccaaccagacgcacaaaccaaggt

SEQ ID NO: 79886 - DNA, 25 bp, Canis familiaris
cccaggccaagcctggctaacccgg

SEQ ID NO: 79887 - DNA, 25 bp, Canis familiaris
cgccggcgcaagaggttcacacgcc

SEQ ID NO: 79888 - DNA, 25 bp, Canis familiaris
ccgggtgcagtgttgtttatacttc

SEQ ID NO: 79889 - DNA, 25 bp, Canis familiaris
cgcaggcctgccatatgatttaagc

SEQ ID NO: 79890 - DNA, 25 bp, Canis familiaris
cgcaagcgcaccgccaattagcgca

SEQ ID NO: 79891 - DNA, 25 bp, Canis familiaris
cgcatatctaagccaccaacaacca

SEQ ID NO: 79892 - DNA, 25 bp, Canis familiaris
cgcattctcaagtctccacaagagg

SEQ ID NO: 79893 - DNA, 25 bp, Canis familiaris
cgcttgctctggtatgaacatgtag

SEQ ID NO: 79894 - DNA, 25 bp, Canis familiaris
cgcacgctctgttgaaggctggatt

SEQ ID NO: 79895 - DNA, 25 bp, Canis familiaris
cgcgctcttatggtatggctgtcag

SEQ ID NO: 79896 - DNA, 25 bp, Canis familiaris
cgcgctgtttctgctgggagcagcc

SEQ ID NO: 79897 - DNA, 25 bp, Canis familiaris
cgcgttacctcctggagctggatga

SEQ ID NO: 79898 - DNA, 25 bp, Canis familiaris
cgcggtacctctgggtcagatggaa

SEQ ID NO: 79899 - DNA, 25 bp, Canis familiaris
cgcgttgccctcgggaaaggagacg

SEQ ID NO: 79900 - DNA, 25 bp, Canis familiaris
cgctgtgtgcccaaggacaaagcca

SEQ ID NO: 79901 - DNA, 25 bp, Canis familiaris
cgcttgcctagcaagcgcaaggccc

SEQ ID NO: 79902 - DNA, 25 bp, Canis familiaris
cgctgtcgctcggcaagaagttcga

SEQ ID NO: 79903 - DNA, 25 bp, Canis familiaris
cgctggccttcgggacaggtcgaag

SEQ ID NO: 79904 - DNA, 25 bp, Canis familiaris
cgcactggttctggactcaagtcga

SEQ ID NO: 79905 - DNA, 25 bp, Canis familiaris
cgcagctgcctgaagaagcacaagt

SEQ ID NO: 79906 - DNA, 25 bp, Canis familiaris
cgcagctgtctgaagaagccacaag

SEQ ID NO: 79907 - DNA, 25 bp, Canis familiaris
cgcacctttcaattgccagatgaac

SEQ ID NO: 79908 - DNA, 25 bp, Canis familiaris
cgcccttcctttgctgagaagcagg

SEQ ID NO: 79909 - DNA, 25 bp, Canis familiaris
cgctgttttgacctccatagaagac

SEQ ID NO: 79910 - DNA, 25 bp, Canis familiaris
cgcttcatttccctcattgtgaagt

SEQ ID NO: 79911 - DNA, 25 bp, Canis familiaris
cgcaaccttcactgcgctggaagtg

SEQ ID NO: 79912 - DNA, 25 bp, Canis familiaris
cgaaatttcagaggccgaccaatgc

SEQ ID NO: 79913 - DNA, 25 bp, Canis familiaris
cgaatctttcaaagccgagctgaat

SEQ ID NO: 79914 - DNA, 25 bp, Canis familiaris
cgaacatgttgcttaccgcaccatt

SEQ ID NO: 79915 - DNA, 25 bp, Canis familiaris
cgacaagatcatctactcgcacttc

SEQ ID NO: 79916 - DNA, 25 bp, Canis familiaris
cgaactatcatgcatattaccactg

SEQ ID NO: 79917 - DNA, 25 bp, Canis familiaris
cgcaaatcactgctcagcaacctgg

SEQ ID NO: 79918 - DNA, 25 bp, Canis familiaris
cgcaaatcactgttcagcaggctgt

SEQ ID NO: 79919 - DNA, 25 bp, Canis familiaris
cgcaactctccaggagcaggtgttc

SEQ ID NO: 79920 - DNA, 25 bp, Canis familiaris
ccgagctctacaatggcaattttgg

SEQ ID NO: 79921 - DNA, 25 bp, Canis familiaris
ccgagattgagcaatttagctgggg

SEQ ID NO: 79922 - DNA, 25 bp, Canis familiaris
cgcgagtcatggagatgaaggccgt

SEQ ID NO: 79923 - DNA, 25 bp, Canis familiaris
cgctggtcatgaagcagtgccaccc

SEQ ID NO: 79924 - DNA, 25 bp, Canis familiaris
cgcagatggagaaggctccctcctc

SEQ ID NO: 79925 - DNA, 25 bp, Canis familiaris
cgcactgtaacgcctacgtttgctg

SEQ ID NO: 79926 - DNA, 25 bp, Canis familiaris
cgcccaaaccgcatctgagtttttc

SEQ ID NO: 79927 - DNA, 25 bp, Canis familiaris
ccgccaaactccgcagttttgtgga

SEQ ID NO: 79928 - DNA, 25 bp, Canis familiaris
cccaaacctacagctctttgtgctt

SEQ ID NO: 79929 - DNA, 25 bp, Canis familiaris
cccagcaatccaaaaccttcagttt

SEQ ID NO: 79930 - DNA, 25 bp, Canis familiaris
cgccagtgaaaactcccttggcctt

SEQ ID NO: 79931 - DNA, 25 bp, Canis familiaris
cgcacggaggaagccgcttgggctg

SEQ ID NO: 79932 - DNA, 25 bp, Canis familiaris
cgccggggagggttcgatgggcgct

SEQ ID NO: 79933 - DNA, 25 bp, Canis familiaris
cgcaggacggagggaagcgggggcg

SEQ ID NO: 79934 - DNA, 25 bp, Canis familiaris
cgcagggccgtgtggacggaggggg

SEQ ID NO: 79935 - DNA, 25 bp, Canis familiaris
cgcagggaccggaggcggaggacag

SEQ ID NO: 79936 - DNA, 25 bp, Canis familiaris
cgcagctggcacaggttggcgtagg

SEQ ID NO: 79937 - DNA, 25 bp, Canis familiaris
cgcagatggcagagacgggcgtgtg

SEQ ID NO: 79938 - DNA, 25 bp, Canis familiaris
cgcgtgccaaggacggtcttggcct

SEQ ID NO: 79939 - DNA, 25 bp, Canis familiaris
cgcgcctacagtcaagtctgctgtg

SEQ ID NO: 79940 - DNA, 25 bp, Canis familiaris
cgcccttggttgttgtggtgtggtt

SEQ ID NO: 79941 - DNA, 25 bp, Canis familiaris
cgccaaattttgcgctcggtgcgat

SEQ ID NO: 79942 - DNA, 25 bp, Canis familiaris
cgcgccaaattttgcgctcggtgcg

SEQ ID NO: 79943 - DNA, 25 bp, Canis familiaris
cgcccacaattggagggttgctgcc

SEQ ID NO: 79944 - DNA, 25 bp, Canis familiaris
cgcacgccagaagtgaccgttgtca

SEQ ID NO: 79945 - DNA, 25 bp, Canis familiaris
cgcacgcaggcaagggccaggtggc

SEQ ID NO: 79946 - DNA, 25 bp, Canis familiaris
cgaagagagaaacccacgtgagtga

SEQ ID NO: 79947 - DNA, 25 bp, Canis familiaris
cgccagatcgtgaagcccacggcga

SEQ ID NO: 79948 - DNA, 25 bp, Canis familiaris
cccaatcttcattcctgagcgggca

SEQ ID NO: 79949 - DNA, 25 bp, Canis familiaris
ccgaatgtataatgctgacgttctt

SEQ ID NO: 79950 - DNA, 25 bp, Canis familiaris
cccaaatgaatatttggcctatatt

SEQ ID NO: 79951 - DNA, 25 bp, Canis familiaris
cccagttacaatttctactcgatct

SEQ ID NO: 79952 - DNA, 25 bp, Canis familiaris
cgcacactcaactgcatttactcgg

SEQ ID NO: 79953 - DNA, 25 bp, Canis familiaris
cgctcctcaggctgatttttgagaa

SEQ ID NO: 79954 - DNA, 25 bp, Canis familiaris
cgctccaggcgctgggttgggagat

SEQ ID NO: 79955 - DNA, 25 bp, Canis familiaris
cgctccatgcggggtggcttaatat

SEQ ID NO: 79956 - DNA, 25 bp, Canis familiaris
cgcgccatggagggctaccataagc

SEQ ID NO: 79957 - DNA, 25 bp, Canis familiaris
cgcccatggagggcactatccgaaa

SEQ ID NO: 79958 - DNA, 25 bp, Canis familiaris
cgcaccatggtgaacacccggaaga

SEQ ID NO: 79959 - DNA, 25 bp, Canis familiaris
cgcaaagggaactacgcggagcgag

SEQ ID NO: 79960 - DNA, 25 bp, Canis familiaris
cgcaaagcgaaagcggcaggatcga

SEQ ID NO: 79961 - DNA, 25 bp, Canis familiaris
cgcgacaagaagtacgcgcccacca

SEQ ID NO: 79962 - DNA, 25 bp, Canis familiaris
cgcgtctataagcgccactacatgg

SEQ ID NO: 79963 - DNA, 25 bp, Canis familiaris
cgcttcttatacttctcctatgaga

SEQ ID NO: 79964 - DNA, 25 bp, Canis familiaris
cgctgtccataccaactactatgcg

SEQ ID NO: 79965 - DNA, 25 bp, Canis familiaris
cgctgtccacttctctgaataagac

SEQ ID NO: 79966 - DNA, 25 bp, Canis familiaris
cgctctacctccattgtacaagaaa

SEQ ID NO: 79967 - DNA, 25 bp, Canis familiaris
cgcacaacctctttccgagatggaa

SEQ ID NO: 79968 - DNA, 25 bp, Canis familiaris
cgcaaggttcatgtgaccaaggaca

SEQ ID NO: 79969 - DNA, 25 bp, Canis familiaris
cgctggagtttcaataccggagatc

SEQ ID NO: 79970 - DNA, 25 bp, Canis familiaris
cgcgccgtctctaaacctagagatc

SEQ ID NO: 79971 - DNA, 25 bp, Canis familiaris
cgccaggtagcaatcacagccgagg

SEQ ID NO: 79972 - DNA, 25 bp, Canis familiaris
cgctgcaggacgatgacgggcggct

SEQ ID NO: 79973 - DNA, 25 bp, Canis familiaris
cgctcaggactggacctggagccgc

SEQ ID NO: 79974 - DNA, 25 bp, Canis familiaris
cgctagacatctgttcgttcagcct

SEQ ID NO: 79975 - DNA, 25 bp, Canis familiaris
cgctcaacctcttttgttcagtatg

SEQ ID NO: 79976 - DNA, 25 bp, Canis familiaris
cgcaaagccttgttgctcttcttgt

SEQ ID NO: 79977 - DNA, 25 bp, Canis familiaris
cgaatactgcattcaggctcttcct

SEQ ID NO: 79978 - DNA, 25 bp, Canis familiaris
cgcagaagtcttaggctcacatgcc

SEQ ID NO: 79979 - DNA, 25 bp, Canis familiaris
cgcagagatgtttcgtcgcaagccc

SEQ ID NO: 79980 - DNA, 25 bp, Canis familiaris
cgcaaatgcttctagatcgactgcg

SEQ ID NO: 79981 - DNA, 25 bp, Canis familiaris
cgcaagtgcttctaggcggactgtt

SEQ ID NO: 79982 - DNA, 25 bp, Canis familiaris
cgaatattacaacgcggcagcatta

SEQ ID NO: 79983 - DNA, 25 bp, Canis familiaris
cgctatactacaacagatcgcagtt

SEQ ID NO: 79984 - DNA, 25 bp, Canis familiaris
cgctaactcacaatcccaagatcaa

SEQ ID NO: 79985 - DNA, 25 bp, Canis familiaris
cgctggaggacagcccgcagacaag

SEQ ID NO: 79986 - DNA, 25 bp, Canis familiaris
cgctgggtacaacccagaaagcttc

SEQ ID NO: 79987 - DNA, 25 bp, Canis familiaris
cgctttgctcaatgcccagaaagtg

SEQ ID NO: 79988 - DNA, 25 bp, Canis familiaris
cgctttgcgacaccactcaaaggag

SEQ ID NO: 79989 - DNA, 25 bp, Canis familiaris
cgcctctctgactccgaaaggaagg

SEQ ID NO: 79990 - DNA, 25 bp, Canis familiaris
cgcaacttcccctgagtaggagctg

SEQ ID NO: 79991 - DNA, 25 bp, Canis familiaris
cgctacttcccctggatatgaatgt

SEQ ID NO: 79992 - DNA, 25 bp, Canis familiaris
cgctccttccaggggaatcgtatct

SEQ ID NO: 79993 - DNA, 25 bp, Canis familiaris
cgctccttgtcccaggagttgttca

SEQ ID NO: 79994 - DNA, 25 bp, Canis familiaris
cgctccttgtcccaggagttgttca

SEQ ID NO: 79995 - DNA, 25 bp, Canis familiaris
cgctatttgatgttgggcgtttata

SEQ ID NO: 79996 - DNA, 25 bp, Canis familiaris
cgcgatgttgactgcacaggtaata

SEQ ID NO: 79997 - DNA, 25 bp, Canis familiaris
cgcgatgtgtgatttcaccgaggac

SEQ ID NO: 79998 - DNA, 25 bp, Canis familiaris
cgctgtgtgctgaaaattggggaac

SEQ ID NO: 79999 - DNA, 25 bp, Canis familiaris
cgctgctggaggctttcgggaatgc

SEQ ID NO: 80000 - DNA, 25 bp, Canis familiaris
cgcccgagctgtccatctcgggaac

SEQ ID NO: 80001 - DNA, 25 bp, Canis familiaris
cgcacgaaggagcagatcgtggaga

SEQ ID NO: 80002 - DNA, 25 bp, Canis familiaris
cgcaagacggaccagagcgaaagca

SEQ ID NO: 80003 - DNA, 25 bp, Canis familiaris
cgcaagacggaccagagcgaaagca

SEQ ID NO: 80004 - DNA, 25 bp, Canis familiaris
cgaagacaggaccacggatcggcac

SEQ ID NO: 80005 - DNA, 25 bp, Canis familiaris
cgaagacaggaccacggatcggcac

SEQ ID NO: 80006 - DNA, 25 bp, Canis familiaris
cgaagacaggaccacggatcggcac

SEQ ID NO: 80007 - DNA, 25 bp, Canis familiaris
cgaagacaggaccacggatcggcac

SEQ ID NO: 80008 - DNA, 25 bp, Canis familiaris
cgcacggagacccgggacgtgcagg

SEQ ID NO: 80009 - DNA, 25 bp, Canis familiaris
cgcaccgagaccaggcgtgtgaaca

SEQ ID NO: 80010 - DNA, 25 bp, Canis familiaris
cgcacctgaagctttggcgagcaga

SEQ ID NO: 80011 - DNA, 25 bp, Canis familiaris
cgcacttatcaggaacgcctcgata

SEQ ID NO: 80012 - DNA, 25 bp, Canis familiaris
cgcagttcatctccaaagcgcttgt

SEQ ID NO: 80013 - DNA, 25 bp, Canis familiaris
cgcatttgcatgcttcatacctctg

SEQ ID NO: 80014 - DNA, 25 bp, Canis familiaris
cgctgacatgatattgacactcttg

SEQ ID NO: 80015 - DNA, 25 bp, Canis familiaris
cgcgagctgttttgacttttattaa

SEQ ID NO: 80016 - DNA, 25 bp, Canis familiaris
cgctgtcgccgtggattgttatttt

SEQ ID NO: 80017 - DNA, 25 bp, Canis familiaris
cgcgatcccgaggttgtcaatgacg

SEQ ID NO: 80018 - DNA, 25 bp, Canis familiaris
cgaatgctgttactcttgtaccacg

SEQ ID NO: 80019 - DNA, 25 bp, Canis familiaris
cgcaaggctttgccatcgccaaagc

SEQ ID NO: 80020 - DNA, 25 bp, Canis familiaris
cgcaactgttgaccatggccaagac

SEQ ID NO: 80021 - DNA, 25 bp, Canis familiaris
cgcaacgcttgccacgcgtaatgtc

SEQ ID NO: 80022 - DNA, 25 bp, Canis familiaris
cgcaacgttgccagcgtatgtctgc

SEQ ID NO: 80023 - DNA, 25 bp, Canis familiaris
cgcaacgttgccagcgtatgtctgc

SEQ ID NO: 80024 - DNA, 25 bp, Canis familiaris
cgcaacgttgccagcgtatgtctgc

SEQ ID NO: 80025 - DNA, 25 bp, Canis familiaris
cgcaccggtctcaaggaatcaccgt

SEQ ID NO: 80026 - DNA, 25 bp, Canis familiaris
cgcacgcgccttgtgagaattctgc

SEQ ID NO: 80027 - DNA, 25 bp, Canis familiaris
cgcgattgcgcaatgccataaattt

SEQ ID NO: 80028 - DNA, 25 bp, Canis familiaris
cgcgtcagcccggataggatttaca

SEQ ID NO: 80029 - DNA, 25 bp, Canis familiaris
cgcgtatccacacagttgctattac

SEQ ID NO: 80030 - DNA, 25 bp, Canis familiaris
cgcgctgtcctacgagaactacgac

SEQ ID NO: 80031 - DNA, 25 bp, Canis familiaris
cgcaggatgccttatgcgtcatcta

SEQ ID NO: 80032 - DNA, 25 bp, Canis familiaris
cgcatggtgagcagacgatgcatct

SEQ ID NO: 80033 - DNA, 25 bp, Canis familiaris
cgcagctggagaaggcggcgctggc

SEQ ID NO: 80034 - DNA, 25 bp, Canis familiaris
cgcctgtggtgatgcgtgcagtggc

SEQ ID NO: 80035 - DNA, 25 bp, Canis familiaris
cgcaggctggtgtgcaggtcatgac

SEQ ID NO: 80036 - DNA, 25 bp, Canis familiaris
cgcgtgcgcgtgagtgtgtgtgagc

SEQ ID NO: 80037 - DNA, 25 bp, Canis familiaris
cgcaccgcgtgcaaggttttcgcgg

SEQ ID NO: 80038 - DNA, 25 bp, Canis familiaris
cgcacggctgtgaaaggtaccccgc

SEQ ID NO: 80039 - DNA, 25 bp, Canis familiaris
cgcgcgtgtgtgcatacgtgcacgc

SEQ ID NO: 80040 - DNA, 25 bp, Canis familiaris
cgcagcaggtctccaaggtgaacag

SEQ ID NO: 80041 - DNA, 25 bp, Canis familiaris
cgccgtgcctaccatggtgaccacg

SEQ ID NO: 80042 - DNA, 25 bp, Canis familiaris
cgcgctgctcattgactgcaggtcc

SEQ ID NO: 80043 - DNA, 25 bp, Canis familiaris
cgcgtcatcatctaccaggagaagc

SEQ ID NO: 80044 - DNA, 25 bp, Canis familiaris
cgcactttgtacacgagacgcaggc

SEQ ID NO: 80045 - DNA, 25 bp, Canis familiaris
cgcaccttctacatcatcgagcggg

SEQ ID NO: 80046 - DNA, 25 bp, Canis familiaris
cgcgtcgttacgtcatggttgggtc

SEQ ID NO: 80047 - DNA, 25 bp, Canis familiaris
cctgtcggaaagaaggacgaatgtc

SEQ ID NO: 80048 - DNA, 25 bp, Canis familiaris
cgccatccgaaaccttactgaagat

SEQ ID NO: 80049 - DNA, 25 bp, Canis familiaris
cgccacttggtacctatacctgtgt

SEQ ID NO: 80050 - DNA, 25 bp, Canis familiaris
cgctccttgttacctatagcatcag

SEQ ID NO: 80051 - DNA, 25 bp, Canis familiaris
cgctccctggttactatagcatcag

SEQ ID NO: 80052 - DNA, 25 bp, Canis familiaris
cgctccctgatgttcatgggaatca

SEQ ID NO: 80053 - DNA, 25 bp, Canis familiaris
cgctctgccattcagcttggaaatt

SEQ ID NO: 80054 - DNA, 25 bp, Canis familiaris
cgctctgccttggtgtaagctcaag

SEQ ID NO: 80055 - DNA, 25 bp, Canis familiaris
cgcttgccctggcttttaggggcac

SEQ ID NO: 80056 - DNA, 25 bp, Canis familiaris
cgctgcgccgggctgtatttaagga

SEQ ID NO: 80057 - DNA, 25 bp, Canis familiaris
cgctggccgtggagttcttggagag

SEQ ID NO: 80058 - DNA, 25 bp, Canis familiaris
ccgcctagttacctatctttgaaag

SEQ ID NO: 80059 - DNA, 25 bp, Canis familiaris
cgccactgagtgcatttactttagc

SEQ ID NO: 80060 - DNA, 25 bp, Canis familiaris
cccacaagccgactctagcgaaagc

SEQ ID NO: 80061 - DNA, 25 bp, Canis familiaris
cgctgccaagcctgttgggcaaggt

SEQ ID NO: 80062 - DNA, 25 bp, Canis familiaris
cgctgccaaggctgtgggcaaggtc

SEQ ID NO: 80063 - DNA, 25 bp, Canis familiaris
cgctgtagtggctgctgcggagacg

SEQ ID NO: 80064 - DNA, 25 bp, Canis familiaris
cgctgatgcagcgtgaatcgccggc

SEQ ID NO: 80065 - DNA, 25 bp, Canis familiaris
cgctgctggcagttatcgccaagct

SEQ ID NO: 80066 - DNA, 25 bp, Canis familiaris
cgctgctggcaatatcgccagctct

SEQ ID NO: 80067 - DNA, 25 bp, Canis familiaris
cgctgccagcaattagcgccagtgt

SEQ ID NO: 80068 - DNA, 25 bp, Canis familiaris
cgcggctcaacaaggccggtgggaa

SEQ ID NO: 80069 - DNA, 25 bp, Canis familiaris
cgcgtcccaagacgccagggagtca

SEQ ID NO: 80070 - DNA, 25 bp, Canis familiaris
cgcttctccaagtctgcagacgaga

SEQ ID NO: 80071 - DNA, 25 bp, Canis familiaris
cgcttcccacaggctgtggcaaggt

SEQ ID NO: 80072 - DNA, 25 bp, Canis familiaris
cgcttgcacgcggccttggcagcag

SEQ ID NO: 80073 - DNA, 25 bp, Canis familiaris
cgcttgagcaccgcatcggctgcat

SEQ ID NO: 80074 - DNA, 25 bp, Canis familiaris
cgcttgagcaccgcatcggctgcat

SEQ ID NO: 80075 - DNA, 25 bp, Canis familiaris
cgcattggcctggctcagaagctga

SEQ ID NO: 80076 - DNA, 25 bp, Canis familiaris
cgctcccactggaaacactgattct

SEQ ID NO: 80077 - DNA, 25 bp, Canis familiaris
cgctatccctgtttgattctatttt

SEQ ID NO: 80078 - DNA, 25 bp, Canis familiaris
cgctatagtttttgacctcttttat

SEQ ID NO: 80079 - DNA, 25 bp, Canis familiaris
cgctttttgtatttccaccattagt

SEQ ID NO: 80080 - DNA, 25 bp, Canis familiaris
cgctattgttgttttaccgatctaa

SEQ ID NO: 80081 - DNA, 25 bp, Canis familiaris
cgccaggcttcttgataagcttgtc

SEQ ID NO: 80082 - DNA, 25 bp, Canis familiaris
cgcgcaacttcttctcaagaacctg

SEQ ID NO: 80083 - DNA, 25 bp, Canis familiaris
cgctgccagctttactggagaactt

SEQ ID NO: 80084 - DNA, 25 bp, Canis familiaris
cgcgccgctgcctaggcgaaatttg

SEQ ID NO: 80085 - DNA, 25 bp, Canis familiaris
cgctcagccaccttgggagcaaagt

SEQ ID NO: 80086 - DNA, 25 bp, Canis familiaris
cgcagcatccccacggagaatgaac

SEQ ID NO: 80087 - DNA, 25 bp, Canis familiaris
cgcagttccagctgcggacaggaac

SEQ ID NO: 80088 - DNA, 25 bp, Canis familiaris
cgcagcacttcgtcagcgagagcgt

SEQ ID NO: 80089 - DNA, 25 bp, Canis familiaris
cgcacgcttctgtgcgagagcctgc

SEQ ID NO: 80090 - DNA, 25 bp, Canis familiaris
cgctcctggcgcaggaacatcatca

SEQ ID NO: 80091 - DNA, 25 bp, Canis familiaris
cgctatcggcggccagaaagtcacc

SEQ ID NO: 80092 - DNA, 25 bp, Canis familiaris
cgctgtgctggcgaccataaaggca

SEQ ID NO: 80093 - DNA, 25 bp, Canis familiaris
cgcagtcgcagttcgcattcaaaga

SEQ ID NO: 80094 - DNA, 25 bp, Canis familiaris
cgcgtcgctgtcagctgtctaagac

SEQ ID NO: 80095 - DNA, 25 bp, Canis familiaris
cgcgtccgatgcatgtgacacacac

SEQ ID NO: 80096 - DNA, 25 bp, Canis familiaris
cgcagtccagttgcgacaggcacta

SEQ ID NO: 80097 - DNA, 25 bp, Canis familiaris
cgcgtctaactacgagtagactact

SEQ ID NO: 80098 - DNA, 25 bp, Canis familiaris
cgccactacatggacggacagaccc

SEQ ID NO: 80099 - DNA, 25 bp, Canis familiaris
cgcaccaacagtggcggagacccga

SEQ ID NO: 80100 - DNA, 25 bp, Canis familiaris
cgcagaaggcgggcaggcaggcgcc

SEQ ID NO: 80101 - DNA, 25 bp, Canis familiaris
cgcagaaggcgggcaggcaggcgcc

SEQ ID NO: 80102 - DNA, 25 bp, Canis familiaris
cgcagaaggcgggcaggcaggcgcc

SEQ ID NO: 80103 - DNA, 25 bp, Canis familiaris
cgcattaaggcggagcgcaagcggc

SEQ ID NO: 80104 - DNA, 25 bp, Canis familiaris
cgcttcaaggcagagcaaatgtgac

SEQ ID NO: 80105 - DNA, 25 bp, Canis familiaris
cgctgctcagagccaccaaaaaaaa

SEQ ID NO: 80106 - DNA, 25 bp, Canis familiaris
cgctgccggcggggacaagaaggtc

SEQ ID NO: 80107 - DNA, 25 bp, Canis familiaris
cgcccgagcggagagtcaagtgctg

SEQ ID NO: 80108 - DNA, 25 bp, Canis familiaris
cgcaccccgcaagtattcacttgtg

SEQ ID NO: 80109 - DNA, 25 bp, Canis familiaris
cgctccaaccaagatctcattactg

SEQ ID NO: 80110 - DNA, 25 bp, Canis familiaris
cgcataaaatcaaggtgctattcag

SEQ ID NO: 80111 - DNA, 25 bp, Canis familiaris
cgcactcaactccatgaggcttgga

SEQ ID NO: 80112 - DNA, 25 bp, Canis familiaris
cgcacatcatcagcgcgcaagaggg

SEQ ID NO: 80113 - DNA, 25 bp, Canis familiaris
cgcccatcaccaagcagaacgagca

SEQ ID NO: 80114 - DNA, 25 bp, Canis familiaris
cgcacctgcccaaggacatcgtgcg

SEQ ID NO: 80115 - DNA, 25 bp, Canis familiaris
cgcacacgcacacagttctggacag

SEQ ID NO: 80116 - DNA, 25 bp, Canis familiaris
cccaatatcatccagtttgtgccgg

SEQ ID NO: 80117 - DNA, 25 bp, Canis familiaris
cccaatcatcaccatgtgtgtccct

SEQ ID NO: 80118 - DNA, 25 bp, Canis familiaris
cgctcacctgcagttggatgttcgt

SEQ ID NO: 80119 - DNA, 25 bp, Canis familiaris
cgctcccgcactgtactgtgcggaa

SEQ ID NO: 80120 - DNA, 25 bp, Canis familiaris
cgccgcttgctaaacctggcgtgaa

SEQ ID NO: 80121 - DNA, 25 bp, Canis familiaris
cgccgccggaaagcgtgccaatcaa

SEQ ID NO: 80122 - DNA, 25 bp, Canis familiaris
cgccgggggacagcgtgaacagcta

SEQ ID NO: 80123 - DNA, 25 bp, Canis familiaris
cgctcgagtgggacaccgacgagtg

SEQ ID NO: 80124 - DNA, 25 bp, Canis familiaris
cgcatcagagtctgtccacttctag

SEQ ID NO: 80125 - DNA, 25 bp, Canis familiaris
cgcatcagttaaaccctcctaaagg

SEQ ID NO: 80126 - DNA, 25 bp, Canis familiaris
cgctgtgatatatagtcgctttaag

SEQ ID NO: 80127 - DNA, 25 bp, Canis familiaris
cgcgctgatatacacggcttgtgga

SEQ ID NO: 80128 - DNA, 25 bp, Canis familiaris
cgcctggataccgcagctaggaata

SEQ ID NO: 80129 - DNA, 25 bp, Canis familiaris
cgcctggataccgcagctaggaata

SEQ ID NO: 80130 - DNA, 25 bp, Canis familiaris
cgcctggataccgcagctaggaata

SEQ ID NO: 80131 - DNA, 25 bp, Canis familiaris
cgcctggataccgcagctaggaata

SEQ ID NO: 80132 - DNA, 25 bp, Canis familiaris
cgcctggataccgcagctaggaata

SEQ ID NO: 80133 - DNA, 25 bp, Canis familiaris
cgcctggataccgcagctaggaata

SEQ ID NO: 80134 - DNA, 25 bp, Canis familiaris
cgctctataagctgcacctcaagaa

SEQ ID NO: 80135 - DNA, 25 bp, Canis familiaris
acatggtatgtctgacccaggtgct

SEQ ID NO: 80136 - DNA, 25 bp, Canis familiaris
cgcgttgcggttgaggcaggcggac

SEQ ID NO: 80137 - DNA, 25 bp, Canis familiaris
cgcaggtggcgcaggtgcgcaggcg

SEQ ID NO: 80138 - DNA, 25 bp, Canis familiaris
cgcgcgagagcgaggagcagcggcg

SEQ ID NO: 80139 - DNA, 25 bp, Canis familiaris
cgcggcggctagaagagcagcggga

SEQ ID NO: 80140 - DNA, 25 bp, Canis familiaris
cgcggctggttgcgaagagcggagt

SEQ ID NO: 80141 - DNA, 25 bp, Canis familiaris
cgcggcccacgggacatgaggaagg

SEQ ID NO: 80142 - DNA, 25 bp, Canis familiaris
cgccgtgcccttgattgggaagtac

SEQ ID NO: 80143 - DNA, 25 bp, Canis familiaris
cgccgggtttggggtggagcagaag

SEQ ID NO: 80144 - DNA, 25 bp, Canis familiaris
cgccggttttgggagcttgagctcc

SEQ ID NO: 80145 - DNA, 25 bp, Canis familiaris
cgcctttatttacagcgacagcccc

SEQ ID NO: 80146 - DNA, 25 bp, Canis familiaris
cgcgctttgttttggtccaagaact

SEQ ID NO: 80147 - DNA, 25 bp, Canis familiaris
cgcgtcttttgttgactctagataa

SEQ ID NO: 80148 - DNA, 25 bp, Canis familiaris
cgcttctttagttgacagcagtacg

SEQ ID NO: 80149 - DNA, 25 bp, Canis familiaris
cgcacgcttcggttgagcaggatga

SEQ ID NO: 80150 - DNA, 25 bp, Canis familiaris
cccgttcgggaatgtggaccaggtg

SEQ ID NO: 80151 - DNA, 25 bp, Canis familiaris
cccttctggggacaaggaccagctg

SEQ ID NO: 80152 - DNA, 25 bp, Canis familiaris
cgctactgtgggttggaatggacca

SEQ ID NO: 80153 - DNA, 25 bp, Canis familiaris
cccacggggactgagggtccaggct

SEQ ID NO: 80154 - DNA, 25 bp, Canis familiaris
ccgagcggaggagaacgccctcggc

SEQ ID NO: 80155 - DNA, 25 bp, Canis familiaris
cgctggggggtggatcaccacaccc

SEQ ID NO: 80156 - DNA, 25 bp, Canis familiaris
cgctggggggtggatcaccacaccc

SEQ ID NO: 80157 - DNA, 25 bp, Canis familiaris
cgctgggtgtggccgataatgcaag

SEQ ID NO: 80158 - DNA, 25 bp, Canis familiaris
cgctggaggtgtcctgcattgacaa

SEQ ID NO: 80159 - DNA, 25 bp, Canis familiaris
cgcggggctggggccagacaaagac

SEQ ID NO: 80160 - DNA, 25 bp, Canis familiaris
tctggggggaagtccaaaggcggcg

SEQ ID NO: 80161 - DNA, 25 bp, Canis familiaris
tcaccaggggaacaaaaggcaccgt

SEQ ID NO: 80162 - DNA, 25 bp, Canis familiaris
cgccggggaagaggagagggcgccg

SEQ ID NO: 80163 - DNA, 25 bp, Canis familiaris
cgccgccaggaaccaggtgagggtc

SEQ ID NO: 80164 - DNA, 25 bp, Canis familiaris
cgcgctacaaaaccgggctggaagc

SEQ ID NO: 80165 - DNA, 25 bp, Canis familiaris
cgccattaccattccaggggggagc

SEQ ID NO: 80166 - DNA, 25 bp, Canis familiaris
cgcgcggacttctagagggagggac

SEQ ID NO: 80167 - DNA, 25 bp, Canis familiaris
ccgcggagtccatgttggggaactt

SEQ ID NO: 80168 - DNA, 25 bp, Canis familiaris
cccttgggcaaccaatgggaaattg

SEQ ID NO: 80169 - DNA, 25 bp, Canis familiaris
cccttgaaaatccctgtggccagtt

SEQ ID NO: 80170 - DNA, 25 bp, Canis familiaris
ccctgaggaacaatgcgcttggcca

SEQ ID NO: 80171 - DNA, 25 bp, Canis familiaris
cccgcatcgttctgcagattgacaa

SEQ ID NO: 80172 - DNA, 25 bp, Canis familiaris
cgcagcccctgtttcgaaacaacag

SEQ ID NO: 80173 - DNA, 25 bp, Canis familiaris
cgctcccacatttccgtgaaagaag

SEQ ID NO: 80174 - DNA, 25 bp, Canis familiaris
cgcaccgtgcttccggtgcagatgg

SEQ ID NO: 80175 - DNA, 25 bp, Canis familiaris
cgctgccgagcagtacagggcgacg

SEQ ID NO: 80176 - DNA, 25 bp, Canis familiaris
ccgccggccaaagagccagcgggga

SEQ ID NO: 80177 - DNA, 25 bp, Canis familiaris
cgcctatgagcctcaaaccggggaa

SEQ ID NO: 80178 - DNA, 25 bp, Canis familiaris
cgccctccctaagactcaaggaaga

SEQ ID NO: 80179 - DNA, 25 bp, Canis familiaris
cgccggctcctgcaaatgcaaagag

SEQ ID NO: 80180 - DNA, 25 bp, Canis familiaris
cgcccgccctagcaaggaatgagac

SEQ ID NO: 80181 - DNA, 25 bp, Canis familiaris
cgcaccagcgagacctagacgtagg

SEQ ID NO: 80182 - DNA, 25 bp, Canis familiaris
cgcctcggagtcccgggtgtaggcg

SEQ ID NO: 80183 - DNA, 25 bp, Canis familiaris
cgccccgagtctacacggaaaatcg

SEQ ID NO: 80184 - DNA, 25 bp, Canis familiaris
cgcaccagccagcttgcaagtgaaa

SEQ ID NO: 80185 - DNA, 25 bp, Canis familiaris
cgcatctcaggtctccaagagcaaa

SEQ ID NO: 80186 - DNA, 25 bp, Canis familiaris
cgcggcaggtgtggccaagcagaaa

SEQ ID NO: 80187 - DNA, 25 bp, Canis familiaris
cgcgcacggagttgccaggagcaaa

SEQ ID NO: 80188 - DNA, 25 bp, Canis familiaris
cgccactggttagagggcccagctt

SEQ ID NO: 80189 - DNA, 25 bp, Canis familiaris
cgccccgtgctagggggacaaccat

SEQ ID NO: 80190 - DNA, 25 bp, Canis familiaris
cgccttgcctctcgatggaggatca

SEQ ID NO: 80191 - DNA, 25 bp, Canis familiaris
cgcctctgcattccagggcgctgtc

SEQ ID NO: 80192 - DNA, 25 bp, Canis familiaris
cgcaccagtgtcaggagctgcgctc

SEQ ID NO: 80193 - DNA, 25 bp, Canis familiaris
cgcaccgtgtgcaaggagatccgtc

SEQ ID NO: 80194 - DNA, 25 bp, Canis familiaris
cgcaccaccagccatggaagggtcg

SEQ ID NO: 80195 - DNA, 25 bp, Canis familiaris
cgcccccagtgtgcacgagtgggaa

SEQ ID NO: 80196 - DNA, 25 bp, Canis familiaris
cgcgccccttgtaagttggtgatga

SEQ ID NO: 80197 - DNA, 25 bp, Canis familiaris
cgctccccaatgctaactttgattg

SEQ ID NO: 80198 - DNA, 25 bp, Canis familiaris
cccagcctttgacaacctgtattac

SEQ ID NO: 80199 - DNA, 25 bp, Canis familiaris
cccaggctattccgaaccttgtgga

SEQ ID NO: 80200 - DNA, 25 bp, Canis familiaris
cgccggttgacacgagagagctcgc

SEQ ID NO: 80201 - DNA, 25 bp, Canis familiaris
cgctgcggttcctgcagaactacac

SEQ ID NO: 80202 - DNA, 25 bp, Canis familiaris
cgcgtgtttgactacagtgagtact

SEQ ID NO: 80203 - DNA, 25 bp, Canis familiaris
cgcttcatttgctaggcgtgagctg

SEQ ID NO: 80204 - DNA, 25 bp, Canis familiaris
cgcttcctgctgggcaggtggctgg

SEQ ID NO: 80205 - DNA, 25 bp, Canis familiaris
cgcgtccgctgaggcggagggggag

SEQ ID NO: 80206 - DNA, 25 bp, Canis familiaris
cgcgatcctggggggaagggggcag

SEQ ID NO: 80207 - DNA, 25 bp, Canis familiaris
cgcagcagccggggcggtagtaggg

SEQ ID NO: 80208 - DNA, 25 bp, Canis familiaris
cgcagaatcgaccccttagggagag

SEQ ID NO: 80209 - DNA, 25 bp, Canis familiaris
ccgagatctataccgcttgggaaac

SEQ ID NO: 80210 - DNA, 25 bp, Canis familiaris
cgcgagagtacccgtgtgtggaagt

SEQ ID NO: 80211 - DNA, 25 bp, Canis familiaris
cgccctgacaccagtggtagtcgtc

SEQ ID NO: 80212 - DNA, 25 bp, Canis familiaris
cgcttcgacagcgacgtgggggagt

SEQ ID NO: 80213 - DNA, 25 bp, Canis familiaris
cgcttcgacagcgacgtgggggagt

SEQ ID NO: 80214 - DNA, 25 bp, Canis familiaris
cgcctggctcacgaagttggctgga

SEQ ID NO: 80215 - DNA, 25 bp, Canis familiaris
cgctctgtgctcacggacgagcggc

SEQ ID NO: 80216 - DNA, 25 bp, Canis familiaris
cgctcaagctgtcatgtacggagcc

SEQ ID NO: 80217 - DNA, 25 bp, Canis familiaris
cgctcaacatccagtacggagactc

SEQ ID NO: 80218 - DNA, 25 bp, Canis familiaris
cgctcctcatccgcgaggtagatgt

SEQ ID NO: 80219 - DNA, 25 bp, Canis familiaris
cgctctgtcatccatccaaggaagg

SEQ ID NO: 80220 - DNA, 25 bp, Canis familiaris
cgctttgccagctacatcgagaagg

SEQ ID NO: 80221 - DNA, 25 bp, Canis familiaris
cgcttatctagatcatctgaggaag

SEQ ID NO: 80222 - DNA, 25 bp, Canis familiaris
cgcagttccgcatggctcaggaaga

SEQ ID NO: 80223 - DNA, 25 bp, Canis familiaris
cgcggacatctatgtgcaggagaag

SEQ ID NO: 80224 - DNA, 25 bp, Canis familiaris
cgcagtacacagaggaagagagagg

SEQ ID NO: 80225 - DNA, 25 bp, Canis familiaris
cgcagcccacagatgattcaggcca

SEQ ID NO: 80226 - DNA, 25 bp, Canis familiaris
cgcctgaaagttatccccaagctga

SEQ ID NO: 80227 - DNA, 25 bp, Canis familiaris
cccggacagtttatccacaccaatt

SEQ ID NO: 80228 - DNA, 25 bp, Canis familiaris
cgcatgtgagaacttgttgtccccc

SEQ ID NO: 80229 - DNA, 25 bp, Canis familiaris
ccggaagagcgtgtggcacggctcc

SEQ ID NO: 80230 - DNA, 25 bp, Canis familiaris
cgccgctatgactgggtgagggccc

SEQ ID NO: 80231 - DNA, 25 bp, Canis familiaris
cgccctgagagcataggcggcccgc

SEQ ID NO: 80232 - DNA, 25 bp, Canis familiaris
cgccttgggcttggggatgcggtgg

SEQ ID NO: 80233 - DNA, 25 bp, Canis familiaris
cgctgcttgggctgagcggtggagg

SEQ ID NO: 80234 - DNA, 25 bp, Canis familiaris
cgcccggcacagcacaggatatggg

SEQ ID NO: 80235 - DNA, 25 bp, Canis familiaris
cgcccagtgaagctgcaggccaagg

SEQ ID NO: 80236 - DNA, 25 bp, Canis familiaris
cgccatgtgctgctcagacagggtg

SEQ ID NO: 80237 - DNA, 25 bp, Canis familiaris
cgccatgtgctgctcagacagggtg

SEQ ID NO: 80238 - DNA, 25 bp, Canis familiaris
cgcgcattctgaggcaacggagtgg

SEQ ID NO: 80239 - DNA, 25 bp, Canis familiaris
cgcgcatttgggcgacgctggaaca

SEQ ID NO: 80240 - DNA, 25 bp, Canis familiaris
cgccggcggtgaggacgcggagaag

SEQ ID NO: 80241 - DNA, 25 bp, Canis familiaris
cccaggtgggcaggcccgataaaag

SEQ ID NO: 80242 - DNA, 25 bp, Canis familiaris
cccacagtggccagctacgtaaaga

SEQ ID NO: 80243 - DNA, 25 bp, Canis familiaris
ccgcaaggggcttcaacctggagga

SEQ ID NO: 80244 - DNA, 25 bp, Canis familiaris
ccgaaaagggagaaaagtgatgaga

SEQ ID NO: 80245 - DNA, 25 bp, Canis familiaris
cgccaacagaggcaaagagggtagt

SEQ ID NO: 80246 - DNA, 25 bp, Canis familiaris
cgctccagcagacgcagagatgcag

SEQ ID NO: 80247 - DNA, 25 bp, Canis familiaris
cgctcagccgcaggagatggcgtcc

SEQ ID NO: 80248 - DNA, 25 bp, Canis familiaris
cgccagggagtgttgtcagtccggt

SEQ ID NO: 80249 - DNA, 25 bp, Canis familiaris
cgctgcgtggacatcgatgagtgcc

SEQ ID NO: 80250 - DNA, 25 bp, Canis familiaris
cgcgctgcgtggacatcgatgagtg

SEQ ID NO: 80251 - DNA, 25 bp, Canis familiaris
cgcgctgcgtgagcatgttgtgggc

SEQ ID NO: 80252 - DNA, 25 bp, Canis familiaris
cgcatctggggcgtgggtggttcta

SEQ ID NO: 80253 - DNA, 25 bp, Canis familiaris
cgctgcgagaacggcgtgtgcgtgt

SEQ ID NO: 80254 - DNA, 25 bp, Canis familiaris
cgcgcgcagaagttgcgcttcctgc

SEQ ID NO: 80255 - DNA, 25 bp, Canis familiaris
cgctggcaagagtacagcatttgct

SEQ ID NO: 80256 - DNA, 25 bp, Canis familiaris
cgctgccaatgcactcgatcttgtc

SEQ ID NO: 80257 - DNA, 25 bp, Canis familiaris
cgctgccaatgatgtttcatttgcc

SEQ ID NO: 80258 - DNA, 25 bp, Canis familiaris
cgctccatagacctcttgtatttct

SEQ ID NO: 80259 - DNA, 25 bp, Canis familiaris
cgcgaaaagcctaggtataatccta

SEQ ID NO: 80260 - DNA, 25 bp, Canis familiaris
cgcgaaagctcgaggcgtcaacacc

SEQ ID NO: 80261 - DNA, 25 bp, Canis familiaris
cgcaggaaccgaggacttcaggggc

SEQ ID NO: 80262 - DNA, 25 bp, Canis familiaris
cgcaggaagctcgacatcagccctg

SEQ ID NO: 80263 - DNA, 25 bp, Canis familiaris
cgcaggaggcgctaaaccactgagc

SEQ ID NO: 80264 - DNA, 25 bp, Canis familiaris
cgcgcgtgtgcggcaaccgcaagaa

SEQ ID NO: 80265 - DNA, 25 bp, Canis familiaris
cgcggtgtgcggaagtggagtcagg

SEQ ID NO: 80266 - DNA, 25 bp, Canis familiaris
cgctggtggccgagatgggtgagtg

SEQ ID NO: 80267 - DNA, 25 bp, Canis familiaris
cgctgctttcccagtaggtgtgggg

SEQ ID NO: 80268 - DNA, 25 bp, Canis familiaris
cgcttcttcatctttttgtgtgggg

SEQ ID NO: 80269 - DNA, 25 bp, Canis familiaris
cgccctacttctgtgatcttggggg

SEQ ID NO: 80270 - DNA, 25 bp, Canis familiaris
cgcccctagtgcgtttgcttggggt

SEQ ID NO: 80271 - DNA, 25 bp, Canis familiaris
cgcctactcagtgttctggtcaggt

SEQ ID NO: 80272 - DNA, 25 bp, Canis familiaris
cgcccgctcgaagtactggtggcag

SEQ ID NO: 80273 - DNA, 25 bp, Canis familiaris
cgcccagactgtttccggggattgt

SEQ ID NO: 80274 - DNA, 25 bp, Canis familiaris
cgcataaggcttttgtgggtcgttt

SEQ ID NO: 80275 - DNA, 25 bp, Canis familiaris
gccaacgttcaaggtaagtcgttct

SEQ ID NO: 80276 - DNA, 25 bp, Canis familiaris
ccgaccttaaggccacagttgttgt

SEQ ID NO: 80277 - DNA, 25 bp, Canis familiaris
cgcgatgccgggatcaaagtctgtt

SEQ ID NO: 80278 - DNA, 25 bp, Canis familiaris
cgcgcggaggtgatagccgtcgtgg

SEQ ID NO: 80279 - DNA, 25 bp, Canis familiaris
cgccaggagggagacgggcggcggc

SEQ ID NO: 80280 - DNA, 25 bp, Canis familiaris
cgcgccaggggtgagggtgcgacag

SEQ ID NO: 80281 - DNA, 25 bp, Canis familiaris
cgcccgggagcggaggactgtgaac

SEQ ID NO: 80282 - DNA, 25 bp, Canis familiaris
cgcccgggcatcgggagtctagatc

SEQ ID NO: 80283 - DNA, 25 bp, Canis familiaris
cgcccgaggccaaggcgtcgaacga

SEQ ID NO: 80284 - DNA, 25 bp, Canis familiaris
cgcccgacgcggagggcgacatcag

SEQ ID NO: 80285 - DNA, 25 bp, Canis familiaris
cgcgccgcagccatggcgtttaaag

SEQ ID NO: 80286 - DNA, 25 bp, Canis familiaris
cgcgctgcgcagtttgtgctgcgtg

SEQ ID NO: 80287 - DNA, 25 bp, Canis familiaris
cgctgcgacatcatggtgctgcagg

SEQ ID NO: 80288 - DNA, 25 bp, Canis familiaris
cgcgctacactgactggctcagcgt

SEQ ID NO: 80289 - DNA, 25 bp, Canis familiaris
cgcgctacactgactggctcagcgt

SEQ ID NO: 80290 - DNA, 25 bp, Canis familiaris
cgcaggaactgcgtgtgtcctatca

SEQ ID NO: 80291 - DNA, 25 bp, Canis familiaris
cgcgagaaccgcaagtactacatgg

SEQ ID NO: 80292 - DNA, 25 bp, Canis familiaris
cgctgcagaacgccaagtacgaggg

SEQ ID NO: 80293 - DNA, 25 bp, Canis familiaris
cgcgaagatcgccaactcatggggg

SEQ ID NO: 80294 - DNA, 25 bp, Canis familiaris
cccaagtccaagtcttacggtgcaa

SEQ ID NO: 80295 - DNA, 25 bp, Canis familiaris
cctcaattcaattcaattccgggtt

SEQ ID NO: 80296 - DNA, 25 bp, Canis familiaris
cccagatctcggacacgtccgtggt

SEQ ID NO: 80297 - DNA, 25 bp, Canis familiaris
cccaggctcgggggttgccgagaag

SEQ ID NO: 80298 - DNA, 25 bp, Canis familiaris
cgccggctccggaggatggggaggt

SEQ ID NO: 80299 - DNA, 25 bp, Canis familiaris
cgctgcggtcatggggggagtgagg

SEQ ID NO: 80300 - DNA, 25 bp, Canis familiaris
cgctcactgactcctggggggagag

SEQ ID NO: 80301 - DNA, 25 bp, Canis familiaris
cgcgcctggaacagggagggatacc

SEQ ID NO: 80302 - DNA, 25 bp, Canis familiaris
ccctcgcgaatccgtgtaaagtaat

SEQ ID NO: 80303 - DNA, 25 bp, Canis familiaris
cgcgtctgcggatggtggacacagt

SEQ ID NO: 80304 - DNA, 25 bp, Canis familiaris
cgccgctgctgggagagatcccctg

SEQ ID NO: 80305 - DNA, 25 bp, Canis familiaris
cgcatgctcaggctgggaatccctg

SEQ ID NO: 80306 - DNA, 25 bp, Canis familiaris
cgctgccggggcgagtatgagcgct

SEQ ID NO: 80307 - DNA, 25 bp, Canis familiaris
cgcatcgccggcaagagcattgagg

SEQ ID NO: 80308 - DNA, 25 bp, Canis familiaris
cgcatgctgctgcgggcagctggag

SEQ ID NO: 80309 - DNA, 25 bp, Canis familiaris
cgctgcggcgtgggagcttgaagac

SEQ ID NO: 80310 - DNA, 25 bp, Canis familiaris
cgctcaccctgaggacactgaagac

SEQ ID NO: 80311 - DNA, 25 bp, Canis familiaris
cgctgcccaggagctacatggagaa

SEQ ID NO: 80312 - DNA, 25 bp, Canis familiaris
cgctgcgagcagtcgctgctcaagg

SEQ ID NO: 80313 - DNA, 25 bp, Canis familiaris
cgctgcaagcagtgtctcaatgagg

SEQ ID NO: 80314 - DNA, 25 bp, Canis familiaris
cgctgaggccatagtcaatagggaa

SEQ ID NO: 80315 - DNA, 25 bp, Canis familiaris
cgctcactcgcatgtcagtgaaaaa

SEQ ID NO: 80316 - DNA, 25 bp, Canis familiaris
cgcccacgctggacattgtcgcaag

SEQ ID NO: 80317 - DNA, 25 bp, Canis familiaris
cgccaacatgctgggcgtgtcgctc

SEQ ID NO: 80318 - DNA, 25 bp, Canis familiaris
cgctacagcagcagcgggcacttgg

SEQ ID NO: 80319 - DNA, 25 bp, Canis familiaris
cgcgatggcagccacgagcagactt

SEQ ID NO: 80320 - DNA, 25 bp, Canis familiaris
cgcgctgtgcagacaccatggaggt

SEQ ID NO: 80321 - DNA, 25 bp, Canis familiaris
cgccaagcagcaaccatgcgtgagt

SEQ ID NO: 80322 - DNA, 25 bp, Canis familiaris
cgcgagagcgaggagcagcggcgga

SEQ ID NO: 80323 - DNA, 25 bp, Canis familiaris
cgctagagctagcgagcgcgctaac

SEQ ID NO: 80324 - DNA, 25 bp, Canis familiaris
cgccgagaacgagggcctggacgac

SEQ ID NO: 80325 - DNA, 25 bp, Canis familiaris
cgcgcgagatatggcccgcgctgga

SEQ ID NO: 80326 - DNA, 25 bp, Canis familiaris
cgcgaaagagccgcgccagagagct

SEQ ID NO: 80327 - DNA, 25 bp, Canis familiaris
cgcgcaaagcgaaagcggcaggatc

SEQ ID NO: 80328 - DNA, 25 bp, Canis familiaris
cgcggacagcgggagctggtctgtt

SEQ ID NO: 80329 - DNA, 25 bp, Canis familiaris
cgcccacagcgtttggtgttgattc

SEQ ID NO: 80330 - DNA, 25 bp, Canis familiaris
cgccagacctactgggcatctggtc

SEQ ID NO: 80331 - DNA, 25 bp, Canis familiaris
cgcctgaccttggggagtcttatgt

SEQ ID NO: 80332 - DNA, 25 bp, Canis familiaris
cgcgctgagcactctgggatttgta

SEQ ID NO: 80333 - DNA, 25 bp, Canis familiaris
cgcctgacccactcaatgatgatgc

SEQ ID NO: 80334 - DNA, 25 bp, Canis familiaris
cgcctgacccactcaatgatgatgc

SEQ ID NO: 80335 - DNA, 25 bp, Canis familiaris
cgcctcctcaccaaatatgctgagc

SEQ ID NO: 80336 - DNA, 25 bp, Canis familiaris
cgctcacccacacagaagatgcgcc

SEQ ID NO: 80337 - DNA, 25 bp, Canis familiaris
cgcgacaccgctcaaatatggctcc

SEQ ID NO: 80338 - DNA, 25 bp, Canis familiaris
cgccagcaatttcaacatatcctcc

SEQ ID NO: 80339 - DNA, 25 bp, Canis familiaris
cgcgctcgtgtgtggacaatggctc

SEQ ID NO: 80340 - DNA, 25 bp, Canis familiaris
cgcccttggtgcggacagtgtgcgt

SEQ ID NO: 80341 - DNA, 25 bp, Canis familiaris
cgctgcccaggtggacaaggtctgg

SEQ ID NO: 80342 - DNA, 25 bp, Canis familiaris
gcgtcacccacgggcaaatgttggg

SEQ ID NO: 80343 - DNA, 25 bp, Canis familiaris
cgctcctccactctgggagttagga

SEQ ID NO: 80344 - DNA, 25 bp, Canis familiaris
cgcgttctcctgggggacttagaga

SEQ ID NO: 80345 - DNA, 25 bp, Canis familiaris
cgcgttctgtccagggatttgggaa

SEQ ID NO: 80346 - DNA, 25 bp, Canis familiaris
cgcgttcttcttcgtgtgatagtga

SEQ ID NO: 80347 - DNA, 25 bp, Canis familiaris
cgcgtcatctccagcatttgacacg

SEQ ID NO: 80348 - DNA, 25 bp, Canis familiaris
cgctacatcgccagtctgaagcagc

SEQ ID NO: 80349 - DNA, 25 bp, Canis familiaris
cgctactgcctggccttgaagagga

SEQ ID NO: 80350 - DNA, 25 bp, Canis familiaris
cgcttctttggcggtgacaggggtg

SEQ ID NO: 80351 - DNA, 25 bp, Canis familiaris
cgcttcgtgtgctattgcgaggggg

SEQ ID NO: 80352 - DNA, 25 bp, Canis familiaris
cgcgccggattattgctgcaactgg

SEQ ID NO: 80353 - DNA, 25 bp, Canis familiaris
cgccggattattgctgcaactggca

SEQ ID NO: 80354 - DNA, 25 bp, Canis familiaris
cgccactatattatcgctaatccaa

SEQ ID NO: 80355 - DNA, 25 bp, Canis familiaris
cccctatacgtgaggaatcccaagg

SEQ ID NO: 80356 - DNA, 25 bp, Canis familiaris
ccctggtactggagcgactaccggg

SEQ ID NO: 80357 - DNA, 25 bp, Canis familiaris
cccttcttcaggagaactcccggct

SEQ ID NO: 80358 - DNA, 25 bp, Canis familiaris
gccttccgccggagaaactactgac

SEQ ID NO: 80359 - DNA, 25 bp, Canis familiaris
cgcccccagggaagaaacatattct

SEQ ID NO: 80360 - DNA, 25 bp, Canis familiaris
cgccgcccaggttctgggaagttct

SEQ ID NO: 80361 - DNA, 25 bp, Canis familiaris
cgcccgcacggcttgggaggatttt

SEQ ID NO: 80362 - DNA, 25 bp, Canis familiaris
cgcctgcccttccggaaggattttg

SEQ ID NO: 80363 - DNA, 25 bp, Canis familiaris
cccccttaccgatatgtgttttgct

SEQ ID NO: 80364 - DNA, 25 bp, Canis familiaris
cgcctgccttttgtcaattttggga

SEQ ID NO: 80365 - DNA, 25 bp, Canis familiaris
cgccgcacttttataagtcatcgta

SEQ ID NO: 80366 - DNA, 25 bp, Canis familiaris
cgccgcactttaaaaagtcatcgta

SEQ ID NO: 80367 - DNA, 25 bp, Canis familiaris
ccgtcacggtgacacaagtccggcg

SEQ ID NO: 80368 - DNA, 25 bp, Canis familiaris
ccctcaaggctacagaaccaccagc

SEQ ID NO: 80369 - DNA, 25 bp, Canis familiaris
cgcctgaaggtgccggagagcaacg

SEQ ID NO: 80370 - DNA, 25 bp, Canis familiaris
cgccgtgcaggatgctgcgtgcaaa

SEQ ID NO: 80371 - DNA, 25 bp, Canis familiaris
cgccagccaggatgctacacattag

SEQ ID NO: 80372 - DNA, 25 bp, Canis familiaris
cgctaacggagagccacatcttggc

SEQ ID NO: 80373 - DNA, 25 bp, Canis familiaris
cccaaggcacagtcacccctgtgcc

SEQ ID NO: 80374 - DNA, 25 bp, Canis familiaris
cccaactgcaagtacctgcgggtaa

SEQ ID NO: 80375 - DNA, 25 bp, Canis familiaris
cccagcagtctgtttccgagggtac

SEQ ID NO: 80376 - DNA, 25 bp, Canis familiaris
cccaagccatggatccctgggtggc

SEQ ID NO: 80377 - DNA, 25 bp, Canis familiaris
cgccaacacggtgctgtctggcggg

SEQ ID NO: 80378 - DNA, 25 bp, Canis familiaris
cgccatcaaatggtacttcgtccca

SEQ ID NO: 80379 - DNA, 25 bp, Canis familiaris
cgccatccattggacaattgcgccc

SEQ ID NO: 80380 - DNA, 25 bp, Canis familiaris
cccacgtgggacaataagccctgga

SEQ ID NO: 80381 - DNA, 25 bp, Canis familiaris
cgcccggtgagcttcagcaaggcgg

SEQ ID NO: 80382 - DNA, 25 bp, Canis familiaris
cgccgggacagctgcaagggcgact

SEQ ID NO: 80383 - DNA, 25 bp, Canis familiaris
cgcctggaacagggagggatacctg

SEQ ID NO: 80384 - DNA, 25 bp, Canis familiaris
cgcctggacagcgacgaggagatcg

SEQ ID NO: 80385 - DNA, 25 bp, Canis familiaris
cgcgctgcggcggaagaaggtgctg

SEQ ID NO: 80386 - DNA, 25 bp, Canis familiaris
cgctctctgggtttgggagtgctgc

SEQ ID NO: 80387 - DNA, 25 bp, Canis familiaris
cgcctcttggtgaatccgaatcatc

SEQ ID NO: 80388 - DNA, 25 bp, Canis familiaris
cgctctgctgtcctgtaggaacaca

SEQ ID NO: 80389 - DNA, 25 bp, Canis familiaris
cgcgtattctttagagcacctcaac

SEQ ID NO: 80390 - DNA, 25 bp, Canis familiaris
cgctgtttctgctgggagcagccaa

SEQ ID NO: 80391 - DNA, 25 bp, Canis familiaris
cgcctgagttgctgtgggaccaagg

SEQ ID NO: 80392 - DNA, 25 bp, Canis familiaris
cccaagcttcaagtcggcttcattg

SEQ ID NO: 80393 - DNA, 25 bp, Canis familiaris
cccaagcccaagcgagtgtgcaagg

SEQ ID NO: 80394 - DNA, 25 bp, Canis familiaris
cccactgttaagttggtggctcagg

SEQ ID NO: 80395 - DNA, 25 bp, Canis familiaris
cccaccttaattgggcctgccaata

SEQ ID NO: 80396 - DNA, 25 bp, Canis familiaris
cccaggtctttttgacccgacatat

SEQ ID NO: 80397 - DNA, 25 bp, Canis familiaris
cccagggttctatgtccagcaaaaa

SEQ ID NO: 80398 - DNA, 25 bp, Canis familiaris
ccttaaggcttccaggccacgaaag

SEQ ID NO: 80399 - DNA, 25 bp, Canis familiaris
cgctgaaaggcatcggtgccacgca

SEQ ID NO: 80400 - DNA, 25 bp, Canis familiaris
cgctgaggggctggcgtgagccagg

SEQ ID NO: 80401 - DNA, 25 bp, Canis familiaris
cgccagggaaggcgccctggtacac

SEQ ID NO: 80402 - DNA, 25 bp, Canis familiaris
ccgcaggttaggagcctcctaccac

SEQ ID NO: 80403 - DNA, 25 bp, Canis familiaris
cccaacggctaaagtccgctaccag

SEQ ID NO: 80404 - DNA, 25 bp, Canis familiaris
cccttgggtaatgttcctggccagg

SEQ ID NO: 80405 - DNA, 25 bp, Canis familiaris
cgccctgggtaattgttcttggcca

SEQ ID NO: 80406 - DNA, 25 bp, Canis familiaris
cgccctgaggctggaggtcctgggc

SEQ ID NO: 80407 - DNA, 25 bp, Canis familiaris
cccttctggctgagagcttctggac

SEQ ID NO: 80408 - DNA, 25 bp, Canis familiaris
cgccttcagaagaacccttggactc

SEQ ID NO: 80409 - DNA, 25 bp, Canis familiaris
cccatggcaaaaaacctgttcagtc

SEQ ID NO: 80410 - DNA, 25 bp, Canis familiaris
gccgagagaaaacatccttattgaa

SEQ ID NO: 80411 - DNA, 25 bp, Canis familiaris
cctgaataaatacataaaatctcta

SEQ ID NO: 80412 - DNA, 25 bp, Canis familiaris
cccaatggccaataaagaatgctta

SEQ ID NO: 80413 - DNA, 25 bp, Canis familiaris
cccaagcccacacgaaggaggttgg

SEQ ID NO: 80414 - DNA, 25 bp, Canis familiaris
ccccctgaccagcacgagggttgat

SEQ ID NO: 80415 - DNA, 25 bp, Canis familiaris
cccacgtactacctcacgtgtttct

SEQ ID NO: 80416 - DNA, 25 bp, Canis familiaris
cccacacgacgaggccaagtttgac

SEQ ID NO: 80417 - DNA, 25 bp, Canis familiaris
cccagcaaatgctgggccctttgcc

SEQ ID NO: 80418 - DNA, 25 bp, Canis familiaris
cgctgccaaagctgcccaatttggg

SEQ ID NO: 80419 - DNA, 25 bp, Canis familiaris
cgctaaactcttccaccattattgg

SEQ ID NO: 80420 - DNA, 25 bp, Canis familiaris
cgctcaaatgtgcacccgattatgg

SEQ ID NO: 80421 - DNA, 25 bp, Canis familiaris
cgccagaaggatgccgcagaccatt

SEQ ID NO: 80422 - DNA, 25 bp, Canis familiaris
cccaaagcaatgcacagactccgtg

SEQ ID NO: 80423 - DNA, 25 bp, Canis familiaris
cgccgacacactcggaacttgcggg

SEQ ID NO: 80424 - DNA, 25 bp, Canis familiaris
cgcccagcccataagaactttgaga

SEQ ID NO: 80425 - DNA, 25 bp, Canis familiaris
cgcccatcccttaatgcagattggg

SEQ ID NO: 80426 - DNA, 25 bp, Canis familiaris
cccaatccccatggtcacagtggga

SEQ ID NO: 80427 - DNA, 25 bp, Canis familiaris
cccaatccccttgaatttctagcat

SEQ ID NO: 80428 - DNA, 25 bp, Canis familiaris
cccagaacccctggacaacatcttg

SEQ ID NO: 80429 - DNA, 25 bp, Canis familiaris
cccagaaccagccatgccaaaaaaa

SEQ ID NO: 80430 - DNA, 25 bp, Canis familiaris
cccaaaacaggcctcagccaactag

SEQ ID NO: 80431 - DNA, 25 bp, Canis familiaris
cccaaaaagactccttcaccaatag

SEQ ID NO: 80432 - DNA, 25 bp, Canis familiaris
cccagaaaaagccagttgccccgag

SEQ ID NO: 80433 - DNA, 25 bp, Canis familiaris
cccagaaacaattgactccgtccgt

SEQ ID NO: 80434 - DNA, 25 bp, Canis familiaris
cgcgagaggtactatgacagcctgg

SEQ ID NO: 80435 - DNA, 25 bp, Canis familiaris
cgcgaagcatatagcttcaagcctg

SEQ ID NO: 80436 - DNA, 25 bp, Canis familiaris
cgctcgatgcctactacaagcgctg

SEQ ID NO: 80437 - DNA, 25 bp, Canis familiaris
cgccaggccttttgcaagtcataat

SEQ ID NO: 80438 - DNA, 25 bp, Canis familiaris
cgctaagttttagtggatcagattt

SEQ ID NO: 80439 - DNA, 25 bp, Canis familiaris
cgctaagtcttgccctaacagttgg

SEQ ID NO: 80440 - DNA, 25 bp, Canis familiaris
cgctaagtattacccacagacatat

SEQ ID NO: 80441 - DNA, 25 bp, Canis familiaris
cgctcaactacttgactcacagaca

SEQ ID NO: 80442 - DNA, 25 bp, Canis familiaris
cgccatcagaactatcatctccgaa

SEQ ID NO: 80443 - DNA, 25 bp, Canis familiaris
cgcccagaattcttcacatggccac

SEQ ID NO: 80444 - DNA, 25 bp, Canis familiaris
cgctccagtattttacatgaatgat

SEQ ID NO: 80445 - DNA, 25 bp, Canis familiaris
cgctcagtatttgtaatgagaatga

SEQ ID NO: 80446 - DNA, 25 bp, Canis familiaris
cccagtattctccaagcatgacgat

SEQ ID NO: 80447 - DNA, 25 bp, Canis familiaris
cccaggcattgctgacaggatgcag

SEQ ID NO: 80448 - DNA, 25 bp, Canis familiaris
cccagcgttatgtacatgatgtcac

SEQ ID NO: 80449 - DNA, 25 bp, Canis familiaris
cgctcggtgcgatactgatgatgaa

SEQ ID NO: 80450 - DNA, 25 bp, Canis familiaris
cgctcggtgcgatactgatgatgaa

SEQ ID NO: 80451 - DNA, 25 bp, Canis familiaris
cgcctggtgctgaggtgtgtgacac

SEQ ID NO: 80452 - DNA, 25 bp, Canis familiaris
cgccgttcagttccttcagaagagc

SEQ ID NO: 80453 - DNA, 25 bp, Canis familiaris
cgccgatttgcccacttaatagaga

SEQ ID NO: 80454 - DNA, 25 bp, Canis familiaris
cgccgaatggcgaattttgaagatt

SEQ ID NO: 80455 - DNA, 25 bp, Canis familiaris
cgcgcaggagacgttttatgagttt

SEQ ID NO: 80456 - DNA, 25 bp, Canis familiaris
ccgtccagatcaaacctggagcttt

SEQ ID NO: 80457 - DNA, 25 bp, Canis familiaris
cgcgaccaaaattcaggctagcttc

SEQ ID NO: 80458 - DNA, 25 bp, Canis familiaris
cgcccacaaaattagccaagttcat

SEQ ID NO: 80459 - DNA, 25 bp, Canis familiaris
cgccaacaatatacttccaagcctt

SEQ ID NO: 80460 - DNA, 25 bp, Canis familiaris
cgcgaaccatatacttcaaagccgt

SEQ ID NO: 80461 - DNA, 25 bp, Canis familiaris
cgcgaaccttcatgacaaacgtctc

SEQ ID NO: 80462 - DNA, 25 bp, Canis familiaris
gtggaacttccgccaaaatttctgc

SEQ ID NO: 80463 - DNA, 25 bp, Canis familiaris
cccaactccctgcaaaatttgtcct

SEQ ID NO: 80464 - DNA, 25 bp, Canis familiaris
cgccaccccactgaataattttctg

SEQ ID NO: 80465 - DNA, 25 bp, Canis familiaris
cccacccagtctggattccattctt

SEQ ID NO: 80466 - DNA, 25 bp, Canis familiaris
cccacaccagcctgttttcataata

SEQ ID NO: 80467 - DNA, 25 bp, Canis familiaris
cccacaccagcctgttttcataata

SEQ ID NO: 80468 - DNA, 25 bp, Canis familiaris
cccaacacgatcagttttgcttgta

SEQ ID NO: 80469 - DNA, 25 bp, Canis familiaris
cgcccatcctatacatttgttcttt

SEQ ID NO: 80470 - DNA, 25 bp, Canis familiaris
cccccgtaaactcatgtcatctatt

SEQ ID NO: 80471 - DNA, 25 bp, Canis familiaris
cccccgtaaactcatgtcatctatt

SEQ ID NO: 80472 - DNA, 25 bp, Canis familiaris
cccaccccaaagtaactgccttgtg

SEQ ID NO: 80473 - DNA, 25 bp, Canis familiaris
cccaccccaaagtaactgccttgtg

SEQ ID NO: 80474 - DNA, 25 bp, Canis familiaris
cccaaccctacgtgagatcccaggg

SEQ ID NO: 80475 - DNA, 25 bp, Canis familiaris
cccaaggttacctgcaacgaaatgc

SEQ ID NO: 80476 - DNA, 25 bp, Canis familiaris
cgccacttttccaatacaccagaaa

SEQ ID NO: 80477 - DNA, 25 bp, Canis familiaris
cccactttgacctcaagccagaaaa

SEQ ID NO: 80478 - DNA, 25 bp, Canis familiaris
cccacttctgaatatatatcccaaa

SEQ ID NO: 80479 - DNA, 25 bp, Canis familiaris
cccaccaatggctagataaccctga

SEQ ID NO: 80480 - DNA, 25 bp, Canis familiaris
cccaccagattgctgcaggggccta

SEQ ID NO: 80481 - DNA, 25 bp, Canis familiaris
cccaccttgtgtccaggtggtcctg

SEQ ID NO: 80482 - DNA, 25 bp, Canis familiaris
cgcccatttcagaccggtggtggga

SEQ ID NO: 80483 - DNA, 25 bp, Canis familiaris
cccacctccagcacgaagggggagt

SEQ ID NO: 80484 - DNA, 25 bp, Canis familiaris
cgcctaccgcgcacagaaggagcgc

SEQ ID NO: 80485 - DNA, 25 bp, Canis familiaris
cgcctgagggctcaagtgtggagcc

SEQ ID NO: 80486 - DNA, 25 bp, Canis familiaris
cccaggcaacagcacgtttacacag

SEQ ID NO: 80487 - DNA, 25 bp, Canis familiaris
cccttcagacatcacctttttagaa

SEQ ID NO: 80488 - DNA, 25 bp, Canis familiaris
cccccaactctgtctctaagttatt

SEQ ID NO: 80489 - DNA, 25 bp, Canis familiaris
ccgcctaattgtgttaggtcctttg

SEQ ID NO: 80490 - DNA, 25 bp, Canis familiaris
gcggaaatttgtgtttggacacttg

SEQ ID NO: 80491 - DNA, 25 bp, Canis familiaris
cccaactttgtcgctttacactaga

SEQ ID NO: 80492 - DNA, 25 bp, Canis familiaris
ccaaacctgttcactttccaaagag

SEQ ID NO: 80493 - DNA, 25 bp, Canis familiaris
cccaactctgttaagccttcctggg

SEQ ID NO: 80494 - DNA, 25 bp, Canis familiaris
cccaactctcttgtgttatctcagt

SEQ ID NO: 80495 - DNA, 25 bp, Canis familiaris
cccacagcgtttggtgttgattcga

SEQ ID NO: 80496 - DNA, 25 bp, Canis familiaris
cccaagtgttccagtttcactgagt

SEQ ID NO: 80497 - DNA, 25 bp, Canis familiaris
cccaagtcttcctgcgaaagtcact

SEQ ID NO: 80498 - DNA, 25 bp, Canis familiaris
cccagttcgacttaccgaaatgcct

SEQ ID NO: 80499 - DNA, 25 bp, Canis familiaris
cccagttctagtaaagaccacccat

SEQ ID NO: 80500 - DNA, 25 bp, Canis familiaris
gctcctttacagagggaaacccatt

SEQ ID NO: 80501 - DNA, 25 bp, Canis familiaris
cgcctgatttccaggaaagtcccct

SEQ ID NO: 80502 - DNA, 25 bp, Canis familiaris
cgcgctccttccaggatgaagaggg

SEQ ID NO: 80503 - DNA, 25 bp, Canis familiaris
cgcggctcatttctggagtggaggt

SEQ ID NO: 80504 - DNA, 25 bp, Canis familiaris
cgccgctttcgttggaggtgattgt

SEQ ID NO: 80505 - DNA, 25 bp, Canis familiaris
cgccgctgattcgaggggggaggat

SEQ ID NO: 80506 - DNA, 25 bp, Canis familiaris
cgcgcacgacacgggagcggcgcgg

SEQ ID NO: 80507 - DNA, 25 bp, Canis familiaris
cgctgaggagcccgctgaggagcgg

SEQ ID NO: 80508 - DNA, 25 bp, Canis familiaris
cgcgtggagatccagcgagctggcg

SEQ ID NO: 80509 - DNA, 25 bp, Canis familiaris
cgctggatgatgtgctgcggctgtg

SEQ ID NO: 80510 - DNA, 25 bp, Canis familiaris
cgcgagatatggcccgcgctggagt

SEQ ID NO: 80511 - DNA, 25 bp, Canis familiaris
cgctgagatggatccgctcagggcc

SEQ ID NO: 80512 - DNA, 25 bp, Canis familiaris
cgccagcatggatgtgcggggcgcc

SEQ ID NO: 80513 - DNA, 25 bp, Canis familiaris
cccagaggggactggggcaccctga

SEQ ID NO: 80514 - DNA, 25 bp, Canis familiaris
cccaaggtggagtgggcggcgcttc

SEQ ID NO: 80515 - DNA, 25 bp, Canis familiaris
cgcctgggtggacatgaccggcggc

SEQ ID NO: 80516 - DNA, 25 bp, Canis familiaris
cgccgggctctgattgaccgaatgg

SEQ ID NO: 80517 - DNA, 25 bp, Canis familiaris
cgcctgggcttctggagccaggtga

SEQ ID NO: 80518 - DNA, 25 bp, Canis familiaris
cgcctgagggtcgggcaggaggtgt

SEQ ID NO: 80519 - DNA, 25 bp, Canis familiaris
ccctatgggtccacaagggctccga

SEQ ID NO: 80520 - DNA, 25 bp, Canis familiaris
ccctacgccttcaacggaggtactg

SEQ ID NO: 80521 - DNA, 25 bp, Canis familiaris
cccttccctttctcagaggtaggct

SEQ ID NO: 80522 - DNA, 25 bp, Canis familiaris
ccctcgtaggtatccgaacggtctg

SEQ ID NO: 80523 - DNA, 25 bp, Canis familiaris
cccacggaggtttgtccaacggatg

SEQ ID NO: 80524 - DNA, 25 bp, Canis familiaris
cccacgcaggtgtttttcaacggtg

SEQ ID NO: 80525 - DNA, 25 bp, Canis familiaris
ccctccagatggctttattacctca

SEQ ID NO: 80526 - DNA, 25 bp, Canis familiaris
cgccctctgtggcatgttttggctt

SEQ ID NO: 80527 - DNA, 25 bp, Canis familiaris
cgccccaggctgttgtcaacaggct

SEQ ID NO: 80528 - DNA, 25 bp, Canis familiaris
cgcccgcgagcatatatgcacacgc

SEQ ID NO: 80529 - DNA, 25 bp, Canis familiaris
cgcctctcatgatactcatgccacg

SEQ ID NO: 80530 - DNA, 25 bp, Canis familiaris
cccatgtgtgtgcactgaccatcag

SEQ ID NO: 80531 - DNA, 25 bp, Canis familiaris
cccatacgtcaactgtcagatgatt

SEQ ID NO: 80532 - DNA, 25 bp, Canis familiaris
cgcccacagtgatgatgtcgagatc

SEQ ID NO: 80533 - DNA, 25 bp, Canis familiaris
cgccgccaatgcttgttcaggcacg

SEQ ID NO: 80534 - DNA, 25 bp, Canis familiaris
cgcccgcaagcaggttgtgtctggg

SEQ ID NO: 80535 - DNA, 25 bp, Canis familiaris
cgccccaacagcaggatgattcaat

SEQ ID NO: 80536 - DNA, 25 bp, Canis familiaris
cgcccctgtgcatttggaaatcaat

SEQ ID NO: 80537 - DNA, 25 bp, Canis familiaris
cgcccctctgtagtgccagagactt

SEQ ID NO: 80538 - DNA, 25 bp, Canis familiaris
cgccatcgatcatacgctagtgcct

SEQ ID NO: 80539 - DNA, 25 bp, Canis familiaris
cgcgagcagatacacggaggtgtcg

SEQ ID NO: 80540 - DNA, 25 bp, Canis familiaris
cgcgagcgcaacgccaaggtgggcg

SEQ ID NO: 80541 - DNA, 25 bp, Canis familiaris
cgcgcggaatccgcatacgtcaagc

SEQ ID NO: 80542 - DNA, 25 bp, Canis familiaris
cgccggagatccagtacctgatgga

SEQ ID NO: 80543 - DNA, 25 bp, Canis familiaris
cgcctgtaatcccagctactcggga

SEQ ID NO: 80544 - DNA, 25 bp, Canis familiaris
cgcctgtaatcccagcactttggga

SEQ ID NO: 80545 - DNA, 25 bp, Canis familiaris
cgccctttccttctatgatggatac

SEQ ID NO: 80546 - DNA, 25 bp, Canis familiaris
cgccctgttagtgcttctgaagata

SEQ ID NO: 80547 - DNA, 25 bp, Canis familiaris
cgcgccttatctggtcatgggacag

SEQ ID NO: 80548 - DNA, 25 bp, Canis familiaris
cccactttgcatgttgaggaatgtc

SEQ ID NO: 80549 - DNA, 25 bp, Canis familiaris
cccaatttctcttgtatgagtttcc

SEQ ID NO: 80550 - DNA, 25 bp, Canis familiaris
cccacttgaaccatggagtttccaa

SEQ ID NO: 80551 - DNA, 25 bp, Canis familiaris
cccacttacacgagaggttccatgc

SEQ ID NO: 80552 - DNA, 25 bp, Canis familiaris
cccaagaagggaaggctgtcgccac

SEQ ID NO: 80553 - DNA, 25 bp, Canis familiaris
cccaaaaggcgaagcacgacttgcc

SEQ ID NO: 80554 - DNA, 25 bp, Canis familiaris
cccacagaaccgaagccagatttac

SEQ ID NO: 80555 - DNA, 25 bp, Canis familiaris
cccacagacatatatgagtaatctt

SEQ ID NO: 80556 - DNA, 25 bp, Canis familiaris
cgccctgagccgtatgcagtaggtt

SEQ ID NO: 80557 - DNA, 25 bp, Canis familiaris
cccactgagcctttgcactaattta

SEQ ID NO: 80558 - DNA, 25 bp, Canis familiaris
cccacttcagctttcagttagcctg

SEQ ID NO: 80559 - DNA, 25 bp, Canis familiaris
cgccatctcctctgataaacacgag

SEQ ID NO: 80560 - DNA, 25 bp, Canis familiaris
cctttccatacgttcaatccgagca

SEQ ID NO: 80561 - DNA, 25 bp, Canis familiaris
ccgttgacataccactcagtcacgc

SEQ ID NO: 80562 - DNA, 25 bp, Canis familiaris
cgcctcggagaggcctcagtatcgc

SEQ ID NO: 80563 - DNA, 25 bp, Canis familiaris
cgcccagagagactcaccagagaac

SEQ ID NO: 80564 - DNA, 25 bp, Canis familiaris
ccccagggttccaggacatagtctg

SEQ ID NO: 80565 - DNA, 25 bp, Canis familiaris
cccaaatcgtcatcagggccaagtt

SEQ ID NO: 80566 - DNA, 25 bp, Canis familiaris
cccacaacaaccacatggccaaggt

SEQ ID NO: 80567 - DNA, 25 bp, Canis familiaris
cgccgcggaaccacatgttagaggt

SEQ ID NO: 80568 - DNA, 25 bp, Canis familiaris
cgccgggaccgtacttgatggagcg

SEQ ID NO: 80569 - DNA, 25 bp, Canis familiaris
cgccgaggactggttcttcagcaag

SEQ ID NO: 80570 - DNA, 25 bp, Canis familiaris
cccaaggtcgtgtctcagtatgagc

SEQ ID NO: 80571 - DNA, 25 bp, Canis familiaris
cgcccgaccatgatccaatatggca

SEQ ID NO: 80572 - DNA, 25 bp, Canis familiaris
cgccgtaccggtggcacatagagca

SEQ ID NO: 80573 - DNA, 25 bp, Canis familiaris
cgccaggccacaggtggactcgagt

SEQ ID NO: 80574 - DNA, 25 bp, Canis familiaris
cccagcgcaacaggtgatgccgtga

SEQ ID NO: 80575 - DNA, 25 bp, Canis familiaris
cgccagctcacaaggtgtgtcctgg

SEQ ID NO: 80576 - DNA, 25 bp, Canis familiaris
cgccggagcaagtgcagtccttggt

SEQ ID NO: 80577 - DNA, 25 bp, Canis familiaris
cgccagtaaactaagctccggagct

SEQ ID NO: 80578 - DNA, 25 bp, Canis familiaris
cgccacgaaacacgacgcgcaaggc

SEQ ID NO: 80579 - DNA, 25 bp, Canis familiaris
cgccaaagtgacaggcggcgcggcc

SEQ ID NO: 80580 - DNA, 25 bp, Canis familiaris
cgcctcggtgacgtagggcacaggc

SEQ ID NO: 80581 - DNA, 25 bp, Canis familiaris
cgcccgcgaagcgtagacgatccag

SEQ ID NO: 80582 - DNA, 25 bp, Canis familiaris
cgcccgccaagttcaaaggccagca

SEQ ID NO: 80583 - DNA, 25 bp, Canis familiaris
cccaggctaagtgtacgtgacgcgc

SEQ ID NO: 80584 - DNA, 25 bp, Canis familiaris
cgccaactaagctgaacgccatctc

SEQ ID NO: 80585 - DNA, 25 bp, Canis familiaris
cgccacaattcgggaacaagatgat

SEQ ID NO: 80586 - DNA, 25 bp, Canis familiaris
cccagcaaatagggccccgtcattc

SEQ ID NO: 80587 - DNA, 25 bp, Canis familiaris
cccagaaatcatatgctacttgttt

SEQ ID NO: 80588 - DNA, 25 bp, Canis familiaris
cccaattactggactaatggctttt

SEQ ID NO: 80589 - DNA, 25 bp, Canis familiaris
cccaatcaacggactttccaatgtt

SEQ ID NO: 80590 - DNA, 25 bp, Canis familiaris
cccacaaagtgcttcttattcaggt

SEQ ID NO: 80591 - DNA, 25 bp, Canis familiaris
cccaaggaggatgctgtgttcggct

SEQ ID NO: 80592 - DNA, 25 bp, Canis familiaris
cccaagtgacggggcttgtcatgcc

SEQ ID NO: 80593 - DNA, 25 bp, Canis familiaris
cccaagggcccatgctgttatgccc

SEQ ID NO: 80594 - DNA, 25 bp, Canis familiaris
cgccaacagcaggccaagtttgacg

SEQ ID NO: 80595 - DNA, 25 bp, Canis familiaris
cccaaacccaaagtcagtcactcaa

SEQ ID NO: 80596 - DNA, 25 bp, Canis familiaris
cccaacactaaatctgcagacactc

SEQ ID NO: 80597 - DNA, 25 bp, Canis familiaris
cccaacctaaacctctggacacaag

SEQ ID NO: 80598 - DNA, 25 bp, Canis familiaris
cccaaaaaagacatccgcacacaca

SEQ ID NO: 80599 - DNA, 25 bp, Canis familiaris
ccaattaaaccagtatccactcttc

SEQ ID NO: 80600 - DNA, 25 bp, Canis familiaris
cctattaaaaccatccattttgcca

SEQ ID NO: 80601 - DNA, 25 bp, Canis familiaris
ccctaaaggccacttcctatatctg

SEQ ID NO: 80602 - DNA, 25 bp, Canis familiaris
ccctataattatcgctattccaacg

SEQ ID NO: 80603 - DNA, 25 bp, Canis familiaris
cctaagacacctctttccaaggaga

SEQ ID NO: 80604 - DNA, 25 bp, Canis familiaris
cctcaagaatcccttcgggaatgcc

SEQ ID NO: 80605 - DNA, 25 bp, Canis familiaris
cccaaccatcgcctacaggtgaggc

SEQ ID NO: 80606 - DNA, 25 bp, Canis familiaris
cccaacttcttcaagatggtggagg

SEQ ID NO: 80607 - DNA, 25 bp, Canis familiaris
cccaaggctttgaaggatgtgaagg

SEQ ID NO: 80608 - DNA, 25 bp, Canis familiaris
cgccagaggccaatccgaataaacg

SEQ ID NO: 80609 - DNA, 25 bp, Canis familiaris
cgccaggagctcaccaagaagctga

SEQ ID NO: 80610 - DNA, 25 bp, Canis familiaris
cgccaggagctgcgcaagctgaagc

SEQ ID NO: 80611 - DNA, 25 bp, Canis familiaris
cgccgagggcgaccagatcaatgcc

SEQ ID NO: 80612 - DNA, 25 bp, Canis familiaris
cgcctggagaaacctgccaagtatg

SEQ ID NO: 80613 - DNA, 25 bp, Canis familiaris
cccaatgataaccactgtcactgtt

SEQ ID NO: 80614 - DNA, 25 bp, Canis familiaris
cgccaaggtacatctgtccatttaa

SEQ ID NO: 80615 - DNA, 25 bp, Canis familiaris
cccaatggctccccgagagcattta

SEQ ID NO: 80616 - DNA, 25 bp, Canis familiaris
cccaatgtgtccgtcgtggatctga

SEQ ID NO: 80617 - DNA, 25 bp, Canis familiaris
cgccaatgactctcacatttgtctc

SEQ ID NO: 80618 - DNA, 25 bp, Canis familiaris
cccaataccagtgcatgaggcttct

SEQ ID NO: 80619 - DNA, 25 bp, Canis familiaris
cgccaacaccatgggctacagcttc

SEQ ID NO: 80620 - DNA, 25 bp, Canis familiaris
cgccaacaccatgggctacagcttc

SEQ ID NO: 80621 - DNA, 25 bp, Canis familiaris
cccaatccagatgtctatgatcatt

SEQ ID NO: 80622 - DNA, 25 bp, Canis familiaris
cccagcaacgacctcaatgacagtc

SEQ ID NO: 80623 - DNA, 25 bp, Canis familiaris
cccaacccaagtgtgacattccaaa

SEQ ID NO: 80624 - DNA, 25 bp, Canis familiaris
ccgatacccagatcccaatttcgaa

SEQ ID NO: 80625 - DNA, 25 bp, Canis familiaris
ccgcaattgacaagccccaattttg

SEQ ID NO: 80626 - DNA, 25 bp, Canis familiaris
cccaattcacaaccccaagatagtg

SEQ ID NO: 80627 - DNA, 25 bp, Canis familiaris
ccgactacaacatccagaaggagtc

SEQ ID NO: 80628 - DNA, 25 bp, Canis familiaris
cgcgcactgggacggcgagaaggag

SEQ ID NO: 80629 - DNA, 25 bp, Canis familiaris
cgccccggaggcagctgagggcagt

SEQ ID NO: 80630 - DNA, 25 bp, Canis familiaris
cccacttggaggcccttgtgtagtt

SEQ ID NO: 80631 - DNA, 25 bp, Canis familiaris
gccccttgggaggactttgcaagtc

SEQ ID NO: 80632 - DNA, 25 bp, Canis familiaris
cccatcttgggagggtttcctgtgg

SEQ ID NO: 80633 - DNA, 25 bp, Canis familiaris
cccagttgaggtggggtccttgctc

SEQ ID NO: 80634 - DNA, 25 bp, Canis familiaris
cccagattgaagtgggaccttcttg

SEQ ID NO: 80635 - DNA, 25 bp, Canis familiaris
ccctattatagggggcgtcttcatt

SEQ ID NO: 80636 - DNA, 25 bp, Canis familiaris
cccttcttaggcctcagggctttat

SEQ ID NO: 80637 - DNA, 25 bp, Canis familiaris
cccacgtcgaggcctaaggccactt

SEQ ID NO: 80638 - DNA, 25 bp, Canis familiaris
cccacgggactccgagaggcccgtg

SEQ ID NO: 80639 - DNA, 25 bp, Canis familiaris
cccaatggacatatggagggcccga

SEQ ID NO: 80640 - DNA, 25 bp, Canis familiaris
cccacactgtcacggggaacacgga

SEQ ID NO: 80641 - DNA, 25 bp, Canis familiaris
cccccgaacgagggccagaatggag

SEQ ID NO: 80642 - DNA, 25 bp, Canis familiaris
cccacccaacactggctgagtagag

SEQ ID NO: 80643 - DNA, 25 bp, Canis familiaris
cccagcccagactggacggtacagt

SEQ ID NO: 80644 - DNA, 25 bp, Canis familiaris
cccaacaagcacaaccggctgtaca

SEQ ID NO: 80645 - DNA, 25 bp, Canis familiaris
cccaatatcccaaagggcggcagcc

SEQ ID NO: 80646 - DNA, 25 bp, Canis familiaris
cccacagacccaagaggacggcgac

SEQ ID NO: 80647 - DNA, 25 bp, Canis familiaris
cccaagcacaacatggtgacgagaa

SEQ ID NO: 80648 - DNA, 25 bp, Canis familiaris
cccacagcccaaacgcttagagaaa

SEQ ID NO: 80649 - DNA, 25 bp, Canis familiaris
cccaccccaagcaccatatggaaat

SEQ ID NO: 80650 - DNA, 25 bp, Canis familiaris
cccaccaactctcactttggaacaa

SEQ ID NO: 80651 - DNA, 25 bp, Canis familiaris
cccagggcctggcaccttattaaga

SEQ ID NO: 80652 - DNA, 25 bp, Canis familiaris
ccgaggttcaagcttcattttcaag

SEQ ID NO: 80653 - DNA, 25 bp, Canis familiaris
cgcctggaccagagtttgtttcaag

SEQ ID NO: 80654 - DNA, 25 bp, Canis familiaris
cgccacccgatagttatttttcaag

SEQ ID NO: 80655 - DNA, 25 bp, Canis familiaris
ccctctcgagattttattccctgaa

SEQ ID NO: 80656 - DNA, 25 bp, Canis familiaris
cccacgaattccatatcccggaaag

SEQ ID NO: 80657 - DNA, 25 bp, Canis familiaris
cccacgaaagccgttgccaggggca

SEQ ID NO: 80658 - DNA, 25 bp, Canis familiaris
cccacgaaacccgtacaaatcatgc

SEQ ID NO: 80659 - DNA, 25 bp, Canis familiaris
cccaaacatcctgactaccagacac

SEQ ID NO: 80660 - DNA, 25 bp, Canis familiaris
cccagatgggcctcattactagact

SEQ ID NO: 80661 - DNA, 25 bp, Canis familiaris
cccaagtgtccatccatacatgaat

SEQ ID NO: 80662 - DNA, 25 bp, Canis familiaris
cgcccaagtcgcattcaacataatg

SEQ ID NO: 80663 - DNA, 25 bp, Canis familiaris
cgcccagacttcaataaaacgtgct

SEQ ID NO: 80664 - DNA, 25 bp, Canis familiaris
cgcccagacttcaataaaacgtgct

SEQ ID NO: 80665 - DNA, 25 bp, Canis familiaris
cgcccatgctttcgtaataatcttc

SEQ ID NO: 80666 - DNA, 25 bp, Canis familiaris
cgcccagccggaggaagtcatctcc

SEQ ID NO: 80667 - DNA, 25 bp, Canis familiaris
cgccctcgcagggatgagattctcg

SEQ ID NO: 80668 - DNA, 25 bp, Canis familiaris
cgccgtcgcgatgtgtgatttcacc

SEQ ID NO: 80669 - DNA, 25 bp, Canis familiaris
cgcgcgctacgagcagtatttcggc

SEQ ID NO: 80670 - DNA, 25 bp, Canis familiaris
cgccctagcgagactgtcatcagtc

SEQ ID NO: 80671 - DNA, 25 bp, Canis familiaris
cgcctctgaagacgcgtctcaggag

SEQ ID NO: 80672 - DNA, 25 bp, Canis familiaris
cgcccttcatgactgaggccagaag

SEQ ID NO: 80673 - DNA, 25 bp, Canis familiaris
cgccctcgcgagtcatggagatgaa

SEQ ID NO: 80674 - DNA, 25 bp, Canis familiaris
cgccctctgtgtctgtggatgaagg

SEQ ID NO: 80675 - DNA, 25 bp, Canis familiaris
cgcgcctgctgggagaggggagggg

SEQ ID NO: 80676 - DNA, 25 bp, Canis familiaris
cgcgcggcaggggcaggaaaggggt

SEQ ID NO: 80677 - DNA, 25 bp, Canis familiaris
cgccggagtgcggcagggcacagga

SEQ ID NO: 80678 - DNA, 25 bp, Canis familiaris
cgccggcatgtggctgtgggaggaa

SEQ ID NO: 80679 - DNA, 25 bp, Canis familiaris
cgccgcagcagaggcatggtccaga

SEQ ID NO: 80680 - DNA, 25 bp, Canis familiaris
cgccgcacatcatcagcgcgcaaga

SEQ ID NO: 80681 - DNA, 25 bp, Canis familiaris
cgccccaatgtccagctgaagaatg

SEQ ID NO: 80682 - DNA, 25 bp, Canis familiaris
cgccccattgagcgcgcaatggtcg

SEQ ID NO: 80683 - DNA, 25 bp, Canis familiaris
cgccccatgtactcgagtgatgtgc

SEQ ID NO: 80684 - DNA, 25 bp, Canis familiaris
cgcctccagaacgcaggtgctggcg

SEQ ID NO: 80685 - DNA, 25 bp, Canis familiaris
cctcttcagaaaccagttggccctg

SEQ ID NO: 80686 - DNA, 25 bp, Canis familiaris
cccagccaaaaccagcaaggcccat

SEQ ID NO: 80687 - DNA, 25 bp, Canis familiaris
cccacacaacaacacaatccacttg

SEQ ID NO: 80688 - DNA, 25 bp, Canis familiaris
cccaacacaattctaatctcttctc

SEQ ID NO: 80689 - DNA, 25 bp, Canis familiaris
cccaccaggattgtgaaacttccag

SEQ ID NO: 80690 - DNA, 25 bp, Canis familiaris
cccactgcagtaaacaggcaacctt

SEQ ID NO: 80691 - DNA, 25 bp, Canis familiaris
cgcctctcctcaacaaagcaaatta

SEQ ID NO: 80692 - DNA, 25 bp, Canis familiaris
cgcgctctccttccaatataaggtc

SEQ ID NO: 80693 - DNA, 25 bp, Canis familiaris
cgcctcttgatgcccagtaggggtc

SEQ ID NO: 80694 - DNA, 25 bp, Canis familiaris
cccactggctggggtacaggggagt

SEQ ID NO: 80695 - DNA, 25 bp, Canis familiaris
cccacattcaggtgtcccttaacat

SEQ ID NO: 80696 - DNA, 25 bp, Canis familiaris
cccaccctggggacccagtgtacat

SEQ ID NO: 80697 - DNA, 25 bp, Canis familiaris
cccaaagttggaccccatcagtaag

SEQ ID NO: 80698 - DNA, 25 bp, Canis familiaris
cgcgcaagagggcagaccgatagaa

SEQ ID NO: 80699 - DNA, 25 bp, Canis familiaris
cgcccatgcctgggaaggtgataga

SEQ ID NO: 80700 - DNA, 25 bp, Canis familiaris
cgccctgctcgaggctaggagagag

SEQ ID NO: 80701 - DNA, 25 bp, Canis familiaris
cgcctgctcctggagtacacggact

SEQ ID NO: 80702 - DNA, 25 bp, Canis familiaris
cgcctgctcacagagatccatgggg

SEQ ID NO: 80703 - DNA, 25 bp, Canis familiaris
cgccatcaagttcgtgctcagcggg

SEQ ID NO: 80704 - DNA, 25 bp, Canis familiaris
cgcctatgacctggtgctagctgag

SEQ ID NO: 80705 - DNA, 25 bp, Canis familiaris
cgcctacgacatggtgctggtggag

SEQ ID NO: 80706 - DNA, 25 bp, Canis familiaris
cgccagccgacaagccggaggagaa

SEQ ID NO: 80707 - DNA, 25 bp, Canis familiaris
cgccaccgagaacggacacgaggcc

SEQ ID NO: 80708 - DNA, 25 bp, Canis familiaris
cgcctactaggccggaacagagaac

SEQ ID NO: 80709 - DNA, 25 bp, Canis familiaris
cgcgctacatcagcacggagctggg

SEQ ID NO: 80710 - DNA, 25 bp, Canis familiaris
cgcgctgcacgtgaagcggcgcgcg

SEQ ID NO: 80711 - DNA, 25 bp, Canis familiaris
cgcgctggcgttacagcgcaacagc

SEQ ID NO: 80712 - DNA, 25 bp, Canis familiaris
cgcctgggcatgttcgacatccagc

SEQ ID NO: 80713 - DNA, 25 bp, Canis familiaris
cgccggcgtggaagacagcagccag

SEQ ID NO: 80714 - DNA, 25 bp, Canis familiaris
cgccccgctgtatgatgcacagccg

SEQ ID NO: 80715 - DNA, 25 bp, Canis familiaris
cgccaatgcttgttcaggcacgcca

SEQ ID NO: 80716 - DNA, 25 bp, Canis familiaris
cccactgtggattatctcacgctga

SEQ ID NO: 80717 - DNA, 25 bp, Canis familiaris
cccactgttgagttttcctgacttg

SEQ ID NO: 80718 - DNA, 25 bp, Canis familiaris
cccactgttgtatacgcttattgag

SEQ ID NO: 80719 - DNA, 25 bp, Canis familiaris
cccacttctccatcaggttctggag

SEQ ID NO: 80720 - DNA, 25 bp, Canis familiaris
cccacttgcccacagagctatgtgg

SEQ ID NO: 80721 - DNA, 25 bp, Canis familiaris
cccagcattgcccagaggacatttt

SEQ ID NO: 80722 - DNA, 25 bp, Canis familiaris
cccagcctgccactgatgcagatgc

SEQ ID NO: 80723 - DNA, 25 bp, Canis familiaris
cgccaggcccagcagcagagcctgg

SEQ ID NO: 80724 - DNA, 25 bp, Canis familiaris
cccagtcctcagaccaaacggatca

SEQ ID NO: 80725 - DNA, 25 bp, Canis familiaris
cccagttcatcgacgagaacccaga

SEQ ID NO: 80726 - DNA, 25 bp, Canis familiaris
cccgtttaaagaagacgctcgcaga

SEQ ID NO: 80727 - DNA, 25 bp, Canis familiaris
ccctttctagggggagcctacagct

SEQ ID NO: 80728 - DNA, 25 bp, Canis familiaris
cctttggcaatgtccgtaccaacca

SEQ ID NO: 80729 - DNA, 25 bp, Canis familiaris
cctttggccagatcttcaggcccga

SEQ ID NO: 80730 - DNA, 25 bp, Canis familiaris
cgcctcgtacaaacttaggctccaa

SEQ ID NO: 80731 - DNA, 25 bp, Canis familiaris
cgcctctaacatctctcgaggtcgc

SEQ ID NO: 80732 - DNA, 25 bp, Canis familiaris
cgccctattctttctagcagagtac

SEQ ID NO: 80733 - DNA, 25 bp, Canis familiaris
cgcctctgatttcttagcacatttc

SEQ ID NO: 80734 - DNA, 25 bp, Canis familiaris
cgcctcttcattctgttagttttcg

SEQ ID NO: 80735 - DNA, 25 bp, Canis familiaris
cgcctttcattctgttcgatttaca

SEQ ID NO: 80736 - DNA, 25 bp, Canis familiaris
cccttatactctgtgattatcccca

SEQ ID NO: 80737 - DNA, 25 bp, Canis familiaris
cccactatatttatgtttgccccaa

SEQ ID NO: 80738 - DNA, 25 bp, Canis familiaris
cctcaatttttccggttgatgtccg

SEQ ID NO: 80739 - DNA, 25 bp, Canis familiaris
cccaagtgttttcagtcgtgcaccg

SEQ ID NO: 80740 - DNA, 25 bp, Canis familiaris
cccacagtggtaagtcaccgggtcg

SEQ ID NO: 80741 - DNA, 25 bp, Canis familiaris
cccagcaaggtcgtgccaacgtggg

SEQ ID NO: 80742 - DNA, 25 bp, Canis familiaris
cccaaatctgtcctccaacaaaagt

SEQ ID NO: 80743 - DNA, 25 bp, Canis familiaris
cccagcgagcgttcccaagaagaac

SEQ ID NO: 80744 - DNA, 25 bp, Canis familiaris
cccaggacggactccagaagttctg

SEQ ID NO: 80745 - DNA, 25 bp, Canis familiaris
cccacggcgagagccgacgagtttc

SEQ ID NO: 80746 - DNA, 25 bp, Canis familiaris
cccacggtcaacgagcaacggtgta

SEQ ID NO: 80747 - DNA, 25 bp, Canis familiaris
cgccacgagatctggtgtcacgcgc

SEQ ID NO: 80748 - DNA, 25 bp, Canis familiaris
cgcgccgagctcgagaggacggagc

SEQ ID NO: 80749 - DNA, 25 bp, Canis familiaris
cgcccaggcccaggagcagctgggc

SEQ ID NO: 80750 - DNA, 25 bp, Canis familiaris
cgcccaggcctgccaggatgcaggg

SEQ ID NO: 80751 - DNA, 25 bp, Canis familiaris
cgccgcagccaatcggagcgggagg

SEQ ID NO: 80752 - DNA, 25 bp, Canis familiaris
cgccctgcccgagggcagcaaggac

SEQ ID NO: 80753 - DNA, 25 bp, Canis familiaris
ccccatacctagagccagcaggttc

SEQ ID NO: 80754 - DNA, 25 bp, Canis familiaris
cccaactcctggagccagcagatgc

SEQ ID NO: 80755 - DNA, 25 bp, Canis familiaris
ccgagccgcctggataccgcagcta

SEQ ID NO: 80756 - DNA, 25 bp, Canis familiaris
cccactccacatgcatgcacgtggt

SEQ ID NO: 80757 - DNA, 25 bp, Canis familiaris
cgccagcttgccgcaactgggaaga

SEQ ID NO: 80758 - DNA, 25 bp, Canis familiaris
cgccagtatgccacacacagtgaaa

SEQ ID NO: 80759 - DNA, 25 bp, Canis familiaris
cgccagttgtgcacttttacaagcc

SEQ ID NO: 80760 - DNA, 25 bp, Canis familiaris
cccaagttgttcattgccacacagg

SEQ ID NO: 80761 - DNA, 25 bp, Canis familiaris
cccacgtacattacctgttcaaact

SEQ ID NO: 80762 - DNA, 25 bp, Canis familiaris
cccacttaatatcacttgctcaaat

SEQ ID NO: 80763 - DNA, 25 bp, Canis familiaris
cccacttaataatcagtgctctcat

SEQ ID NO: 80764 - DNA, 25 bp, Canis familiaris
cccagttagaaccacagtctctcac

SEQ ID NO: 80765 - DNA, 25 bp, Canis familiaris
cccagttaacctacagagtcgcacg

SEQ ID NO: 80766 - DNA, 25 bp, Canis familiaris
gcgctagttgtagataacggctccg

SEQ ID NO: 80767 - DNA, 25 bp, Canis familiaris
cccaatttaaattactgcaccgcgg

SEQ ID NO: 80768 - DNA, 25 bp, Canis familiaris
cccaacgccaaattttgctccggtg

SEQ ID NO: 80769 - DNA, 25 bp, Canis familiaris
ccgcaacccaaaaaatgacacggtg

SEQ ID NO: 80770 - DNA, 25 bp, Canis familiaris
cccaaaccctcaaggatggcctggt

SEQ ID NO: 80771 - DNA, 25 bp, Canis familiaris
cccaaagtacacagatcaggacggc

SEQ ID NO: 80772 - DNA, 25 bp, Canis familiaris
cccaattgttcctctggcagacggg

SEQ ID NO: 80773 - DNA, 25 bp, Canis familiaris
cgccaaggttactacgcggagcgag

SEQ ID NO: 80774 - DNA, 25 bp, Canis familiaris
cccaacacctactacgagggcggct

SEQ ID NO: 80775 - DNA, 25 bp, Canis familiaris
cgccgacccagacggctgaaggggt

SEQ ID NO: 80776 - DNA, 25 bp, Canis familiaris
cgcccacgaagcggagctggagagg

SEQ ID NO: 80777 - DNA, 25 bp, Canis familiaris
cccacattggacggatgtgagggtt

SEQ ID NO: 80778 - DNA, 25 bp, Canis familiaris
cgccgcctgcgaggagatgctgcgg

SEQ ID NO: 80779 - DNA, 25 bp, Canis familiaris
cgccagcctctatttgtctgtgaaa

SEQ ID NO: 80780 - DNA, 25 bp, Canis familiaris
cgccaccattgacttcatcttgaag

SEQ ID NO: 80781 - DNA, 25 bp, Canis familiaris
cgccccactggaacataggatgggc

SEQ ID NO: 80782 - DNA, 25 bp, Canis familiaris
cgccccctggacatatcgatgggcc

SEQ ID NO: 80783 - DNA, 25 bp, Canis familiaris
cccatcctctgttaaatccgggcct

SEQ ID NO: 80784 - DNA, 25 bp, Canis familiaris
cccactctattgtcaaagtagggca

SEQ ID NO: 80785 - DNA, 25 bp, Canis familiaris
cgcctctctacgcaaagcagaacgc

SEQ ID NO: 80786 - DNA, 25 bp, Canis familiaris
cgcccgtagcagagaactaatcgag

SEQ ID NO: 80787 - DNA, 25 bp, Canis familiaris
cctgcccaactacacctaacaaggg

SEQ ID NO: 80788 - DNA, 25 bp, Canis familiaris
cccacctggcttgtcctaacaaggg

SEQ ID NO: 80789 - DNA, 25 bp, Canis familiaris
cccacctggctgtgccttaattgtg

SEQ ID NO: 80790 - DNA, 25 bp, Canis familiaris
cccaagctgaggggccttttgtgcg

SEQ ID NO: 80791 - DNA, 25 bp, Canis familiaris
cccaagtgagggctctggagttcgg

SEQ ID NO: 80792 - DNA, 25 bp, Canis familiaris
cccaaggatgggggctcagggccgg

SEQ ID NO: 80793 - DNA, 25 bp, Canis familiaris
cccaggaagcggctcaagcggccgg

SEQ ID NO: 80794 - DNA, 25 bp, Canis familiaris
cccagggactggcattagcatgaaa

SEQ ID NO: 80795 - DNA, 25 bp, Canis familiaris
cgccagggtctgctttgtggaacag

SEQ ID NO: 80796 - DNA, 25 bp, Canis familiaris
cgccagagggccatcctgtataaac

SEQ ID NO: 80797 - DNA, 25 bp, Canis familiaris
cccagcgggcacaccaggaaaagta

SEQ ID NO: 80798 - DNA, 25 bp, Canis familiaris
cccactgggccttcaaggtgaacaa

SEQ ID NO: 80799 - DNA, 25 bp, Canis familiaris
cccctggggaactgggttcctcatg

SEQ ID NO: 80800 - DNA, 25 bp, Canis familiaris
cgccctggggaatgaagggatcgct

SEQ ID NO: 80801 - DNA, 25 bp, Canis familiaris
cccactcggagcttcgtggtggacg

SEQ ID NO: 80802 - DNA, 25 bp, Canis familiaris
cccagccgtatcttttggcggacag

SEQ ID NO: 80803 - DNA, 25 bp, Canis familiaris
cccagccgtatcttttggcggacag

SEQ ID NO: 80804 - DNA, 25 bp, Canis familiaris
cccagccgtatcttttggcggacag

SEQ ID NO: 80805 - DNA, 25 bp, Canis familiaris
cccagccgtatcttttggcggacag

SEQ ID NO: 80806 - DNA, 25 bp, Canis familiaris
cccaagagtacctttgtgtggacga

SEQ ID NO: 80807 - DNA, 25 bp, Canis familiaris
cgcctagttacctatctttgaaagg

SEQ ID NO: 80808 - DNA, 25 bp, Canis familiaris
cgcccatggttcgagactttcaacc

SEQ ID NO: 80809 - DNA, 25 bp, Canis familiaris
ccccaccttcggatttgaagccgct

SEQ ID NO: 80810 - DNA, 25 bp, Canis familiaris
ccctccgattttctgtaagacctct

SEQ ID NO: 80811 - DNA, 25 bp, Canis familiaris
cccaccagtttctcgtgtagtcttt

SEQ ID NO: 80812 - DNA, 25 bp, Canis familiaris
cccactagtcttatcctgataggga

SEQ ID NO: 80813 - DNA, 25 bp, Canis familiaris
cccaaagctcttcttccttaggaga

SEQ ID NO: 80814 - DNA, 25 bp, Canis familiaris
cgccacaagccagttatccctgtgg

SEQ ID NO: 80815 - DNA, 25 bp, Canis familiaris
cccacccacaataataccaaggaat

SEQ ID NO: 80816 - DNA, 25 bp, Canis familiaris
cccagcccccttgaagaaagcaatt

SEQ ID NO: 80817 - DNA, 25 bp, Canis familiaris
cgccaccccttgaccaagaagagat

SEQ ID NO: 80818 - DNA, 25 bp, Canis familiaris
cgccccgatgtttaccagaagtgat

SEQ ID NO: 80819 - DNA, 25 bp, Canis familiaris
cgcctcccagttctgagcgagagga

SEQ ID NO: 80820 - DNA, 25 bp, Canis familiaris
cgcccccagattctagggacacatt

SEQ ID NO: 80821 - DNA, 25 bp, Canis familiaris
cccacccgttaatagcaacacctga

SEQ ID NO: 80822 - DNA, 25 bp, Canis familiaris
cccagcccaaccaaaagcattacca

SEQ ID NO: 80823 - DNA, 25 bp, Canis familiaris
cccaagccctccaaagagctgaaac

SEQ ID NO: 80824 - DNA, 25 bp, Canis familiaris
cccacatggcctccaaggagtaaga

SEQ ID NO: 80825 - DNA, 25 bp, Canis familiaris
cccaagtggcccaagtggaacgtgg

SEQ ID NO: 80826 - DNA, 25 bp, Canis familiaris
cccaactggccacagcgttaagtaa

SEQ ID NO: 80827 - DNA, 25 bp, Canis familiaris
caaattgcattagtttctttagaat

SEQ ID NO: 80828 - DNA, 25 bp, Canis familiaris
cccacctgtggagaagcccaaggcc

SEQ ID NO: 80829 - DNA, 25 bp, Canis familiaris
cccaggggggcatcatacctaggcc

SEQ ID NO: 80830 - DNA, 25 bp, Canis familiaris
cccacgggctgggacatccccgtgg

SEQ ID NO: 80831 - DNA, 25 bp, Canis familiaris
cccacgggctgggacatccccgtgg

SEQ ID NO: 80832 - DNA, 25 bp, Canis familiaris
cccaaatcctggccacacaaggggg

SEQ ID NO: 80833 - DNA, 25 bp, Canis familiaris
cccaacccttgccaggcagggtggt

SEQ ID NO: 80834 - DNA, 25 bp, Canis familiaris
cccacacccttggtggagcttgagg

SEQ ID NO: 80835 - DNA, 25 bp, Canis familiaris
cccacattccttatggcacgttgtg

SEQ ID NO: 80836 - DNA, 25 bp, Canis familiaris
cccagacttgtgtggccacgttgga

SEQ ID NO: 80837 - DNA, 25 bp, Canis familiaris
cccagacttggccctggaagcttgg

SEQ ID NO: 80838 - DNA, 25 bp, Canis familiaris
cccagactggccacattaatgttca

SEQ ID NO: 80839 - DNA, 25 bp, Canis familiaris
cgccagttgcccaacactaaatctg

SEQ ID NO: 80840 - DNA, 25 bp, Canis familiaris
cgccgtgtgccagacatcacagagt

SEQ ID NO: 80841 - DNA, 25 bp, Canis familiaris
cgcctgttcttttctgaagcactga

SEQ ID NO: 80842 - DNA, 25 bp, Canis familiaris
cccagcatccctatatgaagccatg

SEQ ID NO: 80843 - DNA, 25 bp, Canis familiaris
cccactccggaaggacctagttctg

SEQ ID NO: 80844 - DNA, 25 bp, Canis familiaris
cccacctcgggtgacagttgtgatc

SEQ ID NO: 80845 - DNA, 25 bp, Canis familiaris
cgccactccgggacaagctggcgga

SEQ ID NO: 80846 - DNA, 25 bp, Canis familiaris
cccactgcttcagggcaagggggat

SEQ ID NO: 80847 - DNA, 25 bp, Canis familiaris
cgccaagttccggcgagtggcgcgc

SEQ ID NO: 80848 - DNA, 25 bp, Canis familiaris
cgcctggttcctgcgagcatcaggc

SEQ ID NO: 80849 - DNA, 25 bp, Canis familiaris
cgcctgtgggccttctgaagggcac

SEQ ID NO: 80850 - DNA, 25 bp, Canis familiaris
cgcctggaccctctacaggagatac

SEQ ID NO: 80851 - DNA, 25 bp, Canis familiaris
cgccgtggccgtggtgaagcggaac

SEQ ID NO: 80852 - DNA, 25 bp, Canis familiaris
cgccgtggccgtggtgaagcggaac

SEQ ID NO: 80853 - DNA, 25 bp, Canis familiaris
cgcctaggccgtggttggctaagca

SEQ ID NO: 80854 - DNA, 25 bp, Canis familiaris
ccataaacctttctgagtcattgca

SEQ ID NO: 80855 - DNA, 25 bp, Canis familiaris
cccacacactctcttctgaggattt

SEQ ID NO: 80856 - DNA, 25 bp, Canis familiaris
cgccgctattctgttctagcagagt

SEQ ID NO: 80857 - DNA, 25 bp, Canis familiaris
cgcctgctacacgttgctgtaagtg

SEQ ID NO: 80858 - DNA, 25 bp, Canis familiaris
cgcctctctcccttctggagagact

SEQ ID NO: 80859 - DNA, 25 bp, Canis familiaris
cgccttcccacattcgcaggaagat

SEQ ID NO: 80860 - DNA, 25 bp, Canis familiaris
cgcctccctatctcagagagaaggc

SEQ ID NO: 80861 - DNA, 25 bp, Canis familiaris
cccaccctgataaagagagatggaa

SEQ ID NO: 80862 - DNA, 25 bp, Canis familiaris
cccactgcctgaatgactgcactga

SEQ ID NO: 80863 - DNA, 25 bp, Canis familiaris
cccactgacatgtacattcatctgc

SEQ ID NO: 80864 - DNA, 25 bp, Canis familiaris
cccactcacatttcaaacccagaac

SEQ ID NO: 80865 - DNA, 25 bp, Canis familiaris
cgccgaacatgttgcttaccgcacc

SEQ ID NO: 80866 - DNA, 25 bp, Canis familiaris
cccagacacagttctgggccccgag

SEQ ID NO: 80867 - DNA, 25 bp, Canis familiaris
cccagaagactgtggatggcccctc

SEQ ID NO: 80868 - DNA, 25 bp, Canis familiaris
cccagaagactgtggatggcccctc

SEQ ID NO: 80869 - DNA, 25 bp, Canis familiaris
cccaagttgctgttaatgcccacca

SEQ ID NO: 80870 - DNA, 25 bp, Canis familiaris
cccaatggtggcgtgatggcccagc

SEQ ID NO: 80871 - DNA, 25 bp, Canis familiaris
cccagacggatcggaatgccaacgg

SEQ ID NO: 80872 - DNA, 25 bp, Canis familiaris
cccagcactttgggaggccgaggtg

SEQ ID NO: 80873 - DNA, 25 bp, Canis familiaris
cccatacgtctgactgaggacgggt

SEQ ID NO: 80874 - DNA, 25 bp, Canis familiaris
cccataaatataccttgcattaaaa

SEQ ID NO: 80875 - DNA, 25 bp, Canis familiaris
cccacaagacaaccctgagacagag

SEQ ID NO: 80876 - DNA, 25 bp, Canis familiaris
cgccaagagaccccggagaggagag

SEQ ID NO: 80877 - DNA, 25 bp, Canis familiaris
cccacaagaggcgcgcgggagagag

SEQ ID NO: 80878 - DNA, 25 bp, Canis familiaris
cccacaaaggccccagtgtagaggc

SEQ ID NO: 80879 - DNA, 25 bp, Canis familiaris
cccaccaaggccccagtgtagaggc

SEQ ID NO: 80880 - DNA, 25 bp, Canis familiaris
cccacctggcctaccaatgtggggc

SEQ ID NO: 80881 - DNA, 25 bp, Canis familiaris
cccacttgggccccatgtgtggggg

SEQ ID NO: 80882 - DNA, 25 bp, Canis familiaris
cccagcctgggtgcctggaagaggg

SEQ ID NO: 80883 - DNA, 25 bp, Canis familiaris
cccaagcggggctcaggcaaggatg

SEQ ID NO: 80884 - DNA, 25 bp, Canis familiaris
cccagcgggtggtgagtgcacgggc

SEQ ID NO: 80885 - DNA, 25 bp, Canis familiaris
cccagggctgctgcaggaggcctgg

SEQ ID NO: 80886 - DNA, 25 bp, Canis familiaris
cgccgaggatgtgagtcctgctcgc

SEQ ID NO: 80887 - DNA, 25 bp, Canis familiaris
cccacagaagctgatgtcacgtccc

SEQ ID NO: 80888 - DNA, 25 bp, Canis familiaris
cccacagaggcccttcagggcagcc

SEQ ID NO: 80889 - DNA, 25 bp, Canis familiaris
ccctcatgtgccagtttgggctgcc

SEQ ID NO: 80890 - DNA, 25 bp, Canis familiaris
cgcctgcaggccagatgttgggtta

SEQ ID NO: 80891 - DNA, 25 bp, Canis familiaris
cgcctgagtgccagattggcaggtg

SEQ ID NO: 80892 - DNA, 25 bp, Canis familiaris
cgcctgggcagatgttgtcttgtgt

SEQ ID NO: 80893 - DNA, 25 bp, Canis familiaris
cgccgagagcgatgggcatctctcg

SEQ ID NO: 80894 - DNA, 25 bp, Canis familiaris
cgcctgcacaggtggagttctagct

SEQ ID NO: 80895 - DNA, 25 bp, Canis familiaris
cgcctgcacctgggtgtttggagcc

SEQ ID NO: 80896 - DNA, 25 bp, Canis familiaris
cccagaactcaggctttttactcct

SEQ ID NO: 80897 - DNA, 25 bp, Canis familiaris
cccaaattcagtttcttttcatctc

SEQ ID NO: 80898 - DNA, 25 bp, Canis familiaris
ccctaactcagcctactttatagca

SEQ ID NO: 80899 - DNA, 25 bp, Canis familiaris
cgccaaactcaacatcttcttcaag

SEQ ID NO: 80900 - DNA, 25 bp, Canis familiaris
cccaaagatccgaatctcctaaagg

SEQ ID NO: 80901 - DNA, 25 bp, Canis familiaris
cccaagagactctaacacctacacg

SEQ ID NO: 80902 - DNA, 25 bp, Canis familiaris
cccaaggcacaaaagcccagagcac

SEQ ID NO: 80903 - DNA, 25 bp, Canis familiaris
cccaaggccaaggccacaggctcaa

SEQ ID NO: 80904 - DNA, 25 bp, Canis familiaris
cgcctctggccgtaccactggcatc

SEQ ID NO: 80905 - DNA, 25 bp, Canis familiaris
cgccactgacaccaagaacgtgcag

SEQ ID NO: 80906 - DNA, 25 bp, Canis familiaris
cgccaccaccaatgctgcagtgtgg

SEQ ID NO: 80907 - DNA, 25 bp, Canis familiaris
cgccaccccaatttcctggtggtgg

SEQ ID NO: 80908 - DNA, 25 bp, Canis familiaris
cccagccccaaccttgctggggtga

SEQ ID NO: 80909 - DNA, 25 bp, Canis familiaris
ccgacagccctagtttgggggtgcg

SEQ ID NO: 80910 - DNA, 25 bp, Canis familiaris
cccacccctactgtggttggttgag

SEQ ID NO: 80911 - DNA, 25 bp, Canis familiaris
cccaacccctcctgtgtgtggttgg

SEQ ID NO: 80912 - DNA, 25 bp, Canis familiaris
cccacccccatggctggggtggttg

SEQ ID NO: 80913 - DNA, 25 bp, Canis familiaris
cccacttcccatgctcagggtgggt

SEQ ID NO: 80914 - DNA, 25 bp, Canis familiaris
cccacgtgtcctgtcacgttggagt

SEQ ID NO: 80915 - DNA, 25 bp, Canis familiaris
cccagcaattgcctctttagttgga

SEQ ID NO: 80916 - DNA, 25 bp, Canis familiaris
cccacgtctcactaattcgtctgag

SEQ ID NO: 80917 - DNA, 25 bp, Canis familiaris
cccagcgactaccagattcgtctag

SEQ ID NO: 80918 - DNA, 25 bp, Canis familiaris
cccagcggctcctgaagcgtggaga

SEQ ID NO: 80919 - DNA, 25 bp, Canis familiaris
cccacggctgaactcacggtgatga

SEQ ID NO: 80920 - DNA, 25 bp, Canis familiaris
cccacggggcagccacaggatggca

SEQ ID NO: 80921 - DNA, 25 bp, Canis familiaris
cccagggggcagcagtgaggacaag

SEQ ID NO: 80922 - DNA, 25 bp, Canis familiaris
cgccaggacgacgcaggcatgtaca

SEQ ID NO: 80923 - DNA, 25 bp, Canis familiaris
cccaacacgcactgggcgtacaaca

SEQ ID NO: 80924 - DNA, 25 bp, Canis familiaris
cccagtcaccattcggtggctacaa

SEQ ID NO: 80925 - DNA, 25 bp, Canis familiaris
cccagtgcaccaactgcgtgcagga

SEQ ID NO: 80926 - DNA, 25 bp, Canis familiaris
cccaatacacatcctgcattcaatg

SEQ ID NO: 80927 - DNA, 25 bp, Canis familiaris
cccaatccacgagtcatcatcttga

SEQ ID NO: 80928 - DNA, 25 bp, Canis familiaris
cccagcatccataagccatgtttcc

SEQ ID NO: 80929 - DNA, 25 bp, Canis familiaris
cccacatgcacgcatgcacggtcga

SEQ ID NO: 80930 - DNA, 25 bp, Canis familiaris
cccagacacggtcgctggaccaaaa

SEQ ID NO: 80931 - DNA, 25 bp, Canis familiaris
ccgaaccgagtagggacgggcagag

SEQ ID NO: 80932 - DNA, 25 bp, Canis familiaris
cccacggcggcgaggacgtggcggt

SEQ ID NO: 80933 - DNA, 25 bp, Canis familiaris
cccacccccgatgtatcagttgtgg

SEQ ID NO: 80934 - DNA, 25 bp, Canis familiaris
cccacaccccttattaggctgtggt

SEQ ID NO: 80935 - DNA, 25 bp, Canis familiaris
cccacccctcacagtttaggtagtg

SEQ ID NO: 80936 - DNA, 25 bp, Canis familiaris
cccacctcactcttaggtaaggttg

SEQ ID NO: 80937 - DNA, 25 bp, Canis familiaris
cccacctcattctggggctagggtg

SEQ ID NO: 80938 - DNA, 25 bp, Canis familiaris
cccactgtctttagggagaacagag

SEQ ID NO: 80939 - DNA, 25 bp, Canis familiaris
cccacggccatgtgaaaaagcaccc

SEQ ID NO: 80940 - DNA, 25 bp, Canis familiaris
cccacgcaacgagaagaaacacaga

SEQ ID NO: 80941 - DNA, 25 bp, Canis familiaris
cccactcccaaggctaaaactcaga

SEQ ID NO: 80942 - DNA, 25 bp, Canis familiaris
cccacactgctaagactacccagtc

SEQ ID NO: 80943 - DNA, 25 bp, Canis familiaris
cgccaccatggaggagtaccacagg

SEQ ID NO: 80944 - DNA, 25 bp, Canis familiaris
cgccaggctggaggcagtgtgccga

SEQ ID NO: 80945 - DNA, 25 bp, Canis familiaris
cgccagatgcggtgcaatggaagag

SEQ ID NO: 80946 - DNA, 25 bp, Canis familiaris
cgcctcatgtggtgcctggacaggc

SEQ ID NO: 80947 - DNA, 25 bp, Canis familiaris
cccactagatgctgcctggcaagga

SEQ ID NO: 80948 - DNA, 25 bp, Canis familiaris
cccactgagatgtgcaatgctgaag

SEQ ID NO: 80949 - DNA, 25 bp, Canis familiaris
cccacctgatcaccaatctgaggga

SEQ ID NO: 80950 - DNA, 25 bp, Canis familiaris
cccaccagtgcccacaatgggtcag

SEQ ID NO: 80951 - DNA, 25 bp, Canis familiaris
cccaccaagtgcccacatgggtcag

SEQ ID NO: 80952 - DNA, 25 bp, Canis familiaris
cccagctgctcaggtacacagggtc

SEQ ID NO: 80953 - DNA, 25 bp, Canis familiaris
cccacgcccaggacaagaagatctc

SEQ ID NO: 80954 - DNA, 25 bp, Canis familiaris
cccacgcctctgtgacaggaactgt

SEQ ID NO: 80955 - DNA, 25 bp, Canis familiaris
cccaactctcgctgattgacaatcg

SEQ ID NO: 80956 - DNA, 25 bp, Canis familiaris
cccaacatgtccttgagtctcatat

SEQ ID NO: 80957 - DNA, 25 bp, Canis familiaris
cccacaatctgtctggactcttttc

SEQ ID NO: 80958 - DNA, 25 bp, Canis familiaris
cccacatatctgtctccagaattta

SEQ ID NO: 80959 - DNA, 25 bp, Canis familiaris
cccacagagtgaccacgagctcttg

SEQ ID NO: 80960 - DNA, 25 bp, Canis familiaris
cccaggtctgaggatcgagtcttgc

SEQ ID NO: 80961 - DNA, 25 bp, Canis familiaris
cccagagtgaggcaaggctttcttg

SEQ ID NO: 80962 - DNA, 25 bp, Canis familiaris
cccagactcgagcagaggggtcagg

SEQ ID NO: 80963 - DNA, 25 bp, Canis familiaris
cccagaccagagcttgcagctggta

SEQ ID NO: 80964 - DNA, 25 bp, Canis familiaris
cccacacgagatccttctctgagta

SEQ ID NO: 80965 - DNA, 25 bp, Canis familiaris
cccacaggcaatatcccaagattcc

SEQ ID NO: 80966 - DNA, 25 bp, Canis familiaris
cccaaggcaatgtctctcctatttg

SEQ ID NO: 80967 - DNA, 25 bp, Canis familiaris
cccacacgtagattgtccatttctg

SEQ ID NO: 80968 - DNA, 25 bp, Canis familiaris
cccaatcggacctcgatttctggtt

SEQ ID NO: 80969 - DNA, 25 bp, Canis familiaris
cccagatcttacgtggcctttctgg

SEQ ID NO: 80970 - DNA, 25 bp, Canis familiaris
ccctcgcataacgtgggttttggat

SEQ ID NO: 80971 - DNA, 25 bp, Canis familiaris
cccacccaagccaggtctatggaga

SEQ ID NO: 80972 - DNA, 25 bp, Canis familiaris
cccacccccataaagtgctgggaca

SEQ ID NO: 80973 - DNA, 25 bp, Canis familiaris
cccaccccaccaaaggtcagtgaag

SEQ ID NO: 80974 - DNA, 25 bp, Canis familiaris
cccacccacgtcaacgtgtctgtgg

SEQ ID NO: 80975 - DNA, 25 bp, Canis familiaris
cccagtcccgtgaaattgttgtctt

SEQ ID NO: 80976 - DNA, 25 bp, Canis familiaris
cccagcccttggacagaatatttca

SEQ ID NO: 80977 - DNA, 25 bp, Canis familiaris
cccacgctttggtacatgaatcccc

SEQ ID NO: 80978 - DNA, 25 bp, Canis familiaris
cccacgggtggtgcagagtccgaac

SEQ ID NO: 80979 - DNA, 25 bp, Canis familiaris
cccacaagggggacatggatctgta

SEQ ID NO: 80980 - DNA, 25 bp, Canis familiaris
cccaacaaggggacaggatctgtga

SEQ ID NO: 80981 - DNA, 25 bp, Canis familiaris
cccaatcacagaccccaagatgttg

SEQ ID NO: 80982 - DNA, 25 bp, Canis familiaris
cccaaatctacgcctctagatgcat

SEQ ID NO: 80983 - DNA, 25 bp, Canis familiaris
cgcctagtgctacttgcctagtgct

SEQ ID NO: 80984 - DNA, 25 bp, Canis familiaris
ccctacggtgttcctgatgatctgc

SEQ ID NO: 80985 - DNA, 25 bp, Canis familiaris
ccgcaacgttgccagcgtatgtctg

SEQ ID NO: 80986 - DNA, 25 bp, Canis familiaris
cccaagcctctcaacagaagctgtg

SEQ ID NO: 80987 - DNA, 25 bp, Canis familiaris
cccacctctacttcagaacatggcc

SEQ ID NO: 80988 - DNA, 25 bp, Canis familiaris
cccatccttggctctgaagcagggt

SEQ ID NO: 80989 - DNA, 25 bp, Canis familiaris
cccacagtgatgatgtcgagatcgg

SEQ ID NO: 80990 - DNA, 25 bp, Canis familiaris
cgccatcatgggagtcgacatccgc

SEQ ID NO: 80991 - DNA, 25 bp, Canis familiaris
cgccaagtgttgctctgacattcac

SEQ ID NO: 80992 - DNA, 25 bp, Canis familiaris
cccacattgttccctacaatacgtg

SEQ ID NO: 80993 - DNA, 25 bp, Canis familiaris
cccaccatgttcttgaacaatcagg

SEQ ID NO: 80994 - DNA, 25 bp, Canis familiaris
cccagcttgtcttgttcaacacagg

SEQ ID NO: 80995 - DNA, 25 bp, Canis familiaris
cccgtgctctatagcttcatcaacc

SEQ ID NO: 80996 - DNA, 25 bp, Canis familiaris
cccatgatcattctgtcttaaccct

SEQ ID NO: 80997 - DNA, 25 bp, Canis familiaris
cctgtgtttagtaatttacacttgg

SEQ ID NO: 80998 - DNA, 25 bp, Canis familiaris
ccggtttcagtgaagtaaacagtat

SEQ ID NO: 80999 - DNA, 25 bp, Canis familiaris
cccagtgtctgaaaggtaattgttt

SEQ ID NO: 81000 - DNA, 25 bp, Canis familiaris
cccagcttcagatacctacatagtt

SEQ ID NO: 81001 - DNA, 25 bp, Canis familiaris
ccctgctgtcaaaaaatatgcatgt

SEQ ID NO: 81002 - DNA, 25 bp, Canis familiaris
ccctgtccaatgttaatccgtatcc

SEQ ID NO: 81003 - DNA, 25 bp, Canis familiaris
cccactccattgtaaatcggttttg

SEQ ID NO: 81004 - DNA, 25 bp, Canis familiaris
cccatatcctttgaacacctttata

SEQ ID NO: 81005 - DNA, 25 bp, Canis familiaris
ccaaacgcatttgaaacaacctgat

SEQ ID NO: 81006 - DNA, 25 bp, Canis familiaris
cccaactgcaaagagaaaactgtga

SEQ ID NO: 81007 - DNA, 25 bp, Canis familiaris
cccaaacatgggaagaagatactga

SEQ ID NO: 81008 - DNA, 25 bp, Canis familiaris
cccagaagggctaagagaaaggatc

SEQ ID NO: 81009 - DNA, 25 bp, Canis familiaris
cccagaagtggtccgcaagatggga

SEQ ID NO: 81010 - DNA, 25 bp, Canis familiaris
cccaagggatgtgctggagtgtggc

SEQ ID NO: 81011 - DNA, 25 bp, Canis familiaris
cccaaggagatgaagctgaagcagg

SEQ ID NO: 81012 - DNA, 25 bp, Canis familiaris
cccaatgtgggcaacaatccagagt

SEQ ID NO: 81013 - DNA, 25 bp, Canis familiaris
cccaagtgggctacactcacgaggt

SEQ ID NO: 81014 - DNA, 25 bp, Canis familiaris
cccaagtgtggctacatctagagtg

SEQ ID NO: 81015 - DNA, 25 bp, Canis familiaris
cccaacttgagatgtatgaaggctt

SEQ ID NO: 81016 - DNA, 25 bp, Canis familiaris
cccacatcgtggtactaggcacctt

SEQ ID NO: 81017 - DNA, 25 bp, Canis familiaris
cccaagcattggtatctacggcctg

SEQ ID NO: 81018 - DNA, 25 bp, Canis familiaris
cccaagcattggtatctacggcctg

SEQ ID NO: 81019 - DNA, 25 bp, Canis familiaris
cccaagcattggtatctacggcctg

SEQ ID NO: 81020 - DNA, 25 bp, Canis familiaris
cccaggcatgggtccctgggcttct

SEQ ID NO: 81021 - DNA, 25 bp, Canis familiaris
cccagggacccagtgtgtggtttgt

SEQ ID NO: 81022 - DNA, 25 bp, Canis familiaris
cccagggaccaagctgacagtcgta

SEQ ID NO: 81023 - DNA, 25 bp, Canis familiaris
cccagggcccagtgggactgagctg

SEQ ID NO: 81024 - DNA, 25 bp, Canis familiaris
cccagacggtcatcgttggctgagg

SEQ ID NO: 81025 - DNA, 25 bp, Canis familiaris
cccagcctggtgtacacgaggtagt

SEQ ID NO: 81026 - DNA, 25 bp, Canis familiaris
cgccattggggatcgcagcaagaag

SEQ ID NO: 81027 - DNA, 25 bp, Canis familiaris
ccgcatattaggcgcagataaaaga

SEQ ID NO: 81028 - DNA, 25 bp, Canis familiaris
cccactgtggcgcgagagagaagag

SEQ ID NO: 81029 - DNA, 25 bp, Canis familiaris
cccagtctctggtggaggccacagt

SEQ ID NO: 81030 - DNA, 25 bp, Canis familiaris
cccaatgcttggggggagcagccaa

SEQ ID NO: 81031 - DNA, 25 bp, Canis familiaris
cccttgtcggcgagaagcctcaggc

SEQ ID NO: 81032 - DNA, 25 bp, Canis familiaris
ccctcagtactggtcggacctagga

SEQ ID NO: 81033 - DNA, 25 bp, Canis familiaris
cccacgtactaccatgtactcttgg

SEQ ID NO: 81034 - DNA, 25 bp, Canis familiaris
cccaggtgccttgcagtacctgttg

SEQ ID NO: 81035 - DNA, 25 bp, Canis familiaris
cccagcggtctcaacttacggatgg

SEQ ID NO: 81036 - DNA, 25 bp, Canis familiaris
cccagcgagttcactacacaggaaa

SEQ ID NO: 81037 - DNA, 25 bp, Canis familiaris
cccagcaaggacactgagcaagaga

SEQ ID NO: 81038 - DNA, 25 bp, Canis familiaris
cccacagagagtcctggagccagag

SEQ ID NO: 81039 - DNA, 25 bp, Canis familiaris
cccagcagctggcgctgcgccagca

SEQ ID NO: 81040 - DNA, 25 bp, Canis familiaris
cccagagctatagctggcgcagcac

SEQ ID NO: 81041 - DNA, 25 bp, Canis familiaris
cccagccttgcagcattgtcaggct

SEQ ID NO: 81042 - DNA, 25 bp, Canis familiaris
cccagtctatgcgtgcaggtcacga

SEQ ID NO: 81043 - DNA, 25 bp, Canis familiaris
cccagctcttgctgcgtgatactgg

SEQ ID NO: 81044 - DNA, 25 bp, Canis familiaris
cccagctatgtaggcaggtttgcag

SEQ ID NO: 81045 - DNA, 25 bp, Canis familiaris
cccacttgtgctgacttcattgaga

SEQ ID NO: 81046 - DNA, 25 bp, Canis familiaris
cccacctatgtgtacccatatctga

SEQ ID NO: 81047 - DNA, 25 bp, Canis familiaris
cccatcgatggtaaactcgactgac

SEQ ID NO: 81048 - DNA, 25 bp, Canis familiaris
cccagtgtgattctaccaggctaca

SEQ ID NO: 81049 - DNA, 25 bp, Canis familiaris
cccaggatgtattggtcaagggacc

SEQ ID NO: 81050 - DNA, 25 bp, Canis familiaris
cgccagggccagaagtccagggaaa

SEQ ID NO: 81051 - DNA, 25 bp, Canis familiaris
cccagaggctcaagttcctgtgcga

SEQ ID NO: 81052 - DNA, 25 bp, Canis familiaris
cccacaggctctcaaccgtggttga

SEQ ID NO: 81053 - DNA, 25 bp, Canis familiaris
cccacagagatccacaaccgggggc

SEQ ID NO: 81054 - DNA, 25 bp, Canis familiaris
cgccaataaggtccatccgggggca

SEQ ID NO: 81055 - DNA, 25 bp, Canis familiaris
ccctgaacatggtgtccccagggca

SEQ ID NO: 81056 - DNA, 25 bp, Canis familiaris
cccaagaaggctgcctctcacaggg

SEQ ID NO: 81057 - DNA, 25 bp, Canis familiaris
cccacaataccagtcacctaattta

SEQ ID NO: 81058 - DNA, 25 bp, Canis familiaris
cccaatgtatcccgacgtaatttat

SEQ ID NO: 81059 - DNA, 25 bp, Canis familiaris
cccactggattccgcttgtaattct

SEQ ID NO: 81060 - DNA, 25 bp, Canis familiaris
cccagtagttggtcttgtaaatgca

SEQ ID NO: 81061 - DNA, 25 bp, Canis familiaris
cccaggagtctgcgtttccaagaga

SEQ ID NO: 81062 - DNA, 25 bp, Canis familiaris
cccaggccctctgtttctaaagatt

SEQ ID NO: 81063 - DNA, 25 bp, Canis familiaris
cccaggcccttgtatgttctaaaat

SEQ ID NO: 81064 - DNA, 25 bp, Canis familiaris
cccaagcccctgtatgacatgtata

SEQ ID NO: 81065 - DNA, 25 bp, Canis familiaris
cccaatctctcccaagagcttaacc

SEQ ID NO: 81066 - DNA, 25 bp, Canis familiaris
cccaagtctctccagctgagttata

SEQ ID NO: 81067 - DNA, 25 bp, Canis familiaris
cccaagacgctaaccagtattttga

SEQ ID NO: 81068 - DNA, 25 bp, Canis familiaris
ccctaaggctacctcagtttgcttc

SEQ ID NO: 81069 - DNA, 25 bp, Canis familiaris
ccctacaggcaacacatcttccttt

SEQ ID NO: 81070 - DNA, 25 bp, Canis familiaris
ccctacaggcaacacatcttccttt

SEQ ID NO: 81071 - DNA, 25 bp, Canis familiaris
ccctaataaaagatccagcactttt

SEQ ID NO: 81072 - DNA, 25 bp, Canis familiaris
cccagaaattaaactccctctctct

SEQ ID NO: 81073 - DNA, 25 bp, Canis familiaris
ccactacaagttaaggcctctacct

SEQ ID NO: 81074 - DNA, 25 bp, Canis familiaris
ccacaacaagttgaaccgatttcgg

SEQ ID NO: 81075 - DNA, 25 bp, Canis familiaris
cccaacaggtatgacaccacaaagg

SEQ ID NO: 81076 - DNA, 25 bp, Canis familiaris
cccaatgggttggtcccaccaatgg

SEQ ID NO: 81077 - DNA, 25 bp, Canis familiaris
cccacaggttgtgtgcacaccgttg

SEQ ID NO: 81078 - DNA, 25 bp, Canis familiaris
cccaaggtctcagctgcacaaaact

SEQ ID NO: 81079 - DNA, 25 bp, Canis familiaris
cccacagatgtccagagcgcaagag

SEQ ID NO: 81080 - DNA, 25 bp, Canis familiaris
cccatcaatgaccattgcgcccatg

SEQ ID NO: 81081 - DNA, 25 bp, Canis familiaris
cccacatcatgcctggtggcggcat

SEQ ID NO: 81082 - DNA, 25 bp, Canis familiaris
cccacacattgcttctggctggtgt

SEQ ID NO: 81083 - DNA, 25 bp, Canis familiaris
cccacatgatctgcctagctgagga

SEQ ID NO: 81084 - DNA, 25 bp, Canis familiaris
cccacaatccccaggaggagaacct

SEQ ID NO: 81085 - DNA, 25 bp, Canis familiaris
cccagcttccacctgatggtgtaga

SEQ ID NO: 81086 - DNA, 25 bp, Canis familiaris
cccagtctttcccataattactata

SEQ ID NO: 81087 - DNA, 25 bp, Canis familiaris
cccagtccttcaatcacgtaagcta

SEQ ID NO: 81088 - DNA, 25 bp, Canis familiaris
cccaggctcagcaacagcaggtaac

SEQ ID NO: 81089 - DNA, 25 bp, Canis familiaris
cccaggattggagggcttcacacct

SEQ ID NO: 81090 - DNA, 25 bp, Canis familiaris
cccagttctggtgcgatgacaatct

SEQ ID NO: 81091 - DNA, 25 bp, Canis familiaris
cccgtgcattgtcccaaacacatta

SEQ ID NO: 81092 - DNA, 25 bp, Canis familiaris
cctagactacttgaaggcaattaga

SEQ ID NO: 81093 - DNA, 25 bp, Canis familiaris
cccaggctacttttgaagcgattct

SEQ ID NO: 81094 - DNA, 25 bp, Canis familiaris
cccttccacgtatcacagcgatagt

SEQ ID NO: 81095 - DNA, 25 bp, Canis familiaris
cccatctccacctaataaagtttct

SEQ ID NO: 81096 - DNA, 25 bp, Canis familiaris
ccctgcctcctctaaaaatttgtat

SEQ ID NO: 81097 - DNA, 25 bp, Canis familiaris
cccagcccagctgaaggagcttcgt

SEQ ID NO: 81098 - DNA, 25 bp, Canis familiaris
cccaccccttactatagctacagtg

SEQ ID NO: 81099 - DNA, 25 bp, Canis familiaris
cgccaacgcctgtacgaacttaggc

SEQ ID NO: 81100 - DNA, 25 bp, Canis familiaris
cgccaactacatcatgcggtttttg

SEQ ID NO: 81101 - DNA, 25 bp, Canis familiaris
cccagatccaactacgagcttttta

SEQ ID NO: 81102 - DNA, 25 bp, Canis familiaris
cccagaccagtaaccacagttttag

SEQ ID NO: 81103 - DNA, 25 bp, Canis familiaris
ggtatggaacgatcttagttttgta

SEQ ID NO: 81104 - DNA, 25 bp, Canis familiaris
cccaaccactgggtcaatgtgtcct

SEQ ID NO: 81105 - DNA, 25 bp, Canis familiaris
cccaacagcatccgcttgcttgggc

SEQ ID NO: 81106 - DNA, 25 bp, Canis familiaris
cccatacagtggccttcgtaggaca

SEQ ID NO: 81107 - DNA, 25 bp, Canis familiaris
cgccaagcttgtccaatcgtctgga

SEQ ID NO: 81108 - DNA, 25 bp, Canis familiaris
cccagagctgggacaacctctatga

SEQ ID NO: 81109 - DNA, 25 bp, Canis familiaris
cccacctgaaggcatgcctctatgt

SEQ ID NO: 81110 - DNA, 25 bp, Canis familiaris
cccacacttacacagcaatctatga

SEQ ID NO: 81111 - DNA, 25 bp, Canis familiaris
cccacacttcacagacacatctgct

SEQ ID NO: 81112 - DNA, 25 bp, Canis familiaris
cccaactccatcagcatcgatgctg

SEQ ID NO: 81113 - DNA, 25 bp, Canis familiaris
cccaacctacagcagcgatatcgtc

SEQ ID NO: 81114 - DNA, 25 bp, Canis familiaris
cccaagccccagagagcagtggtgc

SEQ ID NO: 81115 - DNA, 25 bp, Canis familiaris
cccaacacccaagcagagctcagtg

SEQ ID NO: 81116 - DNA, 25 bp, Canis familiaris
cccagacctcacagaattgccattg

SEQ ID NO: 81117 - DNA, 25 bp, Canis familiaris
cccaacagcctcagcaaggtcttgc

SEQ ID NO: 81118 - DNA, 25 bp, Canis familiaris
ccctatcaactttcgatggtagtcg

SEQ ID NO: 81119 - DNA, 25 bp, Canis familiaris
ccctcttgattttagtggttctcca

SEQ ID NO: 81120 - DNA, 25 bp, Canis familiaris
ccctattctttctagcagagtacgc

SEQ ID NO: 81121 - DNA, 25 bp, Canis familiaris
cccttctattcctgaaacagtggtc

SEQ ID NO: 81122 - DNA, 25 bp, Canis familiaris
cccatgccggtccttgaaagagtgg

SEQ ID NO: 81123 - DNA, 25 bp, Canis familiaris
cccatgcgcggtgatgatcgccgag

SEQ ID NO: 81124 - DNA, 25 bp, Canis familiaris
ccctgggttgactttgccttgaagt

SEQ ID NO: 81125 - DNA, 25 bp, Canis familiaris
cccttggcttggatgtgttccaagg

SEQ ID NO: 81126 - DNA, 25 bp, Canis familiaris
cccatcccttgaagttgtcctatag

SEQ ID NO: 81127 - DNA, 25 bp, Canis familiaris
cccaggcactgggagtttggattaa

SEQ ID NO: 81128 - DNA, 25 bp, Canis familiaris
cccacagagctgggcagattctgga

SEQ ID NO: 81129 - DNA, 25 bp, Canis familiaris
cccacagcctggacagtcctggagg

SEQ ID NO: 81130 - DNA, 25 bp, Canis familiaris
cccaactctcaggcgacctaaggaa

SEQ ID NO: 81131 - DNA, 25 bp, Canis familiaris
cccaaggctccaggaaccaagggag

SEQ ID NO: 81132 - DNA, 25 bp, Canis familiaris
cccagaagctcccaaacaccaggga

SEQ ID NO: 81133 - DNA, 25 bp, Canis familiaris
cccagaagttgctacattacctcgg

SEQ ID NO: 81134 - DNA, 25 bp, Canis familiaris
cccgagatggttctctactcgctgg

SEQ ID NO: 81135 - DNA, 25 bp, Canis familiaris
cccgagaggtccaagtaatcgtccg

SEQ ID NO: 81136 - DNA, 25 bp, Canis familiaris
cccaggaagcccactacatagtttg

SEQ ID NO: 81137 - DNA, 25 bp, Canis familiaris
cccagggatcccaacaatagcagtt

SEQ ID NO: 81138 - DNA, 25 bp, Canis familiaris
cccagagttcagtccctaaagttca

SEQ ID NO: 81139 - DNA, 25 bp, Canis familiaris
cccagagttctctgccttaattctc

SEQ ID NO: 81140 - DNA, 25 bp, Canis familiaris
cccacgttgccggctttgaattgga

SEQ ID NO: 81141 - DNA, 25 bp, Canis familiaris
cccacttctctcggtgttaagatgt

SEQ ID NO: 81142 - DNA, 25 bp, Canis familiaris
cccacatacccgagcagctcaaggg

SEQ ID NO: 81143 - DNA, 25 bp, Canis familiaris
ccatgggacctcgtggtgaaccagg

SEQ ID NO: 81144 - DNA, 25 bp, Canis familiaris
cccaggacctgctgggaccagggtg

SEQ ID NO: 81145 - DNA, 25 bp, Canis familiaris
cccagtgccaagtgacgtggcgggc

SEQ ID NO: 81146 - DNA, 25 bp, Canis familiaris
cccatgtcgtagtcgagaaacggac

SEQ ID NO: 81147 - DNA, 25 bp, Canis familiaris
ccgcaaaggcagcaggctaccggac

SEQ ID NO: 81148 - DNA, 25 bp, Canis familiaris
cccaccatggagcttgtacactcag

SEQ ID NO: 81149 - DNA, 25 bp, Canis familiaris
cccaactggatgccctgaaagcacg

SEQ ID NO: 81150 - DNA, 25 bp, Canis familiaris
cccagacggaccggaatgccagggt

SEQ ID NO: 81151 - DNA, 25 bp, Canis familiaris
gcccaggaaacctgctaggagggta

SEQ ID NO: 81152 - DNA, 25 bp, Canis familiaris
cccagaggaacctgcgaaggacttc

SEQ ID NO: 81153 - DNA, 25 bp, Canis familiaris
cccagcggaaatcacccggatcttg

SEQ ID NO: 81154 - DNA, 25 bp, Canis familiaris
cccacgggaatctcccagtgcatgg

SEQ ID NO: 81155 - DNA, 25 bp, Canis familiaris
cccagcgggaacaggccacagctgg

SEQ ID NO: 81156 - DNA, 25 bp, Canis familiaris
cccagcgggaccaggccaagctggg

SEQ ID NO: 81157 - DNA, 25 bp, Canis familiaris
cccactggggccggaggaggtgagg

SEQ ID NO: 81158 - DNA, 25 bp, Canis familiaris
cccaaagcccccgaggaggaatgag

SEQ ID NO: 81159 - DNA, 25 bp, Canis familiaris
cccatacccctccaaggtggaatgg

SEQ ID NO: 81160 - DNA, 25 bp, Canis familiaris
cccaagccgtgtccgaaggaccagg

SEQ ID NO: 81161 - DNA, 25 bp, Canis familiaris
cccaagccgttcatgtagccaaagc

SEQ ID NO: 81162 - DNA, 25 bp, Canis familiaris
cccaagccgctgttcttcagaaaag

SEQ ID NO: 81163 - DNA, 25 bp, Canis familiaris
ccctactattgagttccacgaagag

SEQ ID NO: 81164 - DNA, 25 bp, Canis familiaris
ccgtcattttttgtctcagtgcaga

SEQ ID NO: 81165 - DNA, 25 bp, Canis familiaris
ccctatacgtctcgagttcgtgcag

SEQ ID NO: 81166 - DNA, 25 bp, Canis familiaris
cccattacgcacggatccatagccg

SEQ ID NO: 81167 - DNA, 25 bp, Canis familiaris
cccaagaagacacgtgccatgcgcc

SEQ ID NO: 81168 - DNA, 25 bp, Canis familiaris
cccagtatgatgtgtgtgccatctg

SEQ ID NO: 81169 - DNA, 25 bp, Canis familiaris
cccagccatgtatgtggccatccag

SEQ ID NO: 81170 - DNA, 25 bp, Canis familiaris
cccagccatgtacgtagccatccag

SEQ ID NO: 81171 - DNA, 25 bp, Canis familiaris
cccagccatgtacgtagccatccag

SEQ ID NO: 81172 - DNA, 25 bp, Canis familiaris
cccagccatgtacgttgctatccag

SEQ ID NO: 81173 - DNA, 25 bp, Canis familiaris
cccacaacatcaacttcaaccagta

SEQ ID NO: 81174 - DNA, 25 bp, Canis familiaris
cccacctatgaacccaagacagtca

SEQ ID NO: 81175 - DNA, 25 bp, Canis familiaris
cccactctagagttccaagatatcc

SEQ ID NO: 81176 - DNA, 25 bp, Canis familiaris
cccatcctcaggatgtcggttctcc

SEQ ID NO: 81177 - DNA, 25 bp, Canis familiaris
cccgcggcacagagggatatctccc

SEQ ID NO: 81178 - DNA, 25 bp, Canis familiaris
cccacaggccttcgaggagatgctc

SEQ ID NO: 81179 - DNA, 25 bp, Canis familiaris
cccatcagcggcacagagggtcctc

SEQ ID NO: 81180 - DNA, 25 bp, Canis familiaris
cccagcgcagctgcaagtgggaccc

SEQ ID NO: 81181 - DNA, 25 bp, Canis familiaris
cccagcctgtgcaggtgcggaaggc

SEQ ID NO: 81182 - DNA, 25 bp, Canis familiaris
ccacatgcctactggacctaaggtc

SEQ ID NO: 81183 - DNA, 25 bp, Canis familiaris
cccagctctaaccgtcacttgggac

SEQ ID NO: 81184 - DNA, 25 bp, Canis familiaris
cccactcttactctatcttttgata

SEQ ID NO: 81185 - DNA, 25 bp, Canis familiaris
cccactcctcctttattatatgttt

SEQ ID NO: 81186 - DNA, 25 bp, Canis familiaris
cccacttccgtcttatccaagtgtg

SEQ ID NO: 81187 - DNA, 25 bp, Canis familiaris
cccaacgcacgtgttcataatttgc

SEQ ID NO: 81188 - DNA, 25 bp, Canis familiaris
cccacacgcctgagtttttggtcac

SEQ ID NO: 81189 - DNA, 25 bp, Canis familiaris
cccaactacgcctttctttggatgc

SEQ ID NO: 81190 - DNA, 25 bp, Canis familiaris
cccaactcacccagtgaattggagc

SEQ ID NO: 81191 - DNA, 25 bp, Canis familiaris
cccaactccacctggatacatgggc

SEQ ID NO: 81192 - DNA, 25 bp, Canis familiaris
cccaccccaccaaagaagctgatgg

SEQ ID NO: 81193 - DNA, 25 bp, Canis familiaris
cccacaccacacatttgtatgcttc

SEQ ID NO: 81194 - DNA, 25 bp, Canis familiaris
cccacccacatcatcgatttgttgt

SEQ ID NO: 81195 - DNA, 25 bp, Canis familiaris
cccaggacaactgcctttgttctaa

SEQ ID NO: 81196 - DNA, 25 bp, Canis familiaris
cccaaatcagccacgtttttctgga

SEQ ID NO: 81197 - DNA, 25 bp, Canis familiaris
ccctaattccctaatttccatctag

SEQ ID NO: 81198 - DNA, 25 bp, Canis familiaris
ccaatacattcacaaattaccactt

SEQ ID NO: 81199 - DNA, 25 bp, Canis familiaris
ccctacttcagagctttactcctta

SEQ ID NO: 81200 - DNA, 25 bp, Canis familiaris
ccctaggaagatgtctatcagcccc

SEQ ID NO: 81201 - DNA, 25 bp, Canis familiaris
cccatcatggaggacccagtagccc

SEQ ID NO: 81202 - DNA, 25 bp, Canis familiaris
cccattcgggacatatggatacgcc

SEQ ID NO: 81203 - DNA, 25 bp, Canis familiaris
cccagtgtgcggtcaaatgtgaaag

SEQ ID NO: 81204 - DNA, 25 bp, Canis familiaris
cccagccacaggccaacttcaaagt

SEQ ID NO: 81205 - DNA, 25 bp, Canis familiaris
cccaacacaggtatgcattcaagga

SEQ ID NO: 81206 - DNA, 25 bp, Canis familiaris
cccaaacacctcttcatgtcaataa

SEQ ID NO: 81207 - DNA, 25 bp, Canis familiaris
cccagaaaccttacagatcatgcaa

SEQ ID NO: 81208 - DNA, 25 bp, Canis familiaris
cccagagaccctgacgagatcatgc

SEQ ID NO: 81209 - DNA, 25 bp, Canis familiaris
cccaggaccgcagcaaggtcatggc

SEQ ID NO: 81210 - DNA, 25 bp, Canis familiaris
cccagtggcaaggctctagtatctg

SEQ ID NO: 81211 - DNA, 25 bp, Canis familiaris
cccagtgactcatgctcaagttcct

SEQ ID NO: 81212 - DNA, 25 bp, Canis familiaris
cccactaccagtgaacttgcttgaa

SEQ ID NO: 81213 - DNA, 25 bp, Canis familiaris
cccagtaaagtgcggcttgtcagaa

SEQ ID NO: 81214 - DNA, 25 bp, Canis familiaris
cccagcttgaacaggcgctcgatag

SEQ ID NO: 81215 - DNA, 25 bp, Canis familiaris
cccattaatatcatggctctaaaat

SEQ ID NO: 81216 - DNA, 25 bp, Canis familiaris
cccaccaaacttgctataagaaagg

SEQ ID NO: 81217 - DNA, 25 bp, Canis familiaris
ccccacagaagctgggaggaaaaag

SEQ ID NO: 81218 - DNA, 25 bp, Canis familiaris
ccctcaagtagccggtcggccaata

SEQ ID NO: 81219 - DNA, 25 bp, Canis familiaris
ccctgtagtagtcatgccaggccaa

SEQ ID NO: 81220 - DNA, 25 bp, Canis familiaris
cccaggcgaagtccaagcaggccat

SEQ ID NO: 81221 - DNA, 25 bp, Canis familiaris
cccagcccaagtccaaatgtttaca

SEQ ID NO: 81222 - DNA, 25 bp, Canis familiaris
cccacccagagccatcataagttat

SEQ ID NO: 81223 - DNA, 25 bp, Canis familiaris
cccacgctaactacatatatatata

SEQ ID NO: 81224 - DNA, 25 bp, Canis familiaris
cccacgctgcatacaacacatttta

SEQ ID NO: 81225 - DNA, 25 bp, Canis familiaris
cccaccagccaggccaatgatttat

SEQ ID NO: 81226 - DNA, 25 bp, Canis familiaris
cccagccaagccgatcaatgcattg

SEQ ID NO: 81227 - DNA, 25 bp, Canis familiaris
cccacaaacatgtccactcatctgg

SEQ ID NO: 81228 - DNA, 25 bp, Canis familiaris
cccaaatacttgccacactctggtc

SEQ ID NO: 81229 - DNA, 25 bp, Canis familiaris
cccaacatgccttccaaatcggtga

SEQ ID NO: 81230 - DNA, 25 bp, Canis familiaris
cccacactgctcatctacaaaggtg

SEQ ID NO: 81231 - DNA, 25 bp, Canis familiaris
cccactctgcccaggcaaagaacct

SEQ ID NO: 81232 - DNA, 25 bp, Canis familiaris
cccaccagcagagtcggtagggccc

SEQ ID NO: 81233 - DNA, 25 bp, Canis familiaris
cccacacagcaggacgtgctacgga

SEQ ID NO: 81234 - DNA, 25 bp, Canis familiaris
cccaccacgcaaaggctacaggagt

SEQ ID NO: 81235 - DNA, 25 bp, Canis familiaris
cccacaccacaaacgtacggcgtat

SEQ ID NO: 81236 - DNA, 25 bp, Canis familiaris
cccataccagaggacttacggaaga

SEQ ID NO: 81237 - DNA, 25 bp, Canis familiaris
cccttccgcgaactgtatttgggat

SEQ ID NO: 81238 - DNA, 25 bp, Canis familiaris
cccttaagagacctgtcctgctggt

SEQ ID NO: 81239 - DNA, 25 bp, Canis familiaris
cccttgggagcagatgtccgggctg

SEQ ID NO: 81240 - DNA, 25 bp, Canis familiaris
cccttcaggcctggattccacaggg

SEQ ID NO: 81241 - DNA, 25 bp, Canis familiaris
cccaggcaacttgttccagcgatgg

SEQ ID NO: 81242 - DNA, 25 bp, Canis familiaris
cccaggcaccaaggtttcacgagca

SEQ ID NO: 81243 - DNA, 25 bp, Canis familiaris
cccagcagaccatggacgtcctggc

SEQ ID NO: 81244 - DNA, 25 bp, Canis familiaris
cccacagactttgtgctgctacggg

SEQ ID NO: 81245 - DNA, 25 bp, Canis familiaris
cccaaatcatttttgctgcaccgag

SEQ ID NO: 81246 - DNA, 25 bp, Canis familiaris
cccagaggcttttgttgcacagaag

SEQ ID NO: 81247 - DNA, 25 bp, Canis familiaris
cccagggcattcgggacacaggcac

SEQ ID NO: 81248 - DNA, 25 bp, Canis familiaris
cccagggtcctgggatcaagtccct

SEQ ID NO: 81249 - DNA, 25 bp, Canis familiaris
cccagggtcctgggatcaagtccct

SEQ ID NO: 81250 - DNA, 25 bp, Canis familiaris
cccagcggtgtcacagcacaagttc

SEQ ID NO: 81251 - DNA, 25 bp, Canis familiaris
cccagcgggatcacagtgagctccc

SEQ ID NO: 81252 - DNA, 25 bp, Canis familiaris
cccaggcctgatgacagctattccc

SEQ ID NO: 81253 - DNA, 25 bp, Canis familiaris
cccagatgccattccatcactgata

SEQ ID NO: 81254 - DNA, 25 bp, Canis familiaris
cccactgtgctggccatcaagaatg

SEQ ID NO: 81255 - DNA, 25 bp, Canis familiaris
cccacatcctgtgcatcaaggacat

SEQ ID NO: 81256 - DNA, 25 bp, Canis familiaris
cccatctctctgagtcaaggcttcc

SEQ ID NO: 81257 - DNA, 25 bp, Canis familiaris
cccagtcctgtggatcctgctgttc

SEQ ID NO: 81258 - DNA, 25 bp, Canis familiaris
cccattatgaatgtgcctctatctc

SEQ ID NO: 81259 - DNA, 25 bp, Canis familiaris
cccatgatatgattttccaatctct

SEQ ID NO: 81260 - DNA, 25 bp, Canis familiaris
cccagcaagcagaactcactactct

SEQ ID NO: 81261 - DNA, 25 bp, Canis familiaris
cccaccatcgaagactcctatacga

SEQ ID NO: 81262 - DNA, 25 bp, Canis familiaris
cccactccgaaattctcttacaaga

SEQ ID NO: 81263 - DNA, 25 bp, Canis familiaris
cccactccttagttacactgcaagg

SEQ ID NO: 81264 - DNA, 25 bp, Canis familiaris
cccactccagcaaggtccaagaaga

SEQ ID NO: 81265 - DNA, 25 bp, Canis familiaris
cccatcaacaatcggccaacaacgg

SEQ ID NO: 81266 - DNA, 25 bp, Canis familiaris
cccatgcagagccatgtggcccaga

SEQ ID NO: 81267 - DNA, 25 bp, Canis familiaris
cccagcagcaggctgtgacagcagt

SEQ ID NO: 81268 - DNA, 25 bp, Canis familiaris
cccacatgtgtgtgatgtcatcatg

SEQ ID NO: 81269 - DNA, 25 bp, Canis familiaris
cccacatggccatatatcacatata

SEQ ID NO: 81270 - DNA, 25 bp, Canis familiaris
cccactgtgccaaaaacagataatt

SEQ ID NO: 81271 - DNA, 25 bp, Canis familiaris
cccatttccaaaccctgaaattatg

SEQ ID NO: 81272 - DNA, 25 bp, Canis familiaris
ccctttcccagatcttcaatatttg

SEQ ID NO: 81273 - DNA, 25 bp, Canis familiaris
ccctagttttgttctgtcctatatg

SEQ ID NO: 81274 - DNA, 25 bp, Canis familiaris
cccttttttctctgccagtatctaa

SEQ ID NO: 81275 - DNA, 25 bp, Canis familiaris
ccctttgcaatggctttgaactttc

SEQ ID NO: 81276 - DNA, 25 bp, Canis familiaris
cccatttggtcccttggattgtctt

SEQ ID NO: 81277 - DNA, 25 bp, Canis familiaris
ccctagtgcgtttgcttggggtctc

SEQ ID NO: 81278 - DNA, 25 bp, Canis familiaris
cccacgcggatgggttgttgttctc

SEQ ID NO: 81279 - DNA, 25 bp, Canis familiaris
cccccggagttgtgtcgtgtaatgg

SEQ ID NO: 81280 - DNA, 25 bp, Canis familiaris
cccacacgagatcacaagtcgtgta

SEQ ID NO: 81281 - DNA, 25 bp, Canis familiaris
cccacccagcacagacagtctggaa

SEQ ID NO: 81282 - DNA, 25 bp, Canis familiaris
cccaccacacagtaggcactctgta

SEQ ID NO: 81283 - DNA, 25 bp, Canis familiaris
cccacccaggcatgtacctgagaac

SEQ ID NO: 81284 - DNA, 25 bp, Canis familiaris
cccagctccaaatctgagcctcaga

SEQ ID NO: 81285 - DNA, 25 bp, Canis familiaris
cccacccacggattgagaccaggag

SEQ ID NO: 81286 - DNA, 25 bp, Canis familiaris
cccacccctggaggagaagaggaag

SEQ ID NO: 81287 - DNA, 25 bp, Canis familiaris
cccacccgctgcgggctttgaggtt

SEQ ID NO: 81288 - DNA, 25 bp, Canis familiaris
cccacccagctagctgcgttggatt

SEQ ID NO: 81289 - DNA, 25 bp, Canis familiaris
cccagcccctagtgcgtgaaattgg

SEQ ID NO: 81290 - DNA, 25 bp, Canis familiaris
cccagcaccccgtgtggatttgggg

SEQ ID NO: 81291 - DNA, 25 bp, Canis familiaris
cccagccccagattcttggtttggg

SEQ ID NO: 81292 - DNA, 25 bp, Canis familiaris
ccgagccaggaagtttggttgtgga

SEQ ID NO: 81293 - DNA, 25 bp, Canis familiaris
cccagcgcggaaatttgtgtttgga

SEQ ID NO: 81294 - DNA, 25 bp, Canis familiaris
ccctcgggtttttgattctgtgcca

SEQ ID NO: 81295 - DNA, 25 bp, Canis familiaris
cccactgttttctttgttctggact

SEQ ID NO: 81296 - DNA, 25 bp, Canis familiaris
cccactttcttcctatggcaataac

SEQ ID NO: 81297 - DNA, 25 bp, Canis familiaris
ccctcaagtcttcattgccagtaag

SEQ ID NO: 81298 - DNA, 25 bp, Canis familiaris
ccctgctaggttaattctaatttca

SEQ ID NO: 81299 - DNA, 25 bp, Canis familiaris
cccacttggttttcttatcttatag

SEQ ID NO: 81300 - DNA, 25 bp, Canis familiaris
cccttctggttttctcactttgaat

SEQ ID NO: 81301 - DNA, 25 bp, Canis familiaris
ccctttggagcggacgcctgtatac

SEQ ID NO: 81302 - DNA, 25 bp, Canis familiaris
ccctcattgcaacaaagcccttaac

SEQ ID NO: 81303 - DNA, 25 bp, Canis familiaris
ccctatggaattttatcccttcatt

SEQ ID NO: 81304 - DNA, 25 bp, Canis familiaris
ccctatgtcagaacttattcctccc

SEQ ID NO: 81305 - DNA, 25 bp, Canis familiaris
cccttgttcacaaaattcctgccgt

SEQ ID NO: 81306 - DNA, 25 bp, Canis familiaris
cccagattacactactatttctgac

SEQ ID NO: 81307 - DNA, 25 bp, Canis familiaris
cccagtagcaacaagcatactttac

SEQ ID NO: 81308 - DNA, 25 bp, Canis familiaris
cccagtcaccagcagctacttagac

SEQ ID NO: 81309 - DNA, 25 bp, Canis familiaris
cccagccatccagagtaccatgaag

SEQ ID NO: 81310 - DNA, 25 bp, Canis familiaris
cccaccctcaggaggctcagagacc

SEQ ID NO: 81311 - DNA, 25 bp, Canis familiaris
cccagccactgagccaggctcaagg

SEQ ID NO: 81312 - DNA, 25 bp, Canis familiaris
cccagcctctggaaggtgctgaagg

SEQ ID NO: 81313 - DNA, 25 bp, Canis familiaris
cccagcagctgatgcgggtctacgg

SEQ ID NO: 81314 - DNA, 25 bp, Canis familiaris
cccaggccagacatgtgtcggctgg

SEQ ID NO: 81315 - DNA, 25 bp, Canis familiaris
cccaggtagccaaggacgtgtgtac

SEQ ID NO: 81316 - DNA, 25 bp, Canis familiaris
cccaggtagccaatggtggcggcaa

SEQ ID NO: 81317 - DNA, 25 bp, Canis familiaris
cccacgctacagcaggtgctgcagg

SEQ ID NO: 81318 - DNA, 25 bp, Canis familiaris
cccagccttagccaggacgaggtga

SEQ ID NO: 81319 - DNA, 25 bp, Canis familiaris
cccagccaatgggaggactcggccc

SEQ ID NO: 81320 - DNA, 25 bp, Canis familiaris
cccactacgcgcgtgtgaatcaggc

SEQ ID NO: 81321 - DNA, 25 bp, Canis familiaris
cccactgctcaggccactgaatggg

SEQ ID NO: 81322 - DNA, 25 bp, Canis familiaris
cccactgctcaggccactgaatggg

SEQ ID NO: 81323 - DNA, 25 bp, Canis familiaris
cccactgcacactccatgatggtgt

SEQ ID NO: 81324 - DNA, 25 bp, Canis familiaris
cccaccaatcatggcctggaggcag

SEQ ID NO: 81325 - DNA, 25 bp, Canis familiaris
cccaccaactgcccagaaatcagga

SEQ ID NO: 81326 - DNA, 25 bp, Canis familiaris
cccaccccatcgactaaatcaggat

SEQ ID NO: 81327 - DNA, 25 bp, Canis familiaris
cccaccccttgcatgcaaattttca

SEQ ID NO: 81328 - DNA, 25 bp, Canis familiaris
cccacgcgtccgatgtaataatatc

SEQ ID NO: 81329 - DNA, 25 bp, Canis familiaris
cccacgcgtccgctttaatgatcac

SEQ ID NO: 81330 - DNA, 25 bp, Canis familiaris
cccttggtcgcgcagtataatccaa

SEQ ID NO: 81331 - DNA, 25 bp, Canis familiaris
cccttggtggcctaagtgggctcca

SEQ ID NO: 81332 - DNA, 25 bp, Canis familiaris
cccttggtggcctgagccaggtgta

SEQ ID NO: 81333 - DNA, 25 bp, Canis familiaris
cccatcgacgtggtcggccagaagt

SEQ ID NO: 81334 - DNA, 25 bp, Canis familiaris
cccacgtctgtggatccagcacagc

SEQ ID NO: 81335 - DNA, 25 bp, Canis familiaris
cccacggtgaggtaccacacgaagg

SEQ ID NO: 81336 - DNA, 25 bp, Canis familiaris
cccagccggatgaaaccaccagaag

SEQ ID NO: 81337 - DNA, 25 bp, Canis familiaris
cccagagaccagaaagaagccagaa

SEQ ID NO: 81338 - DNA, 25 bp, Canis familiaris
cccagctgcccaggaaggcagcacg

SEQ ID NO: 81339 - DNA, 25 bp, Canis familiaris
cccacatctgcctgagactgagaca

SEQ ID NO: 81340 - DNA, 25 bp, Canis familiaris
cccagcacccaattactgcaagcag

SEQ ID NO: 81341 - DNA, 25 bp, Canis familiaris
cccacatcccagttacgagacgaat

SEQ ID NO: 81342 - DNA, 25 bp, Canis familiaris
cccactccccttacgaggagaagag

SEQ ID NO: 81343 - DNA, 25 bp, Canis familiaris
cccagcaggccgctttgagggacaa

SEQ ID NO: 81344 - DNA, 25 bp, Canis familiaris
cccaggaggcggaagcgcagcggaa

SEQ ID NO: 81345 - DNA, 25 bp, Canis familiaris
cccacgggaatggagctcgcgggac

SEQ ID NO: 81346 - DNA, 25 bp, Canis familiaris
cccaccggagtaggatcagagtgaa

SEQ ID NO: 81347 - DNA, 25 bp, Canis familiaris
cccactcacggtctgagctggaata

SEQ ID NO: 81348 - DNA, 25 bp, Canis familiaris
cccaccggtggcagtctggaataaa

SEQ ID NO: 81349 - DNA, 25 bp, Canis familiaris
cccatcctggtgccaggtccagatt

SEQ ID NO: 81350 - DNA, 25 bp, Canis familiaris
cccatcaggctacaggtcacagttg

SEQ ID NO: 81351 - DNA, 25 bp, Canis familiaris
cccagctagcctctggtcacagagg

SEQ ID NO: 81352 - DNA, 25 bp, Canis familiaris
cccagctcgcttcagtggcagtggg

SEQ ID NO: 81353 - DNA, 25 bp, Canis familiaris
cccagcagcctcttggggcaagggt

SEQ ID NO: 81354 - DNA, 25 bp, Canis familiaris
cccacgtcgttgccagtgcaaggtg

SEQ ID NO: 81355 - DNA, 25 bp, Canis familiaris
cccacgtcgggttagcatcagagtg

SEQ ID NO: 81356 - DNA, 25 bp, Canis familiaris
cccacctcgggtgtgtctggagggg

SEQ ID NO: 81357 - DNA, 25 bp, Canis familiaris
cccacttcacgcgtttttggagaag

SEQ ID NO: 81358 - DNA, 25 bp, Canis familiaris
cccactaccgcgagggggagcaagc

SEQ ID NO: 81359 - DNA, 25 bp, Canis familiaris
cccatgtactcggttgtaggaagta

SEQ ID NO: 81360 - DNA, 25 bp, Canis familiaris
cccatggagcgcgtgtttgactaca

SEQ ID NO: 81361 - DNA, 25 bp, Canis familiaris
cccagtgatgccatggtggtctgcc

SEQ ID NO: 81362 - DNA, 25 bp, Canis familiaris
cccatgtgtgtcatggcggtcgctc

SEQ ID NO: 81363 - DNA, 25 bp, Canis familiaris
cccagtgtgatttagggccctgagc

SEQ ID NO: 81364 - DNA, 25 bp, Canis familiaris
cccagtgttgtctaggtgacccatc

SEQ ID NO: 81365 - DNA, 25 bp, Canis familiaris
ccctctgttttaagagacctgaact

SEQ ID NO: 81366 - DNA, 25 bp, Canis familiaris
cccattgctatcatacaggtcacga

SEQ ID NO: 81367 - DNA, 25 bp, Canis familiaris
cccatttcagcatcttggacaccac

SEQ ID NO: 81368 - DNA, 25 bp, Canis familiaris
cccttcactaacttggaagccccag

SEQ ID NO: 81369 - DNA, 25 bp, Canis familiaris
cccttcactatttttaaagcgcaat

SEQ ID NO: 81370 - DNA, 25 bp, Canis familiaris
cccttagctagtttggatatgacca

SEQ ID NO: 81371 - DNA, 25 bp, Canis familiaris
ccctccactagtagtgccaaaccca

SEQ ID NO: 81372 - DNA, 25 bp, Canis familiaris
cccttccatagattgtgcctttcag

SEQ ID NO: 81373 - DNA, 25 bp, Canis familiaris
cccttgccaacaaggcaccttgttc

SEQ ID NO: 81374 - DNA, 25 bp, Canis familiaris
cccttgcgcaaacagtttctttctg

SEQ ID NO: 81375 - DNA, 25 bp, Canis familiaris
ccctcttcataaaatatttcccttg

SEQ ID NO: 81376 - DNA, 25 bp, Canis familiaris
ccctcttcaggtctatttccaaatg

SEQ ID NO: 81377 - DNA, 25 bp, Canis familiaris
ccctcactgggggttttggcacttg

SEQ ID NO: 81378 - DNA, 25 bp, Canis familiaris
cccacctggagtttctatcggagtt

SEQ ID NO: 81379 - DNA, 25 bp, Canis familiaris
cccagccgttgtctatatcctgagt

SEQ ID NO: 81380 - DNA, 25 bp, Canis familiaris
cccaccttgtgtccaattcaagagc

SEQ ID NO: 81381 - DNA, 25 bp, Canis familiaris
cccatcctgggcagaattcagaggc

SEQ ID NO: 81382 - DNA, 25 bp, Canis familiaris
cccatctcgggacactatagcagta

SEQ ID NO: 81383 - DNA, 25 bp, Canis familiaris
ccaattcgtggggagcgaacgttgt

SEQ ID NO: 81384 - DNA, 25 bp, Canis familiaris
cccactcgtagtcagccaaatttga

SEQ ID NO: 81385 - DNA, 25 bp, Canis familiaris
cccactggaagccttgtccaaatta

SEQ ID NO: 81386 - DNA, 25 bp, Canis familiaris
cccacgctggacattgtcgcaagtc

SEQ ID NO: 81387 - DNA, 25 bp, Canis familiaris
cccacgctgctgctgtatgtggacg

SEQ ID NO: 81388 - DNA, 25 bp, Canis familiaris
cccagctgctgccttggaaggagag

SEQ ID NO: 81389 - DNA, 25 bp, Canis familiaris
cccagtctcatgatggagagggaac

SEQ ID NO: 81390 - DNA, 25 bp, Canis familiaris
cccacccagagacaggaagaagcca

SEQ ID NO: 81391 - DNA, 25 bp, Canis familiaris
cccacccgctgacaacatggatgag

SEQ ID NO: 81392 - DNA, 25 bp, Canis familiaris
cccacccagcgagacacacaagctg

SEQ ID NO: 81393 - DNA, 25 bp, Canis familiaris
cccacccactggaatccagcagcag

SEQ ID NO: 81394 - DNA, 25 bp, Canis familiaris
cccactgcgaatcgcgaccaggagg

SEQ ID NO: 81395 - DNA, 25 bp, Canis familiaris
cccatccaacatccgacagattgac

SEQ ID NO: 81396 - DNA, 25 bp, Canis familiaris
cccatgagatgatccagaagtctga

SEQ ID NO: 81397 - DNA, 25 bp, Canis familiaris
cccatgtgtgatcttgtgtggcaga

SEQ ID NO: 81398 - DNA, 25 bp, Canis familiaris
cccatggtgctattctgtgtccaac

SEQ ID NO: 81399 - DNA, 25 bp, Canis familiaris
cccatggtgtacatcctccataata

SEQ ID NO: 81400 - DNA, 25 bp, Canis familiaris
cccttttaccttttgcataatgaat

SEQ ID NO: 81401 - DNA, 25 bp, Canis familiaris
cccttatttactttccatctgatat

SEQ ID NO: 81402 - DNA, 25 bp, Canis familiaris
cccttcacttcccaatacactagtg

SEQ ID NO: 81403 - DNA, 25 bp, Canis familiaris
cccatttctatctctctaatctagt

SEQ ID NO: 81404 - DNA, 25 bp, Canis familiaris
cccatgattgctacacccaatagct

SEQ ID NO: 81405 - DNA, 25 bp, Canis familiaris
cccagagtcttactgccagcaatca

SEQ ID NO: 81406 - DNA, 25 bp, Canis familiaris
cccatgatatctgaagctatgaata

SEQ ID NO: 81407 - DNA, 25 bp, Canis familiaris
cccatgatcctcaaagcccagaagg

SEQ ID NO: 81408 - DNA, 25 bp, Canis familiaris
cccagacacccaagtccatggagat

SEQ ID NO: 81409 - DNA, 25 bp, Canis familiaris
cccatgaacccactgatcactggag

SEQ ID NO: 81410 - DNA, 25 bp, Canis familiaris
cccttgtctccacaccatgagagtg

SEQ ID NO: 81411 - DNA, 25 bp, Canis familiaris
ccctagtagatgccgacgcagacct

SEQ ID NO: 81412 - DNA, 25 bp, Canis familiaris
cccatgaatacccaacgagaccgag

SEQ ID NO: 81413 - DNA, 25 bp, Canis familiaris
ccgtgaatccagtccacttactggg

SEQ ID NO: 81414 - DNA, 25 bp, Canis familiaris
ccgcagaatcgaccccttagggaga

SEQ ID NO: 81415 - DNA, 25 bp, Canis familiaris
cccagcactggccccagttagggat

SEQ ID NO: 81416 - DNA, 25 bp, Canis familiaris
cccagatctggaccagcctctgaag

SEQ ID NO: 81417 - DNA, 25 bp, Canis familiaris
cccagcaggaggtcactccgcaaga

SEQ ID NO: 81418 - DNA, 25 bp, Canis familiaris
cccactggattgtcagccttgcaag

SEQ ID NO: 81419 - DNA, 25 bp, Canis familiaris
cccacctattgctgcctgagcaatg

SEQ ID NO: 81420 - DNA, 25 bp, Canis familiaris
cccaccgcttcatcactgagaaggc

SEQ ID NO: 81421 - DNA, 25 bp, Canis familiaris
cccacctcttcagccaggaggagct

SEQ ID NO: 81422 - DNA, 25 bp, Canis familiaris
cccatcttctaggccaagaaggcgc

SEQ ID NO: 81423 - DNA, 25 bp, Canis familiaris
cccttcatctactgcaacatcaacg

SEQ ID NO: 81424 - DNA, 25 bp, Canis familiaris
cccttctctgcatcggtgtagacag

SEQ ID NO: 81425 - DNA, 25 bp, Canis familiaris
cccatttgcgctaccggtgcaatga

SEQ ID NO: 81426 - DNA, 25 bp, Canis familiaris
cccatttgcgctaccggtgcaatga

SEQ ID NO: 81427 - DNA, 25 bp, Canis familiaris
ccgatgttctggatccggaagcgtc

SEQ ID NO: 81428 - DNA, 25 bp, Canis familiaris
cccaggtctggcaccgagacaggtg

SEQ ID NO: 81429 - DNA, 25 bp, Canis familiaris
cccaccatcgtcacccagaagaggg

SEQ ID NO: 81430 - DNA, 25 bp, Canis familiaris
cccagtccctgaacctctgggaggg

SEQ ID NO: 81431 - DNA, 25 bp, Canis familiaris
cccagttcacggagccgaggcagga

SEQ ID NO: 81432 - DNA, 25 bp, Canis familiaris
cccagctactcgggaggctgaggca

SEQ ID NO: 81433 - DNA, 25 bp, Canis familiaris
cccagtcccgggtagatgaccattt

SEQ ID NO: 81434 - DNA, 25 bp, Canis familiaris
cccaggccccgttcagaatggcaat

SEQ ID NO: 81435 - DNA, 25 bp, Canis familiaris
cccaggccccgattagaagatgaga

SEQ ID NO: 81436 - DNA, 25 bp, Canis familiaris
cccacgcgtccgaaagcatgagcaa

SEQ ID NO: 81437 - DNA, 25 bp, Canis familiaris
cccacgaggccaaaatgcagcactt

SEQ ID NO: 81438 - DNA, 25 bp, Canis familiaris
ccctctgactggaaaacagactcta

SEQ ID NO: 81439 - DNA, 25 bp, Canis familiaris
cccgtcctgaaatacatgttcactg

SEQ ID NO: 81440 - DNA, 25 bp, Canis familiaris
cccttctcccagagactgttcatgg

SEQ ID NO: 81441 - DNA, 25 bp, Canis familiaris
cccagtccccacagaaggtaagaag

SEQ ID NO: 81442 - DNA, 25 bp, Canis familiaris
cccctgccccttcaagggaagcaag

SEQ ID NO: 81443 - DNA, 25 bp, Canis familiaris
cccttcaacgctcaaagcttaacaa

SEQ ID NO: 81444 - DNA, 25 bp, Canis familiaris
cccttgcacccgaacagcggtaact

SEQ ID NO: 81445 - DNA, 25 bp, Canis familiaris
cccttgcaccacgttctttaaattg

SEQ ID NO: 81446 - DNA, 25 bp, Canis familiaris
cccttcattccgtttattcaatttg

SEQ ID NO: 81447 - DNA, 25 bp, Canis familiaris
cccttccccagctattttatgtctg

SEQ ID NO: 81448 - DNA, 25 bp, Canis familiaris
cccttctcttgcccattttggaggc

SEQ ID NO: 81449 - DNA, 25 bp, Canis familiaris
ccctctcatttcccattgttaagtt

SEQ ID NO: 81450 - DNA, 25 bp, Canis familiaris
cccttagtttgtcttgtttggtcag

SEQ ID NO: 81451 - DNA, 25 bp, Canis familiaris
cccttaatccttcatcagtttcgag

SEQ ID NO: 81452 - DNA, 25 bp, Canis familiaris
ccctctagctccttggaactttggt

SEQ ID NO: 81453 - DNA, 25 bp, Canis familiaris
cccaccagcaccttgtggactttga

SEQ ID NO: 81454 - DNA, 25 bp, Canis familiaris
cccatcctcctcttttaatattagg

SEQ ID NO: 81455 - DNA, 25 bp, Canis familiaris
cccatcacacctggcttctagaata

SEQ ID NO: 81456 - DNA, 25 bp, Canis familiaris
cccaccagcttctgtctcataaatt

SEQ ID NO: 81457 - DNA, 25 bp, Canis familiaris
cccaccacgttttgctatcagaact

SEQ ID NO: 81458 - DNA, 25 bp, Canis familiaris
cccacccatgtttctttgaacactc

SEQ ID NO: 81459 - DNA, 25 bp, Canis familiaris
cccacccatatgtactcttgaactc

SEQ ID NO: 81460 - DNA, 25 bp, Canis familiaris
cccaccacacattcctttgaaataa

SEQ ID NO: 81461 - DNA, 25 bp, Canis familiaris
cccacccagcttcctggtgatagaa

SEQ ID NO: 81462 - DNA, 25 bp, Canis familiaris
cccagcaagagcacaagaggaagag

SEQ ID NO: 81463 - DNA, 25 bp, Canis familiaris
cccatcaatagtttaatagacaggt

SEQ ID NO: 81464 - DNA, 25 bp, Canis familiaris
ccctaaatgcggaagaaataagttg

SEQ ID NO: 81465 - DNA, 25 bp, Canis familiaris
ccctacgcagggccaagttcaagtt

SEQ ID NO: 81466 - DNA, 25 bp, Canis familiaris
ccctatcgcggagaagagacacgct

SEQ ID NO: 81467 - DNA, 25 bp, Canis familiaris
cccatacgggggtgacacattgtcc

SEQ ID NO: 81468 - DNA, 25 bp, Canis familiaris
ccttcaaggggttcacccatggcct

SEQ ID NO: 81469 - DNA, 25 bp, Canis familiaris
cccatctggggagtaacaccggcgg

SEQ ID NO: 81470 - DNA, 25 bp, Canis familiaris
ccctatacgtgaggaatcccaaggg

SEQ ID NO: 81471 - DNA, 25 bp, Canis familiaris
ccctggccagaactactgccgaagg

SEQ ID NO: 81472 - DNA, 25 bp, Canis familiaris
ccctactcgtactctgtcgtgaggg

SEQ ID NO: 81473 - DNA, 25 bp, Canis familiaris
cccatcattgtttccctgtggttgg

SEQ ID NO: 81474 - DNA, 25 bp, Canis familiaris
cccatcttttactagcttgacgtgt

SEQ ID NO: 81475 - DNA, 25 bp, Canis familiaris
ccctctttgaacttcctgagctggt

SEQ ID NO: 81476 - DNA, 25 bp, Canis familiaris
ccctctgtttcttatcacaacttga

SEQ ID NO: 81477 - DNA, 25 bp, Canis familiaris
ccctagttcgtgtcccagagttagg

SEQ ID NO: 81478 - DNA, 25 bp, Canis familiaris
cccttgtctccgactcaagagtttg

SEQ ID NO: 81479 - DNA, 25 bp, Canis familiaris
cccattgacttccatgctcaagcag

SEQ ID NO: 81480 - DNA, 25 bp, Canis familiaris
cccatcaagcttctgcatggagcct

SEQ ID NO: 81481 - DNA, 25 bp, Canis familiaris
cccatcgagcgggtcaagctgctgc

SEQ ID NO: 81482 - DNA, 25 bp, Canis familiaris
cccatcgcggtctttacagtgactt

SEQ ID NO: 81483 - DNA, 25 bp, Canis familiaris
cccacctagtcatcaacatgtactt

SEQ ID NO: 81484 - DNA, 25 bp, Canis familiaris
cccaccttctcgtagagctaacatc

SEQ ID NO: 81485 - DNA, 25 bp, Canis familiaris
cccatcttgtctgcacaacaactac

SEQ ID NO: 81486 - DNA, 25 bp, Canis familiaris
cccttttcccactatgaagtcctgg

SEQ ID NO: 81487 - DNA, 25 bp, Canis familiaris
cccttttctctgtcattaaacctat

SEQ ID NO: 81488 - DNA, 25 bp, Canis familiaris
ccctttcccggcttaatgagccatt

SEQ ID NO: 81489 - DNA, 25 bp, Canis familiaris
cctcttctacgacgactactacgag

SEQ ID NO: 81490 - DNA, 25 bp, Canis familiaris
ccattcgaacgtctgccctatcaac

SEQ ID NO: 81491 - DNA, 25 bp, Canis familiaris
ccctagaacgtgctgttgcttccag

SEQ ID NO: 81492 - DNA, 25 bp, Canis familiaris
cccatggaatctttgtgggcctcca

SEQ ID NO: 81493 - DNA, 25 bp, Canis familiaris
cccaggaactgcttcctgatgtatc

SEQ ID NO: 81494 - DNA, 25 bp, Canis familiaris
cccagcccactcttggctatgagat

SEQ ID NO: 81495 - DNA, 25 bp, Canis familiaris
cccagcaccccagtggtacatgaaa

SEQ ID NO: 81496 - DNA, 25 bp, Canis familiaris
cccagccgccctggggaatgaaggg

SEQ ID NO: 81497 - DNA, 25 bp, Canis familiaris
cccagcacccaccctgggaagaggg

SEQ ID NO: 81498 - DNA, 25 bp, Canis familiaris
cccaccacatgccctgtggagaagg

SEQ ID NO: 81499 - DNA, 25 bp, Canis familiaris
cccaccacatctcatgaggagacgg

SEQ ID NO: 81500 - DNA, 25 bp, Canis familiaris
cccagccacaccaaaggcgagcagg

SEQ ID NO: 81501 - DNA, 25 bp, Canis familiaris
cccagctgcacagcacaacctggag

SEQ ID NO: 81502 - DNA, 25 bp, Canis familiaris
cccagctgcactttaacccagaggg

SEQ ID NO: 81503 - DNA, 25 bp, Canis familiaris
cccagtcagcttggaaaccacctgc

SEQ ID NO: 81504 - DNA, 25 bp, Canis familiaris
cccaggagcagtgagtaccccagga

SEQ ID NO: 81505 - DNA, 25 bp, Canis familiaris
cccaggaggtaggtacgctgccgac

SEQ ID NO: 81506 - DNA, 25 bp, Canis familiaris
cccaggggtgggtcatgggctctat

SEQ ID NO: 81507 - DNA, 25 bp, Canis familiaris
cccgatgatcggcttcatcggcctg

SEQ ID NO: 81508 - DNA, 25 bp, Canis familiaris
cccagatgagcgtcgctttgccggt

SEQ ID NO: 81509 - DNA, 25 bp, Canis familiaris
cccagagggtccttggctaggtgca

SEQ ID NO: 81510 - DNA, 25 bp, Canis familiaris
cccagaggcttcttcttgctggtgg

SEQ ID NO: 81511 - DNA, 25 bp, Canis familiaris
ccctcaagatctgctcttggaacgt

SEQ ID NO: 81512 - DNA, 25 bp, Canis familiaris
cccataggtctctagcctgataaga

SEQ ID NO: 81513 - DNA, 25 bp, Canis familiaris
cccataacctaagcatactcagcca

SEQ ID NO: 81514 - DNA, 25 bp, Canis familiaris
cccagaacattcagcctgggaagca

SEQ ID NO: 81515 - DNA, 25 bp, Canis familiaris
cccagaagtgttagcctgtggcggc

SEQ ID NO: 81516 - DNA, 25 bp, Canis familiaris
ccctcaaggtttgcctggggctgtg

SEQ ID NO: 81517 - DNA, 25 bp, Canis familiaris
cccaccaggtgccttcctgggtggg

SEQ ID NO: 81518 - DNA, 25 bp, Canis familiaris
cccaccaggacttcctgctgtttgg

SEQ ID NO: 81519 - DNA, 25 bp, Canis familiaris
cccacctggatccatctctggatct

SEQ ID NO: 81520 - DNA, 25 bp, Canis familiaris
cccagcgctggcgttgctggtgact

SEQ ID NO: 81521 - DNA, 25 bp, Canis familiaris
cccagctgcagggggctgcaggcct

SEQ ID NO: 81522 - DNA, 25 bp, Canis familiaris
cccagcccaccaggtgaggctgcat

SEQ ID NO: 81523 - DNA, 25 bp, Canis familiaris
cccagccctccagggggcgagaaga

SEQ ID NO: 81524 - DNA, 25 bp, Canis familiaris
cccagacctgcctgggacacgggaa

SEQ ID NO: 81525 - DNA, 25 bp, Canis familiaris
cccagatactgcctgggggtccgga

SEQ ID NO: 81526 - DNA, 25 bp, Canis familiaris
cccatgacccgctgtgggtactggc

SEQ ID NO: 81527 - DNA, 25 bp, Canis familiaris
cccagcccctcaatgtaggctactg

SEQ ID NO: 81528 - DNA, 25 bp, Canis familiaris
cccagccccattgctatagtgacta

SEQ ID NO: 81529 - DNA, 25 bp, Canis familiaris
cccacctactgtgctatagagacac

SEQ ID NO: 81530 - DNA, 25 bp, Canis familiaris
ccctcttgaatcagctgatacgatc

SEQ ID NO: 81531 - DNA, 25 bp, Canis familiaris
ccctcaggaatctgagatctcgact

SEQ ID NO: 81532 - DNA, 25 bp, Canis familiaris
ccctggatggtgcagcagttctagc

SEQ ID NO: 81533 - DNA, 25 bp, Canis familiaris
cccagagcttgtcgatgttgtcgtg

SEQ ID NO: 81534 - DNA, 25 bp, Canis familiaris
ccctactgatgatgtgttgttgcca

SEQ ID NO: 81535 - DNA, 25 bp, Canis familiaris
cccatactgtgggcagttcggctca

SEQ ID NO: 81536 - DNA, 25 bp, Canis familiaris
cccttattgccagcttgctggctag

SEQ ID NO: 81537 - DNA, 25 bp, Canis familiaris
cccttgcaatgcggaatggctttaa

SEQ ID NO: 81538 - DNA, 25 bp, Canis familiaris
cccttcaagttgcacgtgcctataa

SEQ ID NO: 81539 - DNA, 25 bp, Canis familiaris
cccttcaagataacacagcccagat

SEQ ID NO: 81540 - DNA, 25 bp, Canis familiaris
cccattagagatttcactcccgcac

SEQ ID NO: 81541 - DNA, 25 bp, Canis familiaris
cccatacatttatatgctcccgcaa

SEQ ID NO: 81542 - DNA, 25 bp, Canis familiaris
cccatacatgtaaatctccgcgaca

SEQ ID NO: 81543 - DNA, 25 bp, Canis familiaris
ccctcaatgtgcaaacttcgtgcag

SEQ ID NO: 81544 - DNA, 25 bp, Canis familiaris
ccctcagcatgtcaacaacgtctat

SEQ ID NO: 81545 - DNA, 25 bp, Canis familiaris
ccctctgcatctgatctcatattgt

SEQ ID NO: 81546 - DNA, 25 bp, Canis familiaris
ccctagcatcgatctggttgtggtg

SEQ ID NO: 81547 - DNA, 25 bp, Canis familiaris
cccttcacagagcctgggtctgagg

SEQ ID NO: 81548 - DNA, 25 bp, Canis familiaris
ccctccactaggaggtctgcctaag

SEQ ID NO: 81549 - DNA, 25 bp, Canis familiaris
ccctcgccaagaggcgggtgcctag

SEQ ID NO: 81550 - DNA, 25 bp, Canis familiaris
cccatcgcgagactcatcctgggac

SEQ ID NO: 81551 - DNA, 25 bp, Canis familiaris
ccctcagccagttcaccagggaagg

SEQ ID NO: 81552 - DNA, 25 bp, Canis familiaris
cccatcagaacttgcccggaaggca

SEQ ID NO: 81553 - DNA, 25 bp, Canis familiaris
cccagaaaccatcgcttggcttggt

SEQ ID NO: 81554 - DNA, 25 bp, Canis familiaris
cccatgcaaaaccagcttcctgtga

SEQ ID NO: 81555 - DNA, 25 bp, Canis familiaris
cccagcaaggagcagttcctgccca

SEQ ID NO: 81556 - DNA, 25 bp, Canis familiaris
cccagcaggtggcagccagcctgct

SEQ ID NO: 81557 - DNA, 25 bp, Canis familiaris
cccagctggctggaagcctggcagt

SEQ ID NO: 81558 - DNA, 25 bp, Canis familiaris
cccagggcgcgatcctggagatccg

SEQ ID NO: 81559 - DNA, 25 bp, Canis familiaris
cccagtgggcttcactgggcccgtg

SEQ ID NO: 81560 - DNA, 25 bp, Canis familiaris
cccagtggcagttcacacagggccc

SEQ ID NO: 81561 - DNA, 25 bp, Canis familiaris
cccagatcctgctaggccaggagcc

SEQ ID NO: 81562 - DNA, 25 bp, Canis familiaris
cccagcatcctgccaggagcgtgac

SEQ ID NO: 81563 - DNA, 25 bp, Canis familiaris
cccagaactccattgcagctgatgg

SEQ ID NO: 81564 - DNA, 25 bp, Canis familiaris
cccagaaggacggcatgctgctgtc

SEQ ID NO: 81565 - DNA, 25 bp, Canis familiaris
cccatgctttgtggccatgcttgtg

SEQ ID NO: 81566 - DNA, 25 bp, Canis familiaris
cccatcatgtcatagccatgtggtt

SEQ ID NO: 81567 - DNA, 25 bp, Canis familiaris
cccaggctgctgtagctctgtggga

SEQ ID NO: 81568 - DNA, 25 bp, Canis familiaris
cccagtgtcagattgatcttggaga

SEQ ID NO: 81569 - DNA, 25 bp, Canis familiaris
cccagtgtcaagtcaccaaagacaa

SEQ ID NO: 81570 - DNA, 25 bp, Canis familiaris
cccagtgtcgagtcccgacatgaac

SEQ ID NO: 81571 - DNA, 25 bp, Canis familiaris
ccctcttgcaggttccaacataata

SEQ ID NO: 81572 - DNA, 25 bp, Canis familiaris
ccctctctgaggtttcctgggattg

SEQ ID NO: 81573 - DNA, 25 bp, Canis familiaris
cccattctccagttttgttcagttg

SEQ ID NO: 81574 - DNA, 25 bp, Canis familiaris
cccagttcactgtgttggatcaggt

SEQ ID NO: 81575 - DNA, 25 bp, Canis familiaris
cccattcccatgcgtaggacacggg

SEQ ID NO: 81576 - DNA, 25 bp, Canis familiaris
ccctttctcaggtggcagagccgag

SEQ ID NO: 81577 - DNA, 25 bp, Canis familiaris
ccctttgcctgtcctggaagggctg

SEQ ID NO: 81578 - DNA, 25 bp, Canis familiaris
cccttctgacccgaggaaagccaga

SEQ ID NO: 81579 - DNA, 25 bp, Canis familiaris
cccttcgcccacaaaattagccaag

SEQ ID NO: 81580 - DNA, 25 bp, Canis familiaris
cccttcgcccatgattggtgaccaa

SEQ ID NO: 81581 - DNA, 25 bp, Canis familiaris
cccttctacactttctggaggcaca

SEQ ID NO: 81582 - DNA, 25 bp, Canis familiaris
cccattctcccgttaggagctgctt

SEQ ID NO: 81583 - DNA, 25 bp, Canis familiaris
cccttctcagcggtgtcatatacgt

SEQ ID NO: 81584 - DNA, 25 bp, Canis familiaris
cccttctgagctgaggcgctgaggt

SEQ ID NO: 81585 - DNA, 25 bp, Canis familiaris
ccgctttggttattgcctgggttgg

SEQ ID NO: 81586 - DNA, 25 bp, Canis familiaris
ccctttggtggaatgcctggtggct

SEQ ID NO: 81587 - DNA, 25 bp, Canis familiaris
ccctgttgtatgtggcgctttgagt

SEQ ID NO: 81588 - DNA, 25 bp, Canis familiaris
ccctaacttgggccagccttggttg

SEQ ID NO: 81589 - DNA, 25 bp, Canis familiaris
cccataacttgattccaggttgagt

SEQ ID NO: 81590 - DNA, 25 bp, Canis familiaris
ccctctaccagtgccaggagctgga

SEQ ID NO: 81591 - DNA, 25 bp, Canis familiaris
cccttctgcagaggcccagagagta

SEQ ID NO: 81592 - DNA, 25 bp, Canis familiaris
cccttctcactccgacaatgagtcc

SEQ ID NO: 81593 - DNA, 25 bp, Canis familiaris
cccatccttctgcttcatataatca

SEQ ID NO: 81594 - DNA, 25 bp, Canis familiaris
cccatcctttgccttatctaacaaa

SEQ ID NO: 81595 - DNA, 25 bp, Canis familiaris
cccatcacatcttctttactgtaaa

SEQ ID NO: 81596 - DNA, 25 bp, Canis familiaris
ccctaattcactgtcgctttggagt

SEQ ID NO: 81597 - DNA, 25 bp, Canis familiaris
cccttataccacttgatggttggag

SEQ ID NO: 81598 - DNA, 25 bp, Canis familiaris
cccttttgcacatgggctgctatgg

SEQ ID NO: 81599 - DNA, 25 bp, Canis familiaris
cccttcttgttgaggctctttggaa

SEQ ID NO: 81600 - DNA, 25 bp, Canis familiaris
cccttcctttgcacttcttagtgta

SEQ ID NO: 81601 - DNA, 25 bp, Canis familiaris
cccttcctagtctatcgttctgggt

SEQ ID NO: 81602 - DNA, 25 bp, Canis familiaris
ccctgcccaatttttcttctgaggt

SEQ ID NO: 81603 - DNA, 25 bp, Canis familiaris
cccagcccaacattaccttctggtt

SEQ ID NO: 81604 - DNA, 25 bp, Canis familiaris
cccatcaccaaccaaccagttgagt

SEQ ID NO: 81605 - DNA, 25 bp, Canis familiaris
ccctacaagaccactcacgtgtgtg

SEQ ID NO: 81606 - DNA, 25 bp, Canis familiaris
ccctcaaggcccatctatgttgtaa

SEQ ID NO: 81607 - DNA, 25 bp, Canis familiaris
cctcagaaacccagctttttacatt

SEQ ID NO: 81608 - DNA, 25 bp, Canis familiaris
cccttacatacctcttttagtcatt

SEQ ID NO: 81609 - DNA, 25 bp, Canis familiaris
tccctacctacctggttgtaacaat

SEQ ID NO: 81610 - DNA, 25 bp, Canis familiaris
cccatccgtacctaagtttgcaaca

SEQ ID NO: 81611 - DNA, 25 bp, Canis familiaris
ccctccgacccaaattttgaccatg

SEQ ID NO: 81612 - DNA, 25 bp, Canis familiaris
cccttcgagcttgtagtctctacca

SEQ ID NO: 81613 - DNA, 25 bp, Canis familiaris
cccttcccttttctctgtagaagca

SEQ ID NO: 81614 - DNA, 25 bp, Canis familiaris
cccattcctcgtcacagtgttaagg

SEQ ID NO: 81615 - DNA, 25 bp, Canis familiaris
cccatcttccttcacagtatttaag

SEQ ID NO: 81616 - DNA, 25 bp, Canis familiaris
cccagcttctttacacaggtcaaaa

SEQ ID NO: 81617 - DNA, 25 bp, Canis familiaris
cccatgccctcttctaggggcaaga

SEQ ID NO: 81618 - DNA, 25 bp, Canis familiaris
cccagacatcatcaaggtggccaag

SEQ ID NO: 81619 - DNA, 25 bp, Canis familiaris
cccagactgcagctcgggagcttgg

SEQ ID NO: 81620 - DNA, 25 bp, Canis familiaris
cccaggctacgtgttgagcgtggcc

SEQ ID NO: 81621 - DNA, 25 bp, Canis familiaris
cccaggttctgtgtctaggtggggg

SEQ ID NO: 81622 - DNA, 25 bp, Canis familiaris
cccagaggattgtccccaggtgggg

SEQ ID NO: 81623 - DNA, 25 bp, Canis familiaris
cccagggagtgagggcctgtgtaga

SEQ ID NO: 81624 - DNA, 25 bp, Canis familiaris
cccagggcctgatgccctatggtca

SEQ ID NO: 81625 - DNA, 25 bp, Canis familiaris
cccatcggcatctccgactatggaa

SEQ ID NO: 81626 - DNA, 25 bp, Canis familiaris
cccatcccatctacctgacagatgg

SEQ ID NO: 81627 - DNA, 25 bp, Canis familiaris
cctataccgatatctggctatgtgc

SEQ ID NO: 81628 - DNA, 25 bp, Canis familiaris
ccctaactattttgtgcaatggcga

SEQ ID NO: 81629 - DNA, 25 bp, Canis familiaris
cccagacctttgacttcacttctgg

SEQ ID NO: 81630 - DNA, 25 bp, Canis familiaris
cccagaggtttgtctactgcattca

SEQ ID NO: 81631 - DNA, 25 bp, Canis familiaris
cccagggtatagtaagtcaccaggg

SEQ ID NO: 81632 - DNA, 25 bp, Canis familiaris
cccagggttcattacaacacccatg

SEQ ID NO: 81633 - DNA, 25 bp, Canis familiaris
cccagtgcatttcagtacaagccct

SEQ ID NO: 81634 - DNA, 25 bp, Canis familiaris
cccagacttttatcacaagctcctt

SEQ ID NO: 81635 - DNA, 25 bp, Canis familiaris
cccagtcttttctcaaatgtcatct

SEQ ID NO: 81636 - DNA, 25 bp, Canis familiaris
ccgcttcttcttggacaaaacactg

SEQ ID NO: 81637 - DNA, 25 bp, Canis familiaris
cccattctatcatcccaaaactgga

SEQ ID NO: 81638 - DNA, 25 bp, Canis familiaris
cccataatatcatgctccaaatatt

SEQ ID NO: 81639 - DNA, 25 bp, Canis familiaris
cccatcagtctcagctaaccatatt

SEQ ID NO: 81640 - DNA, 25 bp, Canis familiaris
ccctcaatacattcataatccttca

SEQ ID NO: 81641 - DNA, 25 bp, Canis familiaris
ccctcaccatgctgcaggtagttca

SEQ ID NO: 81642 - DNA, 25 bp, Canis familiaris
cccatcaccatttttgtatttcagt

SEQ ID NO: 81643 - DNA, 25 bp, Canis familiaris
cccattctcattcttggatgctcat

SEQ ID NO: 81644 - DNA, 25 bp, Canis familiaris
cccttctgtatcctatgtacgcagt

SEQ ID NO: 81645 - DNA, 25 bp, Canis familiaris
cccttactggcccagatcttcagtt

SEQ ID NO: 81646 - DNA, 25 bp, Canis familiaris
cccagtaagtgcgggtcataagctt

SEQ ID NO: 81647 - DNA, 25 bp, Canis familiaris
cccttgcaacctgggacaaagctga

SEQ ID NO: 81648 - DNA, 25 bp, Canis familiaris
ccctcatcaaaggggaatgatacca

SEQ ID NO: 81649 - DNA, 25 bp, Canis familiaris
ccctccaacaggggccatgagttag

SEQ ID NO: 81650 - DNA, 25 bp, Canis familiaris
ccccggatggggcgaatttcagtgt

SEQ ID NO: 81651 - DNA, 25 bp, Canis familiaris
ccctctgtgtgggagcctactttaa

SEQ ID NO: 81652 - DNA, 25 bp, Canis familiaris
ccctagggggcacctgtcttaagat

SEQ ID NO: 81653 - DNA, 25 bp, Canis familiaris
cccaggggaggcttatttgaatatg

SEQ ID NO: 81654 - DNA, 25 bp, Canis familiaris
cccatggagggcactatccgaaagg

SEQ ID NO: 81655 - DNA, 25 bp, Canis familiaris
cccaggagaggacctctccccaagc

SEQ ID NO: 81656 - DNA, 25 bp, Canis familiaris
cccaggaatctgtccttcttcctga

SEQ ID NO: 81657 - DNA, 25 bp, Canis familiaris
cccagcagaaagtctgcttctccct

SEQ ID NO: 81658 - DNA, 25 bp, Canis familiaris
cccagagatgaagctttctgcctac

SEQ ID NO: 81659 - DNA, 25 bp, Canis familiaris
cccagagagagctatcctttcctgc

SEQ ID NO: 81660 - DNA, 25 bp, Canis familiaris
cccagaggaccaggccgatcctggt

SEQ ID NO: 81661 - DNA, 25 bp, Canis familiaris
cccagggtctcagcacccctgggtc

SEQ ID NO: 81662 - DNA, 25 bp, Canis familiaris
cccagggttcagcgcactgcctggg

SEQ ID NO: 81663 - DNA, 25 bp, Canis familiaris
cccagtgggctacatcagagtcggt

SEQ ID NO: 81664 - DNA, 25 bp, Canis familiaris
ccctgtgtggaacctgggtcgactc

SEQ ID NO: 81665 - DNA, 25 bp, Canis familiaris
ccctgctgtgtgaaccgtggaaaca

SEQ ID NO: 81666 - DNA, 25 bp, Canis familiaris
ccctctgggccctccagaaagaaca

SEQ ID NO: 81667 - DNA, 25 bp, Canis familiaris
cccttcaggtgcttaccaaccagaa

SEQ ID NO: 81668 - DNA, 25 bp, Canis familiaris
cccttcagggttggtgcagacacga

SEQ ID NO: 81669 - DNA, 25 bp, Canis familiaris
cccttgggtggatctgcagccaggg

SEQ ID NO: 81670 - DNA, 25 bp, Canis familiaris
cccttaggcggctgccaacatgggc

SEQ ID NO: 81671 - DNA, 25 bp, Canis familiaris
ccctacaagccgggccagacagtgt

SEQ ID NO: 81672 - DNA, 25 bp, Canis familiaris
ccctagcaaggggaggcccgtgtgg

SEQ ID NO: 81673 - DNA, 25 bp, Canis familiaris
ccctgacttcgggagagcctttggc

SEQ ID NO: 81674 - DNA, 25 bp, Canis familiaris
ccctgactctggtgaacttctaaca

SEQ ID NO: 81675 - DNA, 25 bp, Canis familiaris
cccatgccctgatccaagaaaaact

SEQ ID NO: 81676 - DNA, 25 bp, Canis familiaris
cccagaccagcatcgggaaagaaat

SEQ ID NO: 81677 - DNA, 25 bp, Canis familiaris
cccagacggcatcaggcgagaagag

SEQ ID NO: 81678 - DNA, 25 bp, Canis familiaris
cccatgcccagtccatggcagagac

SEQ ID NO: 81679 - DNA, 25 bp, Canis familiaris
cccatgtactgccacaggacagaca

SEQ ID NO: 81680 - DNA, 25 bp, Canis familiaris
cccagaactgctccgagacgtgggc

SEQ ID NO: 81681 - DNA, 25 bp, Canis familiaris
cccagagacgctgaggaggtggaca

SEQ ID NO: 81682 - DNA, 25 bp, Canis familiaris
cccagagcacctgcagtgtttttca

SEQ ID NO: 81683 - DNA, 25 bp, Canis familiaris
cccagacctctgtaattttatatag

SEQ ID NO: 81684 - DNA, 25 bp, Canis familiaris
cccgacctggactccattgttagtc

SEQ ID NO: 81685 - DNA, 25 bp, Canis familiaris
ccctccttggtatcctactaagtag

SEQ ID NO: 81686 - DNA, 25 bp, Canis familiaris
cccatggcttcagaccctggaaagt

SEQ ID NO: 81687 - DNA, 25 bp, Canis familiaris
cccaggctggacaattcctggaagg

SEQ ID NO: 81688 - DNA, 25 bp, Canis familiaris
cccagggtgactatcctgggctccc

SEQ ID NO: 81689 - DNA, 25 bp, Canis familiaris
cccagaggacactcatcctgggccc

SEQ ID NO: 81690 - DNA, 25 bp, Canis familiaris
ccctcaggccaggactccagaggcc

SEQ ID NO: 81691 - DNA, 25 bp, Canis familiaris
cccttggccaagcaccaggtgcaag

SEQ ID NO: 81692 - DNA, 25 bp, Canis familiaris
ccctaccaacagccttcaggtgttg

SEQ ID NO: 81693 - DNA, 25 bp, Canis familiaris
ccctgtccaggaagctccaggtttc

SEQ ID NO: 81694 - DNA, 25 bp, Canis familiaris
cccttgcaaggtccctgggtgaatg

SEQ ID NO: 81695 - DNA, 25 bp, Canis familiaris
cccttcaggagagcctctgggcaat

SEQ ID NO: 81696 - DNA, 25 bp, Canis familiaris
cccttagtaagtgcctctagctcaa

SEQ ID NO: 81697 - DNA, 25 bp, Canis familiaris
cccatctctgtatgaccacttatgt

SEQ ID NO: 81698 - DNA, 25 bp, Canis familiaris
cccagatcatgtttgagaccttcaa

SEQ ID NO: 81699 - DNA, 25 bp, Canis familiaris
cccagatcatgtttgagaccttcaa

SEQ ID NO: 81700 - DNA, 25 bp, Canis familiaris
cccagtctggaaagaccctctcatg

SEQ ID NO: 81701 - DNA, 25 bp, Canis familiaris
cccagtgggttgaacatcctgccat

SEQ ID NO: 81702 - DNA, 25 bp, Canis familiaris
cccagatgtgtgtgatattcctgct

SEQ ID NO: 81703 - DNA, 25 bp, Canis familiaris
cccatggtgttaacattcctctcat

SEQ ID NO: 81704 - DNA, 25 bp, Canis familiaris
cccagggctttggcatagcctcaga

SEQ ID NO: 81705 - DNA, 25 bp, Canis familiaris
cccagaccacttcgctatggtatat

SEQ ID NO: 81706 - DNA, 25 bp, Canis familiaris
cccagaccacttcgctatggtatat

SEQ ID NO: 81707 - DNA, 25 bp, Canis familiaris
cccaggtgccctggctaattgtatt

SEQ ID NO: 81708 - DNA, 25 bp, Canis familiaris
cccttgggcactggtaatttgttct

SEQ ID NO: 81709 - DNA, 25 bp, Canis familiaris
ccctgggtacgtgattgaagtcttt

SEQ ID NO: 81710 - DNA, 25 bp, Canis familiaris
cccatgaaatacctagttgactcct

SEQ ID NO: 81711 - DNA, 25 bp, Canis familiaris
ccctgtaatgagcttggttcctctt

SEQ ID NO: 81712 - DNA, 25 bp, Canis familiaris
cccttaagggcagggcttcacttct

SEQ ID NO: 81713 - DNA, 25 bp, Canis familiaris
cctcaaaaggccaggcttccatttc

SEQ ID NO: 81714 - DNA, 25 bp, Canis familiaris
ccgtaatcaaccatgggatccatta

SEQ ID NO: 81715 - DNA, 25 bp, Canis familiaris
ccctaactgaccaatgggccactta

SEQ ID NO: 81716 - DNA, 25 bp, Canis familiaris
ccctacctgctcccatagagaattt

SEQ ID NO: 81717 - DNA, 25 bp, Canis familiaris
cccatcaccatagtccacgagatag

SEQ ID NO: 81718 - DNA, 25 bp, Canis familiaris
cccatccaaccagtcagctggcagg

SEQ ID NO: 81719 - DNA, 25 bp, Canis familiaris
cccatccacagtgcgagtgcgtgtg

SEQ ID NO: 81720 - DNA, 25 bp, Canis familiaris
cccatccacagctatgccgggtggt

SEQ ID NO: 81721 - DNA, 25 bp, Canis familiaris
cccatcccacaaccaggaggtttgc

SEQ ID NO: 81722 - DNA, 25 bp, Canis familiaris
cccagagcccaacaggagggggcca

SEQ ID NO: 81723 - DNA, 25 bp, Canis familiaris
cccaggctgccacggaggaggcaag

SEQ ID NO: 81724 - DNA, 25 bp, Canis familiaris
cccagagctgaacgggaagctcact

SEQ ID NO: 81725 - DNA, 25 bp, Canis familiaris
cccgtggttgtgctcaaaccttggt

SEQ ID NO: 81726 - DNA, 25 bp, Canis familiaris
cccaggggcttccatgagaaccttg

SEQ ID NO: 81727 - DNA, 25 bp, Canis familiaris
cccaggaggagtcggcccacctggg

SEQ ID NO: 81728 - DNA, 25 bp, Canis familiaris
cccaggagctgactctggccctggg

SEQ ID NO: 81729 - DNA, 25 bp, Canis familiaris
cccagggctggacacagactgcagg

SEQ ID NO: 81730 - DNA, 25 bp, Canis familiaris
cccagggagggccaagtcagcagta

SEQ ID NO: 81731 - DNA, 25 bp, Canis familiaris
cccagggatcccgaagatatgtgta

SEQ ID NO: 81732 - DNA, 25 bp, Canis familiaris
cccaggcgacctcacaactgtgaga

SEQ ID NO: 81733 - DNA, 25 bp, Canis familiaris
cccaggcaattccccaattggactt

SEQ ID NO: 81734 - DNA, 25 bp, Canis familiaris
ccctgcgatttccccaaatgtggga

SEQ ID NO: 81735 - DNA, 25 bp, Canis familiaris
ccctcgctatccattgaaactccga

SEQ ID NO: 81736 - DNA, 25 bp, Canis familiaris
ccctctcttctgtggaaactctgaa

SEQ ID NO: 81737 - DNA, 25 bp, Canis familiaris
ccctcaccctgatggtacttcagaa

SEQ ID NO: 81738 - DNA, 25 bp, Canis familiaris
ccctaccttgtcatgtaccatcaat

SEQ ID NO: 81739 - DNA, 25 bp, Canis familiaris
cccattccttccttgtagtatacaa

SEQ ID NO: 81740 - DNA, 25 bp, Canis familiaris
cccagatcctgtgctttattctaaa

SEQ ID NO: 81741 - DNA, 25 bp, Canis familiaris
cccagtctctggtttgtattttaat

SEQ ID NO: 81742 - DNA, 25 bp, Canis familiaris
cccagatttgtgtttgatagttcct

SEQ ID NO: 81743 - DNA, 25 bp, Canis familiaris
cccagtttgtggatgcattgctgct

SEQ ID NO: 81744 - DNA, 25 bp, Canis familiaris
ccctgcatttgtgcattcttcttca

SEQ ID NO: 81745 - DNA, 25 bp, Canis familiaris
ccctcttgtgtgagtctcctacaga

SEQ ID NO: 81746 - DNA, 25 bp, Canis familiaris
ccctctgttgaagactcctactgta

SEQ ID NO: 81747 - DNA, 25 bp, Canis familiaris
cccttttgccaaatgtcctactggg

SEQ ID NO: 81748 - DNA, 25 bp, Canis familiaris
cccagtcattcctacttcaatagcg

SEQ ID NO: 81749 - DNA, 25 bp, Canis familiaris
cccagtttccttatcacttgctgta

SEQ ID NO: 81750 - DNA, 25 bp, Canis familiaris
cccatgtgtccacttgacgagcttt

SEQ ID NO: 81751 - DNA, 25 bp, Canis familiaris
cccaggttcagacagcgtgcactgt

SEQ ID NO: 81752 - DNA, 25 bp, Canis familiaris
cccaggtttagaaggtgcctgctac

SEQ ID NO: 81753 - DNA, 25 bp, Canis familiaris
cccaggagtaaacgggctgccttat

SEQ ID NO: 81754 - DNA, 25 bp, Canis familiaris
cccagtggtctctggaactcctttt

SEQ ID NO: 81755 - DNA, 25 bp, Canis familiaris
cccaggcgtccttcaaagtctgttt

SEQ ID NO: 81756 - DNA, 25 bp, Canis familiaris
cccagtagttcttccagggcagtgg

SEQ ID NO: 81757 - DNA, 25 bp, Canis familiaris
cccttagatgtccggggctgcacgc

SEQ ID NO: 81758 - DNA, 25 bp, Canis familiaris
cccttagatgtccggggctgcacgc

SEQ ID NO: 81759 - DNA, 25 bp, Canis familiaris
cccttacattcagcagacacgcact

SEQ ID NO: 81760 - DNA, 25 bp, Canis familiaris
cccatgctccatgccaaacagggct

SEQ ID NO: 81761 - DNA, 25 bp, Canis familiaris
cccatgtgctgcttccaagacaagg

SEQ ID NO: 81762 - DNA, 25 bp, Canis familiaris
cccttgctgcttgagctgcagaagc

SEQ ID NO: 81763 - DNA, 25 bp, Canis familiaris
ccctgtggctgtgagcatgctaacc

SEQ ID NO: 81764 - DNA, 25 bp, Canis familiaris
ccctttctcattagcacttaccgag

SEQ ID NO: 81765 - DNA, 25 bp, Canis familiaris
ccctttctcttatttctacacgata

SEQ ID NO: 81766 - DNA, 25 bp, Canis familiaris
ccctttctcgtcttctatgactaat

SEQ ID NO: 81767 - DNA, 25 bp, Canis familiaris
cccttcttgtgttcatttgccgaaa

SEQ ID NO: 81768 - DNA, 25 bp, Canis familiaris
ccctgtttgtgaattgccccaaata

SEQ ID NO: 81769 - DNA, 25 bp, Canis familiaris
cccatgttcgctttgtcaccgaaca

SEQ ID NO: 81770 - DNA, 25 bp, Canis familiaris
cccagtatcgccttaagccagaacc

SEQ ID NO: 81771 - DNA, 25 bp, Canis familiaris
ccgaacggcactaaaccactgagcc

SEQ ID NO: 81772 - DNA, 25 bp, Canis familiaris
ccaggagctggacacctacctgatc

SEQ ID NO: 81773 - DNA, 25 bp, Canis familiaris
ccgtgagcgtggccacaaacacgat

SEQ ID NO: 81774 - DNA, 25 bp, Canis familiaris
ccctgccagcagggaaaacctgata

SEQ ID NO: 81775 - DNA, 25 bp, Canis familiaris
ccctacgatcacgtatacacctatt

SEQ ID NO: 81776 - DNA, 25 bp, Canis familiaris
ccctacttcacagagcctttatctc

SEQ ID NO: 81777 - DNA, 25 bp, Canis familiaris
ccctcttttcatcacgttaatctgc

SEQ ID NO: 81778 - DNA, 25 bp, Canis familiaris
ccctcgttggctcagctacgaattg

SEQ ID NO: 81779 - DNA, 25 bp, Canis familiaris
cccatttctcgtctgtatgctagat

SEQ ID NO: 81780 - DNA, 25 bp, Canis familiaris
cccttggccctgctgagagtaattt

SEQ ID NO: 81781 - DNA, 25 bp, Canis familiaris
ccctgttgcaccgttggcatattag

SEQ ID NO: 81782 - DNA, 25 bp, Canis familiaris
ccctgagccccgaggacaaaggtgc

SEQ ID NO: 81783 - DNA, 25 bp, Canis familiaris
cccagtccccactgttggagagggc

SEQ ID NO: 81784 - DNA, 25 bp, Canis familiaris
cccttcccatactgttggccaagga

SEQ ID NO: 81785 - DNA, 25 bp, Canis familiaris
cccattcccataaagctatccagaa

SEQ ID NO: 81786 - DNA, 25 bp, Canis familiaris
cccatcctccaggggtacaggacag

SEQ ID NO: 81787 - DNA, 25 bp, Canis familiaris
ccgaccagcagaggcggtagggccc

SEQ ID NO: 81788 - DNA, 25 bp, Canis familiaris
cccaggcaggatcgggttggcagcc

SEQ ID NO: 81789 - DNA, 25 bp, Canis familiaris
cccagtgaatacccgattggcacca

SEQ ID NO: 81790 - DNA, 25 bp, Canis familiaris
cccaggactacacccaggaacaatt

SEQ ID NO: 81791 - DNA, 25 bp, Canis familiaris
ccctggacaacttcctggacaaatt

SEQ ID NO: 81792 - DNA, 25 bp, Canis familiaris
ccctggcaataataatggcacttca

SEQ ID NO: 81793 - DNA, 25 bp, Canis familiaris
cccatggcaaattccatggcaccgt

SEQ ID NO: 81794 - DNA, 25 bp, Canis familiaris
cccatggcgcaattcttggggggga

SEQ ID NO: 81795 - DNA, 25 bp, Canis familiaris
ccctggagcgtcttggggggggatg

SEQ ID NO: 81796 - DNA, 25 bp, Canis familiaris
ccctgcctcgttagcgggaggttga

SEQ ID NO: 81797 - DNA, 25 bp, Canis familiaris
cccttccgctttgtggatctgtatg

SEQ ID NO: 81798 - DNA, 25 bp, Canis familiaris
cccttgccgctgaggggtggcttta

SEQ ID NO: 81799 - DNA, 25 bp, Canis familiaris
ccctagccctgttgggggacattct

SEQ ID NO: 81800 - DNA, 25 bp, Canis familiaris
ccctagctcactctttaggcacaga

SEQ ID NO: 81801 - DNA, 25 bp, Canis familiaris
ccctcacatgaccaccttggtcaag

SEQ ID NO: 81802 - DNA, 25 bp, Canis familiaris
ccctcaacctgacattgctacagtg

SEQ ID NO: 81803 - DNA, 25 bp, Canis familiaris
ccctaaggatgggtgtgctactggc

SEQ ID NO: 81804 - DNA, 25 bp, Canis familiaris
ccctatatggttgtgtcatcctctc

SEQ ID NO: 81805 - DNA, 25 bp, Canis familiaris
ccctaatggaattcggagccatcat

SEQ ID NO: 81806 - DNA, 25 bp, Canis familiaris
ccctattaggtgtgggcctactcca

SEQ ID NO: 81807 - DNA, 25 bp, Canis familiaris
cccatttagaagtggcctctactcc

SEQ ID NO: 81808 - DNA, 25 bp, Canis familiaris
cccatcatctggttttggcactttt

SEQ ID NO: 81809 - DNA, 25 bp, Canis familiaris
ccctatcatgtctggtgtgccttaa

SEQ ID NO: 81810 - DNA, 25 bp, Canis familiaris
cccatagcatggggcttggctccaa

SEQ ID NO: 81811 - DNA, 25 bp, Canis familiaris
ccctggatcaggccattggcctcct

SEQ ID NO: 81812 - DNA, 25 bp, Canis familiaris
cccatggccaggacttgggcacggc

SEQ ID NO: 81813 - DNA, 25 bp, Canis familiaris
cccatgtctattactttggatctcg

SEQ ID NO: 81814 - DNA, 25 bp, Canis familiaris
ccctatcacatctcatttggttctc

SEQ ID NO: 81815 - DNA, 25 bp, Canis familiaris
cccttatgcacggaactctgtttct

SEQ ID NO: 81816 - DNA, 25 bp, Canis familiaris
ccctcctaagtgtagctctgtttat

SEQ ID NO: 81817 - DNA, 25 bp, Canis familiaris
ccctcaaaactactgcattttttat

SEQ ID NO: 81818 - DNA, 25 bp, Canis familiaris
ccctcacacccaagctttaagttag

SEQ ID NO: 81819 - DNA, 25 bp, Canis familiaris
ccctacagggaactgctggaagctg

SEQ ID NO: 81820 - DNA, 25 bp, Canis familiaris
ccctagatggggtctcagaaaggac

SEQ ID NO: 81821 - DNA, 25 bp, Canis familiaris
ccctacatggggtcatcattggaaa

SEQ ID NO: 81822 - DNA, 25 bp, Canis familiaris
ccctgactgaattacatctttgaag

SEQ ID NO: 81823 - DNA, 25 bp, Canis familiaris
ccctaggacctatctttggaggcca

SEQ ID NO: 81824 - DNA, 25 bp, Canis familiaris
cccttgtacctatctttgaaggcca

SEQ ID NO: 81825 - DNA, 25 bp, Canis familiaris
ccctttcacctaccagctaaaggct

SEQ ID NO: 81826 - DNA, 25 bp, Canis familiaris
ccccttccctttgtcaataggcaca

SEQ ID NO: 81827 - DNA, 25 bp, Canis familiaris
ccctctttccttatcaccaaggaag

SEQ ID NO: 81828 - DNA, 25 bp, Canis familiaris
ccctcttgtgccagttatccaaatg

SEQ ID NO: 81829 - DNA, 25 bp, Canis familiaris
cccatcatccccgagctaataaaag

SEQ ID NO: 81830 - DNA, 25 bp, Canis familiaris
cccatcctcaccgtcagacaaagga

SEQ ID NO: 81831 - DNA, 25 bp, Canis familiaris
ccctccccattggatcacaatttac

SEQ ID NO: 81832 - DNA, 25 bp, Canis familiaris
ccctcaagctcaatctacgttgtta

SEQ ID NO: 81833 - DNA, 25 bp, Canis familiaris
ccctagagccacatccagtttttaa

SEQ ID NO: 81834 - DNA, 25 bp, Canis familiaris
cccatgaagccctcgttgtttataa

SEQ ID NO: 81835 - DNA, 25 bp, Canis familiaris
cccatagtcgcttcctaatgtttta

SEQ ID NO: 81836 - DNA, 25 bp, Canis familiaris
cccataccctgaaccattcatttat

SEQ ID NO: 81837 - DNA, 25 bp, Canis familiaris
cccatcccattgaccttataatcta

SEQ ID NO: 81838 - DNA, 25 bp, Canis familiaris
ccctcactatttctttagacacaga

SEQ ID NO: 81839 - DNA, 25 bp, Canis familiaris
ccctcatgccagtgcctttaagaag

SEQ ID NO: 81840 - DNA, 25 bp, Canis familiaris
cccttccagatacccattaaagagt

SEQ ID NO: 81841 - DNA, 25 bp, Canis familiaris
ccctacactgagaacacctaaagga

SEQ ID NO: 81842 - DNA, 25 bp, Canis familiaris
ccctaccaggtgtccctgaatgcag

SEQ ID NO: 81843 - DNA, 25 bp, Canis familiaris
cccaggcacggtggcacctgtgagg

SEQ ID NO: 81844 - DNA, 25 bp, Canis familiaris
cccaggtcttgtgctgagcatggag

SEQ ID NO: 81845 - DNA, 25 bp, Canis familiaris
cccaggatcgcgacctgagctgaag

SEQ ID NO: 81846 - DNA, 25 bp, Canis familiaris
cccatggtgccaccgtgatggtgag

SEQ ID NO: 81847 - DNA, 25 bp, Canis familiaris
cccatcatgggccctgaagaggagg

SEQ ID NO: 81848 - DNA, 25 bp, Canis familiaris
ccctagtggactcgccagagggtgc

SEQ ID NO: 81849 - DNA, 25 bp, Canis familiaris
cccatgcggataaaccaggtggtcc

SEQ ID NO: 81850 - DNA, 25 bp, Canis familiaris
ccgatggaaagatctcagaacagtc

SEQ ID NO: 81851 - DNA, 25 bp, Canis familiaris
ccctggaaagagctgcatactttta

SEQ ID NO: 81852 - DNA, 25 bp, Canis familiaris
ccctgcccaagtgtgaaccttcttg

SEQ ID NO: 81853 - DNA, 25 bp, Canis familiaris
ccctgcctattgtttaggtcctttg

SEQ ID NO: 81854 - DNA, 25 bp, Canis familiaris
ccctcctttctatttgttggttatg

SEQ ID NO: 81855 - DNA, 25 bp, Canis familiaris
ccctcctttgtgtggttggaaaatg

SEQ ID NO: 81856 - DNA, 25 bp, Canis familiaris
ccctccattttcaggctgggaaacg

SEQ ID NO: 81857 - DNA, 25 bp, Canis familiaris
ccctccatttccaggctgggaaacg

SEQ ID NO: 81858 - DNA, 25 bp, Canis familiaris
cccatgctcatgaggaagaggggaa

SEQ ID NO: 81859 - DNA, 25 bp, Canis familiaris
cccatggttctggaaagggtgaatg

SEQ ID NO: 81860 - DNA, 25 bp, Canis familiaris
cccgttgccttttacgttatgtgca

SEQ ID NO: 81861 - DNA, 25 bp, Canis familiaris
ccctattgccattaaactgttaata

SEQ ID NO: 81862 - DNA, 25 bp, Canis familiaris
cccttctgcccagaatctgtcaaat

SEQ ID NO: 81863 - DNA, 25 bp, Canis familiaris
ccctttggcctcaagtttctaatgt

SEQ ID NO: 81864 - DNA, 25 bp, Canis familiaris
ccctctcacgttaaatgcttttact

SEQ ID NO: 81865 - DNA, 25 bp, Canis familiaris
cccatctacctttttgtttgtcagt

SEQ ID NO: 81866 - DNA, 25 bp, Canis familiaris
cccatgtttcttttccttatgtcag

SEQ ID NO: 81867 - DNA, 25 bp, Canis familiaris
ccctgtatttatttgccctgtgtac

SEQ ID NO: 81868 - DNA, 25 bp, Canis familiaris
ccctggattttcttacacggatgcc

SEQ ID NO: 81869 - DNA, 25 bp, Canis familiaris
ccctgttcccacttcagaaggacca

SEQ ID NO: 81870 - DNA, 25 bp, Canis familiaris
cccttttccctttgatagtgtctca

SEQ ID NO: 81871 - DNA, 25 bp, Canis familiaris
ccctttctgctgcttgtatttgtta

SEQ ID NO: 81872 - DNA, 25 bp, Canis familiaris
cccttaccttttaatatctgtgtct

SEQ ID NO: 81873 - DNA, 25 bp, Canis familiaris
ccctaagccttctgattctcaggtt

SEQ ID NO: 81874 - DNA, 25 bp, Canis familiaris
ccgcatacaccagttcgagtccggg

SEQ ID NO: 81875 - DNA, 25 bp, Canis familiaris
ccctacccgcacgggtcatcgaaga

SEQ ID NO: 81876 - DNA, 25 bp, Canis familiaris
cccttccatccctggctaaatagag

SEQ ID NO: 81877 - DNA, 25 bp, Canis familiaris
ccctttgactcctggctgaaagcag

SEQ ID NO: 81878 - DNA, 25 bp, Canis familiaris
ccctttattctgctgcatcgaaaca

SEQ ID NO: 81879 - DNA, 25 bp, Canis familiaris
ccctttaccagtagcatcatcggac

SEQ ID NO: 81880 - DNA, 25 bp, Canis familiaris
ccctacccgaggactacgagactca

SEQ ID NO: 81881 - DNA, 25 bp, Canis familiaris
cccatacccgaggactacgagactc

SEQ ID NO: 81882 - DNA, 25 bp, Canis familiaris
cccatgatgcccttgttgtagcgga

SEQ ID NO: 81883 - DNA, 25 bp, Canis familiaris
ccctgcagccactttgtgacactgc

SEQ ID NO: 81884 - DNA, 25 bp, Canis familiaris
ccctagccctctggataacatccag

SEQ ID NO: 81885 - DNA, 25 bp, Canis familiaris
cccgagccgcctggataccgcagct

SEQ ID NO: 81886 - DNA, 25 bp, Canis familiaris
cccaggccagccagtacctgagagt

SEQ ID NO: 81887 - DNA, 25 bp, Canis familiaris
cccaggcctgccaggatgcaggggt

SEQ ID NO: 81888 - DNA, 25 bp, Canis familiaris
cccaggcaggtctggtcaccatggt

SEQ ID NO: 81889 - DNA, 25 bp, Canis familiaris
cccaggcaccgttggtgcaccaggt

SEQ ID NO: 81890 - DNA, 25 bp, Canis familiaris
cccatggacctgagcctatggctgg

SEQ ID NO: 81891 - DNA, 25 bp, Canis familiaris
cccatggcctagctgccttatgtgg

SEQ ID NO: 81892 - DNA, 25 bp, Canis familiaris
cccattcctcatccatcaaatattg

SEQ ID NO: 81893 - DNA, 25 bp, Canis familiaris
cccatctcagtgttctcacaatttg

SEQ ID NO: 81894 - DNA, 25 bp, Canis familiaris
cccatccattaggccagcaatgctt

SEQ ID NO: 81895 - DNA, 25 bp, Canis familiaris
cccattctagatgcacgtctgcttc

SEQ ID NO: 81896 - DNA, 25 bp, Canis familiaris
cccatgttgagctcactttgttcaa

SEQ ID NO: 81897 - DNA, 25 bp, Canis familiaris
cccttagaagtgcctttatctcaac

SEQ ID NO: 81898 - DNA, 25 bp, Canis familiaris
cccttacaagttctccacacaaaca

SEQ ID NO: 81899 - DNA, 25 bp, Canis familiaris
cccttccaggttcctcaaaacaatg

SEQ ID NO: 81900 - DNA, 25 bp, Canis familiaris
cccttccggatactcttctaaagag

SEQ ID NO: 81901 - DNA, 25 bp, Canis familiaris
cccttcctctgctcttttaatgaga

SEQ ID NO: 81902 - DNA, 25 bp, Canis familiaris
cccatcccctgagcttgaagcaaga

SEQ ID NO: 81903 - DNA, 25 bp, Canis familiaris
ccctctccaggctctataagccaga

SEQ ID NO: 81904 - DNA, 25 bp, Canis familiaris
cccttcgagcagtagtctcaaaaga

SEQ ID NO: 81905 - DNA, 25 bp, Canis familiaris
cccttggggatggaatgcataataa

SEQ ID NO: 81906 - DNA, 25 bp, Canis familiaris
cccttatgagcgctatatatttacg

SEQ ID NO: 81907 - DNA, 25 bp, Canis familiaris
ccctttggtgtgattatttcatctg

SEQ ID NO: 81908 - DNA, 25 bp, Canis familiaris
cccattccgctgaatttttccagtt

SEQ ID NO: 81909 - DNA, 25 bp, Canis familiaris
cccttcatcctgaatctttcttcag

SEQ ID NO: 81910 - DNA, 25 bp, Canis familiaris
cccgttactggagttacattcgttg

SEQ ID NO: 81911 - DNA, 25 bp, Canis familiaris
cccggtttgatagtctacaatttat

SEQ ID NO: 81912 - DNA, 25 bp, Canis familiaris
ccctggtttacagtcctcgatacta

SEQ ID NO: 81913 - DNA, 25 bp, Canis familiaris
ccctgtttttcagtccattctagga

SEQ ID NO: 81914 - DNA, 25 bp, Canis familiaris
ccctatctatcttcctgttattatt

SEQ ID NO: 81915 - DNA, 25 bp, Canis familiaris
cccatggcttgttcctgtgttggtt

SEQ ID NO: 81916 - DNA, 25 bp, Canis familiaris
cccatacttgtttcctatgctgttt

SEQ ID NO: 81917 - DNA, 25 bp, Canis familiaris
cccttcctgtatgttcatctgtttt

SEQ ID NO: 81918 - DNA, 25 bp, Canis familiaris
ccctgggtgttggcttccagttttg

SEQ ID NO: 81919 - DNA, 25 bp, Canis familiaris
gcccctggtagggcaaccagtaggg

SEQ ID NO: 81920 - DNA, 25 bp, Canis familiaris
ccccaagtagggcacttcgagggtg

SEQ ID NO: 81921 - DNA, 25 bp, Canis familiaris
cccatcactgggcaggcaattcaga

SEQ ID NO: 81922 - DNA, 25 bp, Canis familiaris
cccatctccggcaaggaactcagac

SEQ ID NO: 81923 - DNA, 25 bp, Canis familiaris
cccttcctggctaggaccatggagg

SEQ ID NO: 81924 - DNA, 25 bp, Canis familiaris
cccttccgtgtacatggatgggcag

SEQ ID NO: 81925 - DNA, 25 bp, Canis familiaris
ccctaccagtgcaacgagtgttggc

SEQ ID NO: 81926 - DNA, 25 bp, Canis familiaris
ccctagccatggaaatgagttcatc

SEQ ID NO: 81927 - DNA, 25 bp, Canis familiaris
cccatgacctgccaacagtgttgat

SEQ ID NO: 81928 - DNA, 25 bp, Canis familiaris
ccgcagaggacgcacaggcttttaa

SEQ ID NO: 81929 - DNA, 25 bp, Canis familiaris
cccgacaaccatccagagttttcaa

SEQ ID NO: 81930 - DNA, 25 bp, Canis familiaris
ccctggcaggccaacgggttcaaag

SEQ ID NO: 81931 - DNA, 25 bp, Canis familiaris
cccggtggcccaacggtatagtgct

SEQ ID NO: 81932 - DNA, 25 bp, Canis familiaris
cccggggtccacagtgagggtcatc

SEQ ID NO: 81933 - DNA, 25 bp, Canis familiaris
ccctttggcccagagtagcctggtc

SEQ ID NO: 81934 - DNA, 25 bp, Canis familiaris
ccctggttgcccgtgagtcaccagg

SEQ ID NO: 81935 - DNA, 25 bp, Canis familiaris
ccctgggtccttgtgtattagagtt

SEQ ID NO: 81936 - DNA, 25 bp, Canis familiaris
cctcttggttttgaccttaacatct

SEQ ID NO: 81937 - DNA, 25 bp, Canis familiaris
ccctcttgttttgagccttaacatc

SEQ ID NO: 81938 - DNA, 25 bp, Canis familiaris
cccgcctaaattgagcctttgagct

SEQ ID NO: 81939 - DNA, 25 bp, Canis familiaris
ccctggtcagaaagcccctattagt

SEQ ID NO: 81940 - DNA, 25 bp, Canis familiaris
ccctggacacagaggtgcccatgga

SEQ ID NO: 81941 - DNA, 25 bp, Canis familiaris
ccctttgctaacattgcccatggca

SEQ ID NO: 81942 - DNA, 25 bp, Canis familiaris
ccctttcgagacaactcatcctgag

SEQ ID NO: 81943 - DNA, 25 bp, Canis familiaris
ccctcgttcagtggaatctcgtacc

SEQ ID NO: 81944 - DNA, 25 bp, Canis familiaris
ccctcgttctgtagcgtttgtacat

SEQ ID NO: 81945 - DNA, 25 bp, Canis familiaris
cccatctgtgtcttatagatcttct

SEQ ID NO: 81946 - DNA, 25 bp, Canis familiaris
ccctgcatggcttgcttaacctaag

SEQ ID NO: 81947 - DNA, 25 bp, Canis familiaris
ccctagcctcacaattgaccgaaga

SEQ ID NO: 81948 - DNA, 25 bp, Canis familiaris
cccttcctgcagaatgttctcaaca

SEQ ID NO: 81949 - DNA, 25 bp, Canis familiaris
ccctgtcctgcattttatctgcaat

SEQ ID NO: 81950 - DNA, 25 bp, Canis familiaris
cccttccgatcgacattctgacagg

SEQ ID NO: 81951 - DNA, 25 bp, Canis familiaris
ccctcacttgatctgcaactactgg

SEQ ID NO: 81952 - DNA, 25 bp, Canis familiaris
cccattgttgatctctactcacaga

SEQ ID NO: 81953 - DNA, 25 bp, Canis familiaris
cccatcagtaacattgcgcccatgg

SEQ ID NO: 81954 - DNA, 25 bp, Canis familiaris
cccatcagtatgcctcttggcacgg

SEQ ID NO: 81955 - DNA, 25 bp, Canis familiaris
ccccagtagcgtctgggggcccttg

SEQ ID NO: 81956 - DNA, 25 bp, Canis familiaris
cccgcttgagggagggggctgcttt

SEQ ID NO: 81957 - DNA, 25 bp, Canis familiaris
ccgcaggaagggatgggggtgacat

SEQ ID NO: 81958 - DNA, 25 bp, Canis familiaris
ccgcaaacggtggtctggaaggaca

SEQ ID NO: 81959 - DNA, 25 bp, Canis familiaris
cccatcctcggtgtttgtaggaact

SEQ ID NO: 81960 - DNA, 25 bp, Canis familiaris
cccatgcctccctctgattggagga

SEQ ID NO: 81961 - DNA, 25 bp, Canis familiaris
cccatgcttcccacacatgtgtatg

SEQ ID NO: 81962 - DNA, 25 bp, Canis familiaris
cccatgcctcacacaccatagtgtg

SEQ ID NO: 81963 - DNA, 25 bp, Canis familiaris
cccatcaccactgaccaggtgtctg

SEQ ID NO: 81964 - DNA, 25 bp, Canis familiaris
ccctccacacatggtctagtctgat

SEQ ID NO: 81965 - DNA, 25 bp, Canis familiaris
cccatcccacattttcgtagatctt

SEQ ID NO: 81966 - DNA, 25 bp, Canis familiaris
cccatccgaccaatgtctgtaaagt

SEQ ID NO: 81967 - DNA, 25 bp, Canis familiaris
cccattccccatatcttgatcaaac

SEQ ID NO: 81968 - DNA, 25 bp, Canis familiaris
cccttcgctccaagagcttactcaa

SEQ ID NO: 81969 - DNA, 25 bp, Canis familiaris
cccttggctctctgagtgtgtgtgt

SEQ ID NO: 81970 - DNA, 25 bp, Canis familiaris
cccttggctctttggactttgtata

SEQ ID NO: 81971 - DNA, 25 bp, Canis familiaris
ccctgtacttaaagaccctgtatag

SEQ ID NO: 81972 - DNA, 25 bp, Canis familiaris
ccctcgtttagacaccacagttagg

SEQ ID NO: 81973 - DNA, 25 bp, Canis familiaris
ccctcctttggacagaccgaatcag

SEQ ID NO: 81974 - DNA, 25 bp, Canis familiaris
ccctggcttgcagaaaatccagaaa

SEQ ID NO: 81975 - DNA, 25 bp, Canis familiaris
ccctgtgtacaatagcaatcaagaa

SEQ ID NO: 81976 - DNA, 25 bp, Canis familiaris
ccctgtgaaaccgagaatcccattg

SEQ ID NO: 81977 - DNA, 25 bp, Canis familiaris
cccttagcaaagccaaacaccaatg

SEQ ID NO: 81978 - DNA, 25 bp, Canis familiaris
ccctaaacacagccgaagagaagag

SEQ ID NO: 81979 - DNA, 25 bp, Canis familiaris
ccctccaccatcacgtggcaaagag

SEQ ID NO: 81980 - DNA, 25 bp, Canis familiaris
ccctcccccaactggtgatgaggaa

SEQ ID NO: 81981 - DNA, 25 bp, Canis familiaris
ccctccacccagtcttggtggtggt

SEQ ID NO: 81982 - DNA, 25 bp, Canis familiaris
ccctgccgactggatttggctggtc

SEQ ID NO: 81983 - DNA, 25 bp, Canis familiaris
ccctctggaaagctgtggcgtgatg

SEQ ID NO: 81984 - DNA, 25 bp, Canis familiaris
cccttcgggtgccgtgacatgtgtg

SEQ ID NO: 81985 - DNA, 25 bp, Canis familiaris
ccctccctaggccgctgagagaggt

SEQ ID NO: 81986 - DNA, 25 bp, Canis familiaris
ccctccatgctgtaccagtaggttt

SEQ ID NO: 81987 - DNA, 25 bp, Canis familiaris
ccctcctgctgtgcagactttttta

SEQ ID NO: 81988 - DNA, 25 bp, Canis familiaris
ccctagctctctaagactgttcttt

SEQ ID NO: 81989 - DNA, 25 bp, Canis familiaris
cccttcccatgaagatcttgggctt

SEQ ID NO: 81990 - DNA, 25 bp, Canis familiaris
cccattcctgtgggtgctgtggggc

SEQ ID NO: 81991 - DNA, 25 bp, Canis familiaris
cccatctcctgaagctgggcgggga

SEQ ID NO: 81992 - DNA, 25 bp, Canis familiaris
cccatctttgccggggctgggagaa

SEQ ID NO: 81993 - DNA, 25 bp, Canis familiaris
cccattttggaggcggcacaggagc

SEQ ID NO: 81994 - DNA, 25 bp, Canis familiaris
cccattattggctacaggaggtcag

SEQ ID NO: 81995 - DNA, 25 bp, Canis familiaris
ccctcttctgtgtgctggggtagcc

SEQ ID NO: 81996 - DNA, 25 bp, Canis familiaris
ccctcaaaggcatcctgggctacac

SEQ ID NO: 81997 - DNA, 25 bp, Canis familiaris
ccctgaaagcgcccatcaaggtgga

SEQ ID NO: 81998 - DNA, 25 bp, Canis familiaris
ccctcagcaaggggccaagccagaa

SEQ ID NO: 81999 - DNA, 25 bp, Canis familiaris
ccctctgcagcagagggcacccagc

SEQ ID NO: 82000 - DNA, 25 bp, Canis familiaris
ccctctgcgttagagacccacgaga

SEQ ID NO: 82001 - DNA, 25 bp, Canis familiaris
ccctctccttaggggtctagctaca

SEQ ID NO: 82002 - DNA, 25 bp, Canis familiaris
cccatccctgtagtgggactcagct

SEQ ID NO: 82003 - DNA, 25 bp, Canis familiaris
ccctctccgctttgtggaatggatt

SEQ ID NO: 82004 - DNA, 25 bp, Canis familiaris
cccatctcctcctactggaaaatta

SEQ ID NO: 82005 - DNA, 25 bp, Canis familiaris
cccttctctcagtctcgggaagatc

SEQ ID NO: 82006 - DNA, 25 bp, Canis familiaris
cccgtgttggtcgggacacagtcat

SEQ ID NO: 82007 - DNA, 25 bp, Canis familiaris
ccctagttgcctgggagacaagtcc

SEQ ID NO: 82008 - DNA, 25 bp, Canis familiaris
ccctagggtctgggggcaacaccag

SEQ ID NO: 82009 - DNA, 25 bp, Canis familiaris
ccctggaaccagggggcaactccag

SEQ ID NO: 82010 - DNA, 25 bp, Canis familiaris
ccctggtacaagttggaaacagcca

SEQ ID NO: 82011 - DNA, 25 bp, Canis familiaris
ccctggcccgtgctgggaaagtaag

SEQ ID NO: 82012 - DNA, 25 bp, Canis familiaris
cccgtgcccctgtgggaaagtgagg

SEQ ID NO: 82013 - DNA, 25 bp, Canis familiaris
cccgaatccctatagccaaacatgg

SEQ ID NO: 82014 - DNA, 25 bp, Canis familiaris
ccctctacaccttaaccagatacaa

SEQ ID NO: 82015 - DNA, 25 bp, Canis familiaris
ccctccaaccattaatcttattcgg

SEQ ID NO: 82016 - DNA, 25 bp, Canis familiaris
ccctcaatccctattctgctttggg

SEQ ID NO: 82017 - DNA, 25 bp, Canis familiaris
cccttctcccatcttatcattgggg

SEQ ID NO: 82018 - DNA, 25 bp, Canis familiaris
cccttctctcctttattattcagga

SEQ ID NO: 82019 - DNA, 25 bp, Canis familiaris
cccttctctccttggcatatattac

SEQ ID NO: 82020 - DNA, 25 bp, Canis familiaris
cccattctatccatccatggattac

SEQ ID NO: 82021 - DNA, 25 bp, Canis familiaris
cccatctctgtgccagtggctggat

SEQ ID NO: 82022 - DNA, 25 bp, Canis familiaris
ccctctctgtggtccacgtgatgac

SEQ ID NO: 82023 - DNA, 25 bp, Canis familiaris
ccctcatgctgatgttcctgataat

SEQ ID NO: 82024 - DNA, 25 bp, Canis familiaris
cccttgctagggttctgaaattaat

SEQ ID NO: 82025 - DNA, 25 bp, Canis familiaris
cccttggagtctgtcttgagcttaa

SEQ ID NO: 82026 - DNA, 25 bp, Canis familiaris
cccttgtggactgtggtgacgttca

SEQ ID NO: 82027 - DNA, 25 bp, Canis familiaris
cccttgtttatggttggacaaatca

SEQ ID NO: 82028 - DNA, 25 bp, Canis familiaris
cccttactggagccttggcaaaaca

SEQ ID NO: 82029 - DNA, 25 bp, Canis familiaris
cccttagctgtgcatctaggagatc

SEQ ID NO: 82030 - DNA, 25 bp, Canis familiaris
ccctcttcgtcactcattgtgaaca

SEQ ID NO: 82031 - DNA, 25 bp, Canis familiaris
ccctcttcttgcctcaatgcaaata

SEQ ID NO: 82032 - DNA, 25 bp, Canis familiaris
ccctctctttggaccacagttgaaa

SEQ ID NO: 82033 - DNA, 25 bp, Canis familiaris
ccctcctgggatggctcaagttaaa

SEQ ID NO: 82034 - DNA, 25 bp, Canis familiaris
ccctcacagggcagaagtttatagt

SEQ ID NO: 82035 - DNA, 25 bp, Canis familiaris
ccctactgtacaaaagacctacgat

SEQ ID NO: 82036 - DNA, 25 bp, Canis familiaris
cccatttctacagaaaccagttgaa

SEQ ID NO: 82037 - DNA, 25 bp, Canis familiaris
cccattgttaacccaacacaggtat

SEQ ID NO: 82038 - DNA, 25 bp, Canis familiaris
cccttgttcaccccagtgaaggtgt

SEQ ID NO: 82039 - DNA, 25 bp, Canis familiaris
ccctgtttacctccactgatacagt

SEQ ID NO: 82040 - DNA, 25 bp, Canis familiaris
ccctgaagtaccccattgaacatgg

SEQ ID NO: 82041 - DNA, 25 bp, Canis familiaris
ccctcatttcctgtcttgaatgctg

SEQ ID NO: 82042 - DNA, 25 bp, Canis familiaris
ccctcttattcccatctaagcatgt

SEQ ID NO: 82043 - DNA, 25 bp, Canis familiaris
ccctgcttcatggcaggcctaccag

SEQ ID NO: 82044 - DNA, 25 bp, Canis familiaris
ccctattgcccaggtgcaatccaga

SEQ ID NO: 82045 - DNA, 25 bp, Canis familiaris
ccctttcttccattcaactcagagg

SEQ ID NO: 82046 - DNA, 25 bp, Canis familiaris
cccttcctcccagtaagacatgagc

SEQ ID NO: 82047 - DNA, 25 bp, Canis familiaris
cccttgcctccggcaagcggatgac

SEQ ID NO: 82048 - DNA, 25 bp, Canis familiaris
cccttgctctctgggacgtggagaa

SEQ ID NO: 82049 - DNA, 25 bp, Canis familiaris
ccctcgtttctggagcaggggctca

SEQ ID NO: 82050 - DNA, 25 bp, Canis familiaris
ccctgttatggaaacggggctgcag

SEQ ID NO: 82051 - DNA, 25 bp, Canis familiaris
cccttaagctgtaacaggtggccag

SEQ ID NO: 82052 - DNA, 25 bp, Canis familiaris
ccctattagctgtttctctgtggcc

SEQ ID NO: 82053 - DNA, 25 bp, Canis familiaris
ccctcattagtgcctcattatcatg

SEQ ID NO: 82054 - DNA, 25 bp, Canis familiaris
cccattctagcttcatctggcatag

SEQ ID NO: 82055 - DNA, 25 bp, Canis familiaris
ccctctctgcatgatcttgacaaag

SEQ ID NO: 82056 - DNA, 25 bp, Canis familiaris
cccttcttcttcctacacaagtaag

SEQ ID NO: 82057 - DNA, 25 bp, Canis familiaris
ccctttgtcttcctgggcaaggagt

SEQ ID NO: 82058 - DNA, 25 bp, Canis familiaris
ccctagttcttcctggaggagcggc

SEQ ID NO: 82059 - DNA, 25 bp, Canis familiaris
ccgtggccattctctggaggaggtc

SEQ ID NO: 82060 - DNA, 25 bp, Canis familiaris
ccctcccatggccctggaggagttc

SEQ ID NO: 82061 - DNA, 25 bp, Canis familiaris
ccctccctggacctaaggagcgact

SEQ ID NO: 82062 - DNA, 25 bp, Canis familiaris
ccctccctgccaagtataagattag

SEQ ID NO: 82063 - DNA, 25 bp, Canis familiaris
ccctctcggccatgcaagataaaac

SEQ ID NO: 82064 - DNA, 25 bp, Canis familiaris
cccttctcctgatcagagatagata

SEQ ID NO: 82065 - DNA, 25 bp, Canis familiaris
cccatttgcgctccaacaagatgaa

SEQ ID NO: 82066 - DNA, 25 bp, Canis familiaris
ccctttctgctgtacccagagatgg

SEQ ID NO: 82067 - DNA, 25 bp, Canis familiaris
ccctctcattccttcctcaaagagg

SEQ ID NO: 82068 - DNA, 25 bp, Canis familiaris
cccttcatatcattgctcccaaaaa

SEQ ID NO: 82069 - DNA, 25 bp, Canis familiaris
cccttgagatcagtgctccaagata

SEQ ID NO: 82070 - DNA, 25 bp, Canis familiaris
cccttgatgccaattctcggaagca

SEQ ID NO: 82071 - DNA, 25 bp, Canis familiaris
cccttcttctctatcaggacacagc

SEQ ID NO: 82072 - DNA, 25 bp, Canis familiaris
cccttccccatcatgcaggagaagc

SEQ ID NO: 82073 - DNA, 25 bp, Canis familiaris
ccctatcccctgagctggaatacat

SEQ ID NO: 82074 - DNA, 25 bp, Canis familiaris
ccctatagcccgctggtgtgataca

SEQ ID NO: 82075 - DNA, 25 bp, Canis familiaris
ccctcatagcaggctccaaggtgct

SEQ ID NO: 82076 - DNA, 25 bp, Canis familiaris
cccttaacctcatagcatggctctg

SEQ ID NO: 82077 - DNA, 25 bp, Canis familiaris
cccttccccaaatgctgagtctgga

SEQ ID NO: 82078 - DNA, 25 bp, Canis familiaris
cccttccagctatttggggtctgag

SEQ ID NO: 82079 - DNA, 25 bp, Canis familiaris
ccctctgccttttagtggtatctga

SEQ ID NO: 82080 - DNA, 25 bp, Canis familiaris
ccctctgctcttctcaggggaggta

SEQ ID NO: 82081 - DNA, 25 bp, Canis familiaris
cccttctgaccatcgacggagaaag

SEQ ID NO: 82082 - DNA, 25 bp, Canis familiaris
cccttcagagcctcagacctgatga

SEQ ID NO: 82083 - DNA, 25 bp, Canis familiaris
ccctctcagtctgctagagcactaa

SEQ ID NO: 82084 - DNA, 25 bp, Canis familiaris
ccctacagtcccatgagcatgaaag

SEQ ID NO: 82085 - DNA, 25 bp, Canis familiaris
ccctagcctcccatatgatgaaatc

SEQ ID NO: 82086 - DNA, 25 bp, Canis familiaris
cccattgcccccatttagattgcag

SEQ ID NO: 82087 - DNA, 25 bp, Canis familiaris
ccctggtcttccctttagaaatgca

SEQ ID NO: 82088 - DNA, 25 bp, Canis familiaris
ccctgttgttcatccatttgtagaa

SEQ ID NO: 82089 - DNA, 25 bp, Canis familiaris
cccatttatttgcccatttattaga

SEQ ID NO: 82090 - DNA, 25 bp, Canis familiaris
ccctttatttcttgctcttattata

SEQ ID NO: 82091 - DNA, 25 bp, Canis familiaris
ccctttttctttggctgtatctgat

SEQ ID NO: 82092 - DNA, 25 bp, Canis familiaris
cccttttgcttgttcggtgacatga

SEQ ID NO: 82093 - DNA, 25 bp, Canis familiaris
ccctctctcttgtcttcagggaatt

SEQ ID NO: 82094 - DNA, 25 bp, Canis familiaris
cccttctctacacttttggatatta

SEQ ID NO: 82095 - DNA, 25 bp, Canis familiaris
ccctctacacactttgttggttttg

SEQ ID NO: 82096 - DNA, 25 bp, Canis familiaris
cccttcccgcatttattggtgtatt

SEQ ID NO: 82097 - DNA, 25 bp, Canis familiaris
ccctaccccaagccataggggatct

SEQ ID NO: 82098 - DNA, 25 bp, Canis familiaris
ccctgaccaccaagttggtcacctt

SEQ ID NO: 82099 - DNA, 25 bp, Canis familiaris
ccctaccacctactgtggcacataa

SEQ ID NO: 82100 - DNA, 25 bp, Canis familiaris
ccccacccctagtggcaaagcaatc

SEQ ID NO: 82101 - DNA, 25 bp, Canis familiaris
ccctagaacctactttgaaggccat

SEQ ID NO: 82102 - DNA, 25 bp, Canis familiaris
ccctcaaccagctgtcgctaaagga

SEQ ID NO: 82103 - DNA, 25 bp, Canis familiaris
ccctaaacagcaactgcctctacag

SEQ ID NO: 82104 - DNA, 25 bp, Canis familiaris
cccttcagacgcaattccttgagcg

SEQ ID NO: 82105 - DNA, 25 bp, Canis familiaris
ccctacagatggttaccactgtctg

SEQ ID NO: 82106 - DNA, 25 bp, Canis familiaris
ccctcatcaaggctacaattgctgg

SEQ ID NO: 82107 - DNA, 25 bp, Canis familiaris
ccctaagagggctacctctgtggcg

SEQ ID NO: 82108 - DNA, 25 bp, Canis familiaris
ccctcaggggagcacagctcctggg

SEQ ID NO: 82109 - DNA, 25 bp, Canis familiaris
ccctcaggggagcacagctcctggg

SEQ ID NO: 82110 - DNA, 25 bp, Canis familiaris
ccctcaggggagcacagctcctggg

SEQ ID NO: 82111 - DNA, 25 bp, Canis familiaris
ccctcaggggagcacagctcctggg

SEQ ID NO: 82112 - DNA, 25 bp, Canis familiaris
ccctcaggggagcacagctcctggg

SEQ ID NO: 82113 - DNA, 25 bp, Canis familiaris
ccctgattggaacccagtccacagg

SEQ ID NO: 82114 - DNA, 25 bp, Canis familiaris
cccttcgagcactaatgcgtctcac

SEQ ID NO: 82115 - DNA, 25 bp, Canis familiaris
ccctctgtagcatccagcagtgttc

SEQ ID NO: 82116 - DNA, 25 bp, Canis familiaris
ccctcgaatgcttgatgaagcttgt

SEQ ID NO: 82117 - DNA, 25 bp, Canis familiaris
ccctgctgtccttgatggcagcttg

SEQ ID NO: 82118 - DNA, 25 bp, Canis familiaris
ccctcgatgctcttagctgagtgtc

SEQ ID NO: 82119 - DNA, 25 bp, Canis familiaris
ccctcgatgctcttagctgagtgtc

SEQ ID NO: 82120 - DNA, 25 bp, Canis familiaris
ccctcctccataagcaagttcattc

SEQ ID NO: 82121 - DNA, 25 bp, Canis familiaris
ccctcctccataagcaagttcattc

SEQ ID NO: 82122 - DNA, 25 bp, Canis familiaris
ccctcctccataagcaagttcattc

SEQ ID NO: 82123 - DNA, 25 bp, Canis familiaris
ccctcctccataagcaagttcattc

SEQ ID NO: 82124 - DNA, 25 bp, Canis familiaris
ccctcctccataagcaagttcattc

SEQ ID NO: 82125 - DNA, 25 bp, Canis familiaris
ccctcctccataagcaagttcattc

SEQ ID NO: 82126 - DNA, 25 bp, Canis familiaris
ccctagctgcccagaaattcatctc

SEQ ID NO: 82127 - DNA, 25 bp, Canis familiaris
ccctagctgcccagaaattcatctc

SEQ ID NO: 82128 - DNA, 25 bp, Canis familiaris
cccttgccccatgtaatgtgcatct

SEQ ID NO: 82129 - DNA, 25 bp, Canis familiaris
ccctggtcccatggtgaagtcttaa

SEQ ID NO: 82130 - DNA, 25 bp, Canis familiaris
cccttgtagtagcgtcgtgctcaca

SEQ ID NO: 82131 - DNA, 25 bp, Canis familiaris
cccgtgctggtaccaacgtgtaact

SEQ ID NO: 82132 - DNA, 25 bp, Canis familiaris
ccctcggagccaacagacggaaact

SEQ ID NO: 82133 - DNA, 25 bp, Canis familiaris
ccctgccccacaatcaaggaaacct

SEQ ID NO: 82134 - DNA, 25 bp, Canis familiaris
ccctgccctagccttaggagaaaag

SEQ ID NO: 82135 - DNA, 25 bp, Canis familiaris
cctgggcccggtcagggagaagacg

SEQ ID NO: 82136 - DNA, 25 bp, Canis familiaris
cccggacacggacaggattgacaga

SEQ ID NO: 82137 - DNA, 25 bp, Canis familiaris
cccggacacggacaggattgacaga

SEQ ID NO: 82138 - DNA, 25 bp, Canis familiaris
ccctgacagctccttggaggtctga

SEQ ID NO: 82139 - DNA, 25 bp, Canis familiaris
ccctgcagactccttactgtaatgt

SEQ ID NO: 82140 - DNA, 25 bp, Canis familiaris
ccctcagcacttgctattctggaga

SEQ ID NO: 82141 - DNA, 25 bp, Canis familiaris
ccctgtgcagcctctaacatagtgg

SEQ ID NO: 82142 - DNA, 25 bp, Canis familiaris
cccttcacttagtaaatggctcagc

SEQ ID NO: 82143 - DNA, 25 bp, Canis familiaris
cccggcctatcacaaatgtcacggc

SEQ ID NO: 82144 - DNA, 25 bp, Canis familiaris
cccgtccctgagcccagggacttgc

SEQ ID NO: 82145 - DNA, 25 bp, Canis familiaris
cccgtccggagaagcagggcgttca

SEQ ID NO: 82146 - DNA, 25 bp, Canis familiaris
cccgtgcacggaaaatacagcgttt

SEQ ID NO: 82147 - DNA, 25 bp, Canis familiaris
cccgagcaccgaaagggcaggtact

SEQ ID NO: 82148 - DNA, 25 bp, Canis familiaris
cccgagctgtagactcggtgctgga

SEQ ID NO: 82149 - DNA, 25 bp, Canis familiaris
ccctgccatgtaatccgtatcaaca

SEQ ID NO: 82150 - DNA, 25 bp, Canis familiaris
cccttacgctgaacccatgcaatga

SEQ ID NO: 82151 - DNA, 25 bp, Canis familiaris
ccctgtagcctaacctactcagtat

SEQ ID NO: 82152 - DNA, 25 bp, Canis familiaris
ccctgtagccagagcctaatgcaga

SEQ ID NO: 82153 - DNA, 25 bp, Canis familiaris
ccctatccctgaggactactcaacg

SEQ ID NO: 82154 - DNA, 25 bp, Canis familiaris
ccctgatcaccgggactccaaagtg

SEQ ID NO: 82155 - DNA, 25 bp, Canis familiaris
ccctgaccattgggccctggaaggg

SEQ ID NO: 82156 - DNA, 25 bp, Canis familiaris
ccctcacgttctgtgcttggtagag

SEQ ID NO: 82157 - DNA, 25 bp, Canis familiaris
ccctcaagttctcctgtagactagg

SEQ ID NO: 82158 - DNA, 25 bp, Canis familiaris
ccctcggtcattcctatcaacaagg

SEQ ID NO: 82159 - DNA, 25 bp, Canis familiaris
ccctggcagtcttgcccataactat

SEQ ID NO: 82160 - DNA, 25 bp, Canis familiaris
ccctgtgcctttgccaagaatttca

SEQ ID NO: 82161 - DNA, 25 bp, Canis familiaris
ccctgcctttatgccgggataaatc

SEQ ID NO: 82162 - DNA, 25 bp, Canis familiaris
ccctagtttttggggcgattagatg

SEQ ID NO: 82163 - DNA, 25 bp, Canis familiaris
ccctatttttggggggcagtagatg

SEQ ID NO: 82164 - DNA, 25 bp, Canis familiaris
cccttttcctgtcaggggtcagcat

SEQ ID NO: 82165 - DNA, 25 bp, Canis familiaris
ccctctttccatctctggatgggcc

SEQ ID NO: 82166 - DNA, 25 bp, Canis familiaris
ccctctttccacatgtacataacct

SEQ ID NO: 82167 - DNA, 25 bp, Canis familiaris
ccctccttcttccttagataatact

SEQ ID NO: 82168 - DNA, 25 bp, Canis familiaris
ccctcttttcaccagtacatactag

SEQ ID NO: 82169 - DNA, 25 bp, Canis familiaris
cccttaatatcactggctccatatt

SEQ ID NO: 82170 - DNA, 25 bp, Canis familiaris
ccctatgatgttggtggtcctgatc

SEQ ID NO: 82171 - DNA, 25 bp, Canis familiaris
ccctatgatgttggtggtcctgatc

SEQ ID NO: 82172 - DNA, 25 bp, Canis familiaris
ccctcagctgtgacaggtggccagt

SEQ ID NO: 82173 - DNA, 25 bp, Canis familiaris
ccctcgctggtggatgcgtgcattt

SEQ ID NO: 82174 - DNA, 25 bp, Canis familiaris
ccctgcctgctgtttctatgcagtg

SEQ ID NO: 82175 - DNA, 25 bp, Canis familiaris
ccctcacactgcggatgctgatgca

SEQ ID NO: 82176 - DNA, 25 bp, Canis familiaris
ccctgcatgacctgtgatgctgcag

SEQ ID NO: 82177 - DNA, 25 bp, Canis familiaris
ccctctatcacatatgatatcagcc

SEQ ID NO: 82178 - DNA, 25 bp, Canis familiaris
ccctatcatccagagcatctcctgg

SEQ ID NO: 82179 - DNA, 25 bp, Canis familiaris
ccctcatcagtcggagactcatctc

SEQ ID NO: 82180 - DNA, 25 bp, Canis familiaris
ccctcaagattgtcagcaatgcctc

SEQ ID NO: 82181 - DNA, 25 bp, Canis familiaris
ccctcaagatctgcagctcaacagg

SEQ ID NO: 82182 - DNA, 25 bp, Canis familiaris
ccctccagctctaactcataggtac

SEQ ID NO: 82183 - DNA, 25 bp, Canis familiaris
ccctccagtctgtatctgttttgtc

SEQ ID NO: 82184 - DNA, 25 bp, Canis familiaris
ccctctcacgtgtcgtgttttgctg

SEQ ID NO: 82185 - DNA, 25 bp, Canis familiaris
ccctttctggtcctggtggaggtag

SEQ ID NO: 82186 - DNA, 25 bp, Canis familiaris
ccctctgttggcaggggtgggatgg

SEQ ID NO: 82187 - DNA, 25 bp, Canis familiaris
ccctctcctggaagcggtgtgcagg

SEQ ID NO: 82188 - DNA, 25 bp, Canis familiaris
ccctcccggatcacatggacagagt

SEQ ID NO: 82189 - DNA, 25 bp, Canis familiaris
ccctagatcagaccaacatggaaga

SEQ ID NO: 82190 - DNA, 25 bp, Canis familiaris
ccctcagcaagaccacacggagtag

SEQ ID NO: 82191 - DNA, 25 bp, Canis familiaris
cctgaccatagcccccaggaataaa

SEQ ID NO: 82192 - DNA, 25 bp, Canis familiaris
gggacggatgagccctaggtaaccg

SEQ ID NO: 82193 - DNA, 25 bp, Canis familiaris
gcgaacggaattgcttgcggtcacc

SEQ ID NO: 82194 - DNA, 25 bp, Canis familiaris
gctggaacggaatttggcggtcccg

SEQ ID NO: 82195 - DNA, 25 bp, Canis familiaris
gtaaggaggaaattcagtggtaact

SEQ ID NO: 82196 - DNA, 25 bp, Canis familiaris
gctaggagaggagaacgggggcccg

SEQ ID NO: 82197 - DNA, 25 bp, Canis familiaris
cctgaggaggaagaagggggccaag

SEQ ID NO: 82198 - DNA, 25 bp, Canis familiaris
ccccaggaggcaaaaggcggaccag

SEQ ID NO: 82199 - DNA, 25 bp, Canis familiaris
ccccaccggcataaattcgggctca

SEQ ID NO: 82200 - DNA, 25 bp, Canis familiaris
ccctcacccgcaaagtgtgttggtt

SEQ ID NO: 82201 - DNA, 25 bp, Canis familiaris
ccctaacccccaatgtgattacatt

SEQ ID NO: 82202 - DNA, 25 bp, Canis familiaris
ccctaacccccagtgtgatggtact

SEQ ID NO: 82203 - DNA, 25 bp, Canis familiaris
ccctcaaagcagcacacggatggtc

SEQ ID NO: 82204 - DNA, 25 bp, Canis familiaris
ccctgagagcaaagacgcggggtct

SEQ ID NO: 82205 - DNA, 25 bp, Canis familiaris
ccctgagccaaaggcggaagttcaa

SEQ ID NO: 82206 - DNA, 25 bp, Canis familiaris
ccctgagctgcagcgtcggaagttt

SEQ ID NO: 82207 - DNA, 25 bp, Canis familiaris
ccctagctgactccctgagaagtgc

SEQ ID NO: 82208 - DNA, 25 bp, Canis familiaris
ccctacgagtaccggagacttgcgg

SEQ ID NO: 82209 - DNA, 25 bp, Canis familiaris
ccctgtctgaaatggaaatttggga

SEQ ID NO: 82210 - DNA, 25 bp, Canis familiaris
ccctttgaacattccacgttgctgt

SEQ ID NO: 82211 - DNA, 25 bp, Canis familiaris
ccctcttggcaggtcctggtggtgt

SEQ ID NO: 82212 - DNA, 25 bp, Canis familiaris
ccctctttgatggctctgtggaggt

SEQ ID NO: 82213 - DNA, 25 bp, Canis familiaris
ccctcacctgctgatttggactgtg

SEQ ID NO: 82214 - DNA, 25 bp, Canis familiaris
ccctgctcctcagacgatggtctga

SEQ ID NO: 82215 - DNA, 25 bp, Canis familiaris
ccgctttctcaggacggttctggtt

SEQ ID NO: 82216 - DNA, 25 bp, Canis familiaris
ccctttctgcacaactggtgtcagc

SEQ ID NO: 82217 - DNA, 25 bp, Canis familiaris
ccctttctgcattcctgtgattata

SEQ ID NO: 82218 - DNA, 25 bp, Canis familiaris
ccctcttcgcgtggtgtgttatagc

SEQ ID NO: 82219 - DNA, 25 bp, Canis familiaris
ccctattcaatctagtgtgtgttac

SEQ ID NO: 82220 - DNA, 25 bp, Canis familiaris
cccgtgcctaccatggtgaccacgg

SEQ ID NO: 82221 - DNA, 25 bp, Canis familiaris
cccgtccatggggtgctgaaatccg

SEQ ID NO: 82222 - DNA, 25 bp, Canis familiaris
cccgtccagttcagctaatttcagg

SEQ ID NO: 82223 - DNA, 25 bp, Canis familiaris
cccgtctggttcctgcaaagggcac

SEQ ID NO: 82224 - DNA, 25 bp, Canis familiaris
ccctgatctggggaggcgaggacca

SEQ ID NO: 82225 - DNA, 25 bp, Canis familiaris
ccctgttcgctgctgacgagaacgg

SEQ ID NO: 82226 - DNA, 25 bp, Canis familiaris
ccctgtatgcctctggtcgtaccac

SEQ ID NO: 82227 - DNA, 25 bp, Canis familiaris
ccctggacctgaatggcccattcat

SEQ ID NO: 82228 - DNA, 25 bp, Canis familiaris
ccctgtgaccatgacaccacatttg

SEQ ID NO: 82229 - DNA, 25 bp, Canis familiaris
ccctcttgcactgaaccaagccagc

SEQ ID NO: 82230 - DNA, 25 bp, Canis familiaris
ccctttgctcagcagacaccagggc

SEQ ID NO: 82231 - DNA, 25 bp, Canis familiaris
ccctttccagggccaagagggctca

SEQ ID NO: 82232 - DNA, 25 bp, Canis familiaris
ccctccccagggagcagggtggact

SEQ ID NO: 82233 - DNA, 25 bp, Canis familiaris
ccctccccactggatactgctgggg

SEQ ID NO: 82234 - DNA, 25 bp, Canis familiaris
gcgcctcgtaagcaaacggtggagt

SEQ ID NO: 82235 - DNA, 25 bp, Canis familiaris
ccctcgtaagcacttacctggtggc

SEQ ID NO: 82236 - DNA, 25 bp, Canis familiaris
ccctctgttcaaggtctacgtggag

SEQ ID NO: 82237 - DNA, 25 bp, Canis familiaris
ccctctctttaggacctcgatgggc

SEQ ID NO: 82238 - DNA, 25 bp, Canis familiaris
ccctcttttagctaccattgaatgg

SEQ ID NO: 82239 - DNA, 25 bp, Canis familiaris
cccttaaattctgcttctgaacagc

SEQ ID NO: 82240 - DNA, 25 bp, Canis familiaris
ccctctctgaaaccctactaacaga

SEQ ID NO: 82241 - DNA, 25 bp, Canis familiaris
cccccaccagagaactggctcaaca

SEQ ID NO: 82242 - DNA, 25 bp, Canis familiaris
ccctcctcaatggagacctccagac

SEQ ID NO: 82243 - DNA, 25 bp, Canis familiaris
ccctcccagagcaaaccagcagaga

SEQ ID NO: 82244 - DNA, 25 bp, Canis familiaris
ccctctgaagccaacacagcagcag

SEQ ID NO: 82245 - DNA, 25 bp, Canis familiaris
ccatcacgggccacacaagtgtttc

SEQ ID NO: 82246 - DNA, 25 bp, Canis familiaris
ccacatccgtgcccggaaatttcgc

SEQ ID NO: 82247 - DNA, 25 bp, Canis familiaris
ccctccaatgtcctggacagtcctg

SEQ ID NO: 82248 - DNA, 25 bp, Canis familiaris
ccctccgagatccgaaatctcctgg

SEQ ID NO: 82249 - DNA, 25 bp, Canis familiaris
ccctccgaacaattgaatcttatcg

SEQ ID NO: 82250 - DNA, 25 bp, Canis familiaris
ccctcaccctcaagtaattacatcc

SEQ ID NO: 82251 - DNA, 25 bp, Canis familiaris
ccctccccttttgcattaatcaaat

SEQ ID NO: 82252 - DNA, 25 bp, Canis familiaris
ccctcccctgttcttattattcaga

SEQ ID NO: 82253 - DNA, 25 bp, Canis familiaris
ccctggtcctttcattttaattgtg

SEQ ID NO: 82254 - DNA, 25 bp, Canis familiaris
ccctgggctcttgctactttaaata

SEQ ID NO: 82255 - DNA, 25 bp, Canis familiaris
ccctccctctatatcctagataagt

SEQ ID NO: 82256 - DNA, 25 bp, Canis familiaris
ccctcagccttatttcttcataaat

SEQ ID NO: 82257 - DNA, 25 bp, Canis familiaris
ccgctagtgcttctgattactcgaa

SEQ ID NO: 82258 - DNA, 25 bp, Canis familiaris
ccctacgaacttactactcagaaag

SEQ ID NO: 82259 - DNA, 25 bp, Canis familiaris
ccctgacaaagcctgataacgcgaa

SEQ ID NO: 82260 - DNA, 25 bp, Canis familiaris
ccctcaccagtgccattcaaggatg

SEQ ID NO: 82261 - DNA, 25 bp, Canis familiaris
ccctagctcaggctgtccaagagag

SEQ ID NO: 82262 - DNA, 25 bp, Canis familiaris
ccccctagtggactcgccagagggt

SEQ ID NO: 82263 - DNA, 25 bp, Canis familiaris
ccctatctgagatcctcgcacagag

SEQ ID NO: 82264 - DNA, 25 bp, Canis familiaris
ccctaccaaccctgcatcagcagga

SEQ ID NO: 82265 - DNA, 25 bp, Canis familiaris
ccctaccagacttcagagccatggg

SEQ ID NO: 82266 - DNA, 25 bp, Canis familiaris
ccctcacacgcagtggcaggttgga

SEQ ID NO: 82267 - DNA, 25 bp, Canis familiaris
ccctacatcgcggacatgtgtacct

SEQ ID NO: 82268 - DNA, 25 bp, Canis familiaris
ccctactgcggcgacttgtaagcat

SEQ ID NO: 82269 - DNA, 25 bp, Canis familiaris
cccgagtggccttctggataatgaa

SEQ ID NO: 82270 - DNA, 25 bp, Canis familiaris
cccgagggctcttcacagaagcttc

SEQ ID NO: 82271 - DNA, 25 bp, Canis familiaris
ccctgagtggctgacatcacaagaa

SEQ ID NO: 82272 - DNA, 25 bp, Canis familiaris
ccctcgtgccgcacacgaagacatg

SEQ ID NO: 82273 - DNA, 25 bp, Canis familiaris
cccggtctactgcacaaagggttag

SEQ ID NO: 82274 - DNA, 25 bp, Canis familiaris
cccgttgttctgccaacagaggagt

SEQ ID NO: 82275 - DNA, 25 bp, Canis familiaris
ccctcgaatctttcaaagccgagct

SEQ ID NO: 82276 - DNA, 25 bp, Canis familiaris
ccctcttcaccttcgaaggtggatt

SEQ ID NO: 82277 - DNA, 25 bp, Canis familiaris
ccctcttcactccactggaggattg

SEQ ID NO: 82278 - DNA, 25 bp, Canis familiaris
ccctcttcctactagggctgtgctg

SEQ ID NO: 82279 - DNA, 25 bp, Canis familiaris
ccctcccctagagggacttgcgcta

SEQ ID NO: 82280 - DNA, 25 bp, Canis familiaris
ccccctgactagtgatgacattgtg

SEQ ID NO: 82281 - DNA, 25 bp, Canis familiaris
cccgcagctgatttctttgactctg

SEQ ID NO: 82282 - DNA, 25 bp, Canis familiaris
ccctcgctgcgatctattgaaagtc

SEQ ID NO: 82283 - DNA, 25 bp, Canis familiaris
ccctcgctgcgatctattgaaagtc

SEQ ID NO: 82284 - DNA, 25 bp, Canis familiaris
ccctctgcatcgtactgtggataag

SEQ ID NO: 82285 - DNA, 25 bp, Canis familiaris
ccctcgcgagtcatggagatgaagg

SEQ ID NO: 82286 - DNA, 25 bp, Canis familiaris
ccctcatctcagacacggactggag

SEQ ID NO: 82287 - DNA, 25 bp, Canis familiaris
ccctgactcagggtgttctggggag

SEQ ID NO: 82288 - DNA, 25 bp, Canis familiaris
ccctcggcaggggtgttggggagtg

SEQ ID NO: 82289 - DNA, 25 bp, Canis familiaris
ccctcaggatggcctcttgatgggg

SEQ ID NO: 82290 - DNA, 25 bp, Canis familiaris
ccctaggctgggctttggatgagtg

SEQ ID NO: 82291 - DNA, 25 bp, Canis familiaris
ccctatggtggtggttatggatctg

SEQ ID NO: 82292 - DNA, 25 bp, Canis familiaris
ccctgttgaagtccatatagtattg

SEQ ID NO: 82293 - DNA, 25 bp, Canis familiaris
ccctgtgcgaagggcatttgcctct

SEQ ID NO: 82294 - DNA, 25 bp, Canis familiaris
cccctggactgagatcttcctcaga

SEQ ID NO: 82295 - DNA, 25 bp, Canis familiaris
ccctgctggtcaaagtcattgccca

SEQ ID NO: 82296 - DNA, 25 bp, Canis familiaris
ccctctgagcctcagtttgaccaca

SEQ ID NO: 82297 - DNA, 25 bp, Canis familiaris
ccctggagcgtgtgtttgactacag

SEQ ID NO: 82298 - DNA, 25 bp, Canis familiaris
ccctggaggctacgctcaaacggag

SEQ ID NO: 82299 - DNA, 25 bp, Canis familiaris
ccctgggatcatgactcactacgga

SEQ ID NO: 82300 - DNA, 25 bp, Canis familiaris
ccctgggccatcaaggcctactgta

SEQ ID NO: 82301 - DNA, 25 bp, Canis familiaris
ccctgcggcttcaagaccagaagct

SEQ ID NO: 82302 - DNA, 25 bp, Canis familiaris
ccctgcgggctcagaacgatgtggc

SEQ ID NO: 82303 - DNA, 25 bp, Canis familiaris
ccctgctaggccaggcccagatagc

SEQ ID NO: 82304 - DNA, 25 bp, Canis familiaris
ccctcgagcaacagtcctggaagac

SEQ ID NO: 82305 - DNA, 25 bp, Canis familiaris
cccgaagaatgaacccgaagagaca

SEQ ID NO: 82306 - DNA, 25 bp, Canis familiaris
ccctggaggtgatcctgaggccgaa

SEQ ID NO: 82307 - DNA, 25 bp, Canis familiaris
gccccggttgaaacaggtgtcggag

SEQ ID NO: 82308 - DNA, 25 bp, Canis familiaris
cccgggtatgttgcggagatagcga

SEQ ID NO: 82309 - DNA, 25 bp, Canis familiaris
cccggcatggacgtactggagtaga

SEQ ID NO: 82310 - DNA, 25 bp, Canis familiaris
cccgactcgggcaacatgttcgaga

SEQ ID NO: 82311 - DNA, 25 bp, Canis familiaris
cccgaatctggacagccttctgaag

SEQ ID NO: 82312 - DNA, 25 bp, Canis familiaris
ccctgatctctgaggacctgtgtta

SEQ ID NO: 82313 - DNA, 25 bp, Canis familiaris
ccctgccctcagcgaatatggcatc

SEQ ID NO: 82314 - DNA, 25 bp, Canis familiaris
ccctgccaccaaaggagaatgcttg

SEQ ID NO: 82315 - DNA, 25 bp, Canis familiaris
ccctgccaccttagtcatgagagca

SEQ ID NO: 82316 - DNA, 25 bp, Canis familiaris
ccctgccactgcttatgtgaggagc

SEQ ID NO: 82317 - DNA, 25 bp, Canis familiaris
ccctcatccagcgcaggagagagca

SEQ ID NO: 82318 - DNA, 25 bp, Canis familiaris
ccctcaccagcggaggacaatccca

SEQ ID NO: 82319 - DNA, 25 bp, Canis familiaris
ccctcagtctcagaggagccatccc

SEQ ID NO: 82320 - DNA, 25 bp, Canis familiaris
cccgcagcatcctggtaaataccct

SEQ ID NO: 82321 - DNA, 25 bp, Canis familiaris
ccccacaccaggttaattgtaactg

SEQ ID NO: 82322 - DNA, 25 bp, Canis familiaris
ccctcaacgaccactttgtcaagct

SEQ ID NO: 82323 - DNA, 25 bp, Canis familiaris
ccctaccgtgtactcattttaagct

SEQ ID NO: 82324 - DNA, 25 bp, Canis familiaris
ccctgtacgtgatcctcttaatagt

SEQ ID NO: 82325 - DNA, 25 bp, Canis familiaris
ccctgactggtttcccttaagcagt

SEQ ID NO: 82326 - DNA, 25 bp, Canis familiaris
ccctactcctcttaggcttagaagg

SEQ ID NO: 82327 - DNA, 25 bp, Canis familiaris
cccgactcccttaagctgtaacagg

SEQ ID NO: 82328 - DNA, 25 bp, Canis familiaris
cccggcccgatcacgtagacacggg

SEQ ID NO: 82329 - DNA, 25 bp, Canis familiaris
cccggcccgaaagcgaggccgcagt

SEQ ID NO: 82330 - DNA, 25 bp, Canis familiaris
ccctggccctggtgctgcagggccc

SEQ ID NO: 82331 - DNA, 25 bp, Canis familiaris
ccctggccttgttgctatagctggc

SEQ ID NO: 82332 - DNA, 25 bp, Canis familiaris
ccctggcagtagatgtctgggcgag

SEQ ID NO: 82333 - DNA, 25 bp, Canis familiaris
ccctggggattccatcctagcagag

SEQ ID NO: 82334 - DNA, 25 bp, Canis familiaris
ccctggagagcaagctgacccacag

SEQ ID NO: 82335 - DNA, 25 bp, Canis familiaris
ccctgctatgacatctaccttcagt

SEQ ID NO: 82336 - DNA, 25 bp, Canis familiaris
cccctggatttcagtttcctataag

SEQ ID NO: 82337 - DNA, 25 bp, Canis familiaris
cccgggatattgagtctccatatta

SEQ ID NO: 82338 - DNA, 25 bp, Canis familiaris
ccaatttaatttctaccattgtatg

SEQ ID NO: 82339 - DNA, 25 bp, Canis familiaris
ccctgttaacctactacggcttgag

SEQ ID NO: 82340 - DNA, 25 bp, Canis familiaris
ccctgtttgcacctttatttgtttg

SEQ ID NO: 82341 - DNA, 25 bp, Canis familiaris
ccctgtggtcactgttcacattcgg

SEQ ID NO: 82342 - DNA, 25 bp, Canis familiaris
ccctctggcttctgtaatcattggt

SEQ ID NO: 82343 - DNA, 25 bp, Canis familiaris
ccctagcctctctgtgtatatgtga

SEQ ID NO: 82344 - DNA, 25 bp, Canis familiaris
ccctagctccactctgatgtgtgag

SEQ ID NO: 82345 - DNA, 25 bp, Canis familiaris
ccctgtgcccagaagctactgatga

SEQ ID NO: 82346 - DNA, 25 bp, Canis familiaris
ccctgtggccaatatttgtacttca

SEQ ID NO: 82347 - DNA, 25 bp, Canis familiaris
ccctgggttcttttgatgtagttca

SEQ ID NO: 82348 - DNA, 25 bp, Canis familiaris
ccctgggttcttggtattcgctatt

SEQ ID NO: 82349 - DNA, 25 bp, Canis familiaris
ccctagggcttaggcttgggtccat

SEQ ID NO: 82350 - DNA, 25 bp, Canis familiaris
ccctccggtgtaggttatagcccat

SEQ ID NO: 82351 - DNA, 25 bp, Canis familiaris
cctaccggtgaaaagtgacccaatg

SEQ ID NO: 82352 - DNA, 25 bp, Canis familiaris
gcccaaaagtagaaagcgccccaat

SEQ ID NO: 82353 - DNA, 25 bp, Canis familiaris
cccgagtaaaaattcagccacgtat

SEQ ID NO: 82354 - DNA, 25 bp, Canis familiaris
cccgagtgtccaggtgaaacgttgt

SEQ ID NO: 82355 - DNA, 25 bp, Canis familiaris
ccccggttctcgtgaatcgaagtcg

SEQ ID NO: 82356 - DNA, 25 bp, Canis familiaris
cccccaaactccagatccggagtca

SEQ ID NO: 82357 - DNA, 25 bp, Canis familiaris
ccctccaaactctaaactatgaggt

SEQ ID NO: 82358 - DNA, 25 bp, Canis familiaris
ccctggcaaatgtatacacctcatg

SEQ ID NO: 82359 - DNA, 25 bp, Canis familiaris
ccctccacatagtagaacctgagtg

SEQ ID NO: 82360 - DNA, 25 bp, Canis familiaris
ccctcagcactgcaggaacactggc

SEQ ID NO: 82361 - DNA, 25 bp, Canis familiaris
ccctacggcgacgagaagctgagcc

SEQ ID NO: 82362 - DNA, 25 bp, Canis familiaris
ccctgagctgaacgggaagctcact

SEQ ID NO: 82363 - DNA, 25 bp, Canis familiaris
ccctgagtctgacggggatgctcac

SEQ ID NO: 82364 - DNA, 25 bp, Canis familiaris
ccgagaggctaatgggacccttgca

SEQ ID NO: 82365 - DNA, 25 bp, Canis familiaris
ccgtgcgggcaataggccacgcccg

SEQ ID NO: 82366 - DNA, 25 bp, Canis familiaris
gccttgggggaatggccagtggccc

SEQ ID NO: 82367 - DNA, 25 bp, Canis familiaris
gttcgggcgtaatggccttggaagg

SEQ ID NO: 82368 - DNA, 25 bp, Canis familiaris
gttgccggggattggggcatccgaa

SEQ ID NO: 82369 - DNA, 25 bp, Canis familiaris
cctgtcggggtcggagctgaccgac

SEQ ID NO: 82370 - DNA, 25 bp, Canis familiaris
ccctggtggggatgagtgacttgac

SEQ ID NO: 82371 - DNA, 25 bp, Canis familiaris
cccggagtgggagcagtcaggcgac

SEQ ID NO: 82372 - DNA, 25 bp, Canis familiaris
cccggagaaggacaatcagacggac

SEQ ID NO: 82373 - DNA, 25 bp, Canis familiaris
cccctgaaagtgccttaagcccaga

SEQ ID NO: 82374 - DNA, 25 bp, Canis familiaris
cccgtagagactccactaaccggca

SEQ ID NO: 82375 - DNA, 25 bp, Canis familiaris
cccgtagacccacgtgaacaaggag

SEQ ID NO: 82376 - DNA, 25 bp, Canis familiaris
cccgaaatcgctgtggtccaaatgt

SEQ ID NO: 82377 - DNA, 25 bp, Canis familiaris
cccgacaaactaatgattctcacta

SEQ ID NO: 82378 - DNA, 25 bp, Canis familiaris
cccgacaggattatacttactcagc

SEQ ID NO: 82379 - DNA, 25 bp, Canis familiaris
cccgacacggattatacttactccg

SEQ ID NO: 82380 - DNA, 25 bp, Canis familiaris
cccgaagctggtttgatctacacac

SEQ ID NO: 82381 - DNA, 25 bp, Canis familiaris
cccgatgacgtttgagaccatgctc

SEQ ID NO: 82382 - DNA, 25 bp, Canis familiaris
cccgagttgttttgccagctgactc

SEQ ID NO: 82383 - DNA, 25 bp, Canis familiaris
ccctggttgtacaagacttgagggt

SEQ ID NO: 82384 - DNA, 25 bp, Canis familiaris
ccctgggtaaacatctggctgctgg

SEQ ID NO: 82385 - DNA, 25 bp, Canis familiaris
cccgtgggcgaagttcatggcctgg

SEQ ID NO: 82386 - DNA, 25 bp, Canis familiaris
cccgtttctgccaatattgtcctgg

SEQ ID NO: 82387 - DNA, 25 bp, Canis familiaris
cccgttgtgcctattttattaacag

SEQ ID NO: 82388 - DNA, 25 bp, Canis familiaris
ccctgttcctccattcagtgttaaa

SEQ ID NO: 82389 - DNA, 25 bp, Canis familiaris
ccctgttccaacctgtatcatttaa

SEQ ID NO: 82390 - DNA, 25 bp, Canis familiaris
ccctgtgcttccacgttattgataa

SEQ ID NO: 82391 - DNA, 25 bp, Canis familiaris
ccctggtgtctaaagccttggatta

SEQ ID NO: 82392 - DNA, 25 bp, Canis familiaris
ccctgttttatttggcttggtcatt

SEQ ID NO: 82393 - DNA, 25 bp, Canis familiaris
cccggtgtctttaagtctgggcttg

SEQ ID NO: 82394 - DNA, 25 bp, Canis familiaris
cccgtggtaatgaccagggggcctg

SEQ ID NO: 82395 - DNA, 25 bp, Canis familiaris
cccccgttatccaggtgagggctca

SEQ ID NO: 82396 - DNA, 25 bp, Canis familiaris
ccccacgtttggacgactgggcgca

SEQ ID NO: 82397 - DNA, 25 bp, Canis familiaris
cccgatcagtatacgacagccgacg

SEQ ID NO: 82398 - DNA, 25 bp, Canis familiaris
cccgtgtatgaacgaagccgacatg

SEQ ID NO: 82399 - DNA, 25 bp, Canis familiaris
ccgcgtctcgagttgaacctaaggg

SEQ ID NO: 82400 - DNA, 25 bp, Canis familiaris
cccgtggggcttcacactataggtg

SEQ ID NO: 82401 - DNA, 25 bp, Canis familiaris
cccgtgggacttgagcacgtaatag

SEQ ID NO: 82402 - DNA, 25 bp, Canis familiaris
cccgttgccactcagaacttaacag

SEQ ID NO: 82403 - DNA, 25 bp, Canis familiaris
cccgttcccatcgagaacatcaaac

SEQ ID NO: 82404 - DNA, 25 bp, Canis familiaris
cccgttctctttggaagatcctcca

SEQ ID NO: 82405 - DNA, 25 bp, Canis familiaris
cccgtctcggttcatgaacgcatcg

SEQ ID NO: 82406 - DNA, 25 bp, Canis familiaris
ccctctctgggtcttgaaggctaca

SEQ ID NO: 82407 - DNA, 25 bp, Canis familiaris
ccctcctgggccttatgcagggtta

SEQ ID NO: 82408 - DNA, 25 bp, Canis familiaris
ccctcctcgcactttacaagtgttc

SEQ ID NO: 82409 - DNA, 25 bp, Canis familiaris
ccctcctgcgcacggtgaagagtgt

SEQ ID NO: 82410 - DNA, 25 bp, Canis familiaris
ccctctctgccagcaagattgggtg

SEQ ID NO: 82411 - DNA, 25 bp, Canis familiaris
ccctctcggcagacaagttccaggt

SEQ ID NO: 82412 - DNA, 25 bp, Canis familiaris
ccctctgcaagctggacttccagga

SEQ ID NO: 82413 - DNA, 25 bp, Canis familiaris
ccctcagagaggctgacctcgcagg

SEQ ID NO: 82414 - DNA, 25 bp, Canis familiaris
ccctcgagtggcctggcctaatatt

SEQ ID NO: 82415 - DNA, 25 bp, Canis familiaris
ccgtcctgtgtctggaccaaaccac

SEQ ID NO: 82416 - DNA, 25 bp, Canis familiaris
ccctcgtgaggctggatctcaaaaa

SEQ ID NO: 82417 - DNA, 25 bp, Canis familiaris
ccctctgcccgctggatcgcagagg

SEQ ID NO: 82418 - DNA, 25 bp, Canis familiaris
ccctctgcacatcctgggagcagaa

SEQ ID NO: 82419 - DNA, 25 bp, Canis familiaris
ccctcacagcatactctggtcataa

SEQ ID NO: 82420 - DNA, 25 bp, Canis familiaris
ccctcagacacggctggtacaacaa

SEQ ID NO: 82421 - DNA, 25 bp, Canis familiaris
ccctcaactcccagaagaaatactt

SEQ ID NO: 82422 - DNA, 25 bp, Canis familiaris
ccctctcctcccagacaagaaaagg

SEQ ID NO: 82423 - DNA, 25 bp, Canis familiaris
ccctctcctccacagacatggaaga

SEQ ID NO: 82424 - DNA, 25 bp, Canis familiaris
ccctgaccccaaagtatgaggagca

SEQ ID NO: 82425 - DNA, 25 bp, Canis familiaris
ccctcacaccctgggtagcagagcc

SEQ ID NO: 82426 - DNA, 25 bp, Canis familiaris
ccctcagagtgaccgtgttgctgtg

SEQ ID NO: 82427 - DNA, 25 bp, Canis familiaris
ccctcacagtgtccttgtgtgtggg

SEQ ID NO: 82428 - DNA, 25 bp, Canis familiaris
ccctcagcactggcctcagttaggg

SEQ ID NO: 82429 - DNA, 25 bp, Canis familiaris
ccctcagtgaacccagcttgaagga

SEQ ID NO: 82430 - DNA, 25 bp, Canis familiaris
ccctcagtgaaaccgttgacttgcc

SEQ ID NO: 82431 - DNA, 25 bp, Canis familiaris
ccctggcaacaaccagtctactcta

SEQ ID NO: 82432 - DNA, 25 bp, Canis familiaris
cccggcattgaactcagtgctctgc

SEQ ID NO: 82433 - DNA, 25 bp, Canis familiaris
ccctggcttacactgattatcacaa

SEQ ID NO: 82434 - DNA, 25 bp, Canis familiaris
ccctgtgctctttgtgtctataaag

SEQ ID NO: 82435 - DNA, 25 bp, Canis familiaris
ccctggctcttgatctttgattagg

SEQ ID NO: 82436 - DNA, 25 bp, Canis familiaris
cccgactgccttttgtgtgagtagg

SEQ ID NO: 82437 - DNA, 25 bp, Canis familiaris
ccctgagctccgtgtgggtgtaggt

SEQ ID NO: 82438 - DNA, 25 bp, Canis familiaris
ccctgagccggtggtggacgatggg

SEQ ID NO: 82439 - DNA, 25 bp, Canis familiaris
ccctcaaggatggcctggtccatgg

SEQ ID NO: 82440 - DNA, 25 bp, Canis familiaris
ccctcaaggatggcctggtccatgg

SEQ ID NO: 82441 - DNA, 25 bp, Canis familiaris
ccctcaaggatggcctggtccatgg

SEQ ID NO: 82442 - DNA, 25 bp, Canis familiaris
ccctcaaggatggcctggtccatgg

SEQ ID NO: 82443 - DNA, 25 bp, Canis familiaris
ccctcaagagagaatgcatggaaag

SEQ ID NO: 82444 - DNA, 25 bp, Canis familiaris
ccctcctgcacacttgcaggccaaa

SEQ ID NO: 82445 - DNA, 25 bp, Canis familiaris
ccctcttccaggacgtgcagaaacc

SEQ ID NO: 82446 - DNA, 25 bp, Canis familiaris
ccctctgtccagttctgtcaaagta

SEQ ID NO: 82447 - DNA, 25 bp, Canis familiaris
ccctggtcctgtactgtccagtgaa

SEQ ID NO: 82448 - DNA, 25 bp, Canis familiaris
ccctggatagcttcctgggagcatg

SEQ ID NO: 82449 - DNA, 25 bp, Canis familiaris
ccctgctgaaaggcagctggtacga

SEQ ID NO: 82450 - DNA, 25 bp, Canis familiaris
ccctgctaaactatgtacacgagga

SEQ ID NO: 82451 - DNA, 25 bp, Canis familiaris
ccctcatctaaccattcttacggta

SEQ ID NO: 82452 - DNA, 25 bp, Canis familiaris
ccctgtgtcaaccttttgactccta

SEQ ID NO: 82453 - DNA, 25 bp, Canis familiaris
ccctgcttcaacatttcttgcttta

SEQ ID NO: 82454 - DNA, 25 bp, Canis familiaris
ccctcctcataggttgtttcttcat

SEQ ID NO: 82455 - DNA, 25 bp, Canis familiaris
ccctcacccacaattatttcttact

SEQ ID NO: 82456 - DNA, 25 bp, Canis familiaris
ccctcagcccaatggctttgtttcc

SEQ ID NO: 82457 - DNA, 25 bp, Canis familiaris
ccctcactcctaaagctatcatgtt

SEQ ID NO: 82458 - DNA, 25 bp, Canis familiaris
ccctcactctagatcaggcacttta

SEQ ID NO: 82459 - DNA, 25 bp, Canis familiaris
ccctctgcgctacacagagctcatg

SEQ ID NO: 82460 - DNA, 25 bp, Canis familiaris
ccctggcagctttcagtgtcatcag

SEQ ID NO: 82461 - DNA, 25 bp, Canis familiaris
cccgtcagcagattcggtatctgaa

SEQ ID NO: 82462 - DNA, 25 bp, Canis familiaris
ccctgtgcacccagggcttgcaacg

SEQ ID NO: 82463 - DNA, 25 bp, Canis familiaris
ccctgagtgtccagggctggccagg

SEQ ID NO: 82464 - DNA, 25 bp, Canis familiaris
ccctcagcctttcgggctgggaggg

SEQ ID NO: 82465 - DNA, 25 bp, Canis familiaris
ccctccactgccctggggtagaggg

SEQ ID NO: 82466 - DNA, 25 bp, Canis familiaris
ccctccgtgggtttgtgtcaaggtg

SEQ ID NO: 82467 - DNA, 25 bp, Canis familiaris
ccctcccttgttcagtccagagagg

SEQ ID NO: 82468 - DNA, 25 bp, Canis familiaris
ccctcccaccttaacagcacagagg

SEQ ID NO: 82469 - DNA, 25 bp, Canis familiaris
ccctccctgccaaaaagcatctgtg

SEQ ID NO: 82470 - DNA, 25 bp, Canis familiaris
ccctgcccgatcattgaggctctag

SEQ ID NO: 82471 - DNA, 25 bp, Canis familiaris
ccctgagggactctatgctggcatc

SEQ ID NO: 82472 - DNA, 25 bp, Canis familiaris
ccctgaggagcaccctgtgctgctc

SEQ ID NO: 82473 - DNA, 25 bp, Canis familiaris
cccgaggagatgccattttgccctg

SEQ ID NO: 82474 - DNA, 25 bp, Canis familiaris
ccctgaaggctgtattcctgcttct

SEQ ID NO: 82475 - DNA, 25 bp, Canis familiaris
cccgaagagttcacttttgctatta

SEQ ID NO: 82476 - DNA, 25 bp, Canis familiaris
cccgataaaggccctcttgatctag

SEQ ID NO: 82477 - DNA, 25 bp, Canis familiaris
ccctgcgaaagggacttcgatcaca

SEQ ID NO: 82478 - DNA, 25 bp, Canis familiaris
ccctgtcgaagggacgtcaatcaca

SEQ ID NO: 82479 - DNA, 25 bp, Canis familiaris
ccctggccaaggtcatccatgacaa

SEQ ID NO: 82480 - DNA, 25 bp, Canis familiaris
ccctgaccacaggcttcgtacagag

SEQ ID NO: 82481 - DNA, 25 bp, Canis familiaris
cccgacatcaagacggccttcagcg

SEQ ID NO: 82482 - DNA, 25 bp, Canis familiaris
ccctgaatcaagtcccgcgtcaggc

SEQ ID NO: 82483 - DNA, 25 bp, Canis familiaris
cccggacagagctcctgtgtatggc

SEQ ID NO: 82484 - DNA, 25 bp, Canis familiaris
ccctgtccaagctctcatggaggtg

SEQ ID NO: 82485 - DNA, 25 bp, Canis familiaris
ccctctgcaaagaccacattggtgg

SEQ ID NO: 82486 - DNA, 25 bp, Canis familiaris
ccctctggacaggccacagggggtc

SEQ ID NO: 82487 - DNA, 25 bp, Canis familiaris
ccctctggcttggccacagagagta

SEQ ID NO: 82488 - DNA, 25 bp, Canis familiaris
ccctgcggctggagccagagacggc

SEQ ID NO: 82489 - DNA, 25 bp, Canis familiaris
cccggcctggtcgcagaaggtggaa

SEQ ID NO: 82490 - DNA, 25 bp, Canis familiaris
ccctggtcaggtcctctagggtggg

SEQ ID NO: 82491 - DNA, 25 bp, Canis familiaris
ccctcctaggtctcgaggcaggtgc

SEQ ID NO: 82492 - DNA, 25 bp, Canis familiaris
ccctccgggaaactgtggcgtgatg

SEQ ID NO: 82493 - DNA, 25 bp, Canis familiaris
ccctcggggaatttgcaggaagagc

SEQ ID NO: 82494 - DNA, 25 bp, Canis familiaris
ccctcgggcagccaagtgggacgga

SEQ ID NO: 82495 - DNA, 25 bp, Canis familiaris
ccctcggcctccatggggagggaag

SEQ ID NO: 82496 - DNA, 25 bp, Canis familiaris
ccctcttctcccatgtggggacaga

SEQ ID NO: 82497 - DNA, 25 bp, Canis familiaris
ccctggacctccactgtgggaatgg

SEQ ID NO: 82498 - DNA, 25 bp, Canis familiaris
cccgggcctagcaggtgtgggtggc

SEQ ID NO: 82499 - DNA, 25 bp, Canis familiaris
cccggtcacgcaggagttctgggat

SEQ ID NO: 82500 - DNA, 25 bp, Canis familiaris
cccggtcccacaagttcttgattgg

SEQ ID NO: 82501 - DNA, 25 bp, Canis familiaris
cctcagtttccacggttcttaactg

SEQ ID NO: 82502 - DNA, 25 bp, Canis familiaris
ccctgttcttttggttcctatactg

SEQ ID NO: 82503 - DNA, 25 bp, Canis familiaris
ccctgccatgttttcagttactctt

SEQ ID NO: 82504 - DNA, 25 bp, Canis familiaris
ccctgcctgttgtcgcagtgatttt

SEQ ID NO: 82505 - DNA, 25 bp, Canis familiaris
ccctgtgcagttgctcagtggcttt

SEQ ID NO: 82506 - DNA, 25 bp, Canis familiaris
ccctgctgagtggtacatggacgta

SEQ ID NO: 82507 - DNA, 25 bp, Canis familiaris
cccgctagtgcgggacagacgcctc

SEQ ID NO: 82508 - DNA, 25 bp, Canis familiaris
cctcgtcgtcgtcaacacgattgct

SEQ ID NO: 82509 - DNA, 25 bp, Canis familiaris
cccgtctgtcaggaaaatcatattt

SEQ ID NO: 82510 - DNA, 25 bp, Canis familiaris
ccgagtgtccaggtgaaacgttgta

SEQ ID NO: 82511 - DNA, 25 bp, Canis familiaris
ccctggacactggtgatacacccgt

SEQ ID NO: 82512 - DNA, 25 bp, Canis familiaris
ccctgacggctgagaagctccggtc

SEQ ID NO: 82513 - DNA, 25 bp, Canis familiaris
ccctgagcgccgaacaagccaaggt

SEQ ID NO: 82514 - DNA, 25 bp, Canis familiaris
ccctgtcgacgttaatctgaaggag

SEQ ID NO: 82515 - DNA, 25 bp, Canis familiaris
ccctgggacccagagtgagagcaga

SEQ ID NO: 82516 - DNA, 25 bp, Canis familiaris
ccctgggatcatgacctgagccaaa

SEQ ID NO: 82517 - DNA, 25 bp, Canis familiaris
ccctgaaactcgtcctactgagaaa

SEQ ID NO: 82518 - DNA, 25 bp, Canis familiaris
ccctgacgacatcaccaacgaagaa

SEQ ID NO: 82519 - DNA, 25 bp, Canis familiaris
ccctgaaacaggcccagaccaggac

SEQ ID NO: 82520 - DNA, 25 bp, Canis familiaris
ccgatgaacaagctcaaggccagga

SEQ ID NO: 82521 - DNA, 25 bp, Canis familiaris
cccggccaagttcatggccagcata

SEQ ID NO: 82522 - DNA, 25 bp, Canis familiaris
cccgccaagttcaaaggccagcata

SEQ ID NO: 82523 - DNA, 25 bp, Canis familiaris
cccccaagcaccaaagggcaggact

SEQ ID NO: 82524 - DNA, 25 bp, Canis familiaris
cccgtaacaccagaggcctgaagct

SEQ ID NO: 82525 - DNA, 25 bp, Canis familiaris
ccctggacctaaggagcgactgggt

SEQ ID NO: 82526 - DNA, 25 bp, Canis familiaris
ccctgtgcccaagaagctactgatg

SEQ ID NO: 82527 - DNA, 25 bp, Canis familiaris
cccgtggccaagaaagctcacctgt

SEQ ID NO: 82528 - DNA, 25 bp, Canis familiaris
cccgggatcagagaagacatccgca

SEQ ID NO: 82529 - DNA, 25 bp, Canis familiaris
ccctgggcaagagaggactgttgag

SEQ ID NO: 82530 - DNA, 25 bp, Canis familiaris
cccgggcacgatggaatgggtgtgg

SEQ ID NO: 82531 - DNA, 25 bp, Canis familiaris
ccctgggtggtgcagcagtttggcg

SEQ ID NO: 82532 - DNA, 25 bp, Canis familiaris
ccctctgatggggcaaagtcttgga

SEQ ID NO: 82533 - DNA, 25 bp, Canis familiaris
ccctgcatgaggcccacgagttctc

SEQ ID NO: 82534 - DNA, 25 bp, Canis familiaris
cccgaagggtcactggttcatcaga

SEQ ID NO: 82535 - DNA, 25 bp, Canis familiaris
cccgaccggcaccggtacatcaagg

SEQ ID NO: 82536 - DNA, 25 bp, Canis familiaris
ccctgactctcctggtggaactggg

SEQ ID NO: 82537 - DNA, 25 bp, Canis familiaris
ccctggccctgctggggaagaagga

SEQ ID NO: 82538 - DNA, 25 bp, Canis familiaris
cccgagcccctgggggcaagacacg

SEQ ID NO: 82539 - DNA, 25 bp, Canis familiaris
cccggccttcaggtgttcaaggata

SEQ ID NO: 82540 - DNA, 25 bp, Canis familiaris
cccgtggcattcgctgtgaagacga

SEQ ID NO: 82541 - DNA, 25 bp, Canis familiaris
ccctgtggaggcccatgtacaaatg

SEQ ID NO: 82542 - DNA, 25 bp, Canis familiaris
cccggtgagaggcatctccatcaag

SEQ ID NO: 82543 - DNA, 25 bp, Canis familiaris
ccctgcggagggcaacaaggacagc

SEQ ID NO: 82544 - DNA, 25 bp, Canis familiaris
ccctccggagggacatctggggctg

SEQ ID NO: 82545 - DNA, 25 bp, Canis familiaris
ccctcgggatggcattccgttgtgt

SEQ ID NO: 82546 - DNA, 25 bp, Canis familiaris
cccgaaggtgacaactccgtgagtg

SEQ ID NO: 82547 - DNA, 25 bp, Canis familiaris
ccctgaagggtccctgctgttggat

SEQ ID NO: 82548 - DNA, 25 bp, Canis familiaris
cccgacggtgtccactgatttggag

SEQ ID NO: 82549 - DNA, 25 bp, Canis familiaris
ccctgccttgttgcagctactagga

SEQ ID NO: 82550 - DNA, 25 bp, Canis familiaris
cccgtttataccgaactcacagaat

SEQ ID NO: 82551 - DNA, 25 bp, Canis familiaris
cccgtgtattccctaatctcgggat

SEQ ID NO: 82552 - DNA, 25 bp, Canis familiaris
cccgtgttcttgcctaatcaggttg

SEQ ID NO: 82553 - DNA, 25 bp, Canis familiaris
cccgggttgtcctgtgatggttgga

SEQ ID NO: 82554 - DNA, 25 bp, Canis familiaris
ccctgggtctctacggaggtgttgg

SEQ ID NO: 82555 - DNA, 25 bp, Canis familiaris
ccctgggcctgtgggacaggttctg

SEQ ID NO: 82556 - DNA, 25 bp, Canis familiaris
cccgggagttggcactcctgttgtg

SEQ ID NO: 82557 - DNA, 25 bp, Canis familiaris
cccgctggaagggtggcctggttgg

SEQ ID NO: 82558 - DNA, 25 bp, Canis familiaris
ccaccaggaacgagaccgtcgggtg

SEQ ID NO: 82559 - DNA, 25 bp, Canis familiaris
cccgggagcaaatgcagccccgagg

SEQ ID NO: 82560 - DNA, 25 bp, Canis familiaris
cccgagggcatggatgggccccaac

SEQ ID NO: 82561 - DNA, 25 bp, Canis familiaris
cccgtgaggcatttggaccctgaag

SEQ ID NO: 82562 - DNA, 25 bp, Canis familiaris
cccgatcggtggagacgttgaagga

SEQ ID NO: 82563 - DNA, 25 bp, Canis familiaris
cccggctcggcgagcaacttgacgt

SEQ ID NO: 82564 - DNA, 25 bp, Canis familiaris
cccgatgcctgggaaggtcatagac

SEQ ID NO: 82565 - DNA, 25 bp, Canis familiaris
ccctgggctgagtgcagtgctaaac

SEQ ID NO: 82566 - DNA, 25 bp, Canis familiaris
cccggactggcagagtctggactcg

SEQ ID NO: 82567 - DNA, 25 bp, Canis familiaris
cccgaaatctgctgctgtctggagc

SEQ ID NO: 82568 - DNA, 25 bp, Canis familiaris
cccgagcaggcctgtgctcgggcct

SEQ ID NO: 82569 - DNA, 25 bp, Canis familiaris
cccgtgagagcctggcgtggggctc

SEQ ID NO: 82570 - DNA, 25 bp, Canis familiaris
cccgaaggcgcgcaggtgaaggtgt

SEQ ID NO: 82571 - DNA, 25 bp, Canis familiaris
cccgagcagggagaaggcaagggtg

SEQ ID NO: 82572 - DNA, 25 bp, Canis familiaris
ccctgacagggaccagcagaacaga

SEQ ID NO: 82573 - DNA, 25 bp, Canis familiaris
ccctgacggaggcccatgaaagaaa

SEQ ID NO: 82574 - DNA, 25 bp, Canis familiaris
ccctgactggtttttgaacagacaa

SEQ ID NO: 82575 - DNA, 25 bp, Canis familiaris
ccctccatagctgtttgacatcgaa

SEQ ID NO: 82576 - DNA, 25 bp, Canis familiaris
ccccttcgcatcctttgattaaact

SEQ ID NO: 82577 - DNA, 25 bp, Canis familiaris
ccctctgtcccttttattatacatg

SEQ ID NO: 82578 - DNA, 25 bp, Canis familiaris
ccctggtccctatgtattttgcatt

SEQ ID NO: 82579 - DNA, 25 bp, Canis familiaris
cccgtatcccaatgtattttgacac

SEQ ID NO: 82580 - DNA, 25 bp, Canis familiaris
ccccttcgcaaagctcattgtggaa

SEQ ID NO: 82581 - DNA, 25 bp, Canis familiaris
ccctgggccaaaggctcagtggttt

SEQ ID NO: 82582 - DNA, 25 bp, Canis familiaris
ccctggttctgatccttgtggtttt

SEQ ID NO: 82583 - DNA, 25 bp, Canis familiaris
ccctggtgtccctaatgtgatcgtt

SEQ ID NO: 82584 - DNA, 25 bp, Canis familiaris
ccctggatgccacccaagttgtata

SEQ ID NO: 82585 - DNA, 25 bp, Canis familiaris
ccctgagagctgccccatcaggggt

SEQ ID NO: 82586 - DNA, 25 bp, Canis familiaris
ccctggagctccgagatggcgagga

SEQ ID NO: 82587 - DNA, 25 bp, Canis familiaris
ccctgggatcacgatctgagctgaa

SEQ ID NO: 82588 - DNA, 25 bp, Canis familiaris
ccctgggctcaggacatgattgcca

SEQ ID NO: 82589 - DNA, 25 bp, Canis familiaris
ccctgcgttggtacaatcacatcaa

SEQ ID NO: 82590 - DNA, 25 bp, Canis familiaris
ccctgcaactgtatccatctatgaa

SEQ ID NO: 82591 - DNA, 25 bp, Canis familiaris
ccctcgcactgtatcaagcgtcaga

SEQ ID NO: 82592 - DNA, 25 bp, Canis familiaris
ccctcctctgtaccaaggtcaggag

SEQ ID NO: 82593 - DNA, 25 bp, Canis familiaris
ccctctgtgcagcaccaaggggggg

SEQ ID NO: 82594 - DNA, 25 bp, Canis familiaris
ccctcgtgcaacctcagggacgagg

SEQ ID NO: 82595 - DNA, 25 bp, Canis familiaris
ccctgggcagcagctggtggccagg

SEQ ID NO: 82596 - DNA, 25 bp, Canis familiaris
ccctgagaacacctttggccatgga

SEQ ID NO: 82597 - DNA, 25 bp, Canis familiaris
cccgaattctggccttggccaggaa

SEQ ID NO: 82598 - DNA, 25 bp, Canis familiaris
cccgcaacgtgggcttggaaggaca

SEQ ID NO: 82599 - DNA, 25 bp, Canis familiaris
cccgctactgtgggttggaatggac

SEQ ID NO: 82600 - DNA, 25 bp, Canis familiaris
cccgctatcctgggttggctagcgt

SEQ ID NO: 82601 - DNA, 25 bp, Canis familiaris
ccctcctatctcagtcaggcaatgc

SEQ ID NO: 82602 - DNA, 25 bp, Canis familiaris
ccctccatttcactgtcgtggatgg

SEQ ID NO: 82603 - DNA, 25 bp, Canis familiaris
ccctgctttgttgtgctgtggatgc

SEQ ID NO: 82604 - DNA, 25 bp, Canis familiaris
ccctctggtcttgggcttggtagtg

SEQ ID NO: 82605 - DNA, 25 bp, Canis familiaris
ccctgctggttttctcttggaacca

SEQ ID NO: 82606 - DNA, 25 bp, Canis familiaris
ccctgtgcgcatattccatattcaa

SEQ ID NO: 82607 - DNA, 25 bp, Canis familiaris
ccctgtgacatgctgatgccattgg

SEQ ID NO: 82608 - DNA, 25 bp, Canis familiaris
cccgtggcagctggagccacacggt

SEQ ID NO: 82609 - DNA, 25 bp, Canis familiaris
ccctctggattggtggcaactggtg

SEQ ID NO: 82610 - DNA, 25 bp, Canis familiaris
ccctcgctgtgaggtggcccgagga

SEQ ID NO: 82611 - DNA, 25 bp, Canis familiaris
cccgtgttgggtgctgcaccggata

SEQ ID NO: 82612 - DNA, 25 bp, Canis familiaris
ccctgatttcgaaccgagcactgaa

SEQ ID NO: 82613 - DNA, 25 bp, Canis familiaris
ccctgttccgaagctgacagcgatg

SEQ ID NO: 82614 - DNA, 25 bp, Canis familiaris
ccctgtctgaagcagcctgaacgag

SEQ ID NO: 82615 - DNA, 25 bp, Canis familiaris
ccctcctgcatacacacatgtacga

SEQ ID NO: 82616 - DNA, 25 bp, Canis familiaris
ccctcccacacttgagcaggacaat

SEQ ID NO: 82617 - DNA, 25 bp, Canis familiaris
ccctcccctctctaggagacataag

SEQ ID NO: 82618 - DNA, 25 bp, Canis familiaris
cccccggcttcggtgcagaggaaag

SEQ ID NO: 82619 - DNA, 25 bp, Canis familiaris
cccccaagttccctgaggaacaatg

SEQ ID NO: 82620 - DNA, 25 bp, Canis familiaris
cccgccgatcgtctatgggaacttc

SEQ ID NO: 82621 - DNA, 25 bp, Canis familiaris
cccctggacgatctggagcgtagcc

SEQ ID NO: 82622 - DNA, 25 bp, Canis familiaris
ccctgcggggtggtggaggtgcacc

SEQ ID NO: 82623 - DNA, 25 bp, Canis familiaris
ccctccctggtggggatgagtgact

SEQ ID NO: 82624 - DNA, 25 bp, Canis familiaris
ccctccacattgccagaggtggttc

SEQ ID NO: 82625 - DNA, 25 bp, Canis familiaris
ccctgctgcctgggaaggtgttctt

SEQ ID NO: 82626 - DNA, 25 bp, Canis familiaris
ccctcgcgtgtactcacgtgtttgt

SEQ ID NO: 82627 - DNA, 25 bp, Canis familiaris
ccctgtgcctatgtacgttgtttgg

SEQ ID NO: 82628 - DNA, 25 bp, Canis familiaris
ccctgtttggtttctgttttggctg

SEQ ID NO: 82629 - DNA, 25 bp, Canis familiaris
cccgttctgggtttcttggatatgt

SEQ ID NO: 82630 - DNA, 25 bp, Canis familiaris
cccgctttctggagacattagttga

SEQ ID NO: 82631 - DNA, 25 bp, Canis familiaris
ccctgccttctgatatccaaagctt

SEQ ID NO: 82632 - DNA, 25 bp, Canis familiaris
ccctgccttcgaagaactcaatcga

SEQ ID NO: 82633 - DNA, 25 bp, Canis familiaris
cccccttggaacatcctgtagcaag

SEQ ID NO: 82634 - DNA, 25 bp, Canis familiaris
ccctccaatggatcctcgttaaagg

SEQ ID NO: 82635 - DNA, 25 bp, Canis familiaris
cccgacaatcaagctcttgggaaag

SEQ ID NO: 82636 - DNA, 25 bp, Canis familiaris
ccctgccagggagctttgatgtgca

SEQ ID NO: 82637 - DNA, 25 bp, Canis familiaris
ccctgccaggtatcgacactgtgag

SEQ ID NO: 82638 - DNA, 25 bp, Canis familiaris
ccctgcctgaaacagacctgcatga

SEQ ID NO: 82639 - DNA, 25 bp, Canis familiaris
ccctcctgaaagacaacatctccta

SEQ ID NO: 82640 - DNA, 25 bp, Canis familiaris
ccctcccagaatcagaatccagcta

SEQ ID NO: 82641 - DNA, 25 bp, Canis familiaris
ccctccaagacaggagactctcagg

SEQ ID NO: 82642 - DNA, 25 bp, Canis familiaris
ccctccaatccatgggattcatgtc

SEQ ID NO: 82643 - DNA, 25 bp, Canis familiaris
ccctccttcctgcagggattatgcc

SEQ ID NO: 82644 - DNA, 25 bp, Canis familiaris
ccctcctttgcttggtagattggac

SEQ ID NO: 82645 - DNA, 25 bp, Canis familiaris
ccctccatttttcaagtcagcaaca

SEQ ID NO: 82646 - DNA, 25 bp, Canis familiaris
ccctgccaattaatgttaaagaatg

SEQ ID NO: 82647 - DNA, 25 bp, Canis familiaris
ccctgccaaagagtggtgagaacaa

SEQ ID NO: 82648 - DNA, 25 bp, Canis familiaris
cccgcaaccagagatggaagagcta

SEQ ID NO: 82649 - DNA, 25 bp, Canis familiaris
cccccccaagaacacagatctagaa

SEQ ID NO: 82650 - DNA, 25 bp, Canis familiaris
cccccccaagtctcaaatcttgaag

SEQ ID NO: 82651 - DNA, 25 bp, Canis familiaris
cccgtccccaatcttaatggtgtag

SEQ ID NO: 82652 - DNA, 25 bp, Canis familiaris
cccgtcccctagatcaaatcgaata

SEQ ID NO: 82653 - DNA, 25 bp, Canis familiaris
cccccacaccttaccaaattgagat

SEQ ID NO: 82654 - DNA, 25 bp, Canis familiaris
ccctccaacctcaaccagaatatag

SEQ ID NO: 82655 - DNA, 25 bp, Canis familiaris
ccctgccgaccaaagagaccattga

SEQ ID NO: 82656 - DNA, 25 bp, Canis familiaris
ccctccaacctgggtgactcatgga

SEQ ID NO: 82657 - DNA, 25 bp, Canis familiaris
cccggaatcctgggtgccagtgtgt

SEQ ID NO: 82658 - DNA, 25 bp, Canis familiaris
ccctggtatgccctggtacaagttg

SEQ ID NO: 82659 - DNA, 25 bp, Canis familiaris
cccgtgctacacgtgcgtgacacag

SEQ ID NO: 82660 - DNA, 25 bp, Canis familiaris
ccctgtgccccagtcgggacagggc

SEQ ID NO: 82661 - DNA, 25 bp, Canis familiaris
ccctgtgcccggtcgggaatgtgga

SEQ ID NO: 82662 - DNA, 25 bp, Canis familiaris
cccgggctgaggtttgaaatgtcta

SEQ ID NO: 82663 - DNA, 25 bp, Canis familiaris
cccgctcagtatgtttaaagtgcaa

SEQ ID NO: 82664 - DNA, 25 bp, Canis familiaris
ccggctgcaggcctttgggaaggaa

SEQ ID NO: 82665 - DNA, 25 bp, Canis familiaris
cccgtgaggccgagggacaggaacg

SEQ ID NO: 82666 - DNA, 25 bp, Canis familiaris
cccgtgggggcagaggaattcaaag

SEQ ID NO: 82667 - DNA, 25 bp, Canis familiaris
cccgcttcagggtctacagaattca

SEQ ID NO: 82668 - DNA, 25 bp, Canis familiaris
ccctgttcagcgtctctgacaaaac

SEQ ID NO: 82669 - DNA, 25 bp, Canis familiaris
cccgtgctcacgtctgtgcacgaag

SEQ ID NO: 82670 - DNA, 25 bp, Canis familiaris
ccctcctgcacgatgtgcatcgagg

SEQ ID NO: 82671 - DNA, 25 bp, Canis familiaris
ccctcctgatgggcgctgtgtgagg

SEQ ID NO: 82672 - DNA, 25 bp, Canis familiaris
ccgacctggtgctggaggaggggga

SEQ ID NO: 82673 - DNA, 25 bp, Canis familiaris
ccctcctggtgcagcaaggggggcg

SEQ ID NO: 82674 - DNA, 25 bp, Canis familiaris
ccctgcctgtgtcccacaggatgcg

SEQ ID NO: 82675 - DNA, 25 bp, Canis familiaris
ccctgccgtggtgaagaagcatgag

SEQ ID NO: 82676 - DNA, 25 bp, Canis familiaris
ccctgccccttcaagtgtagcaaga

SEQ ID NO: 82677 - DNA, 25 bp, Canis familiaris
ccctgccctcttggagagggagggg

SEQ ID NO: 82678 - DNA, 25 bp, Canis familiaris
ccctgcccttgacccgtgggcaggt

SEQ ID NO: 82679 - DNA, 25 bp, Canis familiaris
ccctccttatagcccttttggatgc

SEQ ID NO: 82680 - DNA, 25 bp, Canis familiaris
ccctcctcgattgcatttgttggct

SEQ ID NO: 82681 - DNA, 25 bp, Canis familiaris
ccctgccacaaagcacttgtcagag

SEQ ID NO: 82682 - DNA, 25 bp, Canis familiaris
ccctgcccacaagttgcttacagac

SEQ ID NO: 82683 - DNA, 25 bp, Canis familiaris
ccctgcctgcactaatttctggagc

SEQ ID NO: 82684 - DNA, 25 bp, Canis familiaris
ccctgcttaatctatgtacagagga

SEQ ID NO: 82685 - DNA, 25 bp, Canis familiaris
ccctccataatctttagagagatga

SEQ ID NO: 82686 - DNA, 25 bp, Canis familiaris
ccctgcctcttctttcagaggtgac

SEQ ID NO: 82687 - DNA, 25 bp, Canis familiaris
ccctgcccattgcctatgaaattta

SEQ ID NO: 82688 - DNA, 25 bp, Canis familiaris
ccctcctactccaatgcaaaatgta

SEQ ID NO: 82689 - DNA, 25 bp, Canis familiaris
ccctcctagctgccacagaaagtca

SEQ ID NO: 82690 - DNA, 25 bp, Canis familiaris
ccctcctatgggcagctcattgccc

SEQ ID NO: 82691 - DNA, 25 bp, Canis familiaris
ccctgccaagggctgctgcagatga

SEQ ID NO: 82692 - DNA, 25 bp, Canis familiaris
ccctgccacaagcactgtcagagga

SEQ ID NO: 82693 - DNA, 25 bp, Canis familiaris
ccctgccacaagcactgtcagagga

SEQ ID NO: 82694 - DNA, 25 bp, Canis familiaris
ccctgccttcagagcttcgggatga

SEQ ID NO: 82695 - DNA, 25 bp, Canis familiaris
ccccagattcagcgttcctggtact

SEQ ID NO: 82696 - DNA, 25 bp, Canis familiaris
ccccgtttgcaggactgactggcaa

SEQ ID NO: 82697 - DNA, 25 bp, Canis familiaris
ccctccaagctctgaagacggcgag

SEQ ID NO: 82698 - DNA, 25 bp, Canis familiaris
cccccacagcagcttatgccggggc

SEQ ID NO: 82699 - DNA, 25 bp, Canis familiaris
ccctccaccaacatcagatctggga

SEQ ID NO: 82700 - DNA, 25 bp, Canis familiaris
ccctccactccacctgagatagagg

SEQ ID NO: 82701 - DNA, 25 bp, Canis familiaris
ccgcacacccagcacagaaaaggtt

SEQ ID NO: 82702 - DNA, 25 bp, Canis familiaris
ccgcatgttcctgcccaataaagtt

SEQ ID NO: 82703 - DNA, 25 bp, Canis familiaris
cccgatggccttctcaaaagcacat

SEQ ID NO: 82704 - DNA, 25 bp, Canis familiaris
cccgattcctgtaaaatgaggccta

SEQ ID NO: 82705 - DNA, 25 bp, Canis familiaris
cccgtgatcgtgtctcacattgggc

SEQ ID NO: 82706 - DNA, 25 bp, Canis familiaris
ccctgtgtcttagccacatgagagg

SEQ ID NO: 82707 - DNA, 25 bp, Canis familiaris
ccctgcgtgatcagatcccggagtt

SEQ ID NO: 82708 - DNA, 25 bp, Canis familiaris
ccctgctgtggctgttccaggagtg

SEQ ID NO: 82709 - DNA, 25 bp, Canis familiaris
ccctgcgggaagttcctggcagctg

SEQ ID NO: 82710 - DNA, 25 bp, Canis familiaris
ccctggggcctggacctgagcaggg

SEQ ID NO: 82711 - DNA, 25 bp, Canis familiaris
ccctgcaggcccagagcgaagaggc

SEQ ID NO: 82712 - DNA, 25 bp, Canis familiaris
ccctgcggcgccagatgaaaaacat

SEQ ID NO: 82713 - DNA, 25 bp, Canis familiaris
ccctgtacccacctaaatcatcagt

SEQ ID NO: 82714 - DNA, 25 bp, Canis familiaris
ccctgcgaacctgctgaaacatcag

SEQ ID NO: 82715 - DNA, 25 bp, Canis familiaris
cccgccacacatcactaatgacttg

SEQ ID NO: 82716 - DNA, 25 bp, Canis familiaris
ccctgccaccatcaataaagcctga

SEQ ID NO: 82717 - DNA, 25 bp, Canis familiaris
ccccatcatcttcaaggcggcctat

SEQ ID NO: 82718 - DNA, 25 bp, Canis familiaris
ccgcaagtgcttctaggcggactgt

SEQ ID NO: 82719 - DNA, 25 bp, Canis familiaris
ccgcaagtgatcccgaaagtgaatt

SEQ ID NO: 82720 - DNA, 25 bp, Canis familiaris
ccgctgagaatccacgaacggatga

SEQ ID NO: 82721 - DNA, 25 bp, Canis familiaris
ccctggcgtgcctgaagcatgggat

SEQ ID NO: 82722 - DNA, 25 bp, Canis familiaris
ccctggcgctgcacatgaagcggca

SEQ ID NO: 82723 - DNA, 25 bp, Canis familiaris
ccctgcgagctcagcatggatctga

SEQ ID NO: 82724 - DNA, 25 bp, Canis familiaris
ccctggtgcgatcctgtgattattt

SEQ ID NO: 82725 - DNA, 25 bp, Canis familiaris
ccctgatggctactctgtgtgtgag

SEQ ID NO: 82726 - DNA, 25 bp, Canis familiaris
ccctgctggtgaatctggcgtgtgt

SEQ ID NO: 82727 - DNA, 25 bp, Canis familiaris
ccctgctgaatgcatctgatcgagc

SEQ ID NO: 82728 - DNA, 25 bp, Canis familiaris
cccgctcatgagctgctgtgaggct

SEQ ID NO: 82729 - DNA, 25 bp, Canis familiaris
ccctgctgtatgcctcagtcaggct

SEQ ID NO: 82730 - DNA, 25 bp, Canis familiaris
ccctgtttgctgtcagtcatgcgga

SEQ ID NO: 82731 - DNA, 25 bp, Canis familiaris
ccctgtgtgtgctcagtgccatgaa

SEQ ID NO: 82732 - DNA, 25 bp, Canis familiaris
cccgtctgctcacagttctgaaggt

SEQ ID NO: 82733 - DNA, 25 bp, Canis familiaris
cccgtattcatccagcttgtaaagt

SEQ ID NO: 82734 - DNA, 25 bp, Canis familiaris
ccccccaacaagctgtgacacagct

SEQ ID NO: 82735 - DNA, 25 bp, Canis familiaris
cccggcggctcaaggagaaccagat

SEQ ID NO: 82736 - DNA, 25 bp, Canis familiaris
cccgagaagccaaataaaccgtgtg

SEQ ID NO: 82737 - DNA, 25 bp, Canis familiaris
cccgagaacccgaggagcggcaggt

SEQ ID NO: 82738 - DNA, 25 bp, Canis familiaris
cccgggaccctgagtgcaaggagtg

SEQ ID NO: 82739 - DNA, 25 bp, Canis familiaris
cctagggacctagtttgaaggccat

SEQ ID NO: 82740 - DNA, 25 bp, Canis familiaris
cctaggacctatctttggaggccat

SEQ ID NO: 82741 - DNA, 25 bp, Canis familiaris
ccctggcaccgtctttgtgatgaac

SEQ ID NO: 82742 - DNA, 25 bp, Canis familiaris
ccctgccacacttatgttcttggaa

SEQ ID NO: 82743 - DNA, 25 bp, Canis familiaris
ccctgccacactgatgactcaagat

SEQ ID NO: 82744 - DNA, 25 bp, Canis familiaris
ccctgcctcgtccagaatgaaggtg

SEQ ID NO: 82745 - DNA, 25 bp, Canis familiaris
ccctgcctggcctagcttaaggggc

SEQ ID NO: 82746 - DNA, 25 bp, Canis familiaris
ccctgcatctcctgagcttatagtc

SEQ ID NO: 82747 - DNA, 25 bp, Canis familiaris
ccctgatcatcttgggttgaagccc

SEQ ID NO: 82748 - DNA, 25 bp, Canis familiaris
cccgaagcgatggtggccaatcctc

SEQ ID NO: 82749 - DNA, 25 bp, Canis familiaris
cccgagtggatgaggcctgtccaag

SEQ ID NO: 82750 - DNA, 25 bp, Canis familiaris
cccggggcatgagggcagctgcccc

SEQ ID NO: 82751 - DNA, 25 bp, Canis familiaris
cccggggcagagggcagctgccccc

SEQ ID NO: 82752 - DNA, 25 bp, Canis familiaris
cccggggcagagggcagctgccccc

SEQ ID NO: 82753 - DNA, 25 bp, Canis familiaris
cccggggcagagggcagctgccccc

SEQ ID NO: 82754 - DNA, 25 bp, Canis familiaris
cccggggcagagggcagctgccccc

SEQ ID NO: 82755 - DNA, 25 bp, Canis familiaris
cccggggcagagggcagctgccccc

SEQ ID NO: 82756 - DNA, 25 bp, Canis familiaris
cccggggcagagggcagctgccccc

SEQ ID NO: 82757 - DNA, 25 bp, Canis familiaris
cccggggcagagggcagctgccccc

SEQ ID NO: 82758 - DNA, 25 bp, Canis familiaris
cccggggcagagggcagctgccccc

SEQ ID NO: 82759 - DNA, 25 bp, Canis familiaris
cccggggcagagggcagctgccccc

SEQ ID NO: 82760 - DNA, 25 bp, Canis familiaris
cccggggcagagggcagctgccccc

SEQ ID NO: 82761 - DNA, 25 bp, Canis familiaris
cccggggcagagggcagctgccccc

SEQ ID NO: 82762 - DNA, 25 bp, Canis familiaris
cccggggcagagggcagctgccccc

SEQ ID NO: 82763 - DNA, 25 bp, Canis familiaris
cccggggcagagggcagctgccccc

SEQ ID NO: 82764 - DNA, 25 bp, Canis familiaris
cccggggcagagggcagctgccccc

SEQ ID NO: 82765 - DNA, 25 bp, Canis familiaris
ccctggggtgagggggcctatctca

SEQ ID NO: 82766 - DNA, 25 bp, Canis familiaris
ccctggcggaagtgggctttctcat

SEQ ID NO: 82767 - DNA, 25 bp, Canis familiaris
cccggggcaatggagcaagtttaat

SEQ ID NO: 82768 - DNA, 25 bp, Canis familiaris
cccggattgagtggagcacatgttc

SEQ ID NO: 82769 - DNA, 25 bp, Canis familiaris
cccggatgaggtggagcacatgttc

SEQ ID NO: 82770 - DNA, 25 bp, Canis familiaris
cccgtgtactcttagcacatttcaa

SEQ ID NO: 82771 - DNA, 25 bp, Canis familiaris
ccccctttctaaactgatatcaaca

SEQ ID NO: 82772 - DNA, 25 bp, Canis familiaris
ccccccatcactgtatggtaccaaa

SEQ ID NO: 82773 - DNA, 25 bp, Canis familiaris
ccccaccagcagagtcggtagggcc

SEQ ID NO: 82774 - DNA, 25 bp, Canis familiaris
cccgaccagcagaggcggtagggcc

SEQ ID NO: 82775 - DNA, 25 bp, Canis familiaris
cccgaacgagggccagaatggaggc

SEQ ID NO: 82776 - DNA, 25 bp, Canis familiaris
ccctgacaggagcgggagctgcgga

SEQ ID NO: 82777 - DNA, 25 bp, Canis familiaris
cccgcaaggtcattacggctgctgt

SEQ ID NO: 82778 - DNA, 25 bp, Canis familiaris
ccgtgcaaggtctacacctgggaag

SEQ ID NO: 82779 - DNA, 25 bp, Canis familiaris
ccctgcagacctgctaccggaagac

SEQ ID NO: 82780 - DNA, 25 bp, Canis familiaris
cccggacaccagaaaccgacagcac

SEQ ID NO: 82781 - DNA, 25 bp, Canis familiaris
ccctggaaccaaacacttaacgctg

SEQ ID NO: 82782 - DNA, 25 bp, Canis familiaris
ccctgctggcaagaacggtgaccgc

SEQ ID NO: 82783 - DNA, 25 bp, Canis familiaris
ccctgctgccacaaaacgggctact

SEQ ID NO: 82784 - DNA, 25 bp, Canis familiaris
ccctgctgctcagtggcaagtgcga

SEQ ID NO: 82785 - DNA, 25 bp, Canis familiaris
ccctggcacactggcaagctgaaga

SEQ ID NO: 82786 - DNA, 25 bp, Canis familiaris
ccctggcaaatggctagcctcatga

SEQ ID NO: 82787 - DNA, 25 bp, Canis familiaris
ccgtgacagccagcatcgaacatga

SEQ ID NO: 82788 - DNA, 25 bp, Canis familiaris
ccgagattcccctgcatcagaaata

SEQ ID NO: 82789 - DNA, 25 bp, Canis familiaris
cctgagttcccagccaaggcaattt

SEQ ID NO: 82790 - DNA, 25 bp, Canis familiaris
ccggctaccacatcctaggtatagt

SEQ ID NO: 82791 - DNA, 25 bp, Canis familiaris
ccccctgcccaagctgggtaagtga

SEQ ID NO: 82792 - DNA, 25 bp, Canis familiaris
cccgctctcccaagttgtggtaagg

SEQ ID NO: 82793 - DNA, 25 bp, Canis familiaris
cctcgccccaaagcctggatatggg

SEQ ID NO: 82794 - DNA, 25 bp, Canis familiaris
ccgcagacccagaactctcggatta

SEQ ID NO: 82795 - DNA, 25 bp, Canis familiaris
ccctgacccacatctgaaggatctc

SEQ ID NO: 82796 - DNA, 25 bp, Canis familiaris
ccctggcacctctttatgaagacat

SEQ ID NO: 82797 - DNA, 25 bp, Canis familiaris
ccctggcacccagcacaatgaagat

SEQ ID NO: 82798 - DNA, 25 bp, Canis familiaris
ccctggcacccagcacaatgaagat

SEQ ID NO: 82799 - DNA, 25 bp, Canis familiaris
ccctggccccagcaaggatgaagat

SEQ ID NO: 82800 - DNA, 25 bp, Canis familiaris
ccctgttcccgaatgcgtgtgaata

SEQ ID NO: 82801 - DNA, 25 bp, Canis familiaris
cccgttttggcatcgctgctaatac

SEQ ID NO: 82802 - DNA, 25 bp, Canis familiaris
cccgtttatgtctcagggtatactc

SEQ ID NO: 82803 - DNA, 25 bp, Canis familiaris
cccgcctttctctgggtatgaacca

SEQ ID NO: 82804 - DNA, 25 bp, Canis familiaris
cccccctggttctgcactagaacca

SEQ ID NO: 82805 - DNA, 25 bp, Canis familiaris
cccccacgagttataatacataagc

SEQ ID NO: 82806 - DNA, 25 bp, Canis familiaris
cccctccgaactgtatacacttggc

SEQ ID NO: 82807 - DNA, 25 bp, Canis familiaris
cccctccttccagataacttataca

SEQ ID NO: 82808 - DNA, 25 bp, Canis familiaris
ccccacgttctcgggaagcttcaag

SEQ ID NO: 82809 - DNA, 25 bp, Canis familiaris
ccccaagtgtctcgggggcctgaag

SEQ ID NO: 82810 - DNA, 25 bp, Canis familiaris
cccgaggtctcgcagtgaagccggg

SEQ ID NO: 82811 - DNA, 25 bp, Canis familiaris
ccccgggccgagagaagtctgccgg

SEQ ID NO: 82812 - DNA, 25 bp, Canis familiaris
ccccgacgacgcttaggagtacgcg

SEQ ID NO: 82813 - DNA, 25 bp, Canis familiaris
cccgccgcgcgacaagaagtacgcg

SEQ ID NO: 82814 - DNA, 25 bp, Canis familiaris
cccgcacaccgactgcaaaaatgtc

SEQ ID NO: 82815 - DNA, 25 bp, Canis familiaris
ccgctgcaaaggtctcaactacgcc

SEQ ID NO: 82816 - DNA, 25 bp, Canis familiaris
ccctgcagtatggccctacacaggc

SEQ ID NO: 82817 - DNA, 25 bp, Canis familiaris
ccctgtgtgggcgttcagcacatgg

SEQ ID NO: 82818 - DNA, 25 bp, Canis familiaris
ccctgaaggtgcttgacatgcacag

SEQ ID NO: 82819 - DNA, 25 bp, Canis familiaris
ccctgaagtggcttgacaatcacag

SEQ ID NO: 82820 - DNA, 25 bp, Canis familiaris
ccccaacatggctcatctacaaaag

SEQ ID NO: 82821 - DNA, 25 bp, Canis familiaris
ccgcccattggacgtctccaaataa

SEQ ID NO: 82822 - DNA, 25 bp, Canis familiaris
cccctcaggggcacttttatgaatt

SEQ ID NO: 82823 - DNA, 25 bp, Canis familiaris
cccccagcgcggaaatttgtgtttg

SEQ ID NO: 82824 - DNA, 25 bp, Canis familiaris
cccccatccctgggattctttgtgg

SEQ ID NO: 82825 - DNA, 25 bp, Canis familiaris
cccccattccatggggttcgtctct

SEQ ID NO: 82826 - DNA, 25 bp, Canis familiaris
cccccgtagtgggtgatacatggct

SEQ ID NO: 82827 - DNA, 25 bp, Canis familiaris
cccggagttgtgtcgtgtaatggca

SEQ ID NO: 82828 - DNA, 25 bp, Canis familiaris
ccctggaggaggccgtgtagcagaa

SEQ ID NO: 82829 - DNA, 25 bp, Canis familiaris
cccgggagcggcccatgtagaggaa

SEQ ID NO: 82830 - DNA, 25 bp, Canis familiaris
cccggcggtgccacagtggagggga

SEQ ID NO: 82831 - DNA, 25 bp, Canis familiaris
cccgcgggtccaatggcggcgggag

SEQ ID NO: 82832 - DNA, 25 bp, Canis familiaris
cccccagtaaagtgcggcttgtcag

SEQ ID NO: 82833 - DNA, 25 bp, Canis familiaris
gaacttagtaaatccaaggcctcag

SEQ ID NO: 82834 - DNA, 25 bp, Canis familiaris
gaaattaccagagagtcaagtagct

SEQ ID NO: 82835 - DNA, 25 bp, Canis familiaris
gaataaaccaagcatcgcgaaggcc

SEQ ID NO: 82836 - DNA, 25 bp, Canis familiaris
gaaccacacgaacattccaagagct

SEQ ID NO: 82837 - DNA, 25 bp, Canis familiaris
gcacatcccggtattttaaggtcta

SEQ ID NO: 82838 - DNA, 25 bp, Canis familiaris
ccccctcgctctgtattaaggacta

SEQ ID NO: 82839 - DNA, 25 bp, Canis familiaris
ccaggccaagttgtgttaagaccgg

SEQ ID NO: 82840 - DNA, 25 bp, Canis familiaris
gcgcggaaatttgtgtttggacact

SEQ ID NO: 82841 - DNA, 25 bp, Canis familiaris
cccgtcaatttcctgctgattggaa

SEQ ID NO: 82842 - DNA, 25 bp, Canis familiaris
cccgttctttgaggctgttggcaaa

SEQ ID NO: 82843 - DNA, 25 bp, Canis familiaris
cccggtgtggggacttgatcccaag

SEQ ID NO: 82844 - DNA, 25 bp, Canis familiaris
cccggcagagggcatcagtgatcac

SEQ ID NO: 82845 - DNA, 25 bp, Canis familiaris
cccggcgagtcacctgatggatcgc

SEQ ID NO: 82846 - DNA, 25 bp, Canis familiaris
ccctgtcagcagtacctgggatggg

SEQ ID NO: 82847 - DNA, 25 bp, Canis familiaris
cccgtccaatcctggacagtggtgt

SEQ ID NO: 82848 - DNA, 25 bp, Canis familiaris
cccgtccgtcaaccaacgatggtag

SEQ ID NO: 82849 - DNA, 25 bp, Canis familiaris
cccgtccatgaagtcgcatacgtgg

SEQ ID NO: 82850 - DNA, 25 bp, Canis familiaris
ccctggctcataagctcagctgtga

SEQ ID NO: 82851 - DNA, 25 bp, Canis familiaris
ccctggcctctactatgtggacagt

SEQ ID NO: 82852 - DNA, 25 bp, Canis familiaris
ccctggcctcggaagtgtggagcag

SEQ ID NO: 82853 - DNA, 25 bp, Canis familiaris
cccgtgtctaggcctgtgtatggag

SEQ ID NO: 82854 - DNA, 25 bp, Canis familiaris
cccggtctgaggaggtcagccaggc

SEQ ID NO: 82855 - DNA, 25 bp, Canis familiaris
cccgtttgacgctggatcaccaggc

SEQ ID NO: 82856 - DNA, 25 bp, Canis familiaris
ccccttgtagcgtaaatcttagcca

SEQ ID NO: 82857 - DNA, 25 bp, Canis familiaris
ccccattgaacatggcattgttacc

SEQ ID NO: 82858 - DNA, 25 bp, Canis familiaris
cccgcattaacctgtgtgttacgac

SEQ ID NO: 82859 - DNA, 25 bp, Canis familiaris
ccctgtttacgcttgtgtgtcatgt

SEQ ID NO: 82860 - DNA, 25 bp, Canis familiaris
ccctggtagacctgttggctgtgaa

SEQ ID NO: 82861 - DNA, 25 bp, Canis familiaris
ccctgttcagcaccgtgtcgagggc

SEQ ID NO: 82862 - DNA, 25 bp, Canis familiaris
ccctgttgcgcacgcaggcaagggc

SEQ ID NO: 82863 - DNA, 25 bp, Canis familiaris
ccctgtctgcagccggaagtgggcc

SEQ ID NO: 82864 - DNA, 25 bp, Canis familiaris
cccgatgatgaagaaactggacctc

SEQ ID NO: 82865 - DNA, 25 bp, Canis familiaris
ccctgaggacatgaaactctgcacc

SEQ ID NO: 82866 - DNA, 25 bp, Canis familiaris
ccctgatgaacccatcattctctca

SEQ ID NO: 82867 - DNA, 25 bp, Canis familiaris
cccgatgctacggtttcattcaagt

SEQ ID NO: 82868 - DNA, 25 bp, Canis familiaris
ccctgagttgggttctatgctggag

SEQ ID NO: 82869 - DNA, 25 bp, Canis familiaris
cccggtatcgagtctcacattgggc

SEQ ID NO: 82870 - DNA, 25 bp, Canis familiaris
cccgagttcgatggctcgcagcggg

SEQ ID NO: 82871 - DNA, 25 bp, Canis familiaris
cccgacccagacatccacgggatga

SEQ ID NO: 82872 - DNA, 25 bp, Canis familiaris
cccgagcacacacagggccgggaga

SEQ ID NO: 82873 - DNA, 25 bp, Canis familiaris
ccctggtacactggtgacctgggga

SEQ ID NO: 82874 - DNA, 25 bp, Canis familiaris
ccctggtctcccagtgccagggaga

SEQ ID NO: 82875 - DNA, 25 bp, Canis familiaris
ccctgttccccatgtctgggagaat

SEQ ID NO: 82876 - DNA, 25 bp, Canis familiaris
ccccgtccccaagcatgtgggagaa

SEQ ID NO: 82877 - DNA, 25 bp, Canis familiaris
cccctaccaccgcgtgtagtagagt

SEQ ID NO: 82878 - DNA, 25 bp, Canis familiaris
cccctagacaccccttctagaatag

SEQ ID NO: 82879 - DNA, 25 bp, Canis familiaris
cccctagtagctggtcttctaacca

SEQ ID NO: 82880 - DNA, 25 bp, Canis familiaris
cccctggctcacagactctaaaaca

SEQ ID NO: 82881 - DNA, 25 bp, Canis familiaris
ccccaatgtcaatagcccaaaaact

SEQ ID NO: 82882 - DNA, 25 bp, Canis familiaris
cccctagtccaagccaagtattact

SEQ ID NO: 82883 - DNA, 25 bp, Canis familiaris
ccccgaggtacagcactggtttctc

SEQ ID NO: 82884 - DNA, 25 bp, Canis familiaris
ccatcccgggagtgacttatttctt

SEQ ID NO: 82885 - DNA, 25 bp, Canis familiaris
ccccctgcagggtagacattccctt

SEQ ID NO: 82886 - DNA, 25 bp, Canis familiaris
ccccctggagagcagtagctcccat

SEQ ID NO: 82887 - DNA, 25 bp, Canis familiaris
ccccgggacagatgtccttcacttt

SEQ ID NO: 82888 - DNA, 25 bp, Canis familiaris
ccccgccgagaatgagctttatttt

SEQ ID NO: 82889 - DNA, 25 bp, Canis familiaris
cccccaaacagtgacttgctttttg

SEQ ID NO: 82890 - DNA, 25 bp, Canis familiaris
cccccaaactcatggtttttagatg

SEQ ID NO: 82891 - DNA, 25 bp, Canis familiaris
ccccttgacccatatgttttaacag

SEQ ID NO: 82892 - DNA, 25 bp, Canis familiaris
cccctgtgaccctaattcttaacat

SEQ ID NO: 82893 - DNA, 25 bp, Canis familiaris
cccctctagcttcagtttctaacat

SEQ ID NO: 82894 - DNA, 25 bp, Canis familiaris
cccccgtatatgggtatattaattg

SEQ ID NO: 82895 - DNA, 25 bp, Canis familiaris
ccccctgtcgacgttaatctgaagg

SEQ ID NO: 82896 - DNA, 25 bp, Canis familiaris
ccccagcccaaggttgaacgcaaag

SEQ ID NO: 82897 - DNA, 25 bp, Canis familiaris
cccgacccacaggtgatctcggaaa

SEQ ID NO: 82898 - DNA, 25 bp, Canis familiaris
cccgtccaggcaggtgcactggtac

SEQ ID NO: 82899 - DNA, 25 bp, Canis familiaris
ccgcgccacgtcgggacgtgatgat

SEQ ID NO: 82900 - DNA, 25 bp, Canis familiaris
cccgcaccagctcacggtggagaag

SEQ ID NO: 82901 - DNA, 25 bp, Canis familiaris
cccgcacgagcacacaagcggcgac

SEQ ID NO: 82902 - DNA, 25 bp, Canis familiaris
cccgttacaggctaggctgtgatac

SEQ ID NO: 82903 - DNA, 25 bp, Canis familiaris
cccgttagcacatagccttaatggt

SEQ ID NO: 82904 - DNA, 25 bp, Canis familiaris
cccgtatacctggatgctcttcaaa

SEQ ID NO: 82905 - DNA, 25 bp, Canis familiaris
cccctcaacctgacattgctacagt

SEQ ID NO: 82906 - DNA, 25 bp, Canis familiaris
cccccatattccaagctgctaaatg

SEQ ID NO: 82907 - DNA, 25 bp, Canis familiaris
ccccgagatctccagtggctaattc

SEQ ID NO: 82908 - DNA, 25 bp, Canis familiaris
cccgtgagcacccatgggaagtcat

SEQ ID NO: 82909 - DNA, 25 bp, Canis familiaris
ccctgtgggccaatccgaagtatgt

SEQ ID NO: 82910 - DNA, 25 bp, Canis familiaris
ccctggtgcccaacacgatgaatat

SEQ ID NO: 82911 - DNA, 25 bp, Canis familiaris
ccctgtgtgcccttactatatagtg

SEQ ID NO: 82912 - DNA, 25 bp, Canis familiaris
cccgctgtcctggagaccaacaggt

SEQ ID NO: 82913 - DNA, 25 bp, Canis familiaris
cccgcgaagcgtagacgatccagtg

SEQ ID NO: 82914 - DNA, 25 bp, Canis familiaris
cccccacgcagttgaaacctgtata

SEQ ID NO: 82915 - DNA, 25 bp, Canis familiaris
cccccacgagtgtctaagtcgtgta

SEQ ID NO: 82916 - DNA, 25 bp, Canis familiaris
ccccgtggagtgtctggcgtgggtt

SEQ ID NO: 82917 - DNA, 25 bp, Canis familiaris
cccccgctactgtgggttggaatgg

SEQ ID NO: 82918 - DNA, 25 bp, Canis familiaris
cccccgtgccagaggcgttggagaa

SEQ ID NO: 82919 - DNA, 25 bp, Canis familiaris
cccggctacctgatgggtgtgcgag

SEQ ID NO: 82920 - DNA, 25 bp, Canis familiaris
cccggtcctatgaggcagtggcggc

SEQ ID NO: 82921 - DNA, 25 bp, Canis familiaris
cccggttctcagttggcattggtgg

SEQ ID NO: 82922 - DNA, 25 bp, Canis familiaris
cccggtttgcagtgagaagtgaagc

SEQ ID NO: 82923 - DNA, 25 bp, Canis familiaris
cccgtgtctgtgctctagaagtagg

SEQ ID NO: 82924 - DNA, 25 bp, Canis familiaris
ccctgtgctggtccaggagagggag

SEQ ID NO: 82925 - DNA, 25 bp, Canis familiaris
ccctgtgtggtccggactgagcagg

SEQ ID NO: 82926 - DNA, 25 bp, Canis familiaris
gcctcggggacctgactgaggttgt

SEQ ID NO: 82927 - DNA, 25 bp, Canis familiaris
ccttgggtgtccttagatgggtagc

SEQ ID NO: 82928 - DNA, 25 bp, Canis familiaris
ccctggtgctgtgttagatagttcc

SEQ ID NO: 82929 - DNA, 25 bp, Canis familiaris
ccctggatgtgtgccctgaaagtgc

SEQ ID NO: 82930 - DNA, 25 bp, Canis familiaris
cccgttggagcccgctgatgagggc

SEQ ID NO: 82931 - DNA, 25 bp, Canis familiaris
cccgtgtggccccaaggagggcatt

SEQ ID NO: 82932 - DNA, 25 bp, Canis familiaris
cccgtgggctccgacatgtggagaa

SEQ ID NO: 82933 - DNA, 25 bp, Canis familiaris
cccgcggccttctcattgtaaggcc

SEQ ID NO: 82934 - DNA, 25 bp, Canis familiaris
cccgcaggcgcatggtttatgaagg

SEQ ID NO: 82935 - DNA, 25 bp, Canis familiaris
cccggaggagggaattgaaattgtg

SEQ ID NO: 82936 - DNA, 25 bp, Canis familiaris
cccggcaggggttatgtacacgttg

SEQ ID NO: 82937 - DNA, 25 bp, Canis familiaris
cccggcagggttctcatacggtgtg

SEQ ID NO: 82938 - DNA, 25 bp, Canis familiaris
cccggagagtctgttcatccgaggg

SEQ ID NO: 82939 - DNA, 25 bp, Canis familiaris
cccgccgtgactgacttcacgatgg

SEQ ID NO: 82940 - DNA, 25 bp, Canis familiaris
ccctggcgtgcctagactgctaggg

SEQ ID NO: 82941 - DNA, 25 bp, Canis familiaris
ccctgtggtcgctgagtcgagaggt

SEQ ID NO: 82942 - DNA, 25 bp, Canis familiaris
cccgtggattgctgtctcgggtgac

SEQ ID NO: 82943 - DNA, 25 bp, Canis familiaris
cccgcaggaatttctccgggtgcct

SEQ ID NO: 82944 - DNA, 25 bp, Canis familiaris
ccctgggattctacttctgctgggc

SEQ ID NO: 82945 - DNA, 25 bp, Canis familiaris
cccgatggtctcattccgtggacga

SEQ ID NO: 82946 - DNA, 25 bp, Canis familiaris
cccggtgactgacttccgagaggcg

SEQ ID NO: 82947 - DNA, 25 bp, Canis familiaris
cccgggagcagacatctcagatggg

SEQ ID NO: 82948 - DNA, 25 bp, Canis familiaris
cccggacacacacctacatataggt

SEQ ID NO: 82949 - DNA, 25 bp, Canis familiaris
cccgagacgacagcatcctgaagtg

SEQ ID NO: 82950 - DNA, 25 bp, Canis familiaris
cccgaatctgccgtgacttggatgt

SEQ ID NO: 82951 - DNA, 25 bp, Canis familiaris
cccgacctggctggagctcaggatc

SEQ ID NO: 82952 - DNA, 25 bp, Canis familiaris
cccgaccgtcatggagcggggcggg

SEQ ID NO: 82953 - DNA, 25 bp, Canis familiaris
cccgcacggattgcgcagcaggttg

SEQ ID NO: 82954 - DNA, 25 bp, Canis familiaris
cccgcagagcgggatgcggcagggc

SEQ ID NO: 82955 - DNA, 25 bp, Canis familiaris
ccccgcatctggggcgtgggtggtt

SEQ ID NO: 82956 - DNA, 25 bp, Canis familiaris
cccggctcaaccagtggtggacttt

SEQ ID NO: 82957 - DNA, 25 bp, Canis familiaris
ccccgcttcaacaagtggtggactt

SEQ ID NO: 82958 - DNA, 25 bp, Canis familiaris
ccccagaggaacctgcgaaggactt

SEQ ID NO: 82959 - DNA, 25 bp, Canis familiaris
ccccaaggaaggtgttgcgcaactt

SEQ ID NO: 82960 - DNA, 25 bp, Canis familiaris
ccccaaaaaagacatccgcacacac

SEQ ID NO: 82961 - DNA, 25 bp, Canis familiaris
cccccacagagataggtcctacagc

SEQ ID NO: 82962 - DNA, 25 bp, Canis familiaris
cccccctgggaagttcttatatgtg

SEQ ID NO: 82963 - DNA, 25 bp, Canis familiaris
cccccctgggttaatggtagcagtg

SEQ ID NO: 82964 - DNA, 25 bp, Canis familiaris
cccggcctggcagttgggtatacag

SEQ ID NO: 82965 - DNA, 25 bp, Canis familiaris
ccccgtccgattcgggtgaatcagg

SEQ ID NO: 82966 - DNA, 25 bp, Canis familiaris
ccacgggtttgtcggcggaatcagg

SEQ ID NO: 82967 - DNA, 25 bp, Canis familiaris
cccgggctctagtgcctgaaatagg

SEQ ID NO: 82968 - DNA, 25 bp, Canis familiaris
ccctgggctcggtggtggaccgagg

SEQ ID NO: 82969 - DNA, 25 bp, Canis familiaris
ccctgggctcgggcgatatggacgg

SEQ ID NO: 82970 - DNA, 25 bp, Canis familiaris
cccgggtgctgacttgtgtggaagg

SEQ ID NO: 82971 - DNA, 25 bp, Canis familiaris
cccggcgtgctgtgcagagggtaga

SEQ ID NO: 82972 - DNA, 25 bp, Canis familiaris
cccgccagatcttccaggggaaggc

SEQ ID NO: 82973 - DNA, 25 bp, Canis familiaris
cccgccagtctttcaacttgaggga

SEQ ID NO: 82974 - DNA, 25 bp, Canis familiaris
cccccatgttttaaatgtttggatg

SEQ ID NO: 82975 - DNA, 25 bp, Canis familiaris
cccctgttttctttatctattctag

SEQ ID NO: 82976 - DNA, 25 bp, Canis familiaris
ccccttactttgctacatttctata

SEQ ID NO: 82977 - DNA, 25 bp, Canis familiaris
cccgcctaccttatacacaatatta

SEQ ID NO: 82978 - DNA, 25 bp, Canis familiaris
cccgtctatactttttactgtctct

SEQ ID NO: 82979 - DNA, 25 bp, Canis familiaris
ccctggcacaactggttatcttctt

SEQ ID NO: 82980 - DNA, 25 bp, Canis familiaris
ccctggccttcatgtttttgtaaga

SEQ ID NO: 82981 - DNA, 25 bp, Canis familiaris
cccgactctccaacatttttgttat

SEQ ID NO: 82982 - DNA, 25 bp, Canis familiaris
cccgactctccaacatttttgttat

SEQ ID NO: 82983 - DNA, 25 bp, Canis familiaris
cccgatcctaccatcttgtataatt

SEQ ID NO: 82984 - DNA, 25 bp, Canis familiaris
ccctggccaaccattgagatgattc

SEQ ID NO: 82985 - DNA, 25 bp, Canis familiaris
cccgggatctcgatgtgatttctgc

SEQ ID NO: 82986 - DNA, 25 bp, Canis familiaris
cccggcgactttatattcatctcaa

SEQ ID NO: 82987 - DNA, 25 bp, Canis familiaris
cccggacctgtttctataactcaag

SEQ ID NO: 82988 - DNA, 25 bp, Canis familiaris
cccgccaagatggtacttacaccaa

SEQ ID NO: 82989 - DNA, 25 bp, Canis familiaris
cccccaggaggtaactcacacagac

SEQ ID NO: 82990 - DNA, 25 bp, Canis familiaris
cccccagagggaagagctcccaaat

SEQ ID NO: 82991 - DNA, 25 bp, Canis familiaris
cccctaaaatacatccccagagatt

SEQ ID NO: 82992 - DNA, 25 bp, Canis familiaris
ccccaagggcaaggaaccacgagat

SEQ ID NO: 82993 - DNA, 25 bp, Canis familiaris
ccccgagggctctggaaccatagag

SEQ ID NO: 82994 - DNA, 25 bp, Canis familiaris
ccccgcaacctcctgagaggtcaaa

SEQ ID NO: 82995 - DNA, 25 bp, Canis familiaris
cccccaaccacaaagactgtcagaa

SEQ ID NO: 82996 - DNA, 25 bp, Canis familiaris
ccccccaacaaaaccatatcagtag

SEQ ID NO: 82997 - DNA, 25 bp, Canis familiaris
ccaccctttcaagacctacttggag

SEQ ID NO: 82998 - DNA, 25 bp, Canis familiaris
cccccttgagagtgaccttcttggg

SEQ ID NO: 82999 - DNA, 25 bp, Canis familiaris
ccccctgtggagtctgaccaggtca

SEQ ID NO: 83000 - DNA, 25 bp, Canis familiaris
cccctttcagaggtggcaccttcag

SEQ ID NO: 83001 - DNA, 25 bp, Canis familiaris
ccccgttagactgtgagcttcttga

SEQ ID NO: 83002 - DNA, 25 bp, Canis familiaris
ccccgatttagtcgtatctctttga

SEQ ID NO: 83003 - DNA, 25 bp, Canis familiaris
ccccagtggtagtctgatagctcct

SEQ ID NO: 83004 - DNA, 25 bp, Canis familiaris
ccctggagtggagcatgaagcccgt

SEQ ID NO: 83005 - DNA, 25 bp, Canis familiaris
ccctggaggtggcaggactctctgg

SEQ ID NO: 83006 - DNA, 25 bp, Canis familiaris
cccgaggcagcgtcggaacacgtgg

SEQ ID NO: 83007 - DNA, 25 bp, Canis familiaris
cccccagcagcctggacggctgggt

SEQ ID NO: 83008 - DNA, 25 bp, Canis familiaris
cccccagcagcctggacggctgggt

SEQ ID NO: 83009 - DNA, 25 bp, Canis familiaris
cccggcgtgaggggccgagatgcgg

SEQ ID NO: 83010 - DNA, 25 bp, Canis familiaris
cccgcagggaggggaagagctggcc

SEQ ID NO: 83011 - DNA, 25 bp, Canis familiaris
cccgggctgcaggaggagaacttgc

SEQ ID NO: 83012 - DNA, 25 bp, Canis familiaris
cccgggcccgagaagaagctgccgg

SEQ ID NO: 83013 - DNA, 25 bp, Canis familiaris
cccggagaccacagaagacccgagt

SEQ ID NO: 83014 - DNA, 25 bp, Canis familiaris
cccggggctgatcctggagacccgg

SEQ ID NO: 83015 - DNA, 25 bp, Canis familiaris
cccggcgagaacctgtgagcccggg

SEQ ID NO: 83016 - DNA, 25 bp, Canis familiaris
cccggggagacccgcattcaggagt

SEQ ID NO: 83017 - DNA, 25 bp, Canis familiaris
ccccgacggaggggtcatgcagccg

SEQ ID NO: 83018 - DNA, 25 bp, Canis familiaris
cccgggctgggacagctcagcccga

SEQ ID NO: 83019 - DNA, 25 bp, Canis familiaris
cccgcgggcgtgagactcagccgct

SEQ ID NO: 83020 - DNA, 25 bp, Canis familiaris
cccgggcagtggtgacagggctgct

SEQ ID NO: 83021 - DNA, 25 bp, Canis familiaris
cccggcaagtggtgacagggcttgt

SEQ ID NO: 83022 - DNA, 25 bp, Canis familiaris
cccgttaatgggcaaagactatgga

SEQ ID NO: 83023 - DNA, 25 bp, Canis familiaris
cccctttcagggcaagaggctcaag

SEQ ID NO: 83024 - DNA, 25 bp, Canis familiaris
cccgttttgctccgaagtattcagt

SEQ ID NO: 83025 - DNA, 25 bp, Canis familiaris
cccgatttctcttttatgatttcct

SEQ ID NO: 83026 - DNA, 25 bp, Canis familiaris
cccgtttgcctcttaaatgtctggt

SEQ ID NO: 83027 - DNA, 25 bp, Canis familiaris
cccgtcattgcttcactgagttttg

SEQ ID NO: 83028 - DNA, 25 bp, Canis familiaris
cccgtgattcttgctggttatttac

SEQ ID NO: 83029 - DNA, 25 bp, Canis familiaris
cccgcgttctcttcggtgattagta

SEQ ID NO: 83030 - DNA, 25 bp, Canis familiaris
cccctgtgtctcataggtctgtaat

SEQ ID NO: 83031 - DNA, 25 bp, Canis familiaris
cccctggtccaattcactgggagat

SEQ ID NO: 83032 - DNA, 25 bp, Canis familiaris
cccgtggtccagtctgacgaggagg

SEQ ID NO: 83033 - DNA, 25 bp, Canis familiaris
cccgtcggagcatatgaggagctgg

SEQ ID NO: 83034 - DNA, 25 bp, Canis familiaris
cccgacgaggaggtggcgtctggcc

SEQ ID NO: 83035 - DNA, 25 bp, Canis familiaris
cccgaagagagactggtcctctgtc

SEQ ID NO: 83036 - DNA, 25 bp, Canis familiaris
cccgaagaaagggatccactttgtg

SEQ ID NO: 83037 - DNA, 25 bp, Canis familiaris
cccccaaaaggcgaagcacgacttg

SEQ ID NO: 83038 - DNA, 25 bp, Canis familiaris
cccgtccaactccaaacacgagttg

SEQ ID NO: 83039 - DNA, 25 bp, Canis familiaris
cccgtacaaccaggccaaggaactg

SEQ ID NO: 83040 - DNA, 25 bp, Canis familiaris
ccccaaagaccaaccaaagagccag

SEQ ID NO: 83041 - DNA, 25 bp, Canis familiaris
cccccagagaccagaaagaagccag

SEQ ID NO: 83042 - DNA, 25 bp, Canis familiaris
ccccgagttcttgcagacaagcccg

SEQ ID NO: 83043 - DNA, 25 bp, Canis familiaris
ccggtggtgtttgaggatcctgggc

SEQ ID NO: 83044 - DNA, 25 bp, Canis familiaris
ccgttcgggaatgtggaccaggtgc

SEQ ID NO: 83045 - DNA, 25 bp, Canis familiaris
ccccctgggaatggcggaccagatg

SEQ ID NO: 83046 - DNA, 25 bp, Canis familiaris
ccgccgcggggaagcaggaactggc

SEQ ID NO: 83047 - DNA, 25 bp, Canis familiaris
cccgatcggcggacgcctaattggt

SEQ ID NO: 83048 - DNA, 25 bp, Canis familiaris
cccgcacgaccgacgttgaatattt

SEQ ID NO: 83049 - DNA, 25 bp, Canis familiaris
ccaacaccacccagtatacgtttat

SEQ ID NO: 83050 - DNA, 25 bp, Canis familiaris
gccccccaaggcagtaaaggaccag

SEQ ID NO: 83051 - DNA, 25 bp, Canis familiaris
ccccgacataggaggccaaggcact

SEQ ID NO: 83052 - DNA, 25 bp, Canis familiaris
ccccaagatcggtgctgctatacaa

SEQ ID NO: 83053 - DNA, 25 bp, Canis familiaris
cccccatggctgctggtgtaaataa

SEQ ID NO: 83054 - DNA, 25 bp, Canis familiaris
cccctcgacgatcccattaaaatat

SEQ ID NO: 83055 - DNA, 25 bp, Canis familiaris
cccctgtcaacacccattattaagt

SEQ ID NO: 83056 - DNA, 25 bp, Canis familiaris
ccccccattcgggacatatggatac

SEQ ID NO: 83057 - DNA, 25 bp, Canis familiaris
cccgaccttgttgcctatgagaaca

SEQ ID NO: 83058 - DNA, 25 bp, Canis familiaris
cccgacatcacgtggatgaaggaac

SEQ ID NO: 83059 - DNA, 25 bp, Canis familiaris
cccgacatccgcacgaaggagcaga

SEQ ID NO: 83060 - DNA, 25 bp, Canis familiaris
cccggccctggggaaggcagagccg

SEQ ID NO: 83061 - DNA, 25 bp, Canis familiaris
ccccgccctgggggcgaagagctgc

SEQ ID NO: 83062 - DNA, 25 bp, Canis familiaris
cccgaccctgccagtgaaaggctac

SEQ ID NO: 83063 - DNA, 25 bp, Canis familiaris
cccgacaccattgggtctgaaccca

SEQ ID NO: 83064 - DNA, 25 bp, Canis familiaris
cccccagccagtggtttaatccaca

SEQ ID NO: 83065 - DNA, 25 bp, Canis familiaris
cccccgtcaatgcttttgttgcaaa

SEQ ID NO: 83066 - DNA, 25 bp, Canis familiaris
ccccgagccaactgttttcttacag

SEQ ID NO: 83067 - DNA, 25 bp, Canis familiaris
ccccgatgccaagaattcgcatctt

SEQ ID NO: 83068 - DNA, 25 bp, Canis familiaris
ccccggcagaaggaatatttttcat

SEQ ID NO: 83069 - DNA, 25 bp, Canis familiaris
cccgggagccagcaaattcttctac

SEQ ID NO: 83070 - DNA, 25 bp, Canis familiaris
cccgagtggcgactatgctattttc

SEQ ID NO: 83071 - DNA, 25 bp, Canis familiaris
cccggctgatggaatttggtcttgc

SEQ ID NO: 83072 - DNA, 25 bp, Canis familiaris
cccgagttggcacttctggataatg

SEQ ID NO: 83073 - DNA, 25 bp, Canis familiaris
cccggttccgtgtcatgtataatca

SEQ ID NO: 83074 - DNA, 25 bp, Canis familiaris
cccgggtcctgtgcatggatgagta

SEQ ID NO: 83075 - DNA, 25 bp, Canis familiaris
cccggcgatgtcaccagtatggtag

SEQ ID NO: 83076 - DNA, 25 bp, Canis familiaris
cccggccttgcatctcagaaggaag

SEQ ID NO: 83077 - DNA, 25 bp, Canis familiaris
cccgcccttgataatgcctctgggc

SEQ ID NO: 83078 - DNA, 25 bp, Canis familiaris
cccggcgctctaacatgtcaggggc

SEQ ID NO: 83079 - DNA, 25 bp, Canis familiaris
cccgggctgtgcaacatgtaccagg

SEQ ID NO: 83080 - DNA, 25 bp, Canis familiaris
cccgcaggccacacatgtgggcagg

SEQ ID NO: 83081 - DNA, 25 bp, Canis familiaris
cccgaggcagacgtctgtcaggggc

SEQ ID NO: 83082 - DNA, 25 bp, Canis familiaris
cccgagcgcaggggctgggaggagc

SEQ ID NO: 83083 - DNA, 25 bp, Canis familiaris
cccgggcagaggccagtggggatag

SEQ ID NO: 83084 - DNA, 25 bp, Canis familiaris
cccggacggcagcagtgtggagctt

SEQ ID NO: 83085 - DNA, 25 bp, Canis familiaris
cccggatccatcaaaggccatgagc

SEQ ID NO: 83086 - DNA, 25 bp, Canis familiaris
cccgcaaccatgaacgcggcgtgtg

SEQ ID NO: 83087 - DNA, 25 bp, Canis familiaris
cccgcgccgctgaacagcggttggg

SEQ ID NO: 83088 - DNA, 25 bp, Canis familiaris
cccgcctcagttccagagactcggg

SEQ ID NO: 83089 - DNA, 25 bp, Canis familiaris
cccggctagtataccttcagcaggg

SEQ ID NO: 83090 - DNA, 25 bp, Canis familiaris
cccgagccaggaagtttggttgtgg

SEQ ID NO: 83091 - DNA, 25 bp, Canis familiaris
cccgtccagctgaagtttcttttgt

SEQ ID NO: 83092 - DNA, 25 bp, Canis familiaris
cccgtgctccatagttgtgtttttt

SEQ ID NO: 83093 - DNA, 25 bp, Canis familiaris
cccgtctctgtagctcaaatttttg

SEQ ID NO: 83094 - DNA, 25 bp, Canis familiaris
cccgactgctgtagtcgttttcagt

SEQ ID NO: 83095 - DNA, 25 bp, Canis familiaris
cccgactgctgtatcgaatcagtac

SEQ ID NO: 83096 - DNA, 25 bp, Canis familiaris
cccgcacctgcagatcagtactgta

SEQ ID NO: 83097 - DNA, 25 bp, Canis familiaris
cccgcattgccaaaagtctcatgct

SEQ ID NO: 83098 - DNA, 25 bp, Canis familiaris
cccctgaccactaggttcatcttaa

SEQ ID NO: 83099 - DNA, 25 bp, Canis familiaris
cccctcaataataggtctccctatt

SEQ ID NO: 83100 - DNA, 25 bp, Canis familiaris
cccccagacaaagacctctgcatac

SEQ ID NO: 83101 - DNA, 25 bp, Canis familiaris
ccccggtcaaaggtgccacatgatg

SEQ ID NO: 83102 - DNA, 25 bp, Canis familiaris
cccggtcaaaggtgccacatgatga

SEQ ID NO: 83103 - DNA, 25 bp, Canis familiaris
ccccccaggaggagcagcctgagga

SEQ ID NO: 83104 - DNA, 25 bp, Canis familiaris
ccccacggaatgcaacccagggata

SEQ ID NO: 83105 - DNA, 25 bp, Canis familiaris
cccctgactgttctacccaggagga

SEQ ID NO: 83106 - DNA, 25 bp, Canis familiaris
cccccagcttcaaatagccacagga

SEQ ID NO: 83107 - DNA, 25 bp, Canis familiaris
cccccacgatcacataagcacgtgg

SEQ ID NO: 83108 - DNA, 25 bp, Canis familiaris
cccccaccatcctgggcaagaggag

SEQ ID NO: 83109 - DNA, 25 bp, Canis familiaris
ccccgacgtctgctgggacagaaag

SEQ ID NO: 83110 - DNA, 25 bp, Canis familiaris
cccctgggactgctgggtcaggagg

SEQ ID NO: 83111 - DNA, 25 bp, Canis familiaris
cccggggagctccgtgagctcgagg

SEQ ID NO: 83112 - DNA, 25 bp, Canis familiaris
cccggagggcaggcggtgctattga

SEQ ID NO: 83113 - DNA, 25 bp, Canis familiaris
cccgggctgtcctgaatgtattata

SEQ ID NO: 83114 - DNA, 25 bp, Canis familiaris
cccgtggcagtctggatgctgaatc

SEQ ID NO: 83115 - DNA, 25 bp, Canis familiaris
cccggggatgcatgctgctggaatg

SEQ ID NO: 83116 - DNA, 25 bp, Canis familiaris
cccggggagcagctgcggaatgcac

SEQ ID NO: 83117 - DNA, 25 bp, Canis familiaris
cccggggagcagctgcggaatgcac

SEQ ID NO: 83118 - DNA, 25 bp, Canis familiaris
cccggggagcagctgcggaatgcac

SEQ ID NO: 83119 - DNA, 25 bp, Canis familiaris
cccggggagcagctgcggaatgcac

SEQ ID NO: 83120 - DNA, 25 bp, Canis familiaris
cccgggatagcagctgcaaggactc

SEQ ID NO: 83121 - DNA, 25 bp, Canis familiaris
cccggtgacacagggcaattggccc

SEQ ID NO: 83122 - DNA, 25 bp, Canis familiaris
cccgcctaagcatcgcaaaggggct

SEQ ID NO: 83123 - DNA, 25 bp, Canis familiaris
cccgtgctaccgaagacaatggggt

SEQ ID NO: 83124 - DNA, 25 bp, Canis familiaris
cccgggcccagctagaactggaggt

SEQ ID NO: 83125 - DNA, 25 bp, Canis familiaris
ccccggcttacacagtcttcagggt

SEQ ID NO: 83126 - DNA, 25 bp, Canis familiaris
ccccggctgggacatgcttagggac

SEQ ID NO: 83127 - DNA, 25 bp, Canis familiaris
cccgggctgggacagaggggtggca

SEQ ID NO: 83128 - DNA, 25 bp, Canis familiaris
cccggtgtgtgtaccagggctgggg

SEQ ID NO: 83129 - DNA, 25 bp, Canis familiaris
ccaccgggttgcacaatgcgcggtg

SEQ ID NO: 83130 - DNA, 25 bp, Canis familiaris
ccaccggtcttagagattccgtcca

SEQ ID NO: 83131 - DNA, 25 bp, Canis familiaris
ccaccggccctagagttgaggtctg

SEQ ID NO: 83132 - DNA, 25 bp, Canis familiaris
ccccgtgggcatcctattctgaggg

SEQ ID NO: 83133 - DNA, 25 bp, Canis familiaris
cccgcgatgggagctgctccctggg

SEQ ID NO: 83134 - DNA, 25 bp, Canis familiaris
cccgccactgaacctgtgtcacggg

SEQ ID NO: 83135 - DNA, 25 bp, Canis familiaris
cccgcgccagaaccgttatgatggg

SEQ ID NO: 83136 - DNA, 25 bp, Canis familiaris
cccgcctggccacaggattgatcga

SEQ ID NO: 83137 - DNA, 25 bp, Canis familiaris
cccccttggcagccgtgattgttga

SEQ ID NO: 83138 - DNA, 25 bp, Canis familiaris
ccccgttgtccgggttgctgtggag

SEQ ID NO: 83139 - DNA, 25 bp, Canis familiaris
cccctttgtacgttcttcttggatg

SEQ ID NO: 83140 - DNA, 25 bp, Canis familiaris
ccccttttctagtgtcctatgtgag

SEQ ID NO: 83141 - DNA, 25 bp, Canis familiaris
cccccgttcaaatgacctatctgtg

SEQ ID NO: 83142 - DNA, 25 bp, Canis familiaris
cccccgagtcaaaggcttatttgtg

SEQ ID NO: 83143 - DNA, 25 bp, Canis familiaris
cccccagatgtcgtttttattcagg

SEQ ID NO: 83144 - DNA, 25 bp, Canis familiaris
cccccagatgactttgtttgtgcca

SEQ ID NO: 83145 - DNA, 25 bp, Canis familiaris
cccgcaagagagtgcgtttcgccga

SEQ ID NO: 83146 - DNA, 25 bp, Canis familiaris
cccgcaaggagtcttatctgccagc

SEQ ID NO: 83147 - DNA, 25 bp, Canis familiaris
cccgagagggtgcacacacatgact

SEQ ID NO: 83148 - DNA, 25 bp, Canis familiaris
ccgcaggaggcgctaaaccactgag

SEQ ID NO: 83149 - DNA, 25 bp, Canis familiaris
cccgcgcagaggctaagaccaagtg

SEQ ID NO: 83150 - DNA, 25 bp, Canis familiaris
cccccaggtgaccataacacaacga

SEQ ID NO: 83151 - DNA, 25 bp, Canis familiaris
ccccgaggggcaaaagctcaagcca

SEQ ID NO: 83152 - DNA, 25 bp, Canis familiaris
cccgccgacggcgaacgtgaatgca

SEQ ID NO: 83153 - DNA, 25 bp, Canis familiaris
cccgggagcgccgaggatgtgagtc

SEQ ID NO: 83154 - DNA, 25 bp, Canis familiaris
cccctggatccccataatgacagct

SEQ ID NO: 83155 - DNA, 25 bp, Canis familiaris
gccagccgaggctaccaaaaactaa

SEQ ID NO: 83156 - DNA, 25 bp, Canis familiaris
tccgtcggactcccaacaaacgaca

SEQ ID NO: 83157 - DNA, 25 bp, Canis familiaris
cctgtaagactcccaaccaactggt

SEQ ID NO: 83158 - DNA, 25 bp, Canis familiaris
ccgtagaagcgcccagacttcagtt

SEQ ID NO: 83159 - DNA, 25 bp, Canis familiaris
gccccaaaggcctgttgaagttccg

SEQ ID NO: 83160 - DNA, 25 bp, Canis familiaris
cccgaaaagccatcgacaagcttcc

SEQ ID NO: 83161 - DNA, 25 bp, Canis familiaris
ccccaaaaggcgaagcacgacttgc

SEQ ID NO: 83162 - DNA, 25 bp, Canis familiaris
cccccataaccacacactggttcat

SEQ ID NO: 83163 - DNA, 25 bp, Canis familiaris
ccccaataccaacaaccttgtcatc

SEQ ID NO: 83164 - DNA, 25 bp, Canis familiaris
cccctattgccattaaactgttaat

SEQ ID NO: 83165 - DNA, 25 bp, Canis familiaris
cccgcgattccatcaagtcgttggc

SEQ ID NO: 83166 - DNA, 25 bp, Canis familiaris
cccgctttcagctcatagtctgtga

SEQ ID NO: 83167 - DNA, 25 bp, Canis familiaris
ccccatctatccagacagacttacc

SEQ ID NO: 83168 - DNA, 25 bp, Canis familiaris
ccccctgaccagcagaggttgatct

SEQ ID NO: 83169 - DNA, 25 bp, Canis familiaris
cccgtggctccagcaggagtttcgt

SEQ ID NO: 83170 - DNA, 25 bp, Canis familiaris
cccgtggctccccaaaatatgccag

SEQ ID NO: 83171 - DNA, 25 bp, Canis familiaris
cccgctgcttcactcgaaaatacac

SEQ ID NO: 83172 - DNA, 25 bp, Canis familiaris
cccgccagccataccaagtataagc

SEQ ID NO: 83173 - DNA, 25 bp, Canis familiaris
cccgcacacagaaccgagaacaacg

SEQ ID NO: 83174 - DNA, 25 bp, Canis familiaris
cccgaccactacgatggagcagcac

SEQ ID NO: 83175 - DNA, 25 bp, Canis familiaris
cccgtccctgccaggcagagacagg

SEQ ID NO: 83176 - DNA, 25 bp, Canis familiaris
cccgcctcctctgcaggagaaacag

SEQ ID NO: 83177 - DNA, 25 bp, Canis familiaris
cccgcctccacagagttgcagaaga

SEQ ID NO: 83178 - DNA, 25 bp, Canis familiaris
cccgctggtacccgatagcatgaag

SEQ ID NO: 83179 - DNA, 25 bp, Canis familiaris
cccgctgaccgcgcagccgcatgaa

SEQ ID NO: 83180 - DNA, 25 bp, Canis familiaris
cccgcggcaaagccatccgcaaaat

SEQ ID NO: 83181 - DNA, 25 bp, Canis familiaris
ccgccggaaagcgtgccaatcaaca

SEQ ID NO: 83182 - DNA, 25 bp, Canis familiaris
ccccgaacgagggccagaatggagg

SEQ ID NO: 83183 - DNA, 25 bp, Canis familiaris
ccccaggggcttgccccatggaggt

SEQ ID NO: 83184 - DNA, 25 bp, Canis familiaris
ccccaggctggacaattcctggaag

SEQ ID NO: 83185 - DNA, 25 bp, Canis familiaris
cccaacggtgcagcggttcaaggaa

SEQ ID NO: 83186 - DNA, 25 bp, Canis familiaris
cccgaacattggaagaatttggaga

SEQ ID NO: 83187 - DNA, 25 bp, Canis familiaris
cccccctgtggttcaatctaggaat

SEQ ID NO: 83188 - DNA, 25 bp, Canis familiaris
ccccgtcccagttcagactgaagac

SEQ ID NO: 83189 - DNA, 25 bp, Canis familiaris
ccccctctctaatcaactttgatgc

SEQ ID NO: 83190 - DNA, 25 bp, Canis familiaris
cccccattgtccatgaactttgagg

SEQ ID NO: 83191 - DNA, 25 bp, Canis familiaris
ccccctcttcctcaggggtgaggag

SEQ ID NO: 83192 - DNA, 25 bp, Canis familiaris
ccccgccttccttgagcggggcagc

SEQ ID NO: 83193 - DNA, 25 bp, Canis familiaris
cccgtccattgctggacgcggtgct

SEQ ID NO: 83194 - DNA, 25 bp, Canis familiaris
cccgctcacagtgtggacttttctc

SEQ ID NO: 83195 - DNA, 25 bp, Canis familiaris
cccccatcaggtttgtctgtgtttg

SEQ ID NO: 83196 - DNA, 25 bp, Canis familiaris
ccccggagttgtgtcgtgtaatggc

SEQ ID NO: 83197 - DNA, 25 bp, Canis familiaris
tccaccgggtttctcgtcaagagga

SEQ ID NO: 83198 - DNA, 25 bp, Canis familiaris
ccccatggttttctttgcaagtgct

SEQ ID NO: 83199 - DNA, 25 bp, Canis familiaris
cccctggcagtgcggtttgtggtgt

SEQ ID NO: 83200 - DNA, 25 bp, Canis familiaris
cccccgtgggttgactgtggttatg

SEQ ID NO: 83201 - DNA, 25 bp, Canis familiaris
ccccccttggtcatacagtgaggct

SEQ ID NO: 83202 - DNA, 25 bp, Canis familiaris
cccccctgggtagcagaggactatt

SEQ ID NO: 83203 - DNA, 25 bp, Canis familiaris
ccccactctagagttccaagatatc

SEQ ID NO: 83204 - DNA, 25 bp, Canis familiaris
ccccgtcgagagagcccagaactcg

SEQ ID NO: 83205 - DNA, 25 bp, Canis familiaris
ccgccagtgcaagtgaggcccaggg

SEQ ID NO: 83206 - DNA, 25 bp, Canis familiaris
ccccgtcgacgagtgtctcgtgtgt

SEQ ID NO: 83207 - DNA, 25 bp, Canis familiaris
ccccgaaaccagggctgcagtgtgt

SEQ ID NO: 83208 - DNA, 25 bp, Canis familiaris
cccgcaggaaccgaggctgaggagt

SEQ ID NO: 83209 - DNA, 25 bp, Canis familiaris
cccgcgctgaagagagctgctgaag

SEQ ID NO: 83210 - DNA, 25 bp, Canis familiaris
ccccccaggatgccctggatgaacc

SEQ ID NO: 83211 - DNA, 25 bp, Canis familiaris
cccgcccatttcctcatgggcagag

SEQ ID NO: 83212 - DNA, 25 bp, Canis familiaris
ccccctcgtatactgctggtgggaa

SEQ ID NO: 83213 - DNA, 25 bp, Canis familiaris
cccccagactcaactcgttgggact

SEQ ID NO: 83214 - DNA, 25 bp, Canis familiaris
cccccagcccagtcggagatgggac

SEQ ID NO: 83215 - DNA, 25 bp, Canis familiaris
cccccaccctgttgttgaggtagtg

SEQ ID NO: 83216 - DNA, 25 bp, Canis familiaris
cccccaccctgataaagagagatgg

SEQ ID NO: 83217 - DNA, 25 bp, Canis familiaris
cccccaccactacaaatgctgagtt

SEQ ID NO: 83218 - DNA, 25 bp, Canis familiaris
ccgccccgactacaagatttggtca

SEQ ID NO: 83219 - DNA, 25 bp, Canis familiaris
tccacccctaaagattgttggttat

SEQ ID NO: 83220 - DNA, 25 bp, Canis familiaris
cccgacccagaagcaggtcgtacta

SEQ ID NO: 83221 - DNA, 25 bp, Canis familiaris
ccccgacccagaagcaggtcgtact

SEQ ID NO: 83222 - DNA, 25 bp, Canis familiaris
cccctgaccaccagaggttgatctt

SEQ ID NO: 83223 - DNA, 25 bp, Canis familiaris
cccgctgcccagcactggggaattt

SEQ ID NO: 83224 - DNA, 25 bp, Canis familiaris
cccgtgcacaactatggatgtggaa

SEQ ID NO: 83225 - DNA, 25 bp, Canis familiaris
cccgtgtctcacctgcagaggaaag

SEQ ID NO: 83226 - DNA, 25 bp, Canis familiaris
cccgtgtgctcggtcatagtgcaca

SEQ ID NO: 83227 - DNA, 25 bp, Canis familiaris
cccgcttgctctggtatgaacatgt

SEQ ID NO: 83228 - DNA, 25 bp, Canis familiaris
cccgttgcagctggtagcagtctaa

SEQ ID NO: 83229 - DNA, 25 bp, Canis familiaris
cccgcctgcacaggtggagttctag

SEQ ID NO: 83230 - DNA, 25 bp, Canis familiaris
ccccctgcaccagtggttgtcgggg

SEQ ID NO: 83231 - DNA, 25 bp, Canis familiaris
ccccctgagagtgaccagacggtgg

SEQ ID NO: 83232 - DNA, 25 bp, Canis familiaris
ccccctgacaattacctgaggaggt

SEQ ID NO: 83233 - DNA, 25 bp, Canis familiaris
cccccatacccatcctgggagatgg

SEQ ID NO: 83234 - DNA, 25 bp, Canis familiaris
cccccatggcgcaattcttgggggg

SEQ ID NO: 83235 - DNA, 25 bp, Canis familiaris
cccgatcatgtccagcatcaagctg

SEQ ID NO: 83236 - DNA, 25 bp, Canis familiaris
cccgatgcagctcccacaaggagaa

SEQ ID NO: 83237 - DNA, 25 bp, Canis familiaris
cccgagagattgcccaaggttccag

SEQ ID NO: 83238 - DNA, 25 bp, Canis familiaris
cccgctatttgacgcacaggttgga

SEQ ID NO: 83239 - DNA, 25 bp, Canis familiaris
ccccttctacacccagatttgagaa

SEQ ID NO: 83240 - DNA, 25 bp, Canis familiaris
ccccttttcaggccaagtcaaggag

SEQ ID NO: 83241 - DNA, 25 bp, Canis familiaris
cccctcctttggtctagtgacgagg

SEQ ID NO: 83242 - DNA, 25 bp, Canis familiaris
ccaccggatttgtgctcggacgggg

SEQ ID NO: 83243 - DNA, 25 bp, Canis familiaris
ccccgaattctggccttggccagga

SEQ ID NO: 83244 - DNA, 25 bp, Canis familiaris
cccgccagatggagccttggacgga

SEQ ID NO: 83245 - DNA, 25 bp, Canis familiaris
cccccggggatgctatgctgggtga

SEQ ID NO: 83246 - DNA, 25 bp, Canis familiaris
cccccatggggtccttggagtgata

SEQ ID NO: 83247 - DNA, 25 bp, Canis familiaris
cccctcattatgctcacttagtgtt

SEQ ID NO: 83248 - DNA, 25 bp, Canis familiaris
cctcctcaaatcctactcaggggac

SEQ ID NO: 83249 - DNA, 25 bp, Canis familiaris
cctgccccaaggtcccaggggcaag

SEQ ID NO: 83250 - DNA, 25 bp, Canis familiaris
ccccctgcaatatcccagtatcaaa

SEQ ID NO: 83251 - DNA, 25 bp, Canis familiaris
cccgcccaataatctagactcatta

SEQ ID NO: 83252 - DNA, 25 bp, Canis familiaris
cccgctggaaaatcttgacgtaaga

SEQ ID NO: 83253 - DNA, 25 bp, Canis familiaris
ccccgctggaaaatcttgacgtaag

SEQ ID NO: 83254 - DNA, 25 bp, Canis familiaris
ccccctagaaaatacccacagtgag

SEQ ID NO: 83255 - DNA, 25 bp, Canis familiaris
ccccccagatctaataagcccactg

SEQ ID NO: 83256 - DNA, 25 bp, Canis familiaris
cccccacgtatttctcaggaactgt

SEQ ID NO: 83257 - DNA, 25 bp, Canis familiaris
ccgcccagacttcaataaaacgtgc

SEQ ID NO: 83258 - DNA, 25 bp, Canis familiaris
ccgcccagacttcaataaaacgtgc

SEQ ID NO: 83259 - DNA, 25 bp, Canis familiaris
ccgcccgtcgtgcaagaaacaaatc

SEQ ID NO: 83260 - DNA, 25 bp, Canis familiaris
ccccctggcttctcaaaacaagcac

SEQ ID NO: 83261 - DNA, 25 bp, Canis familiaris
ccccccagctatttgcaggaagaaa

SEQ ID NO: 83262 - DNA, 25 bp, Canis familiaris
ccccccagatgttttgaggagctca

SEQ ID NO: 83263 - DNA, 25 bp, Canis familiaris
ccccgtcaggtatcgtggttcagaa

SEQ ID NO: 83264 - DNA, 25 bp, Canis familiaris
ccccagtaaagtgcggcttgtcaga

SEQ ID NO: 83265 - DNA, 25 bp, Canis familiaris
ccccctagattggacgtgctttatc

SEQ ID NO: 83266 - DNA, 25 bp, Canis familiaris
ccccgctggttggttgtcttacagc

SEQ ID NO: 83267 - DNA, 25 bp, Canis familiaris
ccccttgggttaggtctcaacagag

SEQ ID NO: 83268 - DNA, 25 bp, Canis familiaris
ccccctggggcttctacataaagag

SEQ ID NO: 83269 - DNA, 25 bp, Canis familiaris
ccccctgtccctttataaaatgctg

SEQ ID NO: 83270 - DNA, 25 bp, Canis familiaris
cccccgtcctagatctaacaaggtg

SEQ ID NO: 83271 - DNA, 25 bp, Canis familiaris
ccccggaactcgattttcagggatg

SEQ ID NO: 83272 - DNA, 25 bp, Canis familiaris
ccccgaagacccactgtacaaggag

SEQ ID NO: 83273 - DNA, 25 bp, Canis familiaris
ccccaggcaacagcagtttacaagg

SEQ ID NO: 83274 - DNA, 25 bp, Canis familiaris
ccccggacagggttgttgaccagtg

SEQ ID NO: 83275 - DNA, 25 bp, Canis familiaris
cccccgaacccaggttgtgcaagtg

SEQ ID NO: 83276 - DNA, 25 bp, Canis familiaris
ccccccaaattcgagaatgtcaaag

SEQ ID NO: 83277 - DNA, 25 bp, Canis familiaris
ccccccagaaatggtaatttgagag

SEQ ID NO: 83278 - DNA, 25 bp, Canis familiaris
ccccgcacagaattacttttataag

SEQ ID NO: 83279 - DNA, 25 bp, Canis familiaris
cccccaggaactgcttcctgatgta

SEQ ID NO: 83280 - DNA, 25 bp, Canis familiaris
cccctagtaagtgccttcagtgtcc

SEQ ID NO: 83281 - DNA, 25 bp, Canis familiaris
cccccagtgaatacccgattggcac

SEQ ID NO: 83282 - DNA, 25 bp, Canis familiaris
cccctttgttagccgtatgtggcct

SEQ ID NO: 83283 - DNA, 25 bp, Canis familiaris
ccccccttgtatgcagtgttagcca

SEQ ID NO: 83284 - DNA, 25 bp, Canis familiaris
cccccaatatcatccagtttgtgcc

SEQ ID NO: 83285 - DNA, 25 bp, Canis familiaris
cccccaaaccaaagcatactcagcc

SEQ ID NO: 83286 - DNA, 25 bp, Canis familiaris
cccgccggagccaaggcaatcgagc

SEQ ID NO: 83287 - DNA, 25 bp, Canis familiaris
cccgccccagctggatgaagatggg

SEQ ID NO: 83288 - DNA, 25 bp, Canis familiaris
cccctcccatgcgtaaaacgttctg

SEQ ID NO: 83289 - DNA, 25 bp, Canis familiaris
ccccccctgagttaggatctactct

SEQ ID NO: 83290 - DNA, 25 bp, Canis familiaris
ccccgccttggtgaagaatccatta

SEQ ID NO: 83291 - DNA, 25 bp, Canis familiaris
ccccccaatgtgggcaacaatccag

SEQ ID NO: 83292 - DNA, 25 bp, Canis familiaris
cccccaatactgtcagcacaaacca

SEQ ID NO: 83293 - DNA, 25 bp, Canis familiaris
cccgccgttctgtcagtgacaatga

SEQ ID NO: 83294 - DNA, 25 bp, Canis familiaris
cccgccaaccattaggctcaatgat

SEQ ID NO: 83295 - DNA, 25 bp, Canis familiaris
ccgccggactttgggctcagatgat

SEQ ID NO: 83296 - DNA, 25 bp, Canis familiaris
cccccagacttttatcacaagctcc

SEQ ID NO: 83297 - DNA, 25 bp, Canis familiaris
cccccacgctttggtacatgaatcc

SEQ ID NO: 83298 - DNA, 25 bp, Canis familiaris
ccccaccctgtggagaaatggtaca

SEQ ID NO: 83299 - DNA, 25 bp, Canis familiaris
cccctgcgcctaggcgaagtcagga

SEQ ID NO: 83300 - DNA, 25 bp, Canis familiaris
ccccaggccaaggacacgaagtaat

SEQ ID NO: 83301 - DNA, 25 bp, Canis familiaris
ccccgagcagaagaccaaaggcaag

SEQ ID NO: 83302 - DNA, 25 bp, Canis familiaris
cccctggaagcagcccaaactgagg

SEQ ID NO: 83303 - DNA, 25 bp, Canis familiaris
ccccagagagcacatccatacatac

SEQ ID NO: 83304 - DNA, 25 bp, Canis familiaris
cccgcagaggctgcacttgagctac

SEQ ID NO: 83305 - DNA, 25 bp, Canis familiaris
cccgcatgtggcccatttggccatg

SEQ ID NO: 83306 - DNA, 25 bp, Canis familiaris
cccgcttctgagtcattctgtgcgc

SEQ ID NO: 83307 - DNA, 25 bp, Canis familiaris
cccctttggtctagattctgctggc

SEQ ID NO: 83308 - DNA, 25 bp, Canis familiaris
ccccttcggatttgaagccgctgca

SEQ ID NO: 83309 - DNA, 25 bp, Canis familiaris
ccacctttggtcctggagacctggg

SEQ ID NO: 83310 - DNA, 25 bp, Canis familiaris
gccccttgggcctttaatgttggcg

SEQ ID NO: 83311 - DNA, 25 bp, Canis familiaris
ccccctggtgctcttggtttgaggg

SEQ ID NO: 83312 - DNA, 25 bp, Canis familiaris
cccccatggtgtctagatgagtatg

SEQ ID NO: 83313 - DNA, 25 bp, Canis familiaris
ccccctgcgtgtccgaagaatatgc

SEQ ID NO: 83314 - DNA, 25 bp, Canis familiaris
ccccctcgtgtgcagatggaagtgc

SEQ ID NO: 83315 - DNA, 25 bp, Canis familiaris
cccgcagccctacaaggagaggccc

SEQ ID NO: 83316 - DNA, 25 bp, Canis familiaris
cccgagcccacacgagagtgaggac

SEQ ID NO: 83317 - DNA, 25 bp, Canis familiaris
ccccgtccagagcactgtgagggag

SEQ ID NO: 83318 - DNA, 25 bp, Canis familiaris
cccctgtctcatcctgtaggatttg

SEQ ID NO: 83319 - DNA, 25 bp, Canis familiaris
cccctggccaaccattgagatgatt

SEQ ID NO: 83320 - DNA, 25 bp, Canis familiaris
ccccgcgccaacatctaagatttgt

SEQ ID NO: 83321 - DNA, 25 bp, Canis familiaris
cccccagccaaacagagagaccttg

SEQ ID NO: 83322 - DNA, 25 bp, Canis familiaris
cccgcctgccctatagatatggcct

SEQ ID NO: 83323 - DNA, 25 bp, Canis familiaris
cccgcagctgctcttaagcaagctg

SEQ ID NO: 83324 - DNA, 25 bp, Canis familiaris
cccgctgctctggttccagaggtca

SEQ ID NO: 83325 - DNA, 25 bp, Canis familiaris
cccgcaaccggtggcaggttcaaga

SEQ ID NO: 83326 - DNA, 25 bp, Canis familiaris
ccccttccaggtggcagttgggagg

SEQ ID NO: 83327 - DNA, 25 bp, Canis familiaris
ccccctccaggagggaagggctgtg

SEQ ID NO: 83328 - DNA, 25 bp, Canis familiaris
ccccctcgcggggggatgcgtgcat

SEQ ID NO: 83329 - DNA, 25 bp, Canis familiaris
cccccaccagggggaggctgtgtca

SEQ ID NO: 83330 - DNA, 25 bp, Canis familiaris
cccgcacccggagagagcactgggt

SEQ ID NO: 83331 - DNA, 25 bp, Canis familiaris
ccccccaaggagtgccatctgggtc

SEQ ID NO: 83332 - DNA, 25 bp, Canis familiaris
cccctcaatagagggccctctagga

SEQ ID NO: 83333 - DNA, 25 bp, Canis familiaris
cccccactatgtggtctccatgtaa

SEQ ID NO: 83334 - DNA, 25 bp, Canis familiaris
ccgacctttgatgacccatgtaatg

SEQ ID NO: 83335 - DNA, 25 bp, Canis familiaris
cccccagttcatgaggcctggctat

SEQ ID NO: 83336 - DNA, 25 bp, Canis familiaris
ccgcccaatcttcattcctgagcgg

SEQ ID NO: 83337 - DNA, 25 bp, Canis familiaris
ccccgcaaacatcttcagtagcagt

SEQ ID NO: 83338 - DNA, 25 bp, Canis familiaris
cccccaacacgcctgcaattaaggg

SEQ ID NO: 83339 - DNA, 25 bp, Canis familiaris
cccccaacctgcctagaagaagtat

SEQ ID NO: 83340 - DNA, 25 bp, Canis familiaris
cccccacacctccagaataaaagat

SEQ ID NO: 83341 - DNA, 25 bp, Canis familiaris
cccctgcagcccaaaaacaaacgca

SEQ ID NO: 83342 - DNA, 25 bp, Canis familiaris
cccgctccccagaaaaacatgacaa

SEQ ID NO: 83343 - DNA, 25 bp, Canis familiaris
cccgcgtcgcgcaaaaatgtctata

SEQ ID NO: 83344 - DNA, 25 bp, Canis familiaris
cccgctgcgctgtacaaagcatgtg

SEQ ID NO: 83345 - DNA, 25 bp, Canis familiaris
cccgcgtgttgacgcagagctgcgg

SEQ ID NO: 83346 - DNA, 25 bp, Canis familiaris
cccgcgtgggagccgatgagtgtga

SEQ ID NO: 83347 - DNA, 25 bp, Canis familiaris
ccccgtgggagcatgctgcggaatg

SEQ ID NO: 83348 - DNA, 25 bp, Canis familiaris
ccccggggacctcctggagagaatg

SEQ ID NO: 83349 - DNA, 25 bp, Canis familiaris
ccccgtgggatccaggctgggagtc

SEQ ID NO: 83350 - DNA, 25 bp, Canis familiaris
cccgcgaggcgctggagcgggactt

SEQ ID NO: 83351 - DNA, 25 bp, Canis familiaris
ccccggtgctgatggacagcctggt

SEQ ID NO: 83352 - DNA, 25 bp, Canis familiaris
ccccgttctggttatagcactagtc

SEQ ID NO: 83353 - DNA, 25 bp, Canis familiaris
cccctaatggggtcaatatcttgtt

SEQ ID NO: 83354 - DNA, 25 bp, Canis familiaris
cccccaatgtgggcaacaatccaga

SEQ ID NO: 83355 - DNA, 25 bp, Canis familiaris
cccgctatactacaacagatcgcag

SEQ ID NO: 83356 - DNA, 25 bp, Canis familiaris
cccgctatcaattacccagtgtatg

SEQ ID NO: 83357 - DNA, 25 bp, Canis familiaris
cccgcagatctaagacccaggaggc

SEQ ID NO: 83358 - DNA, 25 bp, Canis familiaris
cccgcagtatgcacaccacatgtga

SEQ ID NO: 83359 - DNA, 25 bp, Canis familiaris
cccgcactagctactaccagtatgg

SEQ ID NO: 83360 - DNA, 25 bp, Canis familiaris
cccgcccagctagcaacatgggtgc

SEQ ID NO: 83361 - DNA, 25 bp, Canis familiaris
cccccattcattggaccatgtgcgg

SEQ ID NO: 83362 - DNA, 25 bp, Canis familiaris
cccccatgtgcacagcagcatgatt

SEQ ID NO: 83363 - DNA, 25 bp, Canis familiaris
ccccgcatgtgcgcagatggcagag

SEQ ID NO: 83364 - DNA, 25 bp, Canis familiaris
ccgcgccattgcaacagggtgggat

SEQ ID NO: 83365 - DNA, 25 bp, Canis familiaris
cccgcagctgcgaacgggggtacct

SEQ ID NO: 83366 - DNA, 25 bp, Canis familiaris
ccccatggacatagggagggtcccg

SEQ ID NO: 83367 - DNA, 25 bp, Canis familiaris
cccgctgtgagcttcagccgggaac

SEQ ID NO: 83368 - DNA, 25 bp, Canis familiaris
ccgacatgtgactcatcctgggaat

SEQ ID NO: 83369 - DNA, 25 bp, Canis familiaris
ccgagctgtccatctcgggaaccga

SEQ ID NO: 83370 - DNA, 25 bp, Canis familiaris
ccccgttctcacaggtgaggcctga

SEQ ID NO: 83371 - DNA, 25 bp, Canis familiaris
ccccgttgctcggggtcagacctgg

SEQ ID NO: 83372 - DNA, 25 bp, Canis familiaris
ccccttatactgtgctgtgaacctg

SEQ ID NO: 83373 - DNA, 25 bp, Canis familiaris
ccccggccctgatgggcaacgtggt

SEQ ID NO: 83374 - DNA, 25 bp, Canis familiaris
ccccgggcatgcaagtgtccccggg

SEQ ID NO: 83375 - DNA, 25 bp, Canis familiaris
ccccgtgcacgctgattccggggag

SEQ ID NO: 83376 - DNA, 25 bp, Canis familiaris
ccccgcgcaagcagttctcggggct

SEQ ID NO: 83377 - DNA, 25 bp, Canis familiaris
ccccggaagtacgtcatgggccact

SEQ ID NO: 83378 - DNA, 25 bp, Canis familiaris
ccccgaagtggaacctgggcgcatc

SEQ ID NO: 83379 - DNA, 25 bp, Canis familiaris
ccccgacacggaccagtggtcagca

SEQ ID NO: 83380 - DNA, 25 bp, Canis familiaris
cccgcagacaccaatgccttagtag

SEQ ID NO: 83381 - DNA, 25 bp, Canis familiaris
ccccaacttcaagctctaggagagc

SEQ ID NO: 83382 - DNA, 25 bp, Canis familiaris
ccgctgggcttcacctaaggtggtt

SEQ ID NO: 83383 - DNA, 25 bp, Canis familiaris
ccgtggggcttcactaaggtggttg

SEQ ID NO: 83384 - DNA, 25 bp, Canis familiaris
cccgctgggcttcactaagagtggt

SEQ ID NO: 83385 - DNA, 25 bp, Canis familiaris
ccccttctggggttcaaggctggtg

SEQ ID NO: 83386 - DNA, 25 bp, Canis familiaris
cccctaagagggctacctctgtggc

SEQ ID NO: 83387 - DNA, 25 bp, Canis familiaris
cccgctgaggagggcgaagccggtg

SEQ ID NO: 83388 - DNA, 25 bp, Canis familiaris
cccgctcaggaccctgaggcgggtg

SEQ ID NO: 83389 - DNA, 25 bp, Canis familiaris
ccccgcagggcacttgatagcgttt

SEQ ID NO: 83390 - DNA, 25 bp, Canis familiaris
ccgccatggctgaactagatccgtt

SEQ ID NO: 83391 - DNA, 25 bp, Canis familiaris
cccctgtgctaactctagccatgtg

SEQ ID NO: 83392 - DNA, 25 bp, Canis familiaris
cccctggaagatcctacgcgggact

SEQ ID NO: 83393 - DNA, 25 bp, Canis familiaris
cccctggggtcttcccagggcactg

SEQ ID NO: 83394 - DNA, 25 bp, Canis familiaris
cccctggctgcggttttagaggcct

SEQ ID NO: 83395 - DNA, 25 bp, Canis familiaris
ccccgtggccagagtcatagggcac

SEQ ID NO: 83396 - DNA, 25 bp, Canis familiaris
ccccgtaggcagagtctagtctggc

SEQ ID NO: 83397 - DNA, 25 bp, Canis familiaris
ccccgtgggcatgaacaagctctgg

SEQ ID NO: 83398 - DNA, 25 bp, Canis familiaris
ccccgtgggtgaaccagcactatgg

SEQ ID NO: 83399 - DNA, 25 bp, Canis familiaris
ccccgatgttgtaatccaatggtgg

SEQ ID NO: 83400 - DNA, 25 bp, Canis familiaris
ccccgatggagaagcccgaggtggt

SEQ ID NO: 83401 - DNA, 25 bp, Canis familiaris
ccccaatgaaaccctggcaacttgt

SEQ ID NO: 83402 - DNA, 25 bp, Canis familiaris
ccccatgttataccctgaaacctga

SEQ ID NO: 83403 - DNA, 25 bp, Canis familiaris
ccccatggttggacctgtaattctg

SEQ ID NO: 83404 - DNA, 25 bp, Canis familiaris
cccgctgggtgaaccattcacttgt

SEQ ID NO: 83405 - DNA, 25 bp, Canis familiaris
ccccgagatgtcaccagtcatttta

SEQ ID NO: 83406 - DNA, 25 bp, Canis familiaris
ccccgtctgtgcatcacaaattcct

SEQ ID NO: 83407 - DNA, 25 bp, Canis familiaris
cccgcctatgtgctaaactcatttg

SEQ ID NO: 83408 - DNA, 25 bp, Canis familiaris
cccccaatctccaaacacataattg

SEQ ID NO: 83409 - DNA, 25 bp, Canis familiaris
cccgcagcttcttcacaaaataatt

SEQ ID NO: 83410 - DNA, 25 bp, Canis familiaris
ccccagttcccagattagacttcaa

SEQ ID NO: 83411 - DNA, 25 bp, Canis familiaris
ccccgcttccgaaagtgagcactgt

SEQ ID NO: 83412 - DNA, 25 bp, Canis familiaris
cccgcgcccacgatgtggagatggt

SEQ ID NO: 83413 - DNA, 25 bp, Canis familiaris
cccgcagcctacgtggggatggggg

SEQ ID NO: 83414 - DNA, 25 bp, Canis familiaris
ccgagacccacgggctggtggaaag

SEQ ID NO: 83415 - DNA, 25 bp, Canis familiaris
ccagaaccaacagagccgctggcct

SEQ ID NO: 83416 - DNA, 25 bp, Canis familiaris
ccgtatggaccagaccgtggacgtt

SEQ ID NO: 83417 - DNA, 25 bp, Canis familiaris
ccccaggacaagagccgtacactct

SEQ ID NO: 83418 - DNA, 25 bp, Canis familiaris
cccctgtaaggattgtctgtaacct

SEQ ID NO: 83419 - DNA, 25 bp, Canis familiaris
ccccgaagtcaagttggtacacctg

SEQ ID NO: 83420 - DNA, 25 bp, Canis familiaris
ccccgtcctacagacgtgaacactg

SEQ ID NO: 83421 - DNA, 25 bp, Canis familiaris
ccccttcctaaattaactagcactg

SEQ ID NO: 83422 - DNA, 25 bp, Canis familiaris
ccccttctttcaactaatcttactg

SEQ ID NO: 83423 - DNA, 25 bp, Canis familiaris
cccctcctgattcactcaagtgtag

SEQ ID NO: 83424 - DNA, 25 bp, Canis familiaris
ccgttcgtgttctgcggcagtaagc

SEQ ID NO: 83425 - DNA, 25 bp, Canis familiaris
cctgtacgttactcaccatgcaaac

SEQ ID NO: 83426 - DNA, 25 bp, Canis familiaris
ccgcaaggaaacactgaagacacat

SEQ ID NO: 83427 - DNA, 25 bp, Canis familiaris
ccgacctaccacattacaatcaatt

SEQ ID NO: 83428 - DNA, 25 bp, Canis familiaris
cccctcaaactaaataaatcaatct

SEQ ID NO: 83429 - DNA, 25 bp, Canis familiaris
cccccaggaccatatgatgattaat

SEQ ID NO: 83430 - DNA, 25 bp, Canis familiaris
ccccctggacctttgatggaacaga

SEQ ID NO: 83431 - DNA, 25 bp, Canis familiaris
ccccggaggcactggtggtgtgaga

SEQ ID NO: 83432 - DNA, 25 bp, Canis familiaris
cccccgagatgaaccgcaggtgttg

SEQ ID NO: 83433 - DNA, 25 bp, Canis familiaris
cccccgaaacacagcagagcttcag

SEQ ID NO: 83434 - DNA, 25 bp, Canis familiaris
cccccaacacacttggagcacaata

SEQ ID NO: 83435 - DNA, 25 bp, Canis familiaris
cccccacactcctgagaatcagtat

SEQ ID NO: 83436 - DNA, 25 bp, Canis familiaris
cccccagaccacccagaatagtgat

SEQ ID NO: 83437 - DNA, 25 bp, Canis familiaris
cccccaagtcaccctgagatagaga

SEQ ID NO: 83438 - DNA, 25 bp, Canis familiaris
ccccttctatcatccatggatacaa

SEQ ID NO: 83439 - DNA, 25 bp, Canis familiaris
ccccttctatcatccatggatacca

SEQ ID NO: 83440 - DNA, 25 bp, Canis familiaris
cccgcttgccaatccaggaatacat

SEQ ID NO: 83441 - DNA, 25 bp, Canis familiaris
ccccttctcaagcctgggtcataat

SEQ ID NO: 83442 - DNA, 25 bp, Canis familiaris
cccctccaaagccatggtctaaatg

SEQ ID NO: 83443 - DNA, 25 bp, Canis familiaris
cccctcccagaggtgtttaggatct

SEQ ID NO: 83444 - DNA, 25 bp, Canis familiaris
cccctgcccagtgtgatttactatg

SEQ ID NO: 83445 - DNA, 25 bp, Canis familiaris
cccccctctgaatatcttatgatag

SEQ ID NO: 83446 - DNA, 25 bp, Canis familiaris
cccccacttgtgtgacttcattgag

SEQ ID NO: 83447 - DNA, 25 bp, Canis familiaris
cccctcaatcttcaggcaggttggg

SEQ ID NO: 83448 - DNA, 25 bp, Canis familiaris
ccccccatctgcccaggaaagtggg

SEQ ID NO: 83449 - DNA, 25 bp, Canis familiaris
cccccagctcctgaggaagacgggg

SEQ ID NO: 83450 - DNA, 25 bp, Canis familiaris
cccccagccctggagctgtaggagg

SEQ ID NO: 83451 - DNA, 25 bp, Canis familiaris
cccccagcctgttttgtaggagtct

SEQ ID NO: 83452 - DNA, 25 bp, Canis familiaris
ccccctgtctggtatatcgggttct

SEQ ID NO: 83453 - DNA, 25 bp, Canis familiaris
cccccagtgggctacatcagagtgc

SEQ ID NO: 83454 - DNA, 25 bp, Canis familiaris
cccccagtgggctacatcagagtgc

SEQ ID NO: 83455 - DNA, 25 bp, Canis familiaris
cccccagtgggctacatcagagtgc

SEQ ID NO: 83456 - DNA, 25 bp, Canis familiaris
cccccagtgggctacatcagagtgc

SEQ ID NO: 83457 - DNA, 25 bp, Canis familiaris
cccccagtgggctacatcagagtgc

SEQ ID NO: 83458 - DNA, 25 bp, Canis familiaris
cccccagtgggctacatcagagtgc

SEQ ID NO: 83459 - DNA, 25 bp, Canis familiaris
cccccatgtgtgtaagctcatgaag

SEQ ID NO: 83460 - DNA, 25 bp, Canis familiaris
cccccatgtggattctgagtgtcac

SEQ ID NO: 83461 - DNA, 25 bp, Canis familiaris
ccccgcagaggatttcgtgtaccag

SEQ ID NO: 83462 - DNA, 25 bp, Canis familiaris
ccccgaagtgactttatgataatct

SEQ ID NO: 83463 - DNA, 25 bp, Canis familiaris
cccccaatgtgtccgtcgtggatct

SEQ ID NO: 83464 - DNA, 25 bp, Canis familiaris
cccccctgtgcccagggggtcatct

SEQ ID NO: 83465 - DNA, 25 bp, Canis familiaris
ccccctcgtgccagggagggtgcgt

SEQ ID NO: 83466 - DNA, 25 bp, Canis familiaris
ccccctcaggcggagaggagcgggg

SEQ ID NO: 83467 - DNA, 25 bp, Canis familiaris
ccccggcaggggcagggcagaggag

SEQ ID NO: 83468 - DNA, 25 bp, Canis familiaris
ccccgtgggcgaccagtgggaagag

SEQ ID NO: 83469 - DNA, 25 bp, Canis familiaris
cccgcggcgtccgcggggaggtgag

SEQ ID NO: 83470 - DNA, 25 bp, Canis familiaris
cccccgtggacagcgggtgcagggg

SEQ ID NO: 83471 - DNA, 25 bp, Canis familiaris
cccccagcaaaaggctgccgtgcag

SEQ ID NO: 83472 - DNA, 25 bp, Canis familiaris
cccctggccaaggtcatccatgaca

SEQ ID NO: 83473 - DNA, 25 bp, Canis familiaris
cccctggccaaggtcatccatgaca

SEQ ID NO: 83474 - DNA, 25 bp, Canis familiaris
cccctggccaaggtcatccatgaca

SEQ ID NO: 83475 - DNA, 25 bp, Canis familiaris
ccccggagaaggacaatcagacgga

SEQ ID NO: 83476 - DNA, 25 bp, Canis familiaris
cccctgtcgacgttaatctgaagga

SEQ ID NO: 83477 - DNA, 25 bp, Canis familiaris
cccctctcgactttaactggaagtg

SEQ ID NO: 83478 - DNA, 25 bp, Canis familiaris
cccctctcacctgttggtggaagct

SEQ ID NO: 83479 - DNA, 25 bp, Canis familiaris
cccctcccactcacatatgtggacc

SEQ ID NO: 83480 - DNA, 25 bp, Canis familiaris
ccgaatcctttatattatggaccga

SEQ ID NO: 83481 - DNA, 25 bp, Canis familiaris
cccctccttgactgttaggaccaga

SEQ ID NO: 83482 - DNA, 25 bp, Canis familiaris
cccctcgggcactcaaagagatccg

SEQ ID NO: 83483 - DNA, 25 bp, Canis familiaris
cccgccgcggcggctagaagagcag

SEQ ID NO: 83484 - DNA, 25 bp, Canis familiaris
cccgcccggagggagagcagggccg

SEQ ID NO: 83485 - DNA, 25 bp, Canis familiaris
ccccccagctgcccggcagctgggc

SEQ ID NO: 83486 - DNA, 25 bp, Canis familiaris
cccctcactgcagacctactgcagt

SEQ ID NO: 83487 - DNA, 25 bp, Canis familiaris
ccccttatgagcgcctacgatgcgc

SEQ ID NO: 83488 - DNA, 25 bp, Canis familiaris
ccgccttgattgacctgctaggacg

SEQ ID NO: 83489 - DNA, 25 bp, Canis familiaris
ccgccttatttcctgcttgagaatg

SEQ ID NO: 83490 - DNA, 25 bp, Canis familiaris
ccccgctactgtgggttggaatgga

SEQ ID NO: 83491 - DNA, 25 bp, Canis familiaris
cccccaactgatgtgtctggcgtgg

SEQ ID NO: 83492 - DNA, 25 bp, Canis familiaris
ccccgacctgatctgtctgaggatc

SEQ ID NO: 83493 - DNA, 25 bp, Canis familiaris
cccctacgggactttgacgatgcga

SEQ ID NO: 83494 - DNA, 25 bp, Canis familiaris
ccccattcgggacatatggatacgc

SEQ ID NO: 83495 - DNA, 25 bp, Canis familiaris
cccccttgggagcgtgtatactcag

SEQ ID NO: 83496 - DNA, 25 bp, Canis familiaris
cccccctgatacagttgtagactca

SEQ ID NO: 83497 - DNA, 25 bp, Canis familiaris
cccctgccaaagagtggtgagaaca

SEQ ID NO: 83498 - DNA, 25 bp, Canis familiaris
ccccaccaacgatgtgtgtcgtcac

SEQ ID NO: 83499 - DNA, 25 bp, Canis familiaris
ccccccgagcagatggctgaagtgc

SEQ ID NO: 83500 - DNA, 25 bp, Canis familiaris
cccccacagaggagcagctgcagac

SEQ ID NO: 83501 - DNA, 25 bp, Canis familiaris
cccctgcacaggggccagctgaggt

SEQ ID NO: 83502 - DNA, 25 bp, Canis familiaris
ccccagaccagggccagctggtaaa

SEQ ID NO: 83503 - DNA, 25 bp, Canis familiaris
cccccactcaacacagcttgataaa

SEQ ID NO: 83504 - DNA, 25 bp, Canis familiaris
ccccgagcatcaagccttttgaaaa

SEQ ID NO: 83505 - DNA, 25 bp, Canis familiaris
ccccagaccagcctattttcaagga

SEQ ID NO: 83506 - DNA, 25 bp, Canis familiaris
ccccgccatggcctatttggaaggc

SEQ ID NO: 83507 - DNA, 25 bp, Canis familiaris
ccccgctcagtggttcctgcgggag

SEQ ID NO: 83508 - DNA, 25 bp, Canis familiaris
ccccctcattgccattccatgaggg

SEQ ID NO: 83509 - DNA, 25 bp, Canis familiaris
ccccctttctgcagccaggaaggaa

SEQ ID NO: 83510 - DNA, 25 bp, Canis familiaris
ccccctttctgcagccaggaaggaa

SEQ ID NO: 83511 - DNA, 25 bp, Canis familiaris
ccccctttctgcagccaggaaggaa

SEQ ID NO: 83512 - DNA, 25 bp, Canis familiaris
ccccctttctgcagccaggaaggaa

SEQ ID NO: 83513 - DNA, 25 bp, Canis familiaris
ccccctttctgcagccaggaaggaa

SEQ ID NO: 83514 - DNA, 25 bp, Canis familiaris
ccccctttctgcagccaggaaggaa

SEQ ID NO: 83515 - DNA, 25 bp, Canis familiaris
ccccctttctgcagccaggaaggaa

SEQ ID NO: 83516 - DNA, 25 bp, Canis familiaris
ccccctttctgcagccaaggaagga

SEQ ID NO: 83517 - DNA, 25 bp, Canis familiaris
ccccgttgttctgccaacagaggag

SEQ ID NO: 83518 - DNA, 25 bp, Canis familiaris
gcgcccgtgttaggtccataaacgg

SEQ ID NO: 83519 - DNA, 25 bp, Canis familiaris
cccctgccattaaatccacaaacag

SEQ ID NO: 83520 - DNA, 25 bp, Canis familiaris
cccctctattcaaacactattcctg

SEQ ID NO: 83521 - DNA, 25 bp, Canis familiaris
cccctattgctacagactgaacctc

SEQ ID NO: 83522 - DNA, 25 bp, Canis familiaris
cccccattgcacagatgaggaaacc

SEQ ID NO: 83523 - DNA, 25 bp, Canis familiaris
cccccattcatctgtggttcacagt

SEQ ID NO: 83524 - DNA, 25 bp, Canis familiaris
cccgccagtatctgctatcatttca

SEQ ID NO: 83525 - DNA, 25 bp, Canis familiaris
cccctagtatgatgagtcttctgca

SEQ ID NO: 83526 - DNA, 25 bp, Canis familiaris
cccctacattactctgtcatcatga

SEQ ID NO: 83527 - DNA, 25 bp, Canis familiaris
cccccagattagtgcatgtgtgtgc

SEQ ID NO: 83528 - DNA, 25 bp, Canis familiaris
cccccaaatcagttctgctctgttg

SEQ ID NO: 83529 - DNA, 25 bp, Canis familiaris
cccccgtacatatctcttgattgta

SEQ ID NO: 83530 - DNA, 25 bp, Canis familiaris
cccccaagctgtatctttattataa

SEQ ID NO: 83531 - DNA, 25 bp, Canis familiaris
cccccattgtgctcatgtttttata

SEQ ID NO: 83532 - DNA, 25 bp, Canis familiaris
ccccgcatggtgtgacattcttgtt

SEQ ID NO: 83533 - DNA, 25 bp, Canis familiaris
cccccaaatgtcctgtatcttatgt

SEQ ID NO: 83534 - DNA, 25 bp, Canis familiaris
cccccgagcacacatggacagtgag

SEQ ID NO: 83535 - DNA, 25 bp, Canis familiaris
ccccctgccacactatgaaagggag

SEQ ID NO: 83536 - DNA, 25 bp, Canis familiaris
cccccgccatcactgagaatatgtt

SEQ ID NO: 83537 - DNA, 25 bp, Canis familiaris
ccccggcagctgtctggaagatttc

SEQ ID NO: 83538 - DNA, 25 bp, Canis familiaris
ccccggcactgttcagactgtagcc

SEQ ID NO: 83539 - DNA, 25 bp, Canis familiaris
cccctcgcactgtatcaagcgtcag

SEQ ID NO: 83540 - DNA, 25 bp, Canis familiaris
ccccctgcacaggacagtggctgag

SEQ ID NO: 83541 - DNA, 25 bp, Canis familiaris
cccccatcatggaccatgctcgtga

SEQ ID NO: 83542 - DNA, 25 bp, Canis familiaris
ccccgacacgtgcatgcatgtgtat

SEQ ID NO: 83543 - DNA, 25 bp, Canis familiaris
ccccgataccagctgtcagttttgt

SEQ ID NO: 83544 - DNA, 25 bp, Canis familiaris
cccctttgtcagctctgagctttgc

SEQ ID NO: 83545 - DNA, 25 bp, Canis familiaris
ccccttaagctgccttggtgattgc

SEQ ID NO: 83546 - DNA, 25 bp, Canis familiaris
ccccttaatcttggtggtgtcagtg

SEQ ID NO: 83547 - DNA, 25 bp, Canis familiaris
ccccgtcacattgatctgcggtcgt

SEQ ID NO: 83548 - DNA, 25 bp, Canis familiaris
cccctgtctataacctggagtgtgt

SEQ ID NO: 83549 - DNA, 25 bp, Canis familiaris
cccctgtgaagaaactgtatcgtgc

SEQ ID NO: 83550 - DNA, 25 bp, Canis familiaris
cccctgccagagaagtccttcgatg

SEQ ID NO: 83551 - DNA, 25 bp, Canis familiaris
cccctggcaagcaatggcgtaccag

SEQ ID NO: 83552 - DNA, 25 bp, Canis familiaris
cccccatgccacatgactatgacca

SEQ ID NO: 83553 - DNA, 25 bp, Canis familiaris
ccccatcatgcctgaattcagtccc

SEQ ID NO: 83554 - DNA, 25 bp, Canis familiaris
ccccatgctgccaggttgtggctac

SEQ ID NO: 83555 - DNA, 25 bp, Canis familiaris
cccctcgtgttggttgggcacacgg

SEQ ID NO: 83556 - DNA, 25 bp, Canis familiaris
ccccacgtggatgtcagagccacct

SEQ ID NO: 83557 - DNA, 25 bp, Canis familiaris
cccccagacgaggtcaggagcactt

SEQ ID NO: 83558 - DNA, 25 bp, Canis familiaris
cccccgaccagtgaggatgcaagcc

SEQ ID NO: 83559 - DNA, 25 bp, Canis familiaris
cccccggtcctcagattcatgaggc

SEQ ID NO: 83560 - DNA, 25 bp, Canis familiaris
ccccacggctgcttcaggaataaac

SEQ ID NO: 83561 - DNA, 25 bp, Canis familiaris
ccccgcttctcttcttataatagag

SEQ ID NO: 83562 - DNA, 25 bp, Canis familiaris
cccccttctcctgatcagagataga

SEQ ID NO: 83563 - DNA, 25 bp, Canis familiaris
ccccctggcttgcaatcatgtgaag

SEQ ID NO: 83564 - DNA, 25 bp, Canis familiaris
cccccagaactgcagcatcatgtga

SEQ ID NO: 83565 - DNA, 25 bp, Canis familiaris
cccccagttcatcagcagagtgaga

SEQ ID NO: 83566 - DNA, 25 bp, Canis familiaris
ccccagtgttcatagcagcaatgtc

SEQ ID NO: 83567 - DNA, 25 bp, Canis familiaris
ccccgtctgtcttcagagcacagag

SEQ ID NO: 83568 - DNA, 25 bp, Canis familiaris
ccccggtgcacgtcgatgcacagaa

SEQ ID NO: 83569 - DNA, 25 bp, Canis familiaris
ccccgtgcccaggtgataaatactg

SEQ ID NO: 83570 - DNA, 25 bp, Canis familiaris
cccctggcgtcgagattcaagactg

SEQ ID NO: 83571 - DNA, 25 bp, Canis familiaris
ccccggcttataaatgtcaagtgtg

SEQ ID NO: 83572 - DNA, 25 bp, Canis familiaris
ccccgtcctcaactagatcgagtgg

SEQ ID NO: 83573 - DNA, 25 bp, Canis familiaris
ccccctcctcatactgatataagtt

SEQ ID NO: 83574 - DNA, 25 bp, Canis familiaris
ccccctcccttatagaagactatga

SEQ ID NO: 83575 - DNA, 25 bp, Canis familiaris
ccccccaccctgataaagagagatg

SEQ ID NO: 83576 - DNA, 25 bp, Canis familiaris
cccctcgcaaacctctcgaagaggg

SEQ ID NO: 83577 - DNA, 25 bp, Canis familiaris
cccccctatgactcttattgcaggg

SEQ ID NO: 83578 - DNA, 25 bp, Canis familiaris
cccccattacctatctcttgggagt

SEQ ID NO: 83579 - DNA, 25 bp, Canis familiaris
ccccctgtacttattgctgagtttg

SEQ ID NO: 83580 - DNA, 25 bp, Canis familiaris
ccccctgtacttatctcatgaataa

SEQ ID NO: 83581 - DNA, 25 bp, Canis familiaris
ccccactacatcttagtccaggtga

SEQ ID NO: 83582 - DNA, 25 bp, Canis familiaris
cccccagccatctttctggggctgg

SEQ ID NO: 83583 - DNA, 25 bp, Canis familiaris
ccccatggcgcaattcttggggggg

SEQ ID NO: 83584 - DNA, 25 bp, Canis familiaris
ccccgccagatcttccaggggaagg

SEQ ID NO: 83585 - DNA, 25 bp, Canis familiaris
cccccagagacagagccgggactgg

SEQ ID NO: 83586 - DNA, 25 bp, Canis familiaris
ccccccaacaggtacacaggactgg

SEQ ID NO: 83587 - DNA, 25 bp, Canis familiaris
cccccttacaggcaccagaggtgca

SEQ ID NO: 83588 - DNA, 25 bp, Canis familiaris
ccccacttaacacatcctgcaggga

SEQ ID NO: 83589 - DNA, 25 bp, Canis familiaris
ccccctttcaagatcacgcaggatg

SEQ ID NO: 83590 - DNA, 25 bp, Canis familiaris
ccccctcttcatagatgtgacctgg

SEQ ID NO: 83591 - DNA, 25 bp, Canis familiaris
cccccattgtatccatgagacgctg

SEQ ID NO: 83592 - DNA, 25 bp, Canis familiaris
cccccatcagggccagagaagtgct

SEQ ID NO: 83593 - DNA, 25 bp, Canis familiaris
cccccatctgtcctgaggaggatct

SEQ ID NO: 83594 - DNA, 25 bp, Canis familiaris
cccctgcctctccaaggaagtgcag

SEQ ID NO: 83595 - DNA, 25 bp, Canis familiaris
cccctcctgtcctgagtatgggtca

SEQ ID NO: 83596 - DNA, 25 bp, Canis familiaris
ccccgcaggtccttggttgaagtga

SEQ ID NO: 83597 - DNA, 25 bp, Canis familiaris
ccccgggatccaggaggtgaaccag

SEQ ID NO: 83598 - DNA, 25 bp, Canis familiaris
ccccgaggatccaaatgttccactc

SEQ ID NO: 83599 - DNA, 25 bp, Canis familiaris
ccgcccagaagtattgtcccggcaa

SEQ ID NO: 83600 - DNA, 25 bp, Canis familiaris
ccgcctatggggagtgtcctgggca

SEQ ID NO: 83601 - DNA, 25 bp, Canis familiaris
cccccagggtgatgtggccatgagg

SEQ ID NO: 83602 - DNA, 25 bp, Canis familiaris
ccccaaggagcccgtggctctgaag

SEQ ID NO: 83603 - DNA, 25 bp, Canis familiaris
cccccagggactcggagatcatgca

SEQ ID NO: 83604 - DNA, 25 bp, Canis familiaris
ccccgtgggactcgaagatcaagga

SEQ ID NO: 83605 - DNA, 25 bp, Canis familiaris
ccgctgggtctgtctccaaaaaagg

SEQ ID NO: 83606 - DNA, 25 bp, Canis familiaris
ccgctgggtctgtctccaaaaaagg

SEQ ID NO: 83607 - DNA, 25 bp, Canis familiaris
ccgctgtagtcttggcggactcact

SEQ ID NO: 83608 - DNA, 25 bp, Canis familiaris
ccgcgtactgcttgcaggcgagcag

SEQ ID NO: 83609 - DNA, 25 bp, Canis familiaris
ccccgaggctggggcaggcagtgtt

SEQ ID NO: 83610 - DNA, 25 bp, Canis familiaris
cccccgactgcggacaggagcgcag

SEQ ID NO: 83611 - DNA, 25 bp, Canis familiaris
cccccattctgcggagcagaggaag

SEQ ID NO: 83612 - DNA, 25 bp, Canis familiaris
cccccattcgggacatatggatacg

SEQ ID NO: 83613 - DNA, 25 bp, Canis familiaris
cccctattgggtgtcatctgtgaag

SEQ ID NO: 83614 - DNA, 25 bp, Canis familiaris
cccctgatatgccgtgtagattgtg

SEQ ID NO: 83615 - DNA, 25 bp, Canis familiaris
cccctgctcatgctttgaacaatct

SEQ ID NO: 83616 - DNA, 25 bp, Canis familiaris
ccccatctcatgtgtttaacttttc

SEQ ID NO: 83617 - DNA, 25 bp, Canis familiaris
ccccatcttagaagtgtttctttct

SEQ ID NO: 83618 - DNA, 25 bp, Canis familiaris
ccccagtgtagaggcttctgcctgc

SEQ ID NO: 83619 - DNA, 25 bp, Canis familiaris
ccccatttagattgcagtctgcttc

SEQ ID NO: 83620 - DNA, 25 bp, Canis familiaris
ccccatcttcaagcaattcttcaag

SEQ ID NO: 83621 - DNA, 25 bp, Canis familiaris
ccccactgtgacgatacgttctcta

SEQ ID NO: 83622 - DNA, 25 bp, Canis familiaris
ccccccatgacctatttatgatctt

SEQ ID NO: 83623 - DNA, 25 bp, Canis familiaris
cccctcctggagtttgtatatccag

SEQ ID NO: 83624 - DNA, 25 bp, Canis familiaris
cccccctctgagttttatcaactga

SEQ ID NO: 83625 - DNA, 25 bp, Canis familiaris
cccctctcttgtgtttaactctgaa

SEQ ID NO: 83626 - DNA, 25 bp, Canis familiaris
ccccctatcttactttgagacctga

SEQ ID NO: 83627 - DNA, 25 bp, Canis familiaris
cctgccctaatgtttttcggcctga

SEQ ID NO: 83628 - DNA, 25 bp, Canis familiaris
cccccatgatatgattttccaatct

SEQ ID NO: 83629 - DNA, 25 bp, Canis familiaris
ccagattcatttttctttccgacgt

SEQ ID NO: 83630 - DNA, 25 bp, Canis familiaris
ccgaagcaggactcgattccgggat

SEQ ID NO: 83631 - DNA, 25 bp, Canis familiaris
ccgaccggcaccggtacatcaaggg

SEQ ID NO: 83632 - DNA, 25 bp, Canis familiaris
ccgactcaacaccccaaacaaagag

SEQ ID NO: 83633 - DNA, 25 bp, Canis familiaris
cccctcccactctgagacaaaagaa

SEQ ID NO: 83634 - DNA, 25 bp, Canis familiaris
ccgcctccaactctaacaataaaat

SEQ ID NO: 83635 - DNA, 25 bp, Canis familiaris
ccccagccaacccgaaaaatgacag

SEQ ID NO: 83636 - DNA, 25 bp, Canis familiaris
ccccacctacaccgaagctgaaggg

SEQ ID NO: 83637 - DNA, 25 bp, Canis familiaris
cccccctcacagggcacaggggagg

SEQ ID NO: 83638 - DNA, 25 bp, Canis familiaris
cccccgccaagtttgcaggctagat

SEQ ID NO: 83639 - DNA, 25 bp, Canis familiaris
cccccgttagattgtgagctcttat

SEQ ID NO: 83640 - DNA, 25 bp, Canis familiaris
ccccctttgtgttggactgcaaatt

SEQ ID NO: 83641 - DNA, 25 bp, Canis familiaris
ccccgcttgtgttgtgggcaacatt

SEQ ID NO: 83642 - DNA, 25 bp, Canis familiaris
cccctgaggtggctgcaggactcag

SEQ ID NO: 83643 - DNA, 25 bp, Canis familiaris
ccccgaagatggctgaacctgcagg

SEQ ID NO: 83644 - DNA, 25 bp, Canis familiaris
cccctggcagggctgacagcccagg

SEQ ID NO: 83645 - DNA, 25 bp, Canis familiaris
ccccgaagctgaggggcagctccag

SEQ ID NO: 83646 - DNA, 25 bp, Canis familiaris
ccccgcagcacggggactgtccagg

SEQ ID NO: 83647 - DNA, 25 bp, Canis familiaris
cccccgtgcgctaggacagagcacg

SEQ ID NO: 83648 - DNA, 25 bp, Canis familiaris
ccccctgtggtagatcaccaggcct

SEQ ID NO: 83649 - DNA, 25 bp, Canis familiaris
ccccacttagtagaaccagccatat

SEQ ID NO: 83650 - DNA, 25 bp, Canis familiaris
cccccggagctagaagtgcagcctg

SEQ ID NO: 83651 - DNA, 25 bp, Canis familiaris
ccccgagggcaagaaggcgccatcc

SEQ ID NO: 83652 - DNA, 25 bp, Canis familiaris
ccccggggcagagggcagctgcccc

SEQ ID NO: 83653 - DNA, 25 bp, Canis familiaris
ccccggggagctgggagctcggagg

SEQ ID NO: 83654 - DNA, 25 bp, Canis familiaris
ccccgcaggagaccggagtctggaa

SEQ ID NO: 83655 - DNA, 25 bp, Canis familiaris
ccccggcgagaaggcggctgagaaa

SEQ ID NO: 83656 - DNA, 25 bp, Canis familiaris
ccccggggaaaccagtgataatgag

SEQ ID NO: 83657 - DNA, 25 bp, Canis familiaris
ccccgtgggacttgagcacgtaata

SEQ ID NO: 83658 - DNA, 25 bp, Canis familiaris
cccccgaggagctgacggtcaagac

SEQ ID NO: 83659 - DNA, 25 bp, Canis familiaris
cccccgagaggctgacggcggagaa

SEQ ID NO: 83660 - DNA, 25 bp, Canis familiaris
ccccgagatacgagaaggcaggaac

SEQ ID NO: 83661 - DNA, 25 bp, Canis familiaris
ccccgagtacgagatagcagggaca

SEQ ID NO: 83662 - DNA, 25 bp, Canis familiaris
ccccatggttctggaaagggtgaat

SEQ ID NO: 83663 - DNA, 25 bp, Canis familiaris
ccccagtttgtaaaagctcctcaga

SEQ ID NO: 83664 - DNA, 25 bp, Canis familiaris
cccccgatttcactagactacataa

SEQ ID NO: 83665 - DNA, 25 bp, Canis familiaris
ccccctgcttatttaattacaggat

SEQ ID NO: 83666 - DNA, 25 bp, Canis familiaris
ccccttgtctcatttgtttcgagga

SEQ ID NO: 83667 - DNA, 25 bp, Canis familiaris
ccccatatcttctgttttctgaggc

SEQ ID NO: 83668 - DNA, 25 bp, Canis familiaris
ccccatgtttgctgcttgttgcagg

SEQ ID NO: 83669 - DNA, 25 bp, Canis familiaris
cccctttttctggtcattgagctat

SEQ ID NO: 83670 - DNA, 25 bp, Canis familiaris
cccctgtgtcttagccacatgagag

SEQ ID NO: 83671 - DNA, 25 bp, Canis familiaris
cccctgttgctaagctcagccaaag

SEQ ID NO: 83672 - DNA, 25 bp, Canis familiaris
cccctcctggaattcagctcaaggt

SEQ ID NO: 83673 - DNA, 25 bp, Canis familiaris
cccctcgcgtgaggacgacgagcga

SEQ ID NO: 83674 - DNA, 25 bp, Canis familiaris
ccgcgaagcgtagacgatccagtgg

SEQ ID NO: 83675 - DNA, 25 bp, Canis familiaris
ccccctgtctcagtacaatccaggg

SEQ ID NO: 83676 - DNA, 25 bp, Canis familiaris
ccccctggtgccgacaagaaagctg

SEQ ID NO: 83677 - DNA, 25 bp, Canis familiaris
ccccccagtgccacagagaagacag

SEQ ID NO: 83678 - DNA, 25 bp, Canis familiaris
cccccgcagtacacagaggaagaga

SEQ ID NO: 83679 - DNA, 25 bp, Canis familiaris
cccccgcgtccttagagaagatgga

SEQ ID NO: 83680 - DNA, 25 bp, Canis familiaris
ccccaacttactccaggaaggaatg

SEQ ID NO: 83681 - DNA, 25 bp, Canis familiaris
cccctttctgcagccaggaaggaag

SEQ ID NO: 83682 - DNA, 25 bp, Canis familiaris
ccccctgtgctggtccaggagaggg

SEQ ID NO: 83683 - DNA, 25 bp, Canis familiaris
cccctgcatgttctcttggagagag

SEQ ID NO: 83684 - DNA, 25 bp, Canis familiaris
cccctgctgagggatctctgggagg

SEQ ID NO: 83685 - DNA, 25 bp, Canis familiaris
ccccgtgagctgactctgtgggtgg

SEQ ID NO: 83686 - DNA, 25 bp, Canis familiaris
ccccgtcagccaccgagatggggga

SEQ ID NO: 83687 - DNA, 25 bp, Canis familiaris
ccccagtcaccctgggatcgggtga

SEQ ID NO: 83688 - DNA, 25 bp, Canis familiaris
ccccgaagccgctgtcgaagaggtc

SEQ ID NO: 83689 - DNA, 25 bp, Canis familiaris
ccccgaatgggcttaagaagaggtg

SEQ ID NO: 83690 - DNA, 25 bp, Canis familiaris
ccccggtggtgctcagcaaacatga

SEQ ID NO: 83691 - DNA, 25 bp, Canis familiaris
cccctgccgtggtgaagaagcatga

SEQ ID NO: 83692 - DNA, 25 bp, Canis familiaris
ccccgccctgaattctagacatcag

SEQ ID NO: 83693 - DNA, 25 bp, Canis familiaris
ccccgtcaccagtactataatcagg

SEQ ID NO: 83694 - DNA, 25 bp, Canis familiaris
ccccccacttgttcattagattggc

SEQ ID NO: 83695 - DNA, 25 bp, Canis familiaris
ccccaccttttttctataatgcaat

SEQ ID NO: 83696 - DNA, 25 bp, Canis familiaris
ccccacacttgttttctagaatttg

SEQ ID NO: 83697 - DNA, 25 bp, Canis familiaris
ccccaccctttgcattggaacatcg

SEQ ID NO: 83698 - DNA, 25 bp, Canis familiaris
cctcccctttaggaattgacttcag

SEQ ID NO: 83699 - DNA, 25 bp, Canis familiaris
cccccctttcagggcaagaggctca

SEQ ID NO: 83700 - DNA, 25 bp, Canis familiaris
cccccccattcgggacatatggata

SEQ ID NO: 83701 - DNA, 25 bp, Canis familiaris
cccccccttcagttattttctgatg

SEQ ID NO: 83702 - DNA, 25 bp, Canis familiaris
ccccgcagcactggtgtttttattg

SEQ ID NO: 83703 - DNA, 25 bp, Canis familiaris
cccccgagcctggttatgttgtggt

SEQ ID NO: 83704 - DNA, 25 bp, Canis familiaris
ccccgctacaatgtcatcatgtttg

SEQ ID NO: 83705 - DNA, 25 bp, Canis familiaris
ccccgacaccattcatgtcatttct

SEQ ID NO: 83706 - DNA, 25 bp, Canis familiaris
ccccagcccctaagtcattgattag

SEQ ID NO: 83707 - DNA, 25 bp, Canis familiaris
ccccaagacgctaaccagtattttg

SEQ ID NO: 83708 - DNA, 25 bp, Canis familiaris
ccccagcaggccatggccaacattt

SEQ ID NO: 83709 - DNA, 25 bp, Canis familiaris
ccccgcatgcatgtgttcaaactca

SEQ ID NO: 83710 - DNA, 25 bp, Canis familiaris
ccccgatcatcaatggtctacacag

SEQ ID NO: 83711 - DNA, 25 bp, Canis familiaris
cccctatactcggtctatctaggtt

SEQ ID NO: 83712 - DNA, 25 bp, Canis familiaris
cccctatctcctgacttgtgggttt

SEQ ID NO: 83713 - DNA, 25 bp, Canis familiaris
ccccatgccttcacacatttggtgt

SEQ ID NO: 83714 - DNA, 25 bp, Canis familiaris
ccccgcctctgcacgatgagagaat

SEQ ID NO: 83715 - DNA, 25 bp, Canis familiaris
ccccgcgtatcacatggcaagaatg

SEQ ID NO: 83716 - DNA, 25 bp, Canis familiaris
ccccgcctacaggaggcactgatta

SEQ ID NO: 83717 - DNA, 25 bp, Canis familiaris
ccccgttctcatgagctggcaatta

SEQ ID NO: 83718 - DNA, 25 bp, Canis familiaris
ccccgtttctgtggtatgcactata

SEQ ID NO: 83719 - DNA, 25 bp, Canis familiaris
ccccgtgttctttggagcataccag

SEQ ID NO: 83720 - DNA, 25 bp, Canis familiaris
ccccgtgctgctgaacgagtaggca

SEQ ID NO: 83721 - DNA, 25 bp, Canis familiaris
ccccgtgagcgtggagctggtgggc

SEQ ID NO: 83722 - DNA, 25 bp, Canis familiaris
ccccgactgcaaggagctgtgtatg

SEQ ID NO: 83723 - DNA, 25 bp, Canis familiaris
cccctgatccatcagaggttgatct

SEQ ID NO: 83724 - DNA, 25 bp, Canis familiaris
ccccatggccagtcaggcaggtttg

SEQ ID NO: 83725 - DNA, 25 bp, Canis familiaris
cccctagagttctagcgtctcttgg

SEQ ID NO: 83726 - DNA, 25 bp, Canis familiaris
ccccattagctttcagttccgtagc

SEQ ID NO: 83727 - DNA, 25 bp, Canis familiaris
cccctggatgtttccttccagagag

SEQ ID NO: 83728 - DNA, 25 bp, Canis familiaris
cccctggagactgctccagccagag

SEQ ID NO: 83729 - DNA, 25 bp, Canis familiaris
ccccttgagatcagtgctccaagat

SEQ ID NO: 83730 - DNA, 25 bp, Canis familiaris
cccctgtagactttggccatcagat

SEQ ID NO: 83731 - DNA, 25 bp, Canis familiaris
cccctgtagtcctatcacaattgta

SEQ ID NO: 83732 - DNA, 25 bp, Canis familiaris
ccccgtggtcactataccattggga

SEQ ID NO: 83733 - DNA, 25 bp, Canis familiaris
ccccagtttcagcaaccactaggtt

SEQ ID NO: 83734 - DNA, 25 bp, Canis familiaris
ccccatccttagcaatgccttagct

SEQ ID NO: 83735 - DNA, 25 bp, Canis familiaris
ccccatctcattcagaatccttttt

SEQ ID NO: 83736 - DNA, 25 bp, Canis familiaris
cccctctgtctttaagccatattct

SEQ ID NO: 83737 - DNA, 25 bp, Canis familiaris
cccctcgtgacattaaccacactta

SEQ ID NO: 83738 - DNA, 25 bp, Canis familiaris
cccctaacactatcacatcacttga

SEQ ID NO: 83739 - DNA, 25 bp, Canis familiaris
cccctgaccagattaacaccattga

SEQ ID NO: 83740 - DNA, 25 bp, Canis familiaris
ccgacggcacgatgaacctcatgaa

SEQ ID NO: 83741 - DNA, 25 bp, Canis familiaris
cccctggcacgatgacctccaggag

SEQ ID NO: 83742 - DNA, 25 bp, Canis familiaris
cccctctgccagagaatcccaggga

SEQ ID NO: 83743 - DNA, 25 bp, Canis familiaris
cccctgcccagactagagccaaggg

SEQ ID NO: 83744 - DNA, 25 bp, Canis familiaris
cccctgccgagccagacaggaacgg

SEQ ID NO: 83745 - DNA, 25 bp, Canis familiaris
ccccgcggacatttcagtgcaatgg

SEQ ID NO: 83746 - DNA, 25 bp, Canis familiaris
ccccagccctactcagctggatggg

SEQ ID NO: 83747 - DNA, 25 bp, Canis familiaris
cccctgaccttcttacgtgatgaag

SEQ ID NO: 83748 - DNA, 25 bp, Canis familiaris
ccccgttctggcttggctgccagaa

SEQ ID NO: 83749 - DNA, 25 bp, Canis familiaris
ccccgtgattctcatgcatgatgcc

SEQ ID NO: 83750 - DNA, 25 bp, Canis familiaris
ccccagatgttgactatctggcttc

SEQ ID NO: 83751 - DNA, 25 bp, Canis familiaris
ccgatttgttccaatcaggcttctt

SEQ ID NO: 83752 - DNA, 25 bp, Canis familiaris
cctcaaggttccagcaagttcttcc

SEQ ID NO: 83753 - DNA, 25 bp, Canis familiaris
ccccaggtgtccacagctgtagtag

SEQ ID NO: 83754 - DNA, 25 bp, Canis familiaris
ccccatggagtgcttcttctagtgc

SEQ ID NO: 83755 - DNA, 25 bp, Canis familiaris
ccccaggactcacatcttacaatgt

SEQ ID NO: 83756 - DNA, 25 bp, Canis familiaris
ccccggagtcagcatggacacagtt

SEQ ID NO: 83757 - DNA, 25 bp, Canis familiaris
ccccggaggcagctgagggcagtgc

SEQ ID NO: 83758 - DNA, 25 bp, Canis familiaris
ccccggacagcttggaaggcgtgtg

SEQ ID NO: 83759 - DNA, 25 bp, Canis familiaris
ccccggcacacacggaaggtgttct

SEQ ID NO: 83760 - DNA, 25 bp, Canis familiaris
ccccgacacccgcaagagagtgcgt

SEQ ID NO: 83761 - DNA, 25 bp, Canis familiaris
cccctgagccccgagaacaaaggtg

SEQ ID NO: 83762 - DNA, 25 bp, Canis familiaris
cccctgagccccgagaacaaaggtg

SEQ ID NO: 83763 - DNA, 25 bp, Canis familiaris
cccctgagccccgagaacaaaggtg

SEQ ID NO: 83764 - DNA, 25 bp, Canis familiaris
cccctagctcgcggaacacagaagg

SEQ ID NO: 83765 - DNA, 25 bp, Canis familiaris
cccctgtgatccgggaggcagaggt

SEQ ID NO: 83766 - DNA, 25 bp, Canis familiaris
ccccttgtacgccaatgggcggtag

SEQ ID NO: 83767 - DNA, 25 bp, Canis familiaris
cccctcttcatgggaaaggtggtga

SEQ ID NO: 83768 - DNA, 25 bp, Canis familiaris
cccctccacattgccagaggtggtt

SEQ ID NO: 83769 - DNA, 25 bp, Canis familiaris
ccccttgcaattcccagattatttc

SEQ ID NO: 83770 - DNA, 25 bp, Canis familiaris
ccccagatcaatacactagttattt

SEQ ID NO: 83771 - DNA, 25 bp, Canis familiaris
ccccagataatgagccctttggcta

SEQ ID NO: 83772 - DNA, 25 bp, Canis familiaris
cccctctgaaattggcctttggtga

SEQ ID NO: 83773 - DNA, 25 bp, Canis familiaris
ccccccaaaccagcattgttgtgac

SEQ ID NO: 83774 - DNA, 25 bp, Canis familiaris
ccccccaggctggacaattcctgga

SEQ ID NO: 83775 - DNA, 25 bp, Canis familiaris
ccccccatggcgcaattcttggggg

SEQ ID NO: 83776 - DNA, 25 bp, Canis familiaris
ccccacaaagtgctcttccgggagg

SEQ ID NO: 83777 - DNA, 25 bp, Canis familiaris
ccccacgaagtctcctcaatgaggg

SEQ ID NO: 83778 - DNA, 25 bp, Canis familiaris
ccccaaagatcacgcccacaattgg

SEQ ID NO: 83779 - DNA, 25 bp, Canis familiaris
ccccaagaacacgcacatcgtggtg

SEQ ID NO: 83780 - DNA, 25 bp, Canis familiaris
ccccacgatcacataagcacgtggg

SEQ ID NO: 83781 - DNA, 25 bp, Canis familiaris
ccccacgttcttaatcacgtggtgg

SEQ ID NO: 83782 - DNA, 25 bp, Canis familiaris
ccacccctggttatcttgtgggaat

SEQ ID NO: 83783 - DNA, 25 bp, Canis familiaris
tgtaccacgaggagttcctggttaa

SEQ ID NO: 83784 - DNA, 25 bp, Canis familiaris
gccaccacggagagtacctggactc

SEQ ID NO: 83785 - DNA, 25 bp, Canis familiaris
ccccagctacaggcggacctgaact

SEQ ID NO: 83786 - DNA, 25 bp, Canis familiaris
ccgcaccaaagcctgacagttaact

SEQ ID NO: 83787 - DNA, 25 bp, Canis familiaris
ccccattaacctccagattcaacat

SEQ ID NO: 83788 - DNA, 25 bp, Canis familiaris
ccccaatcttcctaaacacaatgct

SEQ ID NO: 83789 - DNA, 25 bp, Canis familiaris
ccccaatgtgggcaacaatccagag

SEQ ID NO: 83790 - DNA, 25 bp, Canis familiaris
ccccacttggaggccaagatccatc

SEQ ID NO: 83791 - DNA, 25 bp, Canis familiaris
ccgctactggtacccagctaggtgc

SEQ ID NO: 83792 - DNA, 25 bp, Canis familiaris
ccgattccggatcgcaacatgggtt

SEQ ID NO: 83793 - DNA, 25 bp, Canis familiaris
gccaattcctggtttaattcctttg

SEQ ID NO: 83794 - DNA, 25 bp, Canis familiaris
ccgatttctcttttatgatttcctt

SEQ ID NO: 83795 - DNA, 25 bp, Canis familiaris
ccgtttgtttttttattgtgctgtg

SEQ ID NO: 83796 - DNA, 25 bp, Canis familiaris
ccgtttcctttcacatatgttatgt

SEQ ID NO: 83797 - DNA, 25 bp, Canis familiaris
ccttctttgttctaaatcaggtagt

SEQ ID NO: 83798 - DNA, 25 bp, Canis familiaris
cccctgttgtacgcaaaggctttct

SEQ ID NO: 83799 - DNA, 25 bp, Canis familiaris
cccctattgtcacctaagggcttct

SEQ ID NO: 83800 - DNA, 25 bp, Canis familiaris
cccctacgatcacgtatacacctat

SEQ ID NO: 83801 - DNA, 25 bp, Canis familiaris
ccccaacccagagtgaatacctatg

SEQ ID NO: 83802 - DNA, 25 bp, Canis familiaris
ccccactgtccaactaaaggctgag

SEQ ID NO: 83803 - DNA, 25 bp, Canis familiaris
ccccaatgcccaagcaagcaagcgg

SEQ ID NO: 83804 - DNA, 25 bp, Canis familiaris
cccctatccagcaacaagcacgagc

SEQ ID NO: 83805 - DNA, 25 bp, Canis familiaris
cccctgaccaatggcagagcctcaa

SEQ ID NO: 83806 - DNA, 25 bp, Canis familiaris
ccccgcacccaggagagctgaagaa

SEQ ID NO: 83807 - DNA, 25 bp, Canis familiaris
cccctgccccatagggctgaggggt

SEQ ID NO: 83808 - DNA, 25 bp, Canis familiaris
ccccatgctcccatgcagaggggcg

SEQ ID NO: 83809 - DNA, 25 bp, Canis familiaris
cccctgtccagctcaatgactgggc

SEQ ID NO: 83810 - DNA, 25 bp, Canis familiaris
ccgctatgtgccagccaagactaag

SEQ ID NO: 83811 - DNA, 25 bp, Canis familiaris
cccctgctcacaagcacgagagtaa

SEQ ID NO: 83812 - DNA, 25 bp, Canis familiaris
ccccagctcaagccctgagatatgc

SEQ ID NO: 83813 - DNA, 25 bp, Canis familiaris
ccccatgtactgccacaggacagac

SEQ ID NO: 83814 - DNA, 25 bp, Canis familiaris
ccccagaactgcacaggtcacttca

SEQ ID NO: 83815 - DNA, 25 bp, Canis familiaris
ccccgcaaccaccaggatcagttgc

SEQ ID NO: 83816 - DNA, 25 bp, Canis familiaris
ccccgaactccacagatatgcttac

SEQ ID NO: 83817 - DNA, 25 bp, Canis familiaris
ccccatgaaatcgcccaatgcaaaa

SEQ ID NO: 83818 - DNA, 25 bp, Canis familiaris
cccctaatcaccgccagaagaatat

SEQ ID NO: 83819 - DNA, 25 bp, Canis familiaris
cccctgaaagcactggccaacagaa

SEQ ID NO: 83820 - DNA, 25 bp, Canis familiaris
ccccggcaaggtggccatcagagaa

SEQ ID NO: 83821 - DNA, 25 bp, Canis familiaris
ccccgagagggtgcacacacatgac

SEQ ID NO: 83822 - DNA, 25 bp, Canis familiaris
ccccgacagcgacaagatcatctac

SEQ ID NO: 83823 - DNA, 25 bp, Canis familiaris
ccccacaggcggtcagagtcttgac

SEQ ID NO: 83824 - DNA, 25 bp, Canis familiaris
ccccatcctgggcagaattcagagg

SEQ ID NO: 83825 - DNA, 25 bp, Canis familiaris
cccctcactgtgtatagccttaatg

SEQ ID NO: 83826 - DNA, 25 bp, Canis familiaris
ccccttcattgatctcaactacatg

SEQ ID NO: 83827 - DNA, 25 bp, Canis familiaris
ccccttcattgacctcaactacatg

SEQ ID NO: 83828 - DNA, 25 bp, Canis familiaris
ccccttctggcactcagaatccata

SEQ ID NO: 83829 - DNA, 25 bp, Canis familiaris
ccccttggtgcactgaagagccatc

SEQ ID NO: 83830 - DNA, 25 bp, Canis familiaris
cccctcctctcattaaagaccaaca

SEQ ID NO: 83831 - DNA, 25 bp, Canis familiaris
cccctcctatgttaaagacgcaccg

SEQ ID NO: 83832 - DNA, 25 bp, Canis familiaris
cccctcctgctttgaaggactcatt

SEQ ID NO: 83833 - DNA, 25 bp, Canis familiaris
cccctcctctgctgatgtggaattt

SEQ ID NO: 83834 - DNA, 25 bp, Canis familiaris
ccccagacctgctgagtcagaatct

SEQ ID NO: 83835 - DNA, 25 bp, Canis familiaris
ccccaggctctttggtgcaaacctg

SEQ ID NO: 83836 - DNA, 25 bp, Canis familiaris
ccgccggactttctgcaagaagtgt

SEQ ID NO: 83837 - DNA, 25 bp, Canis familiaris
ccccaggagtttgcccaggatgtgg

SEQ ID NO: 83838 - DNA, 25 bp, Canis familiaris
ccccgagatgctgttgcccatgggg

SEQ ID NO: 83839 - DNA, 25 bp, Canis familiaris
ccccgatctgtggttgctcagatgg

SEQ ID NO: 83840 - DNA, 25 bp, Canis familiaris
ccgcatgccacgaagttccagggca

SEQ ID NO: 83841 - DNA, 25 bp, Canis familiaris
ccgcgcagcttgaacgactaaagca

SEQ ID NO: 83842 - DNA, 25 bp, Canis familiaris
ccgcgcagcttgaacgactaaagca

SEQ ID NO: 83843 - DNA, 25 bp, Canis familiaris
ccgccactatattatcgctaatcca

SEQ ID NO: 83844 - DNA, 25 bp, Canis familiaris
ccccatctggtttcctatttgcagt

SEQ ID NO: 83845 - DNA, 25 bp, Canis familiaris
ccccatctggtcagcttttgtgtca

SEQ ID NO: 83846 - DNA, 25 bp, Canis familiaris
ccccattgaagctctgtgtctttat

SEQ ID NO: 83847 - DNA, 25 bp, Canis familiaris
cccctgtgcaagtgcctgtgcaagt

SEQ ID NO: 83848 - DNA, 25 bp, Canis familiaris
ccccagtcacgaggcctgtgatact

SEQ ID NO: 83849 - DNA, 25 bp, Canis familiaris
ccccagtacttcccatggtacaaat

SEQ ID NO: 83850 - DNA, 25 bp, Canis familiaris
cccctgctacttagttggtagagca

SEQ ID NO: 83851 - DNA, 25 bp, Canis familiaris
ccccatcaacgttgttattcaggag

SEQ ID NO: 83852 - DNA, 25 bp, Canis familiaris
ccgcctaccgcaagtttgatatcga

SEQ ID NO: 83853 - DNA, 25 bp, Canis familiaris
cccctcaccagcacttagatttaga

SEQ ID NO: 83854 - DNA, 25 bp, Canis familiaris
cccctctccactcttaattatagtt

SEQ ID NO: 83855 - DNA, 25 bp, Canis familiaris
cccctcctcacttttgaattgactg

SEQ ID NO: 83856 - DNA, 25 bp, Canis familiaris
cccctccttctttatagcttagtgt

SEQ ID NO: 83857 - DNA, 25 bp, Canis familiaris
ccgccaacttcctgtggttagttat

SEQ ID NO: 83858 - DNA, 25 bp, Canis familiaris
ccccatcctttctgtgagttataat

SEQ ID NO: 83859 - DNA, 25 bp, Canis familiaris
ccccttgtttcaccatgagttctaa

SEQ ID NO: 83860 - DNA, 25 bp, Canis familiaris
ccccttccttgtccatagttatgaa

SEQ ID NO: 83861 - DNA, 25 bp, Canis familiaris
cccctgtcctcaacgcataggatat

SEQ ID NO: 83862 - DNA, 25 bp, Canis familiaris
cccctgctctcctgagatgtggaat

SEQ ID NO: 83863 - DNA, 25 bp, Canis familiaris
cccctctctctgaggagctgatcaa

SEQ ID NO: 83864 - DNA, 25 bp, Canis familiaris
cccctgcattgtcttgagtgatcag

SEQ ID NO: 83865 - DNA, 25 bp, Canis familiaris
cccctcgatgctcttagctgagtgt

SEQ ID NO: 83866 - DNA, 25 bp, Canis familiaris
cccctcgatgctcttagctgagtgt

SEQ ID NO: 83867 - DNA, 25 bp, Canis familiaris
cccctgccactgcttatgtgaggag

SEQ ID NO: 83868 - DNA, 25 bp, Canis familiaris
ccccactcactgcttgtagggaggg

SEQ ID NO: 83869 - DNA, 25 bp, Canis familiaris
ccccacagagctgctccttgggggg

SEQ ID NO: 83870 - DNA, 25 bp, Canis familiaris
ccccacagagctgctccttgggggg

SEQ ID NO: 83871 - DNA, 25 bp, Canis familiaris
ccccacagagctgctccttgggggg

SEQ ID NO: 83872 - DNA, 25 bp, Canis familiaris
ccccacagagctgctccttgggggg

SEQ ID NO: 83873 - DNA, 25 bp, Canis familiaris
ccccacagagctgctccttgggggg

SEQ ID NO: 83874 - DNA, 25 bp, Canis familiaris
ccccaagtggcccaagtggaacgtg

SEQ ID NO: 83875 - DNA, 25 bp, Canis familiaris
ccccaaccagagccaggtgaacctt

SEQ ID NO: 83876 - DNA, 25 bp, Canis familiaris
ccccaacatggacaattgaagcgct

SEQ ID NO: 83877 - DNA, 25 bp, Canis familiaris
ccccacggagatcattgctttcagt

SEQ ID NO: 83878 - DNA, 25 bp, Canis familiaris
ccgcacctgtgatcaagtcgtacag

SEQ ID NO: 83879 - DNA, 25 bp, Canis familiaris
ccgtctctgtgtacgactactacga

SEQ ID NO: 83880 - DNA, 25 bp, Canis familiaris
ccgtcatagtgtccaacttcaacta

SEQ ID NO: 83881 - DNA, 25 bp, Canis familiaris
ccgtatgatctactgaactcaacct

SEQ ID NO: 83882 - DNA, 25 bp, Canis familiaris
ccgagtttaagccacccagatctgg

SEQ ID NO: 83883 - DNA, 25 bp, Canis familiaris
cccctttgaagaccatgctgcagat

SEQ ID NO: 83884 - DNA, 25 bp, Canis familiaris
ccccttgggagtccatgatcttcat

SEQ ID NO: 83885 - DNA, 25 bp, Canis familiaris
cccctggaagagcccagtctgttga

SEQ ID NO: 83886 - DNA, 25 bp, Canis familiaris
ccccttgaagagttcagcggattga

SEQ ID NO: 83887 - DNA, 25 bp, Canis familiaris
cccctggacaggcccactggagggg

SEQ ID NO: 83888 - DNA, 25 bp, Canis familiaris
ccccatcgcagggacacacgggggc

SEQ ID NO: 83889 - DNA, 25 bp, Canis familiaris
cccctcagatggagcccagagtggg

SEQ ID NO: 83890 - DNA, 25 bp, Canis familiaris
cccctggccgttgccagagcaggga

SEQ ID NO: 83891 - DNA, 25 bp, Canis familiaris
cctccagtcctttgtccggagtaga

SEQ ID NO: 83892 - DNA, 25 bp, Canis familiaris
ccccagttttgatcccacagaagaa

SEQ ID NO: 83893 - DNA, 25 bp, Canis familiaris
ccccagacttttacaaccagcatta

SEQ ID NO: 83894 - DNA, 25 bp, Canis familiaris
ccccagatctgtttcctacagactt

SEQ ID NO: 83895 - DNA, 25 bp, Canis familiaris
ccgctaagtattacccacagacata

SEQ ID NO: 83896 - DNA, 25 bp, Canis familiaris
ccccacaggtctcactgacgaataa

SEQ ID NO: 83897 - DNA, 25 bp, Canis familiaris
ccccaaggccatcagcaaagaccac

SEQ ID NO: 83898 - DNA, 25 bp, Canis familiaris
ccccagggccacaagtaagtcaatt

SEQ ID NO: 83899 - DNA, 25 bp, Canis familiaris
ccccgtggcctcaagatggcagtca

SEQ ID NO: 83900 - DNA, 25 bp, Canis familiaris
ccccgtggtctgcaatggagagctc

SEQ ID NO: 83901 - DNA, 25 bp, Canis familiaris
ccccaggaggctgacgggtgtggtc

SEQ ID NO: 83902 - DNA, 25 bp, Canis familiaris
ccgccagggacttatcttggccggt

SEQ ID NO: 83903 - DNA, 25 bp, Canis familiaris
ccccgggcagtgtttgtggatctgg

SEQ ID NO: 83904 - DNA, 25 bp, Canis familiaris
cccctgtgttgtgttctggtcagag

SEQ ID NO: 83905 - DNA, 25 bp, Canis familiaris
cccctgttttgttctttgccagaga

SEQ ID NO: 83906 - DNA, 25 bp, Canis familiaris
cccctgatttctctttctgcaaagg

SEQ ID NO: 83907 - DNA, 25 bp, Canis familiaris
cccctgatacttcttaacacaaatg

SEQ ID NO: 83908 - DNA, 25 bp, Canis familiaris
cccctttgctgacctttattcaaag

SEQ ID NO: 83909 - DNA, 25 bp, Canis familiaris
cccctattctgaacttctttccaga

SEQ ID NO: 83910 - DNA, 25 bp, Canis familiaris
ccccttgatgagtaattctttccag

SEQ ID NO: 83911 - DNA, 25 bp, Canis familiaris
cccctgggggaaatcttgcgcacag

SEQ ID NO: 83912 - DNA, 25 bp, Canis familiaris
cccctggttggagggctactccaga

SEQ ID NO: 83913 - DNA, 25 bp, Canis familiaris
cccctggccggactggattctgggg

SEQ ID NO: 83914 - DNA, 25 bp, Canis familiaris
ccccggggtccatgaactgggagat

SEQ ID NO: 83915 - DNA, 25 bp, Canis familiaris
ccccggaggatatagccctgtgggt

SEQ ID NO: 83916 - DNA, 25 bp, Canis familiaris
ccccaggaggaaacagccccatgaa

SEQ ID NO: 83917 - DNA, 25 bp, Canis familiaris
cccctggagagcagtagctcccatc

SEQ ID NO: 83918 - DNA, 25 bp, Canis familiaris
cccctgaggagcaccctgtgctgct

SEQ ID NO: 83919 - DNA, 25 bp, Canis familiaris
cccctgaggagcaccctgtgctgct

SEQ ID NO: 83920 - DNA, 25 bp, Canis familiaris
cccctgatgctgtcccaggggctgc

SEQ ID NO: 83921 - DNA, 25 bp, Canis familiaris
cccctagctgtggctgcagggactt

SEQ ID NO: 83922 - DNA, 25 bp, Canis familiaris
cccctcagctgtcgagctggttttg

SEQ ID NO: 83923 - DNA, 25 bp, Canis familiaris
ccccaagtgacggggcttgtcatgc

SEQ ID NO: 83924 - DNA, 25 bp, Canis familiaris
ccccaaggactctgcagcgaggatg

SEQ ID NO: 83925 - DNA, 25 bp, Canis familiaris
cccctggagtcttcagcagcagagg

SEQ ID NO: 83926 - DNA, 25 bp, Canis familiaris
ccccagtattctccaagcatgacga

SEQ ID NO: 83927 - DNA, 25 bp, Canis familiaris
ccgctcagtatttgtaatgagaatg

SEQ ID NO: 83928 - DNA, 25 bp, Canis familiaris
ccgccgcagatcagctcaataaatt

SEQ ID NO: 83929 - DNA, 25 bp, Canis familiaris
cccctgcagagcatgctgactgatg

SEQ ID NO: 83930 - DNA, 25 bp, Canis familiaris
cccctgcagagcatgagatctcgag

SEQ ID NO: 83931 - DNA, 25 bp, Canis familiaris
cccctgcagctcagcagcaatggca

SEQ ID NO: 83932 - DNA, 25 bp, Canis familiaris
ccgctggacagctccagtggctagt

SEQ ID NO: 83933 - DNA, 25 bp, Canis familiaris
cctggggactaccgttggtgtcagt

SEQ ID NO: 83934 - DNA, 25 bp, Canis familiaris
cctgggaagttcctgaatttgtcca

SEQ ID NO: 83935 - DNA, 25 bp, Canis familiaris
cccctgaggcttttgtatttgtact

SEQ ID NO: 83936 - DNA, 25 bp, Canis familiaris
ccccatgccgttgtgaagtgtttct

SEQ ID NO: 83937 - DNA, 25 bp, Canis familiaris
cccctggcgttcatacagtgggcgt

SEQ ID NO: 83938 - DNA, 25 bp, Canis familiaris
cccctgggctctgatagcctgggga

SEQ ID NO: 83939 - DNA, 25 bp, Canis familiaris
cccctgtggcacataaggcacctgg

SEQ ID NO: 83940 - DNA, 25 bp, Canis familiaris
cccctgtccagcgtcaaagaactgg

SEQ ID NO: 83941 - DNA, 25 bp, Canis familiaris
cccctgcttcgcgactaagagagtg

SEQ ID NO: 83942 - DNA, 25 bp, Canis familiaris
cccctcctctgcgctcagaggaagc

SEQ ID NO: 83943 - DNA, 25 bp, Canis familiaris
cccctagccatgatgtcagggtgag

SEQ ID NO: 83944 - DNA, 25 bp, Canis familiaris
ccccttctatgagatgctggcggca

SEQ ID NO: 83945 - DNA, 25 bp, Canis familiaris
cccctcctgatgactgtgcgatgga

SEQ ID NO: 83946 - DNA, 25 bp, Canis familiaris
cccctactgagcctgagccaggagg

SEQ ID NO: 83947 - DNA, 25 bp, Canis familiaris
cccctccgtgggggcaggagtgtgc

SEQ ID NO: 83948 - DNA, 25 bp, Canis familiaris
ccccttccggagagcagggcttgca

SEQ ID NO: 83949 - DNA, 25 bp, Canis familiaris
ccccttccggagagcagggcttgca

SEQ ID NO: 83950 - DNA, 25 bp, Canis familiaris
cccctctcccggatggaggctgaga

SEQ ID NO: 83951 - DNA, 25 bp, Canis familiaris
cccctcccactcttgtagaggtgta

SEQ ID NO: 83952 - DNA, 25 bp, Canis familiaris
cccctcccaggctgtgatgtgagtg

SEQ ID NO: 83953 - DNA, 25 bp, Canis familiaris
cccctcctctggggcgagagcagtg

SEQ ID NO: 83954 - DNA, 25 bp, Canis familiaris
ccccggcaccagggcgtgatggtgc

SEQ ID NO: 83955 - DNA, 25 bp, Canis familiaris
ccccggcagccaggaggaggaggag

SEQ ID NO: 83956 - DNA, 25 bp, Canis familiaris
cccctccgcacagcaaagtggctgg

SEQ ID NO: 83957 - DNA, 25 bp, Canis familiaris
ccccacacgagatcacaagtcgtgt

SEQ ID NO: 83958 - DNA, 25 bp, Canis familiaris
ccccactgccgatgccaaatatttg

SEQ ID NO: 83959 - DNA, 25 bp, Canis familiaris
ccccaagctcgaggtctgagttctt

SEQ ID NO: 83960 - DNA, 25 bp, Canis familiaris
ccccaactgcacctttgttgacttg

SEQ ID NO: 83961 - DNA, 25 bp, Canis familiaris
ccccaactgcactgtagctttttaa

SEQ ID NO: 83962 - DNA, 25 bp, Canis familiaris
ccccttctgccatgtgagggtattg

SEQ ID NO: 83963 - DNA, 25 bp, Canis familiaris
ccccttcacctcagcaggattttga

SEQ ID NO: 83964 - DNA, 25 bp, Canis familiaris
ccccttcctccaaagagtcagttga

SEQ ID NO: 83965 - DNA, 25 bp, Canis familiaris
cccctcaccctcaatggagtattgt

SEQ ID NO: 83966 - DNA, 25 bp, Canis familiaris
cccctcaccccaggtgagtgaccac

SEQ ID NO: 83967 - DNA, 25 bp, Canis familiaris
cccctcagccagtggtggtacagac

SEQ ID NO: 83968 - DNA, 25 bp, Canis familiaris
cccctagccatggaaatgagttcat

SEQ ID NO: 83969 - DNA, 25 bp, Canis familiaris
ccccaaccaggatatgtgtgtgtct

SEQ ID NO: 83970 - DNA, 25 bp, Canis familiaris
ccgccacaacaggagggtgtttgtt

SEQ ID NO: 83971 - DNA, 25 bp, Canis familiaris
ccccaccacacaacttttcttgtgt

SEQ ID NO: 83972 - DNA, 25 bp, Canis familiaris
cctgacccaaagcttctctctttgg

SEQ ID NO: 83973 - DNA, 25 bp, Canis familiaris
ccgctccagaaacgttgattccatt

SEQ ID NO: 83974 - DNA, 25 bp, Canis familiaris
ccgcctctaagggtttgctacatgt

SEQ ID NO: 83975 - DNA, 25 bp, Canis familiaris
cccctccaagagtgtctgcatcagg

SEQ ID NO: 83976 - DNA, 25 bp, Canis familiaris
cccctcagcagccaggcagacataa

SEQ ID NO: 83977 - DNA, 25 bp, Canis familiaris
cccctggcaacactgctacatgaac

SEQ ID NO: 83978 - DNA, 25 bp, Canis familiaris
cccctgccaacatctaatcatatga

SEQ ID NO: 83979 - DNA, 25 bp, Canis familiaris
cccctgccttcacaacattatatac

SEQ ID NO: 83980 - DNA, 25 bp, Canis familiaris
ccgcactgcctgccagaaaacaaaa

SEQ ID NO: 83981 - DNA, 25 bp, Canis familiaris
cccctctctatgcaaacacatcaaa

SEQ ID NO: 83982 - DNA, 25 bp, Canis familiaris
cccctactacactgacacagcaaac

SEQ ID NO: 83983 - DNA, 25 bp, Canis familiaris
ccccagacatagcccaaagagccaa

SEQ ID NO: 83984 - DNA, 25 bp, Canis familiaris
ccccaggatgcaccctgtggatgct

SEQ ID NO: 83985 - DNA, 25 bp, Canis familiaris
ccgccaagcagcaaccatgcgtgag

SEQ ID NO: 83986 - DNA, 25 bp, Canis familiaris
cccctacgagatccagtctgtgtac

SEQ ID NO: 83987 - DNA, 25 bp, Canis familiaris
cccctgatgtgactggcaacttgga

SEQ ID NO: 83988 - DNA, 25 bp, Canis familiaris
cccctgttcacggtcagtgtggacc

SEQ ID NO: 83989 - DNA, 25 bp, Canis familiaris
ccccagttctgggatccctagagat

SEQ ID NO: 83990 - DNA, 25 bp, Canis familiaris
cccctcttctgtgaaccaagcagct

SEQ ID NO: 83991 - DNA, 25 bp, Canis familiaris
cccctcttcgatgacacaagcggtg

SEQ ID NO: 83992 - DNA, 25 bp, Canis familiaris
ccccacctgcttgaaatagcccagt

SEQ ID NO: 83993 - DNA, 25 bp, Canis familiaris
ccccaacagcttgaactaggccagg

SEQ ID NO: 83994 - DNA, 25 bp, Canis familiaris
ccccaatcatttgacattgcgccca

SEQ ID NO: 83995 - DNA, 25 bp, Canis familiaris
cccctacatttggagcctggacacg

SEQ ID NO: 83996 - DNA, 25 bp, Canis familiaris
cccctacagcttcaggcatggagcc

SEQ ID NO: 83997 - DNA, 25 bp, Canis familiaris
cccctacagcttcaggcatggagcc

SEQ ID NO: 83998 - DNA, 25 bp, Canis familiaris
cccctacagcttcaggcatggagcc

SEQ ID NO: 83999 - DNA, 25 bp, Canis familiaris
cccctacagcttcaggcatggagcc

SEQ ID NO: 84000 - DNA, 25 bp, Canis familiaris
ccgcgcttgagcaggagtatggact

SEQ ID NO: 84001 - DNA, 25 bp, Canis familiaris
ccgcccatggacgaagttgaccttg

SEQ ID NO: 84002 - DNA, 25 bp, Canis familiaris
ccgcgccatggtgaaggtgacgttc

SEQ ID NO: 84003 - DNA, 25 bp, Canis familiaris
ccgaacattttgggtggactgttct

SEQ ID NO: 84004 - DNA, 25 bp, Canis familiaris
ccgatatatgccagggggatcccct

SEQ ID NO: 84005 - DNA, 25 bp, Canis familiaris
ccaaagacatccagttggctcgccg

SEQ ID NO: 84006 - DNA, 25 bp, Canis familiaris
ccgaaacagctctagcctgttgccc

SEQ ID NO: 84007 - DNA, 25 bp, Canis familiaris
ccgacaaactcaaccaagtctccgt

SEQ ID NO: 84008 - DNA, 25 bp, Canis familiaris
ccgaggacatccacaaagactacgt

SEQ ID NO: 84009 - DNA, 25 bp, Canis familiaris
cctgggaatcccaaaggaggtcctg

SEQ ID NO: 84010 - DNA, 25 bp, Canis familiaris
ccggggacactcaacaggaacttgg

SEQ ID NO: 84011 - DNA, 25 bp, Canis familiaris
ccggggtcctgagatggatccttga

SEQ ID NO: 84012 - DNA, 25 bp, Canis familiaris
ccgggagaccgagaagacccgagtg

SEQ ID NO: 84013 - DNA, 25 bp, Canis familiaris
cctgggaggggagagggcttgggtg

SEQ ID NO: 84014 - DNA, 25 bp, Canis familiaris
cctcggcaggggtgttggggagtgg

SEQ ID NO: 84015 - DNA, 25 bp, Canis familiaris
ccccagggggggctggtatcagtgg

SEQ ID NO: 84016 - DNA, 25 bp, Canis familiaris
ccccagggctggagactttctttgg

SEQ ID NO: 84017 - DNA, 25 bp, Canis familiaris
ccccagggctggatggttcgtctgg

SEQ ID NO: 84018 - DNA, 25 bp, Canis familiaris
ccccagggcttctgttatctgctgg

SEQ ID NO: 84019 - DNA, 25 bp, Canis familiaris
ccccagaggctcctagttttgtaga

SEQ ID NO: 84020 - DNA, 25 bp, Canis familiaris
ccccaggggctgatcttttgaagaa

SEQ ID NO: 84021 - DNA, 25 bp, Canis familiaris
cctacatggggtcatcattggaaag

SEQ ID NO: 84022 - DNA, 25 bp, Canis familiaris
ccccagggctgttgtcatctagagc

SEQ ID NO: 84023 - DNA, 25 bp, Canis familiaris
ccccattggtggttcttcaacagga

SEQ ID NO: 84024 - DNA, 25 bp, Canis familiaris
cccctctctgggtttcaaagcagga

SEQ ID NO: 84025 - DNA, 25 bp, Canis familiaris
cccctatcgccgtgtgaagtcagga

SEQ ID NO: 84026 - DNA, 25 bp, Canis familiaris
ccccaccccgtcggaagaagagcag

SEQ ID NO: 84027 - DNA, 25 bp, Canis familiaris
cccctcaccccttcaatagagatat

SEQ ID NO: 84028 - DNA, 25 bp, Canis familiaris
ccccatacttacacaacgtgatatt

SEQ ID NO: 84029 - DNA, 25 bp, Canis familiaris
cccctacttctgctcaacagtggaa

SEQ ID NO: 84030 - DNA, 25 bp, Canis familiaris
ccgccattggacgttcaaatgggga

SEQ ID NO: 84031 - DNA, 25 bp, Canis familiaris
cccctcagtgacgttcagtcggagc

SEQ ID NO: 84032 - DNA, 25 bp, Canis familiaris
cccctgaggcacggggtctgaggct

SEQ ID NO: 84033 - DNA, 25 bp, Canis familiaris
ccccagaggacctctatctgggccc

SEQ ID NO: 84034 - DNA, 25 bp, Canis familiaris
ccgccgggagctcactgataggagg

SEQ ID NO: 84035 - DNA, 25 bp, Canis familiaris
ccccaaggcctgtctctgaaggagg

SEQ ID NO: 84036 - DNA, 25 bp, Canis familiaris
ccccactggtcatcttcaaaatggg

SEQ ID NO: 84037 - DNA, 25 bp, Canis familiaris
ccccacggtctacagcacgagatgg

SEQ ID NO: 84038 - DNA, 25 bp, Canis familiaris
ccccttgggctaaccagccagagga

SEQ ID NO: 84039 - DNA, 25 bp, Canis familiaris
ccccatcatggggttccaccagatg

SEQ ID NO: 84040 - DNA, 25 bp, Canis familiaris
ccgactgctgcaatagttcctccgg

SEQ ID NO: 84041 - DNA, 25 bp, Canis familiaris
ccgactagattggtcttttcgtggc

SEQ ID NO: 84042 - DNA, 25 bp, Canis familiaris
ccggctagattgggcttttcgtggc

SEQ ID NO: 84043 - DNA, 25 bp, Canis familiaris
ccgccgagaatgagctttattttgt

SEQ ID NO: 84044 - DNA, 25 bp, Canis familiaris
ccccagtcagtcatattctttcttg

SEQ ID NO: 84045 - DNA, 25 bp, Canis familiaris
ccccagcgcggaaatttgtgtttgg

SEQ ID NO: 84046 - DNA, 25 bp, Canis familiaris
ccccagctgcgtttttttatagtag

SEQ ID NO: 84047 - DNA, 25 bp, Canis familiaris
ccccagccattgggctctttattta

SEQ ID NO: 84048 - DNA, 25 bp, Canis familiaris
cccctccattgtttcttgaattaca

SEQ ID NO: 84049 - DNA, 25 bp, Canis familiaris
cccctcttttgattttggcttagca

SEQ ID NO: 84050 - DNA, 25 bp, Canis familiaris
cccctgcttgttcttgtggttgtgt

SEQ ID NO: 84051 - DNA, 25 bp, Canis familiaris
ccccatttcttgctgttgtgttgtg

SEQ ID NO: 84052 - DNA, 25 bp, Canis familiaris
ccccattacttcggtgtgtgtgtgt

SEQ ID NO: 84053 - DNA, 25 bp, Canis familiaris
ccgccattcagctcatagcttgttg

SEQ ID NO: 84054 - DNA, 25 bp, Canis familiaris
ccgcctatgagctcaaccgggaagc

SEQ ID NO: 84055 - DNA, 25 bp, Canis familiaris
ccgcctatgagctcaaccgggaagc

SEQ ID NO: 84056 - DNA, 25 bp, Canis familiaris
cccctgctgtgtgaaccgtggaaac

SEQ ID NO: 84057 - DNA, 25 bp, Canis familiaris
cccctgctttcttttgaggaccatt

SEQ ID NO: 84058 - DNA, 25 bp, Canis familiaris
cccctcttcttcttcatagtgaaat

SEQ ID NO: 84059 - DNA, 25 bp, Canis familiaris
cccctctcttatctgcatatatgag

SEQ ID NO: 84060 - DNA, 25 bp, Canis familiaris
ccgcctctcgcagtattgcaatata

SEQ ID NO: 84061 - DNA, 25 bp, Canis familiaris
ccgactcccactagtctactatgta

SEQ ID NO: 84062 - DNA, 25 bp, Canis familiaris
ccgatgtccatgttcttatcccatg

SEQ ID NO: 84063 - DNA, 25 bp, Canis familiaris
cctgtgtgagcatttcagcttccgc

SEQ ID NO: 84064 - DNA, 25 bp, Canis familiaris
ccgctcaaggctggctatttcaact

SEQ ID NO: 84065 - DNA, 25 bp, Canis familiaris
ccccagaagtaccttgtcagtcaat

SEQ ID NO: 84066 - DNA, 25 bp, Canis familiaris
ccccatgtcagtcctcttaagataa

SEQ ID NO: 84067 - DNA, 25 bp, Canis familiaris
cccctctcagacctttgtagatagt

SEQ ID NO: 84068 - DNA, 25 bp, Canis familiaris
cccctcggacctgggtgtgaagcag

SEQ ID NO: 84069 - DNA, 25 bp, Canis familiaris
ccccttgggccagtgtgggcaggag

SEQ ID NO: 84070 - DNA, 25 bp, Canis familiaris
cccctctgggaagatgtggcgtgac

SEQ ID NO: 84071 - DNA, 25 bp, Canis familiaris
ccccttcgagaagttgaggctgagg

SEQ ID NO: 84072 - DNA, 25 bp, Canis familiaris
ccccaacgagaaggtcgccaaggag

SEQ ID NO: 84073 - DNA, 25 bp, Canis familiaris
ccccagccggaagcttggcatagga

SEQ ID NO: 84074 - DNA, 25 bp, Canis familiaris
ccccagccaggttgtcaaggcacag

SEQ ID NO: 84075 - DNA, 25 bp, Canis familiaris
ccccagcagcggagacgtgcaggtg

SEQ ID NO: 84076 - DNA, 25 bp, Canis familiaris
ccccaggcaccagggcgtgatggtg

SEQ ID NO: 84077 - DNA, 25 bp, Canis familiaris
ccccaagccctagggctgcatggcc

SEQ ID NO: 84078 - DNA, 25 bp, Canis familiaris
ccccaggccatccaagggtagagca

SEQ ID NO: 84079 - DNA, 25 bp, Canis familiaris
ccccaaccccagacaggtgagacaa

SEQ ID NO: 84080 - DNA, 25 bp, Canis familiaris
ccccacctcccgaggtgtcaatgtt

SEQ ID NO: 84081 - DNA, 25 bp, Canis familiaris
ccccacgctcagcttcgtgggcaag

SEQ ID NO: 84082 - DNA, 25 bp, Canis familiaris
ccccagcctagttgctgttctagaa

SEQ ID NO: 84083 - DNA, 25 bp, Canis familiaris
ccccaaccagtggcatgttctttat

SEQ ID NO: 84084 - DNA, 25 bp, Canis familiaris
ccccaaccagagcgacctgattgag

SEQ ID NO: 84085 - DNA, 25 bp, Canis familiaris
ccccatcccaaggagactctgaggg

SEQ ID NO: 84086 - DNA, 25 bp, Canis familiaris
ccccaagcctggacatgtcctggag

SEQ ID NO: 84087 - DNA, 25 bp, Canis familiaris
ccccaagcctggacagtcctggagg

SEQ ID NO: 84088 - DNA, 25 bp, Canis familiaris
ccccaagcctggacagtcctggagg

SEQ ID NO: 84089 - DNA, 25 bp, Canis familiaris
ccccaagcctggacagtcctggagg

SEQ ID NO: 84090 - DNA, 25 bp, Canis familiaris
ccccaagcctggacagtcctggagg

SEQ ID NO: 84091 - DNA, 25 bp, Canis familiaris
ccccaagcctggacagtcctggagg

SEQ ID NO: 84092 - DNA, 25 bp, Canis familiaris
ccccaagcctggacagtcctggagg

SEQ ID NO: 84093 - DNA, 25 bp, Canis familiaris
ccccaagcctggacagtcctggagg

SEQ ID NO: 84094 - DNA, 25 bp, Canis familiaris
ccccaagcctggacagtcctggagg

SEQ ID NO: 84095 - DNA, 25 bp, Canis familiaris
ccccaagcctggacagtcctggagg

SEQ ID NO: 84096 - DNA, 25 bp, Canis familiaris
ccccaagcctggacagtcctggagg

SEQ ID NO: 84097 - DNA, 25 bp, Canis familiaris
ccccagcagtctgtttccgagggta

SEQ ID NO: 84098 - DNA, 25 bp, Canis familiaris
ccccaggcacgaaattcccagaggt

SEQ ID NO: 84099 - DNA, 25 bp, Canis familiaris
ccccagaagccagttcttccaggga

SEQ ID NO: 84100 - DNA, 25 bp, Canis familiaris
ccccagaaagagcccttgtcaggtg

SEQ ID NO: 84101 - DNA, 25 bp, Canis familiaris
ccccaggaaagccctcattgttgta

SEQ ID NO: 84102 - DNA, 25 bp, Canis familiaris
ccccaggaactgcttcctgatgtat

SEQ ID NO: 84103 - DNA, 25 bp, Canis familiaris
ccccagcctctcagttcttgaggat

SEQ ID NO: 84104 - DNA, 25 bp, Canis familiaris
ccccagcctctctaactacatggga

SEQ ID NO: 84105 - DNA, 25 bp, Canis familiaris
ccccagcgtctctaggggatgccgc

SEQ ID NO: 84106 - DNA, 25 bp, Canis familiaris
ccccagctgtctcaggcattgagga

SEQ ID NO: 84107 - DNA, 25 bp, Canis familiaris
ccgccagcagtcccgatgtggggac

SEQ ID NO: 84108 - DNA, 25 bp, Canis familiaris
ccccagcagcaagcactctgggtga

SEQ ID NO: 84109 - DNA, 25 bp, Canis familiaris
ccgcgacagagagcacttggggagc

SEQ ID NO: 84110 - DNA, 25 bp, Canis familiaris
ccgcgtgcaaggttttcgcggcaca

SEQ ID NO: 84111 - DNA, 25 bp, Canis familiaris
ccgcctgccaggacactctagcagg

SEQ ID NO: 84112 - DNA, 25 bp, Canis familiaris
ccgcctgccaggacactctagcagg

SEQ ID NO: 84113 - DNA, 25 bp, Canis familiaris
ccgcctgccaggacactctagcagg

SEQ ID NO: 84114 - DNA, 25 bp, Canis familiaris
ccgcctgccaggacactctagcagg

SEQ ID NO: 84115 - DNA, 25 bp, Canis familiaris
ccgcctgccaggacactctagcagg

SEQ ID NO: 84116 - DNA, 25 bp, Canis familiaris
ccgcctgccaggacactctagcagg

SEQ ID NO: 84117 - DNA, 25 bp, Canis familiaris
ccgcctgccaggacactctagcagg

SEQ ID NO: 84118 - DNA, 25 bp, Canis familiaris
ccgcctgccaggacactctagcagg

SEQ ID NO: 84119 - DNA, 25 bp, Canis familiaris
ccgcctgccaggacactctagcagg

SEQ ID NO: 84120 - DNA, 25 bp, Canis familiaris
ccgcctgccaggacactctagcagg

SEQ ID NO: 84121 - DNA, 25 bp, Canis familiaris
ccgcctgccaggacactctagcagg

SEQ ID NO: 84122 - DNA, 25 bp, Canis familiaris
ccgcctgccaggacactctagcagg

SEQ ID NO: 84123 - DNA, 25 bp, Canis familiaris
ccgcctgtaggctctcaggcagggc

SEQ ID NO: 84124 - DNA, 25 bp, Canis familiaris
ccccagtatgactgccgagcactga

SEQ ID NO: 84125 - DNA, 25 bp, Canis familiaris
gccgcaagatgtacaaccggccgca

SEQ ID NO: 84126 - DNA, 25 bp, Canis familiaris
ccgcaggatgatcagtccggggcgc

SEQ ID NO: 84127 - DNA, 25 bp, Canis familiaris
ccgaggtgtcacatccggatcgtga

SEQ ID NO: 84128 - DNA, 25 bp, Canis familiaris
ccccagtggaccagctgagacttga

SEQ ID NO: 84129 - DNA, 25 bp, Canis familiaris
ccccagctaaatcaagagacttact

SEQ ID NO: 84130 - DNA, 25 bp, Canis familiaris
ccccagcccaactatgcaggagtat

SEQ ID NO: 84131 - DNA, 25 bp, Canis familiaris
ccccatggagaagacggagctgatc

SEQ ID NO: 84132 - DNA, 25 bp, Canis familiaris
ccccatggcgacgaacagctggtgc

SEQ ID NO: 84133 - DNA, 25 bp, Canis familiaris
ccccatggctgaggactggctggat

SEQ ID NO: 84134 - DNA, 25 bp, Canis familiaris
ccccatacgtcaactgtcagatgat

SEQ ID NO: 84135 - DNA, 25 bp, Canis familiaris
cccctcactgccaagatgtctgtga

SEQ ID NO: 84136 - DNA, 25 bp, Canis familiaris
ccccatcacctccagatggtgctgc

SEQ ID NO: 84137 - DNA, 25 bp, Canis familiaris
ccccttcacacacctgtgtgcagtg

SEQ ID NO: 84138 - DNA, 25 bp, Canis familiaris
ccccttgccactggtgaggatgctg

SEQ ID NO: 84139 - DNA, 25 bp, Canis familiaris
ccccatctggacctgtagcatgtgg

SEQ ID NO: 84140 - DNA, 25 bp, Canis familiaris
ccccatatggccctgtgctgaggga

SEQ ID NO: 84141 - DNA, 25 bp, Canis familiaris
ccccatttgtgtctccaggatgatt

SEQ ID NO: 84142 - DNA, 25 bp, Canis familiaris
cccctttgttgctttttcatgataa

SEQ ID NO: 84143 - DNA, 25 bp, Canis familiaris
ccccatttcctgatgctttcaatac

SEQ ID NO: 84144 - DNA, 25 bp, Canis familiaris
ccccatcgtcggattcttcatatcc

SEQ ID NO: 84145 - DNA, 25 bp, Canis familiaris
ccccatcccaggaattctccaataa

SEQ ID NO: 84146 - DNA, 25 bp, Canis familiaris
ccccatcgagaggactatctccaaa

SEQ ID NO: 84147 - DNA, 25 bp, Canis familiaris
ccccataagcagtatcatctccgtt

SEQ ID NO: 84148 - DNA, 25 bp, Canis familiaris
ccgcctagcaaattattctcctatc

SEQ ID NO: 84149 - DNA, 25 bp, Canis familiaris
ccgtccggaggtatctactgacctt

SEQ ID NO: 84150 - DNA, 25 bp, Canis familiaris
ccgcccgtaaattcacagactgacc

SEQ ID NO: 84151 - DNA, 25 bp, Canis familiaris
ccccttggcagtttgctcagatcta

SEQ ID NO: 84152 - DNA, 25 bp, Canis familiaris
ccgattttgccatttgtctgtgtaa

SEQ ID NO: 84153 - DNA, 25 bp, Canis familiaris
ccgcattgttgttgggtcagttgga

SEQ ID NO: 84154 - DNA, 25 bp, Canis familiaris
ccgtggcttgttggggatttaagtg

SEQ ID NO: 84155 - DNA, 25 bp, Canis familiaris
gcggtggtctgttggggccaaaagg

SEQ ID NO: 84156 - DNA, 25 bp, Canis familiaris
gctgaacgtcttcggcgggaagcaa

SEQ ID NO: 84157 - DNA, 25 bp, Canis familiaris
ccagaggacttacggaagaatcaag

SEQ ID NO: 84158 - DNA, 25 bp, Canis familiaris
ccgtggaatctcaggaagtccagag

SEQ ID NO: 84159 - DNA, 25 bp, Canis familiaris
ccgcctggactcacagaatgcccag

SEQ ID NO: 84160 - DNA, 25 bp, Canis familiaris
ccccttgagctctgcatcagaacca

SEQ ID NO: 84161 - DNA, 25 bp, Canis familiaris
ccccatcgagcacggcatcgtcacc

SEQ ID NO: 84162 - DNA, 25 bp, Canis familiaris
ccccatctagatgcagtctgcttcc

SEQ ID NO: 84163 - DNA, 25 bp, Canis familiaris
ccccatctagatgcagtctgcttcc

SEQ ID NO: 84164 - DNA, 25 bp, Canis familiaris
ccccattcattgacattgtctctcc

SEQ ID NO: 84165 - DNA, 25 bp, Canis familiaris
ccccttcatctgagttctctggagt

SEQ ID NO: 84166 - DNA, 25 bp, Canis familiaris
ccgacttactgaatggtgctcaggg

SEQ ID NO: 84167 - DNA, 25 bp, Canis familiaris
ccgactcttctccaacgtagaggta

SEQ ID NO: 84168 - DNA, 25 bp, Canis familiaris
ccgacactaccacactttgagttca

SEQ ID NO: 84169 - DNA, 25 bp, Canis familiaris
ccggactttacttctaatgacttca

SEQ ID NO: 84170 - DNA, 25 bp, Canis familiaris
ccgcgagctgttttgacttttatta

SEQ ID NO: 84171 - DNA, 25 bp, Canis familiaris
ccgtgaaattgttgtcttttttatg

SEQ ID NO: 84172 - DNA, 25 bp, Canis familiaris
ccgtttatgtgatgtgtattccatt

SEQ ID NO: 84173 - DNA, 25 bp, Canis familiaris
ccgctaccagtgctgctgtagggct

SEQ ID NO: 84174 - DNA, 25 bp, Canis familiaris
ccgcttgcgcagcttgcgcatgtgg

SEQ ID NO: 84175 - DNA, 25 bp, Canis familiaris
ccgcttcctgcagtgtgctgagcag

SEQ ID NO: 84176 - DNA, 25 bp, Canis familiaris
ccgctgctgctcaactattgtcagt

SEQ ID NO: 84177 - DNA, 25 bp, Canis familiaris
ccgcagctgtgaacaaattgaggga

SEQ ID NO: 84178 - DNA, 25 bp, Canis familiaris
ccgcgctgcagaagcgctacggctc

SEQ ID NO: 84179 - DNA, 25 bp, Canis familiaris
ccgctgcacagagggcttcaatgct

SEQ ID NO: 84180 - DNA, 25 bp, Canis familiaris
ccgcgcagctacgtggtgctgatgc

SEQ ID NO: 84181 - DNA, 25 bp, Canis familiaris
ccgcgggacactgtgctatgtatga

SEQ ID NO: 84182 - DNA, 25 bp, Canis familiaris
gccgtttaccagctgttgtaaccca

SEQ ID NO: 84183 - DNA, 25 bp, Canis familiaris
ccagtttaactgcgtggctgacaaa

SEQ ID NO: 84184 - DNA, 25 bp, Canis familiaris
gccgtttaactcacatgccaggacg

SEQ ID NO: 84185 - DNA, 25 bp, Canis familiaris
cctgttgtaaccaaaggcctacgat

SEQ ID NO: 84186 - DNA, 25 bp, Canis familiaris
cctgtgtgtacaaaagggacttcga

SEQ ID NO: 84187 - DNA, 25 bp, Canis familiaris
ccgaggctatcccaatcggacctcg

SEQ ID NO: 84188 - DNA, 25 bp, Canis familiaris
ccgcattgcattgtattttgccccc

SEQ ID NO: 84189 - DNA, 25 bp, Canis familiaris
ccgcagagtctgctttttcctctgc

SEQ ID NO: 84190 - DNA, 25 bp, Canis familiaris
ccgcatgctaatcgctttttaccgc

SEQ ID NO: 84191 - DNA, 25 bp, Canis familiaris
ccgcatgctgataccatataactac

SEQ ID NO: 84192 - DNA, 25 bp, Canis familiaris
ccgcatctgcagccagtgaaagcca

SEQ ID NO: 84193 - DNA, 25 bp, Canis familiaris
ccgcaggcagtctgaaatccggctc

SEQ ID NO: 84194 - DNA, 25 bp, Canis familiaris
ccgaggggaagctcatcttctgctc

SEQ ID NO: 84195 - DNA, 25 bp, Canis familiaris
ccgtgctggagagcttcaaggtcag

SEQ ID NO: 84196 - DNA, 25 bp, Canis familiaris
ccgtctccaacaatccaagatgcac

SEQ ID NO: 84197 - DNA, 25 bp, Canis familiaris
ccgtctacgtctaatcagactcatc

SEQ ID NO: 84198 - DNA, 25 bp, Canis familiaris
ccccatcaagctgcgcacagagtat

SEQ ID NO: 84199 - DNA, 25 bp, Canis familiaris
ccccatcttctaggccaagaaggcg

SEQ ID NO: 84200 - DNA, 25 bp, Canis familiaris
gccctcgctttatcccaaagtagcg

SEQ ID NO: 84201 - DNA, 25 bp, Canis familiaris
ccccagctaccatgtcccaggtagc

SEQ ID NO: 84202 - DNA, 25 bp, Canis familiaris
ccccatgtacagcttcaccgagggc

SEQ ID NO: 84203 - DNA, 25 bp, Canis familiaris
ccccattgacgcagatggcgctagg

SEQ ID NO: 84204 - DNA, 25 bp, Canis familiaris
ccccagagacgctgaggaggtggac

SEQ ID NO: 84205 - DNA, 25 bp, Canis familiaris
ccccaggtcagcagagctcaggagg

SEQ ID NO: 84206 - DNA, 25 bp, Canis familiaris
ccccactgctgcacaagtgacgagg

SEQ ID NO: 84207 - DNA, 25 bp, Canis familiaris
ccgccctgcgtgactatgagacggt

SEQ ID NO: 84208 - DNA, 25 bp, Canis familiaris
ccccagctgccggtgaagatgcatg

SEQ ID NO: 84209 - DNA, 25 bp, Canis familiaris
ccccaggccctggagaggatgcagt

SEQ ID NO: 84210 - DNA, 25 bp, Canis familiaris
ccccagtccctgactcagggtgttc

SEQ ID NO: 84211 - DNA, 25 bp, Canis familiaris
ccgtcttctcgtagtatcggagttc

SEQ ID NO: 84212 - DNA, 25 bp, Canis familiaris
gacggttccgttcttgaagtgtcag

SEQ ID NO: 84213 - DNA, 25 bp, Canis familiaris
gacgggtccacgatttagaggttct

SEQ ID NO: 84214 - DNA, 25 bp, Canis familiaris
gtcctggcccacgtgtttaagggca

SEQ ID NO: 84215 - DNA, 25 bp, Canis familiaris
ccgcttgccctggcttttaggggca

SEQ ID NO: 84216 - DNA, 25 bp, Canis familiaris
ccgctttcacccattcaggggaagc

SEQ ID NO: 84217 - DNA, 25 bp, Canis familiaris
ccgttttccactctgaagatttaca

SEQ ID NO: 84218 - DNA, 25 bp, Canis familiaris
ccgtgtttccacattggaacccttg

SEQ ID NO: 84219 - DNA, 25 bp, Canis familiaris
tccgttttccaggttccaagttcat

SEQ ID NO: 84220 - DNA, 25 bp, Canis familiaris
ccggttacacgtaatccacttctgt

SEQ ID NO: 84221 - DNA, 25 bp, Canis familiaris
ccgagtttacttctggagctggcgg

SEQ ID NO: 84222 - DNA, 25 bp, Canis familiaris
ccgctggccaacaggtgggggaggg

SEQ ID NO: 84223 - DNA, 25 bp, Canis familiaris
ccgcttccaaaggggggtgctatga

SEQ ID NO: 84224 - DNA, 25 bp, Canis familiaris
ccgttccacaaaggctccaggtaag

SEQ ID NO: 84225 - DNA, 25 bp, Canis familiaris
ccgtgttccgaagattctagtaatg

SEQ ID NO: 84226 - DNA, 25 bp, Canis familiaris
ccttctcccgaacattggaagaatt

SEQ ID NO: 84227 - DNA, 25 bp, Canis familiaris
cctatccccaactttctagaagcaa

SEQ ID NO: 84228 - DNA, 25 bp, Canis familiaris
ccccaacacatagtttatttagcaa

SEQ ID NO: 84229 - DNA, 25 bp, Canis familiaris
ccccacacatcttccattttataga

SEQ ID NO: 84230 - DNA, 25 bp, Canis familiaris
ccccacatgctcatctgaactaatg

SEQ ID NO: 84231 - DNA, 25 bp, Canis familiaris
ccccacgctttggtacatgaatccc

SEQ ID NO: 84232 - DNA, 25 bp, Canis familiaris
ccccagctgcctagtgaaagacacc

SEQ ID NO: 84233 - DNA, 25 bp, Canis familiaris
ccccatccaccactggaagacaagt

SEQ ID NO: 84234 - DNA, 25 bp, Canis familiaris
ccgcagcccgttagggagacaagta

SEQ ID NO: 84235 - DNA, 25 bp, Canis familiaris
ccgagctcggttccggaatacactc

SEQ ID NO: 84236 - DNA, 25 bp, Canis familiaris
ccgagcggagatccgggtttgcctc

SEQ ID NO: 84237 - DNA, 25 bp, Canis familiaris
ccgctctggattgttgagtttgctc

SEQ ID NO: 84238 - DNA, 25 bp, Canis familiaris
ccgctctccaggtacgaaactgcac

SEQ ID NO: 84239 - DNA, 25 bp, Canis familiaris
ccgatccacggacgctgaagttagc

SEQ ID NO: 84240 - DNA, 25 bp, Canis familiaris
ccgacccagaagcaggtcgtactac

SEQ ID NO: 84241 - DNA, 25 bp, Canis familiaris
ccgccaccaacatggagaccttgta

SEQ ID NO: 84242 - DNA, 25 bp, Canis familiaris
ccgcttgtcaagaaggacctttgga

SEQ ID NO: 84243 - DNA, 25 bp, Canis familiaris
ccgtttacgcatcacacgttgtgaa

SEQ ID NO: 84244 - DNA, 25 bp, Canis familiaris
ccgttgttctgccaacagaggagta

SEQ ID NO: 84245 - DNA, 25 bp, Canis familiaris
ccgttcctttgctcagatgctgagg

SEQ ID NO: 84246 - DNA, 25 bp, Canis familiaris
ccggattctttcacagtcagggagt

SEQ ID NO: 84247 - DNA, 25 bp, Canis familiaris
ccggatggtcgtcggagtcgggtca

SEQ ID NO: 84248 - DNA, 25 bp, Canis familiaris
ccacggagccgttggaagcgggccg

SEQ ID NO: 84249 - DNA, 25 bp, Canis familiaris
ccccatcaccgtcgtgaagcagggc

SEQ ID NO: 84250 - DNA, 25 bp, Canis familiaris
ccccactcacgggtgaatgatctcc

SEQ ID NO: 84251 - DNA, 25 bp, Canis familiaris
ccgccactggggaggcaatgtcctg

SEQ ID NO: 84252 - DNA, 25 bp, Canis familiaris
ccgctactgtgggttggaatggacc

SEQ ID NO: 84253 - DNA, 25 bp, Canis familiaris
ccgagtcttggctgttgtgttttgc

SEQ ID NO: 84254 - DNA, 25 bp, Canis familiaris
ccgcagacgagttgattttgttttc

SEQ ID NO: 84255 - DNA, 25 bp, Canis familiaris
ccgctacctgtagattctgtatttt

SEQ ID NO: 84256 - DNA, 25 bp, Canis familiaris
ccgctaggttagtttgttgattcgt

SEQ ID NO: 84257 - DNA, 25 bp, Canis familiaris
ccgtaggctttgtgtcctttagctg

SEQ ID NO: 84258 - DNA, 25 bp, Canis familiaris
ccgtattgttttcacacttctggca

SEQ ID NO: 84259 - DNA, 25 bp, Canis familiaris
ccgtccttttatcatgttcctgacc

SEQ ID NO: 84260 - DNA, 25 bp, Canis familiaris
ccgtcccgttgagatgttgtctttt

SEQ ID NO: 84261 - DNA, 25 bp, Canis familiaris
ccgattccggaatagttcttttgat

SEQ ID NO: 84262 - DNA, 25 bp, Canis familiaris
ccagtccactgggtcaactttttgg

SEQ ID NO: 84263 - DNA, 25 bp, Canis familiaris
cctgtccacttgggttcaattcttg

SEQ ID NO: 84264 - DNA, 25 bp, Canis familiaris
ccgaccaatgtctgtaaagtgctct

SEQ ID NO: 84265 - DNA, 25 bp, Canis familiaris
ccgcgccaaggtttcaacagacctc

SEQ ID NO: 84266 - DNA, 25 bp, Canis familiaris
ccgccaccattaaataacaccatcc

SEQ ID NO: 84267 - DNA, 25 bp, Canis familiaris
ccgtctgtttaattacaccagcatc

SEQ ID NO: 84268 - DNA, 25 bp, Canis familiaris
ccagttgggaaaatccccgatctga

SEQ ID NO: 84269 - DNA, 25 bp, Canis familiaris
ccgctatgttgtcaaccaccttgga

SEQ ID NO: 84270 - DNA, 25 bp, Canis familiaris
ccgaatgtaggtttccaccttcaag

SEQ ID NO: 84271 - DNA, 25 bp, Canis familiaris
ccgcggttgagtgtacacctttggg

SEQ ID NO: 84272 - DNA, 25 bp, Canis familiaris
gggagaacgtgtgtcaccgttcgca

SEQ ID NO: 84273 - DNA, 25 bp, Canis familiaris
gaaaagaaggggtaccgtctcagtg

SEQ ID NO: 84274 - DNA, 25 bp, Canis familiaris
tcgaaaaaggagctccggaccggag

SEQ ID NO: 84275 - DNA, 25 bp, Canis familiaris
gcgaaaaagaggcagccggggaggg

SEQ ID NO: 84276 - DNA, 25 bp, Canis familiaris
ccccacaagaggcgcgcgggagaga

SEQ ID NO: 84277 - DNA, 25 bp, Canis familiaris
ccgctccgaagggcaggcccggagc

SEQ ID NO: 84278 - DNA, 25 bp, Canis familiaris
ccgcctttcagggaggaccgagtgg

SEQ ID NO: 84279 - DNA, 25 bp, Canis familiaris
ccgcccttcatgttggtgactaaga

SEQ ID NO: 84280 - DNA, 25 bp, Canis familiaris
ccgccctctcctttataaaatgaca

SEQ ID NO: 84281 - DNA, 25 bp, Canis familiaris
ccgctcccggattttgaaacagacg

SEQ ID NO: 84282 - DNA, 25 bp, Canis familiaris
ccgctctcccaagttgtggtaaggg

SEQ ID NO: 84283 - DNA, 25 bp, Canis familiaris
ccgctcgccacaaatatgggtactg

SEQ ID NO: 84284 - DNA, 25 bp, Canis familiaris
ccgtcatgcccagcataacgtacag

SEQ ID NO: 84285 - DNA, 25 bp, Canis familiaris
ccgcgcatggacaccgcgcggacag

SEQ ID NO: 84286 - DNA, 25 bp, Canis familiaris
ccccagtgaatacccgattggcacc

SEQ ID NO: 84287 - DNA, 25 bp, Canis familiaris
ccgccatcaaaaccgctttggctca

SEQ ID NO: 84288 - DNA, 25 bp, Canis familiaris
ccgccagggaaggcgccctggtaca

SEQ ID NO: 84289 - DNA, 25 bp, Canis familiaris
ccccaggccagatgcccaatgggaa

SEQ ID NO: 84290 - DNA, 25 bp, Canis familiaris
ccccagcgcggatctggagctggac

SEQ ID NO: 84291 - DNA, 25 bp, Canis familiaris
ccccagagcttgagccagagcttga

SEQ ID NO: 84292 - DNA, 25 bp, Canis familiaris
ccgctaagtggggccatgactatga

SEQ ID NO: 84293 - DNA, 25 bp, Canis familiaris
ccgaagaggtggacctctccgcagg

SEQ ID NO: 84294 - DNA, 25 bp, Canis familiaris
ccgaccaaggtgacaccagcacgaa

SEQ ID NO: 84295 - DNA, 25 bp, Canis familiaris
ccgcaccatggtgaacacccggaag

SEQ ID NO: 84296 - DNA, 25 bp, Canis familiaris
ccgcattctggtgccaaagcctgga

SEQ ID NO: 84297 - DNA, 25 bp, Canis familiaris
ccgcctctggctgagcccagagtgg

SEQ ID NO: 84298 - DNA, 25 bp, Canis familiaris
ccgcctggccatggagcgccaggtg

SEQ ID NO: 84299 - DNA, 25 bp, Canis familiaris
ccgcttgagccatgagcatccattg

SEQ ID NO: 84300 - DNA, 25 bp, Canis familiaris
ccgttgacactccgacaacttgtcg

SEQ ID NO: 84301 - DNA, 25 bp, Canis familiaris
ccgatctttagccagagaactttct

SEQ ID NO: 84302 - DNA, 25 bp, Canis familiaris
ccgagccttgcgccagaaaattgtc

SEQ ID NO: 84303 - DNA, 25 bp, Canis familiaris
ccgcatcgctttcagatactttctg

SEQ ID NO: 84304 - DNA, 25 bp, Canis familiaris
ccccagtgtggccagatggcctcct

SEQ ID NO: 84305 - DNA, 25 bp, Canis familiaris
ccccatgtgtgtcatggcggtcgct

SEQ ID NO: 84306 - DNA, 25 bp, Canis familiaris
ccccagtctgtgaaggccgtctggt

SEQ ID NO: 84307 - DNA, 25 bp, Canis familiaris
ccccagtttcactgcctgtcagtga

SEQ ID NO: 84308 - DNA, 25 bp, Canis familiaris
ccccagatttcagatgctcagcctg

SEQ ID NO: 84309 - DNA, 25 bp, Canis familiaris
ccgaatacttcagcatgcacacggc

SEQ ID NO: 84310 - DNA, 25 bp, Canis familiaris
ccgacttcttgattcgcacacaatc

SEQ ID NO: 84311 - DNA, 25 bp, Canis familiaris
ccccagtcatgtggcaggcaactat

SEQ ID NO: 84312 - DNA, 25 bp, Canis familiaris
ccccagagagtgtcagatgaatctt

SEQ ID NO: 84313 - DNA, 25 bp, Canis familiaris
ccccatgagcttcgctatagcatct

SEQ ID NO: 84314 - DNA, 25 bp, Canis familiaris
ccccagcacttccagatgagatttt

SEQ ID NO: 84315 - DNA, 25 bp, Canis familiaris
ccccagctcttctataagttctcac

SEQ ID NO: 84316 - DNA, 25 bp, Canis familiaris
ccgcggctctgtataaggtctccga

SEQ ID NO: 84317 - DNA, 25 bp, Canis familiaris
ccccactcgctttaagagaccacga

SEQ ID NO: 84318 - DNA, 25 bp, Canis familiaris
ccccactgtctttagggagaacaga

SEQ ID NO: 84319 - DNA, 25 bp, Canis familiaris
ccccactggctacagggacgtggag

SEQ ID NO: 84320 - DNA, 25 bp, Canis familiaris
ccccacttcatcccaggggagggtg

SEQ ID NO: 84321 - DNA, 25 bp, Canis familiaris
ccccagcctactccactaggagtgg

SEQ ID NO: 84322 - DNA, 25 bp, Canis familiaris
ccccagttgatccacttcagggtgt

SEQ ID NO: 84323 - DNA, 25 bp, Canis familiaris
ccccatgtgcttgccttagaggatt

SEQ ID NO: 84324 - DNA, 25 bp, Canis familiaris
ccccagtgctgttcacgatgtggag

SEQ ID NO: 84325 - DNA, 25 bp, Canis familiaris
ccccagcgcagctgcaagtgggacc

SEQ ID NO: 84326 - DNA, 25 bp, Canis familiaris
ccccagtcagggcagtggaggcggc

SEQ ID NO: 84327 - DNA, 25 bp, Canis familiaris
ccccagcaaggacactgagcaagag

SEQ ID NO: 84328 - DNA, 25 bp, Canis familiaris
ccccagcaaggacactgagcaagag

SEQ ID NO: 84329 - DNA, 25 bp, Canis familiaris
ccccagagaggattagcataagaga

SEQ ID NO: 84330 - DNA, 25 bp, Canis familiaris
ccccagagcctgttagtcaagacct

SEQ ID NO: 84331 - DNA, 25 bp, Canis familiaris
ccccaggcagtgtcatttcataccc

SEQ ID NO: 84332 - DNA, 25 bp, Canis familiaris
ccccagacacttttctaatctttct

SEQ ID NO: 84333 - DNA, 25 bp, Canis familiaris
ccccaaacattcttcttgcattttt

SEQ ID NO: 84334 - DNA, 25 bp, Canis familiaris
cctccaaatatttaccgtgtcttct

SEQ ID NO: 84335 - DNA, 25 bp, Canis familiaris
ccccaaacatttaacatgtctccgc

SEQ ID NO: 84336 - DNA, 25 bp, Canis familiaris
ccccacacacttgctagcattgctg

SEQ ID NO: 84337 - DNA, 25 bp, Canis familiaris
ccccagactttggcccagagcaggg

SEQ ID NO: 84338 - DNA, 25 bp, Canis familiaris
ccgccccagttgaccgcaaatgggg

SEQ ID NO: 84339 - DNA, 25 bp, Canis familiaris
ccgcccccgtgggcgaagttcatgg

SEQ ID NO: 84340 - DNA, 25 bp, Canis familiaris
ccgccccccagagagtgatggttgg

SEQ ID NO: 84341 - DNA, 25 bp, Canis familiaris
ccgtccccaaatgcttgctggtggg

SEQ ID NO: 84342 - DNA, 25 bp, Canis familiaris
ccgccactctttatctgtgtttggg

SEQ ID NO: 84343 - DNA, 25 bp, Canis familiaris
ccccaccgatccaatctgttatgtg

SEQ ID NO: 84344 - DNA, 25 bp, Canis familiaris
ccccaatctgccctacttaattgat

SEQ ID NO: 84345 - DNA, 25 bp, Canis familiaris
ccccaagtcccgtatattatgtgtc

SEQ ID NO: 84346 - DNA, 25 bp, Canis familiaris
ccccacagtccactgacaagtcttg

SEQ ID NO: 84347 - DNA, 25 bp, Canis familiaris
ccccacacacgagtgaatacctatg

SEQ ID NO: 84348 - DNA, 25 bp, Canis familiaris
ccccacaactttcatcagcacaagt

SEQ ID NO: 84349 - DNA, 25 bp, Canis familiaris
ccccaataccatgctgacaacaagt

SEQ ID NO: 84350 - DNA, 25 bp, Canis familiaris
ccccagaaccacaaatcctgcaagt

SEQ ID NO: 84351 - DNA, 25 bp, Canis familiaris
ccccagaactcccaatttggcagct

SEQ ID NO: 84352 - DNA, 25 bp, Canis familiaris
ccccagacgctggccaatagggacc

SEQ ID NO: 84353 - DNA, 25 bp, Canis familiaris
cctccaggccctgagaagactacgc

SEQ ID NO: 84354 - DNA, 25 bp, Canis familiaris
ccgccgccacaagagaagactcaca

SEQ ID NO: 84355 - DNA, 25 bp, Canis familiaris
ccgccagtccagacacaggacacgt

SEQ ID NO: 84356 - DNA, 25 bp, Canis familiaris
ccccagtcacagattgatgaactat

SEQ ID NO: 84357 - DNA, 25 bp, Canis familiaris
ccccagtccagcataggcgaaacca

SEQ ID NO: 84358 - DNA, 25 bp, Canis familiaris
ccccagtccctaaagcagagagcac

SEQ ID NO: 84359 - DNA, 25 bp, Canis familiaris
ccgccaggagctcaagcagcgggcc

SEQ ID NO: 84360 - DNA, 25 bp, Canis familiaris
ccgcgcagaaggccgaggtgcggcg

SEQ ID NO: 84361 - DNA, 25 bp, Canis familiaris
ccgcatcatgtcagccaaggacgag

SEQ ID NO: 84362 - DNA, 25 bp, Canis familiaris
ccgacatgctgccagctcagtggac

SEQ ID NO: 84363 - DNA, 25 bp, Canis familiaris
ccgccagctggagcagtggactttt

SEQ ID NO: 84364 - DNA, 25 bp, Canis familiaris
ccgtgcacggaaaatacagcgtttc

SEQ ID NO: 84365 - DNA, 25 bp, Canis familiaris
ccgagcacggattttccacggtgaa

SEQ ID NO: 84366 - DNA, 25 bp, Canis familiaris
ccgcaggtggctgttctatctggga

SEQ ID NO: 84367 - DNA, 25 bp, Canis familiaris
ccgcacagtggctgtctactcggag

SEQ ID NO: 84368 - DNA, 25 bp, Canis familiaris
ccgatcctgggacttaccctgatga

SEQ ID NO: 84369 - DNA, 25 bp, Canis familiaris
ccgacagggtgacttaccctggtca

SEQ ID NO: 84370 - DNA, 25 bp, Canis familiaris
ccgagaaggcaacattccacgaaca

SEQ ID NO: 84371 - DNA, 25 bp, Canis familiaris
ccgaaaggccaaatcaaccagcaga

SEQ ID NO: 84372 - DNA, 25 bp, Canis familiaris
ccgagagacggcaagagctcccagg

SEQ ID NO: 84373 - DNA, 25 bp, Canis familiaris
cctgagaaattgaaagtggctacct

SEQ ID NO: 84374 - DNA, 25 bp, Canis familiaris
cctaatatttcacgatggcctacca

SEQ ID NO: 84375 - DNA, 25 bp, Canis familiaris
ccgaacatgttgcttaccgcaccat

SEQ ID NO: 84376 - DNA, 25 bp, Canis familiaris
cctgaaattcattgacaccacctcc

SEQ ID NO: 84377 - DNA, 25 bp, Canis familiaris
cctaaagtcttagcatgaccctcac

SEQ ID NO: 84378 - DNA, 25 bp, Canis familiaris
ccgtaaggaaaggagcagccgccat

SEQ ID NO: 84379 - DNA, 25 bp, Canis familiaris
ccgtattcaacaaggactccgtctt

SEQ ID NO: 84380 - DNA, 25 bp, Canis familiaris
gccattattaacagtggtccccggg

SEQ ID NO: 84381 - DNA, 25 bp, Canis familiaris
cctgatttccaggaaagtcccctga

SEQ ID NO: 84382 - DNA, 25 bp, Canis familiaris
ccagattgcggagaaaggtcaccaa

SEQ ID NO: 84383 - DNA, 25 bp, Canis familiaris
ccgagtgcggaaggccggtcaggtt

SEQ ID NO: 84384 - DNA, 25 bp, Canis familiaris
ccgcattgggaccactcggtcaaga

SEQ ID NO: 84385 - DNA, 25 bp, Canis familiaris
ccgattggctctgagcccctaagag

SEQ ID NO: 84386 - DNA, 25 bp, Canis familiaris
ccgatggtctcggaggacctcgagg

SEQ ID NO: 84387 - DNA, 25 bp, Canis familiaris
ccgctgtggggctggatcacccaca

SEQ ID NO: 84388 - DNA, 25 bp, Canis familiaris
cctcggtggggtggaccctcagaag

SEQ ID NO: 84389 - DNA, 25 bp, Canis familiaris
cctcaaggtagtctatgcccttaac

SEQ ID NO: 84390 - DNA, 25 bp, Canis familiaris
cctcatgggataccctgacacttcc

SEQ ID NO: 84391 - DNA, 25 bp, Canis familiaris
ccgagggctacttcggcatgtaccg

SEQ ID NO: 84392 - DNA, 25 bp, Canis familiaris
ccgtatggaagtttgccttgaccga

SEQ ID NO: 84393 - DNA, 25 bp, Canis familiaris
ccgtaggcagagtctagtctggcac

SEQ ID NO: 84394 - DNA, 25 bp, Canis familiaris
ccgctgcacgagtttgactttgcgc

SEQ ID NO: 84395 - DNA, 25 bp, Canis familiaris
cctacagcgtgacggacttggtgtt

SEQ ID NO: 84396 - DNA, 25 bp, Canis familiaris
gcgctccgggagagtttggggtcac

SEQ ID NO: 84397 - DNA, 25 bp, Canis familiaris
ccgcgcgtgcgagagttggagtttc

SEQ ID NO: 84398 - DNA, 25 bp, Canis familiaris
ccccacacgcaggtggtgcggttcg

SEQ ID NO: 84399 - DNA, 25 bp, Canis familiaris
ccccacctgcagggtgctggatggg

SEQ ID NO: 84400 - DNA, 25 bp, Canis familiaris
ccgccaccatgagctggctggagga

SEQ ID NO: 84401 - DNA, 25 bp, Canis familiaris
ccgctacaagcacgcgtgtggcaga

SEQ ID NO: 84402 - DNA, 25 bp, Canis familiaris
ccgccatccagctggagagagccaa

SEQ ID NO: 84403 - DNA, 25 bp, Canis familiaris
ccgcctcatcaaggtggagagcgcc

SEQ ID NO: 84404 - DNA, 25 bp, Canis familiaris
ccgcacatcatcagcgcgcaagagg

SEQ ID NO: 84405 - DNA, 25 bp, Canis familiaris
ccgccttgtgggccaggaggtggca

SEQ ID NO: 84406 - DNA, 25 bp, Canis familiaris
ccgccatcccgggaggagttgagca

SEQ ID NO: 84407 - DNA, 25 bp, Canis familiaris
ccgccactcctaagcagtggtttgt

SEQ ID NO: 84408 - DNA, 25 bp, Canis familiaris
ccgccactccttagcagtgggttgt

SEQ ID NO: 84409 - DNA, 25 bp, Canis familiaris
ccccactgcacttctgatggttgtt

SEQ ID NO: 84410 - DNA, 25 bp, Canis familiaris
ccgactggccatctgtgagttttga

SEQ ID NO: 84411 - DNA, 25 bp, Canis familiaris
ccagaccaccagacctggcttttaa

SEQ ID NO: 84412 - DNA, 25 bp, Canis familiaris
ccggccagggccatggctttatggg

SEQ ID NO: 84413 - DNA, 25 bp, Canis familiaris
ccgcaccgcgtgcaaggttttcgcg

SEQ ID NO: 84414 - DNA, 25 bp, Canis familiaris
gcccccctggaacaatatttggagg

SEQ ID NO: 84415 - DNA, 25 bp, Canis familiaris
ccccaccgaggacaccagttgggtg

SEQ ID NO: 84416 - DNA, 25 bp, Canis familiaris
ccccacctgaagttcctgagagtgg

SEQ ID NO: 84417 - DNA, 25 bp, Canis familiaris
ccccaacagcaagcactcgaggagg

SEQ ID NO: 84418 - DNA, 25 bp, Canis familiaris
ccccaaggcagagcccgagggaggc

SEQ ID NO: 84419 - DNA, 25 bp, Canis familiaris
ccccaagtagggtcctcggtgagtg

SEQ ID NO: 84420 - DNA, 25 bp, Canis familiaris
ccccacattagtgtcctattccagt

SEQ ID NO: 84421 - DNA, 25 bp, Canis familiaris
ccccacattaggctccatgctgagc

SEQ ID NO: 84422 - DNA, 25 bp, Canis familiaris
ccccaagtgtggctacatctagagt

SEQ ID NO: 84423 - DNA, 25 bp, Canis familiaris
ccccacacaggcatgtacactgaga

SEQ ID NO: 84424 - DNA, 25 bp, Canis familiaris
ccccacgactcaagctcaagcataa

SEQ ID NO: 84425 - DNA, 25 bp, Canis familiaris
ccccagctgcacagaccaaatcaaa

SEQ ID NO: 84426 - DNA, 25 bp, Canis familiaris
ccccaatgccttagccataacagtc

SEQ ID NO: 84427 - DNA, 25 bp, Canis familiaris
ccccaagcccgaggcatcaaaagcc

SEQ ID NO: 84428 - DNA, 25 bp, Canis familiaris
ccccaccatgcgggacatcaacaag

SEQ ID NO: 84429 - DNA, 25 bp, Canis familiaris
ccgcaaccactaggacccagaatgt

SEQ ID NO: 84430 - DNA, 25 bp, Canis familiaris
ccgagcagcacacagtgatccacat

SEQ ID NO: 84431 - DNA, 25 bp, Canis familiaris
ccgaggcgcatggcgaatccatata

SEQ ID NO: 84432 - DNA, 25 bp, Canis familiaris
ccgctggtgctgggcagaacttcaa

SEQ ID NO: 84433 - DNA, 25 bp, Canis familiaris
ccgctgggctggagaacatccttgg

SEQ ID NO: 84434 - DNA, 25 bp, Canis familiaris
ccgctgttcggtggtcacattttgg

SEQ ID NO: 84435 - DNA, 25 bp, Canis familiaris
ccgtgtcttcactgtaatttctgga

SEQ ID NO: 84436 - DNA, 25 bp, Canis familiaris
cctgtgtttcaaccttgacccaggg

SEQ ID NO: 84437 - DNA, 25 bp, Canis familiaris
ccgcttttcaagctcagagcccagg

SEQ ID NO: 84438 - DNA, 25 bp, Canis familiaris
ccgctttaccagcagaacgctgccc

SEQ ID NO: 84439 - DNA, 25 bp, Canis familiaris
ccggttatccacgagaacttctcag

SEQ ID NO: 84440 - DNA, 25 bp, Canis familiaris
cctcgagttccgcgtacgagtcagg

SEQ ID NO: 84441 - DNA, 25 bp, Canis familiaris
cctggtatgccctggtacaagttgg

SEQ ID NO: 84442 - DNA, 25 bp, Canis familiaris
ccgtttgctactacattcctagtta

SEQ ID NO: 84443 - DNA, 25 bp, Canis familiaris
ccgtttgctaagacatgtcctggca

SEQ ID NO: 84444 - DNA, 25 bp, Canis familiaris
ccgctgccgctatggatgatcggga

SEQ ID NO: 84445 - DNA, 25 bp, Canis familiaris
ccgccgccagcatggatgtgcgggg

SEQ ID NO: 84446 - DNA, 25 bp, Canis familiaris
ccgccgctcgcagcgagggggagtt

SEQ ID NO: 84447 - DNA, 25 bp, Canis familiaris
ccgcaccccagcacaggggaagttt

SEQ ID NO: 84448 - DNA, 25 bp, Canis familiaris
ccgccaggccgcttatggggaattt

SEQ ID NO: 84449 - DNA, 25 bp, Canis familiaris
ccccaaccaggcaatggcggcagat

SEQ ID NO: 84450 - DNA, 25 bp, Canis familiaris
ccccaaggatggatgcaggaggact

SEQ ID NO: 84451 - DNA, 25 bp, Canis familiaris
ccccaagaagggcgacagctcagct

SEQ ID NO: 84452 - DNA, 25 bp, Canis familiaris
ccccaaaagtcccagcagagctctg

SEQ ID NO: 84453 - DNA, 25 bp, Canis familiaris
ccccacacaggccaccagaatgggc

SEQ ID NO: 84454 - DNA, 25 bp, Canis familiaris
ccgccacaattccctagactgggac

SEQ ID NO: 84455 - DNA, 25 bp, Canis familiaris
ccgccacaattcgggaacaagatga

SEQ ID NO: 84456 - DNA, 25 bp, Canis familiaris
ccccacatcatgacacgggccaaga

SEQ ID NO: 84457 - DNA, 25 bp, Canis familiaris
ccccaagtacacctgtgctgcaagg

SEQ ID NO: 84458 - DNA, 25 bp, Canis familiaris
ccccacagctgggcgtgagatgaag

SEQ ID NO: 84459 - DNA, 25 bp, Canis familiaris
ccccactgtggcgcgagagagaaga

SEQ ID NO: 84460 - DNA, 25 bp, Canis familiaris
ccccaagcatccgcagaggaatgag

SEQ ID NO: 84461 - DNA, 25 bp, Canis familiaris
ccccactgccctagcagggcaagtc

SEQ ID NO: 84462 - DNA, 25 bp, Canis familiaris
ccgacacagccccgagggcaagaag

SEQ ID NO: 84463 - DNA, 25 bp, Canis familiaris
ccgcctgcaggtgctgaggtcaaaa

SEQ ID NO: 84464 - DNA, 25 bp, Canis familiaris
ccgcccagtgctgcagaagatcatg

SEQ ID NO: 84465 - DNA, 25 bp, Canis familiaris
ccgcctcagactccactgagagctg

SEQ ID NO: 84466 - DNA, 25 bp, Canis familiaris
ccgcctcatgagcctcattgagcgg

SEQ ID NO: 84467 - DNA, 25 bp, Canis familiaris
ccgagctcagagtagatgtagggat

SEQ ID NO: 84468 - DNA, 25 bp, Canis familiaris
ccgcagcagcagtactatctcaagg

SEQ ID NO: 84469 - DNA, 25 bp, Canis familiaris
ccgacgaggacgacgacagggacgt

SEQ ID NO: 84470 - DNA, 25 bp, Canis familiaris
ccgccctggggaatgaagggatcgc

SEQ ID NO: 84471 - DNA, 25 bp, Canis familiaris
ccgtcacagctgcgaccaagggacg

SEQ ID NO: 84472 - DNA, 25 bp, Canis familiaris
ccgacaaggtggccacacagaggtc

SEQ ID NO: 84473 - DNA, 25 bp, Canis familiaris
ccccacagtgggcccagcagagggc

SEQ ID NO: 84474 - DNA, 25 bp, Canis familiaris
ccgccagagctggggtcgcaagaag

SEQ ID NO: 84475 - DNA, 25 bp, Canis familiaris
ccgcgggagggtccgaagcagagtc

SEQ ID NO: 84476 - DNA, 25 bp, Canis familiaris
ccgcggagagaggctgggcatcaag

SEQ ID NO: 84477 - DNA, 25 bp, Canis familiaris
ccgcatcaacgggtgtgccatccag

SEQ ID NO: 84478 - DNA, 25 bp, Canis familiaris
ccgcatcaacggacatgtggccgcc

SEQ ID NO: 84479 - DNA, 25 bp, Canis familiaris
ccgagcagagcttccagggctcgcc

SEQ ID NO: 84480 - DNA, 25 bp, Canis familiaris
ccgacagagtagacagcttcatgag

SEQ ID NO: 84481 - DNA, 25 bp, Canis familiaris
ccgccaagagagtatgttcagatgc

SEQ ID NO: 84482 - DNA, 25 bp, Canis familiaris
ccgccaagagagtatttcattgctt

SEQ ID NO: 84483 - DNA, 25 bp, Canis familiaris
ccgcctcgagagaacttctcgcttc

SEQ ID NO: 84484 - DNA, 25 bp, Canis familiaris
ccccacgggtaggttctgatctagg

SEQ ID NO: 84485 - DNA, 25 bp, Canis familiaris
ccccacagtgcactagatggaaact

SEQ ID NO: 84486 - DNA, 25 bp, Canis familiaris
ccccacacctctagggtacactggg

SEQ ID NO: 84487 - DNA, 25 bp, Canis familiaris
cctctgacactctcatggtgtccct

SEQ ID NO: 84488 - DNA, 25 bp, Canis familiaris
cctcgatacacttcggtctgtagct

SEQ ID NO: 84489 - DNA, 25 bp, Canis familiaris
ccgcctgcacaggtggagttctagc

SEQ ID NO: 84490 - DNA, 25 bp, Canis familiaris
ccgcctgacaggatgagcggctcag

SEQ ID NO: 84491 - DNA, 25 bp, Canis familiaris
ccgcccacaggagctgggtcaggag

SEQ ID NO: 84492 - DNA, 25 bp, Canis familiaris
ccgccgccaaggacgggtgaggcat

SEQ ID NO: 84493 - DNA, 25 bp, Canis familiaris
ccgtcgccaaccatttgtagtttag

SEQ ID NO: 84494 - DNA, 25 bp, Canis familiaris
ccgtccctcactgcttagggtttag

SEQ ID NO: 84495 - DNA, 25 bp, Canis familiaris
ccccactccaccggtgagtgagatt

SEQ ID NO: 84496 - DNA, 25 bp, Canis familiaris
ccgcgcagttaccctgtgagggtgg

SEQ ID NO: 84497 - DNA, 25 bp, Canis familiaris
cctctgatttccagctttgggtcgg

SEQ ID NO: 84498 - DNA, 25 bp, Canis familiaris
ccgtaattgccttgttgtgggggag

SEQ ID NO: 84499 - DNA, 25 bp, Canis familiaris
ccggaatttctgacaatgatggcaa

SEQ ID NO: 84500 - DNA, 25 bp, Canis familiaris
ccggattattgctgcaactggcaaa

SEQ ID NO: 84501 - DNA, 25 bp, Canis familiaris
ccggattattgctgcaactggcaaa

SEQ ID NO: 84502 - DNA, 25 bp, Canis familiaris
ccgtgtgtttgtgatatcgccttaa

SEQ ID NO: 84503 - DNA, 25 bp, Canis familiaris
ccgctgggtcagctacatgggttac

SEQ ID NO: 84504 - DNA, 25 bp, Canis familiaris
ccgtggtacggttcatggtttggtg

SEQ ID NO: 84505 - DNA, 25 bp, Canis familiaris
ccggcagtacggtatcattccttgg

SEQ ID NO: 84506 - DNA, 25 bp, Canis familiaris
ccgccttactgtttctagtcttcgg

SEQ ID NO: 84507 - DNA, 25 bp, Canis familiaris
ccgatttcactgctgtttacttggg

SEQ ID NO: 84508 - DNA, 25 bp, Canis familiaris
ccgacacacacgcttttgaggatta

SEQ ID NO: 84509 - DNA, 25 bp, Canis familiaris
ccgcccacactcttttgtgagggga

SEQ ID NO: 84510 - DNA, 25 bp, Canis familiaris
ccccacagctctggctttgatggag

SEQ ID NO: 84511 - DNA, 25 bp, Canis familiaris
ccccaaggttctctgcatggacgag

SEQ ID NO: 84512 - DNA, 25 bp, Canis familiaris
ccccaactgtgtcaccgtgacgggg

SEQ ID NO: 84513 - DNA, 25 bp, Canis familiaris
ccccaacagagtgacggtcccagtg

SEQ ID NO: 84514 - DNA, 25 bp, Canis familiaris
ccacgaacggatgaagggaccagta

SEQ ID NO: 84515 - DNA, 25 bp, Canis familiaris
cctaacagggttgtggtccacacca

SEQ ID NO: 84516 - DNA, 25 bp, Canis familiaris
ccgaaagtgggcactggtccacctg

SEQ ID NO: 84517 - DNA, 25 bp, Canis familiaris
ccgacagtgggtaccgagtcccact

SEQ ID NO: 84518 - DNA, 25 bp, Canis familiaris
ccgttggggatcaacggaccctctg

SEQ ID NO: 84519 - DNA, 25 bp, Canis familiaris
ccgtcgtgcaagaaacaaatcccca

SEQ ID NO: 84520 - DNA, 25 bp, Canis familiaris
ccgggataagaatactggcctgaat

SEQ ID NO: 84521 - DNA, 25 bp, Canis familiaris
tcgacggattagtaggacggacaat

SEQ ID NO: 84522 - DNA, 25 bp, Canis familiaris
ccgggattgagcaggaggcgccaat

SEQ ID NO: 84523 - DNA, 25 bp, Canis familiaris
ccggcgactacgaggggctcgaaat

SEQ ID NO: 84524 - DNA, 25 bp, Canis familiaris
ccgggaaactggtcgcggattgtag

SEQ ID NO: 84525 - DNA, 25 bp, Canis familiaris
ccgcgggtgtgggacacggatttcg

SEQ ID NO: 84526 - DNA, 25 bp, Canis familiaris
ccgaggagtggggcacacgggggag

SEQ ID NO: 84527 - DNA, 25 bp, Canis familiaris
ccgtggaggagttcaccagggtgga

SEQ ID NO: 84528 - DNA, 25 bp, Canis familiaris
ccgagctgtgcggaatcaccagggg

SEQ ID NO: 84529 - DNA, 25 bp, Canis familiaris
ccgcagcgtgggattcctggaagga

SEQ ID NO: 84530 - DNA, 25 bp, Canis familiaris
ccccaatgggtgttcctcaacaaga

SEQ ID NO: 84531 - DNA, 25 bp, Canis familiaris
ccccaatactgtttcccaactatgt

SEQ ID NO: 84532 - DNA, 25 bp, Canis familiaris
ccgtgtgaacttttccagaacctat

SEQ ID NO: 84533 - DNA, 25 bp, Canis familiaris
ccgtggtcaccttgtcgaagacgtt

SEQ ID NO: 84534 - DNA, 25 bp, Canis familiaris
ccggttcagcctggctcggcaagta

SEQ ID NO: 84535 - DNA, 25 bp, Canis familiaris
ccggccccttggaggagagtcattc

SEQ ID NO: 84536 - DNA, 25 bp, Canis familiaris
ccgtccggctcgttaggagaactag

SEQ ID NO: 84537 - DNA, 25 bp, Canis familiaris
ccgggccccagattgaggagacact

SEQ ID NO: 84538 - DNA, 25 bp, Canis familiaris
ccgccgacgtcttcaaggatgaccg

SEQ ID NO: 84539 - DNA, 25 bp, Canis familiaris
ccgccgtcgcctgagggaagcgagg

SEQ ID NO: 84540 - DNA, 25 bp, Canis familiaris
ccgctacccttcgaggaactggagt

SEQ ID NO: 84541 - DNA, 25 bp, Canis familiaris
ccgcttccgcaaggaggacgagggc

SEQ ID NO: 84542 - DNA, 25 bp, Canis familiaris
ccgctttccgaaatggccgagcagt

SEQ ID NO: 84543 - DNA, 25 bp, Canis familiaris
ccgctgtgttcgcatgagttagaga

SEQ ID NO: 84544 - DNA, 25 bp, Canis familiaris
ccgcagctgttctttggttagggtg

SEQ ID NO: 84545 - DNA, 25 bp, Canis familiaris
ccgcctttctctgggtatgaaccat

SEQ ID NO: 84546 - DNA, 25 bp, Canis familiaris
ccgcgtttctcgttgatagtacact

SEQ ID NO: 84547 - DNA, 25 bp, Canis familiaris
ccgcgtcttttgttgactctagata

SEQ ID NO: 84548 - DNA, 25 bp, Canis familiaris
ccgcttcttatccctgtctaaaagc

SEQ ID NO: 84549 - DNA, 25 bp, Canis familiaris
ccgtttctgtgggtgtctatccaag

SEQ ID NO: 84550 - DNA, 25 bp, Canis familiaris
ccgggtctctggagcttacccgaag

SEQ ID NO: 84551 - DNA, 25 bp, Canis familiaris
ccgggatccaggaggtgaaccagga

SEQ ID NO: 84552 - DNA, 25 bp, Canis familiaris
ccgaggccgcggagaagaccaagga

SEQ ID NO: 84553 - DNA, 25 bp, Canis familiaris
ccgggcccgagaagaagctgccggc

SEQ ID NO: 84554 - DNA, 25 bp, Canis familiaris
ccggagtcccagatagacccgagtg

SEQ ID NO: 84555 - DNA, 25 bp, Canis familiaris
cctggaggcccaagaaggcccaact

SEQ ID NO: 84556 - DNA, 25 bp, Canis familiaris
ccggatcgcaacatgggttaaggct

SEQ ID NO: 84557 - DNA, 25 bp, Canis familiaris
ccgcgtacaagctggtgctgatccg

SEQ ID NO: 84558 - DNA, 25 bp, Canis familiaris
ccgagaacaaatgtgtgctatcctg

SEQ ID NO: 84559 - DNA, 25 bp, Canis familiaris
ccgaccacgcaaccgtggtcctgga

SEQ ID NO: 84560 - DNA, 25 bp, Canis familiaris
ccgacaacctgggctggttctcgga

SEQ ID NO: 84561 - DNA, 25 bp, Canis familiaris
ccgcctatccaggtgtggtttacca

SEQ ID NO: 84562 - DNA, 25 bp, Canis familiaris
cctggccatccagtttggcaactac

SEQ ID NO: 84563 - DNA, 25 bp, Canis familiaris
ccgagttggcacttctggataatga

SEQ ID NO: 84564 - DNA, 25 bp, Canis familiaris
ccgatccgacactatgtgtttcaga

SEQ ID NO: 84565 - DNA, 25 bp, Canis familiaris
ccgacctgattccaaattcatcgca

SEQ ID NO: 84566 - DNA, 25 bp, Canis familiaris
ccgacctgttgaccaatatacccag

SEQ ID NO: 84567 - DNA, 25 bp, Canis familiaris
ccgcgctctgcttggcaaatattct

SEQ ID NO: 84568 - DNA, 25 bp, Canis familiaris
ccgcagctgctctaagcaacttcgg

SEQ ID NO: 84569 - DNA, 25 bp, Canis familiaris
ccgcagctgctcttaagcaagctgc

SEQ ID NO: 84570 - DNA, 25 bp, Canis familiaris
ccgctggcaagagtagcagttgcac

SEQ ID NO: 84571 - DNA, 25 bp, Canis familiaris
ccgtggacagcctgcgtccacgacg

SEQ ID NO: 84572 - DNA, 25 bp, Canis familiaris
ccgggatcaggctgttccaagtgga

SEQ ID NO: 84573 - DNA, 25 bp, Canis familiaris
ccgacgtgtcgctgtctaaggtggc

SEQ ID NO: 84574 - DNA, 25 bp, Canis familiaris
ccgcacgggcacaagttcaagttcc

SEQ ID NO: 84575 - DNA, 25 bp, Canis familiaris
ccgctctgggccaagttgactgtgc

SEQ ID NO: 84576 - DNA, 25 bp, Canis familiaris
ccgctgctggtgttagtggtgctgg

SEQ ID NO: 84577 - DNA, 25 bp, Canis familiaris
ccgcagctggtaccaggcgggcagt

SEQ ID NO: 84578 - DNA, 25 bp, Canis familiaris
ccgcctggataccgcagctaggaat

SEQ ID NO: 84579 - DNA, 25 bp, Canis familiaris
ccgcctggataccgcagctaggaat

SEQ ID NO: 84580 - DNA, 25 bp, Canis familiaris
ccgcgtatgtctgccagcataggtt

SEQ ID NO: 84581 - DNA, 25 bp, Canis familiaris
ccgcttcatgccactgaatacgttg

SEQ ID NO: 84582 - DNA, 25 bp, Canis familiaris
ccgcttcgccaactacatcatgcgg

SEQ ID NO: 84583 - DNA, 25 bp, Canis familiaris
ccgccatcccaactataacagctgg

SEQ ID NO: 84584 - DNA, 25 bp, Canis familiaris
ccgcttcaccaggcaggacaagctg

SEQ ID NO: 84585 - DNA, 25 bp, Canis familiaris
ccgcagtacctggcagtcatcaaag

SEQ ID NO: 84586 - DNA, 25 bp, Canis familiaris
ccgcagccaccatgaacagcaaagg

SEQ ID NO: 84587 - DNA, 25 bp, Canis familiaris
ccgcgcagccgcatgaaccggatgt

SEQ ID NO: 84588 - DNA, 25 bp, Canis familiaris
ccgcgctgctgggtgggcgcggagc

SEQ ID NO: 84589 - DNA, 25 bp, Canis familiaris
ccgcctgcatggcattggtggacgc

SEQ ID NO: 84590 - DNA, 25 bp, Canis familiaris
ccgccagcagggtctggtcagaggg

SEQ ID NO: 84591 - DNA, 25 bp, Canis familiaris
ccgcccagtggctggctggaagtgg

SEQ ID NO: 84592 - DNA, 25 bp, Canis familiaris
ccgcccaggccgcgtgaagaggaag

SEQ ID NO: 84593 - DNA, 25 bp, Canis familiaris
ccgcccaggccgcgtgaagaggaag

SEQ ID NO: 84594 - DNA, 25 bp, Canis familiaris
ccgccctgggggcgaagagctgcgg

SEQ ID NO: 84595 - DNA, 25 bp, Canis familiaris
ccgccgggagggcacagcaagggag

SEQ ID NO: 84596 - DNA, 25 bp, Canis familiaris
ccgcctggggaacctcaacaagagc

SEQ ID NO: 84597 - DNA, 25 bp, Canis familiaris
ccgatcggcggacgcctaattggtt

SEQ ID NO: 84598 - DNA, 25 bp, Canis familiaris
ccgatcccaggaagcccatagaggc

SEQ ID NO: 84599 - DNA, 25 bp, Canis familiaris
ccgaccaagcagttgctgccttgtg

SEQ ID NO: 84600 - DNA, 25 bp, Canis familiaris
ccgagacctgtgatgctgtgtttgt

SEQ ID NO: 84601 - DNA, 25 bp, Canis familiaris
ccgcagtcggtcaccgagtgtgtca

SEQ ID NO: 84602 - DNA, 25 bp, Canis familiaris
ccgcatggggtaatcggagtttaca

SEQ ID NO: 84603 - DNA, 25 bp, Canis familiaris
ccgatcagtggtctcctgtgtttgg

SEQ ID NO: 84604 - DNA, 25 bp, Canis familiaris
ccgttgctggatctgctgtttgaag

SEQ ID NO: 84605 - DNA, 25 bp, Canis familiaris
ccggtcatggtcccatgctgttaaa

SEQ ID NO: 84606 - DNA, 25 bp, Canis familiaris
ccgtgctatatgtgaactgtttttg

SEQ ID NO: 84607 - DNA, 25 bp, Canis familiaris
ccgtccatcactagactctttttca

SEQ ID NO: 84608 - DNA, 25 bp, Canis familiaris
ccgcccacaccaaatattttagtct

SEQ ID NO: 84609 - DNA, 25 bp, Canis familiaris
ccgtcacacccattttatctagagt

SEQ ID NO: 84610 - DNA, 25 bp, Canis familiaris
ccgtcacaaccggatttgccagttg

SEQ ID NO: 84611 - DNA, 25 bp, Canis familiaris
cctgtccaacctgttacctgaagac

SEQ ID NO: 84612 - DNA, 25 bp, Canis familiaris
ccgtcctaagctgttctcttgggaa

SEQ ID NO: 84613 - DNA, 25 bp, Canis familiaris
gccgccccaagtgttttctggggag

SEQ ID NO: 84614 - DNA, 25 bp, Canis familiaris
cctggcccccatgtactatcggggg

SEQ ID NO: 84615 - DNA, 25 bp, Canis familiaris
ccgggtcataacttacttcacaggg

SEQ ID NO: 84616 - DNA, 25 bp, Canis familiaris
ccgtgtgtcaaacaactgtcagcta

SEQ ID NO: 84617 - DNA, 25 bp, Canis familiaris
cctggcctcgaagaattgtattcac

SEQ ID NO: 84618 - DNA, 25 bp, Canis familiaris
ccgggcctgacagatttttccagtt

SEQ ID NO: 84619 - DNA, 25 bp, Canis familiaris
ccgtgacctatagaacctggccact

SEQ ID NO: 84620 - DNA, 25 bp, Canis familiaris
ccgaccctatcaaagacctgtcaac

SEQ ID NO: 84621 - DNA, 25 bp, Canis familiaris
ccgacgaatattacaacgcggcagc

SEQ ID NO: 84622 - DNA, 25 bp, Canis familiaris
ccgtcgtcatgatcatctaccggga

SEQ ID NO: 84623 - DNA, 25 bp, Canis familiaris
ccgctccacatgtacctacgtggga

SEQ ID NO: 84624 - DNA, 25 bp, Canis familiaris
ccgcacgaaggagcagatcgtggag

SEQ ID NO: 84625 - DNA, 25 bp, Canis familiaris
ccgcggcagagggacatcacgtagg

SEQ ID NO: 84626 - DNA, 25 bp, Canis familiaris
ccgcggagcagacactcagagggac

SEQ ID NO: 84627 - DNA, 25 bp, Canis familiaris
ccgccagaagcgcttcaagtgcgag

SEQ ID NO: 84628 - DNA, 25 bp, Canis familiaris
ccgcccgagcagccaataacggagc

SEQ ID NO: 84629 - DNA, 25 bp, Canis familiaris
ccgcgcgctacacataacacgagcg

SEQ ID NO: 84630 - DNA, 25 bp, Canis familiaris
ccggcagctgaccaagaacctgatg

SEQ ID NO: 84631 - DNA, 25 bp, Canis familiaris
ccgcctggacaacgcctctgcattc

SEQ ID NO: 84632 - DNA, 25 bp, Canis familiaris
cctgtaagaccaagccgtattccaa

SEQ ID NO: 84633 - DNA, 25 bp, Canis familiaris
ccgtcagagaataggcatcggaccc

SEQ ID NO: 84634 - DNA, 25 bp, Canis familiaris
ccgtgagcaacaactgtcaggtcgc

SEQ ID NO: 84635 - DNA, 25 bp, Canis familiaris
ccgcatgagaacaagcccttggcct

SEQ ID NO: 84636 - DNA, 25 bp, Canis familiaris
ccgcagcaaactgccgtgctggcag

SEQ ID NO: 84637 - DNA, 25 bp, Canis familiaris
ccgtctaagctggttctgctggaac

SEQ ID NO: 84638 - DNA, 25 bp, Canis familiaris
ccgatcttagccgagacttctggac

SEQ ID NO: 84639 - DNA, 25 bp, Canis familiaris
ccgccattgggcggagctgggaacc

SEQ ID NO: 84640 - DNA, 25 bp, Canis familiaris
ccgcgtcgaggtggagcgcgacaac

SEQ ID NO: 84641 - DNA, 25 bp, Canis familiaris
ccgcagacagatgatggagagctaa

SEQ ID NO: 84642 - DNA, 25 bp, Canis familiaris
ccggacaggtctgggagtgacacca

SEQ ID NO: 84643 - DNA, 25 bp, Canis familiaris
ccgagaaaatcttgccgtgactgga

SEQ ID NO: 84644 - DNA, 25 bp, Canis familiaris
ccgtggaagctctgtcgagcctgga

SEQ ID NO: 84645 - DNA, 25 bp, Canis familiaris
ccgaggtcttgccagtcgacctcgt

SEQ ID NO: 84646 - DNA, 25 bp, Canis familiaris
ccgagttgttcgcaaatccatcgcc

SEQ ID NO: 84647 - DNA, 25 bp, Canis familiaris
ccgagaggtccaagtaatcgtccgc

SEQ ID NO: 84648 - DNA, 25 bp, Canis familiaris
ccgaggtcctgcagtacaagtccgg

SEQ ID NO: 84649 - DNA, 25 bp, Canis familiaris
ccgagggcccgagctgtagactcgg

SEQ ID NO: 84650 - DNA, 25 bp, Canis familiaris
ccgaggaccccaggggacacacagg

SEQ ID NO: 84651 - DNA, 25 bp, Canis familiaris
ccgggacccgcaggtggaaatcgtg

SEQ ID NO: 84652 - DNA, 25 bp, Canis familiaris
ccgggagcgccgaggatgtgagtcc

SEQ ID NO: 84653 - DNA, 25 bp, Canis familiaris
ccggcgatgcggcggcgttattccc

SEQ ID NO: 84654 - DNA, 25 bp, Canis familiaris
ccgggaggggagagtcatgaccatc

SEQ ID NO: 84655 - DNA, 25 bp, Canis familiaris
cctgaacttgggggttgctgacctc

SEQ ID NO: 84656 - DNA, 25 bp, Canis familiaris
cctgaagatggcggctgctgttgta

SEQ ID NO: 84657 - DNA, 25 bp, Canis familiaris
ccgagcaggtggggctgctgtgggc

SEQ ID NO: 84658 - DNA, 25 bp, Canis familiaris
ccgagcggggggtcggagagcagca

SEQ ID NO: 84659 - DNA, 25 bp, Canis familiaris
ccgagcggggggtcggagagcagca

SEQ ID NO: 84660 - DNA, 25 bp, Canis familiaris
ccgactccgatgtgtctctggaaga

SEQ ID NO: 84661 - DNA, 25 bp, Canis familiaris
ccgacctccagaattctctgagaaa

SEQ ID NO: 84662 - DNA, 25 bp, Canis familiaris
ccgaccccgagaacttgctgaaggc

SEQ ID NO: 84663 - DNA, 25 bp, Canis familiaris
ccgactcccttaagctgtaacaggt

SEQ ID NO: 84664 - DNA, 25 bp, Canis familiaris
ccgctcgcccttttcgtaaaggatg

SEQ ID NO: 84665 - DNA, 25 bp, Canis familiaris
ccgcctccctatctcagagagaagg

SEQ ID NO: 84666 - DNA, 25 bp, Canis familiaris
ccgctctcctcaacttgagaagcga

SEQ ID NO: 84667 - DNA, 25 bp, Canis familiaris
ccgctgtcctcatctggaacaaggt

SEQ ID NO: 84668 - DNA, 25 bp, Canis familiaris
ccgctggcccaactggaaagcaggg

SEQ ID NO: 84669 - DNA, 25 bp, Canis familiaris
ccgcgtccaagacagcagaccaggg

SEQ ID NO: 84670 - DNA, 25 bp, Canis familiaris
ccggtcgcagagtgggagccactgc

SEQ ID NO: 84671 - DNA, 25 bp, Canis familiaris
ccgcccagcgaggcggtgaccaggc

SEQ ID NO: 84672 - DNA, 25 bp, Canis familiaris
ccgcccagcgaggcggtgaccaggg

SEQ ID NO: 84673 - DNA, 25 bp, Canis familiaris
ccgcccaggacgtggtggcagggga

SEQ ID NO: 84674 - DNA, 25 bp, Canis familiaris
ccgtgaaggtcctgggtcaaggaga

SEQ ID NO: 84675 - DNA, 25 bp, Canis familiaris
ccgttagttccatggcgctccatgg

SEQ ID NO: 84676 - DNA, 25 bp, Canis familiaris
ccgtataggtcgtcggtatccatgg

SEQ ID NO: 84677 - DNA, 25 bp, Canis familiaris
ccgtattgggcgcctggtcaccagg

SEQ ID NO: 84678 - DNA, 25 bp, Canis familiaris
ccgcttctgagtcattctgtgcgcc

SEQ ID NO: 84679 - DNA, 25 bp, Canis familiaris
ccgctgtgtgtgcaacactggcttc

SEQ ID NO: 84680 - DNA, 25 bp, Canis familiaris
cctgatgctggatgagacctgtctt

SEQ ID NO: 84681 - DNA, 25 bp, Canis familiaris
ccgcagggacagacaccttttttgg

SEQ ID NO: 84682 - DNA, 25 bp, Canis familiaris
ccgcaaggagggcccctgatattta

SEQ ID NO: 84683 - DNA, 25 bp, Canis familiaris
ccgcatgggggggcatcgtatttaa

SEQ ID NO: 84684 - DNA, 25 bp, Canis familiaris
ccgtgggggcagaggaattcaaagg

SEQ ID NO: 84685 - DNA, 25 bp, Canis familiaris
ccgtggggctgcccagaacatcatc

SEQ ID NO: 84686 - DNA, 25 bp, Canis familiaris
ccgagagggtgcacacacatgactt

SEQ ID NO: 84687 - DNA, 25 bp, Canis familiaris
ccggaggagtacctagtgagcttaa

SEQ ID NO: 84688 - DNA, 25 bp, Canis familiaris
ccgtgtgaagaagtgcattggaggt

SEQ ID NO: 84689 - DNA, 25 bp, Canis familiaris
ccgtgtagatggtgcgcttgctggt

SEQ ID NO: 84690 - DNA, 25 bp, Canis familiaris
ccgtggaaggtacactctgctgtgc

SEQ ID NO: 84691 - DNA, 25 bp, Canis familiaris
ccgagcgccaggtcaagatctggtt

SEQ ID NO: 84692 - DNA, 25 bp, Canis familiaris
ccgccgcaggaccatgagatgcagg

SEQ ID NO: 84693 - DNA, 25 bp, Canis familiaris
ccgcgctgcaggacgatgacgggcg

SEQ ID NO: 84694 - DNA, 25 bp, Canis familiaris
ccgccgcaggtccagacctgctgga

SEQ ID NO: 84695 - DNA, 25 bp, Canis familiaris
ccgcccactgtcaagattccagatc

SEQ ID NO: 84696 - DNA, 25 bp, Canis familiaris
ccgtcaccctcatgacatcatagat

SEQ ID NO: 84697 - DNA, 25 bp, Canis familiaris
ccgtcaccctcatgacatcatagat

SEQ ID NO: 84698 - DNA, 25 bp, Canis familiaris
ccgtcaccctcatgacatcatagat

SEQ ID NO: 84699 - DNA, 25 bp, Canis familiaris
ccgtcaccctcatgacatcatagat

SEQ ID NO: 84700 - DNA, 25 bp, Canis familiaris
ccgtcaccctcatgacatcatagat

SEQ ID NO: 84701 - DNA, 25 bp, Canis familiaris
cctgatgagcagactctgcccatcc

SEQ ID NO: 84702 - DNA, 25 bp, Canis familiaris
ccgtaaggctcctgtgtagactttt

SEQ ID NO: 84703 - DNA, 25 bp, Canis familiaris
ccgtaaccaccagtgtgttctctag

SEQ ID NO: 84704 - DNA, 25 bp, Canis familiaris
ccgctgagccactcaggtgttctta

SEQ ID NO: 84705 - DNA, 25 bp, Canis familiaris
ccgctgcccagcactggggaatttt

SEQ ID NO: 84706 - DNA, 25 bp, Canis familiaris
ccgcatcctcaaagctggaggcaag

SEQ ID NO: 84707 - DNA, 25 bp, Canis familiaris
ccgcatcctccaagctggaggccag

SEQ ID NO: 84708 - DNA, 25 bp, Canis familiaris
ccgcccatcactatggagttcagtg

SEQ ID NO: 84709 - DNA, 25 bp, Canis familiaris
ccgccctcagcgatcgtgagaagag

SEQ ID NO: 84710 - DNA, 25 bp, Canis familiaris
ccgcggccactgacacaatcagaaa

SEQ ID NO: 84711 - DNA, 25 bp, Canis familiaris
ccgcagctcctggacacagaggaca

SEQ ID NO: 84712 - DNA, 25 bp, Canis familiaris
ccgacagccagggaagagagagcaa

SEQ ID NO: 84713 - DNA, 25 bp, Canis familiaris
ccgacatccgcacgaaggagcagat

SEQ ID NO: 84714 - DNA, 25 bp, Canis familiaris
ccgctgcacgtcaggaggctgcaga

SEQ ID NO: 84715 - DNA, 25 bp, Canis familiaris
ccgcacggtcatcgaggacatgctg

SEQ ID NO: 84716 - DNA, 25 bp, Canis familiaris
ccgcgcgggcactaatggcagcgag

SEQ ID NO: 84717 - DNA, 25 bp, Canis familiaris
ccgcgcggagcagaggggagagcaa

SEQ ID NO: 84718 - DNA, 25 bp, Canis familiaris
ccgcgagcgctacgaggacgggaag

SEQ ID NO: 84719 - DNA, 25 bp, Canis familiaris
ccttggccttcgatcctgggaaggt

SEQ ID NO: 84720 - DNA, 25 bp, Canis familiaris
cctgaggcctttataacttaattat

SEQ ID NO: 84721 - DNA, 25 bp, Canis familiaris
ccggaggccaatataacatttaaat

SEQ ID NO: 84722 - DNA, 25 bp, Canis familiaris
ccgggtgccaatgaaccaaccaata

SEQ ID NO: 84723 - DNA, 25 bp, Canis familiaris
ccgcgtgccgaacaactagaacaag

SEQ ID NO: 84724 - DNA, 25 bp, Canis familiaris
ccgcgtcgcgcaaaaatgtctataa

SEQ ID NO: 84725 - DNA, 25 bp, Canis familiaris
cctgcagttctcagactagcctgtg

SEQ ID NO: 84726 - DNA, 25 bp, Canis familiaris
ccgcttctttggaccggatgctgag

SEQ ID NO: 84727 - DNA, 25 bp, Canis familiaris
ccgctgctctctgagatctgggatg

SEQ ID NO: 84728 - DNA, 25 bp, Canis familiaris
ccgcgactcatggctgttcagagtg

SEQ ID NO: 84729 - DNA, 25 bp, Canis familiaris
ccgcaagatctggtgcttcgggcct

SEQ ID NO: 84730 - DNA, 25 bp, Canis familiaris
ccgctcaagcatcgtcgtggaggac

SEQ ID NO: 84731 - DNA, 25 bp, Canis familiaris
ccgctcacctcaaagtggaggaccc

SEQ ID NO: 84732 - DNA, 25 bp, Canis familiaris
ccgtcacctctaagtgaagacccag

SEQ ID NO: 84733 - DNA, 25 bp, Canis familiaris
ccgctacctcgagcagatacaccgg

SEQ ID NO: 84734 - DNA, 25 bp, Canis familiaris
ccgctaacggagagccacatcttgg

SEQ ID NO: 84735 - DNA, 25 bp, Canis familiaris
ccgtggagggagatgcctacagggt

SEQ ID NO: 84736 - DNA, 25 bp, Canis familiaris
ccgcggaggcgaaggccaacgaggc

SEQ ID NO: 84737 - DNA, 25 bp, Canis familiaris
ccgcgggtgctcgaggtaacgatgg

SEQ ID NO: 84738 - DNA, 25 bp, Canis familiaris
ccggcgggctgggaggagtcggaga

SEQ ID NO: 84739 - DNA, 25 bp, Canis familiaris
ccggggactcggagatcgagctggt

SEQ ID NO: 84740 - DNA, 25 bp, Canis familiaris
ccgggtgacactggggagccaggtg

SEQ ID NO: 84741 - DNA, 25 bp, Canis familiaris
ccgggtcccatcagcaggataggtt

SEQ ID NO: 84742 - DNA, 25 bp, Canis familiaris
ccgcggctctgctcaagaggcaggg

SEQ ID NO: 84743 - DNA, 25 bp, Canis familiaris
ccgcgccgctgctgggagagatccc

SEQ ID NO: 84744 - DNA, 25 bp, Canis familiaris
ccgtccggacgggagatgagtgcct

SEQ ID NO: 84745 - DNA, 25 bp, Canis familiaris
ccgctgccggggcgagtatgagcgc

SEQ ID NO: 84746 - DNA, 25 bp, Canis familiaris
ccgcggaggtggggagcgcggcgca

SEQ ID NO: 84747 - DNA, 25 bp, Canis familiaris
ccgcgagcaggtccaggaccaggtg

SEQ ID NO: 84748 - DNA, 25 bp, Canis familiaris
ccgggctgtgcaacatgtaccagga

SEQ ID NO: 84749 - DNA, 25 bp, Canis familiaris
ccgtgggggctacttcgatgaattt

SEQ ID NO: 84750 - DNA, 25 bp, Canis familiaris
cctgtggtggggcttccagaagttg

SEQ ID NO: 84751 - DNA, 25 bp, Canis familiaris
cctgggagccagggttgggcaagat

SEQ ID NO: 84752 - DNA, 25 bp, Canis familiaris
ccgcggcccagtgactgtgagcggt

SEQ ID NO: 84753 - DNA, 25 bp, Canis familiaris
ccgtgtccgagtgaagggtggtggt

SEQ ID NO: 84754 - DNA, 25 bp, Canis familiaris
cctgttccccttcagagttggtgag

SEQ ID NO: 84755 - DNA, 25 bp, Canis familiaris
ccgtcacccaccagaggatttggaa

SEQ ID NO: 84756 - DNA, 25 bp, Canis familiaris
ccttaccgcacgggcacaagttcaa

SEQ ID NO: 84757 - DNA, 25 bp, Canis familiaris
ccgtggaagacgggtgccagttgag

SEQ ID NO: 84758 - DNA, 25 bp, Canis familiaris
ccgaggcacggggagtcctgtataa

SEQ ID NO: 84759 - DNA, 25 bp, Canis familiaris
ccgggatcgagggtttggtgcacct

SEQ ID NO: 84760 - DNA, 25 bp, Canis familiaris
ccggttccggattccgggatctgct

SEQ ID NO: 84761 - DNA, 25 bp, Canis familiaris
ccggtctcaaggaatcaccgtctcc

SEQ ID NO: 84762 - DNA, 25 bp, Canis familiaris
ccgagttcaagaacacgcgcaccaa

SEQ ID NO: 84763 - DNA, 25 bp, Canis familiaris
ccgcgagtcagagagcccggtgaaa

SEQ ID NO: 84764 - DNA, 25 bp, Canis familiaris
cctgcacggaacacaccggtaaatg

SEQ ID NO: 84765 - DNA, 25 bp, Canis familiaris
cctggggtagcttccacttggaaag

SEQ ID NO: 84766 - DNA, 25 bp, Canis familiaris
ccgtggttagcttttgtattcagaa

SEQ ID NO: 84767 - DNA, 25 bp, Canis familiaris
gccagtggtaacttatttgtccggt

SEQ ID NO: 84768 - DNA, 25 bp, Canis familiaris
ccgctggtaataaaatctgttccca

SEQ ID NO: 84769 - DNA, 25 bp, Canis familiaris
ccgtggtaatgaccagggggcctgc

SEQ ID NO: 84770 - DNA, 25 bp, Canis familiaris
ccggagtaggatcagagtgaacccc

SEQ ID NO: 84771 - DNA, 25 bp, Canis familiaris
ccgtgatgttgattccaggtgaccg

SEQ ID NO: 84772 - DNA, 25 bp, Canis familiaris
ccggcatttgaaccggtggtcgctc

SEQ ID NO: 84773 - DNA, 25 bp, Canis familiaris
ccggtatgtgcaaggcgggcttcgc

SEQ ID NO: 84774 - DNA, 25 bp, Canis familiaris
ccgacatatcttctggggctctggc

SEQ ID NO: 84775 - DNA, 25 bp, Canis familiaris
ccgacacgcaacagtggtctctgga

SEQ ID NO: 84776 - DNA, 25 bp, Canis familiaris
ccgcacagctgcaactgggtggcgg

SEQ ID NO: 84777 - DNA, 25 bp, Canis familiaris
ccgcatgtgcgcagatggcagagac

SEQ ID NO: 84778 - DNA, 25 bp, Canis familiaris
ccgtgcattgctgagtgcagcagca

SEQ ID NO: 84779 - DNA, 25 bp, Canis familiaris
ccgtatttgtggccacacaagtacc

SEQ ID NO: 84780 - DNA, 25 bp, Canis familiaris
ccgtatttgtgccacacatagtaca

SEQ ID NO: 84781 - DNA, 25 bp, Canis familiaris
ccgtttttgctccgcaagtagttca

SEQ ID NO: 84782 - DNA, 25 bp, Canis familiaris
ccgctcctgttctgagcaagctcga

SEQ ID NO: 84783 - DNA, 25 bp, Canis familiaris
ccgtcgtggatctgacgtgccgcct

SEQ ID NO: 84784 - DNA, 25 bp, Canis familiaris
ccgcatgctggggcgagacgtgcgc

SEQ ID NO: 84785 - DNA, 25 bp, Canis familiaris
ccgctgctgggagagatcccctggc

SEQ ID NO: 84786 - DNA, 25 bp, Canis familiaris
ccgtctcagagacctgtgtctcctg

SEQ ID NO: 84787 - DNA, 25 bp, Canis familiaris
ccgctccgtaacatgatctactttg

SEQ ID NO: 84788 - DNA, 25 bp, Canis familiaris
ccgtggctgtaagcgcagaactctc

SEQ ID NO: 84789 - DNA, 25 bp, Canis familiaris
ccgcttgtgttgtgggcaacattcc

SEQ ID NO: 84790 - DNA, 25 bp, Canis familiaris
ccgctttggctcagggctaatgtgc

SEQ ID NO: 84791 - DNA, 25 bp, Canis familiaris
ccgggtggctcagtggttgaatgtc

SEQ ID NO: 84792 - DNA, 25 bp, Canis familiaris
ccggagaggctgcctcggggtgtgt

SEQ ID NO: 84793 - DNA, 25 bp, Canis familiaris
ccggcagaggctgcttgtggccgtg

SEQ ID NO: 84794 - DNA, 25 bp, Canis familiaris
ccgaggagaatggcactgggaggga

SEQ ID NO: 84795 - DNA, 25 bp, Canis familiaris
ccgggaatattctggctgtgaggag

SEQ ID NO: 84796 - DNA, 25 bp, Canis familiaris
ccgggcaagacctggcagaaggctg

SEQ ID NO: 84797 - DNA, 25 bp, Canis familiaris
ccgggaaaccaactgagggctgctg

SEQ ID NO: 84798 - DNA, 25 bp, Canis familiaris
ccgtgggcaaccgctgtgaagtgcg

SEQ ID NO: 84799 - DNA, 25 bp, Canis familiaris
ccgtgaggaagctccgtgaggcggc

SEQ ID NO: 84800 - DNA, 25 bp, Canis familiaris
ccggggacaagaaggcgaagatggc

SEQ ID NO: 84801 - DNA, 25 bp, Canis familiaris
ccgggcgcaaaaggagctgacaatc

SEQ ID NO: 84802 - DNA, 25 bp, Canis familiaris
ccgacggagaacgtggcgtccacga

SEQ ID NO: 84803 - DNA, 25 bp, Canis familiaris
ccgcacggctagacgtggcgtcaga

SEQ ID NO: 84804 - DNA, 25 bp, Canis familiaris
ccgactgctgtagtcgttttcagta

SEQ ID NO: 84805 - DNA, 25 bp, Canis familiaris
ccgacatgctgttctctgtcactgt

SEQ ID NO: 84806 - DNA, 25 bp, Canis familiaris
ccgatgatgattctgttcctcttgt

SEQ ID NO: 84807 - DNA, 25 bp, Canis familiaris
ccgctgacatctctgtgactgatat

SEQ ID NO: 84808 - DNA, 25 bp, Canis familiaris
ccgcagacatcaatttgcatcttct

SEQ ID NO: 84809 - DNA, 25 bp, Canis familiaris
ccgtgtactcttagcacatttcaat

SEQ ID NO: 84810 - DNA, 25 bp, Canis familiaris
ccgtgctacttctagactaacaact

SEQ ID NO: 84811 - DNA, 25 bp, Canis familiaris
cctggaactttggcatctaaaaatg

SEQ ID NO: 84812 - DNA, 25 bp, Canis familiaris
ccggatggcccggattggaaaatca

SEQ ID NO: 84813 - DNA, 25 bp, Canis familiaris
ccgctgggcctttgatgggacagaa

SEQ ID NO: 84814 - DNA, 25 bp, Canis familiaris
ccgcatgtggcccatttggccatgg

SEQ ID NO: 84815 - DNA, 25 bp, Canis familiaris
ccgcatgtgtcgcagttggcagagt

SEQ ID NO: 84816 - DNA, 25 bp, Canis familiaris
ccgctgcattggccacttgcagagg

SEQ ID NO: 84817 - DNA, 25 bp, Canis familiaris
ccgctgcagctggggcaatctgaag

SEQ ID NO: 84818 - DNA, 25 bp, Canis familiaris
ccgctgctgtgatggcgatgccgaa

SEQ ID NO: 84819 - DNA, 25 bp, Canis familiaris
ccgctgctggactggacctatagag

SEQ ID NO: 84820 - DNA, 25 bp, Canis familiaris
ccgctctgcaaccggggagtaaatt

SEQ ID NO: 84821 - DNA, 25 bp, Canis familiaris
ccgctctgcccctgggcaggaaaag

SEQ ID NO: 84822 - DNA, 25 bp, Canis familiaris
ccgctcctcccaatggcgaagaaga

SEQ ID NO: 84823 - DNA, 25 bp, Canis familiaris
ccgctcgtgcctaagcaggggagac

SEQ ID NO: 84824 - DNA, 25 bp, Canis familiaris
ccgtgcagcgtctcacgaggagtac

SEQ ID NO: 84825 - DNA, 25 bp, Canis familiaris
ccgatggcgatcacacacatgcaga

SEQ ID NO: 84826 - DNA, 25 bp, Canis familiaris
ccgtgagagagagtgcacacacagt

SEQ ID NO: 84827 - DNA, 25 bp, Canis familiaris
ccgagatgacagctgaccaaggttc

SEQ ID NO: 84828 - DNA, 25 bp, Canis familiaris
ccgtgtacaggttctcaagtgcttg

SEQ ID NO: 84829 - DNA, 25 bp, Canis familiaris
ccgttgacacggttgcacatttcca

SEQ ID NO: 84830 - DNA, 25 bp, Canis familiaris
ccgtaatggagactggaccttccag

SEQ ID NO: 84831 - DNA, 25 bp, Canis familiaris
ccggtcagggagaagacgattgtca

SEQ ID NO: 84832 - DNA, 25 bp, Canis familiaris
ccgggagggagcacctagtgccagg

SEQ ID NO: 84833 - DNA, 25 bp, Canis familiaris
cctggaggtggagcccagtgatacc

SEQ ID NO: 84834 - DNA, 25 bp, Canis familiaris
ccggagccgggccaaagatgacatc

SEQ ID NO: 84835 - DNA, 25 bp, Canis familiaris
ccgtgcccaggtgataaatactgag

SEQ ID NO: 84836 - DNA, 25 bp, Canis familiaris
ccgcagccaaggcagccaagtacgg

SEQ ID NO: 84837 - DNA, 25 bp, Canis familiaris
ccgcatcttggggcagccaagctgg

SEQ ID NO: 84838 - DNA, 25 bp, Canis familiaris
ccgtcctttggagaagcatgtttag

SEQ ID NO: 84839 - DNA, 25 bp, Canis familiaris
cctacctacggagctcagcaggtta

SEQ ID NO: 84840 - DNA, 25 bp, Canis familiaris
ccgagcagtacagggcgacgaggat

SEQ ID NO: 84841 - DNA, 25 bp, Canis familiaris
ccgcaagtactgtgggcgtggagtc

SEQ ID NO: 84842 - DNA, 25 bp, Canis familiaris
ccgcaagtgcccctgggcaagagag

SEQ ID NO: 84843 - DNA, 25 bp, Canis familiaris
ccgagatggccctgatgcacaaaag

SEQ ID NO: 84844 - DNA, 25 bp, Canis familiaris
ccgagcagacccgactgtgataaag

SEQ ID NO: 84845 - DNA, 25 bp, Canis familiaris
ccggccctgcttctatgatatagat

SEQ ID NO: 84846 - DNA, 25 bp, Canis familiaris
ccgagcgtttcttgaagatgcaaaa

SEQ ID NO: 84847 - DNA, 25 bp, Canis familiaris
ccgtgcggcggcggatgatgatgca

SEQ ID NO: 84848 - DNA, 25 bp, Canis familiaris
ccgtgagtgtccgtgagaggcagct

SEQ ID NO: 84849 - DNA, 25 bp, Canis familiaris
ccggatattccgggtggtgctggct

SEQ ID NO: 84850 - DNA, 25 bp, Canis familiaris
ccggattgagggggcttgtcatagt

SEQ ID NO: 84851 - DNA, 25 bp, Canis familiaris
ccggatgtagggagcctggagaaac

SEQ ID NO: 84852 - DNA, 25 bp, Canis familiaris
ccaggataccccagccttgggaaag

SEQ ID NO: 84853 - DNA, 25 bp, Canis familiaris
gctgggacacccagactttggggaa

SEQ ID NO: 84854 - DNA, 25 bp, Canis familiaris
ccggattcccggatcgggaggcaat

SEQ ID NO: 84855 - DNA, 25 bp, Canis familiaris
ccgaattcccctcttgagtgaatga

SEQ ID NO: 84856 - DNA, 25 bp, Canis familiaris
ccgagtcggccctcaatgaggaggc

SEQ ID NO: 84857 - DNA, 25 bp, Canis familiaris
ccgatttgtccctccagagatgatg

SEQ ID NO: 84858 - DNA, 25 bp, Canis familiaris
ccgatttagccctgtcaagcattcc

SEQ ID NO: 84859 - DNA, 25 bp, Canis familiaris
ccgcagttatcgacggtagagtcca

SEQ ID NO: 84860 - DNA, 25 bp, Canis familiaris
ccgtgttctcacgaggtgggtccgg

SEQ ID NO: 84861 - DNA, 25 bp, Canis familiaris
ccgcttttactctgggagtgaaggt

SEQ ID NO: 84862 - DNA, 25 bp, Canis familiaris
ccgtttctcctctgggcagttaagg

SEQ ID NO: 84863 - DNA, 25 bp, Canis familiaris
ccgcttccccagtgggcaaggacgg

SEQ ID NO: 84864 - DNA, 25 bp, Canis familiaris
ccgcttttcacttggtatccaggac

SEQ ID NO: 84865 - DNA, 25 bp, Canis familiaris
cctgttttcctaggttcgaagtgag

SEQ ID NO: 84866 - DNA, 25 bp, Canis familiaris
ccttgaagtcctcggttctaactga

SEQ ID NO: 84867 - DNA, 25 bp, Canis familiaris
ccgtacctcctgcagtgttaacgac

SEQ ID NO: 84868 - DNA, 25 bp, Canis familiaris
ccgcaacctcctgagaggtcaaaac

SEQ ID NO: 84869 - DNA, 25 bp, Canis familiaris
ccgcatccctgcaggtgagggtcag

SEQ ID NO: 84870 - DNA, 25 bp, Canis familiaris
ccgcataccgtcctggagagagctc

SEQ ID NO: 84871 - DNA, 25 bp, Canis familiaris
ccgcacactcagtccatcgaagagt

SEQ ID NO: 84872 - DNA, 25 bp, Canis familiaris
ccgaactcgctctcgaagcaggagc

SEQ ID NO: 84873 - DNA, 25 bp, Canis familiaris
ccgaggtggctgcgagcgagcagga

SEQ ID NO: 84874 - DNA, 25 bp, Canis familiaris
ccgaggggtgcacagcactcggact

SEQ ID NO: 84875 - DNA, 25 bp, Canis familiaris
ccgagtggtctgtctaggtcttgac

SEQ ID NO: 84876 - DNA, 25 bp, Canis familiaris
ccggctcggtgtttgtacattgcac

SEQ ID NO: 84877 - DNA, 25 bp, Canis familiaris
ccgtcctggtggttgagcatttcac

SEQ ID NO: 84878 - DNA, 25 bp, Canis familiaris
ccgtcccgaaacaagctttcactga

SEQ ID NO: 84879 - DNA, 25 bp, Canis familiaris
ccgcaggcctgacagggtcttcagt

SEQ ID NO: 84880 - DNA, 25 bp, Canis familiaris
ccgcttggcgcacatggacttatac

SEQ ID NO: 84881 - DNA, 25 bp, Canis familiaris
ccgcttctctggtatgaacactcta

SEQ ID NO: 84882 - DNA, 25 bp, Canis familiaris
ccgcttgctctggtatgaacatgta

SEQ ID NO: 84883 - DNA, 25 bp, Canis familiaris
ccgcattgctctttagtgcacttga

SEQ ID NO: 84884 - DNA, 25 bp, Canis familiaris
ccgtggctctggtattcatgttgaa

SEQ ID NO: 84885 - DNA, 25 bp, Canis familiaris
ccggctcatcatctatgtcatgggc

SEQ ID NO: 84886 - DNA, 25 bp, Canis familiaris
ccggtcaagcagtcaggtggaggtt

SEQ ID NO: 84887 - DNA, 25 bp, Canis familiaris
ccgagtcccgtcagatggcaagtgt

SEQ ID NO: 84888 - DNA, 25 bp, Canis familiaris
ccgagtccacgtctgtgcagagtgt

SEQ ID NO: 84889 - DNA, 25 bp, Canis familiaris
ccgaattctggccttggccaggaag

SEQ ID NO: 84890 - DNA, 25 bp, Canis familiaris
ccgcaacgctgggttggaaggacca

SEQ ID NO: 84891 - DNA, 25 bp, Canis familiaris
ccggacgctgagtactggaacgggc

SEQ ID NO: 84892 - DNA, 25 bp, Canis familiaris
ccgagacctgtttgtggaccttgtg

SEQ ID NO: 84893 - DNA, 25 bp, Canis familiaris
ccgtgacctggtcatgggtcctggt

SEQ ID NO: 84894 - DNA, 25 bp, Canis familiaris
ccgtatggtcacacatgggttctgg

SEQ ID NO: 84895 - DNA, 25 bp, Canis familiaris
ccgacaggagccagaggggaccgtg

SEQ ID NO: 84896 - DNA, 25 bp, Canis familiaris
gccggtcggccaataaaggcaccga

SEQ ID NO: 84897 - DNA, 25 bp, Canis familiaris
ccgtgcatcgggtacaatagtccca

SEQ ID NO: 84898 - DNA, 25 bp, Canis familiaris
ccgtgcactctgcaacacggtgtcc

SEQ ID NO: 84899 - DNA, 25 bp, Canis familiaris
ccgtgccttggaaagcgtcgcggtt

SEQ ID NO: 84900 - DNA, 25 bp, Canis familiaris
cctggccttttgtattgctgggttt

SEQ ID NO: 84901 - DNA, 25 bp, Canis familiaris
ccgtgccataattttttatgttctt

SEQ ID NO: 84902 - DNA, 25 bp, Canis familiaris
ccggacaaacatttactgagtatct

SEQ ID NO: 84903 - DNA, 25 bp, Canis familiaris
cctggacaaattgtaggcagccctc

SEQ ID NO: 84904 - DNA, 25 bp, Canis familiaris
ccgaagcatagattgtaaccccctc

SEQ ID NO: 84905 - DNA, 25 bp, Canis familiaris
ccgtcatcatgagagttaccaccac

SEQ ID NO: 84906 - DNA, 25 bp, Canis familiaris
ccgtgcgctgggattaccagcccga

SEQ ID NO: 84907 - DNA, 25 bp, Canis familiaris
ccgggctgggagatgaccttcacgg

SEQ ID NO: 84908 - DNA, 25 bp, Canis familiaris
ccgggttgcagtctaacctaccagg

SEQ ID NO: 84909 - DNA, 25 bp, Canis familiaris
ccggtgttagtggctacacctcgcg

SEQ ID NO: 84910 - DNA, 25 bp, Canis familiaris
ccggtttagtcctatgcctactagg

SEQ ID NO: 84911 - DNA, 25 bp, Canis familiaris
ccggctcaaagggaatccggctgag

SEQ ID NO: 84912 - DNA, 25 bp, Canis familiaris
ccgtctccaacggacactgggatgg

SEQ ID NO: 84913 - DNA, 25 bp, Canis familiaris
ccgacatcccgggaggctgggaatg

SEQ ID NO: 84914 - DNA, 25 bp, Canis familiaris
ccgagcgccggggaggctcggtagg

SEQ ID NO: 84915 - DNA, 25 bp, Canis familiaris
ccgagggcgaggaggacccatgggc

SEQ ID NO: 84916 - DNA, 25 bp, Canis familiaris
ccggggctgatcctggagacccggg

SEQ ID NO: 84917 - DNA, 25 bp, Canis familiaris
ccgagagtgtcagctagatgccccg

SEQ ID NO: 84918 - DNA, 25 bp, Canis familiaris
ccgggatacaggaagatgcccccca

SEQ ID NO: 84919 - DNA, 25 bp, Canis familiaris
gccagggtagaaaaccatcccctct

SEQ ID NO: 84920 - DNA, 25 bp, Canis familiaris
ccgggcaagagaatacttcacccat

SEQ ID NO: 84921 - DNA, 25 bp, Canis familiaris
ccgtcgcgatgtgtgatttcaccga

SEQ ID NO: 84922 - DNA, 25 bp, Canis familiaris
ccgtcggtgcagcgaacttcaagga

SEQ ID NO: 84923 - DNA, 25 bp, Canis familiaris
ccgtgaggaagccgaggcgtcacag

SEQ ID NO: 84924 - DNA, 25 bp, Canis familiaris
ccgaaggacaggcaccttgcagagc

SEQ ID NO: 84925 - DNA, 25 bp, Canis familiaris
ccgtaccactggcatcgtgatggac

SEQ ID NO: 84926 - DNA, 25 bp, Canis familiaris
ccggaaagggcactctggaggacca

SEQ ID NO: 84927 - DNA, 25 bp, Canis familiaris
ccggcaaccaggaccaaagggacag

SEQ ID NO: 84928 - DNA, 25 bp, Canis familiaris
ccggccccaggaacaacggcagaag

SEQ ID NO: 84929 - DNA, 25 bp, Canis familiaris
ccgacaccagagcggctacaggagc

SEQ ID NO: 84930 - DNA, 25 bp, Canis familiaris
ccgtacgaggggccatatgcagaca

SEQ ID NO: 84931 - DNA, 25 bp, Canis familiaris
ccgcaacagcaggggcgatatcctc

SEQ ID NO: 84932 - DNA, 25 bp, Canis familiaris
ccgcaacacagccttggagacgctg

SEQ ID NO: 84933 - DNA, 25 bp, Canis familiaris
ccgcaacagaggatgggagagctta

SEQ ID NO: 84934 - DNA, 25 bp, Canis familiaris
ccgacgcaggttcgtgagcaggtta

SEQ ID NO: 84935 - DNA, 25 bp, Canis familiaris
ccgactggcgatgcggcggcgttat

SEQ ID NO: 84936 - DNA, 25 bp, Canis familiaris
ccgcacaacctgacgtgctggcagt

SEQ ID NO: 84937 - DNA, 25 bp, Canis familiaris
ccgcactgactctacaggttcatgt

SEQ ID NO: 84938 - DNA, 25 bp, Canis familiaris
ccgaggacatcatgcggcttcggga

SEQ ID NO: 84939 - DNA, 25 bp, Canis familiaris
ccgaggtgctcctggtgagcgagga

SEQ ID NO: 84940 - DNA, 25 bp, Canis familiaris
ccgagcgcctgcggaggggcaggaa

SEQ ID NO: 84941 - DNA, 25 bp, Canis familiaris
ccgaggcctgctgggattccagaat

SEQ ID NO: 84942 - DNA, 25 bp, Canis familiaris
ccgcaaccgtggcatgttcatgaag

SEQ ID NO: 84943 - DNA, 25 bp, Canis familiaris
cctgcaagcgtctgggttcaaatga

SEQ ID NO: 84944 - DNA, 25 bp, Canis familiaris
ccgcacgatgcctggagttactgta

SEQ ID NO: 84945 - DNA, 25 bp, Canis familiaris
ccgcaccattccggagtgtatagat

SEQ ID NO: 84946 - DNA, 25 bp, Canis familiaris
ccgcactctttctgattacaacatc

SEQ ID NO: 84947 - DNA, 25 bp, Canis familiaris
ccggtcatctctttgtcgaagacat

SEQ ID NO: 84948 - DNA, 25 bp, Canis familiaris
cctgtgtctcttgtgtacacagact

SEQ ID NO: 84949 - DNA, 25 bp, Canis familiaris
cctgcttgtgttgttgactctactg

SEQ ID NO: 84950 - DNA, 25 bp, Canis familiaris
ccggagcgtgatattactgcttcct

SEQ ID NO: 84951 - DNA, 25 bp, Canis familiaris
ccggtccagattgtagctcttagcc

SEQ ID NO: 84952 - DNA, 25 bp, Canis familiaris
cctggccctttggtttgctataggc

SEQ ID NO: 84953 - DNA, 25 bp, Canis familiaris
cctgggactttattttgctaaccat

SEQ ID NO: 84954 - DNA, 25 bp, Canis familiaris
ccgtgaagtttaccagtctatacca

SEQ ID NO: 84955 - DNA, 25 bp, Canis familiaris
ccgtatttctttccaggcataacaa

SEQ ID NO: 84956 - DNA, 25 bp, Canis familiaris
ccgagtttttcaccacactaacaag

SEQ ID NO: 84957 - DNA, 25 bp, Canis familiaris
ccgtaatttccattcaaacctcaag

SEQ ID NO: 84958 - DNA, 25 bp, Canis familiaris
ccgttgctttggtccaagacccaca

SEQ ID NO: 84959 - DNA, 25 bp, Canis familiaris
ccgggctttgtacatcaagagcacc

SEQ ID NO: 84960 - DNA, 25 bp, Canis familiaris
ccggtgcttgttatcataaaatctc

SEQ ID NO: 84961 - DNA, 25 bp, Canis familiaris
ccggtgctttcttttagttcaattg

SEQ ID NO: 84962 - DNA, 25 bp, Canis familiaris
ccaggtccgtttcttggtcctggag

SEQ ID NO: 84963 - DNA, 25 bp, Canis familiaris
ccggcccgacttctgagctggccgg

SEQ ID NO: 84964 - DNA, 25 bp, Canis familiaris
ccggtggagggtctgagctgccggc

SEQ ID NO: 84965 - DNA, 25 bp, Canis familiaris
cctggtcggggctggactagagtga

SEQ ID NO: 84966 - DNA, 25 bp, Canis familiaris
ccggtgtggtggtgacctggaggaa

SEQ ID NO: 84967 - DNA, 25 bp, Canis familiaris
ccagcgggagggtgattcaggagtg

SEQ ID NO: 84968 - DNA, 25 bp, Canis familiaris
ccagggggggctggtatcagtggca

SEQ ID NO: 84969 - DNA, 25 bp, Canis familiaris
ccgagggctgggcctgaatcaggcc

SEQ ID NO: 84970 - DNA, 25 bp, Canis familiaris
ccgagttatggccctgagccaggcc

SEQ ID NO: 84971 - DNA, 25 bp, Canis familiaris
ccgaggtcatgcctgtgttgccagg

SEQ ID NO: 84972 - DNA, 25 bp, Canis familiaris
cctgggatcatgtggttgcgctatc

SEQ ID NO: 84973 - DNA, 25 bp, Canis familiaris
ccatagcaaattcggttgcattttc

SEQ ID NO: 84974 - DNA, 25 bp, Canis familiaris
cctgccaaagttcttgcattcacgc

SEQ ID NO: 84975 - DNA, 25 bp, Canis familiaris
ccgacacgatttcctctgaactgga

SEQ ID NO: 84976 - DNA, 25 bp, Canis familiaris
ccgtttcatgctgtcctgaagctgg

SEQ ID NO: 84977 - DNA, 25 bp, Canis familiaris
ccggtcatctaggtccagcaacggc

SEQ ID NO: 84978 - DNA, 25 bp, Canis familiaris
ccgacttcacggaccagtacttcgg

SEQ ID NO: 84979 - DNA, 25 bp, Canis familiaris
ccgactccacaagccagtatctgtg

SEQ ID NO: 84980 - DNA, 25 bp, Canis familiaris
ccgttgccacagacgtcgaacttgg

SEQ ID NO: 84981 - DNA, 25 bp, Canis familiaris
ccgtggccaagaaagctcacctgtc

SEQ ID NO: 84982 - DNA, 25 bp, Canis familiaris
ccgggccgagagaagtctgccggca

SEQ ID NO: 84983 - DNA, 25 bp, Canis familiaris
ccgagctggagagcaagttccggca

SEQ ID NO: 84984 - DNA, 25 bp, Canis familiaris
ccgggtggctaaggcttccggagtg

SEQ ID NO: 84985 - DNA, 25 bp, Canis familiaris
ccgggatggctactggttcctaaag

SEQ ID NO: 84986 - DNA, 25 bp, Canis familiaris
ccgacagtggtacgatgtctccatc

SEQ ID NO: 84987 - DNA, 25 bp, Canis familiaris
ccgagcgtggctacagcttcaccac

SEQ ID NO: 84988 - DNA, 25 bp, Canis familiaris
ccgaggagatctacctgacaccggt

SEQ ID NO: 84989 - DNA, 25 bp, Canis familiaris
ccgattacatcgccctgaacgagga

SEQ ID NO: 84990 - DNA, 25 bp, Canis familiaris
ccgactatctacccattgacgatgg

SEQ ID NO: 84991 - DNA, 25 bp, Canis familiaris
ccggccattccaccaggaagggtgg

SEQ ID NO: 84992 - DNA, 25 bp, Canis familiaris
ccggccaacacacaggaactgcatg

SEQ ID NO: 84993 - DNA, 25 bp, Canis familiaris
ccgacgaactcaacaagaacatgga

SEQ ID NO: 84994 - DNA, 25 bp, Canis familiaris
ccgaggacacctttatacacatctg

SEQ ID NO: 84995 - DNA, 25 bp, Canis familiaris
ccgggacgccattttgaaaattgtg

SEQ ID NO: 84996 - DNA, 25 bp, Canis familiaris
ccggaactgcctttccagaggttgg

SEQ ID NO: 84997 - DNA, 25 bp, Canis familiaris
ccgaggaagctaaggccgcgttggg

SEQ ID NO: 84998 - DNA, 25 bp, Canis familiaris
ccggagaagcttggagcccgtgcaa

SEQ ID NO: 84999 - DNA, 25 bp, Canis familiaris
ccgaagaagatcggttgccctgcac

SEQ ID NO: 85000 - DNA, 25 bp, Canis familiaris
ccgaagagagactggtcctctgtct

SEQ ID NO: 85001 - DNA, 25 bp, Canis familiaris
ccggcggacagctgcttacatgttc

SEQ ID NO: 85002 - DNA, 25 bp, Canis familiaris
cctggggtcctaggatcaagtctca

SEQ ID NO: 85003 - DNA, 25 bp, Canis familiaris
ccatggggtcttaattccgtcttca

SEQ ID NO: 85004 - DNA, 25 bp, Canis familiaris
cctgggttcttggtattcgctatta

SEQ ID NO: 85005 - DNA, 25 bp, Canis familiaris
ccggagttgttgtctatgtaggtct

SEQ ID NO: 85006 - DNA, 25 bp, Canis familiaris
ccgggacttgtcactgtgcaggttg

SEQ ID NO: 85007 - DNA, 25 bp, Canis familiaris
ccgaggactttgattgcacattgtt

SEQ ID NO: 85008 - DNA, 25 bp, Canis familiaris
ccgaggactttgattgcacattgtt

SEQ ID NO: 85009 - DNA, 25 bp, Canis familiaris
cctgagaagtctccttccagttggg

SEQ ID NO: 85010 - DNA, 25 bp, Canis familiaris
ccgagatggctacatgatccgccgc

SEQ ID NO: 85011 - DNA, 25 bp, Canis familiaris
ccgagatcattacctgggctgaagc

SEQ ID NO: 85012 - DNA, 25 bp, Canis familiaris
ccggatcacggcaatgcggctgcac

SEQ ID NO: 85013 - DNA, 25 bp, Canis familiaris
ccgagacttggcgatggagcccgac

SEQ ID NO: 85014 - DNA, 25 bp, Canis familiaris
ccgagacgtcgggacactctcgagc

SEQ ID NO: 85015 - DNA, 25 bp, Canis familiaris
ccgaacgctcgtacagatgactcga

SEQ ID NO: 85016 - DNA, 25 bp, Canis familiaris
ccgatgacgcagcagacgcagacac

SEQ ID NO: 85017 - DNA, 25 bp, Canis familiaris
ccgtgtgtgatgccaagacgacccc

SEQ ID NO: 85018 - DNA, 25 bp, Canis familiaris
ccggtctatgactagtggtccccgg

SEQ ID NO: 85019 - DNA, 25 bp, Canis familiaris
ccgagttcaacaacatttcctcccg

SEQ ID NO: 85020 - DNA, 25 bp, Canis familiaris
ccggattaaccaattttcacaccag

SEQ ID NO: 85021 - DNA, 25 bp, Canis familiaris
cctagattggacgtgctttatcggc

SEQ ID NO: 85022 - DNA, 25 bp, Canis familiaris
ccgagttggattgccctacatggca

SEQ ID NO: 85023 - DNA, 25 bp, Canis familiaris
ccgatttggcctggaacaccatgga

SEQ ID NO: 85024 - DNA, 25 bp, Canis familiaris
ccgttgtccctgcagtgcccatagg

SEQ ID NO: 85025 - DNA, 25 bp, Canis familiaris
cctcattggcccttaggtccaacag

SEQ ID NO: 85026 - DNA, 25 bp, Canis familiaris
cctctggggcaagcgggccaaaggc

SEQ ID NO: 85027 - DNA, 25 bp, Canis familiaris
ccttgcaaaagagcctgggcccaag

SEQ ID NO: 85028 - DNA, 25 bp, Canis familiaris
ccttggacgatgggccagcagggcc

SEQ ID NO: 85029 - DNA, 25 bp, Canis familiaris
ccgggacggattccagcatggggag

SEQ ID NO: 85030 - DNA, 25 bp, Canis familiaris
ccgggacggaaggcagggcaggcgg

SEQ ID NO: 85031 - DNA, 25 bp, Canis familiaris
ccgaggcacagagacacgggcatcc

SEQ ID NO: 85032 - DNA, 25 bp, Canis familiaris
cctgggcaagagggcctttccctag

SEQ ID NO: 85033 - DNA, 25 bp, Canis familiaris
cctgtgcggaggggcaatttgcctt

SEQ ID NO: 85034 - DNA, 25 bp, Canis familiaris
ccatggctggggtggttggttccat

SEQ ID NO: 85035 - DNA, 25 bp, Canis familiaris
cctgggtggtttgtctggtttcaca

SEQ ID NO: 85036 - DNA, 25 bp, Canis familiaris
cctggctttgtcagaccttgtgtta

SEQ ID NO: 85037 - DNA, 25 bp, Canis familiaris
ccgatttagtcgtatctctttgaaa

SEQ ID NO: 85038 - DNA, 25 bp, Canis familiaris
ccgtatccgtcttgagcttttaaca

SEQ ID NO: 85039 - DNA, 25 bp, Canis familiaris
ccgtacctgtgtctcttgtgtacac

SEQ ID NO: 85040 - DNA, 25 bp, Canis familiaris
ccgtaccagtgccagtactgcgaat

SEQ ID NO: 85041 - DNA, 25 bp, Canis familiaris
ccgtagccggcttgaagtgctcatc

SEQ ID NO: 85042 - DNA, 25 bp, Canis familiaris
ccgatcccggctgtgagatgtgcag

SEQ ID NO: 85043 - DNA, 25 bp, Canis familiaris
ccgatggctgctagtgttagagtgg

SEQ ID NO: 85044 - DNA, 25 bp, Canis familiaris
ccgatggtttggtggagtgctgcca

SEQ ID NO: 85045 - DNA, 25 bp, Canis familiaris
ccgaggttcatgttgtgggctggcc

SEQ ID NO: 85046 - DNA, 25 bp, Canis familiaris
ccgaggagccattggtggtggcggc

SEQ ID NO: 85047 - DNA, 25 bp, Canis familiaris
cctgggtccagacgctggtgggtga

SEQ ID NO: 85048 - DNA, 25 bp, Canis familiaris
cctgcacgtacgagctagatggaca

SEQ ID NO: 85049 - DNA, 25 bp, Canis familiaris
ccggcctacagtgctgcagaggacg

SEQ ID NO: 85050 - DNA, 25 bp, Canis familiaris
ccgagccttagcctatgaagggcac

SEQ ID NO: 85051 - DNA, 25 bp, Canis familiaris
ccgagccgcggggagaagcgggccg

SEQ ID NO: 85052 - DNA, 25 bp, Canis familiaris
ccggccgtcggagaagtcggcgcgg

SEQ ID NO: 85053 - DNA, 25 bp, Canis familiaris
ccgggctggggagaagggcgtgcgg

SEQ ID NO: 85054 - DNA, 25 bp, Canis familiaris
ccgggctcagggaccacagaaaggc

SEQ ID NO: 85055 - DNA, 25 bp, Canis familiaris
ccaggccctcgaggaccaaagggtg

SEQ ID NO: 85056 - DNA, 25 bp, Canis familiaris
ccggcagcccagagaccattggggg

SEQ ID NO: 85057 - DNA, 25 bp, Canis familiaris
ccgtgcaaaagcagagcccgtggct

SEQ ID NO: 85058 - DNA, 25 bp, Canis familiaris
ccgtatttattattgcccgtgcctt

SEQ ID NO: 85059 - DNA, 25 bp, Canis familiaris
cctggtttatgcaaacgccgagcgc

SEQ ID NO: 85060 - DNA, 25 bp, Canis familiaris
cctcgtggattggaccccaagcagg

SEQ ID NO: 85061 - DNA, 25 bp, Canis familiaris
ccggcgcgatgggagccaacgagga

SEQ ID NO: 85062 - DNA, 25 bp, Canis familiaris
cctggccagggggctacctagaagg

SEQ ID NO: 85063 - DNA, 25 bp, Canis familiaris
cctgggcatgtctggctagcccaaa

SEQ ID NO: 85064 - DNA, 25 bp, Canis familiaris
ccgttggcctggtctagcaacagaa

SEQ ID NO: 85065 - DNA, 25 bp, Canis familiaris
cctggaggcctactgccacataaaa

SEQ ID NO: 85066 - DNA, 25 bp, Canis familiaris
ccgagcaggagcacccagcaaatag

SEQ ID NO: 85067 - DNA, 25 bp, Canis familiaris
ccgggagacccaatgagctacaatg

SEQ ID NO: 85068 - DNA, 25 bp, Canis familiaris
ccgaggaggcacaatgagacttgaa

SEQ ID NO: 85069 - DNA, 25 bp, Canis familiaris
ccgatgccaagaattcgcatcttga

SEQ ID NO: 85070 - DNA, 25 bp, Canis familiaris
ccgagtacgatgatgctgcctgtga

SEQ ID NO: 85071 - DNA, 25 bp, Canis familiaris
ccgaggtctgtgatcccggatttta

SEQ ID NO: 85072 - DNA, 25 bp, Canis familiaris
ccgtgcagtcttatccactggtgta

SEQ ID NO: 85073 - DNA, 25 bp, Canis familiaris
ccgtactctagcacagcacaggtgc

SEQ ID NO: 85074 - DNA, 25 bp, Canis familiaris
ccgtcattccagctgctgctgaagt

SEQ ID NO: 85075 - DNA, 25 bp, Canis familiaris
ccgtctagtatgttctgcgatcacc

SEQ ID NO: 85076 - DNA, 25 bp, Canis familiaris
ccgtcatcaattgtgctgacaacac

SEQ ID NO: 85077 - DNA, 25 bp, Canis familiaris
ccgttccatctgtgagaaatcaccg

SEQ ID NO: 85078 - DNA, 25 bp, Canis familiaris
cctctgtccctgtggaaactgactc

SEQ ID NO: 85079 - DNA, 25 bp, Canis familiaris
cctggtggcctcaggaaattcaccc

SEQ ID NO: 85080 - DNA, 25 bp, Canis familiaris
ccggtggcgtcatgtggtttagcgc

SEQ ID NO: 85081 - DNA, 25 bp, Canis familiaris
ccgtgtgggtgtaggtgtctttgct

SEQ ID NO: 85082 - DNA, 25 bp, Canis familiaris
ccgtgtcgagtgaaaggtggtggtc

SEQ ID NO: 85083 - DNA, 25 bp, Canis familiaris
ccgatgctgctagtgttaagtgggg

SEQ ID NO: 85084 - DNA, 25 bp, Canis familiaris
ccgtcgctactaccgattggatggt

SEQ ID NO: 85085 - DNA, 25 bp, Canis familiaris
ccgtcgctactaccgattggatggt

SEQ ID NO: 85086 - DNA, 25 bp, Canis familiaris
ccgtagctcctatctggcgaatgag

SEQ ID NO: 85087 - DNA, 25 bp, Canis familiaris
ccgagtgctcctttaggcgtatatg

SEQ ID NO: 85088 - DNA, 25 bp, Canis familiaris
ccgtgccactcttctagagcgaaaa

SEQ ID NO: 85089 - DNA, 25 bp, Canis familiaris
ccgggcagcacagcgagaggagcca

SEQ ID NO: 85090 - DNA, 25 bp, Canis familiaris
ccgtaacacatggcaaagaagctca

SEQ ID NO: 85091 - DNA, 25 bp, Canis familiaris
ccgtctcgcacatgcacaagtagga

SEQ ID NO: 85092 - DNA, 25 bp, Canis familiaris
ccgtctgcctccacaagtgacagag

SEQ ID NO: 85093 - DNA, 25 bp, Canis familiaris
ccgtgtccctcaagctaagtcagag

SEQ ID NO: 85094 - DNA, 25 bp, Canis familiaris
cctggacctctatgccaatgtcatc

SEQ ID NO: 85095 - DNA, 25 bp, Canis familiaris
ccgggatctatattccattgtatgg

SEQ ID NO: 85096 - DNA, 25 bp, Canis familiaris
ccgggagctggaccaagtctcagag

SEQ ID NO: 85097 - DNA, 25 bp, Canis familiaris
ccggctggctggcggaggatggagg

SEQ ID NO: 85098 - DNA, 25 bp, Canis familiaris
ccgtctcctgggcatctggaagagg

SEQ ID NO: 85099 - DNA, 25 bp, Canis familiaris
ccgtctccgtactgcatgtgaacgg

SEQ ID NO: 85100 - DNA, 25 bp, Canis familiaris
ccggactcgtactgtgtgtatgcgg

SEQ ID NO: 85101 - DNA, 25 bp, Canis familiaris
ccggactgctgtgatcggtttcagt

SEQ ID NO: 85102 - DNA, 25 bp, Canis familiaris
ccgtgccttatccattgttgaccac

SEQ ID NO: 85103 - DNA, 25 bp, Canis familiaris
cctgttctactgcttgattggccac

SEQ ID NO: 85104 - DNA, 25 bp, Canis familiaris
cctgtgtgatagcccactggatggc

SEQ ID NO: 85105 - DNA, 25 bp, Canis familiaris
ccggagatcatgcaagctggtggct

SEQ ID NO: 85106 - DNA, 25 bp, Canis familiaris
ccgagagatgcccatcgctctcggc

SEQ ID NO: 85107 - DNA, 25 bp, Canis familiaris
ccgggattgcagtcctatcagggag

SEQ ID NO: 85108 - DNA, 25 bp, Canis familiaris
ccgagtgctgcgggcctaatgggag

SEQ ID NO: 85109 - DNA, 25 bp, Canis familiaris
ccgagagcgatgggcatctctcggg

SEQ ID NO: 85110 - DNA, 25 bp, Canis familiaris
ccgagatcaggcgtgagctccaggg

SEQ ID NO: 85111 - DNA, 25 bp, Canis familiaris
ccggcatgaggccggccagcatggg

SEQ ID NO: 85112 - DNA, 25 bp, Canis familiaris
ccgtctgacacccgcagagcgggat

SEQ ID NO: 85113 - DNA, 25 bp, Canis familiaris
ccgttgcacaggggggcgagcagag

SEQ ID NO: 85114 - DNA, 25 bp, Canis familiaris
ccgtctgccacagcagaggctgcaa

SEQ ID NO: 85115 - DNA, 25 bp, Canis familiaris
ccgtgctcccatcaggtgcacgagc

SEQ ID NO: 85116 - DNA, 25 bp, Canis familiaris
ccgtcaactgctgatgggcagctgg

SEQ ID NO: 85117 - DNA, 25 bp, Canis familiaris
ccggaggcagctgagggcagtgcag

SEQ ID NO: 85118 - DNA, 25 bp, Canis familiaris
ccgaggtgcgctggaccaaggacgg

SEQ ID NO: 85119 - DNA, 25 bp, Canis familiaris
ccgggctgccacgaccaagtgacag

SEQ ID NO: 85120 - DNA, 25 bp, Canis familiaris
cctccctgcaaagcctgattgacat

SEQ ID NO: 85121 - DNA, 25 bp, Canis familiaris
cctggcccaatatctcttatgaatc

SEQ ID NO: 85122 - DNA, 25 bp, Canis familiaris
ccggccagaggtacttcctcaatca

SEQ ID NO: 85123 - DNA, 25 bp, Canis familiaris
ccggccaagttcatggccagcatat

SEQ ID NO: 85124 - DNA, 25 bp, Canis familiaris
cctggacaagattgttggcccctgg

SEQ ID NO: 85125 - DNA, 25 bp, Canis familiaris
ccggaataattctgtctcccgtgtt

SEQ ID NO: 85126 - DNA, 25 bp, Canis familiaris
ccgtaacctaatggtagcccgtgtg

SEQ ID NO: 85127 - DNA, 25 bp, Canis familiaris
cctgtaaccagtttgaagtcccttg

SEQ ID NO: 85128 - DNA, 25 bp, Canis familiaris
ccgtccacacagtggcagcattccg

SEQ ID NO: 85129 - DNA, 25 bp, Canis familiaris
ccgtaccaatgtctgcagttacaat

SEQ ID NO: 85130 - DNA, 25 bp, Canis familiaris
ccgtgccctgaggcctgaggaaaat

SEQ ID NO: 85131 - DNA, 25 bp, Canis familiaris
ccgtgtcggagccgcgcgagatatg

SEQ ID NO: 85132 - DNA, 25 bp, Canis familiaris
ccgtgtcctgacttctggaatcttt

SEQ ID NO: 85133 - DNA, 25 bp, Canis familiaris
ccgtaacacacttcttcagatgttt

SEQ ID NO: 85134 - DNA, 25 bp, Canis familiaris
ccggatgaacaccctgtaatctcgt

SEQ ID NO: 85135 - DNA, 25 bp, Canis familiaris
ccggttactctgactgtgtcttcag

SEQ ID NO: 85136 - DNA, 25 bp, Canis familiaris
cctgtttcacctctgttgttgggtt

SEQ ID NO: 85137 - DNA, 25 bp, Canis familiaris
ccggtttccatgtgtcattcgatgg

SEQ ID NO: 85138 - DNA, 25 bp, Canis familiaris
cctggtttaatctgtatttgacttt

SEQ ID NO: 85139 - DNA, 25 bp, Canis familiaris
ccggattctttaggcttgttgcact

SEQ ID NO: 85140 - DNA, 25 bp, Canis familiaris
ccggatttgattttttgccgcaagc

SEQ ID NO: 85141 - DNA, 25 bp, Canis familiaris
ccgaggtaggttttgctcctcaagc

SEQ ID NO: 85142 - DNA, 25 bp, Canis familiaris
cctggtgtaggatttatggcctcta

SEQ ID NO: 85143 - DNA, 25 bp, Canis familiaris
cctgttgtacagtccatattttcta

SEQ ID NO: 85144 - DNA, 25 bp, Canis familiaris
cctgctttcctgtgtattgcatctc

SEQ ID NO: 85145 - DNA, 25 bp, Canis familiaris
cctgcttaactttgtactcccaggc

SEQ ID NO: 85146 - DNA, 25 bp, Canis familiaris
cctgttcatacaatgggaccccatc

SEQ ID NO: 85147 - DNA, 25 bp, Canis familiaris
cctgttcatacatttgtgctgcccg

SEQ ID NO: 85148 - DNA, 25 bp, Canis familiaris
ccgtcacatcgatgttgcatgtgtg

SEQ ID NO: 85149 - DNA, 25 bp, Canis familiaris
ccgtccagcgtactgggctggggca

SEQ ID NO: 85150 - DNA, 25 bp, Canis familiaris
ccgtgcacagctcaggggcattaag

SEQ ID NO: 85151 - DNA, 25 bp, Canis familiaris
ccggtacatcaagggcatcgtgaag

SEQ ID NO: 85152 - DNA, 25 bp, Canis familiaris
ccgagtacgagatagcagggacagg

SEQ ID NO: 85153 - DNA, 25 bp, Canis familiaris
cctggcggggtggcaggggacgagt

SEQ ID NO: 85154 - DNA, 25 bp, Canis familiaris
cctggtgtgggtgtagggtgcctat

SEQ ID NO: 85155 - DNA, 25 bp, Canis familiaris
ccggtttggtctcagtgatctacta

SEQ ID NO: 85156 - DNA, 25 bp, Canis familiaris
ccggtattgttctacggactcactc

SEQ ID NO: 85157 - DNA, 25 bp, Canis familiaris
ccaggctgtgctatccctgtacgcc

SEQ ID NO: 85158 - DNA, 25 bp, Canis familiaris
cctggtgagcaactgcccagtgacc

SEQ ID NO: 85159 - DNA, 25 bp, Canis familiaris
ccgggatgcaacaagccagtgagac

SEQ ID NO: 85160 - DNA, 25 bp, Canis familiaris
ccgggagcagacatctcagatggga

SEQ ID NO: 85161 - DNA, 25 bp, Canis familiaris
ccgggacatacgctgcgaggaccac

SEQ ID NO: 85162 - DNA, 25 bp, Canis familiaris
ccggaacattccacgagaagcccag

SEQ ID NO: 85163 - DNA, 25 bp, Canis familiaris
ccggttcttcagcaccagaacccga

SEQ ID NO: 85164 - DNA, 25 bp, Canis familiaris
ccggcgttatgagatcaagatgacc

SEQ ID NO: 85165 - DNA, 25 bp, Canis familiaris
ccggcgaacattcacacagacagct

SEQ ID NO: 85166 - DNA, 25 bp, Canis familiaris
ccgggaacatgaatgccctggcgcc

SEQ ID NO: 85167 - DNA, 25 bp, Canis familiaris
ccgtgagataattcatccctggcct

SEQ ID NO: 85168 - DNA, 25 bp, Canis familiaris
ccggcagatgaattggcctcctggt

SEQ ID NO: 85169 - DNA, 25 bp, Canis familiaris
ccgtggtgcagtttacccaggtagt

SEQ ID NO: 85170 - DNA, 25 bp, Canis familiaris
ccgtgggcctggaaccagctttgag

SEQ ID NO: 85171 - DNA, 25 bp, Canis familiaris
ccgtgatgaccgcacatccacgggg

SEQ ID NO: 85172 - DNA, 25 bp, Canis familiaris
ccgtgctgaccatcgacgagaaagg

SEQ ID NO: 85173 - DNA, 25 bp, Canis familiaris
ccgtgctgaccatcgacgagaaagg

SEQ ID NO: 85174 - DNA, 25 bp, Canis familiaris
ccgtggttcaagggctggaaagtgg

SEQ ID NO: 85175 - DNA, 25 bp, Canis familiaris
ccgggtcccaggcggagaagtggag

SEQ ID NO: 85176 - DNA, 25 bp, Canis familiaris
cctggagtcctgcacggaagaagga

SEQ ID NO: 85177 - DNA, 25 bp, Canis familiaris
ccgtggccgccggggaagaggagag

SEQ ID NO: 85178 - DNA, 25 bp, Canis familiaris
ccgtggcatcagctccaggaaggaa

SEQ ID NO: 85179 - DNA, 25 bp, Canis familiaris
ccgggacaggacgtgcgactgagaa

SEQ ID NO: 85180 - DNA, 25 bp, Canis familiaris
ccggcctagaactgagcactgagca

SEQ ID NO: 85181 - DNA, 25 bp, Canis familiaris
ccgggatagcaagctgaacgagcac

SEQ ID NO: 85182 - DNA, 25 bp, Canis familiaris
ccgggatcaaagtctgttctggcgg

SEQ ID NO: 85183 - DNA, 25 bp, Canis familiaris
ccggctcatcaaagtcgtcatcgag

SEQ ID NO: 85184 - DNA, 25 bp, Canis familiaris
ccggtcagcagcagtcttctgtgac

SEQ ID NO: 85185 - DNA, 25 bp, Canis familiaris
cctggtcgccatggttttgtattcc

SEQ ID NO: 85186 - DNA, 25 bp, Canis familiaris
ccgtccctcctgaatttaatttgca

SEQ ID NO: 85187 - DNA, 25 bp, Canis familiaris
ccgtccgttcatctttttatatggg

SEQ ID NO: 85188 - DNA, 25 bp, Canis familiaris
ccgtcattcttctgtcttttatcag

SEQ ID NO: 85189 - DNA, 25 bp, Canis familiaris
ccgtcatacctctctcttagaatat

SEQ ID NO: 85190 - DNA, 25 bp, Canis familiaris
ccgtgctactcctttcattgagtgc

SEQ ID NO: 85191 - DNA, 25 bp, Canis familiaris
ccgtgggcccaggtctatgaggcag

SEQ ID NO: 85192 - DNA, 25 bp, Canis familiaris
cctgggcgtccaggttgaagcccgc

SEQ ID NO: 85193 - DNA, 25 bp, Canis familiaris
cctggggccccaaaagagcccagca

SEQ ID NO: 85194 - DNA, 25 bp, Canis familiaris
cctgggggacctgggaggccaggct

SEQ ID NO: 85195 - DNA, 25 bp, Canis familiaris
cctggaaagccctgctaggccaggc

SEQ ID NO: 85196 - DNA, 25 bp, Canis familiaris
ccggaatcgctctcgtgaagcgcgg

SEQ ID NO: 85197 - DNA, 25 bp, Canis familiaris
cctggaacaggagcaggccaccgtg

SEQ ID NO: 85198 - DNA, 25 bp, Canis familiaris
cctgaaatgggaactgcgccacgcg

SEQ ID NO: 85199 - DNA, 25 bp, Canis familiaris
cctggttggcaacgatggcacgcgt

SEQ ID NO: 85200 - DNA, 25 bp, Canis familiaris
cctgtgtgatgcccatggatggcat

SEQ ID NO: 85201 - DNA, 25 bp, Canis familiaris
ccgtgaagccaatgcatgcgatcca

SEQ ID NO: 85202 - DNA, 25 bp, Canis familiaris
ccagtaagccaaggggtccacattg

SEQ ID NO: 85203 - DNA, 25 bp, Canis familiaris
cctgtgaaaccgagaatcccattgg

SEQ ID NO: 85204 - DNA, 25 bp, Canis familiaris
cctggggaacagcatgaaactcttg

SEQ ID NO: 85205 - DNA, 25 bp, Canis familiaris
ccggggctgaagaagaaagctgccg

SEQ ID NO: 85206 - DNA, 25 bp, Canis familiaris
cctggcctgctgggatagggagccc

SEQ ID NO: 85207 - DNA, 25 bp, Canis familiaris
ccggcttgcaggaacaaggccacct

SEQ ID NO: 85208 - DNA, 25 bp, Canis familiaris
ccgtggtgaagaagcatgaggccaa

SEQ ID NO: 85209 - DNA, 25 bp, Canis familiaris
ccgggatcagagaagacatccgcaa

SEQ ID NO: 85210 - DNA, 25 bp, Canis familiaris
ccggtggcacatagagcacccacaa

SEQ ID NO: 85211 - DNA, 25 bp, Canis familiaris
ccgggagacagagagccccagagcc

SEQ ID NO: 85212 - DNA, 25 bp, Canis familiaris
cctgggagagcagatcccccagctg

SEQ ID NO: 85213 - DNA, 25 bp, Canis familiaris
cctgtcgaggacttccctacagaga

SEQ ID NO: 85214 - DNA, 25 bp, Canis familiaris
cctgggcgggattctgacttagagg

SEQ ID NO: 85215 - DNA, 25 bp, Canis familiaris
ccgtgccgggacttcagcaataagg

SEQ ID NO: 85216 - DNA, 25 bp, Canis familiaris
ccggaagggcacgcgcataatgggg

SEQ ID NO: 85217 - DNA, 25 bp, Canis familiaris
cctggagggtcggcccaaagatggg

SEQ ID NO: 85218 - DNA, 25 bp, Canis familiaris
ccgtggttgtgacgctctacaagat

SEQ ID NO: 85219 - DNA, 25 bp, Canis familiaris
ccgtgagtcttaggtatacgatgac

SEQ ID NO: 85220 - DNA, 25 bp, Canis familiaris
ccgttgctttaggtatccgtgatcc

SEQ ID NO: 85221 - DNA, 25 bp, Canis familiaris
ccggccttctagctcaaggctgtga

SEQ ID NO: 85222 - DNA, 25 bp, Canis familiaris
ccggccatactctttagactcggct

SEQ ID NO: 85223 - DNA, 25 bp, Canis familiaris
ccggccatactgccacatagcattc

SEQ ID NO: 85224 - DNA, 25 bp, Canis familiaris
ccggcctcctggacaaggtgggccg

SEQ ID NO: 85225 - DNA, 25 bp, Canis familiaris
ccgggccgcagggaaggcggtgagc

SEQ ID NO: 85226 - DNA, 25 bp, Canis familiaris
cctccgagccgggaagggctgtgtg

SEQ ID NO: 85227 - DNA, 25 bp, Canis familiaris
cctccgcgtaggggtagtggctggt

SEQ ID NO: 85228 - DNA, 25 bp, Canis familiaris
cctggccggggggtagatggtgcat

SEQ ID NO: 85229 - DNA, 25 bp, Canis familiaris
ccggcacgctggcgttgggaatgca

SEQ ID NO: 85230 - DNA, 25 bp, Canis familiaris
ccgtgccagttgcggtggcgatgac

SEQ ID NO: 85231 - DNA, 25 bp, Canis familiaris
ccgtgccggtgctggtgaaagacgg

SEQ ID NO: 85232 - DNA, 25 bp, Canis familiaris
ccgtccgtcatgtggtctgaaggag

SEQ ID NO: 85233 - DNA, 25 bp, Canis familiaris
ccgtgctcgaagcggacgaagcgga

SEQ ID NO: 85234 - DNA, 25 bp, Canis familiaris
ccgtgctgggagctggctcaacgga

SEQ ID NO: 85235 - DNA, 25 bp, Canis familiaris
ccgtggctgaagcaagctgaacgga

SEQ ID NO: 85236 - DNA, 25 bp, Canis familiaris
ccgtgtctggagtgactaagcgcag

SEQ ID NO: 85237 - DNA, 25 bp, Canis familiaris
ccgtctttgatgtctgcacttagtg

SEQ ID NO: 85238 - DNA, 25 bp, Canis familiaris
cctggcctggagtctggatgtagct

SEQ ID NO: 85239 - DNA, 25 bp, Canis familiaris
cctggcttggcagccgatcagttgt

SEQ ID NO: 85240 - DNA, 25 bp, Canis familiaris
cctgtgtgtgcgtctcattagagtt

SEQ ID NO: 85241 - DNA, 25 bp, Canis familiaris
ccggctgttttcacgcagtatgagg

SEQ ID NO: 85242 - DNA, 25 bp, Canis familiaris
ccggtgtttgctaacctgtacagaa

SEQ ID NO: 85243 - DNA, 25 bp, Canis familiaris
ccgtgtcttgttaaggctctagcca

SEQ ID NO: 85244 - DNA, 25 bp, Canis familiaris
ccgtctcttgctttagttctgattc

SEQ ID NO: 85245 - DNA, 25 bp, Canis familiaris
ccgtgcacctatttatatttttgaa

SEQ ID NO: 85246 - DNA, 25 bp, Canis familiaris
ccgtcaccttttactttatcagcat

SEQ ID NO: 85247 - DNA, 25 bp, Canis familiaris
ccgtcacctttcgtcatcaaagaat

SEQ ID NO: 85248 - DNA, 25 bp, Canis familiaris
ccgtccgtcatctttaacaaaatgc

SEQ ID NO: 85249 - DNA, 25 bp, Canis familiaris
cctgtcgccgcactttaaaaagtca

SEQ ID NO: 85250 - DNA, 25 bp, Canis familiaris
cctttgacgcctttaattgacctca

SEQ ID NO: 85251 - DNA, 25 bp, Canis familiaris
cctgtttgcacctttatttgtttgc

SEQ ID NO: 85252 - DNA, 25 bp, Canis familiaris
cctggattccactccatttgtttcg

SEQ ID NO: 85253 - DNA, 25 bp, Canis familiaris
ccggagacacctcactattgacttc

SEQ ID NO: 85254 - DNA, 25 bp, Canis familiaris
ccggagaacacctgtatctcgtatt

SEQ ID NO: 85255 - DNA, 25 bp, Canis familiaris
cctggagaaccacaggatgtccctg

SEQ ID NO: 85256 - DNA, 25 bp, Canis familiaris
cctggaacttcttgctgttttcctg

SEQ ID NO: 85257 - DNA, 25 bp, Canis familiaris
cctgaaacttctgaactgttcactt

SEQ ID NO: 85258 - DNA, 25 bp, Canis familiaris
ccgtccacttcagaaagcttccaat

SEQ ID NO: 85259 - DNA, 25 bp, Canis familiaris
ccgtctacttcgcagaggctgacaa

SEQ ID NO: 85260 - DNA, 25 bp, Canis familiaris
ccgtcgactcccaagtggatgacat

SEQ ID NO: 85261 - DNA, 25 bp, Canis familiaris
ccgtcatgcagtcccttgggtattg

SEQ ID NO: 85262 - DNA, 25 bp, Canis familiaris
cctcctgagggccttgggattgcat

SEQ ID NO: 85263 - DNA, 25 bp, Canis familiaris
ccatcctgcagattggtaccgattc

SEQ ID NO: 85264 - DNA, 25 bp, Canis familiaris
ccaccgagaacggacacgaggccgc

SEQ ID NO: 85265 - DNA, 25 bp, Canis familiaris
ccggcgcaagacggaccagagcgaa

SEQ ID NO: 85266 - DNA, 25 bp, Canis familiaris
cctggcgccagaggatccaatggga

SEQ ID NO: 85267 - DNA, 25 bp, Canis familiaris
cctggcctcactggcaaacgggaac

SEQ ID NO: 85268 - DNA, 25 bp, Canis familiaris
cctggcctacgagaagcgcgtgagc

SEQ ID NO: 85269 - DNA, 25 bp, Canis familiaris
cctgcccgaagagagactggtcctc

SEQ ID NO: 85270 - DNA, 25 bp, Canis familiaris
cctgtacgccaacacagtgctgtct

SEQ ID NO: 85271 - DNA, 25 bp, Canis familiaris
cctgagacccctcgaaggagtctaa

SEQ ID NO: 85272 - DNA, 25 bp, Canis familiaris
ccggacaccactcgagctgtggtat

SEQ ID NO: 85273 - DNA, 25 bp, Canis familiaris
ccggaaaccataccgttgcttgtgt

SEQ ID NO: 85274 - DNA, 25 bp, Canis familiaris
cctggcaaaacccggttgcttggca

SEQ ID NO: 85275 - DNA, 25 bp, Canis familiaris
cctagggaggcccttggcttatcgg

SEQ ID NO: 85276 - DNA, 25 bp, Canis familiaris
cctgatgagtcagccgttggcctac

SEQ ID NO: 85277 - DNA, 25 bp, Canis familiaris
cctgaagtaccccattgaacatggc

SEQ ID NO: 85278 - DNA, 25 bp, Canis familiaris
cctgaagtaccccatcgagcacggc

SEQ ID NO: 85279 - DNA, 25 bp, Canis familiaris
cctgcaactacctcagaggccgggt

SEQ ID NO: 85280 - DNA, 25 bp, Canis familiaris
cctggactgacctggagggtatttt

SEQ ID NO: 85281 - DNA, 25 bp, Canis familiaris
ccggctcaaccagtggtggactttt

SEQ ID NO: 85282 - DNA, 25 bp, Canis familiaris
cctggcccactgatttgaactgtat

SEQ ID NO: 85283 - DNA, 25 bp, Canis familiaris
cctgagccctcttaattacactcgt

SEQ ID NO: 85284 - DNA, 25 bp, Canis familiaris
cctgaggctcctgggaatccgccga

SEQ ID NO: 85285 - DNA, 25 bp, Canis familiaris
cctgattgtgcctcttctcagggga

SEQ ID NO: 85286 - DNA, 25 bp, Canis familiaris
cctatttggattggtcactgggaca

SEQ ID NO: 85287 - DNA, 25 bp, Canis familiaris
cctggccggactggattctggggcc

SEQ ID NO: 85288 - DNA, 25 bp, Canis familiaris
cctggaggacctgtactggatggct

SEQ ID NO: 85289 - DNA, 25 bp, Canis familiaris
cctggaggaccggtggtgtttgagg

SEQ ID NO: 85290 - DNA, 25 bp, Canis familiaris
cctgaagggcctgtctgtctttggc

SEQ ID NO: 85291 - DNA, 25 bp, Canis familiaris
cctcacgttgggttctgtgcttagc

SEQ ID NO: 85292 - DNA, 25 bp, Canis familiaris
ccttcggggctgtttggagttgctc

SEQ ID NO: 85293 - DNA, 25 bp, Canis familiaris
ccttttgtgagcagttaggctccca

SEQ ID NO: 85294 - DNA, 25 bp, Canis familiaris
cctgggtgggcagggttggcccaag

SEQ ID NO: 85295 - DNA, 25 bp, Canis familiaris
ccggagggtgagtgtcggactcgcg

SEQ ID NO: 85296 - DNA, 25 bp, Canis familiaris
ccgggggtggaaggaacctctgcat

SEQ ID NO: 85297 - DNA, 25 bp, Canis familiaris
ccgggtggtggtgctgaacggcgag

SEQ ID NO: 85298 - DNA, 25 bp, Canis familiaris
cctcgtgttggttgggcacacggct

SEQ ID NO: 85299 - DNA, 25 bp, Canis familiaris
cctagtttggctttccgaggagtga

SEQ ID NO: 85300 - DNA, 25 bp, Canis familiaris
ccggtctgtctgtttccggtgaggt

SEQ ID NO: 85301 - DNA, 25 bp, Canis familiaris
ccgggctttgatttaggttgatgag

SEQ ID NO: 85302 - DNA, 25 bp, Canis familiaris
ccgggtgttttgaggtgttggcatt

SEQ ID NO: 85303 - DNA, 25 bp, Canis familiaris
cctggagtttctatcggagttatca

SEQ ID NO: 85304 - DNA, 25 bp, Canis familiaris
gccatggagtgtgttcacgggcctt

SEQ ID NO: 85305 - DNA, 25 bp, Canis familiaris
ccggcaagtggtgacagggcttgtt

SEQ ID NO: 85306 - DNA, 25 bp, Canis familiaris
ccgggcagtggtgacagggctgctg

SEQ ID NO: 85307 - DNA, 25 bp, Canis familiaris
ccgtgtggggcagagcagggcatgt

SEQ ID NO: 85308 - DNA, 25 bp, Canis familiaris
ccgtggccgtcagaggggccagcag

SEQ ID NO: 85309 - DNA, 25 bp, Canis familiaris
ccggtgctttactaggcgacgatca

SEQ ID NO: 85310 - DNA, 25 bp, Canis familiaris
ccggggatctactggcacaagccag

SEQ ID NO: 85311 - DNA, 25 bp, Canis familiaris
cctggcttttaggggcactatggac

SEQ ID NO: 85312 - DNA, 25 bp, Canis familiaris
cctggctttttgttaccacagaggc

SEQ ID NO: 85313 - DNA, 25 bp, Canis familiaris
cctggctacttggactattcaggga

SEQ ID NO: 85314 - DNA, 25 bp, Canis familiaris
ccggctaactgcaacttggacagag

SEQ ID NO: 85315 - DNA, 25 bp, Canis familiaris
cctgctgaaaggcagctggtacgag

SEQ ID NO: 85316 - DNA, 25 bp, Canis familiaris
cctggacaacgcctctgcattccag

SEQ ID NO: 85317 - DNA, 25 bp, Canis familiaris
ccatgcatgactttgccacgtatcc

SEQ ID NO: 85318 - DNA, 25 bp, Canis familiaris
cctgaagacttgacaccttcccaag

SEQ ID NO: 85319 - DNA, 25 bp, Canis familiaris
cctgtggaaagtccctccaccaagg

SEQ ID NO: 85320 - DNA, 25 bp, Canis familiaris
cctttaaaggctgtccaagcatttt

SEQ ID NO: 85321 - DNA, 25 bp, Canis familiaris
ccttaaaaagcctctatacatacta

SEQ ID NO: 85322 - DNA, 25 bp, Canis familiaris
cctctttaacctgtgtaaacaatag

SEQ ID NO: 85323 - DNA, 25 bp, Canis familiaris
cctgtgttccactgttttaaaatag

SEQ ID NO: 85324 - DNA, 25 bp, Canis familiaris
cctgggtggctctgtcacttaaaaa

SEQ ID NO: 85325 - DNA, 25 bp, Canis familiaris
cctgggtggctcattcagttcaaca

SEQ ID NO: 85326 - DNA, 25 bp, Canis familiaris
ccggtgctgagtatgtcgtggagtc

SEQ ID NO: 85327 - DNA, 25 bp, Canis familiaris
ccggtgcaggagagacgattgtcat

SEQ ID NO: 85328 - DNA, 25 bp, Canis familiaris
cctgggcagaagaggtcatctttga

SEQ ID NO: 85329 - DNA, 25 bp, Canis familiaris
cctgggctaatgaaggacctgttct

SEQ ID NO: 85330 - DNA, 25 bp, Canis familiaris
ccgggtgtcatcaggatcatgcttt

SEQ ID NO: 85331 - DNA, 25 bp, Canis familiaris
ccggcgagtacttgagcagctgctc

SEQ ID NO: 85332 - DNA, 25 bp, Canis familiaris
ccggctggagactatggcctctgaa

SEQ ID NO: 85333 - DNA, 25 bp, Canis familiaris
cctgagtggtgaaagctcccatcaa

SEQ ID NO: 85334 - DNA, 25 bp, Canis familiaris
cctgggtcagaatctcctaatgaga

SEQ ID NO: 85335 - DNA, 25 bp, Canis familiaris
ccgtggtcagaagctgcctcagaag

SEQ ID NO: 85336 - DNA, 25 bp, Canis familiaris
ccggcttcaacatcgagccagctgt

SEQ ID NO: 85337 - DNA, 25 bp, Canis familiaris
ccgtgttcttcatcagcatcgagat

SEQ ID NO: 85338 - DNA, 25 bp, Canis familiaris
ccgtcccatctctgagcatgaggtc

SEQ ID NO: 85339 - DNA, 25 bp, Canis familiaris
ccgggcgatgcttgtgcctgagctg

SEQ ID NO: 85340 - DNA, 25 bp, Canis familiaris
ccggccagtggatcagtacagcaac

SEQ ID NO: 85341 - DNA, 25 bp, Canis familiaris
cctgatggacgcaccaggcaaccag

SEQ ID NO: 85342 - DNA, 25 bp, Canis familiaris
cctggataatgcttccgccttccaa

SEQ ID NO: 85343 - DNA, 25 bp, Canis familiaris
cctgaggcactcttccagccttcct

SEQ ID NO: 85344 - DNA, 25 bp, Canis familiaris
cctgaaattatcccagattacagca

SEQ ID NO: 85345 - DNA, 25 bp, Canis familiaris
ccggattttccagggatcacatcac

SEQ ID NO: 85346 - DNA, 25 bp, Canis familiaris
ccgtgtattctttgggtccagcagc

SEQ ID NO: 85347 - DNA, 25 bp, Canis familiaris
ccgggagactttgggaccacagcaa

SEQ ID NO: 85348 - DNA, 25 bp, Canis familiaris
ccggcgaactgtactggaccaaggt

SEQ ID NO: 85349 - DNA, 25 bp, Canis familiaris
ccggctacctggacgggagcaagga

SEQ ID NO: 85350 - DNA, 25 bp, Canis familiaris
ccggctacctgatgggtgtgcgaga

SEQ ID NO: 85351 - DNA, 25 bp, Canis familiaris
ccggtccctgagcaaggcagctcag

SEQ ID NO: 85352 - DNA, 25 bp, Canis familiaris
ccggctccctatgtagcagatgcca

SEQ ID NO: 85353 - DNA, 25 bp, Canis familiaris
ccggcgacctgagacagcatgatgc

SEQ ID NO: 85354 - DNA, 25 bp, Canis familiaris
ccgggccctacaaggcagaggtggg

SEQ ID NO: 85355 - DNA, 25 bp, Canis familiaris
ccgggaacacacagggaggcacgag

SEQ ID NO: 85356 - DNA, 25 bp, Canis familiaris
ccggtaaaggccggcggcgcaggag

SEQ ID NO: 85357 - DNA, 25 bp, Canis familiaris
cctggatcaaggctttcgggggagc

SEQ ID NO: 85358 - DNA, 25 bp, Canis familiaris
cctggtttagttctgcctggggagg

SEQ ID NO: 85359 - DNA, 25 bp, Canis familiaris
ccggaggaacttcatccgtggagca

SEQ ID NO: 85360 - DNA, 25 bp, Canis familiaris
cctgagggaaaaccacacctggatt

SEQ ID NO: 85361 - DNA, 25 bp, Canis familiaris
gccggggccaaaacagccactaaag

SEQ ID NO: 85362 - DNA, 25 bp, Canis familiaris
gcctggtgtcgataaaaactaaact

SEQ ID NO: 85363 - DNA, 25 bp, Canis familiaris
cctgggtcttggataaactgaaagc

SEQ ID NO: 85364 - DNA, 25 bp, Canis familiaris
cctggggttgggcctgaaagagaag

SEQ ID NO: 85365 - DNA, 25 bp, Canis familiaris
ccgggccttggacggaaggcagaag

SEQ ID NO: 85366 - DNA, 25 bp, Canis familiaris
ccgtggccttcgtggagcagggcca

SEQ ID NO: 85367 - DNA, 25 bp, Canis familiaris
ccgggccttcgatcaagagcctgta

SEQ ID NO: 85368 - DNA, 25 bp, Canis familiaris
ccgggccattgccatcgctgcaggc

SEQ ID NO: 85369 - DNA, 25 bp, Canis familiaris
ccgggccatcgccattgctgcgggt

SEQ ID NO: 85370 - DNA, 25 bp, Canis familiaris
cctgtagacgagcagatgctgcaga

SEQ ID NO: 85371 - DNA, 25 bp, Canis familiaris
cctgtccccagaggatctgaacctc

SEQ ID NO: 85372 - DNA, 25 bp, Canis familiaris
cctggaatcccaggatcgagtccca

SEQ ID NO: 85373 - DNA, 25 bp, Canis familiaris
cctggagacccaggatcgagtccca

SEQ ID NO: 85374 - DNA, 25 bp, Canis familiaris
ccgtgagagcctggcgtggggctcc

SEQ ID NO: 85375 - DNA, 25 bp, Canis familiaris
ccgtgggctgtgccaagtgtgccca

SEQ ID NO: 85376 - DNA, 25 bp, Canis familiaris
ccgtgtgcgtgttgaagggccaggg

SEQ ID NO: 85377 - DNA, 25 bp, Canis familiaris
ccggtggctttgagctgaccaagga

SEQ ID NO: 85378 - DNA, 25 bp, Canis familiaris
ccggcggctttgatgggatcagggg

SEQ ID NO: 85379 - DNA, 25 bp, Canis familiaris
ccgggatcttagtgaggtgcagggg

SEQ ID NO: 85380 - DNA, 25 bp, Canis familiaris
cctgcgaatttccaagaggtggtgg

SEQ ID NO: 85381 - DNA, 25 bp, Canis familiaris
cctggttatcttctgggatgcctgg

SEQ ID NO: 85382 - DNA, 25 bp, Canis familiaris
cctgtctttccacttgtgtagcttg

SEQ ID NO: 85383 - DNA, 25 bp, Canis familiaris
cctgtcttgtcatgtgctgaaatgg

SEQ ID NO: 85384 - DNA, 25 bp, Canis familiaris
ccggcgtggaagacagcagccaggc

SEQ ID NO: 85385 - DNA, 25 bp, Canis familiaris
cctggagtcgtactgcgtgcacagg

SEQ ID NO: 85386 - DNA, 25 bp, Canis familiaris
ccggatgttgtcctggagccgagag

SEQ ID NO: 85387 - DNA, 25 bp, Canis familiaris
cctggaatcatgacctgaaccaaag

SEQ ID NO: 85388 - DNA, 25 bp, Canis familiaris
cctgatttcagcattgactcccata

SEQ ID NO: 85389 - DNA, 25 bp, Canis familiaris
cctggattaacttgatgcccgctag

SEQ ID NO: 85390 - DNA, 25 bp, Canis familiaris
cctggagccatacatataccctctg

SEQ ID NO: 85391 - DNA, 25 bp, Canis familiaris
cctggagtcaaggagtaccactggt

SEQ ID NO: 85392 - DNA, 25 bp, Canis familiaris
cctggaagcttctgtcaccattggt

SEQ ID NO: 85393 - DNA, 25 bp, Canis familiaris
cctggaacccgttcccattgtgtga

SEQ ID NO: 85394 - DNA, 25 bp, Canis familiaris
cctgaaaaccgccccaagttcagtg

SEQ ID NO: 85395 - DNA, 25 bp, Canis familiaris
cctggaaaacccacctggtgcagta

SEQ ID NO: 85396 - DNA, 25 bp, Canis familiaris
cctgaggtcagagccaaccgggacc

SEQ ID NO: 85397 - DNA, 25 bp, Canis familiaris
ccgggctcaactgcaactcagaaac

SEQ ID NO: 85398 - DNA, 25 bp, Canis familiaris
cctggcctacaggcccagtctgaaa

SEQ ID NO: 85399 - DNA, 25 bp, Canis familiaris
cctggcccatcatgtcatagccatg

SEQ ID NO: 85400 - DNA, 25 bp, Canis familiaris
cctggcttcagatgtgaggcctgcc

SEQ ID NO: 85401 - DNA, 25 bp, Canis familiaris
cctggcttcacatggatgaccttag

SEQ ID NO: 85402 - DNA, 25 bp, Canis familiaris
cctcgtacataagggcctcttagcc

SEQ ID NO: 85403 - DNA, 25 bp, Canis familiaris
cctgcagggtagacattcccttacc

SEQ ID NO: 85404 - DNA, 25 bp, Canis familiaris
cctcggttcgatactctgacttacc

SEQ ID NO: 85405 - DNA, 25 bp, Canis familiaris
ccatccgtaccaatgtctgcagtta

SEQ ID NO: 85406 - DNA, 25 bp, Canis familiaris
cctcggtagtaactccgtgtcaccg

SEQ ID NO: 85407 - DNA, 25 bp, Canis familiaris
ccacggtactagggccaggaccctg

SEQ ID NO: 85408 - DNA, 25 bp, Canis familiaris
cctctggtaccacggtggtgtccta

SEQ ID NO: 85409 - DNA, 25 bp, Canis familiaris
cctgggtccatctgagggtatccaa

SEQ ID NO: 85410 - DNA, 25 bp, Canis familiaris
cctgtgcgttttgggcaggttccgt

SEQ ID NO: 85411 - DNA, 25 bp, Canis familiaris
ccttggacttcgaagcacgttgcac

SEQ ID NO: 85412 - DNA, 25 bp, Canis familiaris
cctgtaacttgcgggggttgctgac

SEQ ID NO: 85413 - DNA, 25 bp, Canis familiaris
cctgaaagtcagggtcggcttgtga

SEQ ID NO: 85414 - DNA, 25 bp, Canis familiaris
cctgaggtggagggtgggctgctgg

SEQ ID NO: 85415 - DNA, 25 bp, Canis familiaris
cctgagggtcagggggcattttctt

SEQ ID NO: 85416 - DNA, 25 bp, Canis familiaris
cctgctgggctcgccaggaatttat

SEQ ID NO: 85417 - DNA, 25 bp, Canis familiaris
cctgtttcttgaccttaatttcatt

SEQ ID NO: 85418 - DNA, 25 bp, Canis familiaris
ccgtgtctcttaactcttttatatt

SEQ ID NO: 85419 - DNA, 25 bp, Canis familiaris
ccgtgtatctgatccctttatatta

SEQ ID NO: 85420 - DNA, 25 bp, Canis familiaris
ccgtgtctatatactcgctgttata

SEQ ID NO: 85421 - DNA, 25 bp, Canis familiaris
cctgtccatgttatccgtatctaca

SEQ ID NO: 85422 - DNA, 25 bp, Canis familiaris
cctgctgtagaacgtcaccttgttc

SEQ ID NO: 85423 - DNA, 25 bp, Canis familiaris
cctgtctggtcaggaacctgtttgc

SEQ ID NO: 85424 - DNA, 25 bp, Canis familiaris
cctgttgagtcagatgctttcattt

SEQ ID NO: 85425 - DNA, 25 bp, Canis familiaris
cctgtcaggtagttggtccacttgt

SEQ ID NO: 85426 - DNA, 25 bp, Canis familiaris
cctggaggtacatgtatccctttga

SEQ ID NO: 85427 - DNA, 25 bp, Canis familiaris
cctggaggtcacggacaaccggtga

SEQ ID NO: 85428 - DNA, 25 bp, Canis familiaris
cctgggattccaggagcacctcttg

SEQ ID NO: 85429 - DNA, 25 bp, Canis familiaris
cctggaattccaggaatcttcttcg

SEQ ID NO: 85430 - DNA, 25 bp, Canis familiaris
cctggccaaccattgagatgattct

SEQ ID NO: 85431 - DNA, 25 bp, Canis familiaris
ccggacacaccacttagattctatg

SEQ ID NO: 85432 - DNA, 25 bp, Canis familiaris
ccggatgactccccgagatacgaga

SEQ ID NO: 85433 - DNA, 25 bp, Canis familiaris
ccggagcttgtccggaagattgcaa

SEQ ID NO: 85434 - DNA, 25 bp, Canis familiaris
ccggcattgcgttgcggaagctcca

SEQ ID NO: 85435 - DNA, 25 bp, Canis familiaris
ccggcagcgggccgagaaggctcag

SEQ ID NO: 85436 - DNA, 25 bp, Canis familiaris
cctggacggtgctggatggttcgga

SEQ ID NO: 85437 - DNA, 25 bp, Canis familiaris
cctggacggagtcccaggttgggct

SEQ ID NO: 85438 - DNA, 25 bp, Canis familiaris
cctgaggggggaacggttgcagtgt

SEQ ID NO: 85439 - DNA, 25 bp, Canis familiaris
cctgggcgggtaacctgcagaggtt

SEQ ID NO: 85440 - DNA, 25 bp, Canis familiaris
cctggagcgaggtttctccgtgact

SEQ ID NO: 85441 - DNA, 25 bp, Canis familiaris
cctgtggtattgtcttgtcaggatg

SEQ ID NO: 85442 - DNA, 25 bp, Canis familiaris
cctgattggcatactccgtcagtta

SEQ ID NO: 85443 - DNA, 25 bp, Canis familiaris
cctgattctctgacttgccaagtta

SEQ ID NO: 85444 - DNA, 25 bp, Canis familiaris
cctgtatcttactgtactgttcaca

SEQ ID NO: 85445 - DNA, 25 bp, Canis familiaris
cctgtattttctgatttttccacca

SEQ ID NO: 85446 - DNA, 25 bp, Canis familiaris
cctgcacttttctgatctgttttca

SEQ ID NO: 85447 - DNA, 25 bp, Canis familiaris
cctgcatctttttttttcttatctg

SEQ ID NO: 85448 - DNA, 25 bp, Canis familiaris
cctgtctcatttttcgaacccagta

SEQ ID NO: 85449 - DNA, 25 bp, Canis familiaris
cctgaccgttttttacaccaagatg

SEQ ID NO: 85450 - DNA, 25 bp, Canis familiaris
cctacggttcctttctagagaagct

SEQ ID NO: 85451 - DNA, 25 bp, Canis familiaris
gaatcaaggttacggtggaaaatgc

SEQ ID NO: 85452 - DNA, 25 bp, Canis familiaris
tagtaaggtgaatcgtcgacacaat

SEQ ID NO: 85453 - DNA, 25 bp, Canis familiaris
taatcttcgggatggtcatgaaaaa

SEQ ID NO: 85454 - DNA, 25 bp, Canis familiaris
cctcccgggaagctatgcagaacaa

SEQ ID NO: 85455 - DNA, 25 bp, Canis familiaris
cctccggggtgatgttcagggcaga

SEQ ID NO: 85456 - DNA, 25 bp, Canis familiaris
cctggtgggaggtgttctgtgtcca

SEQ ID NO: 85457 - DNA, 25 bp, Canis familiaris
ccggtggaaggcgttttgagaccag

SEQ ID NO: 85458 - DNA, 25 bp, Canis familiaris
cctggtttccctggctttagaccag

SEQ ID NO: 85459 - DNA, 25 bp, Canis familiaris
cctgttgcttccgggagttgaacca

SEQ ID NO: 85460 - DNA, 25 bp, Canis familiaris
cctgacttgctcgggggaaaacatt

SEQ ID NO: 85461 - DNA, 25 bp, Canis familiaris
ccggcatgtggctgtgggaggaaca

SEQ ID NO: 85462 - DNA, 25 bp, Canis familiaris
ccggtgtcatcatgggctggtggac

SEQ ID NO: 85463 - DNA, 25 bp, Canis familiaris
cctggtgcttaagcctggatagccc

SEQ ID NO: 85464 - DNA, 25 bp, Canis familiaris
cctggtgtgaactccggtcagggct

SEQ ID NO: 85465 - DNA, 25 bp, Canis familiaris
cctgagtgagcagcccctttcagga

SEQ ID NO: 85466 - DNA, 25 bp, Canis familiaris
ccgggacatcctgctcaagtcagga

SEQ ID NO: 85467 - DNA, 25 bp, Canis familiaris
cctggtgacacggggcacagttggc

SEQ ID NO: 85468 - DNA, 25 bp, Canis familiaris
cctggagatcccgggatcgagtccc

SEQ ID NO: 85469 - DNA, 25 bp, Canis familiaris
cctggagacccgggatcgaatccca

SEQ ID NO: 85470 - DNA, 25 bp, Canis familiaris
cctgagaaacggctaccacatccaa

SEQ ID NO: 85471 - DNA, 25 bp, Canis familiaris
cctgcagaacaggacctaactacca

SEQ ID NO: 85472 - DNA, 25 bp, Canis familiaris
cctggaaacgacatgcatcaatcct

SEQ ID NO: 85473 - DNA, 25 bp, Canis familiaris
cctggaaagctgaccttggacctga

SEQ ID NO: 85474 - DNA, 25 bp, Canis familiaris
ccggcagaaggagctcttggagcgg

SEQ ID NO: 85475 - DNA, 25 bp, Canis familiaris
cctgagggagtacgcctacgacgtg

SEQ ID NO: 85476 - DNA, 25 bp, Canis familiaris
cctgacttaatacccataccaaaat

SEQ ID NO: 85477 - DNA, 25 bp, Canis familiaris
cctgtcctaaagactgctagccaga

SEQ ID NO: 85478 - DNA, 25 bp, Canis familiaris
ccggcctgagcaaactgctggtcag

SEQ ID NO: 85479 - DNA, 25 bp, Canis familiaris
ccggacaccatgagcctcagtgagg

SEQ ID NO: 85480 - DNA, 25 bp, Canis familiaris
ccggtcaaaggtgccacatgatgag

SEQ ID NO: 85481 - DNA, 25 bp, Canis familiaris
cctgggaacagactgccctcagagg

SEQ ID NO: 85482 - DNA, 25 bp, Canis familiaris
cctgcacagaaccgggcccagaagt

SEQ ID NO: 85483 - DNA, 25 bp, Canis familiaris
ccggccgcatgcttggaggtaaagt

SEQ ID NO: 85484 - DNA, 25 bp, Canis familiaris
ccggccagcatgtctgggggcaaat

SEQ ID NO: 85485 - DNA, 25 bp, Canis familiaris
ccggcgccatgagtgagctggagca

SEQ ID NO: 85486 - DNA, 25 bp, Canis familiaris
cctgggccaagctgcgagcatgcag

SEQ ID NO: 85487 - DNA, 25 bp, Canis familiaris
ccgtggccaccaggcagaagaggtt

SEQ ID NO: 85488 - DNA, 25 bp, Canis familiaris
ccgggatcacgagtcagtagggagg

SEQ ID NO: 85489 - DNA, 25 bp, Canis familiaris
ccggtgatactggtagttggtgtga

SEQ ID NO: 85490 - DNA, 25 bp, Canis familiaris
cctggtacactggtgacctggggag

SEQ ID NO: 85491 - DNA, 25 bp, Canis familiaris
cctgtaatcccagcactttgggagg

SEQ ID NO: 85492 - DNA, 25 bp, Canis familiaris
cctgtaatcccagctactcgggagg

SEQ ID NO: 85493 - DNA, 25 bp, Canis familiaris
cctggaccccaacttctcaggaaga

SEQ ID NO: 85494 - DNA, 25 bp, Canis familiaris
ccggtcagccctgttattggacaga

SEQ ID NO: 85495 - DNA, 25 bp, Canis familiaris
ccagactacttttttatactacaca

SEQ ID NO: 85496 - DNA, 25 bp, Canis familiaris
cctgatttcttttaataagccctca

SEQ ID NO: 85497 - DNA, 25 bp, Canis familiaris
cctgcattgctgatgcccatataac

SEQ ID NO: 85498 - DNA, 25 bp, Canis familiaris
cctgctggtgacctgcacagcatgg

SEQ ID NO: 85499 - DNA, 25 bp, Canis familiaris
cctgaggcattcccaagctagaaga

SEQ ID NO: 85500 - DNA, 25 bp, Canis familiaris
ccggatcttctggcacacacagaat

SEQ ID NO: 85501 - DNA, 25 bp, Canis familiaris
ccggtccactcctacaagagaaacg

SEQ ID NO: 85502 - DNA, 25 bp, Canis familiaris
ccggtcgcctctggcagcgaaaaga

SEQ ID NO: 85503 - DNA, 25 bp, Canis familiaris
ccgggcccctaggcaaaacagcaga

SEQ ID NO: 85504 - DNA, 25 bp, Canis familiaris
cctgggaccccggcagaaggaatat

SEQ ID NO: 85505 - DNA, 25 bp, Canis familiaris
cctgactacccatgaacgggataat

SEQ ID NO: 85506 - DNA, 25 bp, Canis familiaris
cctaactctctctgacaggtggaaa

SEQ ID NO: 85507 - DNA, 25 bp, Canis familiaris
ccatatacccaagactggattaaag

SEQ ID NO: 85508 - DNA, 25 bp, Canis familiaris
cctatacccaaccctgcaaagttga

SEQ ID NO: 85509 - DNA, 25 bp, Canis familiaris
gccttacccaaacacaggaactgac

SEQ ID NO: 85510 - DNA, 25 bp, Canis familiaris
ccatttcccaaacaccagtacatta

SEQ ID NO: 85511 - DNA, 25 bp, Canis familiaris
cctactcccaacacccagtagatgg

SEQ ID NO: 85512 - DNA, 25 bp, Canis familiaris
cctttccaagacaaagcccgttgtg

SEQ ID NO: 85513 - DNA, 25 bp, Canis familiaris
ccttggaccgacaaagtttgacctg

SEQ ID NO: 85514 - DNA, 25 bp, Canis familiaris
cctcctatccaaaacggtcgatcgc

SEQ ID NO: 85515 - DNA, 25 bp, Canis familiaris
cctgcccaacaagaaggtctgcatc

SEQ ID NO: 85516 - DNA, 25 bp, Canis familiaris
cctgtcccagcacacaagttccagg

SEQ ID NO: 85517 - DNA, 25 bp, Canis familiaris
cctcggccaaaaagagtgctccggg

SEQ ID NO: 85518 - DNA, 25 bp, Canis familiaris
cctgcggaagcacaagaccaatcgg

SEQ ID NO: 85519 - DNA, 25 bp, Canis familiaris
cctgaagaagcacaagtccggcggc

SEQ ID NO: 85520 - DNA, 25 bp, Canis familiaris
cctggagccacacacagtttgacct

SEQ ID NO: 85521 - DNA, 25 bp, Canis familiaris
cctggcgtcacagaggctactatca

SEQ ID NO: 85522 - DNA, 25 bp, Canis familiaris
cctggcttgcctggatggctacatg

SEQ ID NO: 85523 - DNA, 25 bp, Canis familiaris
cctggcttcgtttggcattgatgca

SEQ ID NO: 85524 - DNA, 25 bp, Canis familiaris
cctgtgcccagcgtggcacttagca

SEQ ID NO: 85525 - DNA, 25 bp, Canis familiaris
cctggccgcagggggtgttcaggcc

SEQ ID NO: 85526 - DNA, 25 bp, Canis familiaris
ccggcaccagggcgtgatggtgcgc

SEQ ID NO: 85527 - DNA, 25 bp, Canis familiaris
ccggattcagtgcaggtttggatgc

SEQ ID NO: 85528 - DNA, 25 bp, Canis familiaris
cctggttcgggctttgtcgaatcgt

SEQ ID NO: 85529 - DNA, 25 bp, Canis familiaris
cctgttcaggagattagtaagtcag

SEQ ID NO: 85530 - DNA, 25 bp, Canis familiaris
cctgttcatggttttggggtgtgtg

SEQ ID NO: 85531 - DNA, 25 bp, Canis familiaris
cctgttgctcggactacggtagttg

SEQ ID NO: 85532 - DNA, 25 bp, Canis familiaris
cctgattggggcactctggatattg

SEQ ID NO: 85533 - DNA, 25 bp, Canis familiaris
cctgtgggagcctgatgcgggatta

SEQ ID NO: 85534 - DNA, 25 bp, Canis familiaris
cctggggtccatcatgcatttggct

SEQ ID NO: 85535 - DNA, 25 bp, Canis familiaris
cctggtggtgccaaagcttctgacc

SEQ ID NO: 85536 - DNA, 25 bp, Canis familiaris
cctcatatacctctacagtctgacc

SEQ ID NO: 85537 - DNA, 25 bp, Canis familiaris
cctctatatgggtttcgacgaagcg

SEQ ID NO: 85538 - DNA, 25 bp, Canis familiaris
cctgtattgggctttctgcatggag

SEQ ID NO: 85539 - DNA, 25 bp, Canis familiaris
cctggctatgggttcctctcagagc

SEQ ID NO: 85540 - DNA, 25 bp, Canis familiaris
cctggcaaatggctagcctcatgaa

SEQ ID NO: 85541 - DNA, 25 bp, Canis familiaris
cctggccaaggtcatccatgacaac

SEQ ID NO: 85542 - DNA, 25 bp, Canis familiaris
cctgcagaaaagaaacctaccacgg

SEQ ID NO: 85543 - DNA, 25 bp, Canis familiaris
cctgagcaaaaatgggcatccaccc

SEQ ID NO: 85544 - DNA, 25 bp, Canis familiaris
cctggttgaagttgtgtcacacaca

SEQ ID NO: 85545 - DNA, 25 bp, Canis familiaris
cctggtgctgaggtgtgtgacacac

SEQ ID NO: 85546 - DNA, 25 bp, Canis familiaris
cctgggcagcagctggtggccagga

SEQ ID NO: 85547 - DNA, 25 bp, Canis familiaris
cctgggccgcctggcggccattgtg

SEQ ID NO: 85548 - DNA, 25 bp, Canis familiaris
cctggtccggtccagatgccaagat

SEQ ID NO: 85549 - DNA, 25 bp, Canis familiaris
ccggccctggaggagatctccatga

SEQ ID NO: 85550 - DNA, 25 bp, Canis familiaris
ccggccgcagtaccagatttggaat

SEQ ID NO: 85551 - DNA, 25 bp, Canis familiaris
cctgcaggaaccccaagttggcaat

SEQ ID NO: 85552 - DNA, 25 bp, Canis familiaris
cctggtgaacggccacgattggttg

SEQ ID NO: 85553 - DNA, 25 bp, Canis familiaris
cctggggacagggcgggtgagtctg

SEQ ID NO: 85554 - DNA, 25 bp, Canis familiaris
ccgggaggcagggcctgagctcccg

SEQ ID NO: 85555 - DNA, 25 bp, Canis familiaris
ccggagaagcagcatctctgtcctt

SEQ ID NO: 85556 - DNA, 25 bp, Canis familiaris
ccgggatagcagctgcaaggactct

SEQ ID NO: 85557 - DNA, 25 bp, Canis familiaris
ccgggatgacatcggcattatcctc

SEQ ID NO: 85558 - DNA, 25 bp, Canis familiaris
cctgggtaagagtctttcgctctcc

SEQ ID NO: 85559 - DNA, 25 bp, Canis familiaris
ccttgaggaacgttttgcagccaac

SEQ ID NO: 85560 - DNA, 25 bp, Canis familiaris
cctctgacgaatgggtatattgaaa

SEQ ID NO: 85561 - DNA, 25 bp, Canis familiaris
cctgtgagggtcccatcaattgatg

SEQ ID NO: 85562 - DNA, 25 bp, Canis familiaris
cctggagggctccctgatctatgga

SEQ ID NO: 85563 - DNA, 25 bp, Canis familiaris
cctggcgccgtgtagctgattagga

SEQ ID NO: 85564 - DNA, 25 bp, Canis familiaris
ccggagcaggtggctgtttgaggaa

SEQ ID NO: 85565 - DNA, 25 bp, Canis familiaris
ccggatgcttcagctttctggaaat

SEQ ID NO: 85566 - DNA, 25 bp, Canis familiaris
ccggcatctccaggctttcctggag

SEQ ID NO: 85567 - DNA, 25 bp, Canis familiaris
ccggcacaccaggagttcttggacc

SEQ ID NO: 85568 - DNA, 25 bp, Canis familiaris
ccggccccagagagtcctaaaggca

SEQ ID NO: 85569 - DNA, 25 bp, Canis familiaris
tcgtacctccggagtccttgggaga

SEQ ID NO: 85570 - DNA, 25 bp, Canis familiaris
cctccctcgcggagttgttgggatt

SEQ ID NO: 85571 - DNA, 25 bp, Canis familiaris
cctccacccttgtggttgttgtgcc

SEQ ID NO: 85572 - DNA, 25 bp, Canis familiaris
cctggcatccagctcaaggctgtta

SEQ ID NO: 85573 - DNA, 25 bp, Canis familiaris
cctgtgctcgagtccagaggtagtt

SEQ ID NO: 85574 - DNA, 25 bp, Canis familiaris
cctgtacactgacttgagaccagtt

SEQ ID NO: 85575 - DNA, 25 bp, Canis familiaris
cctctgccccgggcagaccagttag

SEQ ID NO: 85576 - DNA, 25 bp, Canis familiaris
cctggtcccagtgcatttcagtaca

SEQ ID NO: 85577 - DNA, 25 bp, Canis familiaris
cctggctttccttctttcaatcata

SEQ ID NO: 85578 - DNA, 25 bp, Canis familiaris
cctggataccgcagctaggaataat

SEQ ID NO: 85579 - DNA, 25 bp, Canis familiaris
cctggataccgcagctaggaataat

SEQ ID NO: 85580 - DNA, 25 bp, Canis familiaris
cctggatatcgcgggtatcaatata

SEQ ID NO: 85581 - DNA, 25 bp, Canis familiaris
cctcgaactcctgtccaatgatata

SEQ ID NO: 85582 - DNA, 25 bp, Canis familiaris
cctccaaccttgttgatcctgttaa

SEQ ID NO: 85583 - DNA, 25 bp, Canis familiaris
cctccgttaatgcgtcctgaataaa

SEQ ID NO: 85584 - DNA, 25 bp, Canis familiaris
cctcctttaaaggctgtccaagcat

SEQ ID NO: 85585 - DNA, 25 bp, Canis familiaris
cctgtacatgtatcccttcaaatct

SEQ ID NO: 85586 - DNA, 25 bp, Canis familiaris
cctgatgatgcgcataccttaaata

SEQ ID NO: 85587 - DNA, 25 bp, Canis familiaris
cctctatgcacttgccttgtactaa

SEQ ID NO: 85588 - DNA, 25 bp, Canis familiaris
ccagacgagcttccttgaactaaag

SEQ ID NO: 85589 - DNA, 25 bp, Canis familiaris
cctgagcggactcccaaactaaaca

SEQ ID NO: 85590 - DNA, 25 bp, Canis familiaris
cctggggattcacacacactggaac

SEQ ID NO: 85591 - DNA, 25 bp, Canis familiaris
cctcagggtactcacacactttata

SEQ ID NO: 85592 - DNA, 25 bp, Canis familiaris
cctcgggtaatgtccaagctcccat

SEQ ID NO: 85593 - DNA, 25 bp, Canis familiaris
cctcggttacaagcggttctatgac

SEQ ID NO: 85594 - DNA, 25 bp, Canis familiaris
cctggtttccaagccgtgtggacag

SEQ ID NO: 85595 - DNA, 25 bp, Canis familiaris
cctgttatctcgtattcggaccgac

SEQ ID NO: 85596 - DNA, 25 bp, Canis familiaris
cctgcttttccgatcagagtccaga

SEQ ID NO: 85597 - DNA, 25 bp, Canis familiaris
cctgtgggtcagggtcgcagggcag

SEQ ID NO: 85598 - DNA, 25 bp, Canis familiaris
cctgtggctgtgccaggccaagaag

SEQ ID NO: 85599 - DNA, 25 bp, Canis familiaris
cctggtgctgtctaactcatatgag

SEQ ID NO: 85600 - DNA, 25 bp, Canis familiaris
cctggcagcaggtatatcgtgatgg

SEQ ID NO: 85601 - DNA, 25 bp, Canis familiaris
cctggcacgagatcatgctgtcttg

SEQ ID NO: 85602 - DNA, 25 bp, Canis familiaris
cctggagccagcagatgctccttcc

SEQ ID NO: 85603 - DNA, 25 bp, Canis familiaris
cctggatcatggaaccacgctgtcc

SEQ ID NO: 85604 - DNA, 25 bp, Canis familiaris
cctgtattcatgtaccgagtgctcc

SEQ ID NO: 85605 - DNA, 25 bp, Canis familiaris
cctggcacacagagcctgaggtccg

SEQ ID NO: 85606 - DNA, 25 bp, Canis familiaris
cctgtctgaagcagcctgaacgagc

SEQ ID NO: 85607 - DNA, 25 bp, Canis familiaris
cctggctggatgagccgccactggc

SEQ ID NO: 85608 - DNA, 25 bp, Canis familiaris
cctggtggtggggctgtgcacaggc

SEQ ID NO: 85609 - DNA, 25 bp, Canis familiaris
cctggcggcggacgtcatgaagagc

SEQ ID NO: 85610 - DNA, 25 bp, Canis familiaris
cctgggctgggggtagagagatggc

SEQ ID NO: 85611 - DNA, 25 bp, Canis familiaris
cctgggtgttggctggaggactggt

SEQ ID NO: 85612 - DNA, 25 bp, Canis familiaris
cctgggtattgtctttgtcacggat

SEQ ID NO: 85613 - DNA, 25 bp, Canis familiaris
cctggaggattttgctcaggcccgg

SEQ ID NO: 85614 - DNA, 25 bp, Canis familiaris
cctggagccatttggctctgggggg

SEQ ID NO: 85615 - DNA, 25 bp, Canis familiaris
cctggtgccaggctcctggaggaca

SEQ ID NO: 85616 - DNA, 25 bp, Canis familiaris
cctgcttcaaggcctcgtgaattaa

SEQ ID NO: 85617 - DNA, 25 bp, Canis familiaris
cctctcctgtgaaccttgaattgcg

SEQ ID NO: 85618 - DNA, 25 bp, Canis familiaris
cctgctcgtgtggtggacgaacggg

SEQ ID NO: 85619 - DNA, 25 bp, Canis familiaris
cctgtcggtggccacacaagacgag

SEQ ID NO: 85620 - DNA, 25 bp, Canis familiaris
cctggctgtggatcaacacacacca

SEQ ID NO: 85621 - DNA, 25 bp, Canis familiaris
cctggcttggatcaacacacccaag

SEQ ID NO: 85622 - DNA, 25 bp, Canis familiaris
cctggcctgaccaaaaatcccatga

SEQ ID NO: 85623 - DNA, 25 bp, Canis familiaris
cctggcctgactaaaaatccaatga

SEQ ID NO: 85624 - DNA, 25 bp, Canis familiaris
cctgtccgactacaacatccagaag

SEQ ID NO: 85625 - DNA, 25 bp, Canis familiaris
cctgtcgccctatgtatctccaaga

SEQ ID NO: 85626 - DNA, 25 bp, Canis familiaris
cctgttggccactaatacaccttat

SEQ ID NO: 85627 - DNA, 25 bp, Canis familiaris
cctgttgaccaatatacccagtgat

SEQ ID NO: 85628 - DNA, 25 bp, Canis familiaris
cctgtgctactatgagtacccgctg

SEQ ID NO: 85629 - DNA, 25 bp, Canis familiaris
cctggctcctcatgaaactggcaat

SEQ ID NO: 85630 - DNA, 25 bp, Canis familiaris
cctggctcagcctggagactaagca

SEQ ID NO: 85631 - DNA, 25 bp, Canis familiaris
cctgaccagcactttacctgatacg

SEQ ID NO: 85632 - DNA, 25 bp, Canis familiaris
cctccaaccattaatcttattcgga

SEQ ID NO: 85633 - DNA, 25 bp, Canis familiaris
cctcagaatccgttcttctgttctc

SEQ ID NO: 85634 - DNA, 25 bp, Canis familiaris
cctgagaactgtttgtccgatgcct

SEQ ID NO: 85635 - DNA, 25 bp, Canis familiaris
cctatggaatgtaatcccggtcatt

SEQ ID NO: 85636 - DNA, 25 bp, Canis familiaris
cctgaagattttacagagtctgtca

SEQ ID NO: 85637 - DNA, 25 bp, Canis familiaris
cctgaggcagttgcgcgaggtgatc

SEQ ID NO: 85638 - DNA, 25 bp, Canis familiaris
gccgttagcgactgcgacgttcgat

SEQ ID NO: 85639 - DNA, 25 bp, Canis familiaris
cctgttaccacatggtccttcagaa

SEQ ID NO: 85640 - DNA, 25 bp, Canis familiaris
cctgttatcctaaaggccttctact

SEQ ID NO: 85641 - DNA, 25 bp, Canis familiaris
cctgcttccctaaagggcaagccca

SEQ ID NO: 85642 - DNA, 25 bp, Canis familiaris
cctgggccctagtgaggacactcta

SEQ ID NO: 85643 - DNA, 25 bp, Canis familiaris
cctggtgttcggttatggagcctct

SEQ ID NO: 85644 - DNA, 25 bp, Canis familiaris
cctgaggttctcttctcagggcctc

SEQ ID NO: 85645 - DNA, 25 bp, Canis familiaris
cctgaggctcttttccagccttcct

SEQ ID NO: 85646 - DNA, 25 bp, Canis familiaris
cctgatggctcttttctggcaattg

SEQ ID NO: 85647 - DNA, 25 bp, Canis familiaris
cctggaccagctgcttagcaatctg

SEQ ID NO: 85648 - DNA, 25 bp, Canis familiaris
cctggcaccagaaattcccatcatg

SEQ ID NO: 85649 - DNA, 25 bp, Canis familiaris
cctgagccctcaaattcttaagttt

SEQ ID NO: 85650 - DNA, 25 bp, Canis familiaris
cctggaccgctttgtcttcaaagta

SEQ ID NO: 85651 - DNA, 25 bp, Canis familiaris
cctggaccatgcctttttcaagaag

SEQ ID NO: 85652 - DNA, 25 bp, Canis familiaris
cctcgagcaccgtttagtctaaaat

SEQ ID NO: 85653 - DNA, 25 bp, Canis familiaris
cctcagaagccgtcatccggctcaa

SEQ ID NO: 85654 - DNA, 25 bp, Canis familiaris
cctgtgagagctcgagacaacgcct

SEQ ID NO: 85655 - DNA, 25 bp, Canis familiaris
cctgtggaggaaccatgagcgcccc

SEQ ID NO: 85656 - DNA, 25 bp, Canis familiaris
cctgtggaggaaccatgagcgcccc

SEQ ID NO: 85657 - DNA, 25 bp, Canis familiaris
cctgcttggaaatagagcccctctc

SEQ ID NO: 85658 - DNA, 25 bp, Canis familiaris
cctgctccgaaaattaaccctcaca

SEQ ID NO: 85659 - DNA, 25 bp, Canis familiaris
cctcctatggttcctcaaacctaca

SEQ ID NO: 85660 - DNA, 25 bp, Canis familiaris
cctccttggattccttcacgaaagc

SEQ ID NO: 85661 - DNA, 25 bp, Canis familiaris
cctctttggttccactcggagaaca

SEQ ID NO: 85662 - DNA, 25 bp, Canis familiaris
cctctatttgctgcggccgagtaag

SEQ ID NO: 85663 - DNA, 25 bp, Canis familiaris
cctggctggactgccgggagataag

SEQ ID NO: 85664 - DNA, 25 bp, Canis familiaris
aaacctgagtctgctgattgaaata

SEQ ID NO: 85665 - DNA, 25 bp, Canis familiaris
cctggcagagaaactggggggcagt

SEQ ID NO: 85666 - DNA, 25 bp, Canis familiaris
ccggcgcacgacgtgcgggtggcgg

SEQ ID NO: 85667 - DNA, 25 bp, Canis familiaris
ccggcggcgacgaggaggaggatgg

SEQ ID NO: 85668 - DNA, 25 bp, Canis familiaris
ccggctggcgggacaagctggagta

SEQ ID NO: 85669 - DNA, 25 bp, Canis familiaris
cctggctgtgggctccagggatctc

SEQ ID NO: 85670 - DNA, 25 bp, Canis familiaris
cctggcagggggacacaggcactct

SEQ ID NO: 85671 - DNA, 25 bp, Canis familiaris
cctggcagggggacacaggcactct

SEQ ID NO: 85672 - DNA, 25 bp, Canis familiaris
cctgcggagggcaacaaggacagct

SEQ ID NO: 85673 - DNA, 25 bp, Canis familiaris
cctcagggggctgcttggaagtcta

SEQ ID NO: 85674 - DNA, 25 bp, Canis familiaris
cctcccgttttacacatagtataca

SEQ ID NO: 85675 - DNA, 25 bp, Canis familiaris
cctcaacttttctgtgacttgaaaa

SEQ ID NO: 85676 - DNA, 25 bp, Canis familiaris
cctaccttcgttgtctttagcagaa

SEQ ID NO: 85677 - DNA, 25 bp, Canis familiaris
cctgtccttggcatgttttgtatcg

SEQ ID NO: 85678 - DNA, 25 bp, Canis familiaris
cctgtcaccaggatcttctttgagc

SEQ ID NO: 85679 - DNA, 25 bp, Canis familiaris
cctgaacacgggacctctatcgaaa

SEQ ID NO: 85680 - DNA, 25 bp, Canis familiaris
cctgatcgtcgtcgtcgttgtcagg

SEQ ID NO: 85681 - DNA, 25 bp, Canis familiaris
cctgtgcgtcattctgttgctagtg

SEQ ID NO: 85682 - DNA, 25 bp, Canis familiaris
cctggttctcgtgtgctagtgaggc

SEQ ID NO: 85683 - DNA, 25 bp, Canis familiaris
cctggcccatctgcttgctagggcc

SEQ ID NO: 85684 - DNA, 25 bp, Canis familiaris
ccggccactcccgattataatgcca

SEQ ID NO: 85685 - DNA, 25 bp, Canis familiaris
cctggcctcccaggagtatagagcc

SEQ ID NO: 85686 - DNA, 25 bp, Canis familiaris
cctggcatctctccttgaaaaagaa

SEQ ID NO: 85687 - DNA, 25 bp, Canis familiaris
cctggctgttactccaagaatacaa

SEQ ID NO: 85688 - DNA, 25 bp, Canis familiaris
cctggtcttggcactcatggaaaca

SEQ ID NO: 85689 - DNA, 25 bp, Canis familiaris
cctggcctgggatcctgaaaggacc

SEQ ID NO: 85690 - DNA, 25 bp, Canis familiaris
cctggcacgtccaccaggtacgaac

SEQ ID NO: 85691 - DNA, 25 bp, Canis familiaris
cctgtccttccagccaaggactggg

SEQ ID NO: 85692 - DNA, 25 bp, Canis familiaris
ccaggcgtccttgccaaagaaggcc

SEQ ID NO: 85693 - DNA, 25 bp, Canis familiaris
cctgggccaactggtcaacaacggc

SEQ ID NO: 85694 - DNA, 25 bp, Canis familiaris
cctggtgctcccggaaacaaaggag

SEQ ID NO: 85695 - DNA, 25 bp, Canis familiaris
cctgtgcgcctcggggcaaagaaga

SEQ ID NO: 85696 - DNA, 25 bp, Canis familiaris
ccggctcctgcaaagtgcacaagag

SEQ ID NO: 85697 - DNA, 25 bp, Canis familiaris
cctggctctggacactgcaccagag

SEQ ID NO: 85698 - DNA, 25 bp, Canis familiaris
cctggctttgtctctgcaaacagtg

SEQ ID NO: 85699 - DNA, 25 bp, Canis familiaris
ccggcctgtgtcctctgaaagagga

SEQ ID NO: 85700 - DNA, 25 bp, Canis familiaris
ccggctcgggcggctgaagaacgag

SEQ ID NO: 85701 - DNA, 25 bp, Canis familiaris
cctgcagctagggggctgaatacca

SEQ ID NO: 85702 - DNA, 25 bp, Canis familiaris
cctgctccaggcaggggaaggccct

SEQ ID NO: 85703 - DNA, 25 bp, Canis familiaris
cctgaagaggccagcgggcaagcca

SEQ ID NO: 85704 - DNA, 25 bp, Canis familiaris
cctgaagggcagaccccagcagatc

SEQ ID NO: 85705 - DNA, 25 bp, Canis familiaris
cctgaaggcggccacggaagtcgac

SEQ ID NO: 85706 - DNA, 25 bp, Canis familiaris
cctggagcgctcacagaggctagtc

SEQ ID NO: 85707 - DNA, 25 bp, Canis familiaris
cctgtggaccaggagcggctagatc

SEQ ID NO: 85708 - DNA, 25 bp, Canis familiaris
cctggtcaccagggctgccatttgc

SEQ ID NO: 85709 - DNA, 25 bp, Canis familiaris
cctggtcacacactcagctccagga

SEQ ID NO: 85710 - DNA, 25 bp, Canis familiaris
cctggaatcaagtctcacatcaggc

SEQ ID NO: 85711 - DNA, 25 bp, Canis familiaris
cctgggatcgagttctgcatcgggc

SEQ ID NO: 85712 - DNA, 25 bp, Canis familiaris
cctggggctgaggctgcagctcagg

SEQ ID NO: 85713 - DNA, 25 bp, Canis familiaris
cctgtgggtgaagtcctgcaacttc

SEQ ID NO: 85714 - DNA, 25 bp, Canis familiaris
cctggtgagattctttcatccttcc

SEQ ID NO: 85715 - DNA, 25 bp, Canis familiaris
cctcctagatgtctgttcgtcatgg

SEQ ID NO: 85716 - DNA, 25 bp, Canis familiaris
cctcctggagtgagtccagctcctg

SEQ ID NO: 85717 - DNA, 25 bp, Canis familiaris
cctggtggatctgcagtctgagcta

SEQ ID NO: 85718 - DNA, 25 bp, Canis familiaris
cctggcttgttttgcattgatgtca

SEQ ID NO: 85719 - DNA, 25 bp, Canis familiaris
cctgagtttctgttgatttgctacc

SEQ ID NO: 85720 - DNA, 25 bp, Canis familiaris
cctggtgcctggttgacttgtggca

SEQ ID NO: 85721 - DNA, 25 bp, Canis familiaris
cctgagcagcctgagctacttcaag

SEQ ID NO: 85722 - DNA, 25 bp, Canis familiaris
cctgaagctgcctcaagtccacagg

SEQ ID NO: 85723 - DNA, 25 bp, Canis familiaris
cctgggctgagggaattcgacattg

SEQ ID NO: 85724 - DNA, 25 bp, Canis familiaris
ccggctctgaggaaatctgaaatag

SEQ ID NO: 85725 - DNA, 25 bp, Canis familiaris
cctggcttgcagaaaatccagaaaa

SEQ ID NO: 85726 - DNA, 25 bp, Canis familiaris
cctggctccattcccagggaacaga

SEQ ID NO: 85727 - DNA, 25 bp, Canis familiaris
cctggctccgtacaagtgcaaatga

SEQ ID NO: 85728 - DNA, 25 bp, Canis familiaris
cctggctcccagctataggactaaa

SEQ ID NO: 85729 - DNA, 25 bp, Canis familiaris
cctggactcagacggatagctactc

SEQ ID NO: 85730 - DNA, 25 bp, Canis familiaris
cctggcccagagctatagctggcgc

SEQ ID NO: 85731 - DNA, 25 bp, Canis familiaris
cctgagcatccgtgtctagggagcc

SEQ ID NO: 85732 - DNA, 25 bp, Canis familiaris
cctggcacccagcacaatgaagatc

SEQ ID NO: 85733 - DNA, 25 bp, Canis familiaris
cctggacccactagccatgaatatg

SEQ ID NO: 85734 - DNA, 25 bp, Canis familiaris
cctgagaagccgggcacatgactaa

SEQ ID NO: 85735 - DNA, 25 bp, Canis familiaris
cctgcagtacatgcgggctgaccag

SEQ ID NO: 85736 - DNA, 25 bp, Canis familiaris
cctggcttcatggcaggcttaccag

SEQ ID NO: 85737 - DNA, 25 bp, Canis familiaris
cctggccgatgggctgcttgagaca

SEQ ID NO: 85738 - DNA, 25 bp, Canis familiaris
cctggcctgagggctccaggagcag

SEQ ID NO: 85739 - DNA, 25 bp, Canis familiaris
gcgcggactagtctccgtgaagtgt

SEQ ID NO: 85740 - DNA, 25 bp, Canis familiaris
cctgtgactactctgttgtggtgtt

SEQ ID NO: 85741 - DNA, 25 bp, Canis familiaris
cctgtaattctgctgctgtgatggg

SEQ ID NO: 85742 - DNA, 25 bp, Canis familiaris
cctggccaactgccagctggaggcc

SEQ ID NO: 85743 - DNA, 25 bp, Canis familiaris
cctggcacactggcaagctgaagac

SEQ ID NO: 85744 - DNA, 25 bp, Canis familiaris
cctggaagctggtcaggtggccgtc

SEQ ID NO: 85745 - DNA, 25 bp, Canis familiaris
cctcgagcagggtcacgtggcagag

SEQ ID NO: 85746 - DNA, 25 bp, Canis familiaris
cctggagcgcgtgcactttgagaag

SEQ ID NO: 85747 - DNA, 25 bp, Canis familiaris
cctggaggcacggatccggcagaag

SEQ ID NO: 85748 - DNA, 25 bp, Canis familiaris
cctggagacacagcctcctgagaag

SEQ ID NO: 85749 - DNA, 25 bp, Canis familiaris
cctggcagagatctccctgaggaac

SEQ ID NO: 85750 - DNA, 25 bp, Canis familiaris
cctttgagagtattgcggagtgaac

SEQ ID NO: 85751 - DNA, 25 bp, Canis familiaris
cctatacacagtttggaggaaaacg

SEQ ID NO: 85752 - DNA, 25 bp, Canis familiaris
cctgtccagccctagggggaaactg

SEQ ID NO: 85753 - DNA, 25 bp, Canis familiaris
cctgtcatcccttcagggtgacgat

SEQ ID NO: 85754 - DNA, 25 bp, Canis familiaris
cctgtgccctgcaacgaggagcacg

SEQ ID NO: 85755 - DNA, 25 bp, Canis familiaris
cctggccctctctgagggcagcagg

SEQ ID NO: 85756 - DNA, 25 bp, Canis familiaris
cctggcccctgaagcaggagcagag

SEQ ID NO: 85757 - DNA, 25 bp, Canis familiaris
cctggtctcgtgcacacagaggagt

SEQ ID NO: 85758 - DNA, 25 bp, Canis familiaris
cctggcccctgcaaatcagaggtat

SEQ ID NO: 85759 - DNA, 25 bp, Canis familiaris
cctggcccaaccacatgaggtattc

SEQ ID NO: 85760 - DNA, 25 bp, Canis familiaris
cctgcggccaatactgccaagtttc

SEQ ID NO: 85761 - DNA, 25 bp, Canis familiaris
cctctggtaatgtttcccttctgag

SEQ ID NO: 85762 - DNA, 25 bp, Canis familiaris
cctatggaaattaatccccttcagt

SEQ ID NO: 85763 - DNA, 25 bp, Canis familiaris
cctatgctgaaagatattcccttat

SEQ ID NO: 85764 - DNA, 25 bp, Canis familiaris
cctgactgaccactttaagcctttg

SEQ ID NO: 85765 - DNA, 25 bp, Canis familiaris
cctcccaggagtatagagcctcctg

SEQ ID NO: 85766 - DNA, 25 bp, Canis familiaris
gcccccgaatggctacagaccaaag

SEQ ID NO: 85767 - DNA, 25 bp, Canis familiaris
ccaacccaagtgtgacattccaaaa

SEQ ID NO: 85768 - DNA, 25 bp, Canis familiaris
ccaccccaagcctgaattaatctat

SEQ ID NO: 85769 - DNA, 25 bp, Canis familiaris
cctgttccgacctgtatcaatttaa

SEQ ID NO: 85770 - DNA, 25 bp, Canis familiaris
cctgttccaacctgtatcatttaaa

SEQ ID NO: 85771 - DNA, 25 bp, Canis familiaris
cctgcttccacctttgatttattaa

SEQ ID NO: 85772 - DNA, 25 bp, Canis familiaris
cctgttacccagctgtattgttgcc

SEQ ID NO: 85773 - DNA, 25 bp, Canis familiaris
gcctggtgaaccaggtgtttgggca

SEQ ID NO: 85774 - DNA, 25 bp, Canis familiaris
cctcgcataacgtgggttttggata

SEQ ID NO: 85775 - DNA, 25 bp, Canis familiaris
cctaggatgccctgggttcttggta

SEQ ID NO: 85776 - DNA, 25 bp, Canis familiaris
cctaacagcaactggtttattttca

SEQ ID NO: 85777 - DNA, 25 bp, Canis familiaris
ccacgtgtgctataggttttttgta

SEQ ID NO: 85778 - DNA, 25 bp, Canis familiaris
gccccatggtggtgaattttgtttc

SEQ ID NO: 85779 - DNA, 25 bp, Canis familiaris
gcctacttgggacaagtcctgtttt

SEQ ID NO: 85780 - DNA, 25 bp, Canis familiaris
cctgagttggtactgtttactttct

SEQ ID NO: 85781 - DNA, 25 bp, Canis familiaris
cctgggaaaatgtttattctttctg

SEQ ID NO: 85782 - DNA, 25 bp, Canis familiaris
cctgtgtccaaatattgttctccac

SEQ ID NO: 85783 - DNA, 25 bp, Canis familiaris
cctggtcacaattgagaatttctta

SEQ ID NO: 85784 - DNA, 25 bp, Canis familiaris
cctggcctgagttggagcatggtct

SEQ ID NO: 85785 - DNA, 25 bp, Canis familiaris
cctggctcgacaaggagtgcgtcta

SEQ ID NO: 85786 - DNA, 25 bp, Canis familiaris
cctggctcggcaagtagatggcgat

SEQ ID NO: 85787 - DNA, 25 bp, Canis familiaris
cctggctcacgaagttggctggaag

SEQ ID NO: 85788 - DNA, 25 bp, Canis familiaris
cctggctcacgaagttggctggaag

SEQ ID NO: 85789 - DNA, 25 bp, Canis familiaris
cctggctcacgaagttggctggaag

SEQ ID NO: 85790 - DNA, 25 bp, Canis familiaris
cctggctcacgaagttggctggaag

SEQ ID NO: 85791 - DNA, 25 bp, Canis familiaris
tccggctccgggagggaaaggcctg

SEQ ID NO: 85792 - DNA, 25 bp, Canis familiaris
cctgtgaccgggaggggacaggccg

SEQ ID NO: 85793 - DNA, 25 bp, Canis familiaris
cctggaacagggagggatacctggc

SEQ ID NO: 85794 - DNA, 25 bp, Canis familiaris
cctgggtggcttaggggatccctgg

SEQ ID NO: 85795 - DNA, 25 bp, Canis familiaris
cctggtgggtacaggaatctgccat

SEQ ID NO: 85796 - DNA, 25 bp, Canis familiaris
cctgggggtccagatagatgctgtt

SEQ ID NO: 85797 - DNA, 25 bp, Canis familiaris
cctggggaccaagaagctgctgacc

SEQ ID NO: 85798 - DNA, 25 bp, Canis familiaris
cctgttagaagcaatgtaaatgtga

SEQ ID NO: 85799 - DNA, 25 bp, Canis familiaris
cctgtttggatcgtgtcggagtgca

SEQ ID NO: 85800 - DNA, 25 bp, Canis familiaris
cctggttgcatgtcccacgaagata

SEQ ID NO: 85801 - DNA, 25 bp, Canis familiaris
cctcagctggcatcatggaccacga

SEQ ID NO: 85802 - DNA, 25 bp, Canis familiaris
cctgcagctggattacgcaacagta

SEQ ID NO: 85803 - DNA, 25 bp, Canis familiaris
cctgcagctggattacgcaacagta

SEQ ID NO: 85804 - DNA, 25 bp, Canis familiaris
ccttcaaaatatagcacagcagtca

SEQ ID NO: 85805 - DNA, 25 bp, Canis familiaris
cctctcaaaagactgtgcacaggcc

SEQ ID NO: 85806 - DNA, 25 bp, Canis familiaris
cctgtcaaaaattgagtcacgtccg

SEQ ID NO: 85807 - DNA, 25 bp, Canis familiaris
cctgtcgagatgtcacatgggcaca

SEQ ID NO: 85808 - DNA, 25 bp, Canis familiaris
cctggagagcagtagctcccatcat

SEQ ID NO: 85809 - DNA, 25 bp, Canis familiaris
cctgctgagcagggagcccaacatg

SEQ ID NO: 85810 - DNA, 25 bp, Canis familiaris
cctgtgtgcagccgagccataaaga

SEQ ID NO: 85811 - DNA, 25 bp, Canis familiaris
cctgtgcagccgcagcgtaggaggg

SEQ ID NO: 85812 - DNA, 25 bp, Canis familiaris
cctgtgcagctccacattggggtgg

SEQ ID NO: 85813 - DNA, 25 bp, Canis familiaris
cctggagctgccaagtggggagccg

SEQ ID NO: 85814 - DNA, 25 bp, Canis familiaris
cctggcgcacctggatgggcagcgc

SEQ ID NO: 85815 - DNA, 25 bp, Canis familiaris
cctggtgccgctttggcaagcggga

SEQ ID NO: 85816 - DNA, 25 bp, Canis familiaris
cctgggctgggcctgagaacgaggg

SEQ ID NO: 85817 - DNA, 25 bp, Canis familiaris
cctggacttagcctgcatgtactgg

SEQ ID NO: 85818 - DNA, 25 bp, Canis familiaris
cctggcatcattacgtgtgtgtgtg

SEQ ID NO: 85819 - DNA, 25 bp, Canis familiaris
cctgtgcatcaggggctgtgaggga

SEQ ID NO: 85820 - DNA, 25 bp, Canis familiaris
cctgctgagcaaggagcctgatgtg

SEQ ID NO: 85821 - DNA, 25 bp, Canis familiaris
cctggagaccatggcttgatggaca

SEQ ID NO: 85822 - DNA, 25 bp, Canis familiaris
cctgggctgccagtgcttatggcag

SEQ ID NO: 85823 - DNA, 25 bp, Canis familiaris
cctgcgtgcgccatgtaatgctggc

SEQ ID NO: 85824 - DNA, 25 bp, Canis familiaris
cctggtggcccagtgatttagcact

SEQ ID NO: 85825 - DNA, 25 bp, Canis familiaris
cctgactagcccatcattttgatgt

SEQ ID NO: 85826 - DNA, 25 bp, Canis familiaris
cctgatctcactcacacatgttttt

SEQ ID NO: 85827 - DNA, 25 bp, Canis familiaris
cctgtcacacattgagaatttctta

SEQ ID NO: 85828 - DNA, 25 bp, Canis familiaris
cctacaacattgaagatttacagcc

SEQ ID NO: 85829 - DNA, 25 bp, Canis familiaris
cctgtcacgttggagtcggaagcgc

SEQ ID NO: 85830 - DNA, 25 bp, Canis familiaris
cctgtcaccctcagtaggagacgtt

SEQ ID NO: 85831 - DNA, 25 bp, Canis familiaris
cctgtaccccaaggcagcagagcct

SEQ ID NO: 85832 - DNA, 25 bp, Canis familiaris
cctggcatgccagagaagcagagag

SEQ ID NO: 85833 - DNA, 25 bp, Canis familiaris
cctggcaggagtcagagcatggagg

SEQ ID NO: 85834 - DNA, 25 bp, Canis familiaris
cctgtgagggtgcgcagctggagag

SEQ ID NO: 85835 - DNA, 25 bp, Canis familiaris
cctggcacggggccagggagcggct

SEQ ID NO: 85836 - DNA, 25 bp, Canis familiaris
cctgaacagagccacagaaggaccg

SEQ ID NO: 85837 - DNA, 25 bp, Canis familiaris
cctgagaagccacctgaacgagagt

SEQ ID NO: 85838 - DNA, 25 bp, Canis familiaris
cctgcaaagctcctgcgaggcggag

SEQ ID NO: 85839 - DNA, 25 bp, Canis familiaris
cctgtgaggcatttggagcctgaag

SEQ ID NO: 85840 - DNA, 25 bp, Canis familiaris
cctggaggcgttcggcaatgccaag

SEQ ID NO: 85841 - DNA, 25 bp, Canis familiaris
cctggcaggcactgtggacacccag

SEQ ID NO: 85842 - DNA, 25 bp, Canis familiaris
cctgaatccacaactggggccacaa

SEQ ID NO: 85843 - DNA, 25 bp, Canis familiaris
cctacatggcacaaccaggatccag

SEQ ID NO: 85844 - DNA, 25 bp, Canis familiaris
cctggcagtcctgctcaggatggca

SEQ ID NO: 85845 - DNA, 25 bp, Canis familiaris
cctgatgcctcttctccaggaggca

SEQ ID NO: 85846 - DNA, 25 bp, Canis familiaris
cctgtgtcttagccacatgagagga

SEQ ID NO: 85847 - DNA, 25 bp, Canis familiaris
cctgtcctgtgactgcatcacaacg

SEQ ID NO: 85848 - DNA, 25 bp, Canis familiaris
cctgtcttccaggattccatctgga

SEQ ID NO: 85849 - DNA, 25 bp, Canis familiaris
cctgttatccaggcactcaatatag

SEQ ID NO: 85850 - DNA, 25 bp, Canis familiaris
cctgtcttgcctcatccaaaaattg

SEQ ID NO: 85851 - DNA, 25 bp, Canis familiaris
cctgtctatgcctaatcccaaaaga

SEQ ID NO: 85852 - DNA, 25 bp, Canis familiaris
cctgtgtggtgctttcccagaataa

SEQ ID NO: 85853 - DNA, 25 bp, Canis familiaris
cctgtgtggtgctttccagaataaa

SEQ ID NO: 85854 - DNA, 25 bp, Canis familiaris
cctggtcgtgtcctcggagacaaag

SEQ ID NO: 85855 - DNA, 25 bp, Canis familiaris
cctgagatcgtgacctgggctgaaa

SEQ ID NO: 85856 - DNA, 25 bp, Canis familiaris
cctgaactgggccgactgccaaata

SEQ ID NO: 85857 - DNA, 25 bp, Canis familiaris
cctgacctgttgcgattccaagtcc

SEQ ID NO: 85858 - DNA, 25 bp, Canis familiaris
cctgtctttgtgcggatccggattc

SEQ ID NO: 85859 - DNA, 25 bp, Canis familiaris
cctgttgtttaagactggctgattc

SEQ ID NO: 85860 - DNA, 25 bp, Canis familiaris
cctgtttatcttgcctggaggtctc

SEQ ID NO: 85861 - DNA, 25 bp, Canis familiaris
cctgtgtctacttcacaagacatgg

SEQ ID NO: 85862 - DNA, 25 bp, Canis familiaris
cctggacttcgagcaagagatggcc

SEQ ID NO: 85863 - DNA, 25 bp, Canis familiaris
cctggtcttcggtggcagggtagcc

SEQ ID NO: 85864 - DNA, 25 bp, Canis familiaris
cctggtcttccgcaggaggtgttca

SEQ ID NO: 85865 - DNA, 25 bp, Canis familiaris
cctgtgctcattcctgctttaaggt

SEQ ID NO: 85866 - DNA, 25 bp, Canis familiaris
cctttcagcgccacttagaggtcgt

SEQ ID NO: 85867 - DNA, 25 bp, Canis familiaris
cctgtcctgggcacccagaggactt

SEQ ID NO: 85868 - DNA, 25 bp, Canis familiaris
cctgtcctgggcacccagaggactt

SEQ ID NO: 85869 - DNA, 25 bp, Canis familiaris
cctgacctggtaccgggagagcaaa

SEQ ID NO: 85870 - DNA, 25 bp, Canis familiaris
cctgtctctgggcgggtgagaccag

SEQ ID NO: 85871 - DNA, 25 bp, Canis familiaris
ccttgtcttttgggagtcctcagcc

SEQ ID NO: 85872 - DNA, 25 bp, Canis familiaris
cctgtggcttgttggtgagacctca

SEQ ID NO: 85873 - DNA, 25 bp, Canis familiaris
cctgtatgcctctggtcgtaccacg

SEQ ID NO: 85874 - DNA, 25 bp, Canis familiaris
cctgtactctgcagggtcttccagg

SEQ ID NO: 85875 - DNA, 25 bp, Canis familiaris
cctgctactctgttccttcacatcc

SEQ ID NO: 85876 - DNA, 25 bp, Canis familiaris
cctgtcactgtgtttatatgctatt

SEQ ID NO: 85877 - DNA, 25 bp, Canis familiaris
cctgtcctggcatcagtagcgtttg

SEQ ID NO: 85878 - DNA, 25 bp, Canis familiaris
cctgatatctgggcgcagcgacagt

SEQ ID NO: 85879 - DNA, 25 bp, Canis familiaris
cctccatggtggcagctggcagtgt

SEQ ID NO: 85880 - DNA, 25 bp, Canis familiaris
cctggaggtggactctgtgctggat

SEQ ID NO: 85881 - DNA, 25 bp, Canis familiaris
cctggggatggaatcatgcggtatc

SEQ ID NO: 85882 - DNA, 25 bp, Canis familiaris
cctgtctgcattcgttagtggtcat

SEQ ID NO: 85883 - DNA, 25 bp, Canis familiaris
cctgttctgtgccttaacttattct

SEQ ID NO: 85884 - DNA, 25 bp, Canis familiaris
ccttccatggttatccgtattcaac

SEQ ID NO: 85885 - DNA, 25 bp, Canis familiaris
cctctacggtgtcttgcagtttata

SEQ ID NO: 85886 - DNA, 25 bp, Canis familiaris
ccatctacggggatgaagtttgatg

SEQ ID NO: 85887 - DNA, 25 bp, Canis familiaris
cctccacatgggcttcttgtttgat

SEQ ID NO: 85888 - DNA, 25 bp, Canis familiaris
cctcggacggccagatattcttgtc

SEQ ID NO: 85889 - DNA, 25 bp, Canis familiaris
cctcttacgtggagctgacttctct

SEQ ID NO: 85890 - DNA, 25 bp, Canis familiaris
cctagaagcactcacctgactttta

SEQ ID NO: 85891 - DNA, 25 bp, Canis familiaris
cctggggcacagcaactactttaaa

SEQ ID NO: 85892 - DNA, 25 bp, Canis familiaris
ccacgtgatgacccaagtactacta

SEQ ID NO: 85893 - DNA, 25 bp, Canis familiaris
ccatccagaaccaagaacattcctt

SEQ ID NO: 85894 - DNA, 25 bp, Canis familiaris
cctcctagagccctgaaattcttgg

SEQ ID NO: 85895 - DNA, 25 bp, Canis familiaris
cctcctgaacctccaagtttctaat

SEQ ID NO: 85896 - DNA, 25 bp, Canis familiaris
gcttcttgtcccacaaactgtaaga

SEQ ID NO: 85897 - DNA, 25 bp, Canis familiaris
cctgttgtcccctcatagtgataaa

SEQ ID NO: 85898 - DNA, 25 bp, Canis familiaris
cctgccgttcacctactaggaaatg

SEQ ID NO: 85899 - DNA, 25 bp, Canis familiaris
cctgccacttcatctttatggtgct

SEQ ID NO: 85900 - DNA, 25 bp, Canis familiaris
cctcaacgaccactttgtcaagctc

SEQ ID NO: 85901 - DNA, 25 bp, Canis familiaris
cctcacagctgagcgttcttcagcg

SEQ ID NO: 85902 - DNA, 25 bp, Canis familiaris
cctcggtagacgctttgtggttgga

SEQ ID NO: 85903 - DNA, 25 bp, Canis familiaris
cctcgcgtagaccaggtagcagctt

SEQ ID NO: 85904 - DNA, 25 bp, Canis familiaris
cctcctgtggtcgggttgacgatgg

SEQ ID NO: 85905 - DNA, 25 bp, Canis familiaris
cctcggggtgaggtagtgacgaagt

SEQ ID NO: 85906 - DNA, 25 bp, Canis familiaris
cctcggccggaggttggccaggttg

SEQ ID NO: 85907 - DNA, 25 bp, Canis familiaris
cctgcgccgaagagagtgggggtct

SEQ ID NO: 85908 - DNA, 25 bp, Canis familiaris
cctgcccaaggtaacacctgtggtc

SEQ ID NO: 85909 - DNA, 25 bp, Canis familiaris
cctgcagcatcttgggaaccttggt

SEQ ID NO: 85910 - DNA, 25 bp, Canis familiaris
cctgagcacctgaggaccacatgga

SEQ ID NO: 85911 - DNA, 25 bp, Canis familiaris
cctggagcctgacgaggccatgctg

SEQ ID NO: 85912 - DNA, 25 bp, Canis familiaris
cctgcagaacaaccggcgtctgttt

SEQ ID NO: 85913 - DNA, 25 bp, Canis familiaris
cctgacaacagagtttcgtggtttg

SEQ ID NO: 85914 - DNA, 25 bp, Canis familiaris
cctgccccatggtttggtggttgga

SEQ ID NO: 85915 - DNA, 25 bp, Canis familiaris
cctgtccctgggatgggcggggagg

SEQ ID NO: 85916 - DNA, 25 bp, Canis familiaris
cctgtcccgggggctggtgaatgtg

SEQ ID NO: 85917 - DNA, 25 bp, Canis familiaris
cctgcccccaggtgaggctaagtca

SEQ ID NO: 85918 - DNA, 25 bp, Canis familiaris
cctcccgcactctgagaggtcaaaa

SEQ ID NO: 85919 - DNA, 25 bp, Canis familiaris
cctgaccagcacgagggttgatctt

SEQ ID NO: 85920 - DNA, 25 bp, Canis familiaris
cctgagtctgacggggatgctcact

SEQ ID NO: 85921 - DNA, 25 bp, Canis familiaris
cctgacctcattggaggtgtccagg

SEQ ID NO: 85922 - DNA, 25 bp, Canis familiaris
cctgaggctctggggagtactcggc

SEQ ID NO: 85923 - DNA, 25 bp, Canis familiaris
cctgagcttctgaggagccccagga

SEQ ID NO: 85924 - DNA, 25 bp, Canis familiaris
cctgtgattgtgaagggcctccaga

SEQ ID NO: 85925 - DNA, 25 bp, Canis familiaris
cctggatggtgcagcagttctagcg

SEQ ID NO: 85926 - DNA, 25 bp, Canis familiaris
cctggagggcagccagtttgtccca

SEQ ID NO: 85927 - DNA, 25 bp, Canis familiaris
cctgagggcaacggcttttaccagc

SEQ ID NO: 85928 - DNA, 25 bp, Canis familiaris
cctgaaggccacagcctttacctgg

SEQ ID NO: 85929 - DNA, 25 bp, Canis familiaris
cctacgagatccagtctgtgtacct

SEQ ID NO: 85930 - DNA, 25 bp, Canis familiaris
cctacaggaagcttgtctggaagtc

SEQ ID NO: 85931 - DNA, 25 bp, Canis familiaris
cctccacaggactgtctggcaatcg

SEQ ID NO: 85932 - DNA, 25 bp, Canis familiaris
cctggtctggagtgtctgaagacag

SEQ ID NO: 85933 - DNA, 25 bp, Canis familiaris
cctggatctttgagtctggtgtcac

SEQ ID NO: 85934 - DNA, 25 bp, Canis familiaris
cctgagagctttgggtctggaggcc

SEQ ID NO: 85935 - DNA, 25 bp, Canis familiaris
cctgggctgtggggcctggacagcc

SEQ ID NO: 85936 - DNA, 25 bp, Canis familiaris
cctgggcttggcgaggttgatcgga

SEQ ID NO: 85937 - DNA, 25 bp, Canis familiaris
cctggttgtacaagacttgagggta

SEQ ID NO: 85938 - DNA, 25 bp, Canis familiaris
cctggtcttcactcctaactgagtg

SEQ ID NO: 85939 - DNA, 25 bp, Canis familiaris
cctgagtcttcttaactgggtggag

SEQ ID NO: 85940 - DNA, 25 bp, Canis familiaris
cctgggttcttttctggggagaatg

SEQ ID NO: 85941 - DNA, 25 bp, Canis familiaris
cctgggtaattgttcttggccaagg

SEQ ID NO: 85942 - DNA, 25 bp, Canis familiaris
cctgggcttacttcactcaggctaa

SEQ ID NO: 85943 - DNA, 25 bp, Canis familiaris
cctgggtgttctgaccattctgaac

SEQ ID NO: 85944 - DNA, 25 bp, Canis familiaris
cctggggctggtgagcgttgtggaa

SEQ ID NO: 85945 - DNA, 25 bp, Canis familiaris
cctgagtggtgggtgcagcgttgcg

SEQ ID NO: 85946 - DNA, 25 bp, Canis familiaris
cctgagggggcaccaggttgagcgc

SEQ ID NO: 85947 - DNA, 25 bp, Canis familiaris
cctgagtagaggaccaggtgtccac

SEQ ID NO: 85948 - DNA, 25 bp, Canis familiaris
cctggggagatgaccgtgtcccctc

SEQ ID NO: 85949 - DNA, 25 bp, Canis familiaris
cctggggaatgaagggatcgctgct

SEQ ID NO: 85950 - DNA, 25 bp, Canis familiaris
cctggtggtatatcgacatccgcaa

SEQ ID NO: 85951 - DNA, 25 bp, Canis familiaris
cctgggtatgcagactgactcctgc

SEQ ID NO: 85952 - DNA, 25 bp, Canis familiaris
cctgtgcttactgactgatccacgt

SEQ ID NO: 85953 - DNA, 25 bp, Canis familiaris
cctgccccagatgacattcgatgga

SEQ ID NO: 85954 - DNA, 25 bp, Canis familiaris
cctgccccaacgacttgtacagaaa

SEQ ID NO: 85955 - DNA, 25 bp, Canis familiaris
cctgccaccagacatcttactagaa

SEQ ID NO: 85956 - DNA, 25 bp, Canis familiaris
cctgtcccatgtgcatcttatttaa

SEQ ID NO: 85957 - DNA, 25 bp, Canis familiaris
cctgttactgtggctcactcttaaa

SEQ ID NO: 85958 - DNA, 25 bp, Canis familiaris
cctgtaccacaggatcactttgaca

SEQ ID NO: 85959 - DNA, 25 bp, Canis familiaris
cctgctcaacaatgtccacttgacg

SEQ ID NO: 85960 - DNA, 25 bp, Canis familiaris
cctgcttagtggttcacacctgaag

SEQ ID NO: 85961 - DNA, 25 bp, Canis familiaris
cctgtgttgctggtctgccagttga

SEQ ID NO: 85962 - DNA, 25 bp, Canis familiaris
cctgatgtgatggttcctctcttgg

SEQ ID NO: 85963 - DNA, 25 bp, Canis familiaris
cctgcaatgtggatctgttttcccc

SEQ ID NO: 85964 - DNA, 25 bp, Canis familiaris
cctgattgggattctctccattccc

SEQ ID NO: 85965 - DNA, 25 bp, Canis familiaris
cctgtctgtgtatccctgattcaca

SEQ ID NO: 85966 - DNA, 25 bp, Canis familiaris
cctgttgtctgtgtcttactatgca

SEQ ID NO: 85967 - DNA, 25 bp, Canis familiaris
cctgttgttgggacccctatcaatt

SEQ ID NO: 85968 - DNA, 25 bp, Canis familiaris
cctgctgtgtttcagcagccctggc

SEQ ID NO: 85969 - DNA, 25 bp, Canis familiaris
cctgccttctagagagacctggggg

SEQ ID NO: 85970 - DNA, 25 bp, Canis familiaris
cctgacttgctggccagaggcatcg

SEQ ID NO: 85971 - DNA, 25 bp, Canis familiaris
cctgatgggtgtgcgagagctctgc

SEQ ID NO: 85972 - DNA, 25 bp, Canis familiaris
cctgaggaggtgacacattgcctgc

SEQ ID NO: 85973 - DNA, 25 bp, Canis familiaris
cctgtaggcaggaccttgtctgaag

SEQ ID NO: 85974 - DNA, 25 bp, Canis familiaris
cctgtcactgggaactatgcatcga

SEQ ID NO: 85975 - DNA, 25 bp, Canis familiaris
cctgtcacattgccgactgatgaag

SEQ ID NO: 85976 - DNA, 25 bp, Canis familiaris
cctgtcacattgccgactgatgaag

SEQ ID NO: 85977 - DNA, 25 bp, Canis familiaris
cctgtcacagagtgctctctgaagg

SEQ ID NO: 85978 - DNA, 25 bp, Canis familiaris
cctgtccgagatacacaatatccag

SEQ ID NO: 85979 - DNA, 25 bp, Canis familiaris
cctctggcagcgaaaagaccccgga

SEQ ID NO: 85980 - DNA, 25 bp, Canis familiaris
cctgctgatacgcaaggacggccgc

SEQ ID NO: 85981 - DNA, 25 bp, Canis familiaris
cctctctgagcgagcggacttcgcc

SEQ ID NO: 85982 - DNA, 25 bp, Canis familiaris
cctgtctggctatgcgaggttcatg

SEQ ID NO: 85983 - DNA, 25 bp, Canis familiaris
cctgctgtggcatggaagtttctga

SEQ ID NO: 85984 - DNA, 25 bp, Canis familiaris
cctgtgttgccgagatgtgatccga

SEQ ID NO: 85985 - DNA, 25 bp, Canis familiaris
cctgcagtctctttctgaggatcca

SEQ ID NO: 85986 - DNA, 25 bp, Canis familiaris
cctgcagagccacttttggtccaag

SEQ ID NO: 85987 - DNA, 25 bp, Canis familiaris
cctgcacagccgctttgtggagctg

SEQ ID NO: 85988 - DNA, 25 bp, Canis familiaris
cctgacccaagtagctgtttgctga

SEQ ID NO: 85989 - DNA, 25 bp, Canis familiaris
cctgactccggcagtgaatgcctat

SEQ ID NO: 85990 - DNA, 25 bp, Canis familiaris
cctgtcctcaggagatggcagcggt

SEQ ID NO: 85991 - DNA, 25 bp, Canis familiaris
cctgggccagctgcgagcagcaggg

SEQ ID NO: 85992 - DNA, 25 bp, Canis familiaris
cctgtggccgctgccatgtatatgg

SEQ ID NO: 85993 - DNA, 25 bp, Canis familiaris
cctgtggccacatctctggagtggg

SEQ ID NO: 85994 - DNA, 25 bp, Canis familiaris
cctgtgtcccaccatcgggtgggtg

SEQ ID NO: 85995 - DNA, 25 bp, Canis familiaris
ccttgtcctaggtgccgggaatgac

SEQ ID NO: 85996 - DNA, 25 bp, Canis familiaris
ccttgtggttggtgagccgggatgg

SEQ ID NO: 85997 - DNA, 25 bp, Canis familiaris
cctgatgtggggcttgactgggggc

SEQ ID NO: 85998 - DNA, 25 bp, Canis familiaris
cctgtgggggagagcactgcccagg

SEQ ID NO: 85999 - DNA, 25 bp, Canis familiaris
ccatggggaaatccagacccaagtg

SEQ ID NO: 86000 - DNA, 25 bp, Canis familiaris
cctccggaggtggcaaccatcgaat

SEQ ID NO: 86001 - DNA, 25 bp, Canis familiaris
cctcccgtggctgaagcaagctgaa

SEQ ID NO: 86002 - DNA, 25 bp, Canis familiaris
cctcctccggatgacatctacgtga

SEQ ID NO: 86003 - DNA, 25 bp, Canis familiaris
cctcctcactggagactacaagtgg

SEQ ID NO: 86004 - DNA, 25 bp, Canis familiaris
cctgctctacatcctggacatacaa

SEQ ID NO: 86005 - DNA, 25 bp, Canis familiaris
cctgttactctccatgactaactgt

SEQ ID NO: 86006 - DNA, 25 bp, Canis familiaris
cctgccaagaccaaactcaactgtc

SEQ ID NO: 86007 - DNA, 25 bp, Canis familiaris
cctgtagccaccaatgtctcaagag

SEQ ID NO: 86008 - DNA, 25 bp, Canis familiaris
cctgtagaccctgttctgaacgttg

SEQ ID NO: 86009 - DNA, 25 bp, Canis familiaris
cctgctcagaccgttttatgatcct

SEQ ID NO: 86010 - DNA, 25 bp, Canis familiaris
cctgtcagtgtctctctgaaacctg

SEQ ID NO: 86011 - DNA, 25 bp, Canis familiaris
cctgtgcaggcctacctgcacattc

SEQ ID NO: 86012 - DNA, 25 bp, Canis familiaris
cctgctgaagcctgccgcctgcacc

SEQ ID NO: 86013 - DNA, 25 bp, Canis familiaris
cctgtccagctcagtaggtcacgtg

SEQ ID NO: 86014 - DNA, 25 bp, Canis familiaris
cctgtccagcttcctggtgtgacag

SEQ ID NO: 86015 - DNA, 25 bp, Canis familiaris
cctgtcccttttagtctgcaagaag

SEQ ID NO: 86016 - DNA, 25 bp, Canis familiaris
cctgtctggcttttcgttgtataaa

SEQ ID NO: 86017 - DNA, 25 bp, Canis familiaris
cctgttggctgttgtcgttgattat

SEQ ID NO: 86018 - DNA, 25 bp, Canis familiaris
cctgctggtctgtggagctgtagtt

SEQ ID NO: 86019 - DNA, 25 bp, Canis familiaris
cctgggcttgtcggagcttgatgtc

SEQ ID NO: 86020 - DNA, 25 bp, Canis familiaris
cctgtcctatatcctgcagttggac

SEQ ID NO: 86021 - DNA, 25 bp, Canis familiaris
cctgtctttatcctgtgcttgatca

SEQ ID NO: 86022 - DNA, 25 bp, Canis familiaris
cctgctcgctggagtggcatttgca

SEQ ID NO: 86023 - DNA, 25 bp, Canis familiaris
cctatcggtgatgttatgatcatga

SEQ ID NO: 86024 - DNA, 25 bp, Canis familiaris
cctgacggtggcttctgagatgcta

SEQ ID NO: 86025 - DNA, 25 bp, Canis familiaris
cctgaggagcctctatgactgtgac

SEQ ID NO: 86026 - DNA, 25 bp, Canis familiaris
cctgggagcccattattctgctagg

SEQ ID NO: 86027 - DNA, 25 bp, Canis familiaris
cctgctgggacttgtagtcgcctag

SEQ ID NO: 86028 - DNA, 25 bp, Canis familiaris
cctgctgttcctgtggtgcccatag

SEQ ID NO: 86029 - DNA, 25 bp, Canis familiaris
cctgcaggtcctggtgaatgccatt

SEQ ID NO: 86030 - DNA, 25 bp, Canis familiaris
cctgcaggtcctggtgaatgccatt

SEQ ID NO: 86031 - DNA, 25 bp, Canis familiaris
cctgcaggtcctggtgaatgccatt

SEQ ID NO: 86032 - DNA, 25 bp, Canis familiaris
cctcggacctcctaatgaattccaa

SEQ ID NO: 86033 - DNA, 25 bp, Canis familiaris
ccttaagccctctttggtgttcaag

SEQ ID NO: 86034 - DNA, 25 bp, Canis familiaris
ccttaagcaccttttctgggtcaga

SEQ ID NO: 86035 - DNA, 25 bp, Canis familiaris
cctccacctcctcttctaggaggaa

SEQ ID NO: 86036 - DNA, 25 bp, Canis familiaris
cctccataccacacgttcgaagaac

SEQ ID NO: 86037 - DNA, 25 bp, Canis familiaris
cctccataccacacgttcgaagaac

SEQ ID NO: 86038 - DNA, 25 bp, Canis familiaris
cctccaacacaaacgtcggcgtatt

SEQ ID NO: 86039 - DNA, 25 bp, Canis familiaris
cctcctagacaattcttgccgtgaa

SEQ ID NO: 86040 - DNA, 25 bp, Canis familiaris
cctcctaaactcttctttgaaatat

SEQ ID NO: 86041 - DNA, 25 bp, Canis familiaris
cctgcctattgagctactttctaaa

SEQ ID NO: 86042 - DNA, 25 bp, Canis familiaris
cctcctttcgccacttatgtaaagc

SEQ ID NO: 86043 - DNA, 25 bp, Canis familiaris
cctgcactttccatacatcttaaaa

SEQ ID NO: 86044 - DNA, 25 bp, Canis familiaris
cctcgttccaaaactcgcaaaacag

SEQ ID NO: 86045 - DNA, 25 bp, Canis familiaris
cctctttcgaatgccaaaacccagt

SEQ ID NO: 86046 - DNA, 25 bp, Canis familiaris
cctcacttcgaaaggggagacccag

SEQ ID NO: 86047 - DNA, 25 bp, Canis familiaris
cctcacgtcgaagtgggagacccct

SEQ ID NO: 86048 - DNA, 25 bp, Canis familiaris
cctgcacttgagaggggtgacagcc

SEQ ID NO: 86049 - DNA, 25 bp, Canis familiaris
cctttccatacgcggtgtagccgga

SEQ ID NO: 86050 - DNA, 25 bp, Canis familiaris
cctgttgcctttggtggtgtactgg

SEQ ID NO: 86051 - DNA, 25 bp, Canis familiaris
cctgttcaccactggggacactgga

SEQ ID NO: 86052 - DNA, 25 bp, Canis familiaris
cctgttctccagcgcagggagcagg

SEQ ID NO: 86053 - DNA, 25 bp, Canis familiaris
cctgtaccgcagcagcagcgagcgg

SEQ ID NO: 86054 - DNA, 25 bp, Canis familiaris
cctgccagactactaccagactgag

SEQ ID NO: 86055 - DNA, 25 bp, Canis familiaris
cctgcaaactgggacgaagctgata

SEQ ID NO: 86056 - DNA, 25 bp, Canis familiaris
cctccacaaggctcagaagagtcag

SEQ ID NO: 86057 - DNA, 25 bp, Canis familiaris
cctccctgaggatccaaaacaccaa

SEQ ID NO: 86058 - DNA, 25 bp, Canis familiaris
gccaaactgaatgtccaaagtacct

SEQ ID NO: 86059 - DNA, 25 bp, Canis familiaris
ccttcactatttttaaagcgcaatt

SEQ ID NO: 86060 - DNA, 25 bp, Canis familiaris
ccttccccatgttcaattcaggctt

SEQ ID NO: 86061 - DNA, 25 bp, Canis familiaris
cctgattccctgtaagtctcagggt

SEQ ID NO: 86062 - DNA, 25 bp, Canis familiaris
cctgtctcccgattgtttcagggtt

SEQ ID NO: 86063 - DNA, 25 bp, Canis familiaris
cctgtccagactttctttgctgtgg

SEQ ID NO: 86064 - DNA, 25 bp, Canis familiaris
cctgctcagcagcttggtttctggg

SEQ ID NO: 86065 - DNA, 25 bp, Canis familiaris
cctccgtcttctcgtagtatcggag

SEQ ID NO: 86066 - DNA, 25 bp, Canis familiaris
cctccagttttgctctttcatatgg

SEQ ID NO: 86067 - DNA, 25 bp, Canis familiaris
cctgccatgtttccagaattcgttg

SEQ ID NO: 86068 - DNA, 25 bp, Canis familiaris
cctgccattttgcagaattcgtttt

SEQ ID NO: 86069 - DNA, 25 bp, Canis familiaris
cctgcacaaattctaaacctgtttt

SEQ ID NO: 86070 - DNA, 25 bp, Canis familiaris
cctccaagctctctaagatccgagt

SEQ ID NO: 86071 - DNA, 25 bp, Canis familiaris
cctaaaatcaccaaaacccagcatc

SEQ ID NO: 86072 - DNA, 25 bp, Canis familiaris
cctagttatccacgcaaaccacaag

SEQ ID NO: 86073 - DNA, 25 bp, Canis familiaris
cctaacttgcgcagaaaacaagatg

SEQ ID NO: 86074 - DNA, 25 bp, Canis familiaris
cctaccttgggctggaaccaggaag

SEQ ID NO: 86075 - DNA, 25 bp, Canis familiaris
cctgcaccttgggtcctagaggagg

SEQ ID NO: 86076 - DNA, 25 bp, Canis familiaris
cctgcccatggggtttgcaggctgc

SEQ ID NO: 86077 - DNA, 25 bp, Canis familiaris
cctgctcgacgtgttccagcagtac

SEQ ID NO: 86078 - DNA, 25 bp, Canis familiaris
cctgggccttgactacaacagctac

SEQ ID NO: 86079 - DNA, 25 bp, Canis familiaris
cctgtcccttgattaagcaagtgac

SEQ ID NO: 86080 - DNA, 25 bp, Canis familiaris
cctgttccttggtagactttgctcc

SEQ ID NO: 86081 - DNA, 25 bp, Canis familiaris
cctgttcctgtgctgagacttttta

SEQ ID NO: 86082 - DNA, 25 bp, Canis familiaris
cctgtgtccgcttctgaagatctgt

SEQ ID NO: 86083 - DNA, 25 bp, Canis familiaris
cctgttcacgcttgagactatcttc

SEQ ID NO: 86084 - DNA, 25 bp, Canis familiaris
cctgtaatctgtggagccttctgct

SEQ ID NO: 86085 - DNA, 25 bp, Canis familiaris
cctgctaacttcacctacagtttca

SEQ ID NO: 86086 - DNA, 25 bp, Canis familiaris
cctgccagtttcacgtcaacaatta

SEQ ID NO: 86087 - DNA, 25 bp, Canis familiaris
cctcctgattttgccttacaacaag

SEQ ID NO: 86088 - DNA, 25 bp, Canis familiaris
cctccacttttctctctagtaaatt

SEQ ID NO: 86089 - DNA, 25 bp, Canis familiaris
cctgtctcttttcttctgagttgaa

SEQ ID NO: 86090 - DNA, 25 bp, Canis familiaris
cctgacttgtttttgcttgagccag

SEQ ID NO: 86091 - DNA, 25 bp, Canis familiaris
tccccttagaatttgcctaccagga

SEQ ID NO: 86092 - DNA, 25 bp, Canis familiaris
cctccattagaatcgagccacccaa

SEQ ID NO: 86093 - DNA, 25 bp, Canis familiaris
cctccttagaaccatggccagcagg

SEQ ID NO: 86094 - DNA, 25 bp, Canis familiaris
cctccgtcaacaggactcacaggag

SEQ ID NO: 86095 - DNA, 25 bp, Canis familiaris
cctgcaggctgaaagtattaatgaa

SEQ ID NO: 86096 - DNA, 25 bp, Canis familiaris
cctgaggctgatggggtcaaatgaa

SEQ ID NO: 86097 - DNA, 25 bp, Canis familiaris
cctgttgctgatggcctggagaaga

SEQ ID NO: 86098 - DNA, 25 bp, Canis familiaris
cctgctccgaaggcatctggcaaga

SEQ ID NO: 86099 - DNA, 25 bp, Canis familiaris
cctgagcctgcggcacttggaagta

SEQ ID NO: 86100 - DNA, 25 bp, Canis familiaris
cctgatcctcaggagcttctgggaa

SEQ ID NO: 86101 - DNA, 25 bp, Canis familiaris
cctgctgtctgaggacttcttggga

SEQ ID NO: 86102 - DNA, 25 bp, Canis familiaris
cctgcagttggatgttcgtgccgga

SEQ ID NO: 86103 - DNA, 25 bp, Canis familiaris
cctgagaagatgtgctcctggccgg

SEQ ID NO: 86104 - DNA, 25 bp, Canis familiaris
cctgcaggaagctgaccgagtcggc

SEQ ID NO: 86105 - DNA, 25 bp, Canis familiaris
cctgcagggcgaggacgcaggccgg

SEQ ID NO: 86106 - DNA, 25 bp, Canis familiaris
cctacggcgacgagaagctgagccc

SEQ ID NO: 86107 - DNA, 25 bp, Canis familiaris
cctccgggacagggacaggggacat

SEQ ID NO: 86108 - DNA, 25 bp, Canis familiaris
cctccttggagggtgagaggcccct

SEQ ID NO: 86109 - DNA, 25 bp, Canis familiaris
cctcccaggaaactggagtccccag

SEQ ID NO: 86110 - DNA, 25 bp, Canis familiaris
cctgagccaggcacagatgtcgtcc

SEQ ID NO: 86111 - DNA, 25 bp, Canis familiaris
cctgcccaggctgcctggggcactg

SEQ ID NO: 86112 - DNA, 25 bp, Canis familiaris
cctctcagggatcacgtgtggacgt

SEQ ID NO: 86113 - DNA, 25 bp, Canis familiaris
cctccagaggtaccctgtcgaaggg

SEQ ID NO: 86114 - DNA, 25 bp, Canis familiaris
cctcccaggccaagcctggctaacc

SEQ ID NO: 86115 - DNA, 25 bp, Canis familiaris
cctcatccaggctcagcgggattac

SEQ ID NO: 86116 - DNA, 25 bp, Canis familiaris
cctgtccatggcatacgctggagct

SEQ ID NO: 86117 - DNA, 25 bp, Canis familiaris
cctgtacgcgctgcacgtgaagcgg

SEQ ID NO: 86118 - DNA, 25 bp, Canis familiaris
cctgtcgccgcggcacaagaaggag

SEQ ID NO: 86119 - DNA, 25 bp, Canis familiaris
cctgctcccagcggagcaccaaggg

SEQ ID NO: 86120 - DNA, 25 bp, Canis familiaris
cctgctcatacagggaagcctgaga

SEQ ID NO: 86121 - DNA, 25 bp, Canis familiaris
cctgtgcacaagcaggggctgatgt

SEQ ID NO: 86122 - DNA, 25 bp, Canis familiaris
cctgtgcccaggctggagctgatgt

SEQ ID NO: 86123 - DNA, 25 bp, Canis familiaris
cctgacgctcagcgtggagctgcgg

SEQ ID NO: 86124 - DNA, 25 bp, Canis familiaris
cctgtcttcatcccagtgactaggg

SEQ ID NO: 86125 - DNA, 25 bp, Canis familiaris
cctgtcccacctggaactgggtgtt

SEQ ID NO: 86126 - DNA, 25 bp, Canis familiaris
cctgtcacccctggagttgggttag

SEQ ID NO: 86127 - DNA, 25 bp, Canis familiaris
gacggacctcttgagtgtcgttgtc

SEQ ID NO: 86128 - DNA, 25 bp, Canis familiaris
ccaggaattctggggctggcgggtc

SEQ ID NO: 86129 - DNA, 25 bp, Canis familiaris
cctgaaaactggcgtgcctgcgttc

SEQ ID NO: 86130 - DNA, 25 bp, Canis familiaris
cctgaagaaggccttgaccgcagct

SEQ ID NO: 86131 - DNA, 25 bp, Canis familiaris
cctgacacgggacttgatcctgggt

SEQ ID NO: 86132 - DNA, 25 bp, Canis familiaris
cctgaccgcctgcggacattggacg

SEQ ID NO: 86133 - DNA, 25 bp, Canis familiaris
cctgaccaccttcggcaagatgtag

SEQ ID NO: 86134 - DNA, 25 bp, Canis familiaris
gcctttcctttgtgcaaggttgttt

SEQ ID NO: 86135 - DNA, 25 bp, Canis familiaris
cctgcttttttgtacaaacttgtct

SEQ ID NO: 86136 - DNA, 25 bp, Canis familiaris
cctgcggcttcaagaccagaagctg

SEQ ID NO: 86137 - DNA, 25 bp, Canis familiaris
cctcgacgtcaacctgcagacaagg

SEQ ID NO: 86138 - DNA, 25 bp, Canis familiaris
ccaggacctaccctcaacagaggag

SEQ ID NO: 86139 - DNA, 25 bp, Canis familiaris
ccaagaccccctcagaaacaggact

SEQ ID NO: 86140 - DNA, 25 bp, Canis familiaris
ggctagtccccctgaggaacagggc

SEQ ID NO: 86141 - DNA, 25 bp, Canis familiaris
cctcaggcaccccaaaaacacaggg

SEQ ID NO: 86142 - DNA, 25 bp, Canis familiaris
cctcgagcccaccaggaacgaaaga

SEQ ID NO: 86143 - DNA, 25 bp, Canis familiaris
ccatttcaccaacgggacggagcgg

SEQ ID NO: 86144 - DNA, 25 bp, Canis familiaris
ccatttcaccaacgggacggagcgg

SEQ ID NO: 86145 - DNA, 25 bp, Canis familiaris
ccatttcaccaacgggacggagcgg

SEQ ID NO: 86146 - DNA, 25 bp, Canis familiaris
ccatttcaccaacgggacggagcgg

SEQ ID NO: 86147 - DNA, 25 bp, Canis familiaris
ccatttcaccaacgggacggagcgg

SEQ ID NO: 86148 - DNA, 25 bp, Canis familiaris
ccatttcaccaacgggacggagcgg

SEQ ID NO: 86149 - DNA, 25 bp, Canis familiaris
ccatttcaccaacgggacggagcgg

SEQ ID NO: 86150 - DNA, 25 bp, Canis familiaris
ccatttcaccaacgggacggagcgg

SEQ ID NO: 86151 - DNA, 25 bp, Canis familiaris
ccatttcaccaacgggacggagcgg

SEQ ID NO: 86152 - DNA, 25 bp, Canis familiaris
ccatttcaccaacgggacggagcgg

SEQ ID NO: 86153 - DNA, 25 bp, Canis familiaris
cctctacccaacctgggcagtagga

SEQ ID NO: 86154 - DNA, 25 bp, Canis familiaris
cctgaaccaaagggagacgctcggc

SEQ ID NO: 86155 - DNA, 25 bp, Canis familiaris
cctgcacccagactggggggctcgg

SEQ ID NO: 86156 - DNA, 25 bp, Canis familiaris
cctgatggccaactgggtgggcgcc

SEQ ID NO: 86157 - DNA, 25 bp, Canis familiaris
cctgaagcagcacgtgcagggggcg

SEQ ID NO: 86158 - DNA, 25 bp, Canis familiaris
cctgcagcacagcgtcaggggagcc

SEQ ID NO: 86159 - DNA, 25 bp, Canis familiaris
cctgcacacctggccagaggtgtcg

SEQ ID NO: 86160 - DNA, 25 bp, Canis familiaris
cctgcagcttcttccagatgttgtc

SEQ ID NO: 86161 - DNA, 25 bp, Canis familiaris
cctgatgctgtcaccgatgttgaag

SEQ ID NO: 86162 - DNA, 25 bp, Canis familiaris
cctgatgtctgtgtgcctgattgaa

SEQ ID NO: 86163 - DNA, 25 bp, Canis familiaris
cctgagtcctgggctctttgaagga

SEQ ID NO: 86164 - DNA, 25 bp, Canis familiaris
cctgcattccggggtctatggagaa

SEQ ID NO: 86165 - DNA, 25 bp, Canis familiaris
cctgattcctgcctggatcatttgg

SEQ ID NO: 86166 - DNA, 25 bp, Canis familiaris
cctgtttcggggttgcattgtggat

SEQ ID NO: 86167 - DNA, 25 bp, Canis familiaris
cctgctttggggctgctgttataac

SEQ ID NO: 86168 - DNA, 25 bp, Canis familiaris
cctgttctgcttccttggtataaat

SEQ ID NO: 86169 - DNA, 25 bp, Canis familiaris
cctgttctcagtgctttgtgtgttt

SEQ ID NO: 86170 - DNA, 25 bp, Canis familiaris
cctgatttcattgcaccggtgcatg

SEQ ID NO: 86171 - DNA, 25 bp, Canis familiaris
cctgtttctgctgccatcgaggcag

SEQ ID NO: 86172 - DNA, 25 bp, Canis familiaris
cctgttgcttccacactgagagaga

SEQ ID NO: 86173 - DNA, 25 bp, Canis familiaris
cctgattcttcctacacttgatagg

SEQ ID NO: 86174 - DNA, 25 bp, Canis familiaris
cctgactttcatgacacgtggagca

SEQ ID NO: 86175 - DNA, 25 bp, Canis familiaris
cctccttggcaccaaagacgcagcc

SEQ ID NO: 86176 - DNA, 25 bp, Canis familiaris
cctcctggggccacagaggcaggca

SEQ ID NO: 86177 - DNA, 25 bp, Canis familiaris
cctcctccggatgccaaggagctgg

SEQ ID NO: 86178 - DNA, 25 bp, Canis familiaris
cctcctcactgagaacacgtggctc

SEQ ID NO: 86179 - DNA, 25 bp, Canis familiaris
cctcctattcctgacagcagtggtc

SEQ ID NO: 86180 - DNA, 25 bp, Canis familiaris
cctcaccaacaacacaatcgggcgg

SEQ ID NO: 86181 - DNA, 25 bp, Canis familiaris
cctagcacgaaactaattcgaggcc

SEQ ID NO: 86182 - DNA, 25 bp, Canis familiaris
gccttccgaagtccaagttaaccag

SEQ ID NO: 86183 - DNA, 25 bp, Canis familiaris
cctccctagtttccagtctaaacag

SEQ ID NO: 86184 - DNA, 25 bp, Canis familiaris
cctcgcgtcagtgtggcagtgcgga

SEQ ID NO: 86185 - DNA, 25 bp, Canis familiaris
cctcggacatgtcatggtgaatggc

SEQ ID NO: 86186 - DNA, 25 bp, Canis familiaris
cctgcaggaatcccagtgtgcctgt

SEQ ID NO: 86187 - DNA, 25 bp, Canis familiaris
cctaccagatctagcacagtgcctt

SEQ ID NO: 86188 - DNA, 25 bp, Canis familiaris
cctgacccctagccagtgattatga

SEQ ID NO: 86189 - DNA, 25 bp, Canis familiaris
cctgacccctggccataatatgatt

SEQ ID NO: 86190 - DNA, 25 bp, Canis familiaris
cctgaaccatcaggcccaatcagtg

SEQ ID NO: 86191 - DNA, 25 bp, Canis familiaris
cctgaaagccaggcctctgtggcgg

SEQ ID NO: 86192 - DNA, 25 bp, Canis familiaris
cctgaagaggcgggcacggtgcccc

SEQ ID NO: 86193 - DNA, 25 bp, Canis familiaris
cctgaagaggcgggcacggtgcccc

SEQ ID NO: 86194 - DNA, 25 bp, Canis familiaris
cctgacagcaggcaggacggacccg

SEQ ID NO: 86195 - DNA, 25 bp, Canis familiaris
cctgacgctggatgacatcgaacgc

SEQ ID NO: 86196 - DNA, 25 bp, Canis familiaris
cctgactctgtctgacttgctattg

SEQ ID NO: 86197 - DNA, 25 bp, Canis familiaris
cctgctcttgtcagtcatttcatgc

SEQ ID NO: 86198 - DNA, 25 bp, Canis familiaris
cctccaatgttggtgcctacatgca

SEQ ID NO: 86199 - DNA, 25 bp, Canis familiaris
cctccaggtagtcgtctaagagacc

SEQ ID NO: 86200 - DNA, 25 bp, Canis familiaris
cctccggcttctcactggaggatcc

SEQ ID NO: 86201 - DNA, 25 bp, Canis familiaris
cctgcctggttaaggggagagaact

SEQ ID NO: 86202 - DNA, 25 bp, Canis familiaris
cctgccccctgccagcagggaaaac

SEQ ID NO: 86203 - DNA, 25 bp, Canis familiaris
cctccagcgccgcagtctggaagaa

SEQ ID NO: 86204 - DNA, 25 bp, Canis familiaris
cctctgcccacactagtttggatga

SEQ ID NO: 86205 - DNA, 25 bp, Canis familiaris
cctgctcaccacccagggtgtggac

SEQ ID NO: 86206 - DNA, 25 bp, Canis familiaris
cctgaagctgccacagggacttcca

SEQ ID NO: 86207 - DNA, 25 bp, Canis familiaris
cctgcaactgctgccaggagactcc

SEQ ID NO: 86208 - DNA, 25 bp, Canis familiaris
cctccacattgccagaggtggttcc

SEQ ID NO: 86209 - DNA, 25 bp, Canis familiaris
cctccagcttcttacgtggttatgt

SEQ ID NO: 86210 - DNA, 25 bp, Canis familiaris
cctgcctctccagagggttctgatg

SEQ ID NO: 86211 - DNA, 25 bp, Canis familiaris
cctgccctgcaagtcagaggtacca

SEQ ID NO: 86212 - DNA, 25 bp, Canis familiaris
cctgccagcatccagtcaatgagta

SEQ ID NO: 86213 - DNA, 25 bp, Canis familiaris
ccatccagatcacgatgccgttcac

SEQ ID NO: 86214 - DNA, 25 bp, Canis familiaris
cctccgcgaagaccgtctaggaatt

SEQ ID NO: 86215 - DNA, 25 bp, Canis familiaris
cctgccatgtaatccgtatcaacaa

SEQ ID NO: 86216 - DNA, 25 bp, Canis familiaris
cctgccatgtgagaccgtcacaagt

SEQ ID NO: 86217 - DNA, 25 bp, Canis familiaris
cctacaatacgtgcttccaatgttg

SEQ ID NO: 86218 - DNA, 25 bp, Canis familiaris
cctgacacattccgttacaaagttg

SEQ ID NO: 86219 - DNA, 25 bp, Canis familiaris
cctcacaatctccagtacactaatg

SEQ ID NO: 86220 - DNA, 25 bp, Canis familiaris
cctcacagttgccatgtagacccct

SEQ ID NO: 86221 - DNA, 25 bp, Canis familiaris
cctccagcctgtaggaaactcacta

SEQ ID NO: 86222 - DNA, 25 bp, Canis familiaris
cctcctcatctacactaactacgag

SEQ ID NO: 86223 - DNA, 25 bp, Canis familiaris
cctctccactaactcgattaacgat

SEQ ID NO: 86224 - DNA, 25 bp, Canis familiaris
cctgctcccgaattatttggacaat

SEQ ID NO: 86225 - DNA, 25 bp, Canis familiaris
cctgcctgcccagatatggcggaaa

SEQ ID NO: 86226 - DNA, 25 bp, Canis familiaris
cctgacgcccaactatttgataata

SEQ ID NO: 86227 - DNA, 25 bp, Canis familiaris
cctgaggccccagctaaatcaagag

SEQ ID NO: 86228 - DNA, 25 bp, Canis familiaris
cctgaggccctggttctattgtagg

SEQ ID NO: 86229 - DNA, 25 bp, Canis familiaris
cctcaggtgtctgtactttctctgg

SEQ ID NO: 86230 - DNA, 25 bp, Canis familiaris
cctctggctgtttatcctttatgct

SEQ ID NO: 86231 - DNA, 25 bp, Canis familiaris
cctctggtggtctcgtatttctaga

SEQ ID NO: 86232 - DNA, 25 bp, Canis familiaris
cctgttcttgtatcccttttagaga

SEQ ID NO: 86233 - DNA, 25 bp, Canis familiaris
cctgaatctgtttaccctgactaca

SEQ ID NO: 86234 - DNA, 25 bp, Canis familiaris
cctgatttgttctattcctgtctca

SEQ ID NO: 86235 - DNA, 25 bp, Canis familiaris
cctgcttcgtcacagacgtgtgcca

SEQ ID NO: 86236 - DNA, 25 bp, Canis familiaris
cctgcgtgtgtccaaactgcgagac

SEQ ID NO: 86237 - DNA, 25 bp, Canis familiaris
cctgctgagagtccagatgtgccag

SEQ ID NO: 86238 - DNA, 25 bp, Canis familiaris
cctgctgcagaggatgcggctgcca

SEQ ID NO: 86239 - DNA, 25 bp, Canis familiaris
cctgcgcagcatgcaagagctcagc

SEQ ID NO: 86240 - DNA, 25 bp, Canis familiaris
cctgctcagttgggagtctgcgtct

SEQ ID NO: 86241 - DNA, 25 bp, Canis familiaris
cctccacttggcttgaagcgtcatt

SEQ ID NO: 86242 - DNA, 25 bp, Canis familiaris
cctccatcctggcctgaatggccat

SEQ ID NO: 86243 - DNA, 25 bp, Canis familiaris
cctgctcaccgtgctgacatgtgaa

SEQ ID NO: 86244 - DNA, 25 bp, Canis familiaris
cctgccatcctgacactgatagttt

SEQ ID NO: 86245 - DNA, 25 bp, Canis familiaris
cctgcacactaacctgtatgctctt

SEQ ID NO: 86246 - DNA, 25 bp, Canis familiaris
cctgccacgaagacggtgcatctgc

SEQ ID NO: 86247 - DNA, 25 bp, Canis familiaris
cctgcacaccaagatacagatcatc

SEQ ID NO: 86248 - DNA, 25 bp, Canis familiaris
cctgcggctcaagtccaagcagcac

SEQ ID NO: 86249 - DNA, 25 bp, Canis familiaris
cctcaggtgcaggctgcctatcaga

SEQ ID NO: 86250 - DNA, 25 bp, Canis familiaris
cctgcaagtcatcctgttatcattg

SEQ ID NO: 86251 - DNA, 25 bp, Canis familiaris
cctgcaagtgcacctggcagagagg

SEQ ID NO: 86252 - DNA, 25 bp, Canis familiaris
cctgctcattgctgggctgcaggcc

SEQ ID NO: 86253 - DNA, 25 bp, Canis familiaris
cctgctgcagcgcgggctgcaggtg

SEQ ID NO: 86254 - DNA, 25 bp, Canis familiaris
cctgctgcagcagaggtcggatgct

SEQ ID NO: 86255 - DNA, 25 bp, Canis familiaris
cctgcacagaggagtcgtgtcttct

SEQ ID NO: 86256 - DNA, 25 bp, Canis familiaris
cctgcacaggtggagttctagctcc

SEQ ID NO: 86257 - DNA, 25 bp, Canis familiaris
cctgccagggggacactaggcactt

SEQ ID NO: 86258 - DNA, 25 bp, Canis familiaris
cctgcccggatgtacctagagatgt

SEQ ID NO: 86259 - DNA, 25 bp, Canis familiaris
cctcggggaggaactgcagcgtgga

SEQ ID NO: 86260 - DNA, 25 bp, Canis familiaris
cctgaagggggaagctatcctggca

SEQ ID NO: 86261 - DNA, 25 bp, Canis familiaris
cctcgaagtggtacagcttcctgtg

SEQ ID NO: 86262 - DNA, 25 bp, Canis familiaris
cctgaacgtggcaaagctcctcaag

SEQ ID NO: 86263 - DNA, 25 bp, Canis familiaris
cctgacccatttaagcatccatcaa

SEQ ID NO: 86264 - DNA, 25 bp, Canis familiaris
cctgaaccacatagctcaagccaag

SEQ ID NO: 86265 - DNA, 25 bp, Canis familiaris
cctgcaagcctgtggaggccaagca

SEQ ID NO: 86266 - DNA, 25 bp, Canis familiaris
cctgccatcctacagaggcctagag

SEQ ID NO: 86267 - DNA, 25 bp, Canis familiaris
cctgccaccatcaataaagcctgag

SEQ ID NO: 86268 - DNA, 25 bp, Canis familiaris
cctgccctacctgatagcacaggcc

SEQ ID NO: 86269 - DNA, 25 bp, Canis familiaris
cctctagctgaattaatgccaaccc

SEQ ID NO: 86270 - DNA, 25 bp, Canis familiaris
cctcatcactggaatgttccaacgg

SEQ ID NO: 86271 - DNA, 25 bp, Canis familiaris
cctcatcactggcatattcccattt

SEQ ID NO: 86272 - DNA, 25 bp, Canis familiaris
cctgatagcaagcaatcccatcatt

SEQ ID NO: 86273 - DNA, 25 bp, Canis familiaris
cctgatggagattaatcccttcatt

SEQ ID NO: 86274 - DNA, 25 bp, Canis familiaris
cctgaccagattaacaccattgatt

SEQ ID NO: 86275 - DNA, 25 bp, Canis familiaris
cctgcaccagcttaccaagctgcgc

SEQ ID NO: 86276 - DNA, 25 bp, Canis familiaris
cctgagcgcaagtactctgtgtgga

SEQ ID NO: 86277 - DNA, 25 bp, Canis familiaris
cctgcccaaccactctgtggtgaag

SEQ ID NO: 86278 - DNA, 25 bp, Canis familiaris
cctgatcccctcatcaaggtgaatg

SEQ ID NO: 86279 - DNA, 25 bp, Canis familiaris
cctgcactgtcctgtaaggctgaag

SEQ ID NO: 86280 - DNA, 25 bp, Canis familiaris
cctgcctgtcctcctaaagcaggcc

SEQ ID NO: 86281 - DNA, 25 bp, Canis familiaris
cctgcgcagtccagttgcgacaggc

SEQ ID NO: 86282 - DNA, 25 bp, Canis familiaris
cctgaggtcacaagttgccatctac

SEQ ID NO: 86283 - DNA, 25 bp, Canis familiaris
cctgagggctcaagtgtggagcccg

SEQ ID NO: 86284 - DNA, 25 bp, Canis familiaris
cctgagtggctcagtcatgtcacct

SEQ ID NO: 86285 - DNA, 25 bp, Canis familiaris
cctgacggccaggtcatcaccattg

SEQ ID NO: 86286 - DNA, 25 bp, Canis familiaris
cctgacggccaagtcatcactattg

SEQ ID NO: 86287 - DNA, 25 bp, Canis familiaris
cctgaccagcagaggctcatctttg

SEQ ID NO: 86288 - DNA, 25 bp, Canis familiaris
cctgacccagatcggctcagtggga

SEQ ID NO: 86289 - DNA, 25 bp, Canis familiaris
cctgagaccagctctgtctctggga

SEQ ID NO: 86290 - DNA, 25 bp, Canis familiaris
cctgcgcaacgttggtcttggaagg

SEQ ID NO: 86291 - DNA, 25 bp, Canis familiaris
cctcgcaactgttgaccatggccaa

SEQ ID NO: 86292 - DNA, 25 bp, Canis familiaris
cctcgaatgctgatgagcttgtgag

SEQ ID NO: 86293 - DNA, 25 bp, Canis familiaris
cctccatcagttgacattgtcgccc

SEQ ID NO: 86294 - DNA, 25 bp, Canis familiaris
cctgcactgcatataacttgtcctg

SEQ ID NO: 86295 - DNA, 25 bp, Canis familiaris
cctgctctcagaaaacttccctgac

SEQ ID NO: 86296 - DNA, 25 bp, Canis familiaris
cctcccacaaggactatccattcac

SEQ ID NO: 86297 - DNA, 25 bp, Canis familiaris
cctccccataggaataaccatctcg

SEQ ID NO: 86298 - DNA, 25 bp, Canis familiaris
cctccccttgtcagcaagaaccagt

SEQ ID NO: 86299 - DNA, 25 bp, Canis familiaris
gccccttattgctggtcaaaccggg

SEQ ID NO: 86300 - DNA, 25 bp, Canis familiaris
cctccctttcttgctcaaactggag

SEQ ID NO: 86301 - DNA, 25 bp, Canis familiaris
cctcccttttacctgtcattttgag

SEQ ID NO: 86302 - DNA, 25 bp, Canis familiaris
cctccctatatacctggttttcgca

SEQ ID NO: 86303 - DNA, 25 bp, Canis familiaris
cctcaacatttcctaggtttatctg

SEQ ID NO: 86304 - DNA, 25 bp, Canis familiaris
ccttacttgccctggttaagccaga

SEQ ID NO: 86305 - DNA, 25 bp, Canis familiaris
cctcccttgacctgtgtaaatgcta

SEQ ID NO: 86306 - DNA, 25 bp, Canis familiaris
cctcctcggacctgatgtctaagtg

SEQ ID NO: 86307 - DNA, 25 bp, Canis familiaris
cctccatcgttgtccttgttgaagg

SEQ ID NO: 86308 - DNA, 25 bp, Canis familiaris
cctgaccgtgctaactgtgtgtaca

SEQ ID NO: 86309 - DNA, 25 bp, Canis familiaris
cctgcacggttggagtgtggggcac

SEQ ID NO: 86310 - DNA, 25 bp, Canis familiaris
cctgccgtgtgtgatctggggagtg

SEQ ID NO: 86311 - DNA, 25 bp, Canis familiaris
cctgcgggagctgcacttggataat

SEQ ID NO: 86312 - DNA, 25 bp, Canis familiaris
cctgctggggctttctgagtaaata

SEQ ID NO: 86313 - DNA, 25 bp, Canis familiaris
cctcggtgccctcaggtagatgata

SEQ ID NO: 86314 - DNA, 25 bp, Canis familiaris
cctcctgcccgtcaggtgttaagtt

SEQ ID NO: 86315 - DNA, 25 bp, Canis familiaris
cctcctcccgtatgtagcgtagagt

SEQ ID NO: 86316 - DNA, 25 bp, Canis familiaris
cctgccccactgtctttagggagaa

SEQ ID NO: 86317 - DNA, 25 bp, Canis familiaris
cctgccaccctggttttcagagaaa

SEQ ID NO: 86318 - DNA, 25 bp, Canis familiaris
cctccgccctgggaaaacagctgaa

SEQ ID NO: 86319 - DNA, 25 bp, Canis familiaris
cctccagccaaagttcacagacctg

SEQ ID NO: 86320 - DNA, 25 bp, Canis familiaris
cctgcctgaccagatgccaaaactg

SEQ ID NO: 86321 - DNA, 25 bp, Canis familiaris
cctccgagcaccacgcaagaagatt

SEQ ID NO: 86322 - DNA, 25 bp, Canis familiaris
cctcctaccaacaacaacaagtttg

SEQ ID NO: 86323 - DNA, 25 bp, Canis familiaris
tcctccttcccacaaaaaggcctga

SEQ ID NO: 86324 - DNA, 25 bp, Canis familiaris
tcccgtctggtccgtagaaaagcca

SEQ ID NO: 86325 - DNA, 25 bp, Canis familiaris
gactacttagctctggtaaaagcca

SEQ ID NO: 86326 - DNA, 25 bp, Canis familiaris
gttaccttgtttgtaaacacatcct

SEQ ID NO: 86327 - DNA, 25 bp, Canis familiaris
gcgtccctgtctgtggaaaaaacct

SEQ ID NO: 86328 - DNA, 25 bp, Canis familiaris
gcctccaagttctgcaaaaacggtt

SEQ ID NO: 86329 - DNA, 25 bp, Canis familiaris
cctccacgtctcagcacaaggacgc

SEQ ID NO: 86330 - DNA, 25 bp, Canis familiaris
cctccctgttaactaatagcatcag

SEQ ID NO: 86331 - DNA, 25 bp, Canis familiaris
cctgcccgctattacatcacggaag

SEQ ID NO: 86332 - DNA, 25 bp, Canis familiaris
cctgccgcgcacagcgaaggagaag

SEQ ID NO: 86333 - DNA, 25 bp, Canis familiaris
cctgccactgcctgggagggagagt

SEQ ID NO: 86334 - DNA, 25 bp, Canis familiaris
cctgcatccctttgctggggaggag

SEQ ID NO: 86335 - DNA, 25 bp, Canis familiaris
cctgcattcctccaagctgcggagg

SEQ ID NO: 86336 - DNA, 25 bp, Canis familiaris
cctgctacccactagtcacaggtgg

SEQ ID NO: 86337 - DNA, 25 bp, Canis familiaris
cctccccaacactgacggcatggag

SEQ ID NO: 86338 - DNA, 25 bp, Canis familiaris
cctccaaaccccaaagcagctggag

SEQ ID NO: 86339 - DNA, 25 bp, Canis familiaris
cctcgcgaatccgtgtaaagtaatg

SEQ ID NO: 86340 - DNA, 25 bp, Canis familiaris
cctcgccgccaagttcaaaggccag

SEQ ID NO: 86341 - DNA, 25 bp, Canis familiaris
cctccacgcacggctgtgaaaggta

SEQ ID NO: 86342 - DNA, 25 bp, Canis familiaris
cctccaagcagagcaacaacaagta

SEQ ID NO: 86343 - DNA, 25 bp, Canis familiaris
cctgccaccgaggcaccaaaaacac

SEQ ID NO: 86344 - DNA, 25 bp, Canis familiaris
cctccacctgaggcacggaagacag

SEQ ID NO: 86345 - DNA, 25 bp, Canis familiaris
cctccacctaggacatgtaagaagg

SEQ ID NO: 86346 - DNA, 25 bp, Canis familiaris
cctcctcccaagactctagtgagaa

SEQ ID NO: 86347 - DNA, 25 bp, Canis familiaris
cctcctccgagactcttaggggaag

SEQ ID NO: 86348 - DNA, 25 bp, Canis familiaris
cctcaatgccaggagctcctgcagg

SEQ ID NO: 86349 - DNA, 25 bp, Canis familiaris
cctcattgctgcgatcatgtccaag

SEQ ID NO: 86350 - DNA, 25 bp, Canis familiaris
cctcttcgttcttgcctatgtgaac

SEQ ID NO: 86351 - DNA, 25 bp, Canis familiaris
cctgcatccgttactgcagcttgtc

SEQ ID NO: 86352 - DNA, 25 bp, Canis familiaris
cctgctcggtggacaccatcatggc

SEQ ID NO: 86353 - DNA, 25 bp, Canis familiaris
cctgccgtggtgaagaagcatgagg

SEQ ID NO: 86354 - DNA, 25 bp, Canis familiaris
cctgccctggtgaactacagccagg

SEQ ID NO: 86355 - DNA, 25 bp, Canis familiaris
cctgccgctgttacctgagaggaaa

SEQ ID NO: 86356 - DNA, 25 bp, Canis familiaris
cctgccctccaatgctggaatcaaa

SEQ ID NO: 86357 - DNA, 25 bp, Canis familiaris
cctgcctcccaagtgaatttcactg

SEQ ID NO: 86358 - DNA, 25 bp, Canis familiaris
cctcttcctagttgaaatttcatgg

SEQ ID NO: 86359 - DNA, 25 bp, Canis familiaris
cctctgttctacctgacttttttag

SEQ ID NO: 86360 - DNA, 25 bp, Canis familiaris
cctcaccctaagcagtcttgttgaa

SEQ ID NO: 86361 - DNA, 25 bp, Canis familiaris
cctgctgccctcagggtcagaggtg

SEQ ID NO: 86362 - DNA, 25 bp, Canis familiaris
cctgcagcatccctggatttcagag

SEQ ID NO: 86363 - DNA, 25 bp, Canis familiaris
cctgcctccagtagttccagaaatc

SEQ ID NO: 86364 - DNA, 25 bp, Canis familiaris
cctcctccatgttttctggactgac

SEQ ID NO: 86365 - DNA, 25 bp, Canis familiaris
cctccatcctatagttctggtccag

SEQ ID NO: 86366 - DNA, 25 bp, Canis familiaris
cctgcctccttagtgttggtctaag

SEQ ID NO: 86367 - DNA, 25 bp, Canis familiaris
cctgaacacttttgcttatgtatga

SEQ ID NO: 86368 - DNA, 25 bp, Canis familiaris
cctgccacactgtcttgtttatagt

SEQ ID NO: 86369 - DNA, 25 bp, Canis familiaris
cctgcccatctgtgcttaattgaga

SEQ ID NO: 86370 - DNA, 25 bp, Canis familiaris
cctgccttcgggtcaagttgtgatc

SEQ ID NO: 86371 - DNA, 25 bp, Canis familiaris
cctgctcttcatcttcgagtttatc

SEQ ID NO: 86372 - DNA, 25 bp, Canis familiaris
cctgctcattctcgtagctttttaa

SEQ ID NO: 86373 - DNA, 25 bp, Canis familiaris
cctgaagcctccactgattgttaag

SEQ ID NO: 86374 - DNA, 25 bp, Canis familiaris
cctgacttctccagctgctggtata

SEQ ID NO: 86375 - DNA, 25 bp, Canis familiaris
cctgactttcccctggagtgtgggg

SEQ ID NO: 86376 - DNA, 25 bp, Canis familiaris
cctgaactcctccctggaaaggaag

SEQ ID NO: 86377 - DNA, 25 bp, Canis familiaris
gccttagtcttcccgggaaggaatg

SEQ ID NO: 86378 - DNA, 25 bp, Canis familiaris
ccttgggctctatcgggaatggacc

SEQ ID NO: 86379 - DNA, 25 bp, Canis familiaris
ccttaccttgtatgggtgggaccag

SEQ ID NO: 86380 - DNA, 25 bp, Canis familiaris
cctccccacttctggaggaggggag

SEQ ID NO: 86381 - DNA, 25 bp, Canis familiaris
cctgccccttcatgggacagggggg

SEQ ID NO: 86382 - DNA, 25 bp, Canis familiaris
cctgccctcttggagagggaggggg

SEQ ID NO: 86383 - DNA, 25 bp, Canis familiaris
cctccagtggcagcggggagcgggg

SEQ ID NO: 86384 - DNA, 25 bp, Canis familiaris
cctccagggaccattgccggtgagg

SEQ ID NO: 86385 - DNA, 25 bp, Canis familiaris
cctgccaggaacccaacgagggtgg

SEQ ID NO: 86386 - DNA, 25 bp, Canis familiaris
cctgccaggaacccacagtggaagt

SEQ ID NO: 86387 - DNA, 25 bp, Canis familiaris
cctgcttgaacttgaccagtgtgaa

SEQ ID NO: 86388 - DNA, 25 bp, Canis familiaris
cctccataatctttagagagatgaa

SEQ ID NO: 86389 - DNA, 25 bp, Canis familiaris
cctgccacaagcactgtcagaggaa

SEQ ID NO: 86390 - DNA, 25 bp, Canis familiaris
cctgcccaagccctgggaggagagg

SEQ ID NO: 86391 - DNA, 25 bp, Canis familiaris
cctaccacagccaggggcgacagga

SEQ ID NO: 86392 - DNA, 25 bp, Canis familiaris
cctcccacacacacaggtggatcca

SEQ ID NO: 86393 - DNA, 25 bp, Canis familiaris
cctccagaacgcaggtgctggcgcc

SEQ ID NO: 86394 - DNA, 25 bp, Canis familiaris
cctcctaaccaggtgtcatctgacc

SEQ ID NO: 86395 - DNA, 25 bp, Canis familiaris
cctcccaatcccagattgctacttt

SEQ ID NO: 86396 - DNA, 25 bp, Canis familiaris
cctccccactcccaatagtatttgg

SEQ ID NO: 86397 - DNA, 25 bp, Canis familiaris
cctccctaccctctaagtattgaat

SEQ ID NO: 86398 - DNA, 25 bp, Canis familiaris
cctccccaacttcacaggtaaagca

SEQ ID NO: 86399 - DNA, 25 bp, Canis familiaris
cctccccacttctgtatttaaagct

SEQ ID NO: 86400 - DNA, 25 bp, Canis familiaris
cctcctcccaatctttctagaagag

SEQ ID NO: 86401 - DNA, 25 bp, Canis familiaris
cctcctcacaactttttctaacagg

SEQ ID NO: 86402 - DNA, 25 bp, Canis familiaris
cctcctatcacgttttgttccaacg

SEQ ID NO: 86403 - DNA, 25 bp, Canis familiaris
cctcccacatcgtttaatccacggg

SEQ ID NO: 86404 - DNA, 25 bp, Canis familiaris
cctccccattttcatacaccaaggg

SEQ ID NO: 86405 - DNA, 25 bp, Canis familiaris
cctccctctttacagcacaaataaa

SEQ ID NO: 86406 - DNA, 25 bp, Canis familiaris
ccatccccttcaagtacgataacca

SEQ ID NO: 86407 - DNA, 25 bp, Canis familiaris
cctctcgccttaattattagtactg

SEQ ID NO: 86408 - DNA, 25 bp, Canis familiaris
cctgcttcctttaccttcagaagta

SEQ ID NO: 86409 - DNA, 25 bp, Canis familiaris
cctattgccattaaactgttaatac

SEQ ID NO: 86410 - DNA, 25 bp, Canis familiaris
cctttgagcatccagggtgtccaat

SEQ ID NO: 86411 - DNA, 25 bp, Canis familiaris
cctttaagccagtgtccctgtgggc

SEQ ID NO: 86412 - DNA, 25 bp, Canis familiaris
gccttaattaaggattccacttgga

SEQ ID NO: 86413 - DNA, 25 bp, Canis familiaris
ccttacatacttcaatcccttttat

SEQ ID NO: 86414 - DNA, 25 bp, Canis familiaris
ccaaaaacatctcagaagttttcaa

SEQ ID NO: 86415 - DNA, 25 bp, Canis familiaris
ccatcgtaactatacatatttttaa

SEQ ID NO: 86416 - DNA, 25 bp, Canis familiaris
ccacgtagactagaaatacttttag

SEQ ID NO: 86417 - DNA, 25 bp, Canis familiaris
ccacctaggcctgttaactgttttg

SEQ ID NO: 86418 - DNA, 25 bp, Canis familiaris
ccacaatacccgttctgaagctttt

SEQ ID NO: 86419 - DNA, 25 bp, Canis familiaris
gccatcgaaaacttccgaactgttg

SEQ ID NO: 86420 - DNA, 25 bp, Canis familiaris
ccagcgaaaactgccttcctggggc

SEQ ID NO: 86421 - DNA, 25 bp, Canis familiaris
cctctgaagcaaccaccattttatg

SEQ ID NO: 86422 - DNA, 25 bp, Canis familiaris
cctcaagaggaatgactgtttatgc

SEQ ID NO: 86423 - DNA, 25 bp, Canis familiaris
cctcaatgaatgtaaaatttgtact

SEQ ID NO: 86424 - DNA, 25 bp, Canis familiaris
cctcctatatgctcatcattcttgc

SEQ ID NO: 86425 - DNA, 25 bp, Canis familiaris
cctcctagtcattctgcattttatc

SEQ ID NO: 86426 - DNA, 25 bp, Canis familiaris
cctccttgtgcttcaaagttcttca

SEQ ID NO: 86427 - DNA, 25 bp, Canis familiaris
cctgcttttgcccagaagctgtctg

SEQ ID NO: 86428 - DNA, 25 bp, Canis familiaris
cctcttctagtccaggtctttacta

SEQ ID NO: 86429 - DNA, 25 bp, Canis familiaris
cctccttcagatcagtgctcattaa

SEQ ID NO: 86430 - DNA, 25 bp, Canis familiaris
cctccttctgctggaggccaatcca

SEQ ID NO: 86431 - DNA, 25 bp, Canis familiaris
cctcaccagcggaggacaatcccac

SEQ ID NO: 86432 - DNA, 25 bp, Canis familiaris
cctcagggctgccagggaaactcca

SEQ ID NO: 86433 - DNA, 25 bp, Canis familiaris
cctgcagcgcctgagggcagtgact

SEQ ID NO: 86434 - DNA, 25 bp, Canis familiaris
cctgcatgcccagcaagtggagtcc

SEQ ID NO: 86435 - DNA, 25 bp, Canis familiaris
cctgcagcccaccaaagtggtgtcc

SEQ ID NO: 86436 - DNA, 25 bp, Canis familiaris
cctgctcttgaccttgagtggtgtc

SEQ ID NO: 86437 - DNA, 25 bp, Canis familiaris
cctgcctgtagatttatgctgggag

SEQ ID NO: 86438 - DNA, 25 bp, Canis familiaris
cctgccttgctgtttcagctcaaat

SEQ ID NO: 86439 - DNA, 25 bp, Canis familiaris
cctcctcatctgtttaccacgagag

SEQ ID NO: 86440 - DNA, 25 bp, Canis familiaris
cctccactgctgtcataactcaggg

SEQ ID NO: 86441 - DNA, 25 bp, Canis familiaris
cctccctggctagatccagtgttcg

SEQ ID NO: 86442 - DNA, 25 bp, Canis familiaris
cctccggagaacacctgtatctcgt

SEQ ID NO: 86443 - DNA, 25 bp, Canis familiaris
cctccataagaagcccgtggccgat

SEQ ID NO: 86444 - DNA, 25 bp, Canis familiaris
cctcacaaaaaccccagcttctggg

SEQ ID NO: 86445 - DNA, 25 bp, Canis familiaris
cctccataagcacagattcacttct

SEQ ID NO: 86446 - DNA, 25 bp, Canis familiaris
cctccatctcagcccagaaatgctg

SEQ ID NO: 86447 - DNA, 25 bp, Canis familiaris
cctgcgaccgagaaaaatctgctaa

SEQ ID NO: 86448 - DNA, 25 bp, Canis familiaris
cctgcggccaggaacatgaccatgt

SEQ ID NO: 86449 - DNA, 25 bp, Canis familiaris
cctgctggctagcgaggttcatggg

SEQ ID NO: 86450 - DNA, 25 bp, Canis familiaris
cctgcatggacacctgggtctatga

SEQ ID NO: 86451 - DNA, 25 bp, Canis familiaris
cctgctgaacatccactggtcgaac

SEQ ID NO: 86452 - DNA, 25 bp, Canis familiaris
cctgcagctgcataactggatcgac

SEQ ID NO: 86453 - DNA, 25 bp, Canis familiaris
cctgcagctcagcagcaatggcacc

SEQ ID NO: 86454 - DNA, 25 bp, Canis familiaris
cctcagcctggccagatgcaggccc

SEQ ID NO: 86455 - DNA, 25 bp, Canis familiaris
cctgcgcctggcacatgagtgcctg

SEQ ID NO: 86456 - DNA, 25 bp, Canis familiaris
cctgccactgtgagctggtgctcag

SEQ ID NO: 86457 - DNA, 25 bp, Canis familiaris
cctctcaacagaagctgtgcagcca

SEQ ID NO: 86458 - DNA, 25 bp, Canis familiaris
cctccctgctgaatgcatctgatcg

SEQ ID NO: 86459 - DNA, 25 bp, Canis familiaris
cctccagctgtagtctgtgcctggt

SEQ ID NO: 86460 - DNA, 25 bp, Canis familiaris
cctcgaatgtcagcttcagctctgg

SEQ ID NO: 86461 - DNA, 25 bp, Canis familiaris
cctcgaatgcttgatgaagcttgtg

SEQ ID NO: 86462 - DNA, 25 bp, Canis familiaris
cctccaagctctccatagttagtgt

SEQ ID NO: 86463 - DNA, 25 bp, Canis familiaris
cctgccggcattcgaatctgtatgt

SEQ ID NO: 86464 - DNA, 25 bp, Canis familiaris
cctgccgagctctacaatggcaatt

SEQ ID NO: 86465 - DNA, 25 bp, Canis familiaris
cctgctccccattagatgactatta

SEQ ID NO: 86466 - DNA, 25 bp, Canis familiaris
cctccacctgcctaatgttatgcaa

SEQ ID NO: 86467 - DNA, 25 bp, Canis familiaris
cctgccactaactatctctgatagc

SEQ ID NO: 86468 - DNA, 25 bp, Canis familiaris
cctgccacaaagcacttgtcagagg

SEQ ID NO: 86469 - DNA, 25 bp, Canis familiaris
cctgcacctactcagctatctcagg

SEQ ID NO: 86470 - DNA, 25 bp, Canis familiaris
cctgcactctcctaagtgacactgg

SEQ ID NO: 86471 - DNA, 25 bp, Canis familiaris
cctgctctggctcaaatcaatctgg

SEQ ID NO: 86472 - DNA, 25 bp, Canis familiaris
cctgcccgctggaaatctgatgtag

SEQ ID NO: 86473 - DNA, 25 bp, Canis familiaris
cctgcccggggctagagtggaggcc

SEQ ID NO: 86474 - DNA, 25 bp, Canis familiaris
cctgctcgggcgagaagcggaggcc

SEQ ID NO: 86475 - DNA, 25 bp, Canis familiaris
cctgctcggggctggacgaggaggc

SEQ ID NO: 86476 - DNA, 25 bp, Canis familiaris
ccatcagggctacaggaccaggggc

SEQ ID NO: 86477 - DNA, 25 bp, Canis familiaris
cctcaggcctactgggccaagcaag

SEQ ID NO: 86478 - DNA, 25 bp, Canis familiaris
cctcatggcctacatggcctccaag

SEQ ID NO: 86479 - DNA, 25 bp, Canis familiaris
cctctggtgctcaggtacatcccag

SEQ ID NO: 86480 - DNA, 25 bp, Canis familiaris
cctctgacttcaacagcgacaccca

SEQ ID NO: 86481 - DNA, 25 bp, Canis familiaris
cctctagctgattaatgcaagacac

SEQ ID NO: 86482 - DNA, 25 bp, Canis familiaris
cctccagctgctacacagaacaaca

SEQ ID NO: 86483 - DNA, 25 bp, Canis familiaris
cctgccgcatctatccaaaataaca

SEQ ID NO: 86484 - DNA, 25 bp, Canis familiaris
cctgcccactcgcatgcaaaggaaa

SEQ ID NO: 86485 - DNA, 25 bp, Canis familiaris
cctgcatccactggtgctgccaagg

SEQ ID NO: 86486 - DNA, 25 bp, Canis familiaris
cctgcatagagctttctgctcagca

SEQ ID NO: 86487 - DNA, 25 bp, Canis familiaris
cctgcttatgctttctgtcaaataa

SEQ ID NO: 86488 - DNA, 25 bp, Canis familiaris
cctgctttcattttctccatagcat

SEQ ID NO: 86489 - DNA, 25 bp, Canis familiaris
cctgcttcttctttcatctatgaat

SEQ ID NO: 86490 - DNA, 25 bp, Canis familiaris
cctgctcatcatcctgattgtgcta

SEQ ID NO: 86491 - DNA, 25 bp, Canis familiaris
cctgctcagctggctttgtggacaa

SEQ ID NO: 86492 - DNA, 25 bp, Canis familiaris
cctgcatcagctttcctgggaagag

SEQ ID NO: 86493 - DNA, 25 bp, Canis familiaris
cctgctgtgtgaaccgtggaaacaa

SEQ ID NO: 86494 - DNA, 25 bp, Canis familiaris
cctgctgttaccgtttgcaaaaatt

SEQ ID NO: 86495 - DNA, 25 bp, Canis familiaris
cctctgtttcaggttcaccacaaat

SEQ ID NO: 86496 - DNA, 25 bp, Canis familiaris
cctgctgtaacagctgtacgagcag

SEQ ID NO: 86497 - DNA, 25 bp, Canis familiaris
cctgcttaatctatgtacagaggaa

SEQ ID NO: 86498 - DNA, 25 bp, Canis familiaris
cctgcctaatcatccccaaggagag

SEQ ID NO: 86499 - DNA, 25 bp, Canis familiaris
cctgctccatactccacagagggag

SEQ ID NO: 86500 - DNA, 25 bp, Canis familiaris
cctctgcactgactacccagaatgg

SEQ ID NO: 86501 - DNA, 25 bp, Canis familiaris
cctctgtgtgctcagcgccatgaag

SEQ ID NO: 86502 - DNA, 25 bp, Canis familiaris
cctcgtgcttggcgcacagagctgt

SEQ ID NO: 86503 - DNA, 25 bp, Canis familiaris
cctcgtctgtgatgtgacccattca

SEQ ID NO: 86504 - DNA, 25 bp, Canis familiaris
cctcgtcctgtatgaccgagtcctg

SEQ ID NO: 86505 - DNA, 25 bp, Canis familiaris
cctcgccacgtttcacgagattctc

SEQ ID NO: 86506 - DNA, 25 bp, Canis familiaris
cctctgcacaagtttcccaatggtc

SEQ ID NO: 86507 - DNA, 25 bp, Canis familiaris
cctctgcacttgggtcggtaggtat

SEQ ID NO: 86508 - DNA, 25 bp, Canis familiaris
ccttcttggggtgggtgagtccagg

SEQ ID NO: 86509 - DNA, 25 bp, Canis familiaris
cctacttggtaggggtcggcaccag

SEQ ID NO: 86510 - DNA, 25 bp, Canis familiaris
gctcgaagttgtaggggttccacgg

SEQ ID NO: 86511 - DNA, 25 bp, Canis familiaris
gccgaagtttcttgtttgatcccag

SEQ ID NO: 86512 - DNA, 25 bp, Canis familiaris
gcccaagtttggggactaccagtgt

SEQ ID NO: 86513 - DNA, 25 bp, Canis familiaris
cctcaactctttgggactcaacttt

SEQ ID NO: 86514 - DNA, 25 bp, Canis familiaris
cctctactccctcaatttagtttgc

SEQ ID NO: 86515 - DNA, 25 bp, Canis familiaris
cctgccctccacagaattgggttcc

SEQ ID NO: 86516 - DNA, 25 bp, Canis familiaris
cctgccctccctggagactggaggt

SEQ ID NO: 86517 - DNA, 25 bp, Canis familiaris
cctccgctgcaggctggagacacgg

SEQ ID NO: 86518 - DNA, 25 bp, Canis familiaris
cctccttgcagggccacaagtgtgc

SEQ ID NO: 86519 - DNA, 25 bp, Canis familiaris
ccatgccaaacggtcacaagtatgc

SEQ ID NO: 86520 - DNA, 25 bp, Canis familiaris
cctgccatcaccgctgagaagtagc

SEQ ID NO: 86521 - DNA, 25 bp, Canis familiaris
cctgccatccttcctgaaattgggc

SEQ ID NO: 86522 - DNA, 25 bp, Canis familiaris
cctgctacttatcttcaattggtga

SEQ ID NO: 86523 - DNA, 25 bp, Canis familiaris
cctgctcccaatcttttattgtgtc

SEQ ID NO: 86524 - DNA, 25 bp, Canis familiaris
cctccccaagttgagctttgatgat

SEQ ID NO: 86525 - DNA, 25 bp, Canis familiaris
cctccttgcatagtggtagtttgag

SEQ ID NO: 86526 - DNA, 25 bp, Canis familiaris
cctccaagcggtctagcatcttaga

SEQ ID NO: 86527 - DNA, 25 bp, Canis familiaris
cctccaagcgggtggacatccagaa

SEQ ID NO: 86528 - DNA, 25 bp, Canis familiaris
cctctcaagtgctgtgggactactc

SEQ ID NO: 86529 - DNA, 25 bp, Canis familiaris
cctccagagcttgagggcctcatta

SEQ ID NO: 86530 - DNA, 25 bp, Canis familiaris
cctcctggcacggatggattcttta

SEQ ID NO: 86531 - DNA, 25 bp, Canis familiaris
cctgccttccagcataacattttag

SEQ ID NO: 86532 - DNA, 25 bp, Canis familiaris
cctgcccaccaattaaattcttaat

SEQ ID NO: 86533 - DNA, 25 bp, Canis familiaris
cctcccccacattaataatttatat

SEQ ID NO: 86534 - DNA, 25 bp, Canis familiaris
cctccattccctgactgaattacat

SEQ ID NO: 86535 - DNA, 25 bp, Canis familiaris
cctccattccgtgcagcatacagta

SEQ ID NO: 86536 - DNA, 25 bp, Canis familiaris
cctccatgtctccagtcacataatt

SEQ ID NO: 86537 - DNA, 25 bp, Canis familiaris
cctccagcattcattcctgatcatt

SEQ ID NO: 86538 - DNA, 25 bp, Canis familiaris
cctccagctacgggcacgttctgga

SEQ ID NO: 86539 - DNA, 25 bp, Canis familiaris
cctgccactgacgggcagttctctg

SEQ ID NO: 86540 - DNA, 25 bp, Canis familiaris
cctgccagtgacagggcttctcgta

SEQ ID NO: 86541 - DNA, 25 bp, Canis familiaris
cctccatgtgccagcatggttcacg

SEQ ID NO: 86542 - DNA, 25 bp, Canis familiaris
cctcgatgctcttagctgagtgtcc

SEQ ID NO: 86543 - DNA, 25 bp, Canis familiaris
cctcgatgctcttagctgagtgtcc

SEQ ID NO: 86544 - DNA, 25 bp, Canis familiaris
cctcgatgctcttagctgagtgtcc

SEQ ID NO: 86545 - DNA, 25 bp, Canis familiaris
cctcagatgcttcacgggagctcgg

SEQ ID NO: 86546 - DNA, 25 bp, Canis familiaris
gcccctttaagctgggttggtcctg

SEQ ID NO: 86547 - DNA, 25 bp, Canis familiaris
cctgccattaacgtcggtttgttct

SEQ ID NO: 86548 - DNA, 25 bp, Canis familiaris
cctcgcctatacgtggaagtgggtc

SEQ ID NO: 86549 - DNA, 25 bp, Canis familiaris
ccttactgataggggcacctgggtg

SEQ ID NO: 86550 - DNA, 25 bp, Canis familiaris
cctcccaacaggggcgcttgggtgg

SEQ ID NO: 86551 - DNA, 25 bp, Canis familiaris
cctcccaaatgacagcctggtgttg

SEQ ID NO: 86552 - DNA, 25 bp, Canis familiaris
cctccccacacagacaagggctttt

SEQ ID NO: 86553 - DNA, 25 bp, Canis familiaris
cctgccccacaggaagatgagggtc

SEQ ID NO: 86554 - DNA, 25 bp, Canis familiaris
gcgtcgcccaagggtaggggtggtg

SEQ ID NO: 86555 - DNA, 25 bp, Canis familiaris
cctgcgcccaaggcctaggaggggc

SEQ ID NO: 86556 - DNA, 25 bp, Canis familiaris
cctcgcaccctcgtaagttgggaga

SEQ ID NO: 86557 - DNA, 25 bp, Canis familiaris
cctcccgatcctgagcagttcgggt

SEQ ID NO: 86558 - DNA, 25 bp, Canis familiaris
cctccacgtctgaggagcgtctggg

SEQ ID NO: 86559 - DNA, 25 bp, Canis familiaris
cctcacacagttctattcttcggcg

SEQ ID NO: 86560 - DNA, 25 bp, Canis familiaris
cctcaagcaccaactcattttctgg

SEQ ID NO: 86561 - DNA, 25 bp, Canis familiaris
cctcaagagccatctcaggagtcgg

SEQ ID NO: 86562 - DNA, 25 bp, Canis familiaris
cctctcaagctgtgcttcgtacatg

SEQ ID NO: 86563 - DNA, 25 bp, Canis familiaris
cctgcccacgggtttgtgacatgtg

SEQ ID NO: 86564 - DNA, 25 bp, Canis familiaris
cctgccacagcggtgactgggaatg

SEQ ID NO: 86565 - DNA, 25 bp, Canis familiaris
cctgccagcagctagagcctgggga

SEQ ID NO: 86566 - DNA, 25 bp, Canis familiaris
cctcctgcatgcagcagctgcagct

SEQ ID NO: 86567 - DNA, 25 bp, Canis familiaris
cctcctcatctactctgatctatga

SEQ ID NO: 86568 - DNA, 25 bp, Canis familiaris
cctacatgaggccttggctgctgct

SEQ ID NO: 86569 - DNA, 25 bp, Canis familiaris
cctccatcaggcattggctctgtga

SEQ ID NO: 86570 - DNA, 25 bp, Canis familiaris
cctgccacgtcgatggcgcagagat

SEQ ID NO: 86571 - DNA, 25 bp, Canis familiaris
cctgcccccagtggtggcagtgtca

SEQ ID NO: 86572 - DNA, 25 bp, Canis familiaris
cctgcccctcacaggtgagagccag

SEQ ID NO: 86573 - DNA, 25 bp, Canis familiaris
cctgcccgtgcgggaggcgaggcag

SEQ ID NO: 86574 - DNA, 25 bp, Canis familiaris
cctgcctttgaggggaagattctga

SEQ ID NO: 86575 - DNA, 25 bp, Canis familiaris
cctgcctttcactcagcttgaaata

SEQ ID NO: 86576 - DNA, 25 bp, Canis familiaris
cctccttgtactgctttagctgcat

SEQ ID NO: 86577 - DNA, 25 bp, Canis familiaris
cctccttgctcattattgttacgtg

SEQ ID NO: 86578 - DNA, 25 bp, Canis familiaris
cctgccctgctgtaacagctgtacg

SEQ ID NO: 86579 - DNA, 25 bp, Canis familiaris
cctctcctgtgtaaatgttccctag

SEQ ID NO: 86580 - DNA, 25 bp, Canis familiaris
cctccacttggatgatgttcgcctc

SEQ ID NO: 86581 - DNA, 25 bp, Canis familiaris
cctccacttctgtaatttttcccag

SEQ ID NO: 86582 - DNA, 25 bp, Canis familiaris
cctgcccttctgggttgttttcaat

SEQ ID NO: 86583 - DNA, 25 bp, Canis familiaris
cctcccttcggtgtgtgatagttct

SEQ ID NO: 86584 - DNA, 25 bp, Canis familiaris
cctgccgcttagactttgttactga

SEQ ID NO: 86585 - DNA, 25 bp, Canis familiaris
cctgctgtttttatactgtgactgt

SEQ ID NO: 86586 - DNA, 25 bp, Canis familiaris
cctcgttccgacagagtagacagct

SEQ ID NO: 86587 - DNA, 25 bp, Canis familiaris
cctgcgtccacgacgagagtgggcc

SEQ ID NO: 86588 - DNA, 25 bp, Canis familiaris
cctgcgctgcagagacgatagtacg

SEQ ID NO: 86589 - DNA, 25 bp, Canis familiaris
cctgctgggtggtccatgggacgtg

SEQ ID NO: 86590 - DNA, 25 bp, Canis familiaris
cctgctgtctgtccccagggacagc

SEQ ID NO: 86591 - DNA, 25 bp, Canis familiaris
cctgctggcacttcttcaggcagaa

SEQ ID NO: 86592 - DNA, 25 bp, Canis familiaris
cctgctggcaatggctgttggctgc

SEQ ID NO: 86593 - DNA, 25 bp, Canis familiaris
cctgccgaagctgtctgagcagctc

SEQ ID NO: 86594 - DNA, 25 bp, Canis familiaris
cctcgtgcaactgctctagttcaga

SEQ ID NO: 86595 - DNA, 25 bp, Canis familiaris
cctcgtcatcctgtcaaatatagca

SEQ ID NO: 86596 - DNA, 25 bp, Canis familiaris
cctcctcaccatgaccatcatgatg

SEQ ID NO: 86597 - DNA, 25 bp, Canis familiaris
cctcctgagccaggtccttgtgagg

SEQ ID NO: 86598 - DNA, 25 bp, Canis familiaris
cctcctgagcgcaagtactccgtgt

SEQ ID NO: 86599 - DNA, 25 bp, Canis familiaris
cctctgctgtgtctatgacgtcggt

SEQ ID NO: 86600 - DNA, 25 bp, Canis familiaris
cctatcagctgtttaccgttggttt

SEQ ID NO: 86601 - DNA, 25 bp, Canis familiaris
gcctgacagatttttccagttttgt

SEQ ID NO: 86602 - DNA, 25 bp, Canis familiaris
ccagaagcttttgtacttcttgttc

SEQ ID NO: 86603 - DNA, 25 bp, Canis familiaris
ccagaaggtttcatctgttccctca

SEQ ID NO: 86604 - DNA, 25 bp, Canis familiaris
gccgtaggtttgccttgtgtcaatc

SEQ ID NO: 86605 - DNA, 25 bp, Canis familiaris
ccttagtaagtgcctctagctcaac

SEQ ID NO: 86606 - DNA, 25 bp, Canis familiaris
cctccagtgaagatgcctcagtcac

SEQ ID NO: 86607 - DNA, 25 bp, Canis familiaris
cctccgtgtatatgactctgtccag

SEQ ID NO: 86608 - DNA, 25 bp, Canis familiaris
cctcctggcctgtaagccagcttca

SEQ ID NO: 86609 - DNA, 25 bp, Canis familiaris
cctctctggtggtgactacgtcagg

SEQ ID NO: 86610 - DNA, 25 bp, Canis familiaris
cctccgtgtgtgtactgtactgtgc

SEQ ID NO: 86611 - DNA, 25 bp, Canis familiaris
cctacagctgtgcgacggattgggt

SEQ ID NO: 86612 - DNA, 25 bp, Canis familiaris
cctcctgctgtgagcactttgtgga

SEQ ID NO: 86613 - DNA, 25 bp, Canis familiaris
cctcctaggagacgttgctctgtca

SEQ ID NO: 86614 - DNA, 25 bp, Canis familiaris
cctcctaggagaacttgtagtgata

SEQ ID NO: 86615 - DNA, 25 bp, Canis familiaris
cctgccaaggtactcttctggtgag

SEQ ID NO: 86616 - DNA, 25 bp, Canis familiaris
ccttacctgtccattccggaataat

SEQ ID NO: 86617 - DNA, 25 bp, Canis familiaris
cctcttttatcctcacctggaaaat

SEQ ID NO: 86618 - DNA, 25 bp, Canis familiaris
cctctttcctgatggacctgatcaa

SEQ ID NO: 86619 - DNA, 25 bp, Canis familiaris
ccttttagtcttgacagtgtcgcaa

SEQ ID NO: 86620 - DNA, 25 bp, Canis familiaris
cctcttttgctctttaagtcttctg

SEQ ID NO: 86621 - DNA, 25 bp, Canis familiaris
cctctgtttcttgtttgtctggtgc

SEQ ID NO: 86622 - DNA, 25 bp, Canis familiaris
cctctggggccttttgctttgaggt

SEQ ID NO: 86623 - DNA, 25 bp, Canis familiaris
cctctgggtatctgtggccgcgagg

SEQ ID NO: 86624 - DNA, 25 bp, Canis familiaris
cctccatgttactggtctccatgtg

SEQ ID NO: 86625 - DNA, 25 bp, Canis familiaris
cctccagcctagtggatcagcctgg

SEQ ID NO: 86626 - DNA, 25 bp, Canis familiaris
ccttcatccattgatggacatttgg

SEQ ID NO: 86627 - DNA, 25 bp, Canis familiaris
cctctaccacactttgtcatttttg

SEQ ID NO: 86628 - DNA, 25 bp, Canis familiaris
ccttaccctttagatgtatttgagg

SEQ ID NO: 86629 - DNA, 25 bp, Canis familiaris
cctttgcccttcaaactgcagattt

SEQ ID NO: 86630 - DNA, 25 bp, Canis familiaris
cctcaggcctcttctaagtacactg

SEQ ID NO: 86631 - DNA, 25 bp, Canis familiaris
cctctgaccattctaagctgctaag

SEQ ID NO: 86632 - DNA, 25 bp, Canis familiaris
cctcgatccacacaaagctttctgg

SEQ ID NO: 86633 - DNA, 25 bp, Canis familiaris
cctctatgccaacacagtgttgtct

SEQ ID NO: 86634 - DNA, 25 bp, Canis familiaris
cctctgatgctcctggagggtcggc

SEQ ID NO: 86635 - DNA, 25 bp, Canis familiaris
cctcttgtctggtggactgcgagtc

SEQ ID NO: 86636 - DNA, 25 bp, Canis familiaris
cctctgaggctgggcaggacgcaag

SEQ ID NO: 86637 - DNA, 25 bp, Canis familiaris
cctctgaagataaggagaccatgga

SEQ ID NO: 86638 - DNA, 25 bp, Canis familiaris
cctcggagcctaggggcatctggag

SEQ ID NO: 86639 - DNA, 25 bp, Canis familiaris
cctcgcgagtcatggagatgaaggc

SEQ ID NO: 86640 - DNA, 25 bp, Canis familiaris
cctcgctgcaggacgccgagaaggc

SEQ ID NO: 86641 - DNA, 25 bp, Canis familiaris
cctccggtggcactcactgagaggc

SEQ ID NO: 86642 - DNA, 25 bp, Canis familiaris
cctcacgacatcgctgcatctgaag

SEQ ID NO: 86643 - DNA, 25 bp, Canis familiaris
cctgcctacatcttctattgaattc

SEQ ID NO: 86644 - DNA, 25 bp, Canis familiaris
cctcctgagcaccatctttaattgc

SEQ ID NO: 86645 - DNA, 25 bp, Canis familiaris
cctcctagcacgtctattcagcagg

SEQ ID NO: 86646 - DNA, 25 bp, Canis familiaris
cctcatgcgaccatacattctcaga

SEQ ID NO: 86647 - DNA, 25 bp, Canis familiaris
cctctcgaacctatgctctcgaaat

SEQ ID NO: 86648 - DNA, 25 bp, Canis familiaris
cctccgaatcctctctataataatg

SEQ ID NO: 86649 - DNA, 25 bp, Canis familiaris
cctccgacaagccgttcatagcaaa

SEQ ID NO: 86650 - DNA, 25 bp, Canis familiaris
cctccaacaagtccgatctgatcaa

SEQ ID NO: 86651 - DNA, 25 bp, Canis familiaris
cctccaacttcatttgatgctaaat

SEQ ID NO: 86652 - DNA, 25 bp, Canis familiaris
cctcccactcacttgggctaaacac

SEQ ID NO: 86653 - DNA, 25 bp, Canis familiaris
cctcccactctttgttcattaatac

SEQ ID NO: 86654 - DNA, 25 bp, Canis familiaris
cctgccccctgttcttaataaagtg

SEQ ID NO: 86655 - DNA, 25 bp, Canis familiaris
cctgcctcctctttcattaataata

SEQ ID NO: 86656 - DNA, 25 bp, Canis familiaris
cctctatggtcttgccaaaatgaaa

SEQ ID NO: 86657 - DNA, 25 bp, Canis familiaris
cctcgtgtgtctaccatactattaa

SEQ ID NO: 86658 - DNA, 25 bp, Canis familiaris
cctcctgtctgctgaaactgaacac

SEQ ID NO: 86659 - DNA, 25 bp, Canis familiaris
cctcctgtgctggatgagtctctga

SEQ ID NO: 86660 - DNA, 25 bp, Canis familiaris
cctccttcccagggatgctgagctt

SEQ ID NO: 86661 - DNA, 25 bp, Canis familiaris
cctccttctgttggtgtgtgtgcat

SEQ ID NO: 86662 - DNA, 25 bp, Canis familiaris
cctccttgcgtgagctgggtgagac

SEQ ID NO: 86663 - DNA, 25 bp, Canis familiaris
cctttcatggcgtgggctgtgaggc

SEQ ID NO: 86664 - DNA, 25 bp, Canis familiaris
cctttatgtccaataggtgctgcat

SEQ ID NO: 86665 - DNA, 25 bp, Canis familiaris
ccatctgtagttgctatggggacag

SEQ ID NO: 86666 - DNA, 25 bp, Canis familiaris
cctctatggatggacaatggggaca

SEQ ID NO: 86667 - DNA, 25 bp, Canis familiaris
cctctgctgggcgcacagagctgtc

SEQ ID NO: 86668 - DNA, 25 bp, Canis familiaris
cctctgcttggcggcacagagctgt

SEQ ID NO: 86669 - DNA, 25 bp, Canis familiaris
cctcatcatcatcgtcgacagagac

SEQ ID NO: 86670 - DNA, 25 bp, Canis familiaris
cctcagtgatctgcgcacaggacgg

SEQ ID NO: 86671 - DNA, 25 bp, Canis familiaris
cctgcctgccgcagaaggactgggc

SEQ ID NO: 86672 - DNA, 25 bp, Canis familiaris
cctgcctgtgccctaatgtggggga

SEQ ID NO: 86673 - DNA, 25 bp, Canis familiaris
cctccagtcccattcaggtggtggg

SEQ ID NO: 86674 - DNA, 25 bp, Canis familiaris
cctccaggctggcatctgtgtggat

SEQ ID NO: 86675 - DNA, 25 bp, Canis familiaris
cctccatggctcccatcgtgggagc

SEQ ID NO: 86676 - DNA, 25 bp, Canis familiaris
cctccatggccacctggcaggaggc

SEQ ID NO: 86677 - DNA, 25 bp, Canis familiaris
cctcctagacacctggtagatggat

SEQ ID NO: 86678 - DNA, 25 bp, Canis familiaris
cctcctgaactcctgtgaagaagac

SEQ ID NO: 86679 - DNA, 25 bp, Canis familiaris
cctccatctaatcccatcaagaaac

SEQ ID NO: 86680 - DNA, 25 bp, Canis familiaris
cctcaccttcttctgaagaacatta

SEQ ID NO: 86681 - DNA, 25 bp, Canis familiaris
cctccaggtcctattgataacacta

SEQ ID NO: 86682 - DNA, 25 bp, Canis familiaris
cctctgttatcccatttagcaacgt

SEQ ID NO: 86683 - DNA, 25 bp, Canis familiaris
cctctgttcttgcctaataaccagt

SEQ ID NO: 86684 - DNA, 25 bp, Canis familiaris
cctctctatttgtcttcacatacac

SEQ ID NO: 86685 - DNA, 25 bp, Canis familiaris
cctcctcattgcaagctagcacaca

SEQ ID NO: 86686 - DNA, 25 bp, Canis familiaris
cctgcctctactggcgctgccaagg

SEQ ID NO: 86687 - DNA, 25 bp, Canis familiaris
cctcctcttcttggtggcagggaaa

SEQ ID NO: 86688 - DNA, 25 bp, Canis familiaris
cctcttcctctttgatgtgaaccat

SEQ ID NO: 86689 - DNA, 25 bp, Canis familiaris
cctcattgcccttattcgggccgag

SEQ ID NO: 86690 - DNA, 25 bp, Canis familiaris
cctcctgcccaatctcatgggcacg

SEQ ID NO: 86691 - DNA, 25 bp, Canis familiaris
cctccagcaccacacatcagctggg

SEQ ID NO: 86692 - DNA, 25 bp, Canis familiaris
cctcacagccagcgtcaaggaagcg

SEQ ID NO: 86693 - DNA, 25 bp, Canis familiaris
cctcaacatcggcactgtggacgtg

SEQ ID NO: 86694 - DNA, 25 bp, Canis familiaris
cctccatctcaacattgggattgtg

SEQ ID NO: 86695 - DNA, 25 bp, Canis familiaris
ccttcctcaaagtgggttcacccag

SEQ ID NO: 86696 - DNA, 25 bp, Canis familiaris
ccaacaccaaagggcagtactacct

SEQ ID NO: 86697 - DNA, 25 bp, Canis familiaris
ccaaaccttacacagaaccacttca

SEQ ID NO: 86698 - DNA, 25 bp, Canis familiaris
ccaaacgcgaaacagacgctctccc

SEQ ID NO: 86699 - DNA, 25 bp, Canis familiaris
cctcaagcgccacagtagacgactc

SEQ ID NO: 86700 - DNA, 25 bp, Canis familiaris
cctcctgcccgaagagagactggtc

SEQ ID NO: 86701 - DNA, 25 bp, Canis familiaris
cctccctcctgaggtggttagctcg

SEQ ID NO: 86702 - DNA, 25 bp, Canis familiaris
cctccacacctactgtagtctgcag

SEQ ID NO: 86703 - DNA, 25 bp, Canis familiaris
cctccagcagactcgtgatgttcat

SEQ ID NO: 86704 - DNA, 25 bp, Canis familiaris
cctcgagccagctgggctgattctg

SEQ ID NO: 86705 - DNA, 25 bp, Canis familiaris
cctctggtcagcctgtatcttgatt

SEQ ID NO: 86706 - DNA, 25 bp, Canis familiaris
cctctgttccttcattttgtcaggt

SEQ ID NO: 86707 - DNA, 25 bp, Canis familiaris
ccattgtttcttcaattgggactgt

SEQ ID NO: 86708 - DNA, 25 bp, Canis familiaris
cctccactctttccattagggactt

SEQ ID NO: 86709 - DNA, 25 bp, Canis familiaris
cctccagacccgccaataaagacgt

SEQ ID NO: 86710 - DNA, 25 bp, Canis familiaris
tcctatcagtcctcctaataaacgg

SEQ ID NO: 86711 - DNA, 25 bp, Canis familiaris
cctataattatcgctattccaacgg

SEQ ID NO: 86712 - DNA, 25 bp, Canis familiaris
cctaacattgaggccttaaacctga

SEQ ID NO: 86713 - DNA, 25 bp, Canis familiaris
cctccatcattgtaactctcagaaa

SEQ ID NO: 86714 - DNA, 25 bp, Canis familiaris
cctccatcactgtggtgctgcaggt

SEQ ID NO: 86715 - DNA, 25 bp, Canis familiaris
cctcctcctgggttcatgttgtaat

SEQ ID NO: 86716 - DNA, 25 bp, Canis familiaris
cctcctccttgttgatttcttgaat

SEQ ID NO: 86717 - DNA, 25 bp, Canis familiaris
cctcccctctgaattttgtctggat

SEQ ID NO: 86718 - DNA, 25 bp, Canis familiaris
cctcgccctgtatttcaagttggta

SEQ ID NO: 86719 - DNA, 25 bp, Canis familiaris
cctcgctttgtttatccttttgaca

SEQ ID NO: 86720 - DNA, 25 bp, Canis familiaris
gcccctttggataaccgtcttggcg

SEQ ID NO: 86721 - DNA, 25 bp, Canis familiaris
ccttttaggaaacgctgtctttcag

SEQ ID NO: 86722 - DNA, 25 bp, Canis familiaris
ccttactggggatgactcttctttg

SEQ ID NO: 86723 - DNA, 25 bp, Canis familiaris
cctctgagcaggggactatatcttc

SEQ ID NO: 86724 - DNA, 25 bp, Canis familiaris
cctctagagtgtgcacattaccaac

SEQ ID NO: 86725 - DNA, 25 bp, Canis familiaris
cctccagggtcttttctggctacaa

SEQ ID NO: 86726 - DNA, 25 bp, Canis familiaris
cctcctccctcttgtattggtaaga

SEQ ID NO: 86727 - DNA, 25 bp, Canis familiaris
cctcctcctctcactgaagtgtaga

SEQ ID NO: 86728 - DNA, 25 bp, Canis familiaris
cctcgccctgtctcttgacaggaga

SEQ ID NO: 86729 - DNA, 25 bp, Canis familiaris
cctcctccggtggctggatagtgag

SEQ ID NO: 86730 - DNA, 25 bp, Canis familiaris
cctcgcctgggtccaggtgggcaga

SEQ ID NO: 86731 - DNA, 25 bp, Canis familiaris
cctcctctgggtgaatgtgctgggc

SEQ ID NO: 86732 - DNA, 25 bp, Canis familiaris
cctcgttctggggactgtgcaggag

SEQ ID NO: 86733 - DNA, 25 bp, Canis familiaris
cctcgtttgctgaagacactcgtgg

SEQ ID NO: 86734 - DNA, 25 bp, Canis familiaris
cctcctgcttcgagaactcaatcga

SEQ ID NO: 86735 - DNA, 25 bp, Canis familiaris
cctcctcttcacacaggcataactt

SEQ ID NO: 86736 - DNA, 25 bp, Canis familiaris
cctccctacacaaaccaaacatggt

SEQ ID NO: 86737 - DNA, 25 bp, Canis familiaris
cctcctctccttgaccaataaagtc

SEQ ID NO: 86738 - DNA, 25 bp, Canis familiaris
cctcctcgacttcactcaagaaatt

SEQ ID NO: 86739 - DNA, 25 bp, Canis familiaris
cctcccagacggcactgtatgaaag

SEQ ID NO: 86740 - DNA, 25 bp, Canis familiaris
cctccctgtgcgggatctggtggga

SEQ ID NO: 86741 - DNA, 25 bp, Canis familiaris
cctccactcacggagcactggatgg

SEQ ID NO: 86742 - DNA, 25 bp, Canis familiaris
cctccaccggaggccatggaaggag

SEQ ID NO: 86743 - DNA, 25 bp, Canis familiaris
cctcgaactcgaggccagggggacg

SEQ ID NO: 86744 - DNA, 25 bp, Canis familiaris
cctcaaagcccagctgagggagctg

SEQ ID NO: 86745 - DNA, 25 bp, Canis familiaris
cctcctcggctcggcgaatggagtg

SEQ ID NO: 86746 - DNA, 25 bp, Canis familiaris
cctccatcgtgcaccgcaagtgctt

SEQ ID NO: 86747 - DNA, 25 bp, Canis familiaris
cctcctcaagtacctaagtgcttct

SEQ ID NO: 86748 - DNA, 25 bp, Canis familiaris
cctcctgcagcactagcactaaatc

SEQ ID NO: 86749 - DNA, 25 bp, Canis familiaris
cctcctcacagttgccatgtagacc

SEQ ID NO: 86750 - DNA, 25 bp, Canis familiaris
cctcctcacagttgccatgtagacc

SEQ ID NO: 86751 - DNA, 25 bp, Canis familiaris
cctccgacgtcagctgtatgggcgg

SEQ ID NO: 86752 - DNA, 25 bp, Canis familiaris
cctccgactgtcactttgatggtgt

SEQ ID NO: 86753 - DNA, 25 bp, Canis familiaris
cctcctgggacaaggctctgtgttt

SEQ ID NO: 86754 - DNA, 25 bp, Canis familiaris
cctccctggagaagagctatgagct

SEQ ID NO: 86755 - DNA, 25 bp, Canis familiaris
cctccctcttgaatcagctgatacg

SEQ ID NO: 86756 - DNA, 25 bp, Canis familiaris
cctccatcacccaaagcagtattga

SEQ ID NO: 86757 - DNA, 25 bp, Canis familiaris
cctccaccagccgaacgtaggatgc

SEQ ID NO: 86758 - DNA, 25 bp, Canis familiaris
cctccccagttgagcgctgagaatc

SEQ ID NO: 86759 - DNA, 25 bp, Canis familiaris
cctccccagttcaggggtctctagg

SEQ ID NO: 86760 - DNA, 25 bp, Canis familiaris
cctcgcccggagaggggagtcacgg

SEQ ID NO: 86761 - DNA, 25 bp, Canis familiaris
cctccccaggggctgtgggtgagcg

SEQ ID NO: 86762 - DNA, 25 bp, Canis familiaris
cctcctatcaggatcttgctggggg

SEQ ID NO: 86763 - DNA, 25 bp, Canis familiaris
cctcctttgcgcatagtgtcgcggg

SEQ ID NO: 86764 - DNA, 25 bp, Canis familiaris
cctccttcttctcagtctgggggag

SEQ ID NO: 86765 - DNA, 25 bp, Canis familiaris
cctcccttttgcaagttcagtggct

SEQ ID NO: 86766 - DNA, 25 bp, Canis familiaris
cctccgcatgttccgtgtaaggcgc

SEQ ID NO: 86767 - DNA, 25 bp, Canis familiaris
cctcccagtgtgcggtcaaatgtga

SEQ ID NO: 86768 - DNA, 25 bp, Canis familiaris
cctcgtcaggtgcaggtcagcacgt

SEQ ID NO: 86769 - DNA, 25 bp, Canis familiaris
cctctgttggggttgctcactagag

SEQ ID NO: 86770 - DNA, 25 bp, Canis familiaris
cctcagccggctgttgcttgaagag

SEQ ID NO: 86771 - DNA, 25 bp, Canis familiaris
cctcgctgcgatctattgaaagtca

SEQ ID NO: 86772 - DNA, 25 bp, Canis familiaris
cctcccgctggtaataaaatctgtt

SEQ ID NO: 86773 - DNA, 25 bp, Canis familiaris
cctctctgtggtctacaaaaatgtt

SEQ ID NO: 86774 - DNA, 25 bp, Canis familiaris
cctcctctctgtggtctacaaaaat

SEQ ID NO: 86775 - DNA, 25 bp, Canis familiaris
cctccatcctgtgtctacaacaaaa

SEQ ID NO: 86776 - DNA, 25 bp, Canis familiaris
cctcgcatcaggagcctaatccaag

SEQ ID NO: 86777 - DNA, 25 bp, Canis familiaris
cctcgtgaggctggatctcaaaaag

SEQ ID NO: 86778 - DNA, 25 bp, Canis familiaris
cctcctggtcgccctaagaaatgag

SEQ ID NO: 86779 - DNA, 25 bp, Canis familiaris
cctccatggatcccattccataaag

SEQ ID NO: 86780 - DNA, 25 bp, Canis familiaris
cctccagggcccatctattgaagaa

SEQ ID NO: 86781 - DNA, 25 bp, Canis familiaris
cctcctgggttcatgttgtaataaa

SEQ ID NO: 86782 - DNA, 25 bp, Canis familiaris
cctctctggtgacatttggaatatt

SEQ ID NO: 86783 - DNA, 25 bp, Canis familiaris
ccaccggcataaattcgggctcatt

SEQ ID NO: 86784 - DNA, 25 bp, Canis familiaris
cctcctggcataatttggggttaga

SEQ ID NO: 86785 - DNA, 25 bp, Canis familiaris
cctcctaataacatcgggtctcatc

SEQ ID NO: 86786 - DNA, 25 bp, Canis familiaris
cctttgaagacctcggtcttccctg

SEQ ID NO: 86787 - DNA, 25 bp, Canis familiaris
cctttaagccatgggggtctgctca

SEQ ID NO: 86788 - DNA, 25 bp, Canis familiaris
ccttggaccaatggagggctctcca

SEQ ID NO: 86789 - DNA, 25 bp, Canis familiaris
cctcggcacgctgcggagagtacaa

SEQ ID NO: 86790 - DNA, 25 bp, Canis familiaris
cctccgcacgcagggtgcaggtagc

SEQ ID NO: 86791 - DNA, 25 bp, Canis familiaris
cctcctgcagcacagcgtcagggga

SEQ ID NO: 86792 - DNA, 25 bp, Canis familiaris
cctcgtcgcagaaggcgggcaggca

SEQ ID NO: 86793 - DNA, 25 bp, Canis familiaris
cctcgtcgcagaaggcgggcaggca

SEQ ID NO: 86794 - DNA, 25 bp, Canis familiaris
cctcgtcgcagaaggcgggcaggca

SEQ ID NO: 86795 - DNA, 25 bp, Canis familiaris
cctcgacgacctggacgagaccatc

SEQ ID NO: 86796 - DNA, 25 bp, Canis familiaris
cctccctgagccgaacggaatgctc

SEQ ID NO: 86797 - DNA, 25 bp, Canis familiaris
cctccgctcagcgtcaacgaggagt

SEQ ID NO: 86798 - DNA, 25 bp, Canis familiaris
cctcgcctccaggaagaggaagtac

SEQ ID NO: 86799 - DNA, 25 bp, Canis familiaris
cctcagccccagtcggggaagtcga

SEQ ID NO: 86800 - DNA, 25 bp, Canis familiaris
cctcgtccccagcaggggaggcgag

SEQ ID NO: 86801 - DNA, 25 bp, Canis familiaris
cctcccctggcacggggccagggag

SEQ ID NO: 86802 - DNA, 25 bp, Canis familiaris
cctccccatggtcgtcgtggggtga

SEQ ID NO: 86803 - DNA, 25 bp, Canis familiaris
cctccctgagggctcagtctgggga

SEQ ID NO: 86804 - DNA, 25 bp, Canis familiaris
cctccctcggggaatttgcaggaag

SEQ ID NO: 86805 - DNA, 25 bp, Canis familiaris
cctctctcttggtgtctttaatgaa

SEQ ID NO: 86806 - DNA, 25 bp, Canis familiaris
cctcctttgtgtctcctataaatgt

SEQ ID NO: 86807 - DNA, 25 bp, Canis familiaris
cctcctttcttctcatgtgtaaatt

SEQ ID NO: 86808 - DNA, 25 bp, Canis familiaris
cctccatttcctcccagatgaaatc

SEQ ID NO: 86809 - DNA, 25 bp, Canis familiaris
cctccattcctctcatttaatatga

SEQ ID NO: 86810 - DNA, 25 bp, Canis familiaris
cctcctatgaccagcttctaattga

SEQ ID NO: 86811 - DNA, 25 bp, Canis familiaris
cctcagtctactaatccttaattac

SEQ ID NO: 86812 - DNA, 25 bp, Canis familiaris
cctagttacctatctttgaaaggca

SEQ ID NO: 86813 - DNA, 25 bp, Canis familiaris
cctcgttgacctttagctctgaaga

SEQ ID NO: 86814 - DNA, 25 bp, Canis familiaris
cctagtgtaggttctgcagtgcggc

SEQ ID NO: 86815 - DNA, 25 bp, Canis familiaris
cctcacttaccttgctgcatgatgg

SEQ ID NO: 86816 - DNA, 25 bp, Canis familiaris
cctccttatgccttctcggaagtga

SEQ ID NO: 86817 - DNA, 25 bp, Canis familiaris
cctcgctgttcctcaagcagaagta

SEQ ID NO: 86818 - DNA, 25 bp, Canis familiaris
cctcctgacctctaaggctcaagtg

SEQ ID NO: 86819 - DNA, 25 bp, Canis familiaris
cctcctcccagcagaggtcaaggcc

SEQ ID NO: 86820 - DNA, 25 bp, Canis familiaris
cctcctcccgctggtaataaaatct

SEQ ID NO: 86821 - DNA, 25 bp, Canis familiaris
cctcctcgtgccttgtagataaaac

SEQ ID NO: 86822 - DNA, 25 bp, Canis familiaris
cctccccatgcttttcagtgaaaaa

SEQ ID NO: 86823 - DNA, 25 bp, Canis familiaris
cctcagcccttgcgatcatggaaaa

SEQ ID NO: 86824 - DNA, 25 bp, Canis familiaris
cctcacgccatcctgcgtctggact

SEQ ID NO: 86825 - DNA, 25 bp, Canis familiaris
cctctccacattcctgggagcagct

SEQ ID NO: 86826 - DNA, 25 bp, Canis familiaris
cctcctccagtggctggcataggat

SEQ ID NO: 86827 - DNA, 25 bp, Canis familiaris
cctcctccagcttctgcaaagctgt

SEQ ID NO: 86828 - DNA, 25 bp, Canis familiaris
cctcgcctcacttggaacatgtgtc

SEQ ID NO: 86829 - DNA, 25 bp, Canis familiaris
cctccccacagctcataatagctca

SEQ ID NO: 86830 - DNA, 25 bp, Canis familiaris
cctacatagaagtacatcaagatta

SEQ ID NO: 86831 - DNA, 25 bp, Canis familiaris
cctcaccaagcacaccaagttcgtg

SEQ ID NO: 86832 - DNA, 25 bp, Canis familiaris
ccttccggaacatcaagactcttgc

SEQ ID NO: 86833 - DNA, 25 bp, Canis familiaris
ccttgccatcaagtaccaaaccttc

SEQ ID NO: 86834 - DNA, 25 bp, Canis familiaris
cctcctctcatagtgacaccaagtc

SEQ ID NO: 86835 - DNA, 25 bp, Canis familiaris
cctcctctgtctggatcacaacatg

SEQ ID NO: 86836 - DNA, 25 bp, Canis familiaris
cctcctggctctgatcctaagggaa

SEQ ID NO: 86837 - DNA, 25 bp, Canis familiaris
cctccggctgctgaggctaggggac

SEQ ID NO: 86838 - DNA, 25 bp, Canis familiaris
cctccgtagctctgggggtgtgagt

SEQ ID NO: 86839 - DNA, 25 bp, Canis familiaris
cctcctgagtcctctgggggagttg

SEQ ID NO: 86840 - DNA, 25 bp, Canis familiaris
cctcctctgttccactgggagtggg

SEQ ID NO: 86841 - DNA, 25 bp, Canis familiaris
cctcctgtgccaggagctgcggggg

SEQ ID NO: 86842 - DNA, 25 bp, Canis familiaris
cctccctccctggtggggatgagtg

SEQ ID NO: 86843 - DNA, 25 bp, Canis familiaris
cctcccaccgagatgctgttgtagg

SEQ ID NO: 86844 - DNA, 25 bp, Canis familiaris
cctagcctccggagtatctattact

SEQ ID NO: 86845 - DNA, 25 bp, Canis familiaris
cctcgactgcctcaaaactgttatt

SEQ ID NO: 86846 - DNA, 25 bp, Canis familiaris
cctctgcactttgtttacttgtttt

SEQ ID NO: 86847 - DNA, 25 bp, Canis familiaris
cctccctctattatctacattcata

SEQ ID NO: 86848 - DNA, 25 bp, Canis familiaris
cctcacactctttgatgttccttta

SEQ ID NO: 86849 - DNA, 25 bp, Canis familiaris
cctacagccacttctgttctatttc

SEQ ID NO: 86850 - DNA, 25 bp, Canis familiaris
cctcctgctcacatctgtattataa

SEQ ID NO: 86851 - DNA, 25 bp, Canis familiaris
cctcctgtcacagctggatgatcaa

SEQ ID NO: 86852 - DNA, 25 bp, Canis familiaris
cctcctggacacttctgatatcagg

SEQ ID NO: 86853 - DNA, 25 bp, Canis familiaris
cctctgctggagccatttcaacaag

SEQ ID NO: 86854 - DNA, 25 bp, Canis familiaris
cctctgggctgcactgcccaaagat

SEQ ID NO: 86855 - DNA, 25 bp, Canis familiaris
cctcagtggtcagcccaaatggctt

SEQ ID NO: 86856 - DNA, 25 bp, Canis familiaris
cctcattttccctgaaatccttggt

SEQ ID NO: 86857 - DNA, 25 bp, Canis familiaris
cctcgtttcctgtgggactttagat

SEQ ID NO: 86858 - DNA, 25 bp, Canis familiaris
cctcggtgtttgtaggaacttctcg

SEQ ID NO: 86859 - DNA, 25 bp, Canis familiaris
cctcgggcgtctggaagaacttatc

SEQ ID NO: 86860 - DNA, 25 bp, Canis familiaris
cctcctggtgacagcgaaccttgtg

SEQ ID NO: 86861 - DNA, 25 bp, Canis familiaris
cctcctcgtgacacgtggcactaat

SEQ ID NO: 86862 - DNA, 25 bp, Canis familiaris
cctccctggaaacttccacatattt

SEQ ID NO: 86863 - DNA, 25 bp, Canis familiaris
cctccgctgaatctgttcgatcaaa

SEQ ID NO: 86864 - DNA, 25 bp, Canis familiaris
cctcacgctcagtggctttctaaaa

SEQ ID NO: 86865 - DNA, 25 bp, Canis familiaris
cctcaggacgcacactttctaaaga

SEQ ID NO: 86866 - DNA, 25 bp, Canis familiaris
tcctaaactgatgaaggttgtaaga

SEQ ID NO: 86867 - DNA, 25 bp, Canis familiaris
cctaaactgatgaaggttgtaagag

SEQ ID NO: 86868 - DNA, 25 bp, Canis familiaris
cctacaatcggggcagccttaaggc

SEQ ID NO: 86869 - DNA, 25 bp, Canis familiaris
cctaggattggccccactttgggct

SEQ ID NO: 86870 - DNA, 25 bp, Canis familiaris
cctaatcttaatcccctcttggaat

SEQ ID NO: 86871 - DNA, 25 bp, Canis familiaris
cctcaccttaatgtctctgtttatt

SEQ ID NO: 86872 - DNA, 25 bp, Canis familiaris
cctccctgacatttttctgtttata

SEQ ID NO: 86873 - DNA, 25 bp, Canis familiaris
cctccctgaactattttgtgctgtg

SEQ ID NO: 86874 - DNA, 25 bp, Canis familiaris
cctccgtgacgtaactcggtcatgt

SEQ ID NO: 86875 - DNA, 25 bp, Canis familiaris
cctagggagccgcaccttgtcatgt

SEQ ID NO: 86876 - DNA, 25 bp, Canis familiaris
cctcgagacacatcactcacttgtc

SEQ ID NO: 86877 - DNA, 25 bp, Canis familiaris
cctcgcagaaaagtccacctatgtt

SEQ ID NO: 86878 - DNA, 25 bp, Canis familiaris
cctcgcgtgagaagcgtgctccgcg

SEQ ID NO: 86879 - DNA, 25 bp, Canis familiaris
cctcggagacatcgcttctcagagg

SEQ ID NO: 86880 - DNA, 25 bp, Canis familiaris
cctctcaggatctccatccagaagg

SEQ ID NO: 86881 - DNA, 25 bp, Canis familiaris
cctattctgacaatccatctgcatg

SEQ ID NO: 86882 - DNA, 25 bp, Canis familiaris
cctttctaaaccagcacacatacat

SEQ ID NO: 86883 - DNA, 25 bp, Canis familiaris
cctccctaacccagacatgttacta

SEQ ID NO: 86884 - DNA, 25 bp, Canis familiaris
cctcacctacaggccaggatgcatg

SEQ ID NO: 86885 - DNA, 25 bp, Canis familiaris
cctcatcctggagatcgagtgatct

SEQ ID NO: 86886 - DNA, 25 bp, Canis familiaris
cctcctcgagtcctcgagctgtgag

SEQ ID NO: 86887 - DNA, 25 bp, Canis familiaris
cctcctgagcagcctttgagattgt

SEQ ID NO: 86888 - DNA, 25 bp, Canis familiaris
cctctctgagagcttaagcatttgc

SEQ ID NO: 86889 - DNA, 25 bp, Canis familiaris
cctcctgtcagacttaggtgctctc

SEQ ID NO: 86890 - DNA, 25 bp, Canis familiaris
cctcccagcagactttactgtctta

SEQ ID NO: 86891 - DNA, 25 bp, Canis familiaris
cctcccacggtcacagtgtttgaac

SEQ ID NO: 86892 - DNA, 25 bp, Canis familiaris
cctccctcggctaaaatcttggtga

SEQ ID NO: 86893 - DNA, 25 bp, Canis familiaris
ccatccccgttgacggacgttgatg

SEQ ID NO: 86894 - DNA, 25 bp, Canis familiaris
cctccgacaaggacatgtacctgga

SEQ ID NO: 86895 - DNA, 25 bp, Canis familiaris
cctcctgctggggagactcccatgg

SEQ ID NO: 86896 - DNA, 25 bp, Canis familiaris
cctctcctggcagaagctgtttgtc

SEQ ID NO: 86897 - DNA, 25 bp, Canis familiaris
cctcgcggtggaacagctgtttgac

SEQ ID NO: 86898 - DNA, 25 bp, Canis familiaris
cctcgctggtggatgcgtgcattta

SEQ ID NO: 86899 - DNA, 25 bp, Canis familiaris
cctcaggtgatgctttgtcttgtca

SEQ ID NO: 86900 - DNA, 25 bp, Canis familiaris
cctcaggaagtttggccttccctgc

SEQ ID NO: 86901 - DNA, 25 bp, Canis familiaris
cctactgcatagtttacatcctccc

SEQ ID NO: 86902 - DNA, 25 bp, Canis familiaris
cctaagcaaggcttcatcacacctc

SEQ ID NO: 86903 - DNA, 25 bp, Canis familiaris
cctcaatgaccactttgtcaagctc

SEQ ID NO: 86904 - DNA, 25 bp, Canis familiaris
cctaattccctaatttccatctagt

SEQ ID NO: 86905 - DNA, 25 bp, Canis familiaris
cctcctccacctattgacaatggag

SEQ ID NO: 86906 - DNA, 25 bp, Canis familiaris
cctccgccatccattggacaattgc

SEQ ID NO: 86907 - DNA, 25 bp, Canis familiaris
cctccccccatcatgggacaatgcg

SEQ ID NO: 86908 - DNA, 25 bp, Canis familiaris
cctcaccccctatggagatcaaggt

SEQ ID NO: 86909 - DNA, 25 bp, Canis familiaris
cctcatcacccagattccaatatca

SEQ ID NO: 86910 - DNA, 25 bp, Canis familiaris
cctagccatcaaaatgacccactca

SEQ ID NO: 86911 - DNA, 25 bp, Canis familiaris
cctcatccaatacatacactcacat

SEQ ID NO: 86912 - DNA, 25 bp, Canis familiaris
cctcatccaaactttcacctgttag

SEQ ID NO: 86913 - DNA, 25 bp, Canis familiaris
cctcaccagaactcaactctactag

SEQ ID NO: 86914 - DNA, 25 bp, Canis familiaris
cctcaccaaactccaagcctaggaa

SEQ ID NO: 86915 - DNA, 25 bp, Canis familiaris
cctctccaagaggacaatcatctgg

SEQ ID NO: 86916 - DNA, 25 bp, Canis familiaris
ccttcggctggctcagtcagtgaag

SEQ ID NO: 86917 - DNA, 25 bp, Canis familiaris
cctccggcggacagctgcttacatg

SEQ ID NO: 86918 - DNA, 25 bp, Canis familiaris
ccttgcttctagacggtcttcactg

SEQ ID NO: 86919 - DNA, 25 bp, Canis familiaris
tccctttccaacacatttaccaaat

SEQ ID NO: 86920 - DNA, 25 bp, Canis familiaris
ccttttccaacacattattgccctt

SEQ ID NO: 86921 - DNA, 25 bp, Canis familiaris
tcgttgtatcaaaggtttatttact

SEQ ID NO: 86922 - DNA, 25 bp, Canis familiaris
cctttaatctggacttctggttact

SEQ ID NO: 86923 - DNA, 25 bp, Canis familiaris
cctttaacatttcttgtggggctgg

SEQ ID NO: 86924 - DNA, 25 bp, Canis familiaris
gccttttaaacttcctctggcaagg

SEQ ID NO: 86925 - DNA, 25 bp, Canis familiaris
ccaattaaagaaaccctgtgccata

SEQ ID NO: 86926 - DNA, 25 bp, Canis familiaris
cctagtaaaagtccgcagctgtgaa

SEQ ID NO: 86927 - DNA, 25 bp, Canis familiaris
cctaaacacagaccactggatgtga

SEQ ID NO: 86928 - DNA, 25 bp, Canis familiaris
tccaaaaactggcatttgagtatga

SEQ ID NO: 86929 - DNA, 25 bp, Canis familiaris
cctcatgaaactggaataagcgctt

SEQ ID NO: 86930 - DNA, 25 bp, Canis familiaris
cctcgagtcctcgagctgtgaggct

SEQ ID NO: 86931 - DNA, 25 bp, Canis familiaris
cctacatgatcctggccatgacgct

SEQ ID NO: 86932 - DNA, 25 bp, Canis familiaris
cctaatgtggtggggctgcacgctt

SEQ ID NO: 86933 - DNA, 25 bp, Canis familiaris
cctcaagtggtgaggtgcccatcgc

SEQ ID NO: 86934 - DNA, 25 bp, Canis familiaris
tcctaaggcagggggtccaacacag

SEQ ID NO: 86935 - DNA, 25 bp, Canis familiaris
cctactgcctgggaggttaccacag

SEQ ID NO: 86936 - DNA, 25 bp, Canis familiaris
cctactactttatcacttcacacag

SEQ ID NO: 86937 - DNA, 25 bp, Canis familiaris
cctattatcttcaaggccgcctacg

SEQ ID NO: 86938 - DNA, 25 bp, Canis familiaris
cctaatggttcttcgtcagccaagg

SEQ ID NO: 86939 - DNA, 25 bp, Canis familiaris
cctcaaaggccctgtcagccaatgg

SEQ ID NO: 86940 - DNA, 25 bp, Canis familiaris
cctcaacaggaagccctgcctgatg

SEQ ID NO: 86941 - DNA, 25 bp, Canis familiaris
cctaagggcacagagccccttcagc

SEQ ID NO: 86942 - DNA, 25 bp, Canis familiaris
cctaaagcgacagaccatggggcag

SEQ ID NO: 86943 - DNA, 25 bp, Canis familiaris
cctacctgccattaatccaggggaa

SEQ ID NO: 86944 - DNA, 25 bp, Canis familiaris
cctacctggacgttgtgcgggaggt

SEQ ID NO: 86945 - DNA, 25 bp, Canis familiaris
cctcactcgggccttttaggcaggg

SEQ ID NO: 86946 - DNA, 25 bp, Canis familiaris
cctcactcctggtatcgtctagaat

SEQ ID NO: 86947 - DNA, 25 bp, Canis familiaris
cctactggctgttgatgcttctggc

SEQ ID NO: 86948 - DNA, 25 bp, Canis familiaris
cctatctggttggtgcttgggcaga

SEQ ID NO: 86949 - DNA, 25 bp, Canis familiaris
cctctctggactgctgcatgtagga

SEQ ID NO: 86950 - DNA, 25 bp, Canis familiaris
cctctcggaatgacgcaagcatgga

SEQ ID NO: 86951 - DNA, 25 bp, Canis familiaris
ccttcaggcctacaagtggagctac

SEQ ID NO: 86952 - DNA, 25 bp, Canis familiaris
cctaagccctggcaagaggccttgc

SEQ ID NO: 86953 - DNA, 25 bp, Canis familiaris
cctacaccctgaccagtaacattcc

SEQ ID NO: 86954 - DNA, 25 bp, Canis familiaris
cctccccactagtgtacacatgtaa

SEQ ID NO: 86955 - DNA, 25 bp, Canis familiaris
cctccccgcattttgcttagataaa

SEQ ID NO: 86956 - DNA, 25 bp, Canis familiaris
cctccccgcaccatgaataataaaa

SEQ ID NO: 86957 - DNA, 25 bp, Canis familiaris
cctccccacaccacgagaatattta

SEQ ID NO: 86958 - DNA, 25 bp, Canis familiaris
cctcgataacaccccaggaatcata

SEQ ID NO: 86959 - DNA, 25 bp, Canis familiaris
cctcgtggacctcctcagaggatac

SEQ ID NO: 86960 - DNA, 25 bp, Canis familiaris
cctctgttccctctacagtaacaaa

SEQ ID NO: 86961 - DNA, 25 bp, Canis familiaris
cctcattctccctgttcagaaggaa

SEQ ID NO: 86962 - DNA, 25 bp, Canis familiaris
cctcttcagctgtggttgccaaggt

SEQ ID NO: 86963 - DNA, 25 bp, Canis familiaris
cctctcccgctgggtgttcaaggag

SEQ ID NO: 86964 - DNA, 25 bp, Canis familiaris
cctcccctgtgctgttcagcaaggg

SEQ ID NO: 86965 - DNA, 25 bp, Canis familiaris
cctccctgtgctcagtacagacaag

SEQ ID NO: 86966 - DNA, 25 bp, Canis familiaris
cctcccgctgcgaagaaacctgcag

SEQ ID NO: 86967 - DNA, 25 bp, Canis familiaris
cctccctatctcagagagaaggcag

SEQ ID NO: 86968 - DNA, 25 bp, Canis familiaris
cctccctgtgctgagagagtggaaa

SEQ ID NO: 86969 - DNA, 25 bp, Canis familiaris
cctccctgctgaaaggcagctggta

SEQ ID NO: 86970 - DNA, 25 bp, Canis familiaris
cctccctgcatggatagtcctgggc

SEQ ID NO: 86971 - DNA, 25 bp, Canis familiaris
cctcccatggctaggtgcctggatg

SEQ ID NO: 86972 - DNA, 25 bp, Canis familiaris
cctcccagtgccaagtgacgtggcg

SEQ ID NO: 86973 - DNA, 25 bp, Canis familiaris
cctcgtgcagctgtgggcagcgtgg

SEQ ID NO: 86974 - DNA, 25 bp, Canis familiaris
cctcgtgctctcatgggcaatgtgg

SEQ ID NO: 86975 - DNA, 25 bp, Canis familiaris
cctcgtctgcctgcagcgaatggtg

SEQ ID NO: 86976 - DNA, 25 bp, Canis familiaris
cctcgattccccgaattggtggagt

SEQ ID NO: 86977 - DNA, 25 bp, Canis familiaris
cctctgcaacccccagatatttggt

SEQ ID NO: 86978 - DNA, 25 bp, Canis familiaris
cctcagcaaaccacaggcacattgc

SEQ ID NO: 86979 - DNA, 25 bp, Canis familiaris
ccttgagccaccaaagtcctggaac

SEQ ID NO: 86980 - DNA, 25 bp, Canis familiaris
cctctattgcccttagtcctagaaa

SEQ ID NO: 86981 - DNA, 25 bp, Canis familiaris
cctcaattggccttggacttcgaag

SEQ ID NO: 86982 - DNA, 25 bp, Canis familiaris
cctcacatttggctgggctgtcaaa

SEQ ID NO: 86983 - DNA, 25 bp, Canis familiaris
cctcgctttggcgtgggtatgaagc

SEQ ID NO: 86984 - DNA, 25 bp, Canis familiaris
cctcgtccagcggtggttgtgacag

SEQ ID NO: 86985 - DNA, 25 bp, Canis familiaris
cctcgtgcccatagcggtgggagcg

SEQ ID NO: 86986 - DNA, 25 bp, Canis familiaris
cctctgttggcaggggtgggatggc

SEQ ID NO: 86987 - DNA, 25 bp, Canis familiaris
cctctattgccatgtgcctggaatt

SEQ ID NO: 86988 - DNA, 25 bp, Canis familiaris
cctctgtagctcttgtgtcatggga

SEQ ID NO: 86989 - DNA, 25 bp, Canis familiaris
cctctctatgtctatgtctattgtg

SEQ ID NO: 86990 - DNA, 25 bp, Canis familiaris
cctccctgtctgtttcatagatgag

SEQ ID NO: 86991 - DNA, 25 bp, Canis familiaris
cctcccggttactatagcatcagaa

SEQ ID NO: 86992 - DNA, 25 bp, Canis familiaris
cctcccggtacttatagcatcagaa

SEQ ID NO: 86993 - DNA, 25 bp, Canis familiaris
cctccctgtgtacaatagcaatcaa

SEQ ID NO: 86994 - DNA, 25 bp, Canis familiaris
cctccctgtgcaacctaagatcaaa

SEQ ID NO: 86995 - DNA, 25 bp, Canis familiaris
cctcccccagagttatcatgtgata

SEQ ID NO: 86996 - DNA, 25 bp, Canis familiaris
cctcttccctgaaccattgtatatc

SEQ ID NO: 86997 - DNA, 25 bp, Canis familiaris
cctcgtcacttgcaacttgctattc

SEQ ID NO: 86998 - DNA, 25 bp, Canis familiaris
cctattacttgggatgctttttcta

SEQ ID NO: 86999 - DNA, 25 bp, Canis familiaris
cctagctagcctgggacttatttgg

SEQ ID NO: 87000 - DNA, 25 bp, Canis familiaris
cctacctcctaggagtttctttgca

SEQ ID NO: 87001 - DNA, 25 bp, Canis familiaris
cctagcccccatgatatgattttcc

SEQ ID NO: 87002 - DNA, 25 bp, Canis familiaris
ccaatcccccttacaggtttgagct

SEQ ID NO: 87003 - DNA, 25 bp, Canis familiaris
ccactccccagtctaaattggcaca

SEQ ID NO: 87004 - DNA, 25 bp, Canis familiaris
cctctccctaatctaggtgtccata

SEQ ID NO: 87005 - DNA, 25 bp, Canis familiaris
cctctccacttgacactggggttaa

SEQ ID NO: 87006 - DNA, 25 bp, Canis familiaris
cctctcccgtctttgtagaattaag

SEQ ID NO: 87007 - DNA, 25 bp, Canis familiaris
ccttagactgtccttccaaattaga

SEQ ID NO: 87008 - DNA, 25 bp, Canis familiaris
ccttagactgatgtcccatttatcg

SEQ ID NO: 87009 - DNA, 25 bp, Canis familiaris
cctcatattctcatttcctattacg

SEQ ID NO: 87010 - DNA, 25 bp, Canis familiaris
ccttttcactgtttcgatcgtacag

SEQ ID NO: 87011 - DNA, 25 bp, Canis familiaris
cctttcccgtttggtcagtgcaagg

SEQ ID NO: 87012 - DNA, 25 bp, Canis familiaris
cctctgtcctggcttcagtatttgg

SEQ ID NO: 87013 - DNA, 25 bp, Canis familiaris
cctctgtggcttgttggttttggcg

SEQ ID NO: 87014 - DNA, 25 bp, Canis familiaris
cctctgtaccccttagtaagtgcct

SEQ ID NO: 87015 - DNA, 25 bp, Canis familiaris
ccttagaccccttagaacactgagt

SEQ ID NO: 87016 - DNA, 25 bp, Canis familiaris
cctcttgactccctttaacgtgaga

SEQ ID NO: 87017 - DNA, 25 bp, Canis familiaris
cctctcgactttaactggaagtgag

SEQ ID NO: 87018 - DNA, 25 bp, Canis familiaris
cctctctgactccgaaaggaaggtg

SEQ ID NO: 87019 - DNA, 25 bp, Canis familiaris
cctctctcactcctagggggggaga

SEQ ID NO: 87020 - DNA, 25 bp, Canis familiaris
cctcagcccctctaggtggggtggg

SEQ ID NO: 87021 - DNA, 25 bp, Canis familiaris
cctcgctgcccctgtagggaggggt

SEQ ID NO: 87022 - DNA, 25 bp, Canis familiaris
ccttggtcccacattccgatgggag

SEQ ID NO: 87023 - DNA, 25 bp, Canis familiaris
ccattcagaccctcaaccgattggg

SEQ ID NO: 87024 - DNA, 25 bp, Canis familiaris
ccattcataaccgcaagggacgaac

SEQ ID NO: 87025 - DNA, 25 bp, Canis familiaris
ccatcctcaacatcatccaggggga

SEQ ID NO: 87026 - DNA, 25 bp, Canis familiaris
gcttcccaactgctccaaggaaaga

SEQ ID NO: 87027 - DNA, 25 bp, Canis familiaris
cctcccagcagccccaagaggaagg

SEQ ID NO: 87028 - DNA, 25 bp, Canis familiaris
cctcccacacagccaacaaagaaga

SEQ ID NO: 87029 - DNA, 25 bp, Canis familiaris
cctccctatcctgacaccaggaaga

SEQ ID NO: 87030 - DNA, 25 bp, Canis familiaris
cctcccagcgcctgaacgaggagaa

SEQ ID NO: 87031 - DNA, 25 bp, Canis familiaris
cctcttcaccgtgagacgcatcgga

SEQ ID NO: 87032 - DNA, 25 bp, Canis familiaris
cctcttattcctgctacagcacggt

SEQ ID NO: 87033 - DNA, 25 bp, Canis familiaris
cctcccattcctggcaagggcaggt

SEQ ID NO: 87034 - DNA, 25 bp, Canis familiaris
cctcccttcccgaagatatcacagt

SEQ ID NO: 87035 - DNA, 25 bp, Canis familiaris
cctctccttcacctaaataatactt

SEQ ID NO: 87036 - DNA, 25 bp, Canis familiaris
cctccctcactcttaacataataca

SEQ ID NO: 87037 - DNA, 25 bp, Canis familiaris
cctcacctgacattcaaattttaat

SEQ ID NO: 87038 - DNA, 25 bp, Canis familiaris
cctcccataccttggcatcatttaa

SEQ ID NO: 87039 - DNA, 25 bp, Canis familiaris
cctcccagcccttggatgaaccaag

SEQ ID NO: 87040 - DNA, 25 bp, Canis familiaris
ccatctaagcccatgtggtagccca

SEQ ID NO: 87041 - DNA, 25 bp, Canis familiaris
ccttcaacacaggatggaccatctc

SEQ ID NO: 87042 - DNA, 25 bp, Canis familiaris
ccttaccacgtgggacagacctttg

SEQ ID NO: 87043 - DNA, 25 bp, Canis familiaris
cctttcccagttgagcaggtctact

SEQ ID NO: 87044 - DNA, 25 bp, Canis familiaris
ccatcctccggatcaacaggtagac

SEQ ID NO: 87045 - DNA, 25 bp, Canis familiaris
cctcactccgtatagcactttaaag

SEQ ID NO: 87046 - DNA, 25 bp, Canis familiaris
cctctacctgtaaccctataaatat

SEQ ID NO: 87047 - DNA, 25 bp, Canis familiaris
cctcttgttttgagccttaacatct

SEQ ID NO: 87048 - DNA, 25 bp, Canis familiaris
cctttgttttgctgcccaaatctaa

SEQ ID NO: 87049 - DNA, 25 bp, Canis familiaris
gcctttgggtcagggcccaattctg

SEQ ID NO: 87050 - DNA, 25 bp, Canis familiaris
ccttctagttcagatcctcctgagg

SEQ ID NO: 87051 - DNA, 25 bp, Canis familiaris
ccttccagttagaacctccttaatg

SEQ ID NO: 87052 - DNA, 25 bp, Canis familiaris
ccacaccgttcgaagaaccctacat

SEQ ID NO: 87053 - DNA, 25 bp, Canis familiaris
ccataagccttagaacgccctgagt

SEQ ID NO: 87054 - DNA, 25 bp, Canis familiaris
cctatcacgagaacggacgacctaa

SEQ ID NO: 87055 - DNA, 25 bp, Canis familiaris
cctaccaaaagcagccaaccatctt

SEQ ID NO: 87056 - DNA, 25 bp, Canis familiaris
cctaataaaagatccagcacttttt

SEQ ID NO: 87057 - DNA, 25 bp, Canis familiaris
gccaaaaataaatctccggtgttct

SEQ ID NO: 87058 - DNA, 25 bp, Canis familiaris
gtcagataaaaatccccctttggct

SEQ ID NO: 87059 - DNA, 25 bp, Canis familiaris
gctgtataaaattaaacccatttcg

SEQ ID NO: 87060 - DNA, 25 bp, Canis familiaris
gctgtaacacatgaaaaccaaacca

SEQ ID NO: 87061 - DNA, 25 bp, Canis familiaris
cctcaaaatacatacacaaaagcca

SEQ ID NO: 87062 - DNA, 25 bp, Canis familiaris
cctctgaagagatatacccataacc

SEQ ID NO: 87063 - DNA, 25 bp, Canis familiaris
cctctacgcgcaaagcacctgtaga

SEQ ID NO: 87064 - DNA, 25 bp, Canis familiaris
cctctttcgatattcctgatccaga

SEQ ID NO: 87065 - DNA, 25 bp, Canis familiaris
cctcgcttcatggaaccagatcctg

SEQ ID NO: 87066 - DNA, 25 bp, Canis familiaris
ccatcagttcagggagaacaccgta

SEQ ID NO: 87067 - DNA, 25 bp, Canis familiaris
cctcattccagcaagagaccacctc

SEQ ID NO: 87068 - DNA, 25 bp, Canis familiaris
cctctcctgctgcaggactcagcac

SEQ ID NO: 87069 - DNA, 25 bp, Canis familiaris
cctctcgtggtgtcgagcatacctt

SEQ ID NO: 87070 - DNA, 25 bp, Canis familiaris
cctcgtggcgtgtcgttacagatgt

SEQ ID NO: 87071 - DNA, 25 bp, Canis familiaris
cctcggcctggtgtcatacacagat

SEQ ID NO: 87072 - DNA, 25 bp, Canis familiaris
cctcaggccaggcttttgagctgat

SEQ ID NO: 87073 - DNA, 25 bp, Canis familiaris
cctagtaagtgccttcagtgtcctc

SEQ ID NO: 87074 - DNA, 25 bp, Canis familiaris
cctcactagaggcctgtaggtcccg

SEQ ID NO: 87075 - DNA, 25 bp, Canis familiaris
cctcactagcgccagcttcagaggt

SEQ ID NO: 87076 - DNA, 25 bp, Canis familiaris
cctcagctaggactgtgctctcaga

SEQ ID NO: 87077 - DNA, 25 bp, Canis familiaris
cctcactgatgggcttctccatatg

SEQ ID NO: 87078 - DNA, 25 bp, Canis familiaris
cctaagagggctacctctgtggcgg

SEQ ID NO: 87079 - DNA, 25 bp, Canis familiaris
cctattgtggcctctcggggagagg

SEQ ID NO: 87080 - DNA, 25 bp, Canis familiaris
cctactgggccaagcaagggtgggt

SEQ ID NO: 87081 - DNA, 25 bp, Canis familiaris
ccttctagccgactggaggggcggt

SEQ ID NO: 87082 - DNA, 25 bp, Canis familiaris
ccttctacaacacgggggccgtgct

SEQ ID NO: 87083 - DNA, 25 bp, Canis familiaris
ccttctagctcaaggctgtgagtcc

SEQ ID NO: 87084 - DNA, 25 bp, Canis familiaris
cctctttggcccctgagatgtggca

SEQ ID NO: 87085 - DNA, 25 bp, Canis familiaris
cctcttgctggcgcaacagagctgt

SEQ ID NO: 87086 - DNA, 25 bp, Canis familiaris
ccatctggctgggctatatcaactc

SEQ ID NO: 87087 - DNA, 25 bp, Canis familiaris
cctctgtgccaggaatccattctca

SEQ ID NO: 87088 - DNA, 25 bp, Canis familiaris
cctcatggaagccattcggttcctg

SEQ ID NO: 87089 - DNA, 25 bp, Canis familiaris
ccttgggcaggaatgggcttcactt

SEQ ID NO: 87090 - DNA, 25 bp, Canis familiaris
cctctgggaagatgtggcgtgacgg

SEQ ID NO: 87091 - DNA, 25 bp, Canis familiaris
cctctggaaagctgtggcgtgatgg

SEQ ID NO: 87092 - DNA, 25 bp, Canis familiaris
cctcggtcagcaccgtggtgtgagg

SEQ ID NO: 87093 - DNA, 25 bp, Canis familiaris
cctctggttgctcttgtgtgatcaa

SEQ ID NO: 87094 - DNA, 25 bp, Canis familiaris
cctctccattgtctgtgatgcttat

SEQ ID NO: 87095 - DNA, 25 bp, Canis familiaris
ccttcagcctgtctgtgacgtttat

SEQ ID NO: 87096 - DNA, 25 bp, Canis familiaris
ccttcgtctcatcttgggttcgaaa

SEQ ID NO: 87097 - DNA, 25 bp, Canis familiaris
cctctggtgaatattggctggggaa

SEQ ID NO: 87098 - DNA, 25 bp, Canis familiaris
cctcacctgcaaatgttgactctgg

SEQ ID NO: 87099 - DNA, 25 bp, Canis familiaris
cctcatctatgccttcattggccag

SEQ ID NO: 87100 - DNA, 25 bp, Canis familiaris
cctctgcatggcctgcagattggcc

SEQ ID NO: 87101 - DNA, 25 bp, Canis familiaris
cctctgcatggcctgtagattggac

SEQ ID NO: 87102 - DNA, 25 bp, Canis familiaris
cctctgctggcgcatcagagtctgt

SEQ ID NO: 87103 - DNA, 25 bp, Canis familiaris
cctctgctactgcacaagccagttg

SEQ ID NO: 87104 - DNA, 25 bp, Canis familiaris
cctctgctactgcacaagccagtga

SEQ ID NO: 87105 - DNA, 25 bp, Canis familiaris
cctacatgatcgcacacatcacagg

SEQ ID NO: 87106 - DNA, 25 bp, Canis familiaris
cctcatcagtcggagactcatctcg

SEQ ID NO: 87107 - DNA, 25 bp, Canis familiaris
cctctatgcttccaagatcatctcg

SEQ ID NO: 87108 - DNA, 25 bp, Canis familiaris
cctctcatctccaaggctttcgaga

SEQ ID NO: 87109 - DNA, 25 bp, Canis familiaris
cctctgctcctctggcattttgagg

SEQ ID NO: 87110 - DNA, 25 bp, Canis familiaris
cctctgccctgtgaatcttgtgggc

SEQ ID NO: 87111 - DNA, 25 bp, Canis familiaris
cctctgccgctggaagtggtgtgga

SEQ ID NO: 87112 - DNA, 25 bp, Canis familiaris
cctctgtccttaagtagtaggagaa

SEQ ID NO: 87113 - DNA, 25 bp, Canis familiaris
cctctgtgccttaagtagtatggag

SEQ ID NO: 87114 - DNA, 25 bp, Canis familiaris
cctttgccgtaatcatccaggggct

SEQ ID NO: 87115 - DNA, 25 bp, Canis familiaris
cctttcccatgaatacccaacgaga

SEQ ID NO: 87116 - DNA, 25 bp, Canis familiaris
cctcttaccgtattccacaaggatt

SEQ ID NO: 87117 - DNA, 25 bp, Canis familiaris
cctctctttttatcacacgactgtt

SEQ ID NO: 87118 - DNA, 25 bp, Canis familiaris
cctctctatctattcataacccagt

SEQ ID NO: 87119 - DNA, 25 bp, Canis familiaris
ccttcttgtaaataactgcctccct

SEQ ID NO: 87120 - DNA, 25 bp, Canis familiaris
ccttacttacatataacccccagtg

SEQ ID NO: 87121 - DNA, 25 bp, Canis familiaris
ccttacatttctaaaatccccaatg

SEQ ID NO: 87122 - DNA, 25 bp, Canis familiaris
ccttccttcctaagatttctaccag

SEQ ID NO: 87123 - DNA, 25 bp, Canis familiaris
cctacgtcgtgtcggatttcttaag

SEQ ID NO: 87124 - DNA, 25 bp, Canis familiaris
cctatttcctgtcgtcgttcggaag

SEQ ID NO: 87125 - DNA, 25 bp, Canis familiaris
cctctcttccagacgacaagtcgga

SEQ ID NO: 87126 - DNA, 25 bp, Canis familiaris
cctctctgtgccttcgacataaaaa

SEQ ID NO: 87127 - DNA, 25 bp, Canis familiaris
cctctctctctaatcaactgacaac

SEQ ID NO: 87128 - DNA, 25 bp, Canis familiaris
cctcttctgctaacagttatctcag

SEQ ID NO: 87129 - DNA, 25 bp, Canis familiaris
cctatattctcaagggtatcactgg

SEQ ID NO: 87130 - DNA, 25 bp, Canis familiaris
cctcactttgtgctgggatcgtgga

SEQ ID NO: 87131 - DNA, 25 bp, Canis familiaris
cctcacgtttgcttctgtgacggtt

SEQ ID NO: 87132 - DNA, 25 bp, Canis familiaris
cctacctgttgctgccagaggttct

SEQ ID NO: 87133 - DNA, 25 bp, Canis familiaris
cctcacttcgtctctacagagtgtt

SEQ ID NO: 87134 - DNA, 25 bp, Canis familiaris
cctcacggctgttccgacaagagct

SEQ ID NO: 87135 - DNA, 25 bp, Canis familiaris
cctcacaggcatgttgtgagaataa

SEQ ID NO: 87136 - DNA, 25 bp, Canis familiaris
cctctctccatcatgtcgtgaataa

SEQ ID NO: 87137 - DNA, 25 bp, Canis familiaris
cctctacacagcagcacctgaagaa

SEQ ID NO: 87138 - DNA, 25 bp, Canis familiaris
ccttgagatcagtgctccaagataa

SEQ ID NO: 87139 - DNA, 25 bp, Canis familiaris
cctctggccgtaccactggcatcgt

SEQ ID NO: 87140 - DNA, 25 bp, Canis familiaris
cctctggtcgtaccacgggcattgt

SEQ ID NO: 87141 - DNA, 25 bp, Canis familiaris
cctctggctcggatgacgggagtgt

SEQ ID NO: 87142 - DNA, 25 bp, Canis familiaris
cctctgcccaggtgacggagggggg

SEQ ID NO: 87143 - DNA, 25 bp, Canis familiaris
cctctcccagtgtgacctggggcaa

SEQ ID NO: 87144 - DNA, 25 bp, Canis familiaris
cctctccaaatgttccttcagggcc

SEQ ID NO: 87145 - DNA, 25 bp, Canis familiaris
ccttctcagttttccttcaggtatc

SEQ ID NO: 87146 - DNA, 25 bp, Canis familiaris
cctttctttcaatcgtcagttctac

SEQ ID NO: 87147 - DNA, 25 bp, Canis familiaris
cctttctcttactggtctgttcagg

SEQ ID NO: 87148 - DNA, 25 bp, Canis familiaris
ccttttttacacctctggcaatcat

SEQ ID NO: 87149 - DNA, 25 bp, Canis familiaris
cctagttattcttacttgtgcccat

SEQ ID NO: 87150 - DNA, 25 bp, Canis familiaris
cctaattttctctgattggtctaga

SEQ ID NO: 87151 - DNA, 25 bp, Canis familiaris
gcctaagggttatattcaatctgaa

SEQ ID NO: 87152 - DNA, 25 bp, Canis familiaris
cctaagggcttctgatttcggtata

SEQ ID NO: 87153 - DNA, 25 bp, Canis familiaris
gcctaaaccctctctatctgggaat

SEQ ID NO: 87154 - DNA, 25 bp, Canis familiaris
cctcaacaccctcatctcttagggt

SEQ ID NO: 87155 - DNA, 25 bp, Canis familiaris
cctctaggccctgggccgtagggtg

SEQ ID NO: 87156 - DNA, 25 bp, Canis familiaris
cctcttgacccccagagtgtagatg

SEQ ID NO: 87157 - DNA, 25 bp, Canis familiaris
ccttataccgcaggacggccagtgc

SEQ ID NO: 87158 - DNA, 25 bp, Canis familiaris
cctctgtacctgggaaatctcagtc

SEQ ID NO: 87159 - DNA, 25 bp, Canis familiaris
cctctgtgcacctgggaatcatttc

SEQ ID NO: 87160 - DNA, 25 bp, Canis familiaris
cctcttgctcttgtggaattcatcc

SEQ ID NO: 87161 - DNA, 25 bp, Canis familiaris
cctcttgctcctatgattttactgt

SEQ ID NO: 87162 - DNA, 25 bp, Canis familiaris
cctcttcccattttgtgttcaggat

SEQ ID NO: 87163 - DNA, 25 bp, Canis familiaris
cctctctttctgtgtgtgtgatgtg

SEQ ID NO: 87164 - DNA, 25 bp, Canis familiaris
cctctcagagctgtcggtggcaggg

SEQ ID NO: 87165 - DNA, 25 bp, Canis familiaris
cctctgcagagggcgcggaggcagc

SEQ ID NO: 87166 - DNA, 25 bp, Canis familiaris
cctctgcacacgaaggggccagtga

SEQ ID NO: 87167 - DNA, 25 bp, Canis familiaris
ccttccggtaggagccgtcatcaat

SEQ ID NO: 87168 - DNA, 25 bp, Canis familiaris
ccttcctgaaattgggcactttaat

SEQ ID NO: 87169 - DNA, 25 bp, Canis familiaris
cctctcctggaatactcacatttga

SEQ ID NO: 87170 - DNA, 25 bp, Canis familiaris
cctctcctctgttatattcacatat

SEQ ID NO: 87171 - DNA, 25 bp, Canis familiaris
cctctctctcttaatattacaccgc

SEQ ID NO: 87172 - DNA, 25 bp, Canis familiaris
cctctcaccttttcaattgcacagg

SEQ ID NO: 87173 - DNA, 25 bp, Canis familiaris
cctttcagtttgccacatgtcacgg

SEQ ID NO: 87174 - DNA, 25 bp, Canis familiaris
cctcttattttcccatcacattaga

SEQ ID NO: 87175 - DNA, 25 bp, Canis familiaris
cctcttggattcacaatgtgcatta

SEQ ID NO: 87176 - DNA, 25 bp, Canis familiaris
cctcttcgatggactgcaagccatt

SEQ ID NO: 87177 - DNA, 25 bp, Canis familiaris
cctttggtcagaatcagtcctttgg

SEQ ID NO: 87178 - DNA, 25 bp, Canis familiaris
ccttatttcattacaatcctcctta

SEQ ID NO: 87179 - DNA, 25 bp, Canis familiaris
ccttcattgatctcaactacatggt

SEQ ID NO: 87180 - DNA, 25 bp, Canis familiaris
cctatagtactaaatcccatcatga

SEQ ID NO: 87181 - DNA, 25 bp, Canis familiaris
cctctcgtggctgattcccacaagg

SEQ ID NO: 87182 - DNA, 25 bp, Canis familiaris
cctctgagttctgtttggccaatgt

SEQ ID NO: 87183 - DNA, 25 bp, Canis familiaris
cctctggattctcctttgtctaggt

SEQ ID NO: 87184 - DNA, 25 bp, Canis familiaris
cctttttctggcattgccttttttg

SEQ ID NO: 87185 - DNA, 25 bp, Canis familiaris
ccattttggtggcttttttctctcg

SEQ ID NO: 87186 - DNA, 25 bp, Canis familiaris
ccattttaactgctttcttgcctct

SEQ ID NO: 87187 - DNA, 25 bp, Canis familiaris
cctatttagccatgtctccttttgg

SEQ ID NO: 87188 - DNA, 25 bp, Canis familiaris
cctatcttgacaccgtctttgtttt

SEQ ID NO: 87189 - DNA, 25 bp, Canis familiaris
cctaccaaagccctgctctttgtaa

SEQ ID NO: 87190 - DNA, 25 bp, Canis familiaris
cctttcaaagccaacttctcagtta

SEQ ID NO: 87191 - DNA, 25 bp, Canis familiaris
cctctccagcaacatatttccagtt

SEQ ID NO: 87192 - DNA, 25 bp, Canis familiaris
cctaccgcaaccatttagcagtgtt

SEQ ID NO: 87193 - DNA, 25 bp, Canis familiaris
cctacccaataccttggactctggt

SEQ ID NO: 87194 - DNA, 25 bp, Canis familiaris
cctagtctttaccagggtgcctggt

SEQ ID NO: 87195 - DNA, 25 bp, Canis familiaris
cctaccaattgcccaaggtccatgg

SEQ ID NO: 87196 - DNA, 25 bp, Canis familiaris
cctaccctctggacaaggttctggc

SEQ ID NO: 87197 - DNA, 25 bp, Canis familiaris
cctcacccattccttagtgtttgtg

SEQ ID NO: 87198 - DNA, 25 bp, Canis familiaris
cctcacccccgtgaggccatgagaa

SEQ ID NO: 87199 - DNA, 25 bp, Canis familiaris
cctcaaggccctccagggtatggca

SEQ ID NO: 87200 - DNA, 25 bp, Canis familiaris
cctctctagcccacaggaaagacag

SEQ ID NO: 87201 - DNA, 25 bp, Canis familiaris
ccatctctaccggaaggtaaatcgg

SEQ ID NO: 87202 - DNA, 25 bp, Canis familiaris
cctctccaccacgacagttaaaaag

SEQ ID NO: 87203 - DNA, 25 bp, Canis familiaris
ccatctcccgaccacggggaggata

SEQ ID NO: 87204 - DNA, 25 bp, Canis familiaris
cctcttctcagacccaggttgggca

SEQ ID NO: 87205 - DNA, 25 bp, Canis familiaris
cctctgtctctacctagcagtgaag

SEQ ID NO: 87206 - DNA, 25 bp, Canis familiaris
cctctctctgcaatgctgtacgtaa

SEQ ID NO: 87207 - DNA, 25 bp, Canis familiaris
cctctctctcctgaactctagagtt

SEQ ID NO: 87208 - DNA, 25 bp, Canis familiaris
cctctctccactgttcatcaagtgt

SEQ ID NO: 87209 - DNA, 25 bp, Canis familiaris
cctctccaacacctctctgaggtgg

SEQ ID NO: 87210 - DNA, 25 bp, Canis familiaris
cctctccccaggttgtgggtgtgac

SEQ ID NO: 87211 - DNA, 25 bp, Canis familiaris
cctcatccctgcgcaaggaggtctg

SEQ ID NO: 87212 - DNA, 25 bp, Canis familiaris
cctcttcctgagcacggagtatctg

SEQ ID NO: 87213 - DNA, 25 bp, Canis familiaris
cctcttttgcagcagcgggtttagc

SEQ ID NO: 87214 - DNA, 25 bp, Canis familiaris
ccttctttgacttgcctattttggc

SEQ ID NO: 87215 - DNA, 25 bp, Canis familiaris
cctcttttgtgttgcgtgttgcttg

SEQ ID NO: 87216 - DNA, 25 bp, Canis familiaris
cctcttttgcagtcagcctgaacgg

SEQ ID NO: 87217 - DNA, 25 bp, Canis familiaris
cctcttctgaggtgcctgaactcag

SEQ ID NO: 87218 - DNA, 25 bp, Canis familiaris
cctcttccaggacgtgcagaaaccg

SEQ ID NO: 87219 - DNA, 25 bp, Canis familiaris
cctcacccaggactccatgaatatc

SEQ ID NO: 87220 - DNA, 25 bp, Canis familiaris
cctaccctatgacctcatgttaacc

SEQ ID NO: 87221 - DNA, 25 bp, Canis familiaris
cctcacccatatggctctttgaaga

SEQ ID NO: 87222 - DNA, 25 bp, Canis familiaris
cctcagccatacatgtttcttcaga

SEQ ID NO: 87223 - DNA, 25 bp, Canis familiaris
cctagtatgatgagtcttctgcatt

SEQ ID NO: 87224 - DNA, 25 bp, Canis familiaris
cctagttctgatttctgtggcttcc

SEQ ID NO: 87225 - DNA, 25 bp, Canis familiaris
cctaaactatatccggagctgtccc

SEQ ID NO: 87226 - DNA, 25 bp, Canis familiaris
cctatcaactttcgatggtagtcgc

SEQ ID NO: 87227 - DNA, 25 bp, Canis familiaris
ccttcaagttctcggacggttctgg

SEQ ID NO: 87228 - DNA, 25 bp, Canis familiaris
ccttcattgtacaggagggtatgcc

SEQ ID NO: 87229 - DNA, 25 bp, Canis familiaris
ccttttgggctacaggtgtcagacc

SEQ ID NO: 87230 - DNA, 25 bp, Canis familiaris
cctattgtcacctaagggcttctga

SEQ ID NO: 87231 - DNA, 25 bp, Canis familiaris
ccttttacagcatcggatcctcatg

SEQ ID NO: 87232 - DNA, 25 bp, Canis familiaris
cctcttttatgcctgggtcacagtg

SEQ ID NO: 87233 - DNA, 25 bp, Canis familiaris
cctctctatatgtctcacgaataaa

SEQ ID NO: 87234 - DNA, 25 bp, Canis familiaris
cctctcaacatctcacaaaacactt

SEQ ID NO: 87235 - DNA, 25 bp, Canis familiaris
cctctccagccatgcgaaagacaca

SEQ ID NO: 87236 - DNA, 25 bp, Canis familiaris
cctttagccatcgctacgacacatg

SEQ ID NO: 87237 - DNA, 25 bp, Canis familiaris
cctcttatacatgttaccccatcag

SEQ ID NO: 87238 - DNA, 25 bp, Canis familiaris
ccttctctaaatttagccctcgact

SEQ ID NO: 87239 - DNA, 25 bp, Canis familiaris
ccttcactgaaatatacctcaggct

SEQ ID NO: 87240 - DNA, 25 bp, Canis familiaris
ccttatctagaatataacaccgctt

SEQ ID NO: 87241 - DNA, 25 bp, Canis familiaris
cctactgcagccaaaataacccgtt

SEQ ID NO: 87242 - DNA, 25 bp, Canis familiaris
cctttggctttggtagacccttcag

SEQ ID NO: 87243 - DNA, 25 bp, Canis familiaris
ccttttaggatggttgccccagtag

SEQ ID NO: 87244 - DNA, 25 bp, Canis familiaris
cctaagttggctgtgctcatcacca

SEQ ID NO: 87245 - DNA, 25 bp, Canis familiaris
cctcaagttatcgatgtcattcctc

SEQ ID NO: 87246 - DNA, 25 bp, Canis familiaris
cctactgagtatgcattccacgcca

SEQ ID NO: 87247 - DNA, 25 bp, Canis familiaris
cctctctgtgaagcttctccagtga

SEQ ID NO: 87248 - DNA, 25 bp, Canis familiaris
cctctcttgaagcgatgtcacgggc

SEQ ID NO: 87249 - DNA, 25 bp, Canis familiaris
cctctcgtgagggagcagcgggggc

SEQ ID NO: 87250 - DNA, 25 bp, Canis familiaris
ccttcgtgcgtggagatttggtgac

SEQ ID NO: 87251 - DNA, 25 bp, Canis familiaris
ccttcgagcttgtagtctctaccat

SEQ ID NO: 87252 - DNA, 25 bp, Canis familiaris
cctttagcctgattcatttcacaat

SEQ ID NO: 87253 - DNA, 25 bp, Canis familiaris
cctatcacggtattcttctacaccc

SEQ ID NO: 87254 - DNA, 25 bp, Canis familiaris
cctcttcatgtcagctgttcgctgg

SEQ ID NO: 87255 - DNA, 25 bp, Canis familiaris
cctctccttacgctatcagcatgag

SEQ ID NO: 87256 - DNA, 25 bp, Canis familiaris
cctctcctcttgccaggatggtgag

SEQ ID NO: 87257 - DNA, 25 bp, Canis familiaris
ccttactcttcctggatgctgagga

SEQ ID NO: 87258 - DNA, 25 bp, Canis familiaris
cctataccttccttccaggatagtt

SEQ ID NO: 87259 - DNA, 25 bp, Canis familiaris
cctagcccttcttttggggagtgtg

SEQ ID NO: 87260 - DNA, 25 bp, Canis familiaris
cctctcctccctttcttgggaggag

SEQ ID NO: 87261 - DNA, 25 bp, Canis familiaris
cctctcagccccatctggggagacg

SEQ ID NO: 87262 - DNA, 25 bp, Canis familiaris
cctcacctgcccaggaggaaggccc

SEQ ID NO: 87263 - DNA, 25 bp, Canis familiaris
cctctccgtgccaggagcacaagcg

SEQ ID NO: 87264 - DNA, 25 bp, Canis familiaris
cctctctcttgtctgtacatagtgg

SEQ ID NO: 87265 - DNA, 25 bp, Canis familiaris
cctctctcttgtctgtacatagtgg

SEQ ID NO: 87266 - DNA, 25 bp, Canis familiaris
cctctcacttctatgctgacatgtt

SEQ ID NO: 87267 - DNA, 25 bp, Canis familiaris
cctctcagcactttcttagcaggtt

SEQ ID NO: 87268 - DNA, 25 bp, Canis familiaris
cctcagagcacttgacttcgcgaga

SEQ ID NO: 87269 - DNA, 25 bp, Canis familiaris
cctcaacctgaacatgctggacaag

SEQ ID NO: 87270 - DNA, 25 bp, Canis familiaris
cctcaactctgatggcagcgtgatt

SEQ ID NO: 87271 - DNA, 25 bp, Canis familiaris
cctcaagcgccatcacgctggatat

SEQ ID NO: 87272 - DNA, 25 bp, Canis familiaris
cctcaggccagattgcactgcttga

SEQ ID NO: 87273 - DNA, 25 bp, Canis familiaris
cctcattgtggctgagcgcatcgca

SEQ ID NO: 87274 - DNA, 25 bp, Canis familiaris
cctcatcgcgcacgtgggatcgaag

SEQ ID NO: 87275 - DNA, 25 bp, Canis familiaris
cctctcacctgggggacagcatgaa

SEQ ID NO: 87276 - DNA, 25 bp, Canis familiaris
cctctcagcgcctggtggctagaag

SEQ ID NO: 87277 - DNA, 25 bp, Canis familiaris
cctctcgcatcctggcagtgaagga

SEQ ID NO: 87278 - DNA, 25 bp, Canis familiaris
cctcttgcatcccaacgagaagttg

SEQ ID NO: 87279 - DNA, 25 bp, Canis familiaris
cctctctgccttcaacatagacttg

SEQ ID NO: 87280 - DNA, 25 bp, Canis familiaris
cctcatctccttgccaaatagcttg

SEQ ID NO: 87281 - DNA, 25 bp, Canis familiaris
cctactaattctcgcaaatgggaca

SEQ ID NO: 87282 - DNA, 25 bp, Canis familiaris
cctagctttcttccttcaggagaca

SEQ ID NO: 87283 - DNA, 25 bp, Canis familiaris
cctactacctgacctctgcaggaga

SEQ ID NO: 87284 - DNA, 25 bp, Canis familiaris
cctactaccagggcaggctcaggaa

SEQ ID NO: 87285 - DNA, 25 bp, Canis familiaris
cctacttcgagaccagtgccaagga

SEQ ID NO: 87286 - DNA, 25 bp, Canis familiaris
cctacggcttggccagtaccatgga

SEQ ID NO: 87287 - DNA, 25 bp, Canis familiaris
cctacgagaagcgcgtgagcgtgcg

SEQ ID NO: 87288 - DNA, 25 bp, Canis familiaris
cctcagcaacaattccgtggtggag

SEQ ID NO: 87289 - DNA, 25 bp, Canis familiaris
ccttgcaatctatttccttgcttga

SEQ ID NO: 87290 - DNA, 25 bp, Canis familiaris
ccttctaccatattttggctaaact

SEQ ID NO: 87291 - DNA, 25 bp, Canis familiaris
cctattcggacatgtttgctcaaac

SEQ ID NO: 87292 - DNA, 25 bp, Canis familiaris
ccttgtcgccgcacttttataagtc

SEQ ID NO: 87293 - DNA, 25 bp, Canis familiaris
cctctctccctgcagtttataaagt

SEQ ID NO: 87294 - DNA, 25 bp, Canis familiaris
ccttcgcccacaaaattagccaagt

SEQ ID NO: 87295 - DNA, 25 bp, Canis familiaris
cctttcctagaccaactgactaaat

SEQ ID NO: 87296 - DNA, 25 bp, Canis familiaris
ccttttctgtgtcaaatgttaaatg

SEQ ID NO: 87297 - DNA, 25 bp, Canis familiaris
cctcttgtcgttgttattataaatg

SEQ ID NO: 87298 - DNA, 25 bp, Canis familiaris
cctctttgccctggtatgtaatcca

SEQ ID NO: 87299 - DNA, 25 bp, Canis familiaris
cctctttaatcccattatgaatgtg

SEQ ID NO: 87300 - DNA, 25 bp, Canis familiaris
cctctcttacagcccatggggatag

SEQ ID NO: 87301 - DNA, 25 bp, Canis familiaris
cctatcttacaggcttggtgcgaag

SEQ ID NO: 87302 - DNA, 25 bp, Canis familiaris
ccttcttcaactctgcagtgcagaa

SEQ ID NO: 87303 - DNA, 25 bp, Canis familiaris
cctcagttacctcatctgtcaaatg

SEQ ID NO: 87304 - DNA, 25 bp, Canis familiaris
cctcattttcctcatctacagaatg

SEQ ID NO: 87305 - DNA, 25 bp, Canis familiaris
cctcttccacctcattgcaatagat

SEQ ID NO: 87306 - DNA, 25 bp, Canis familiaris
cctcttcctcgcctatacgtggaag

SEQ ID NO: 87307 - DNA, 25 bp, Canis familiaris
cctcttctcccctgaggtggagacc

SEQ ID NO: 87308 - DNA, 25 bp, Canis familiaris
cctcttgtcctgtccagggtgtgaa

SEQ ID NO: 87309 - DNA, 25 bp, Canis familiaris
cctctttcctaggagcagcttttcc

SEQ ID NO: 87310 - DNA, 25 bp, Canis familiaris
cctctttccgagagctctgggtggc

SEQ ID NO: 87311 - DNA, 25 bp, Canis familiaris
cctctttcaccctcattggtgtgtg

SEQ ID NO: 87312 - DNA, 25 bp, Canis familiaris
ccttgttgcacccgccagcgggtgt

SEQ ID NO: 87313 - DNA, 25 bp, Canis familiaris
cctcatcttcagcggggctagggta

SEQ ID NO: 87314 - DNA, 25 bp, Canis familiaris
cctctttccacatgggtaggcctgt

SEQ ID NO: 87315 - DNA, 25 bp, Canis familiaris
cctcttgacaccatggaataccctg

SEQ ID NO: 87316 - DNA, 25 bp, Canis familiaris
cctaatatacctgtgcaaacaatct

SEQ ID NO: 87317 - DNA, 25 bp, Canis familiaris
cctacatctacatacgcaactacac

SEQ ID NO: 87318 - DNA, 25 bp, Canis familiaris
cctcacacattctttctatacaaca

SEQ ID NO: 87319 - DNA, 25 bp, Canis familiaris
cctctcagatccctttctaagaact

SEQ ID NO: 87320 - DNA, 25 bp, Canis familiaris
cctcttcatcctatttcaactaaaa

SEQ ID NO: 87321 - DNA, 25 bp, Canis familiaris
cctcttcatcctatttcaactaaaa

SEQ ID NO: 87322 - DNA, 25 bp, Canis familiaris
cctcttcatcctatttcaactaaaa

SEQ ID NO: 87323 - DNA, 25 bp, Canis familiaris
cctcttcatcctatttcaactaaaa

SEQ ID NO: 87324 - DNA, 25 bp, Canis familiaris
cctcattctgcagttccttaacaaa

SEQ ID NO: 87325 - DNA, 25 bp, Canis familiaris
cctcttctctcttcctggaagaaga

SEQ ID NO: 87326 - DNA, 25 bp, Canis familiaris
cctcttctcatctatacgtgtgtgc

SEQ ID NO: 87327 - DNA, 25 bp, Canis familiaris
cctcttgtcatcaacagccgtgacc

SEQ ID NO: 87328 - DNA, 25 bp, Canis familiaris
cctctagccaaagtcatccatgacc

SEQ ID NO: 87329 - DNA, 25 bp, Canis familiaris
ccttagagaatgtccacctggccag

SEQ ID NO: 87330 - DNA, 25 bp, Canis familiaris
cctaatcgatcgttacctatgccga

SEQ ID NO: 87331 - DNA, 25 bp, Canis familiaris
cctttcttcgagatccttcgcgaaa

SEQ ID NO: 87332 - DNA, 25 bp, Canis familiaris
cctaccctcagatttcagcttctgg

SEQ ID NO: 87333 - DNA, 25 bp, Canis familiaris
cctacctaaaatggcctgttgtgga

SEQ ID NO: 87334 - DNA, 25 bp, Canis familiaris
cctacttaaaattctccctttgcat

SEQ ID NO: 87335 - DNA, 25 bp, Canis familiaris
cctacttaataaactgatccacttg

SEQ ID NO: 87336 - DNA, 25 bp, Canis familiaris
ccacagcataaatagggtctccttg

SEQ ID NO: 87337 - DNA, 25 bp, Canis familiaris
cctcaatccaaaggggcatcacctt

SEQ ID NO: 87338 - DNA, 25 bp, Canis familiaris
cctcacagccaagcatgggggccct

SEQ ID NO: 87339 - DNA, 25 bp, Canis familiaris
cctcaagctcctgcaggtggtgtac

SEQ ID NO: 87340 - DNA, 25 bp, Canis familiaris
cctcacatccctgagcagtgtgtgt

SEQ ID NO: 87341 - DNA, 25 bp, Canis familiaris
cctcaaccagctggatgcgtctgtt

SEQ ID NO: 87342 - DNA, 25 bp, Canis familiaris
cctcagatccagtttccttgtctgt

SEQ ID NO: 87343 - DNA, 25 bp, Canis familiaris
cctcagacctgagtttctgttgatt

SEQ ID NO: 87344 - DNA, 25 bp, Canis familiaris
cctcttcctatttcctttgatgtta

SEQ ID NO: 87345 - DNA, 25 bp, Canis familiaris
cctacttcttcttcgatgttgttta

SEQ ID NO: 87346 - DNA, 25 bp, Canis familiaris
cctaccctgttatctattgtcatct

SEQ ID NO: 87347 - DNA, 25 bp, Canis familiaris
ccttcaaggtcttacttgtgccagt

SEQ ID NO: 87348 - DNA, 25 bp, Canis familiaris
ccttcaacgctcaaagcttaacaac

SEQ ID NO: 87349 - DNA, 25 bp, Canis familiaris
cctataatcctcagtctactaatcc

SEQ ID NO: 87350 - DNA, 25 bp, Canis familiaris
ccttaatctcacggttaaactctct

SEQ ID NO: 87351 - DNA, 25 bp, Canis familiaris
ccttaactgcatcagggaagaatcc

SEQ ID NO: 87352 - DNA, 25 bp, Canis familiaris
gccttaattgtgggggagagcctta

SEQ ID NO: 87353 - DNA, 25 bp, Canis familiaris
ccttaattgtgggggagagccttat

SEQ ID NO: 87354 - DNA, 25 bp, Canis familiaris
ccttgccttggagagccagagcttt

SEQ ID NO: 87355 - DNA, 25 bp, Canis familiaris
cctagcccgccatgacacagggtag

SEQ ID NO: 87356 - DNA, 25 bp, Canis familiaris
cctacctcggccccaagtagtgagg

SEQ ID NO: 87357 - DNA, 25 bp, Canis familiaris
ccttccagggctgaccagtttgagt

SEQ ID NO: 87358 - DNA, 25 bp, Canis familiaris
cctcttcctgtggtagctcagtttg

SEQ ID NO: 87359 - DNA, 25 bp, Canis familiaris
ccttttctggtgacctcagttttca

SEQ ID NO: 87360 - DNA, 25 bp, Canis familiaris
ccttttggggccatacttcttcatg

SEQ ID NO: 87361 - DNA, 25 bp, Canis familiaris
ccttcctaggcgattacttcggcat

SEQ ID NO: 87362 - DNA, 25 bp, Canis familiaris
cctcttctatggcctcttactaagg

SEQ ID NO: 87363 - DNA, 25 bp, Canis familiaris
cctcttcatggcccttttgtaagca

SEQ ID NO: 87364 - DNA, 25 bp, Canis familiaris
cctaccattgcctctgtggtaacac

SEQ ID NO: 87365 - DNA, 25 bp, Canis familiaris
cctaccacagccgctggtgtggacc

SEQ ID NO: 87366 - DNA, 25 bp, Canis familiaris
cctacacacacacttgctttgggga

SEQ ID NO: 87367 - DNA, 25 bp, Canis familiaris
cctacatcatctcgcttatattggg

SEQ ID NO: 87368 - DNA, 25 bp, Canis familiaris
cctacttctgtgatcttggggggtt

SEQ ID NO: 87369 - DNA, 25 bp, Canis familiaris
ccatccttcgttattgggagtcctc

SEQ ID NO: 87370 - DNA, 25 bp, Canis familiaris
ccaccattttgatgtctgggtaccc

SEQ ID NO: 87371 - DNA, 25 bp, Canis familiaris
ccttgatgtttatttgtgggtggca

SEQ ID NO: 87372 - DNA, 25 bp, Canis familiaris
ccttctctgtcctttagggtggatt

SEQ ID NO: 87373 - DNA, 25 bp, Canis familiaris
ccttcattgacctcaactacatggt

SEQ ID NO: 87374 - DNA, 25 bp, Canis familiaris
ccttcgtgaccaaacctaacttgcg

SEQ ID NO: 87375 - DNA, 25 bp, Canis familiaris
cctcttgtaccccacttagaagtgc

SEQ ID NO: 87376 - DNA, 25 bp, Canis familiaris
ccttttaccttgccttgaacaacag

SEQ ID NO: 87377 - DNA, 25 bp, Canis familiaris
ccttcttacgttacatggaaaagtg

SEQ ID NO: 87378 - DNA, 25 bp, Canis familiaris
cctttgctaagggatcatgggataa

SEQ ID NO: 87379 - DNA, 25 bp, Canis familiaris
ccttcctcaggaagcattggtggag

SEQ ID NO: 87380 - DNA, 25 bp, Canis familiaris
ccttcgccggcaagtacgagggctg

SEQ ID NO: 87381 - DNA, 25 bp, Canis familiaris
ccttcaccgagacctactcgggcac

SEQ ID NO: 87382 - DNA, 25 bp, Canis familiaris
ccttgcaaccaacatagggaggctc

SEQ ID NO: 87383 - DNA, 25 bp, Canis familiaris
ccttgtaactcacaatgggcgcctc

SEQ ID NO: 87384 - DNA, 25 bp, Canis familiaris
cctcatataatctttcctgggtgcc

SEQ ID NO: 87385 - DNA, 25 bp, Canis familiaris
cctttgcgcatagtgtcgcgggact

SEQ ID NO: 87386 - DNA, 25 bp, Canis familiaris
cctttggctcagttcctgggattga

SEQ ID NO: 87387 - DNA, 25 bp, Canis familiaris
cctcttggcattctctgatggtttg

SEQ ID NO: 87388 - DNA, 25 bp, Canis familiaris
cctcttgccttggtcatgacgacgt

SEQ ID NO: 87389 - DNA, 25 bp, Canis familiaris
cctcttctcttgtccatactggaat

SEQ ID NO: 87390 - DNA, 25 bp, Canis familiaris
ccttttcttccctctgaatgtgaga

SEQ ID NO: 87391 - DNA, 25 bp, Canis familiaris
cctcttctgttcactttaagttgcc

SEQ ID NO: 87392 - DNA, 25 bp, Canis familiaris
cctcatccttaccctttagatgtat

SEQ ID NO: 87393 - DNA, 25 bp, Canis familiaris
cctcatcctttgctcagctgtgaga

SEQ ID NO: 87394 - DNA, 25 bp, Canis familiaris
cctcacttgtctgtagcactggatg

SEQ ID NO: 87395 - DNA, 25 bp, Canis familiaris
cctacttgtctcctacttggtcaag

SEQ ID NO: 87396 - DNA, 25 bp, Canis familiaris
cctactttcctgaccgtagctatga

SEQ ID NO: 87397 - DNA, 25 bp, Canis familiaris
cctactcctctgtttcaaggcttga

SEQ ID NO: 87398 - DNA, 25 bp, Canis familiaris
cctacccatcgaggtcgtggtggat

SEQ ID NO: 87399 - DNA, 25 bp, Canis familiaris
cctagcaaactgtgcgccgtgtgga

SEQ ID NO: 87400 - DNA, 25 bp, Canis familiaris
cctagaagcacttctcagccgaggc

SEQ ID NO: 87401 - DNA, 25 bp, Canis familiaris
cctacaatgcctttcagatccgtgc

SEQ ID NO: 87402 - DNA, 25 bp, Canis familiaris
cctagaatttatggagactcgtggc

SEQ ID NO: 87403 - DNA, 25 bp, Canis familiaris
cctaaatttagtggagatctgtggc

SEQ ID NO: 87404 - DNA, 25 bp, Canis familiaris
cctataggactattgagagacatgt

SEQ ID NO: 87405 - DNA, 25 bp, Canis familiaris
cctacagaagctggaggaggctgag

SEQ ID NO: 87406 - DNA, 25 bp, Canis familiaris
cctcatggaggtggctggggtcagc

SEQ ID NO: 87407 - DNA, 25 bp, Canis familiaris
cctcaggaggggcgctgcatatcag

SEQ ID NO: 87408 - DNA, 25 bp, Canis familiaris
cctcagagggcgctggctctgacgt

SEQ ID NO: 87409 - DNA, 25 bp, Canis familiaris
cctcagctcaggtcttagtctcagg

SEQ ID NO: 87410 - DNA, 25 bp, Canis familiaris
cctcaccaggccttgagacacagga

SEQ ID NO: 87411 - DNA, 25 bp, Canis familiaris
cctcacacggctctgaacaagggtt

SEQ ID NO: 87412 - DNA, 25 bp, Canis familiaris
cctcacaccataccctcaaaggatt

SEQ ID NO: 87413 - DNA, 25 bp, Canis familiaris
cctacatctctgtgcccaaggagaa

SEQ ID NO: 87414 - DNA, 25 bp, Canis familiaris
ccttatcattatccccaaaccagaa

SEQ ID NO: 87415 - DNA, 25 bp, Canis familiaris
cctttcttgaatggccttaccagcg

SEQ ID NO: 87416 - DNA, 25 bp, Canis familiaris
cctatctttggaggccattagaagc

SEQ ID NO: 87417 - DNA, 25 bp, Canis familiaris
ccttcttagccttggcctaggcagc

SEQ ID NO: 87418 - DNA, 25 bp, Canis familiaris
ccttctcaggcccaggctttggaaa

SEQ ID NO: 87419 - DNA, 25 bp, Canis familiaris
cctttctgttcctcatttgctaaaa

SEQ ID NO: 87420 - DNA, 25 bp, Canis familiaris
ccttctttgtcctctgggggaaatg

SEQ ID NO: 87421 - DNA, 25 bp, Canis familiaris
ccttcttttcttttgggagcgtcat

SEQ ID NO: 87422 - DNA, 25 bp, Canis familiaris
ccttctttattatgttgtatttatt

SEQ ID NO: 87423 - DNA, 25 bp, Canis familiaris
ccattaattattcttttcatctctt

SEQ ID NO: 87424 - DNA, 25 bp, Canis familiaris
cctattggtattgttcctcttctct

SEQ ID NO: 87425 - DNA, 25 bp, Canis familiaris
cctagtggtataaattggcccctat

SEQ ID NO: 87426 - DNA, 25 bp, Canis familiaris
gcctaggggagggatgggccccaat

SEQ ID NO: 87427 - DNA, 25 bp, Canis familiaris
cctatggtgggtgctttgtccccaa

SEQ ID NO: 87428 - DNA, 25 bp, Canis familiaris
ccttgcgggtcaaactgtttcccat

SEQ ID NO: 87429 - DNA, 25 bp, Canis familiaris
ccttcgggccatatctgtttagagt

SEQ ID NO: 87430 - DNA, 25 bp, Canis familiaris
ccttctggagcccttttggaatatt

SEQ ID NO: 87431 - DNA, 25 bp, Canis familiaris
ccattcgtgatggggatcggggatt

SEQ ID NO: 87432 - DNA, 25 bp, Canis familiaris
ccttgctctgagaggtaggcgtgac

SEQ ID NO: 87433 - DNA, 25 bp, Canis familiaris
cctcagctgtgacaggtggccagtc

SEQ ID NO: 87434 - DNA, 25 bp, Canis familiaris
cctcactgctggggagtccctgcca

SEQ ID NO: 87435 - DNA, 25 bp, Canis familiaris
cctcacgtgctgggagacgcaggtc

SEQ ID NO: 87436 - DNA, 25 bp, Canis familiaris
cctcagcgaggccagaatccaggtc

SEQ ID NO: 87437 - DNA, 25 bp, Canis familiaris
cctcagcaagcgccatggatcacgc

SEQ ID NO: 87438 - DNA, 25 bp, Canis familiaris
cctcatgctagcctcatgaaactgg

SEQ ID NO: 87439 - DNA, 25 bp, Canis familiaris
cctcatgccctccagaggagctgag

SEQ ID NO: 87440 - DNA, 25 bp, Canis familiaris
cctcatccctctggagggccagagg

SEQ ID NO: 87441 - DNA, 25 bp, Canis familiaris
cctcacagcctagggctggccaagg

SEQ ID NO: 87442 - DNA, 25 bp, Canis familiaris
cctcatacctgggctgatggcctgg

SEQ ID NO: 87443 - DNA, 25 bp, Canis familiaris
ccttccttcagggtggcttggacag

SEQ ID NO: 87444 - DNA, 25 bp, Canis familiaris
cctacgtatagagttgccttgtacc

SEQ ID NO: 87445 - DNA, 25 bp, Canis familiaris
cctacgtctatattccctctaagac

SEQ ID NO: 87446 - DNA, 25 bp, Canis familiaris
cctaagttctcttccagcgaaaact

SEQ ID NO: 87447 - DNA, 25 bp, Canis familiaris
cctaaggtccattctggcaactcga

SEQ ID NO: 87448 - DNA, 25 bp, Canis familiaris
cctaaaggccacttcctatatctga

SEQ ID NO: 87449 - DNA, 25 bp, Canis familiaris
cctaattagccagccctgatgacta

SEQ ID NO: 87450 - DNA, 25 bp, Canis familiaris
ccttttagcccaaactgatgccaag

SEQ ID NO: 87451 - DNA, 25 bp, Canis familiaris
cctttcggcccagatcttcaatggc

SEQ ID NO: 87452 - DNA, 25 bp, Canis familiaris
cctaagggcccacatgatctgccta

SEQ ID NO: 87453 - DNA, 25 bp, Canis familiaris
cctatgactgatcccactatggctc

SEQ ID NO: 87454 - DNA, 25 bp, Canis familiaris
ccttgactgatagcctcgcagacat

SEQ ID NO: 87455 - DNA, 25 bp, Canis familiaris
ccttgtcatgtacccatccataaag

SEQ ID NO: 87456 - DNA, 25 bp, Canis familiaris
cctcagtatattcctcagccattag

SEQ ID NO: 87457 - DNA, 25 bp, Canis familiaris
ccatcaataaacccagctatgtagg

SEQ ID NO: 87458 - DNA, 25 bp, Canis familiaris
cctcaatacctcctaccagtaggac

SEQ ID NO: 87459 - DNA, 25 bp, Canis familiaris
cctagatacctccttcgaaggcgac

SEQ ID NO: 87460 - DNA, 25 bp, Canis familiaris
cctaggccactgcttcgagttgcag

SEQ ID NO: 87461 - DNA, 25 bp, Canis familiaris
cctcagaccctgcgggagatcgtga

SEQ ID NO: 87462 - DNA, 25 bp, Canis familiaris
cctcaccaccagcggtcatgaatgg

SEQ ID NO: 87463 - DNA, 25 bp, Canis familiaris
cctaccactcggcgtcagccgagtc

SEQ ID NO: 87464 - DNA, 25 bp, Canis familiaris
cctactgcccaggctggaatccagg

SEQ ID NO: 87465 - DNA, 25 bp, Canis familiaris
cctactggtcaaggagactgccacc

SEQ ID NO: 87466 - DNA, 25 bp, Canis familiaris
cctactgtacaaaagacctacgata

SEQ ID NO: 87467 - DNA, 25 bp, Canis familiaris
cctaactccacaaacacctggcaat

SEQ ID NO: 87468 - DNA, 25 bp, Canis familiaris
cctacttgggcaaagagcactggaa

SEQ ID NO: 87469 - DNA, 25 bp, Canis familiaris
cctactctgggcaatcaaagtggtg

SEQ ID NO: 87470 - DNA, 25 bp, Canis familiaris
cctatcctgagtccatctgcaaaag

SEQ ID NO: 87471 - DNA, 25 bp, Canis familiaris
ccttgctgtttgagctgcaaaagct

SEQ ID NO: 87472 - DNA, 25 bp, Canis familiaris
cctatcttatcaatatggaaacatc

SEQ ID NO: 87473 - DNA, 25 bp, Canis familiaris
cctatgctcttcagctggaccaaaa

SEQ ID NO: 87474 - DNA, 25 bp, Canis familiaris
cctagcagatccacaggcaccaagg

SEQ ID NO: 87475 - DNA, 25 bp, Canis familiaris
cctcagcaggccccagattggaagg

SEQ ID NO: 87476 - DNA, 25 bp, Canis familiaris
ccttcggcagccgaggctgcgtcgg

SEQ ID NO: 87477 - DNA, 25 bp, Canis familiaris
cctacgacagcctgctgggcaagga

SEQ ID NO: 87478 - DNA, 25 bp, Canis familiaris
cctatttccctgacttggcagtggg

SEQ ID NO: 87479 - DNA, 25 bp, Canis familiaris
ccttttgccacgtcttggggcaggg

SEQ ID NO: 87480 - DNA, 25 bp, Canis familiaris
ccattcttccccagtggggcacttt

SEQ ID NO: 87481 - DNA, 25 bp, Canis familiaris
ccttctacctcagtcgggagtactg

SEQ ID NO: 87482 - DNA, 25 bp, Canis familiaris
ccttgccacctagtagaacctgatc

SEQ ID NO: 87483 - DNA, 25 bp, Canis familiaris
cctagccaccccaagattcttgtat

SEQ ID NO: 87484 - DNA, 25 bp, Canis familiaris
cctaggcacccctatatacttctat

SEQ ID NO: 87485 - DNA, 25 bp, Canis familiaris
cctaggtatctatattactctctat

SEQ ID NO: 87486 - DNA, 25 bp, Canis familiaris
cctacggtctcaaataacatgctcg

SEQ ID NO: 87487 - DNA, 25 bp, Canis familiaris
cctatcgatgtgcaaaacagatgcg

SEQ ID NO: 87488 - DNA, 25 bp, Canis familiaris
cctcacagtgctcgccagaagtatg

SEQ ID NO: 87489 - DNA, 25 bp, Canis familiaris
cctcacaggcctgctagagtctggt

SEQ ID NO: 87490 - DNA, 25 bp, Canis familiaris
cctcactgtggtctcacagctctgg

SEQ ID NO: 87491 - DNA, 25 bp, Canis familiaris
cctcacttagcattatatcctctag

SEQ ID NO: 87492 - DNA, 25 bp, Canis familiaris
cctactctgagtttgtccacataga

SEQ ID NO: 87493 - DNA, 25 bp, Canis familiaris
cctagtgccagttctgagaaacagt

SEQ ID NO: 87494 - DNA, 25 bp, Canis familiaris
cctatgtggaggctaaccagatgct

SEQ ID NO: 87495 - DNA, 25 bp, Canis familiaris
cctatactgggtcttccgcattaag

SEQ ID NO: 87496 - DNA, 25 bp, Canis familiaris
ccattggtggttcttcaacaggaag

SEQ ID NO: 87497 - DNA, 25 bp, Canis familiaris
cctcaagaggtacccagcaacagga

SEQ ID NO: 87498 - DNA, 25 bp, Canis familiaris
cctagaggtgtaccggacacttttg

SEQ ID NO: 87499 - DNA, 25 bp, Canis familiaris
ccagccaaggactgggaccttctat

SEQ ID NO: 87500 - DNA, 25 bp, Canis familiaris
tccaccaattaactggggccaacct

SEQ ID NO: 87501 - DNA, 25 bp, Canis familiaris
ccatctgtgttatggtccccaaacc

SEQ ID NO: 87502 - DNA, 25 bp, Canis familiaris
gccactttaaacaccacaacaaaca

SEQ ID NO: 87503 - DNA, 25 bp, Canis familiaris
ccactggatacaaccacccaaaaag

SEQ ID NO: 87504 - DNA, 25 bp, Canis familiaris
ccttgagaataagccccatctcaga

SEQ ID NO: 87505 - DNA, 25 bp, Canis familiaris
cctatggagtgatcccctcattaca

SEQ ID NO: 87506 - DNA, 25 bp, Canis familiaris
cctattgaatgaaaccctctgataa

SEQ ID NO: 87507 - DNA, 25 bp, Canis familiaris
cctacgagagacacttcctgcagaa

SEQ ID NO: 87508 - DNA, 25 bp, Canis familiaris
cctacaacgacttcttcctggagga

SEQ ID NO: 87509 - DNA, 25 bp, Canis familiaris
cctacaggctaatctatcctcgagc

SEQ ID NO: 87510 - DNA, 25 bp, Canis familiaris
cctaagtgattcttttcctggatca

SEQ ID NO: 87511 - DNA, 25 bp, Canis familiaris
cctaagtaattctttgactggcctg

SEQ ID NO: 87512 - DNA, 25 bp, Canis familiaris
cctagttaagtatttgtcagcatcc

SEQ ID NO: 87513 - DNA, 25 bp, Canis familiaris
cctagcggagactgatcgttgcatc

SEQ ID NO: 87514 - DNA, 25 bp, Canis familiaris
ccttcgaggacactcatccttgagc

SEQ ID NO: 87515 - DNA, 25 bp, Canis familiaris
ccttgcagcaggaacccacttaggt

SEQ ID NO: 87516 - DNA, 25 bp, Canis familiaris
ccttcagggacctgccgatcaggat

SEQ ID NO: 87517 - DNA, 25 bp, Canis familiaris
gccttcgcagaagaaccagaaggac

SEQ ID NO: 87518 - DNA, 25 bp, Canis familiaris
cctatacgtgaggaatcccaagggc

SEQ ID NO: 87519 - DNA, 25 bp, Canis familiaris
cctacatctgcttgtgactccagaa

SEQ ID NO: 87520 - DNA, 25 bp, Canis familiaris
cctaatctctaactgctcctgaggc

SEQ ID NO: 87521 - DNA, 25 bp, Canis familiaris
cctcaagcataatcgctgactaggc

SEQ ID NO: 87522 - DNA, 25 bp, Canis familiaris
cctagcacacagtccttgagcatag

SEQ ID NO: 87523 - DNA, 25 bp, Canis familiaris
cctagccacgattatctcagcatgt

SEQ ID NO: 87524 - DNA, 25 bp, Canis familiaris
cctagcccagagctggcactgtgtg

SEQ ID NO: 87525 - DNA, 25 bp, Canis familiaris
cctacatgcagcccggagcacggga

SEQ ID NO: 87526 - DNA, 25 bp, Canis familiaris
cctatcagctgcccggaaaacgaga

SEQ ID NO: 87527 - DNA, 25 bp, Canis familiaris
ccttctgctgcgagaacgacatcga

SEQ ID NO: 87528 - DNA, 25 bp, Canis familiaris
ccatcacaccagaacaaaggtcaga

SEQ ID NO: 87529 - DNA, 25 bp, Canis familiaris
cctcacaccggttcagagagctgca

SEQ ID NO: 87530 - DNA, 25 bp, Canis familiaris
cctcactccaggctgagggctcatg

SEQ ID NO: 87531 - DNA, 25 bp, Canis familiaris
ccttctccgagcttgggagctgttt

SEQ ID NO: 87532 - DNA, 25 bp, Canis familiaris
ccttctggcaagttcatggccctgg

SEQ ID NO: 87533 - DNA, 25 bp, Canis familiaris
cctttggcaggacgtgtccctggaa

SEQ ID NO: 87534 - DNA, 25 bp, Canis familiaris
cctttgtggtgcttgttctttgaaa

SEQ ID NO: 87535 - DNA, 25 bp, Canis familiaris
cctattgtgttctttattcttgtta

SEQ ID NO: 87536 - DNA, 25 bp, Canis familiaris
cctaagtttcttctgcatctgatgc

SEQ ID NO: 87537 - DNA, 25 bp, Canis familiaris
cctaagtattcttttcctgatcact

SEQ ID NO: 87538 - DNA, 25 bp, Canis familiaris
ccttagaagtatttgctttgtccta

SEQ ID NO: 87539 - DNA, 25 bp, Canis familiaris
ccttcacaagttctggttctttagt

SEQ ID NO: 87540 - DNA, 25 bp, Canis familiaris
cctatactagtatttgcagaactta

SEQ ID NO: 87541 - DNA, 25 bp, Canis familiaris
cctatagctgtcctttgtgaacttt

SEQ ID NO: 87542 - DNA, 25 bp, Canis familiaris
cctatactgctccttttggtgttca

SEQ ID NO: 87543 - DNA, 25 bp, Canis familiaris
cctcaactacatggtttacatgttc

SEQ ID NO: 87544 - DNA, 25 bp, Canis familiaris
cctatgccttcaagattccactgtc

SEQ ID NO: 87545 - DNA, 25 bp, Canis familiaris
cctatcctctcaaacgtgacttgct

SEQ ID NO: 87546 - DNA, 25 bp, Canis familiaris
cctactcttactcaggactcgtgtc

SEQ ID NO: 87547 - DNA, 25 bp, Canis familiaris
ccttctgcttcctaatggactagat

SEQ ID NO: 87548 - DNA, 25 bp, Canis familiaris
cctactgtcccctagaactacatag

SEQ ID NO: 87549 - DNA, 25 bp, Canis familiaris
cctcaattccggaacaccaataagg

SEQ ID NO: 87550 - DNA, 25 bp, Canis familiaris
cctcaattcctgcaacatccgcagt

SEQ ID NO: 87551 - DNA, 25 bp, Canis familiaris
cctacatttatgcaacagcctcaaa

SEQ ID NO: 87552 - DNA, 25 bp, Canis familiaris
cctacatatcattctacaatgctct

SEQ ID NO: 87553 - DNA, 25 bp, Canis familiaris
ccttcagctcaagtcacaatcctgg

SEQ ID NO: 87554 - DNA, 25 bp, Canis familiaris
ccttcagtccagggcatgatcttgg

SEQ ID NO: 87555 - DNA, 25 bp, Canis familiaris
ccttgagttccagcagcagcttggg

SEQ ID NO: 87556 - DNA, 25 bp, Canis familiaris
ccttgagttcttcgactcttgcgtt

SEQ ID NO: 87557 - DNA, 25 bp, Canis familiaris
ccttagctttgcagcttttgccttt

SEQ ID NO: 87558 - DNA, 25 bp, Canis familiaris
cctattgtctcgtactttttcttgt

SEQ ID NO: 87559 - DNA, 25 bp, Canis familiaris
cctatctgtcctggtctttttttgg

SEQ ID NO: 87560 - DNA, 25 bp, Canis familiaris
cctactgatacgctttctttcttgg

SEQ ID NO: 87561 - DNA, 25 bp, Canis familiaris
cctttaacggtaatctttgcgtctg

SEQ ID NO: 87562 - DNA, 25 bp, Canis familiaris
cctttaacgaggacccattgctgga

SEQ ID NO: 87563 - DNA, 25 bp, Canis familiaris
cctactcactcaaaatcccatgggg

SEQ ID NO: 87564 - DNA, 25 bp, Canis familiaris
cctaccacccaggataccaggatgg

SEQ ID NO: 87565 - DNA, 25 bp, Canis familiaris
cctcaaccccatctattcagtaggg

SEQ ID NO: 87566 - DNA, 25 bp, Canis familiaris
cctcaaaacactgttgtcagagaag

SEQ ID NO: 87567 - DNA, 25 bp, Canis familiaris
ccttgaaaattgctgggcggattgc

SEQ ID NO: 87568 - DNA, 25 bp, Canis familiaris
ccttgaaaatccctgtggccagttt

SEQ ID NO: 87569 - DNA, 25 bp, Canis familiaris
ccttgaagaaggatggaccaatcat

SEQ ID NO: 87570 - DNA, 25 bp, Canis familiaris
cctatgttgagaggggaccaatatt

SEQ ID NO: 87571 - DNA, 25 bp, Canis familiaris
cctaatgtgggggagagccctattc

SEQ ID NO: 87572 - DNA, 25 bp, Canis familiaris
cctagatgtgggctgtgcccttata

SEQ ID NO: 87573 - DNA, 25 bp, Canis familiaris
gcctaagtgtgggctgtgttttaag

SEQ ID NO: 87574 - DNA, 25 bp, Canis familiaris
cctactgtgctgctggtgtttcata

SEQ ID NO: 87575 - DNA, 25 bp, Canis familiaris
cctactgtgtcccagtggctacata

SEQ ID NO: 87576 - DNA, 25 bp, Canis familiaris
cctagtagtgcacagtgcccctggc

SEQ ID NO: 87577 - DNA, 25 bp, Canis familiaris
cctaacaggcagccaaggccgaggc

SEQ ID NO: 87578 - DNA, 25 bp, Canis familiaris
cctaacagagaccacaaggccgcct

SEQ ID NO: 87579 - DNA, 25 bp, Canis familiaris
ccttgaagatgacacaggccgccca

SEQ ID NO: 87580 - DNA, 25 bp, Canis familiaris
ccatagaagacacccgggaccgatc

SEQ ID NO: 87581 - DNA, 25 bp, Canis familiaris
cctaaggccaccacgaggcctacaa

SEQ ID NO: 87582 - DNA, 25 bp, Canis familiaris
cctttactacacaatctagggatat

SEQ ID NO: 87583 - DNA, 25 bp, Canis familiaris
ccatttcagtatctcttagcagggt

SEQ ID NO: 87584 - DNA, 25 bp, Canis familiaris
cctttcctgaggccttctggaggct

SEQ ID NO: 87585 - DNA, 25 bp, Canis familiaris
cctactccaaggcctgtggggatgc

SEQ ID NO: 87586 - DNA, 25 bp, Canis familiaris
cctacgccagagccagggaggtgag

SEQ ID NO: 87587 - DNA, 25 bp, Canis familiaris
cctaggcgcagatcggtgtggccga

SEQ ID NO: 87588 - DNA, 25 bp, Canis familiaris
cctatgggcagaccgcctattgcaa

SEQ ID NO: 87589 - DNA, 25 bp, Canis familiaris
cctagaggcagtacagactattgtc

SEQ ID NO: 87590 - DNA, 25 bp, Canis familiaris
cctagcaggcttccagtctgaggcc

SEQ ID NO: 87591 - DNA, 25 bp, Canis familiaris
cctacagacgtgaacactgaggcac

SEQ ID NO: 87592 - DNA, 25 bp, Canis familiaris
cctacaacctggacgtgacgcagct

SEQ ID NO: 87593 - DNA, 25 bp, Canis familiaris
cctaccccggactatgatgatgcgt

SEQ ID NO: 87594 - DNA, 25 bp, Canis familiaris
cctagcccctggagagcagagctta

SEQ ID NO: 87595 - DNA, 25 bp, Canis familiaris
cctacccattatcactgcaagcatt

SEQ ID NO: 87596 - DNA, 25 bp, Canis familiaris
cctagccctgtcacctgaaataaaa

SEQ ID NO: 87597 - DNA, 25 bp, Canis familiaris
cctaatcctcaatcttaccacaaaa

SEQ ID NO: 87598 - DNA, 25 bp, Canis familiaris
cctagactccgtgtccacataaaaa

SEQ ID NO: 87599 - DNA, 25 bp, Canis familiaris
ccttgcccaaatcaccactaaaaat

SEQ ID NO: 87600 - DNA, 25 bp, Canis familiaris
ccttgaccaagtcactgcctagcag

SEQ ID NO: 87601 - DNA, 25 bp, Canis familiaris
ccttgaaacttgagctccacactgg

SEQ ID NO: 87602 - DNA, 25 bp, Canis familiaris
ccttcaaactgacactcccagaggc

SEQ ID NO: 87603 - DNA, 25 bp, Canis familiaris
gccttcaaggctgacaatcccagtc

SEQ ID NO: 87604 - DNA, 25 bp, Canis familiaris
ccttccggcgcataaagtcagcaag

SEQ ID NO: 87605 - DNA, 25 bp, Canis familiaris
ccttccttctgttgaaggcccagac

SEQ ID NO: 87606 - DNA, 25 bp, Canis familiaris
ccttccccacttggaggccaagatc

SEQ ID NO: 87607 - DNA, 25 bp, Canis familiaris
cctacccctcattgggcagagcaga

SEQ ID NO: 87608 - DNA, 25 bp, Canis familiaris
cctacgtgcctctgtcagaagcaga

SEQ ID NO: 87609 - DNA, 25 bp, Canis familiaris
cctacgatcccagatgcagtgactg

SEQ ID NO: 87610 - DNA, 25 bp, Canis familiaris
cctacgacctctgcagcgtggtcgt

SEQ ID NO: 87611 - DNA, 25 bp, Canis familiaris
cctacgttctctgcaagctgtgcat

SEQ ID NO: 87612 - DNA, 25 bp, Canis familiaris
cctaagcctctggctgtcaggtgca

SEQ ID NO: 87613 - DNA, 25 bp, Canis familiaris
cctaagccccagtgagggatgcctc

SEQ ID NO: 87614 - DNA, 25 bp, Canis familiaris
cctacacatccccagaagggtcctg

SEQ ID NO: 87615 - DNA, 25 bp, Canis familiaris
ccatgagaaccttggaagtttccct

SEQ ID NO: 87616 - DNA, 25 bp, Canis familiaris
ccagatcaaacctggagcttttacg

SEQ ID NO: 87617 - DNA, 25 bp, Canis familiaris
ccttaatatcactggctccatatta

SEQ ID NO: 87618 - DNA, 25 bp, Canis familiaris
ccttagttcattacgatctccttag

SEQ ID NO: 87619 - DNA, 25 bp, Canis familiaris
ccttatgtgtatttcctcttttagc

SEQ ID NO: 87620 - DNA, 25 bp, Canis familiaris
ccatatcacgtttcttctttttaca

SEQ ID NO: 87621 - DNA, 25 bp, Canis familiaris
ccttgcactgttttagttttccaca

SEQ ID NO: 87622 - DNA, 25 bp, Canis familiaris
cctatgctctttctattctactata

SEQ ID NO: 87623 - DNA, 25 bp, Canis familiaris
cctactctgctctctgttagaaata

SEQ ID NO: 87624 - DNA, 25 bp, Canis familiaris
cctacttgccatccactgtggaaca

SEQ ID NO: 87625 - DNA, 25 bp, Canis familiaris
cctacttcccagtctgcgagaacat

SEQ ID NO: 87626 - DNA, 25 bp, Canis familiaris
cctacttctacagctgttgtcatca

SEQ ID NO: 87627 - DNA, 25 bp, Canis familiaris
cctacctctatttctttgatgcaca

SEQ ID NO: 87628 - DNA, 25 bp, Canis familiaris
cctaccctcattccagcaagagacc

SEQ ID NO: 87629 - DNA, 25 bp, Canis familiaris
cctacacttacagccacagagtgcc

SEQ ID NO: 87630 - DNA, 25 bp, Canis familiaris
ccttcacttgccgcacaatgatggc

SEQ ID NO: 87631 - DNA, 25 bp, Canis familiaris
ccttccttacaggccaacaggcttt

SEQ ID NO: 87632 - DNA, 25 bp, Canis familiaris
ccatcccttaaccgaagcacgaatt

SEQ ID NO: 87633 - DNA, 25 bp, Canis familiaris
ccatctcgggaaccgacgatctgaa

SEQ ID NO: 87634 - DNA, 25 bp, Canis familiaris
ccattacgggatccctctgcattat

SEQ ID NO: 87635 - DNA, 25 bp, Canis familiaris
ccattacctggacgagacttgatat

SEQ ID NO: 87636 - DNA, 25 bp, Canis familiaris
cctttccatcgcagatcatctatgt

SEQ ID NO: 87637 - DNA, 25 bp, Canis familiaris
cctttccagccagacttctgacatg

SEQ ID NO: 87638 - DNA, 25 bp, Canis familiaris
cctttccactgctgaggttcaaatt

SEQ ID NO: 87639 - DNA, 25 bp, Canis familiaris
cctttccttacgtgttctgaggcta

SEQ ID NO: 87640 - DNA, 25 bp, Canis familiaris
ccttccccttcctgagagtgaggaa

SEQ ID NO: 87641 - DNA, 25 bp, Canis familiaris
ccttccccttggtggtttgtgatag

SEQ ID NO: 87642 - DNA, 25 bp, Canis familiaris
ccttgcccccaagaaattgtatata

SEQ ID NO: 87643 - DNA, 25 bp, Canis familiaris
ccttcccctccatggagtttgttga

SEQ ID NO: 87644 - DNA, 25 bp, Canis familiaris
ccttcccacccaaggtattcagtgg

SEQ ID NO: 87645 - DNA, 25 bp, Canis familiaris
ccttctggcccctggtatggtgggg

SEQ ID NO: 87646 - DNA, 25 bp, Canis familiaris
ccttctggcccctggtatggtgggg

SEQ ID NO: 87647 - DNA, 25 bp, Canis familiaris
ccttctggcccctggtatggtgggg

SEQ ID NO: 87648 - DNA, 25 bp, Canis familiaris
ccttctggcccctggtatggtgggg

SEQ ID NO: 87649 - DNA, 25 bp, Canis familiaris
ccttctggcccctggtatggtgggg

SEQ ID NO: 87650 - DNA, 25 bp, Canis familiaris
ccttctggcccctggtatggtgggg

SEQ ID NO: 87651 - DNA, 25 bp, Canis familiaris
ccttctggcccctggtatggtgggg

SEQ ID NO: 87652 - DNA, 25 bp, Canis familiaris
ccttctggcccctggtatggtgggg

SEQ ID NO: 87653 - DNA, 25 bp, Canis familiaris
ccttctggcccctggtatggtgggg

SEQ ID NO: 87654 - DNA, 25 bp, Canis familiaris
ccttctggcccctggtatggtgggg

SEQ ID NO: 87655 - DNA, 25 bp, Canis familiaris
ccttctggcccctggtatggtgggg

SEQ ID NO: 87656 - DNA, 25 bp, Canis familiaris
ccttctggcccctggtatggtgggg

SEQ ID NO: 87657 - DNA, 25 bp, Canis familiaris
ccttctggcccctggtatggtgggg

SEQ ID NO: 87658 - DNA, 25 bp, Canis familiaris
ccttctggcccctggtatggtgggg

SEQ ID NO: 87659 - DNA, 25 bp, Canis familiaris
ccttctggcccctggtatggtgggg

SEQ ID NO: 87660 - DNA, 25 bp, Canis familiaris
ccttctggcccctggtatggtgggg

SEQ ID NO: 87661 - DNA, 25 bp, Canis familiaris
ccttctggcccctggtatggtgggg

SEQ ID NO: 87662 - DNA, 25 bp, Canis familiaris
ccttagccaccccggtgacgataag

SEQ ID NO: 87663 - DNA, 25 bp, Canis familiaris
cctttcctctccaagaggacaatca

SEQ ID NO: 87664 - DNA, 25 bp, Canis familiaris
cctttcccttctacaagttatcaca

SEQ ID NO: 87665 - DNA, 25 bp, Canis familiaris
cctttcacccttcacattaaacaag

SEQ ID NO: 87666 - DNA, 25 bp, Canis familiaris
cctttcccaatggccaataaagaat

SEQ ID NO: 87667 - DNA, 25 bp, Canis familiaris
ccttcttctcttccaaacaaaacat

SEQ ID NO: 87668 - DNA, 25 bp, Canis familiaris
cctagctacccttcaaacacaagaa

SEQ ID NO: 87669 - DNA, 25 bp, Canis familiaris
ccataaactctaacaccacaactga

SEQ ID NO: 87670 - DNA, 25 bp, Canis familiaris
cctactgacttttcaccagagactg

SEQ ID NO: 87671 - DNA, 25 bp, Canis familiaris
cctactacaacttcttcaggaatgt

SEQ ID NO: 87672 - DNA, 25 bp, Canis familiaris
cctagtaattccctacaggattgcg

SEQ ID NO: 87673 - DNA, 25 bp, Canis familiaris
cctaccacacccctcaaatatagag

SEQ ID NO: 87674 - DNA, 25 bp, Canis familiaris
cctacccatcctactactaatatat

SEQ ID NO: 87675 - DNA, 25 bp, Canis familiaris
cctaccagtcactttatatcgtcaa

SEQ ID NO: 87676 - DNA, 25 bp, Canis familiaris
cctactcattgctcctgatattgac

SEQ ID NO: 87677 - DNA, 25 bp, Canis familiaris
cctttcaggcccgtggattatctag

SEQ ID NO: 87678 - DNA, 25 bp, Canis familiaris
cctttagctgcctcggtagacaagc

SEQ ID NO: 87679 - DNA, 25 bp, Canis familiaris
ccattttcaggctgggaaacggccg

SEQ ID NO: 87680 - DNA, 25 bp, Canis familiaris
ccatttccaggctgggaaacggccg

SEQ ID NO: 87681 - DNA, 25 bp, Canis familiaris
ccttggcttggatggggactctggc

SEQ ID NO: 87682 - DNA, 25 bp, Canis familiaris
ccttcttgggaggagaccacctggc

SEQ ID NO: 87683 - DNA, 25 bp, Canis familiaris
ccttgccaaagggagaccccagagg

SEQ ID NO: 87684 - DNA, 25 bp, Canis familiaris
ccttgccaggcccccaaagcaaggg

SEQ ID NO: 87685 - DNA, 25 bp, Canis familiaris
ccttgtagacaccatccctagcaag

SEQ ID NO: 87686 - DNA, 25 bp, Canis familiaris
ccttgttgggtaccccagcaagcag

SEQ ID NO: 87687 - DNA, 25 bp, Canis familiaris
cctttgggactcccaccatcatagt

SEQ ID NO: 87688 - DNA, 25 bp, Canis familiaris
ccattttagaatgccaccaatactc

SEQ ID NO: 87689 - DNA, 25 bp, Canis familiaris
cctaccagagaagccaccagttctc

SEQ ID NO: 87690 - DNA, 25 bp, Canis familiaris
ccatgactatgattcgtgtaccggt

SEQ ID NO: 87691 - DNA, 25 bp, Canis familiaris
ccagaattgtctcccgacggggatg

SEQ ID NO: 87692 - DNA, 25 bp, Canis familiaris
ccaggagtggtatcgtcggcgttga

SEQ ID NO: 87693 - DNA, 25 bp, Canis familiaris
gctcgggggatgagcccccgttgtc

SEQ ID NO: 87694 - DNA, 25 bp, Canis familiaris
ccatgcggaagaaagcccccgtcat

SEQ ID NO: 87695 - DNA, 25 bp, Canis familiaris
gcaaaagaagacagacccctaatgg

SEQ ID NO: 87696 - DNA, 25 bp, Canis familiaris
ccaagacaggaaggacccctcagtg

SEQ ID NO: 87697 - DNA, 25 bp, Canis familiaris
ccattgtcaaagtgcttccctctgg

SEQ ID NO: 87698 - DNA, 25 bp, Canis familiaris
ccttgacaacagagattcgcacccc

SEQ ID NO: 87699 - DNA, 25 bp, Canis familiaris
ccatgtgaacaacaggctccaaccc

SEQ ID NO: 87700 - DNA, 25 bp, Canis familiaris
tcgagtaaagagagtccccaatccc

SEQ ID NO: 87701 - DNA, 25 bp, Canis familiaris
tcgagtaccggtcaccgaagacctc

SEQ ID NO: 87702 - DNA, 25 bp, Canis familiaris
gccttgcaccggaaaccaacaaccg

SEQ ID NO: 87703 - DNA, 25 bp, Canis familiaris
ccttctcctgggcacaagaaaccca

SEQ ID NO: 87704 - DNA, 25 bp, Canis familiaris
cctttcttgtctcaagataactgac

SEQ ID NO: 87705 - DNA, 25 bp, Canis familiaris
cctttctcttctggaggaacagcag

SEQ ID NO: 87706 - DNA, 25 bp, Canis familiaris
ccttcctgtcctggatggccagggt

SEQ ID NO: 87707 - DNA, 25 bp, Canis familiaris
ccttcgtgtaccctgtatcagggtg

SEQ ID NO: 87708 - DNA, 25 bp, Canis familiaris
cctataatcaagccctgcttcaggg

SEQ ID NO: 87709 - DNA, 25 bp, Canis familiaris
ccttcaactgtgactgcctgacagc

SEQ ID NO: 87710 - DNA, 25 bp, Canis familiaris
cctagcccatgctgtgactggcagc

SEQ ID NO: 87711 - DNA, 25 bp, Canis familiaris
cctaccatggcaagtgccaggctga

SEQ ID NO: 87712 - DNA, 25 bp, Canis familiaris
cctatccagatgcgagccggctggc

SEQ ID NO: 87713 - DNA, 25 bp, Canis familiaris
cctaccaaggggccagggccttctg

SEQ ID NO: 87714 - DNA, 25 bp, Canis familiaris
cctacgcaagggcccaagtttcaag

SEQ ID NO: 87715 - DNA, 25 bp, Canis familiaris
ccatcatccaagtgtcccagattgt

SEQ ID NO: 87716 - DNA, 25 bp, Canis familiaris
ccttcgaggcacgtgcccagattgg

SEQ ID NO: 87717 - DNA, 25 bp, Canis familiaris
ccttcgacgacctcaagtcgctgga

SEQ ID NO: 87718 - DNA, 25 bp, Canis familiaris
ccttcgaggacctaaaccagcaggc

SEQ ID NO: 87719 - DNA, 25 bp, Canis familiaris
ccttctaagacccagaggcccaggg

SEQ ID NO: 87720 - DNA, 25 bp, Canis familiaris
ccttcttcaaggcatgggcccatgg

SEQ ID NO: 87721 - DNA, 25 bp, Canis familiaris
ccttttctctgggtgtggcactatg

SEQ ID NO: 87722 - DNA, 25 bp, Canis familiaris
cctttgtcgctgctggaatcatcca

SEQ ID NO: 87723 - DNA, 25 bp, Canis familiaris
ccttctggcagtgctaatatcgcct

SEQ ID NO: 87724 - DNA, 25 bp, Canis familiaris
ccatctacgagggctatgctctccc

SEQ ID NO: 87725 - DNA, 25 bp, Canis familiaris
ccatcttctgggaaccttacggatt

SEQ ID NO: 87726 - DNA, 25 bp, Canis familiaris
ccattattgggtaccgcatcacagt

SEQ ID NO: 87727 - DNA, 25 bp, Canis familiaris
ccttttttttgcagctgacagcttg

SEQ ID NO: 87728 - DNA, 25 bp, Canis familiaris
gcctaccttattggccgtggcctgg

SEQ ID NO: 87729 - DNA, 25 bp, Canis familiaris
cctaccttgaggacacctgggtggt

SEQ ID NO: 87730 - DNA, 25 bp, Canis familiaris
ccttccttaggcacctggagggagg

SEQ ID NO: 87731 - DNA, 25 bp, Canis familiaris
ccttctcttctgttagcttctaggg

SEQ ID NO: 87732 - DNA, 25 bp, Canis familiaris
ccttgcctctcagttcagtttgagg

SEQ ID NO: 87733 - DNA, 25 bp, Canis familiaris
ccttccctgcatcaattcttgcaat

SEQ ID NO: 87734 - DNA, 25 bp, Canis familiaris
ccttctcctctttttagtcagtgag

SEQ ID NO: 87735 - DNA, 25 bp, Canis familiaris
ccttcgcttatctttgtagtactga

SEQ ID NO: 87736 - DNA, 25 bp, Canis familiaris
cctaccgatgaaattgttgtgacga

SEQ ID NO: 87737 - DNA, 25 bp, Canis familiaris
ccttagcgatggtttgggagacggg

SEQ ID NO: 87738 - DNA, 25 bp, Canis familiaris
ccttgcctggcttttggtgaacgga

SEQ ID NO: 87739 - DNA, 25 bp, Canis familiaris
ccttcgctcagtttgttgggagcgt

SEQ ID NO: 87740 - DNA, 25 bp, Canis familiaris
ccttccacaagactgaagtatgagc

SEQ ID NO: 87741 - DNA, 25 bp, Canis familiaris
ccttctacaatgagctgcgtgtggc

SEQ ID NO: 87742 - DNA, 25 bp, Canis familiaris
ccttctacaatgagctgcgtgtggc

SEQ ID NO: 87743 - DNA, 25 bp, Canis familiaris
ccattctacacaatcaagcggtcga

SEQ ID NO: 87744 - DNA, 25 bp, Canis familiaris
ccattccacatctctttgtacaact

SEQ ID NO: 87745 - DNA, 25 bp, Canis familiaris
ccttttctccctaattcagacagct

SEQ ID NO: 87746 - DNA, 25 bp, Canis familiaris
cctttatctccctttaaccagattg

SEQ ID NO: 87747 - DNA, 25 bp, Canis familiaris
ccatcttgaacccctaaaccatgat

SEQ ID NO: 87748 - DNA, 25 bp, Canis familiaris
ccttgtacaccgatcatgaactcgt

SEQ ID NO: 87749 - DNA, 25 bp, Canis familiaris
cctagtcctcctagaatgaattgag

SEQ ID NO: 87750 - DNA, 25 bp, Canis familiaris
cctagggccctttagaattatgcta

SEQ ID NO: 87751 - DNA, 25 bp, Canis familiaris
cctaggcccctagagtagattgcta

SEQ ID NO: 87752 - DNA, 25 bp, Canis familiaris
ccttggccctcaaaagtccaggctt

SEQ ID NO: 87753 - DNA, 25 bp, Canis familiaris
ccttgaggctctaagtcgcaccagg

SEQ ID NO: 87754 - DNA, 25 bp, Canis familiaris
ccttaggctccatgatacccacagg

SEQ ID NO: 87755 - DNA, 25 bp, Canis familiaris
cctttgggctgatcaatcccaagca

SEQ ID NO: 87756 - DNA, 25 bp, Canis familiaris
cctatgtgggtgacgaggcccagag

SEQ ID NO: 87757 - DNA, 25 bp, Canis familiaris
ccttgtcgctggagaacccatgagg

SEQ ID NO: 87758 - DNA, 25 bp, Canis familiaris
ccttgtttgaatggagccacctgcg

SEQ ID NO: 87759 - DNA, 25 bp, Canis familiaris
cctttatccatttgtccatcgctgg

SEQ ID NO: 87760 - DNA, 25 bp, Canis familiaris
cctttttctctactctttgctagga

SEQ ID NO: 87761 - DNA, 25 bp, Canis familiaris
ccttttcctcaactgcattatcttg

SEQ ID NO: 87762 - DNA, 25 bp, Canis familiaris
cctattgctcttcagctcatttgga

SEQ ID NO: 87763 - DNA, 25 bp, Canis familiaris
ccatacttccatccagctttttaag

SEQ ID NO: 87764 - DNA, 25 bp, Canis familiaris
cctttctcacactagctctattata

SEQ ID NO: 87765 - DNA, 25 bp, Canis familiaris
gcgtggtacatctcagactgtttac

SEQ ID NO: 87766 - DNA, 25 bp, Canis familiaris
ccatcgtgcaccgcaagtgcttcta

SEQ ID NO: 87767 - DNA, 25 bp, Canis familiaris
ccttctgatctcaccagttggtcag

SEQ ID NO: 87768 - DNA, 25 bp, Canis familiaris
cctatcttctttcagtgtctctgta

SEQ ID NO: 87769 - DNA, 25 bp, Canis familiaris
cctagcgttctacagcagaggctgt

SEQ ID NO: 87770 - DNA, 25 bp, Canis familiaris
cctacctcttcacctatagcagtgt

SEQ ID NO: 87771 - DNA, 25 bp, Canis familiaris
cctacctgcctacgcaacaagatgt

SEQ ID NO: 87772 - DNA, 25 bp, Canis familiaris
cctacctgcttgttcacacatagag

SEQ ID NO: 87773 - DNA, 25 bp, Canis familiaris
cctaggcctggcttctaatgaagac

SEQ ID NO: 87774 - DNA, 25 bp, Canis familiaris
cctagcgcgcgggacggataacaat

SEQ ID NO: 87775 - DNA, 25 bp, Canis familiaris
cctaggagctgggccctgaaagcca

SEQ ID NO: 87776 - DNA, 25 bp, Canis familiaris
ccttggacatgggctcccagatacc

SEQ ID NO: 87777 - DNA, 25 bp, Canis familiaris
cctatctgagatcctcgcacagaga

SEQ ID NO: 87778 - DNA, 25 bp, Canis familiaris
ccttccacatgcaccacaggaatac

SEQ ID NO: 87779 - DNA, 25 bp, Canis familiaris
cctaccatggtgaccacgggtgacg

SEQ ID NO: 87780 - DNA, 25 bp, Canis familiaris
cctaccatggtgatccacggggtga

SEQ ID NO: 87781 - DNA, 25 bp, Canis familiaris
ccataccagaggacttacggaagaa

SEQ ID NO: 87782 - DNA, 25 bp, Canis familiaris
ccatattctgaggaatctccgaaaa

SEQ ID NO: 87783 - DNA, 25 bp, Canis familiaris
cctttctgcccatttctacagaaac

SEQ ID NO: 87784 - DNA, 25 bp, Canis familiaris
cctttgctgtgctctttgtcaaata

SEQ ID NO: 87785 - DNA, 25 bp, Canis familiaris
cctttctgtgcttctcagttgttta

SEQ ID NO: 87786 - DNA, 25 bp, Canis familiaris
cctttctttgatacaccttttcaag

SEQ ID NO: 87787 - DNA, 25 bp, Canis familiaris
cctttttttataccctgatgacctg

SEQ ID NO: 87788 - DNA, 25 bp, Canis familiaris
ccttatttactttccatctgatatg

SEQ ID NO: 87789 - DNA, 25 bp, Canis familiaris
cctttgttttaagcatttatgtggt

SEQ ID NO: 87790 - DNA, 25 bp, Canis familiaris
cctttgtctctaaaactttgcatgt

SEQ ID NO: 87791 - DNA, 25 bp, Canis familiaris
ccttaacctgcaaccactgaggcaa

SEQ ID NO: 87792 - DNA, 25 bp, Canis familiaris
ccttgaaccctcgactcgaagacag

SEQ ID NO: 87793 - DNA, 25 bp, Canis familiaris
ccttaccctgtcgctcataatgagg

SEQ ID NO: 87794 - DNA, 25 bp, Canis familiaris
ccactactcctcgcgttaacaggag

SEQ ID NO: 87795 - DNA, 25 bp, Canis familiaris
ccttcagctacctggttgaccagtg

SEQ ID NO: 87796 - DNA, 25 bp, Canis familiaris
ccttagatgtccggggctgcacgcg

SEQ ID NO: 87797 - DNA, 25 bp, Canis familiaris
cctttattcactgggtgtcacagcc

SEQ ID NO: 87798 - DNA, 25 bp, Canis familiaris
cctttgctgtaaaggtccaggcctt

SEQ ID NO: 87799 - DNA, 25 bp, Canis familiaris
ccttttgctcacaggtctcttaatc

SEQ ID NO: 87800 - DNA, 25 bp, Canis familiaris
ccattttccactatgtgcttctcaa

SEQ ID NO: 87801 - DNA, 25 bp, Canis familiaris
ccttcttgcctccttgttttgaggc

SEQ ID NO: 87802 - DNA, 25 bp, Canis familiaris
ccttctggcaccctggtatggtggg

SEQ ID NO: 87803 - DNA, 25 bp, Canis familiaris
ccttctgagagcccttggaggctgc

SEQ ID NO: 87804 - DNA, 25 bp, Canis familiaris
ccatcaccaagccctgggaggtgca

SEQ ID NO: 87805 - DNA, 25 bp, Canis familiaris
ccttcctatcaggcggccagagtga

SEQ ID NO: 87806 - DNA, 25 bp, Canis familiaris
ccattactacccgccagagatataa

SEQ ID NO: 87807 - DNA, 25 bp, Canis familiaris
ccttcctacccatctacaaatgtta

SEQ ID NO: 87808 - DNA, 25 bp, Canis familiaris
ccattcctacctttctaatttgtgt

SEQ ID NO: 87809 - DNA, 25 bp, Canis familiaris
cctttattctcattttaatttggct

SEQ ID NO: 87810 - DNA, 25 bp, Canis familiaris
cctttcttctactattagcatcttc

SEQ ID NO: 87811 - DNA, 25 bp, Canis familiaris
cctttctgcatctgtacttcatttg

SEQ ID NO: 87812 - DNA, 25 bp, Canis familiaris
cctttcttttctccatatcatttgt

SEQ ID NO: 87813 - DNA, 25 bp, Canis familiaris
cctttgttgttgtccaattgtggtt

SEQ ID NO: 87814 - DNA, 25 bp, Canis familiaris
cctttgtgagtgttctcaagtctgg

SEQ ID NO: 87815 - DNA, 25 bp, Canis familiaris
ccttcttggctgatccatgtgcatt

SEQ ID NO: 87816 - DNA, 25 bp, Canis familiaris
ccttctttcatgttctcatctgtaa

SEQ ID NO: 87817 - DNA, 25 bp, Canis familiaris
ccttcttcatctcccacagatgtga

SEQ ID NO: 87818 - DNA, 25 bp, Canis familiaris
ccttcgtagctgacccagactggaa

SEQ ID NO: 87819 - DNA, 25 bp, Canis familiaris
ccttcgctgactccaaagccaggag

SEQ ID NO: 87820 - DNA, 25 bp, Canis familiaris
cctatcggatctgttatcgcggggt

SEQ ID NO: 87821 - DNA, 25 bp, Canis familiaris
ccttgggtctcctattcttatgggt

SEQ ID NO: 87822 - DNA, 25 bp, Canis familiaris
cctttggactctgtgctctggagat

SEQ ID NO: 87823 - DNA, 25 bp, Canis familiaris
cctttgctgtcctgtgtagtgattt

SEQ ID NO: 87824 - DNA, 25 bp, Canis familiaris
cctatttgatacttggttctgacgt

SEQ ID NO: 87825 - DNA, 25 bp, Canis familiaris
ccttttaatatctgtgtctgtctgt

SEQ ID NO: 87826 - DNA, 25 bp, Canis familiaris
ccttttacatactgctgtctatgtg

SEQ ID NO: 87827 - DNA, 25 bp, Canis familiaris
cctttcatagcattaggtgccttgt

SEQ ID NO: 87828 - DNA, 25 bp, Canis familiaris
ccttctgaacactaggatctccttg

SEQ ID NO: 87829 - DNA, 25 bp, Canis familiaris
ccttctgaaaaactgattggctgac

SEQ ID NO: 87830 - DNA, 25 bp, Canis familiaris
ccatcatcgcgccaaattttgcgct

SEQ ID NO: 87831 - DNA, 25 bp, Canis familiaris
ccttcgcccagaattcttcacatgg

SEQ ID NO: 87832 - DNA, 25 bp, Canis familiaris
ccttgctcctaattctgctgaacag

SEQ ID NO: 87833 - DNA, 25 bp, Canis familiaris
ccttccccaatgtggtccatggtga

SEQ ID NO: 87834 - DNA, 25 bp, Canis familiaris
ccttcaccctgggggactcatgatg

SEQ ID NO: 87835 - DNA, 25 bp, Canis familiaris
ccttctccacatccttaattcatgt

SEQ ID NO: 87836 - DNA, 25 bp, Canis familiaris
ccttccctagcgctagtatcataaa

SEQ ID NO: 87837 - DNA, 25 bp, Canis familiaris
ccttggcctagtgccagttctgaga

SEQ ID NO: 87838 - DNA, 25 bp, Canis familiaris
ccttggcatctactgcatccagttc

SEQ ID NO: 87839 - DNA, 25 bp, Canis familiaris
ccttgtcatgtaccatcaataaagt

SEQ ID NO: 87840 - DNA, 25 bp, Canis familiaris
ccttgtccaacccagtacaagtgac

SEQ ID NO: 87841 - DNA, 25 bp, Canis familiaris
cctttccctccacaggcaagtggtt

SEQ ID NO: 87842 - DNA, 25 bp, Canis familiaris
cctttccacctccttgttgagggtg

SEQ ID NO: 87843 - DNA, 25 bp, Canis familiaris
cctttcccattcctgaggctgatgg

SEQ ID NO: 87844 - DNA, 25 bp, Canis familiaris
ccttcatcatcttcatcgatgaggt

SEQ ID NO: 87845 - DNA, 25 bp, Canis familiaris
ccttcagcagctcgtcgtgagtgaa

SEQ ID NO: 87846 - DNA, 25 bp, Canis familiaris
cctataacctgccggatgcttcagc

SEQ ID NO: 87847 - DNA, 25 bp, Canis familiaris
ccttaaccctcggatgagatcgccc

SEQ ID NO: 87848 - DNA, 25 bp, Canis familiaris
cctataacccgcagtgaatgtcgct

SEQ ID NO: 87849 - DNA, 25 bp, Canis familiaris
ccttgcaacccctagtgaattctga

SEQ ID NO: 87850 - DNA, 25 bp, Canis familiaris
ccttttccccattgtgacatttgta

SEQ ID NO: 87851 - DNA, 25 bp, Canis familiaris
ccttctaggccactcaggacatttt

SEQ ID NO: 87852 - DNA, 25 bp, Canis familiaris
ccttctaggtctaagcgatctttaa

SEQ ID NO: 87853 - DNA, 25 bp, Canis familiaris
ccttctagggcttaggaggtctaca

SEQ ID NO: 87854 - DNA, 25 bp, Canis familiaris
ccttgtaagtcttttggccattcaa

SEQ ID NO: 87855 - DNA, 25 bp, Canis familiaris
ccttgccaacgttcattgagacatt

SEQ ID NO: 87856 - DNA, 25 bp, Canis familiaris
ccttgccaccagacgttagacacaa

SEQ ID NO: 87857 - DNA, 25 bp, Canis familiaris
ccttcacacagacccttatgtacag

SEQ ID NO: 87858 - DNA, 25 bp, Canis familiaris
cctatacagcaagctctccgtggac

SEQ ID NO: 87859 - DNA, 25 bp, Canis familiaris
ccttccacaacattgccctggagac

SEQ ID NO: 87860 - DNA, 25 bp, Canis familiaris
ccttcaccaaattcagcatcttaac

SEQ ID NO: 87861 - DNA, 25 bp, Canis familiaris
cctttcctcaattcaattcaattcc

SEQ ID NO: 87862 - DNA, 25 bp, Canis familiaris
cctttcctatgatcgttcgtgattc

SEQ ID NO: 87863 - DNA, 25 bp, Canis familiaris
ccttccacttcatcgtttggtgact

SEQ ID NO: 87864 - DNA, 25 bp, Canis familiaris
ccttctcacttctctgttaatgggg

SEQ ID NO: 87865 - DNA, 25 bp, Canis familiaris
ccttctccgtcatcgagtacgagtg

SEQ ID NO: 87866 - DNA, 25 bp, Canis familiaris
ccttcctgggcatggagtcctgtgg

SEQ ID NO: 87867 - DNA, 25 bp, Canis familiaris
ccttcctgggtacgaggcctcagga

SEQ ID NO: 87868 - DNA, 25 bp, Canis familiaris
ccttcttggagtacaggtcgtctga

SEQ ID NO: 87869 - DNA, 25 bp, Canis familiaris
ccttcttcaaggacaggatagactg

SEQ ID NO: 87870 - DNA, 25 bp, Canis familiaris
ccttcttcatgaggctgggtcaagt

SEQ ID NO: 87871 - DNA, 25 bp, Canis familiaris
ccttgatctaatcctgggctaatga

SEQ ID NO: 87872 - DNA, 25 bp, Canis familiaris
ccttgaggaacgtgtcaccatgcac

SEQ ID NO: 87873 - DNA, 25 bp, Canis familiaris
ccttgagaaacggctgaccaccatc

SEQ ID NO: 87874 - DNA, 25 bp, Canis familiaris
ccttatgacacaggtcttccacgag

SEQ ID NO: 87875 - DNA, 25 bp, Canis familiaris
ccatcctgaacacctttccaagaag

SEQ ID NO: 87876 - DNA, 25 bp, Canis familiaris
gcctcctaatggcttcccaaagagc

SEQ ID NO: 87877 - DNA, 25 bp, Canis familiaris
ccttcttgtgcgctatgccaaaaac

SEQ ID NO: 87878 - DNA, 25 bp, Canis familiaris
ccttcagcttggagattatagataa

SEQ ID NO: 87879 - DNA, 25 bp, Canis familiaris
cctatcgctcttaaatatatctgat

SEQ ID NO: 87880 - DNA, 25 bp, Canis familiaris
cctttgtcttcttgtgtcctgaaaa

SEQ ID NO: 87881 - DNA, 25 bp, Canis familiaris
cctttttgtgatccttgccatagaa

SEQ ID NO: 87882 - DNA, 25 bp, Canis familiaris
cctttttggctgataccatctgcaa

SEQ ID NO: 87883 - DNA, 25 bp, Canis familiaris
cctattttggccatcagctgcctta

SEQ ID NO: 87884 - DNA, 25 bp, Canis familiaris
cctattgtgtgactcttgatctcag

SEQ ID NO: 87885 - DNA, 25 bp, Canis familiaris
cctatccatgtgcctgctggaacaa

SEQ ID NO: 87886 - DNA, 25 bp, Canis familiaris
cctatcttcagccctggaacacatg

SEQ ID NO: 87887 - DNA, 25 bp, Canis familiaris
cctttggcagcacccgtaaatctgc

SEQ ID NO: 87888 - DNA, 25 bp, Canis familiaris
ccttggaggctgcccgtatttgtgc

SEQ ID NO: 87889 - DNA, 25 bp, Canis familiaris
ccttgtcagtgtgctgcgttacgtc

SEQ ID NO: 87890 - DNA, 25 bp, Canis familiaris
cctttgggctaccctgtatgcagtc

SEQ ID NO: 87891 - DNA, 25 bp, Canis familiaris
ccttcattggttcctgtgctgtagt

SEQ ID NO: 87892 - DNA, 25 bp, Canis familiaris
ccttgacggtgggtgtctcagtcac

SEQ ID NO: 87893 - DNA, 25 bp, Canis familiaris
cctttcttgggcagctcacagatat

SEQ ID NO: 87894 - DNA, 25 bp, Canis familiaris
cctttcattcccacatcacagagaa

SEQ ID NO: 87895 - DNA, 25 bp, Canis familiaris
ccatatttcttcgccactcaggaag

SEQ ID NO: 87896 - DNA, 25 bp, Canis familiaris
ccttattttcgcccagtggcacaaa

SEQ ID NO: 87897 - DNA, 25 bp, Canis familiaris
cctattctccttggccagggaaata

SEQ ID NO: 87898 - DNA, 25 bp, Canis familiaris
ccttccatcccgacacaggggagaa

SEQ ID NO: 87899 - DNA, 25 bp, Canis familiaris
ccttcaccctgctttagtgtggaga

SEQ ID NO: 87900 - DNA, 25 bp, Canis familiaris
ccttccgcctgctatagtggtggca

SEQ ID NO: 87901 - DNA, 25 bp, Canis familiaris
ccttgccccagatgaggccagagca

SEQ ID NO: 87902 - DNA, 25 bp, Canis familiaris
ccattcccggtatgccacaggaact

SEQ ID NO: 87903 - DNA, 25 bp, Canis familiaris
ccattccggctttccctaatggaat

SEQ ID NO: 87904 - DNA, 25 bp, Canis familiaris
ccttcacagtgcttttctctgagat

SEQ ID NO: 87905 - DNA, 25 bp, Canis familiaris
ccttccactggtttgccatgagcag

SEQ ID NO: 87906 - DNA, 25 bp, Canis familiaris
ccattacaaggtttcagcagctgac

SEQ ID NO: 87907 - DNA, 25 bp, Canis familiaris
ccttgacactgttgtatcacacgcg

SEQ ID NO: 87908 - DNA, 25 bp, Canis familiaris
ccattggccgttgaccacagttgat

SEQ ID NO: 87909 - DNA, 25 bp, Canis familiaris
ccttccctgaacagccacaatggtg

SEQ ID NO: 87910 - DNA, 25 bp, Canis familiaris
ccttcccagaagccagccaaaggca

SEQ ID NO: 87911 - DNA, 25 bp, Canis familiaris
ccttctgcgagaagggccagagggc

SEQ ID NO: 87912 - DNA, 25 bp, Canis familiaris
ccttctcagcaggagggctcatggg

SEQ ID NO: 87913 - DNA, 25 bp, Canis familiaris
ccttccagcaggagggcattgccaa

SEQ ID NO: 87914 - DNA, 25 bp, Canis familiaris
ccttgagccatgttggggcatctcc

SEQ ID NO: 87915 - DNA, 25 bp, Canis familiaris
ccttcagtctagggcctgatcctag

SEQ ID NO: 87916 - DNA, 25 bp, Canis familiaris
ccttcagcccaggacgtgagactgg

SEQ ID NO: 87917 - DNA, 25 bp, Canis familiaris
ccttcactctcagacagcaagactc

SEQ ID NO: 87918 - DNA, 25 bp, Canis familiaris
ccattccctgactgaattacatctt

SEQ ID NO: 87919 - DNA, 25 bp, Canis familiaris
ccattcgggacatatggatacgccc

SEQ ID NO: 87920 - DNA, 25 bp, Canis familiaris
ccttgcttggacatcaggtaccaac

SEQ ID NO: 87921 - DNA, 25 bp, Canis familiaris
ccttcttgctataacttttccacac

SEQ ID NO: 87922 - DNA, 25 bp, Canis familiaris
cctttggctgatcaatccacccaag

SEQ ID NO: 87923 - DNA, 25 bp, Canis familiaris
ccttctgtgctgtgtatgacccaca

SEQ ID NO: 87924 - DNA, 25 bp, Canis familiaris
ccttcggtcgcgaatagcgccatgg

SEQ ID NO: 87925 - DNA, 25 bp, Canis familiaris
ccttcggtggcacacaagcgaggtg

SEQ ID NO: 87926 - DNA, 25 bp, Canis familiaris
ccttgccttgaacaacaggtgggtg

SEQ ID NO: 87927 - DNA, 25 bp, Canis familiaris
ccttcccagaaggcaaggcttgggg

SEQ ID NO: 87928 - DNA, 25 bp, Canis familiaris
ccttcccaaacacttacttcacagt

SEQ ID NO: 87929 - DNA, 25 bp, Canis familiaris
ccttcccagaaatttagcacccagc

SEQ ID NO: 87930 - DNA, 25 bp, Canis familiaris
ccttcaccagtaatattccatctca

SEQ ID NO: 87931 - DNA, 25 bp, Canis familiaris
cctttccagctggatttttctccat

SEQ ID NO: 87932 - DNA, 25 bp, Canis familiaris
ccatttgccctattttttctagcag

SEQ ID NO: 87933 - DNA, 25 bp, Canis familiaris
ccatcttgcactgttcgttactaga

SEQ ID NO: 87934 - DNA, 25 bp, Canis familiaris
cctttccatctttctttatgccaaa

SEQ ID NO: 87935 - DNA, 25 bp, Canis familiaris
cctttgccatttctttatcaaaaat

SEQ ID NO: 87936 - DNA, 25 bp, Canis familiaris
cctttacctgctctttaatcaaaat

SEQ ID NO: 87937 - DNA, 25 bp, Canis familiaris
ccttgttactgtgatatttaaaata

SEQ ID NO: 87938 - DNA, 25 bp, Canis familiaris
cctttgtaggtccttgtctggaaat

SEQ ID NO: 87939 - DNA, 25 bp, Canis familiaris
ccttctgtcgttgcctttgaaagat

SEQ ID NO: 87940 - DNA, 25 bp, Canis familiaris
cctttcatctttgcatttaaaagct

SEQ ID NO: 87941 - DNA, 25 bp, Canis familiaris
ccttactctcctccattgataaaac

SEQ ID NO: 87942 - DNA, 25 bp, Canis familiaris
ccttccctccagtgctaaaacacag

SEQ ID NO: 87943 - DNA, 25 bp, Canis familiaris
ccttcacccctgtggaatgatgccc

SEQ ID NO: 87944 - DNA, 25 bp, Canis familiaris
ccttcaccgcctttgaggaggcaca

SEQ ID NO: 87945 - DNA, 25 bp, Canis familiaris
ccttcacagtccctctaggaggcaa

SEQ ID NO: 87946 - DNA, 25 bp, Canis familiaris
ccattccagccccttggagctggaa

SEQ ID NO: 87947 - DNA, 25 bp, Canis familiaris
ccttcgaggccgcctcggtcaagtc

SEQ ID NO: 87948 - DNA, 25 bp, Canis familiaris
gccttagggccctgctggaaatggc

SEQ ID NO: 87949 - DNA, 25 bp, Canis familiaris
ccttcggtcgcctcatggtagagag

SEQ ID NO: 87950 - DNA, 25 bp, Canis familiaris
ccaggtggtccagatcaggtaggcg

SEQ ID NO: 87951 - DNA, 25 bp, Canis familiaris
ccaggttgggcagacagcttgttct

SEQ ID NO: 87952 - DNA, 25 bp, Canis familiaris
ccaggttgggcagcagggaccctgg

SEQ ID NO: 87953 - DNA, 25 bp, Canis familiaris
ccttcatggccgtaagtgaacccgg

SEQ ID NO: 87954 - DNA, 25 bp, Canis familiaris
gcctacttccggcaggaaaccaacg

SEQ ID NO: 87955 - DNA, 25 bp, Canis familiaris
ccaactcccaggaaggactacccat

SEQ ID NO: 87956 - DNA, 25 bp, Canis familiaris
ccagtccagtagacctaactaccct

SEQ ID NO: 87957 - DNA, 25 bp, Canis familiaris
ccagtcaactgtgcccaaaggcctt

SEQ ID NO: 87958 - DNA, 25 bp, Canis familiaris
ccagtcagccaaaaccataacaccc

SEQ ID NO: 87959 - DNA, 25 bp, Canis familiaris
ccttctccactaaccagagagctgc

SEQ ID NO: 87960 - DNA, 25 bp, Canis familiaris
cctttctgccggacgcgagcagatg

SEQ ID NO: 87961 - DNA, 25 bp, Canis familiaris
cctttctgcagctctctgtgaagct

SEQ ID NO: 87962 - DNA, 25 bp, Canis familiaris
cctttctgggccttgtgctagtata

SEQ ID NO: 87963 - DNA, 25 bp, Canis familiaris
ccatttctgtgtgttaaagtaacag

SEQ ID NO: 87964 - DNA, 25 bp, Canis familiaris
ccttgttgctgttttgtactctata

SEQ ID NO: 87965 - DNA, 25 bp, Canis familiaris
ccttgtgatgttttgtatggctgta

SEQ ID NO: 87966 - DNA, 25 bp, Canis familiaris
ccttggatttcagtcattcgctctg

SEQ ID NO: 87967 - DNA, 25 bp, Canis familiaris
ccttggctcttgacacagggtctgg

SEQ ID NO: 87968 - DNA, 25 bp, Canis familiaris
ccttcagcttccagcagaggtgcat

SEQ ID NO: 87969 - DNA, 25 bp, Canis familiaris
ccatttcctccaacaaggtgcctta

SEQ ID NO: 87970 - DNA, 25 bp, Canis familiaris
ccttttgctctaactcgttctattt

SEQ ID NO: 87971 - DNA, 25 bp, Canis familiaris
ccattccgctataactcttgttttg

SEQ ID NO: 87972 - DNA, 25 bp, Canis familiaris
ccttcttccaaacttgtgttcttgc

SEQ ID NO: 87973 - DNA, 25 bp, Canis familiaris
ccttgccccaacagtattacttctg

SEQ ID NO: 87974 - DNA, 25 bp, Canis familiaris
ccttccaacaacatttccttgtctg

SEQ ID NO: 87975 - DNA, 25 bp, Canis familiaris
ccttcccacaactgatgttctttca

SEQ ID NO: 87976 - DNA, 25 bp, Canis familiaris
ccttccacccaaggatgggcttctt

SEQ ID NO: 87977 - DNA, 25 bp, Canis familiaris
ccttccagccaaggactgggacctt

SEQ ID NO: 87978 - DNA, 25 bp, Canis familiaris
ccttccgctcacaggctgtgagtcc

SEQ ID NO: 87979 - DNA, 25 bp, Canis familiaris
ccttcggcccagggtgtgatcctgg

SEQ ID NO: 87980 - DNA, 25 bp, Canis familiaris
ccttgggccacagggaggtgcctgt

SEQ ID NO: 87981 - DNA, 25 bp, Canis familiaris
ccttgggcagacacgagttttctta

SEQ ID NO: 87982 - DNA, 25 bp, Canis familiaris
ccattttgcagaattcgttttttga

SEQ ID NO: 87983 - DNA, 25 bp, Canis familiaris
ccttcttattcttcttttttgctga

SEQ ID NO: 87984 - DNA, 25 bp, Canis familiaris
ccttcatctttttctactcttttga

SEQ ID NO: 87985 - DNA, 25 bp, Canis familiaris
ccttcatctttttctactcttttga

SEQ ID NO: 87986 - DNA, 25 bp, Canis familiaris
ccttccttgtgtacatttctcttaa

SEQ ID NO: 87987 - DNA, 25 bp, Canis familiaris
ccttatctctgtgagtcttctctgt

SEQ ID NO: 87988 - DNA, 25 bp, Canis familiaris
cctttcctgggtaattcctgttcat

SEQ ID NO: 87989 - DNA, 25 bp, Canis familiaris
ccatgaccctcaggtttttggttct

SEQ ID NO: 87990 - DNA, 25 bp, Canis familiaris
ccatagcgcccagtgcttagtagtt

SEQ ID NO: 87991 - DNA, 25 bp, Canis familiaris
ccttggcttcatggcctaacacttt

SEQ ID NO: 87992 - DNA, 25 bp, Canis familiaris
ccattggctttctcccaaatattgg

SEQ ID NO: 87993 - DNA, 25 bp, Canis familiaris
ccttcccttactcccagaaagatgg

SEQ ID NO: 87994 - DNA, 25 bp, Canis familiaris
ccaccccaatgaccccaagaaagtg

SEQ ID NO: 87995 - DNA, 25 bp, Canis familiaris
ccttcccagatacccttaaagagtg

SEQ ID NO: 87996 - DNA, 25 bp, Canis familiaris
ccttcccgtcgtacttgcgacgagg

SEQ ID NO: 87997 - DNA, 25 bp, Canis familiaris
ccttcctagctcgttctttgggaga

SEQ ID NO: 87998 - DNA, 25 bp, Canis familiaris
cctttccgtcatatcttctggggtt

SEQ ID NO: 87999 - DNA, 25 bp, Canis familiaris
ccttcttcgtcagtatcgtggtggt

SEQ ID NO: 88000 - DNA, 25 bp, Canis familiaris
ccttctgtcgtgcttctttgaggtt

SEQ ID NO: 88001 - DNA, 25 bp, Canis familiaris
ccttttgcctcagttctattgcact

SEQ ID NO: 88002 - DNA, 25 bp, Canis familiaris
ccttatctacgcgtttttcatctgc

SEQ ID NO: 88003 - DNA, 25 bp, Canis familiaris
ccttcctatggagtcttggtttcac

SEQ ID NO: 88004 - DNA, 25 bp, Canis familiaris
ccttcccatggttatccgttatcac

SEQ ID NO: 88005 - DNA, 25 bp, Canis familiaris
ccttcccatgggtaatccgtgatca

SEQ ID NO: 88006 - DNA, 25 bp, Canis familiaris
ccttcccatgcgtgtgcatgcacgt

SEQ ID NO: 88007 - DNA, 25 bp, Canis familiaris
ccattcgtatgctcaggtccgattc

SEQ ID NO: 88008 - DNA, 25 bp, Canis familiaris
ccatccatcttcttgatttccagtt

SEQ ID NO: 88009 - DNA, 25 bp, Canis familiaris
ccttctcttgcccattttggaggcg

SEQ ID NO: 88010 - DNA, 25 bp, Canis familiaris
cctttttccctgtctgtatagtcag

SEQ ID NO: 88011 - DNA, 25 bp, Canis familiaris
ccttttccctcttgctgctataggg

SEQ ID NO: 88012 - DNA, 25 bp, Canis familiaris
ccttctgtcccagagcagctgagag

SEQ ID NO: 88013 - DNA, 25 bp, Canis familiaris
ccttgcgttccaggacatgagccag

SEQ ID NO: 88014 - DNA, 25 bp, Canis familiaris
ccttggtcagcctgagctgaactca

SEQ ID NO: 88015 - DNA, 25 bp, Canis familiaris
ccttctgtatctgctgagccaactc

SEQ ID NO: 88016 - DNA, 25 bp, Canis familiaris
ccttcgctacattgctcgcaaacac

SEQ ID NO: 88017 - DNA, 25 bp, Canis familiaris
ccttcagctatgagctctccaagct

SEQ ID NO: 88018 - DNA, 25 bp, Canis familiaris
ccttcatgcttactacccaagtggg

SEQ ID NO: 88019 - DNA, 25 bp, Canis familiaris
ccatttcctactaagccaacggcgc

SEQ ID NO: 88020 - DNA, 25 bp, Canis familiaris
ccattaagtccttactgataggggc

SEQ ID NO: 88021 - DNA, 25 bp, Canis familiaris
ccattcaagactccttcttgggccc

SEQ ID NO: 88022 - DNA, 25 bp, Canis familiaris
ccattcaagacttttccagggccac

SEQ ID NO: 88023 - DNA, 25 bp, Canis familiaris
ccatataagccctttgcgaggcggg

SEQ ID NO: 88024 - DNA, 25 bp, Canis familiaris
ccttattgccagcttgctggctagt

SEQ ID NO: 88025 - DNA, 25 bp, Canis familiaris
ccttcttggatgcctcttggtatgt

SEQ ID NO: 88026 - DNA, 25 bp, Canis familiaris
ccttttttgcactttctgacatgct

SEQ ID NO: 88027 - DNA, 25 bp, Canis familiaris
cctttatttacttactgtcactaat

SEQ ID NO: 88028 - DNA, 25 bp, Canis familiaris
ccttttttaaatacaatactgatag

SEQ ID NO: 88029 - DNA, 25 bp, Canis familiaris
cctttttttgagtttattctgattg

SEQ ID NO: 88030 - DNA, 25 bp, Canis familiaris
ccttgttctttgtttctatttgtct

SEQ ID NO: 88031 - DNA, 25 bp, Canis familiaris
ccttctcttttcttttctaagatct

SEQ ID NO: 88032 - DNA, 25 bp, Canis familiaris
ccttctctttgggtgacttaagact

SEQ ID NO: 88033 - DNA, 25 bp, Canis familiaris
ccttattcttccttcactttagaca

SEQ ID NO: 88034 - DNA, 25 bp, Canis familiaris
ccttttcttctgtcagcgtgttgaa

SEQ ID NO: 88035 - DNA, 25 bp, Canis familiaris
ccttattcttggccatccaattcca

SEQ ID NO: 88036 - DNA, 25 bp, Canis familiaris
ccttcacctctgaacatccaagttc

SEQ ID NO: 88037 - DNA, 25 bp, Canis familiaris
ccttatctatcacaatccacttgcc

SEQ ID NO: 88038 - DNA, 25 bp, Canis familiaris
ccttactcatcactttggaatggct

SEQ ID NO: 88039 - DNA, 25 bp, Canis familiaris
ccttagtccagcatgcttgtagtgc

SEQ ID NO: 88040 - DNA, 25 bp, Canis familiaris
ccttcgtcaagccatcggttgtgac

SEQ ID NO: 88041 - DNA, 25 bp, Canis familiaris
ccttggtgcctggacgagatctgtg

SEQ ID NO: 88042 - DNA, 25 bp, Canis familiaris
ccttggtaatggtaatgatctgtta

SEQ ID NO: 88043 - DNA, 25 bp, Canis familiaris
ccagggtattgggaacacgtttcag

SEQ ID NO: 88044 - DNA, 25 bp, Canis familiaris
ccagggggatgggtccaagtccgag

SEQ ID NO: 88045 - DNA, 25 bp, Canis familiaris
ccaggagaagggggtcaccatccgg

SEQ ID NO: 88046 - DNA, 25 bp, Canis familiaris
ccatgggaacggagtcaatcgatct

SEQ ID NO: 88047 - DNA, 25 bp, Canis familiaris
ccagggaacctgatttgtcgtcctc

SEQ ID NO: 88048 - DNA, 25 bp, Canis familiaris
ccacccacacctattggtggttctc

SEQ ID NO: 88049 - DNA, 25 bp, Canis familiaris
ccatcccgagctgaatatcggggtc

SEQ ID NO: 88050 - DNA, 25 bp, Canis familiaris
ccatccttacgcataaacgggctac

SEQ ID NO: 88051 - DNA, 25 bp, Canis familiaris
ccatcctctccgatacaaggtcatc

SEQ ID NO: 88052 - DNA, 25 bp, Canis familiaris
ccttatctggctgtacacgagtatc

SEQ ID NO: 88053 - DNA, 25 bp, Canis familiaris
ccatcaagtgggacttcaccagttc

SEQ ID NO: 88054 - DNA, 25 bp, Canis familiaris
ccatatattggccctgctaaaatag

SEQ ID NO: 88055 - DNA, 25 bp, Canis familiaris
ccttcttgcccaggctacaactgag

SEQ ID NO: 88056 - DNA, 25 bp, Canis familiaris
ccttctggccctgctggcaaagatg

SEQ ID NO: 88057 - DNA, 25 bp, Canis familiaris
gcgttctggtccacaccaaggaaag

SEQ ID NO: 88058 - DNA, 25 bp, Canis familiaris
gcctgagttttcacccaaggccaag

SEQ ID NO: 88059 - DNA, 25 bp, Canis familiaris
ccagctttttcaaccaagggcctgt

SEQ ID NO: 88060 - DNA, 25 bp, Canis familiaris
ccatctcttttcccagaataacctt

SEQ ID NO: 88061 - DNA, 25 bp, Canis familiaris
ccatattattaaccacctagccttc

SEQ ID NO: 88062 - DNA, 25 bp, Canis familiaris
ccaaatatgaaactacgtacgtctg

SEQ ID NO: 88063 - DNA, 25 bp, Canis familiaris
ccttttgctggacttcgaactgact

SEQ ID NO: 88064 - DNA, 25 bp, Canis familiaris
ccttggatgggacttgggacccctg

SEQ ID NO: 88065 - DNA, 25 bp, Canis familiaris
ccatcggtggtgtgtcggacccacc

SEQ ID NO: 88066 - DNA, 25 bp, Canis familiaris
ccatgtgtggggtgtcgtagtcgag

SEQ ID NO: 88067 - DNA, 25 bp, Canis familiaris
ccttgtgggtacctgcttatgtata

SEQ ID NO: 88068 - DNA, 25 bp, Canis familiaris
ccttctggatcaccttcatttgatt

SEQ ID NO: 88069 - DNA, 25 bp, Canis familiaris
ccttcgctgatctctgttgtatatt

SEQ ID NO: 88070 - DNA, 25 bp, Canis familiaris
ccttctctagaacgtcgcattctgt

SEQ ID NO: 88071 - DNA, 25 bp, Canis familiaris
ccttgtcagagagccctgtcatgtg

SEQ ID NO: 88072 - DNA, 25 bp, Canis familiaris
ccttgtcataagaggctccatggga

SEQ ID NO: 88073 - DNA, 25 bp, Canis familiaris
ccttgtctcacagtgggtccaggaa

SEQ ID NO: 88074 - DNA, 25 bp, Canis familiaris
ccttccccagcgtttcaagatggat

SEQ ID NO: 88075 - DNA, 25 bp, Canis familiaris
ccttcctcctgcgttgaaagttgag

SEQ ID NO: 88076 - DNA, 25 bp, Canis familiaris
ccttacacagtgcctgtgccgatgt

SEQ ID NO: 88077 - DNA, 25 bp, Canis familiaris
ccttcacctgtgttgactccatgaa

SEQ ID NO: 88078 - DNA, 25 bp, Canis familiaris
ccttctcatctgctgagacccatgc

SEQ ID NO: 88079 - DNA, 25 bp, Canis familiaris
ccttcagctcagggcatgatcccag

SEQ ID NO: 88080 - DNA, 25 bp, Canis familiaris
ccttcagctcagggcatgatcccag

SEQ ID NO: 88081 - DNA, 25 bp, Canis familiaris
ccttcgctgagaagcgtcccggaaa

SEQ ID NO: 88082 - DNA, 25 bp, Canis familiaris
ccttctgtgagtcggaccctgagag

SEQ ID NO: 88083 - DNA, 25 bp, Canis familiaris
ccttcgattgcacggctaccatgaa

SEQ ID NO: 88084 - DNA, 25 bp, Canis familiaris
ccttcgactgcacggccaccatgaa

SEQ ID NO: 88085 - DNA, 25 bp, Canis familiaris
ccttcaaccaatcgcagacgcagta

SEQ ID NO: 88086 - DNA, 25 bp, Canis familiaris
ccttcgactcttccagacggatgat

SEQ ID NO: 88087 - DNA, 25 bp, Canis familiaris
ccttcctctctccctatgaggagat

SEQ ID NO: 88088 - DNA, 25 bp, Canis familiaris
ccttcctcttctcctaaatgacaaa

SEQ ID NO: 88089 - DNA, 25 bp, Canis familiaris
ccttctcccctttgacaataattgc

SEQ ID NO: 88090 - DNA, 25 bp, Canis familiaris
ccttcccacctgaaagatctactcg

SEQ ID NO: 88091 - DNA, 25 bp, Canis familiaris
ccatatcccactaattttctaccgg

SEQ ID NO: 88092 - DNA, 25 bp, Canis familiaris
ccattccaactccactgtggctaca

SEQ ID NO: 88093 - DNA, 25 bp, Canis familiaris
ccttctcacttccacagaactaaaa

SEQ ID NO: 88094 - DNA, 25 bp, Canis familiaris
ccttgccacgttccagctaataata

SEQ ID NO: 88095 - DNA, 25 bp, Canis familiaris
ccttggggatggaatgcataataat

SEQ ID NO: 88096 - DNA, 25 bp, Canis familiaris
ccttgggccggaatcatccagcaag

SEQ ID NO: 88097 - DNA, 25 bp, Canis familiaris
ccatttccctggtgagccagctagc

SEQ ID NO: 88098 - DNA, 25 bp, Canis familiaris
ccatttggcctggattaatacccct

SEQ ID NO: 88099 - DNA, 25 bp, Canis familiaris
ccatggggccggaaaaaccgcacat

SEQ ID NO: 88100 - DNA, 25 bp, Canis familiaris
ccaggggcagcccgataaaggccct

SEQ ID NO: 88101 - DNA, 25 bp, Canis familiaris
ccttggcactggctgaataaggcct

SEQ ID NO: 88102 - DNA, 25 bp, Canis familiaris
ccttgccacttgggagaccaacact

SEQ ID NO: 88103 - DNA, 25 bp, Canis familiaris
ccttctgactaagacaccatacctt

SEQ ID NO: 88104 - DNA, 25 bp, Canis familiaris
ccttctgcctagtacaaacaagcgt

SEQ ID NO: 88105 - DNA, 25 bp, Canis familiaris
ccttctgcctatacaacaagctagc

SEQ ID NO: 88106 - DNA, 25 bp, Canis familiaris
ccttgtcctatttccaatctatgcc

SEQ ID NO: 88107 - DNA, 25 bp, Canis familiaris
ccttgcatcgtcattccaattctgc

SEQ ID NO: 88108 - DNA, 25 bp, Canis familiaris
ccttcacagatttgcccagtctgtc

SEQ ID NO: 88109 - DNA, 25 bp, Canis familiaris
ccttcgtatatcccaggactgtctc

SEQ ID NO: 88110 - DNA, 25 bp, Canis familiaris
ccttcccatatccaagctatcttat

SEQ ID NO: 88111 - DNA, 25 bp, Canis familiaris
ccttacacattccttgcatattata

SEQ ID NO: 88112 - DNA, 25 bp, Canis familiaris
ccttgacacactccctcagaaagag

SEQ ID NO: 88113 - DNA, 25 bp, Canis familiaris
ccttagcacctgacactacatgaca

SEQ ID NO: 88114 - DNA, 25 bp, Canis familiaris
ccttcagagcacacacgtgcgcaca

SEQ ID NO: 88115 - DNA, 25 bp, Canis familiaris
ccttcagagcacacacgtgcgcaca

SEQ ID NO: 88116 - DNA, 25 bp, Canis familiaris
ccttcatgtcacgcattgctgtaac

SEQ ID NO: 88117 - DNA, 25 bp, Canis familiaris
ccttcatgttgcacactctgtaaca

SEQ ID NO: 88118 - DNA, 25 bp, Canis familiaris
ccattcatgtcatttctcggtacac

SEQ ID NO: 88119 - DNA, 25 bp, Canis familiaris
ccatcatttctttcaggtggacaat

SEQ ID NO: 88120 - DNA, 25 bp, Canis familiaris
ccatcttcattgcccaagtcaacaa

SEQ ID NO: 88121 - DNA, 25 bp, Canis familiaris
ccatcagtctttccaattctacaaa

SEQ ID NO: 88122 - DNA, 25 bp, Canis familiaris
ccataccttgcaccatataccaaaa

SEQ ID NO: 88123 - DNA, 25 bp, Canis familiaris
ccatggttatccgttatcacaaaga

SEQ ID NO: 88124 - DNA, 25 bp, Canis familiaris
ccataggctattagggacactatag

SEQ ID NO: 88125 - DNA, 25 bp, Canis familiaris
ccatagccatttagggacactaaag

SEQ ID NO: 88126 - DNA, 25 bp, Canis familiaris
ccatcgaatcgcttgggcatcaatg

SEQ ID NO: 88127 - DNA, 25 bp, Canis familiaris
ccatcgcaactctccaggagcaggt

SEQ ID NO: 88128 - DNA, 25 bp, Canis familiaris
ccatatcaatcttcccaagtctgga

SEQ ID NO: 88129 - DNA, 25 bp, Canis familiaris
ccttcctgctcccagaagtctagaa

SEQ ID NO: 88130 - DNA, 25 bp, Canis familiaris
ccattcttcttcatacagtatagaa

SEQ ID NO: 88131 - DNA, 25 bp, Canis familiaris
ccttgtccatgtctaagcacaggga

SEQ ID NO: 88132 - DNA, 25 bp, Canis familiaris
ccttggcgtgtgctacgctcagagg

SEQ ID NO: 88133 - DNA, 25 bp, Canis familiaris
ccttggctgtggctgtagcccagcc

SEQ ID NO: 88134 - DNA, 25 bp, Canis familiaris
ccttgtggtgggctctatgccaggc

SEQ ID NO: 88135 - DNA, 25 bp, Canis familiaris
ccataggaggggcccgagccaggaa

SEQ ID NO: 88136 - DNA, 25 bp, Canis familiaris
ccataagaatgtacccgaccttgag

SEQ ID NO: 88137 - DNA, 25 bp, Canis familiaris
ccattaagttcccgtgaccatactc

SEQ ID NO: 88138 - DNA, 25 bp, Canis familiaris
gccctaatttagggtgacactatta

SEQ ID NO: 88139 - DNA, 25 bp, Canis familiaris
gcccgagatttttggtccaccaatc

SEQ ID NO: 88140 - DNA, 25 bp, Canis familiaris
ccaggagagtaatggtccaacagac

SEQ ID NO: 88141 - DNA, 25 bp, Canis familiaris
ccagcttaaaatttcccaacgaatg

SEQ ID NO: 88142 - DNA, 25 bp, Canis familiaris
ccagtacaaactctccaattccgag

SEQ ID NO: 88143 - DNA, 25 bp, Canis familiaris
ccaataaagactaaccaagcctcaa

SEQ ID NO: 88144 - DNA, 25 bp, Canis familiaris
ccaccaaggcagcacctaagccaaa

SEQ ID NO: 88145 - DNA, 25 bp, Canis familiaris
ccaccaagggatgctctagttccac

SEQ ID NO: 88146 - DNA, 25 bp, Canis familiaris
ccatccaatctgttccttaaaaagc

SEQ ID NO: 88147 - DNA, 25 bp, Canis familiaris
ccatccattcttcacttaccgaagc

SEQ ID NO: 88148 - DNA, 25 bp, Canis familiaris
ccatccaataatcactaacggccag

SEQ ID NO: 88149 - DNA, 25 bp, Canis familiaris
ccaccgctaagtattacccacagac

SEQ ID NO: 88150 - DNA, 25 bp, Canis familiaris
gcctccctcaaggagttaactaaca

SEQ ID NO: 88151 - DNA, 25 bp, Canis familiaris
ccttcccaacacacgaacatgaaca

SEQ ID NO: 88152 - DNA, 25 bp, Canis familiaris
ccttcccaaacccttattgagacag

SEQ ID NO: 88153 - DNA, 25 bp, Canis familiaris
ccttccaaaacccttgttgagacag

SEQ ID NO: 88154 - DNA, 25 bp, Canis familiaris
ccttctgtgacatttccttttggac

SEQ ID NO: 88155 - DNA, 25 bp, Canis familiaris
ccttggtacctcgatcttcattgga

SEQ ID NO: 88156 - DNA, 25 bp, Canis familiaris
ccttgaggtcctgtcccatgggaca

SEQ ID NO: 88157 - DNA, 25 bp, Canis familiaris
ccattcagtgtcgggtcaccaccga

SEQ ID NO: 88158 - DNA, 25 bp, Canis familiaris
ccatcttatatcaggtcctgaccca

SEQ ID NO: 88159 - DNA, 25 bp, Canis familiaris
ccttgtcagtcaatgttcactaccc

SEQ ID NO: 88160 - DNA, 25 bp, Canis familiaris
ccatagccgacagggtgacttaccc

SEQ ID NO: 88161 - DNA, 25 bp, Canis familiaris
ccatcggcggcaagatcgacttaca

SEQ ID NO: 88162 - DNA, 25 bp, Canis familiaris
ccatcgtctacaagagcagcattga

SEQ ID NO: 88163 - DNA, 25 bp, Canis familiaris
ccatcggtgatcaaggactttcatg

SEQ ID NO: 88164 - DNA, 25 bp, Canis familiaris
ccatcttggtcaaggacacccaggc

SEQ ID NO: 88165 - DNA, 25 bp, Canis familiaris
ccatcttggatctgagccggtcgag

SEQ ID NO: 88166 - DNA, 25 bp, Canis familiaris
ccatctaggatctgtcaacgctctg

SEQ ID NO: 88167 - DNA, 25 bp, Canis familiaris
ccttcggatttgaagccgctgcatg

SEQ ID NO: 88168 - DNA, 25 bp, Canis familiaris
ccttctcgggttagccagatcatgg

SEQ ID NO: 88169 - DNA, 25 bp, Canis familiaris
ccttcctgggtcggagagctgtgtg

SEQ ID NO: 88170 - DNA, 25 bp, Canis familiaris
ccattctgttggcggagtctggggc

SEQ ID NO: 88171 - DNA, 25 bp, Canis familiaris
ccattctgtgggaggatactttttg

SEQ ID NO: 88172 - DNA, 25 bp, Canis familiaris
ccttcttgttttctcactttgatat

SEQ ID NO: 88173 - DNA, 25 bp, Canis familiaris
ccttgcttttttcacatgttttatg

SEQ ID NO: 88174 - DNA, 25 bp, Canis familiaris
ccttgtgtttttgttatgatttgtg

SEQ ID NO: 88175 - DNA, 25 bp, Canis familiaris
ccattgctgtcactttgtttctatt

SEQ ID NO: 88176 - DNA, 25 bp, Canis familiaris
ccatatctacgttctgttatttcag

SEQ ID NO: 88177 - DNA, 25 bp, Canis familiaris
ccttctactttggatgtttctatat

SEQ ID NO: 88178 - DNA, 25 bp, Canis familiaris
ccttgctactttactgataccttta

SEQ ID NO: 88179 - DNA, 25 bp, Canis familiaris
ccttgctcctctttctgagaatttc

SEQ ID NO: 88180 - DNA, 25 bp, Canis familiaris
ccttcttgctcccattgatgaattt

SEQ ID NO: 88181 - DNA, 25 bp, Canis familiaris
ccttgcttgcctctgtatatagtgt

SEQ ID NO: 88182 - DNA, 25 bp, Canis familiaris
ccatttcgcccagttacaggatgct

SEQ ID NO: 88183 - DNA, 25 bp, Canis familiaris
ccttccctcctggaacagtgagcta

SEQ ID NO: 88184 - DNA, 25 bp, Canis familiaris
ccttccttcctgggtatggagtcct

SEQ ID NO: 88185 - DNA, 25 bp, Canis familiaris
ccttctttcctggggatggaatcat

SEQ ID NO: 88186 - DNA, 25 bp, Canis familiaris
ccttcttctcacccagggatactaa

SEQ ID NO: 88187 - DNA, 25 bp, Canis familiaris
ccattttccccaccgtgtaatgaga

SEQ ID NO: 88188 - DNA, 25 bp, Canis familiaris
ccatcttccactgaccagactaaac

SEQ ID NO: 88189 - DNA, 25 bp, Canis familiaris
ccatcttccactgaccagactaaac

SEQ ID NO: 88190 - DNA, 25 bp, Canis familiaris
ccatcttcgagttctccagagctat

SEQ ID NO: 88191 - DNA, 25 bp, Canis familiaris
ccatgttcttgtttcgcgattgtct

SEQ ID NO: 88192 - DNA, 25 bp, Canis familiaris
ccatgcttgcttttgtcatctgggt

SEQ ID NO: 88193 - DNA, 25 bp, Canis familiaris
ccatcactgcttcaacatgctgcac

SEQ ID NO: 88194 - DNA, 25 bp, Canis familiaris
ccattgtgcatctactagagtgcat

SEQ ID NO: 88195 - DNA, 25 bp, Canis familiaris
ccattagcatctactcagggcagtt

SEQ ID NO: 88196 - DNA, 25 bp, Canis familiaris
ccaggacatgcaactcagcttctgt

SEQ ID NO: 88197 - DNA, 25 bp, Canis familiaris
ccacgactaatcctgcttttctgga

SEQ ID NO: 88198 - DNA, 25 bp, Canis familiaris
ccacgagaattctgttttcttaagg

SEQ ID NO: 88199 - DNA, 25 bp, Canis familiaris
ccacgtagactcagttcttctcgga

SEQ ID NO: 88200 - DNA, 25 bp, Canis familiaris
ccatcttagagggttctttcttgaa

SEQ ID NO: 88201 - DNA, 25 bp, Canis familiaris
ccagaacaagcgcttctacctggac

SEQ ID NO: 88202 - DNA, 25 bp, Canis familiaris
ccatcaaccgccagatcaacctgga

SEQ ID NO: 88203 - DNA, 25 bp, Canis familiaris
ccatcaaccgccagatcaacctgga

SEQ ID NO: 88204 - DNA, 25 bp, Canis familiaris
ccatcaaccacctagacttactgta

SEQ ID NO: 88205 - DNA, 25 bp, Canis familiaris
ccatatacacaccctgatttttgaa

SEQ ID NO: 88206 - DNA, 25 bp, Canis familiaris
ccatacacaccaccttatcaatatc

SEQ ID NO: 88207 - DNA, 25 bp, Canis familiaris
ccaggaaacaggttatgaccacttt

SEQ ID NO: 88208 - DNA, 25 bp, Canis familiaris
tcacacgtaacggttaccgtctgtt

SEQ ID NO: 88209 - DNA, 25 bp, Canis familiaris
ccacggaactgggaaggctgttttg

SEQ ID NO: 88210 - DNA, 25 bp, Canis familiaris
ccagttggttgggacagtgctttgt

SEQ ID NO: 88211 - DNA, 25 bp, Canis familiaris
ccatcgtggccatctttggctttgt

SEQ ID NO: 88212 - DNA, 25 bp, Canis familiaris
ccacgggccaggattggactcggag

SEQ ID NO: 88213 - DNA, 25 bp, Canis familiaris
ccacctgggtggaagttaatccgag

SEQ ID NO: 88214 - DNA, 25 bp, Canis familiaris
ccacttgggtggaggccctactggt

SEQ ID NO: 88215 - DNA, 25 bp, Canis familiaris
ccagcgggggtgagtttctactcct

SEQ ID NO: 88216 - DNA, 25 bp, Canis familiaris
ccataaggggtgagcctgccttctc

SEQ ID NO: 88217 - DNA, 25 bp, Canis familiaris
ccatcagggtgagtgggccaccccc

SEQ ID NO: 88218 - DNA, 25 bp, Canis familiaris
ccatagggaagcacaggcacccacc

SEQ ID NO: 88219 - DNA, 25 bp, Canis familiaris
ccaggggaactcttggaaccaacat

SEQ ID NO: 88220 - DNA, 25 bp, Canis familiaris
ccaggaaaaccattaaggcaaccag

SEQ ID NO: 88221 - DNA, 25 bp, Canis familiaris
ccagcccagtttctaggagcagacc

SEQ ID NO: 88222 - DNA, 25 bp, Canis familiaris
ccaggaagtttggttgtggacactc

SEQ ID NO: 88223 - DNA, 25 bp, Canis familiaris
gccttcaagttggttctgtggccct

SEQ ID NO: 88224 - DNA, 25 bp, Canis familiaris
ccattcacgttggcttgctgtgtag

SEQ ID NO: 88225 - DNA, 25 bp, Canis familiaris
ccttgaagtcgactctgctgtgtgg

SEQ ID NO: 88226 - DNA, 25 bp, Canis familiaris
ccttgaggacgcgctgcattgtgcg

SEQ ID NO: 88227 - DNA, 25 bp, Canis familiaris
ccatagggtcctgcagattcatcca

SEQ ID NO: 88228 - DNA, 25 bp, Canis familiaris
ccatagaagctggccaaactcctcc

SEQ ID NO: 88229 - DNA, 25 bp, Canis familiaris
ccatacaggtgtgatttccccagct

SEQ ID NO: 88230 - DNA, 25 bp, Canis familiaris
ccatcagaggttgatcttccggcaa

SEQ ID NO: 88231 - DNA, 25 bp, Canis familiaris
ccatcgagatgtgggaccctgcggc

SEQ ID NO: 88232 - DNA, 25 bp, Canis familiaris
ccatcagtaggtcattgcgcaggtg

SEQ ID NO: 88233 - DNA, 25 bp, Canis familiaris
ccataggggatctagccagggcttg

SEQ ID NO: 88234 - DNA, 25 bp, Canis familiaris
ccttgcggcagtccctaggacatta

SEQ ID NO: 88235 - DNA, 25 bp, Canis familiaris
ccttgggctacgccttaactgtcaa

SEQ ID NO: 88236 - DNA, 25 bp, Canis familiaris
ccttggtgcctctgcttagaatgag

SEQ ID NO: 88237 - DNA, 25 bp, Canis familiaris
ccttgcttccctagtctgcaaagca

SEQ ID NO: 88238 - DNA, 25 bp, Canis familiaris
ccttgtcccctggggcaggacaggg

SEQ ID NO: 88239 - DNA, 25 bp, Canis familiaris
ccattcccaccgaggcagaaaggcc

SEQ ID NO: 88240 - DNA, 25 bp, Canis familiaris
ccttcccacacaacagtcacagaag

SEQ ID NO: 88241 - DNA, 25 bp, Canis familiaris
ccttccagcctatcagacaccaggc

SEQ ID NO: 88242 - DNA, 25 bp, Canis familiaris
ccattccacccatcaaaccagtgaa

SEQ ID NO: 88243 - DNA, 25 bp, Canis familiaris
ccttctctcccatgtatttctggaa

SEQ ID NO: 88244 - DNA, 25 bp, Canis familiaris
ccttccccattatctgttctagaat

SEQ ID NO: 88245 - DNA, 25 bp, Canis familiaris
ccttcccagcataaccattttagaa

SEQ ID NO: 88246 - DNA, 25 bp, Canis familiaris
ccttctctcctaactgcatgttgaa

SEQ ID NO: 88247 - DNA, 25 bp, Canis familiaris
ccttctgcccagagcatgatgctgg

SEQ ID NO: 88248 - DNA, 25 bp, Canis familiaris
ccttctgtcctgttcatgatgtgtg

SEQ ID NO: 88249 - DNA, 25 bp, Canis familiaris
ccttcctcctgaccagagtggatag

SEQ ID NO: 88250 - DNA, 25 bp, Canis familiaris
ccttctcacctgctgccaggtgaca

SEQ ID NO: 88251 - DNA, 25 bp, Canis familiaris
ccttcccgcggcacagagagacagg

SEQ ID NO: 88252 - DNA, 25 bp, Canis familiaris
ccatcgccccggagcagaggagggt

SEQ ID NO: 88253 - DNA, 25 bp, Canis familiaris
ccatctgcgtcctgtacgaggaggc

SEQ ID NO: 88254 - DNA, 25 bp, Canis familiaris
ccatctcgagcccagggcgggattc

SEQ ID NO: 88255 - DNA, 25 bp, Canis familiaris
ccatccatagtacgggccagcagtt

SEQ ID NO: 88256 - DNA, 25 bp, Canis familiaris
ccacataagatacggagtacatcct

SEQ ID NO: 88257 - DNA, 25 bp, Canis familiaris
ccatctcttgcgtggagctacattt

SEQ ID NO: 88258 - DNA, 25 bp, Canis familiaris
ccattcttgcgaggatacttttgcc

SEQ ID NO: 88259 - DNA, 25 bp, Canis familiaris
ccttctctgtaattaattcacctgc

SEQ ID NO: 88260 - DNA, 25 bp, Canis familiaris
ccttctctgtattctttaagccata

SEQ ID NO: 88261 - DNA, 25 bp, Canis familiaris
ccttcctgtttacttatagcatcag

SEQ ID NO: 88262 - DNA, 25 bp, Canis familiaris
ccttcccttatacatctcacataag

SEQ ID NO: 88263 - DNA, 25 bp, Canis familiaris
ccattctcttacaccatacacaaag

SEQ ID NO: 88264 - DNA, 25 bp, Canis familiaris
ccttctcgtagagctaacatcagag

SEQ ID NO: 88265 - DNA, 25 bp, Canis familiaris
ccttctcgtgtgctcatgttacagg

SEQ ID NO: 88266 - DNA, 25 bp, Canis familiaris
ccattccttgctctcattaatcaag

SEQ ID NO: 88267 - DNA, 25 bp, Canis familiaris
ccattccattgaccttctcttaagg

SEQ ID NO: 88268 - DNA, 25 bp, Canis familiaris
ccttgctcaggacccctgttaaggg

SEQ ID NO: 88269 - DNA, 25 bp, Canis familiaris
ccatgcagccaaaatctcctttaag

SEQ ID NO: 88270 - DNA, 25 bp, Canis familiaris
ccatcaccatgaatgtcccttactg

SEQ ID NO: 88271 - DNA, 25 bp, Canis familiaris
ccatcacctacaagcccgtgaagca

SEQ ID NO: 88272 - DNA, 25 bp, Canis familiaris
ccatcacgtgtcagctcgcagtgaa

SEQ ID NO: 88273 - DNA, 25 bp, Canis familiaris
ccatctccttcactgcagggtgtga

SEQ ID NO: 88274 - DNA, 25 bp, Canis familiaris
ccatgctactctctcggttataaga

SEQ ID NO: 88275 - DNA, 25 bp, Canis familiaris
ccatctcccaggtggttctgacata

SEQ ID NO: 88276 - DNA, 25 bp, Canis familiaris
ccatcttccaggagcgagatccctc

SEQ ID NO: 88277 - DNA, 25 bp, Canis familiaris
ccatcttccgcgagaggtactatga

SEQ ID NO: 88278 - DNA, 25 bp, Canis familiaris
ccatcttccgcgagaaggactatga

SEQ ID NO: 88279 - DNA, 25 bp, Canis familiaris
gcctgcccttccggaaggattttgt

SEQ ID NO: 88280 - DNA, 25 bp, Canis familiaris
ccatagccttcccaaaagttgcctt

SEQ ID NO: 88281 - DNA, 25 bp, Canis familiaris
ccatcgtcctttctaagtacctgga

SEQ ID NO: 88282 - DNA, 25 bp, Canis familiaris
ccaggtcctcttgaaagtccagtag

SEQ ID NO: 88283 - DNA, 25 bp, Canis familiaris
ccattctccgctttaacgtttgtag

SEQ ID NO: 88284 - DNA, 25 bp, Canis familiaris
ccattccacagttgtaaatgctagt

SEQ ID NO: 88285 - DNA, 25 bp, Canis familiaris
ccttctgcactgtctctatgattgt

SEQ ID NO: 88286 - DNA, 25 bp, Canis familiaris
ccttctgcatctcttcagcaattgc

SEQ ID NO: 88287 - DNA, 25 bp, Canis familiaris
ccttgctgcttgagctgcagaagct

SEQ ID NO: 88288 - DNA, 25 bp, Canis familiaris
ccttgcgctgctacctgaaagatgt

SEQ ID NO: 88289 - DNA, 25 bp, Canis familiaris
ccttcgtgcattcatgcacacacac

SEQ ID NO: 88290 - DNA, 25 bp, Canis familiaris
ccttgtgtcagttcaaccagcatca

SEQ ID NO: 88291 - DNA, 25 bp, Canis familiaris
ccattgagctagcgacaccgacagg

SEQ ID NO: 88292 - DNA, 25 bp, Canis familiaris
ccattcagtagccacaagcccaatg

SEQ ID NO: 88293 - DNA, 25 bp, Canis familiaris
ccatccaaagccttctaccaatgag

SEQ ID NO: 88294 - DNA, 25 bp, Canis familiaris
ccatctagaatgtcctttcccagat

SEQ ID NO: 88295 - DNA, 25 bp, Canis familiaris
ccattatgaatgtgcctctatctct

SEQ ID NO: 88296 - DNA, 25 bp, Canis familiaris
ccattggcaatgagcggttccgctg

SEQ ID NO: 88297 - DNA, 25 bp, Canis familiaris
ccatcggccgatcgcggaatcagtg

SEQ ID NO: 88298 - DNA, 25 bp, Canis familiaris
ccatagactgcgcaccagtgtcagg

SEQ ID NO: 88299 - DNA, 25 bp, Canis familiaris
ccttgctgctgggcaacaggtcagg

SEQ ID NO: 88300 - DNA, 25 bp, Canis familiaris
ccttgctgctgggcacaggcaggag

SEQ ID NO: 88301 - DNA, 25 bp, Canis familiaris
ccatctcctgggcctggcaggaatg

SEQ ID NO: 88302 - DNA, 25 bp, Canis familiaris
ccatcatgactcgttctgtaggaga

SEQ ID NO: 88303 - DNA, 25 bp, Canis familiaris
ccatcttgagcccatctgtagaaat

SEQ ID NO: 88304 - DNA, 25 bp, Canis familiaris
ccatcttcccaatatagtatacggc

SEQ ID NO: 88305 - DNA, 25 bp, Canis familiaris
ccattgttccctcaaagatacccat

SEQ ID NO: 88306 - DNA, 25 bp, Canis familiaris
ccagagtatccgcccaaaaggccga

SEQ ID NO: 88307 - DNA, 25 bp, Canis familiaris
ccatggtacttgcccctagaaggga

SEQ ID NO: 88308 - DNA, 25 bp, Canis familiaris
ccatccaactggtctccttgaaagg

SEQ ID NO: 88309 - DNA, 25 bp, Canis familiaris
ccatccagactgggaccttggaatg

SEQ ID NO: 88310 - DNA, 25 bp, Canis familiaris
ccatcgagaagctcgccgtggaagc

SEQ ID NO: 88311 - DNA, 25 bp, Canis familiaris
ccttgtaagcttcgctgtgtcggag

SEQ ID NO: 88312 - DNA, 25 bp, Canis familiaris
ccatggtaatcctgctcagtacgag

SEQ ID NO: 88313 - DNA, 25 bp, Canis familiaris
ccatatgtgcagtctaggatcaata

SEQ ID NO: 88314 - DNA, 25 bp, Canis familiaris
ccatcaagcagctgagccagaatac

SEQ ID NO: 88315 - DNA, 25 bp, Canis familiaris
ccatccagcactgagtcatcgttcc

SEQ ID NO: 88316 - DNA, 25 bp, Canis familiaris
ccattagcactggcacatcggactc

SEQ ID NO: 88317 - DNA, 25 bp, Canis familiaris
ccatataccagcgatgacgagacgc

SEQ ID NO: 88318 - DNA, 25 bp, Canis familiaris
ccattcccccagtctggacgactgg

SEQ ID NO: 88319 - DNA, 25 bp, Canis familiaris
ccattggtgaccactgggtgacagg

SEQ ID NO: 88320 - DNA, 25 bp, Canis familiaris
ccagggtagccctggttgctctgtg

SEQ ID NO: 88321 - DNA, 25 bp, Canis familiaris
ccaggggaaggatggccctctgggc

SEQ ID NO: 88322 - DNA, 25 bp, Canis familiaris
ccagtgacaagtgtaagccccgggc

SEQ ID NO: 88323 - DNA, 25 bp, Canis familiaris
ccttgaaagtaattccccaccagca

SEQ ID NO: 88324 - DNA, 25 bp, Canis familiaris
ccttgcatattataatcctcctaca

SEQ ID NO: 88325 - DNA, 25 bp, Canis familiaris
ccagatgatttttcagacttatttg

SEQ ID NO: 88326 - DNA, 25 bp, Canis familiaris
ccaggatccagaaaccccatgattg

SEQ ID NO: 88327 - DNA, 25 bp, Canis familiaris
ccatactcacaaaacgccgcatgtt

SEQ ID NO: 88328 - DNA, 25 bp, Canis familiaris
ccagacttcaataaaacgtgctttt

SEQ ID NO: 88329 - DNA, 25 bp, Canis familiaris
ccagacttcaataaaacgtgctttt

SEQ ID NO: 88330 - DNA, 25 bp, Canis familiaris
ccaagccttttctccagggctttga

SEQ ID NO: 88331 - DNA, 25 bp, Canis familiaris
ccaaggactttggagccggtgttgt

SEQ ID NO: 88332 - DNA, 25 bp, Canis familiaris
ccagagggctttgcccgagctgtgc

SEQ ID NO: 88333 - DNA, 25 bp, Canis familiaris
ccaggatgttttgcccagcctgggg

SEQ ID NO: 88334 - DNA, 25 bp, Canis familiaris
ccaggaccgctatcacgacctggga

SEQ ID NO: 88335 - DNA, 25 bp, Canis familiaris
ccagcaaatcggtgcactgatcgct

SEQ ID NO: 88336 - DNA, 25 bp, Canis familiaris
ccataaacgatgccgactggcgatg

SEQ ID NO: 88337 - DNA, 25 bp, Canis familiaris
ccatcaatatcttggtcagacctga

SEQ ID NO: 88338 - DNA, 25 bp, Canis familiaris
ccatagagtttgctgacaccatcaa

SEQ ID NO: 88339 - DNA, 25 bp, Canis familiaris
ccatgtactcttggtacaccaaccc

SEQ ID NO: 88340 - DNA, 25 bp, Canis familiaris
ccatgaccctgggtacccatactat

SEQ ID NO: 88341 - DNA, 25 bp, Canis familiaris
ccagacggctggggagccgatcctc

SEQ ID NO: 88342 - DNA, 25 bp, Canis familiaris
ccatcctgggatggtgagaagacca

SEQ ID NO: 88343 - DNA, 25 bp, Canis familiaris
ccatcctgcagggccagactaagga

SEQ ID NO: 88344 - DNA, 25 bp, Canis familiaris
ccatctggatgtcacatggacaagg

SEQ ID NO: 88345 - DNA, 25 bp, Canis familiaris
ccttgggtcagagtggctgcagcag

SEQ ID NO: 88346 - DNA, 25 bp, Canis familiaris
ccttcgccaagagtctgcggcagaa

SEQ ID NO: 88347 - DNA, 25 bp, Canis familiaris
ccttcctgcagaatgtgctcaacaa

SEQ ID NO: 88348 - DNA, 25 bp, Canis familiaris
ccttccagcagatgtggatcagcaa

SEQ ID NO: 88349 - DNA, 25 bp, Canis familiaris
ccttccagagaggcatggcccgaag

SEQ ID NO: 88350 - DNA, 25 bp, Canis familiaris
ccttccagggccagagctatgagag

SEQ ID NO: 88351 - DNA, 25 bp, Canis familiaris
ccatgcccgggaggggcctgtgaac

SEQ ID NO: 88352 - DNA, 25 bp, Canis familiaris
ccagcccaggggaccagagggatca

SEQ ID NO: 88353 - DNA, 25 bp, Canis familiaris
ccaccacaggatcaacacgtttcgt

SEQ ID NO: 88354 - DNA, 25 bp, Canis familiaris
ccatccacagccaccattggtgtat

SEQ ID NO: 88355 - DNA, 25 bp, Canis familiaris
ccatctatgccgaacctatgctggt

SEQ ID NO: 88356 - DNA, 25 bp, Canis familiaris
ccatctataggtaccacagtatgtg

SEQ ID NO: 88357 - DNA, 25 bp, Canis familiaris
ccatctgatatgcatttagtctaaa

SEQ ID NO: 88358 - DNA, 25 bp, Canis familiaris
ccattgaatgcgacgagtgtgggaa

SEQ ID NO: 88359 - DNA, 25 bp, Canis familiaris
ccattgttggagacagctgtgagga

SEQ ID NO: 88360 - DNA, 25 bp, Canis familiaris
ccaggtgtgggtgtgaagtcaggaa

SEQ ID NO: 88361 - DNA, 25 bp, Canis familiaris
ccaggcggagtcgaggacgccgctg

SEQ ID NO: 88362 - DNA, 25 bp, Canis familiaris
ccatccactgagaccgaagccttgg

SEQ ID NO: 88363 - DNA, 25 bp, Canis familiaris
ccatccctttgtggaagctcctggg

SEQ ID NO: 88364 - DNA, 25 bp, Canis familiaris
ccatcagtttggagacctcaccggg

SEQ ID NO: 88365 - DNA, 25 bp, Canis familiaris
ccagcgtttcgtttttcaactagat

SEQ ID NO: 88366 - DNA, 25 bp, Canis familiaris
gcctgcttttttgtacaaacttgtc

SEQ ID NO: 88367 - DNA, 25 bp, Canis familiaris
ccattatgttttggtactaagggct

SEQ ID NO: 88368 - DNA, 25 bp, Canis familiaris
ccattgtcttattctgtgacggggg

SEQ ID NO: 88369 - DNA, 25 bp, Canis familiaris
ccattccttcaaggtgggaagggag

SEQ ID NO: 88370 - DNA, 25 bp, Canis familiaris
ccttgctccagcacgtgtgggatgg

SEQ ID NO: 88371 - DNA, 25 bp, Canis familiaris
ccttgcccatgtgcgagtctgggga

SEQ ID NO: 88372 - DNA, 25 bp, Canis familiaris
ccttcccttagctgtgcatctagga

SEQ ID NO: 88373 - DNA, 25 bp, Canis familiaris
ccattcctccaactggctgttagag

SEQ ID NO: 88374 - DNA, 25 bp, Canis familiaris
ccatccgaccaatgtctgtaaagtg

SEQ ID NO: 88375 - DNA, 25 bp, Canis familiaris
ccaggcgaagcgtgtcttcaaccgt

SEQ ID NO: 88376 - DNA, 25 bp, Canis familiaris
ccatggccttgttttcttgaatcac

SEQ ID NO: 88377 - DNA, 25 bp, Canis familiaris
ccatttgcacgttttcgggcaacct

SEQ ID NO: 88378 - DNA, 25 bp, Canis familiaris
ccatttcctagagtggggagcctcc

SEQ ID NO: 88379 - DNA, 25 bp, Canis familiaris
ccagttccaaggggggcctatgcac

SEQ ID NO: 88380 - DNA, 25 bp, Canis familiaris
gcaggttcagaaggggcccctgaaa

SEQ ID NO: 88381 - DNA, 25 bp, Canis familiaris
ccatgcttagagtggagcctactga

SEQ ID NO: 88382 - DNA, 25 bp, Canis familiaris
ccatctatcaactggcattccacta

SEQ ID NO: 88383 - DNA, 25 bp, Canis familiaris
ccattttcatgatggcttcctctcg

SEQ ID NO: 88384 - DNA, 25 bp, Canis familiaris
ccattctagatgcacgtctgcttcc

SEQ ID NO: 88385 - DNA, 25 bp, Canis familiaris
ccatttagattgcagtctgcttccg

SEQ ID NO: 88386 - DNA, 25 bp, Canis familiaris
ccattggagatctgtctcctccgtg

SEQ ID NO: 88387 - DNA, 25 bp, Canis familiaris
ccttgtagagcttggccagcttgcg

SEQ ID NO: 88388 - DNA, 25 bp, Canis familiaris
ccttgtccagctgagagccttgtac

SEQ ID NO: 88389 - DNA, 25 bp, Canis familiaris
ccttgtccctcttgtggtagtagca

SEQ ID NO: 88390 - DNA, 25 bp, Canis familiaris
ccttgctccgccactaggagtagca

SEQ ID NO: 88391 - DNA, 25 bp, Canis familiaris
ccttgcccatccagtatgagttcag

SEQ ID NO: 88392 - DNA, 25 bp, Canis familiaris
ccttggttgcctactaatttcagac

SEQ ID NO: 88393 - DNA, 25 bp, Canis familiaris
ccttggttgcagctgttctggtaga

SEQ ID NO: 88394 - DNA, 25 bp, Canis familiaris
ccttggagctggcttctctgataag

SEQ ID NO: 88395 - DNA, 25 bp, Canis familiaris
ccttggtgctgtcacacacttcagg

SEQ ID NO: 88396 - DNA, 25 bp, Canis familiaris
ccttgcttcgtgtacacacacactg

SEQ ID NO: 88397 - DNA, 25 bp, Canis familiaris
ccatctgtatcatgtacccaactga

SEQ ID NO: 88398 - DNA, 25 bp, Canis familiaris
ccattgttcacggactcttagccat

SEQ ID NO: 88399 - DNA, 25 bp, Canis familiaris
ccatctttgtccaagctcttacatt

SEQ ID NO: 88400 - DNA, 25 bp, Canis familiaris
ccatcttctttacttcttagctgta

SEQ ID NO: 88401 - DNA, 25 bp, Canis familiaris
ccataatttataattgttggccaac

SEQ ID NO: 88402 - DNA, 25 bp, Canis familiaris
ccatggttgaaaagctgttgggcaa

SEQ ID NO: 88403 - DNA, 25 bp, Canis familiaris
ccatggtagaatccggttttgccag

SEQ ID NO: 88404 - DNA, 25 bp, Canis familiaris
ccatcgctggactcgagttgtttcg

SEQ ID NO: 88405 - DNA, 25 bp, Canis familiaris
ccattctgacctagccagttgtctc

SEQ ID NO: 88406 - DNA, 25 bp, Canis familiaris
ccattcttgtctcggagcttgccga

SEQ ID NO: 88407 - DNA, 25 bp, Canis familiaris
ccatctcagtcatcagggttgccta

SEQ ID NO: 88408 - DNA, 25 bp, Canis familiaris
ccatctcttaacctgttggccagaa

SEQ ID NO: 88409 - DNA, 25 bp, Canis familiaris
ccatctctttgaaccgtgtcacaga

SEQ ID NO: 88410 - DNA, 25 bp, Canis familiaris
ccttccatctgacccagttcagagg

SEQ ID NO: 88411 - DNA, 25 bp, Canis familiaris
ccttccagcggcactttgctgagtg

SEQ ID NO: 88412 - DNA, 25 bp, Canis familiaris
ccatgccgagcgtttctttgaagta

SEQ ID NO: 88413 - DNA, 25 bp, Canis familiaris
ccatctgggtcttccatctagaact

SEQ ID NO: 88414 - DNA, 25 bp, Canis familiaris
ccatctggacctaacccagaccatc

SEQ ID NO: 88415 - DNA, 25 bp, Canis familiaris
ccatctcgcacagtgttccaagacc

SEQ ID NO: 88416 - DNA, 25 bp, Canis familiaris
ccattgccatatcggctcgcaaatc

SEQ ID NO: 88417 - DNA, 25 bp, Canis familiaris
ccattcacacataggcaggcataca

SEQ ID NO: 88418 - DNA, 25 bp, Canis familiaris
ccattcaacttgccgcaatgcctta

SEQ ID NO: 88419 - DNA, 25 bp, Canis familiaris
ccatccaggctgtgctgtccctgta

SEQ ID NO: 88420 - DNA, 25 bp, Canis familiaris
ccatccaggctgtgctgtccctgta

SEQ ID NO: 88421 - DNA, 25 bp, Canis familiaris
ccatcatgggtctcagtcccaggac

SEQ ID NO: 88422 - DNA, 25 bp, Canis familiaris
ccatatcgggctcctcttggggagc

SEQ ID NO: 88423 - DNA, 25 bp, Canis familiaris
ccattcacaggcttctcaggaggaa

SEQ ID NO: 88424 - DNA, 25 bp, Canis familiaris
ccttgcatcagttttcatccctgaa

SEQ ID NO: 88425 - DNA, 25 bp, Canis familiaris
ccattcacttttacatcccggaaag

SEQ ID NO: 88426 - DNA, 25 bp, Canis familiaris
ccattactgtagctcccggtagaag

SEQ ID NO: 88427 - DNA, 25 bp, Canis familiaris
ccatttctgttcttcccagttaaga

SEQ ID NO: 88428 - DNA, 25 bp, Canis familiaris
ccatttgttcttccaacgttgacga

SEQ ID NO: 88429 - DNA, 25 bp, Canis familiaris
ccatcctttcttctactattagcat

SEQ ID NO: 88430 - DNA, 25 bp, Canis familiaris
ccatttttcttctccatattactgt

SEQ ID NO: 88431 - DNA, 25 bp, Canis familiaris
ccatgttttttctcctcaaaatcca

SEQ ID NO: 88432 - DNA, 25 bp, Canis familiaris
ccagctttttacatttaagttcaat

SEQ ID NO: 88433 - DNA, 25 bp, Canis familiaris
ccatctagtttaattttcaccctga

SEQ ID NO: 88434 - DNA, 25 bp, Canis familiaris
ccatcttacttaattgcgtcatccc

SEQ ID NO: 88435 - DNA, 25 bp, Canis familiaris
ccatttatttatggcctctgcatcc

SEQ ID NO: 88436 - DNA, 25 bp, Canis familiaris
ccatttagtttggagagcaagccca

SEQ ID NO: 88437 - DNA, 25 bp, Canis familiaris
ccatgtttctttgaacactccaggt

SEQ ID NO: 88438 - DNA, 25 bp, Canis familiaris
ccaggtttatagtaactcctcatga

SEQ ID NO: 88439 - DNA, 25 bp, Canis familiaris
ccaggtttgttgaaagtcctgtggg

SEQ ID NO: 88440 - DNA, 25 bp, Canis familiaris
ccagttttgcccacaactgctgtgg

SEQ ID NO: 88441 - DNA, 25 bp, Canis familiaris
ccagtcttttcacttcaggcgctgg

SEQ ID NO: 88442 - DNA, 25 bp, Canis familiaris
ccatccctatggcatctcgaggtgg

SEQ ID NO: 88443 - DNA, 25 bp, Canis familiaris
ccaacctgatggcttcactggggga

SEQ ID NO: 88444 - DNA, 25 bp, Canis familiaris
ccataaccatggtgccctggtgggc

SEQ ID NO: 88445 - DNA, 25 bp, Canis familiaris
gcgccagggaaggacccggatgggc

SEQ ID NO: 88446 - DNA, 25 bp, Canis familiaris
tgaccggaacgacaccggttcctcg

SEQ ID NO: 88447 - DNA, 25 bp, Canis familiaris
gccttggaccgacaaagtttgacct

SEQ ID NO: 88448 - DNA, 25 bp, Canis familiaris
ccttggtccgtcaaacagtttcaca

SEQ ID NO: 88449 - DNA, 25 bp, Canis familiaris
ccattagtgacactatagacagttt

SEQ ID NO: 88450 - DNA, 25 bp, Canis familiaris
ccatgtagtggccttggatcttccg

SEQ ID NO: 88451 - DNA, 25 bp, Canis familiaris
ccagttgaatggttggcacttcgtg

SEQ ID NO: 88452 - DNA, 25 bp, Canis familiaris
ccagtgtgcgaaatctcgccgtcgg

SEQ ID NO: 88453 - DNA, 25 bp, Canis familiaris
ccaggctctgtgatttcacgccttc

SEQ ID NO: 88454 - DNA, 25 bp, Canis familiaris
ccagttctgtcgcttccagaagtgc

SEQ ID NO: 88455 - DNA, 25 bp, Canis familiaris
ccatattctatcctgtgtgccataa

SEQ ID NO: 88456 - DNA, 25 bp, Canis familiaris
ccatatgtatatgtctcccacagaa

SEQ ID NO: 88457 - DNA, 25 bp, Canis familiaris
ccatagcttacattccactactggg

SEQ ID NO: 88458 - DNA, 25 bp, Canis familiaris
ccattgctggaatacctgagcgtgc

SEQ ID NO: 88459 - DNA, 25 bp, Canis familiaris
ccttgcggattgtacaccttgtgca

SEQ ID NO: 88460 - DNA, 25 bp, Canis familiaris
ccatcgggatgtgactcttgtggat

SEQ ID NO: 88461 - DNA, 25 bp, Canis familiaris
ccatgacggtgtacgctctggtggt

SEQ ID NO: 88462 - DNA, 25 bp, Canis familiaris
ccatcacggtgcactgcagtgccgg

SEQ ID NO: 88463 - DNA, 25 bp, Canis familiaris
ccatcgggtgagcccggcaagcagg

SEQ ID NO: 88464 - DNA, 25 bp, Canis familiaris
ccatgcagagggtccccagagacat

SEQ ID NO: 88465 - DNA, 25 bp, Canis familiaris
ccatcagtgacttatacgagcccat

SEQ ID NO: 88466 - DNA, 25 bp, Canis familiaris
ccatcttgatcttacgagactccct

SEQ ID NO: 88467 - DNA, 25 bp, Canis familiaris
ccatctctgatctacacagccaagt

SEQ ID NO: 88468 - DNA, 25 bp, Canis familiaris
ccatcttgcccaatatgcctatatc

SEQ ID NO: 88469 - DNA, 25 bp, Canis familiaris
ccatcaggcccaatcagtgctggat

SEQ ID NO: 88470 - DNA, 25 bp, Canis familiaris
ccatcgtgcgctaacgcgtgcacat

SEQ ID NO: 88471 - DNA, 25 bp, Canis familiaris
ccatctctgcccaagaggctgagct

SEQ ID NO: 88472 - DNA, 25 bp, Canis familiaris
ccatcttcgctcagctgagtgacgc

SEQ ID NO: 88473 - DNA, 25 bp, Canis familiaris
ccatcgtcgactccgtggagtgcaa

SEQ ID NO: 88474 - DNA, 25 bp, Canis familiaris
ccatttcagaccggtggtgggagaa

SEQ ID NO: 88475 - DNA, 25 bp, Canis familiaris
ccatggcgcaattcttgggggggac

SEQ ID NO: 88476 - DNA, 25 bp, Canis familiaris
ccatgggcacatgtagccagggtcc

SEQ ID NO: 88477 - DNA, 25 bp, Canis familiaris
ccaggagccgtgtcacctgggttct

SEQ ID NO: 88478 - DNA, 25 bp, Canis familiaris
ccaggaccaggcctgtgtagccttt

SEQ ID NO: 88479 - DNA, 25 bp, Canis familiaris
ccatggtcacggcggtcgccatggt

SEQ ID NO: 88480 - DNA, 25 bp, Canis familiaris
ccaggtgagccacttagtccttggt

SEQ ID NO: 88481 - DNA, 25 bp, Canis familiaris
ccagtggcacctttttccataggga

SEQ ID NO: 88482 - DNA, 25 bp, Canis familiaris
ccattgtcaccgttatcaccaaagt

SEQ ID NO: 88483 - DNA, 25 bp, Canis familiaris
ccatcgagcacggcatcgtcaccaa

SEQ ID NO: 88484 - DNA, 25 bp, Canis familiaris
gcctcaagcaggtgctgcaccacaa

SEQ ID NO: 88485 - DNA, 25 bp, Canis familiaris
ccatcaagaccaagcgcagcatcca

SEQ ID NO: 88486 - DNA, 25 bp, Canis familiaris
ccaacgacagcatgggcattctgga

SEQ ID NO: 88487 - DNA, 25 bp, Canis familiaris
ccagacttcgcacgacagacatcag

SEQ ID NO: 88488 - DNA, 25 bp, Canis familiaris
ccatccattaggccagcaatgcttg

SEQ ID NO: 88489 - DNA, 25 bp, Canis familiaris
ccatcgtgtcacctgcagacaggtg

SEQ ID NO: 88490 - DNA, 25 bp, Canis familiaris
ccatcatgaagcgtctgccacgagg

SEQ ID NO: 88491 - DNA, 25 bp, Canis familiaris
ccatcatgcttggcctgacactggc

SEQ ID NO: 88492 - DNA, 25 bp, Canis familiaris
ccagagcttgagccagagcttgaga

SEQ ID NO: 88493 - DNA, 25 bp, Canis familiaris
ccagtcctacagggctctgagtaac

SEQ ID NO: 88494 - DNA, 25 bp, Canis familiaris
ccattcccacagctcagctggtaca

SEQ ID NO: 88495 - DNA, 25 bp, Canis familiaris
ccattcccacaacctgtgtggcaca

SEQ ID NO: 88496 - DNA, 25 bp, Canis familiaris
ccattgctccaggcctatttggcac

SEQ ID NO: 88497 - DNA, 25 bp, Canis familiaris
ccatggccgagagcgactgggacac

SEQ ID NO: 88498 - DNA, 25 bp, Canis familiaris
ccaggcagagacatcaggcgggacc

SEQ ID NO: 88499 - DNA, 25 bp, Canis familiaris
ccatccaggccaatcaggcgggata

SEQ ID NO: 88500 - DNA, 25 bp, Canis familiaris
ccatgctcatccccaaagctgggat

SEQ ID NO: 88501 - DNA, 25 bp, Canis familiaris
ccatttgcagtggcaaagtggagat

SEQ ID NO: 88502 - DNA, 25 bp, Canis familiaris
ccatttgcagtggcaaagtggagat

SEQ ID NO: 88503 - DNA, 25 bp, Canis familiaris
ccatttgcgctccaacaagatgaaa

SEQ ID NO: 88504 - DNA, 25 bp, Canis familiaris
ccattccgcttcaaggcagagcaaa

SEQ ID NO: 88505 - DNA, 25 bp, Canis familiaris
ccattcacttttaggctgagcccat

SEQ ID NO: 88506 - DNA, 25 bp, Canis familiaris
ccattcctttgttattgcgcgaata

SEQ ID NO: 88507 - DNA, 25 bp, Canis familiaris
ccatttttttgtggtctggaatagc

SEQ ID NO: 88508 - DNA, 25 bp, Canis familiaris
ccatttttgtggtgtgtgatatata

SEQ ID NO: 88509 - DNA, 25 bp, Canis familiaris
ccatttctgtgtgtttgctatatag

SEQ ID NO: 88510 - DNA, 25 bp, Canis familiaris
ccagtccctgtggtttccacataaa

SEQ ID NO: 88511 - DNA, 25 bp, Canis familiaris
ccacaaacggagttatctcctagcc

SEQ ID NO: 88512 - DNA, 25 bp, Canis familiaris
ccatccaaaggaatttcccaagcca

SEQ ID NO: 88513 - DNA, 25 bp, Canis familiaris
ccaccaagagtaacaagaacaacca

SEQ ID NO: 88514 - DNA, 25 bp, Canis familiaris
ccaccaaaggacgtcgactcaaact

SEQ ID NO: 88515 - DNA, 25 bp, Canis familiaris
ccatccaagaaggacagcgcagcca

SEQ ID NO: 88516 - DNA, 25 bp, Canis familiaris
ccatccacattgacgagatcaacca

SEQ ID NO: 88517 - DNA, 25 bp, Canis familiaris
ccatcccatcgttaacaactgccga

SEQ ID NO: 88518 - DNA, 25 bp, Canis familiaris
ccatctactgtttgaagcttctgcc

SEQ ID NO: 88519 - DNA, 25 bp, Canis familiaris
ccatccagttatgatcggtctgacc

SEQ ID NO: 88520 - DNA, 25 bp, Canis familiaris
ccatcgcaaatgcttctagatcgac

SEQ ID NO: 88521 - DNA, 25 bp, Canis familiaris
ccatctgaaatgctgctatagggct

SEQ ID NO: 88522 - DNA, 25 bp, Canis familiaris
ccattgtggatgctgctcttggtgc

SEQ ID NO: 88523 - DNA, 25 bp, Canis familiaris
ccatctcaggagcctctcaagagca

SEQ ID NO: 88524 - DNA, 25 bp, Canis familiaris
ccatatgcagacagcctggagagca

SEQ ID NO: 88525 - DNA, 25 bp, Canis familiaris
ccattgccagcaccacagtggagac

SEQ ID NO: 88526 - DNA, 25 bp, Canis familiaris
ccatttggcagcccgtgtgacatct

SEQ ID NO: 88527 - DNA, 25 bp, Canis familiaris
ccatgtcatggctcatagctgtccc

SEQ ID NO: 88528 - DNA, 25 bp, Canis familiaris
ccatgctatgacccaaactctatgc

SEQ ID NO: 88529 - DNA, 25 bp, Canis familiaris
ccatgtaatggatcacattgctgtg

SEQ ID NO: 88530 - DNA, 25 bp, Canis familiaris
ccaggaaaatcgtgtcctgccgcat

SEQ ID NO: 88531 - DNA, 25 bp, Canis familiaris
ccaggtgaaacgttgtaagagctac

SEQ ID NO: 88532 - DNA, 25 bp, Canis familiaris
ccagggaaccctgctgaatggtaag

SEQ ID NO: 88533 - DNA, 25 bp, Canis familiaris
ccagggaaccaagcctcatggatga

SEQ ID NO: 88534 - DNA, 25 bp, Canis familiaris
ccttgggtctccaggctctggataa

SEQ ID NO: 88535 - DNA, 25 bp, Canis familiaris
ccttgggccttcatgcagggcgaaa

SEQ ID NO: 88536 - DNA, 25 bp, Canis familiaris
ccttggcagcctcccagagagggag

SEQ ID NO: 88537 - DNA, 25 bp, Canis familiaris
ccattcgccgccagaatgagggagg

SEQ ID NO: 88538 - DNA, 25 bp, Canis familiaris
ccattttcccttctgagagcagctg

SEQ ID NO: 88539 - DNA, 25 bp, Canis familiaris
ccatcttgctcacgttgaaacgcag

SEQ ID NO: 88540 - DNA, 25 bp, Canis familiaris
ccattctgcctcctgtgacaacagg

SEQ ID NO: 88541 - DNA, 25 bp, Canis familiaris
ccagtctcctgttatgccagagggt

SEQ ID NO: 88542 - DNA, 25 bp, Canis familiaris
ccattccaagcctccgtggagttcg

SEQ ID NO: 88543 - DNA, 25 bp, Canis familiaris
ccatggtaaagatccctgggatcca

SEQ ID NO: 88544 - DNA, 25 bp, Canis familiaris
ccaggtaaaaaggcccgacatgtat

SEQ ID NO: 88545 - DNA, 25 bp, Canis familiaris
ccacgccagtataagatccctgact

SEQ ID NO: 88546 - DNA, 25 bp, Canis familiaris
ccaggagcaatgttcagagactcga

SEQ ID NO: 88547 - DNA, 25 bp, Canis familiaris
ccattcctgagtcaggcctcgacgt

SEQ ID NO: 88548 - DNA, 25 bp, Canis familiaris
ccattctctggaggaggtcaccagg

SEQ ID NO: 88549 - DNA, 25 bp, Canis familiaris
ccattctgcaggcgtgggagccatt

SEQ ID NO: 88550 - DNA, 25 bp, Canis familiaris
ccattccagctgctgggctagccac

SEQ ID NO: 88551 - DNA, 25 bp, Canis familiaris
ccattgacgcagatggcgctaggcg

SEQ ID NO: 88552 - DNA, 25 bp, Canis familiaris
ccatctcagccagctggagctcatc

SEQ ID NO: 88553 - DNA, 25 bp, Canis familiaris
ccatcatgacactctgaactctcag

SEQ ID NO: 88554 - DNA, 25 bp, Canis familiaris
ccatagaccatacatacgatcagca

SEQ ID NO: 88555 - DNA, 25 bp, Canis familiaris
ccaggactcagacgatgcagcggcc

SEQ ID NO: 88556 - DNA, 25 bp, Canis familiaris
ccatggtccagacagggttcacctt

SEQ ID NO: 88557 - DNA, 25 bp, Canis familiaris
ccattgtcatatacccggttcagcc

SEQ ID NO: 88558 - DNA, 25 bp, Canis familiaris
ccatggtcatgatcttcggttactg

SEQ ID NO: 88559 - DNA, 25 bp, Canis familiaris
ccattatcatgattttccttttcaa

SEQ ID NO: 88560 - DNA, 25 bp, Canis familiaris
ccatgtacatatttatctctccttc

SEQ ID NO: 88561 - DNA, 25 bp, Canis familiaris
ccattccttattatccctgatcatc

SEQ ID NO: 88562 - DNA, 25 bp, Canis familiaris
ccattcttctttcatcacagcattt

SEQ ID NO: 88563 - DNA, 25 bp, Canis familiaris
ccatattatttcattcatacttgga

SEQ ID NO: 88564 - DNA, 25 bp, Canis familiaris
ccataccagttcaccaggcttggac

SEQ ID NO: 88565 - DNA, 25 bp, Canis familiaris
ccattccagcccacaagagttgaga

SEQ ID NO: 88566 - DNA, 25 bp, Canis familiaris
ccattccagccgttctagagattcc

SEQ ID NO: 88567 - DNA, 25 bp, Canis familiaris
ccattgctcacggatttggagaaca

SEQ ID NO: 88568 - DNA, 25 bp, Canis familiaris
ccattgaacatggcattgttaccaa

SEQ ID NO: 88569 - DNA, 25 bp, Canis familiaris
ccattccacagccagatttgaccaa

SEQ ID NO: 88570 - DNA, 25 bp, Canis familiaris
ccattcagcacattgagtttcccaa

SEQ ID NO: 88571 - DNA, 25 bp, Canis familiaris
ccattcagcaccgtgtctggctgga

SEQ ID NO: 88572 - DNA, 25 bp, Canis familiaris
ccattcgcacacgagtctgttctga

SEQ ID NO: 88573 - DNA, 25 bp, Canis familiaris
ccattcctgccttttgcaatcatga

SEQ ID NO: 88574 - DNA, 25 bp, Canis familiaris
ccatttctgccatgctttgatcaag

SEQ ID NO: 88575 - DNA, 25 bp, Canis familiaris
ccatttgtcctgtcattctgttcag

SEQ ID NO: 88576 - DNA, 25 bp, Canis familiaris
ccattaggccagcaatgcttgtagt

SEQ ID NO: 88577 - DNA, 25 bp, Canis familiaris
ccatttggcccacatcatttactaa

SEQ ID NO: 88578 - DNA, 25 bp, Canis familiaris
ccattcttaccaccatgttaactaa

SEQ ID NO: 88579 - DNA, 25 bp, Canis familiaris
ccattcctcaactcagtatccagat

SEQ ID NO: 88580 - DNA, 25 bp, Canis familiaris
ccatccgtccacgacgttcgagaaa

SEQ ID NO: 88581 - DNA, 25 bp, Canis familiaris
ccatcgagtccatcgagctgtagag

SEQ ID NO: 88582 - DNA, 25 bp, Canis familiaris
ccaggagtcccacggtctaaggaca

SEQ ID NO: 88583 - DNA, 25 bp, Canis familiaris
ccaggattggcctgcggccttaaat

SEQ ID NO: 88584 - DNA, 25 bp, Canis familiaris
ccaggacagaagcgggcactagaaa

SEQ ID NO: 88585 - DNA, 25 bp, Canis familiaris
ccatggagcgcgtgtttgactacag

SEQ ID NO: 88586 - DNA, 25 bp, Canis familiaris
ccatgcaggtgcgtaatcttgaaaa

SEQ ID NO: 88587 - DNA, 25 bp, Canis familiaris
ccatggtgggctcatgccatgatgg

SEQ ID NO: 88588 - DNA, 25 bp, Canis familiaris
ccatgcgggacctgtcagcagatga

SEQ ID NO: 88589 - DNA, 25 bp, Canis familiaris
ccatggggacctaaagcgtgccgac

SEQ ID NO: 88590 - DNA, 25 bp, Canis familiaris
ccaggaagcggctcaagcggccggc

SEQ ID NO: 88591 - DNA, 25 bp, Canis familiaris
ccatggatacccaacggggccgagg

SEQ ID NO: 88592 - DNA, 25 bp, Canis familiaris
ccatggttctggaaagggtgaatgt

SEQ ID NO: 88593 - DNA, 25 bp, Canis familiaris
ccaggtcctaaaggggtggctccag

SEQ ID NO: 88594 - DNA, 25 bp, Canis familiaris
ccatgcccggtgcacgggttctaat

SEQ ID NO: 88595 - DNA, 25 bp, Canis familiaris
ccagatcgaggacccgcgggtccaa

SEQ ID NO: 88596 - DNA, 25 bp, Canis familiaris
ccagatcggggatcgctgaagccac

SEQ ID NO: 88597 - DNA, 25 bp, Canis familiaris
ccattcgggcttcccagagagagcc

SEQ ID NO: 88598 - DNA, 25 bp, Canis familiaris
ccattcctgacaatgccggaggaga

SEQ ID NO: 88599 - DNA, 25 bp, Canis familiaris
ccattcccatcacccgtgaagaaaa

SEQ ID NO: 88600 - DNA, 25 bp, Canis familiaris
ccatcccctaccctggataataaga

SEQ ID NO: 88601 - DNA, 25 bp, Canis familiaris
ccatcccacccgctaataattagca

SEQ ID NO: 88602 - DNA, 25 bp, Canis familiaris
ccattaccccagctgcatgaaaaaa

SEQ ID NO: 88603 - DNA, 25 bp, Canis familiaris
ccatctactcctacgtgagaccaga

SEQ ID NO: 88604 - DNA, 25 bp, Canis familiaris
ccattcgctcctactgatgagacca

SEQ ID NO: 88605 - DNA, 25 bp, Canis familiaris
ccattccccttgaagagttcagcgg

SEQ ID NO: 88606 - DNA, 25 bp, Canis familiaris
ccatctagccccttaagtgtcaggt

SEQ ID NO: 88607 - DNA, 25 bp, Canis familiaris
ccataagcttcctgaaggctccctt

SEQ ID NO: 88608 - DNA, 25 bp, Canis familiaris
ccataagttcctgctagatttcgta

SEQ ID NO: 88609 - DNA, 25 bp, Canis familiaris
ccatcaagttaagcttgtactggga

SEQ ID NO: 88610 - DNA, 25 bp, Canis familiaris
ccatccttaacacccagttcttgga

SEQ ID NO: 88611 - DNA, 25 bp, Canis familiaris
ccatctcctgaacctacagttactg

SEQ ID NO: 88612 - DNA, 25 bp, Canis familiaris
ccatgctccaatcccatgacagttg

SEQ ID NO: 88613 - DNA, 25 bp, Canis familiaris
ccacccaatcccactgttgatttgg

SEQ ID NO: 88614 - DNA, 25 bp, Canis familiaris
ccaggtcaacctgccagttgtcctg

SEQ ID NO: 88615 - DNA, 25 bp, Canis familiaris
ccatctggcaacagcccagttggcc

SEQ ID NO: 88616 - DNA, 25 bp, Canis familiaris
ccattgccatccaccgagggatgcc

SEQ ID NO: 88617 - DNA, 25 bp, Canis familiaris
ccatggtgatccacggggtgacggg

SEQ ID NO: 88618 - DNA, 25 bp, Canis familiaris
gcgctggcgttacagcgcaacagca

SEQ ID NO: 88619 - DNA, 25 bp, Canis familiaris
ccagaggagtccggggtgatcgctt

SEQ ID NO: 88620 - DNA, 25 bp, Canis familiaris
ccagaggaacctgcgaaggacttca

SEQ ID NO: 88621 - DNA, 25 bp, Canis familiaris
ccaggaaagcctgttgggactcgca

SEQ ID NO: 88622 - DNA, 25 bp, Canis familiaris
ccagtgaaagcctgtttccatctcc

SEQ ID NO: 88623 - DNA, 25 bp, Canis familiaris
ccaggaagtcctttttgcctcattg

SEQ ID NO: 88624 - DNA, 25 bp, Canis familiaris
ccattagagagcctttgttgttcat

SEQ ID NO: 88625 - DNA, 25 bp, Canis familiaris
ccagctaagactaattgtggcactt

SEQ ID NO: 88626 - DNA, 25 bp, Canis familiaris
ccacattggacggatgtgagggttt

SEQ ID NO: 88627 - DNA, 25 bp, Canis familiaris
ccatattcccagcggatgggttgtg

SEQ ID NO: 88628 - DNA, 25 bp, Canis familiaris
ccatatgtcccacgcggatgggttg

SEQ ID NO: 88629 - DNA, 25 bp, Canis familiaris
ccattgccccatctagatgcagtct

SEQ ID NO: 88630 - DNA, 25 bp, Canis familiaris
ccatgtggtctctgtcgtagttaat

SEQ ID NO: 88631 - DNA, 25 bp, Canis familiaris
ccatgaagccctcgttgtttataac

SEQ ID NO: 88632 - DNA, 25 bp, Canis familiaris
ccatgtccacctcttgtcaaagaac

SEQ ID NO: 88633 - DNA, 25 bp, Canis familiaris
ccagtcccagtcactctaagggctc

SEQ ID NO: 88634 - DNA, 25 bp, Canis familiaris
ccattcccagccactttcatgggac

SEQ ID NO: 88635 - DNA, 25 bp, Canis familiaris
ccattaccaagtctcctcatggaga

SEQ ID NO: 88636 - DNA, 25 bp, Canis familiaris
ccaattcccagtgtcacctggacgc

SEQ ID NO: 88637 - DNA, 25 bp, Canis familiaris
ccagttaccagtttctcgttcttgg

SEQ ID NO: 88638 - DNA, 25 bp, Canis familiaris
ccaggtctcggttttcttatttgtg

SEQ ID NO: 88639 - DNA, 25 bp, Canis familiaris
ccatttctcactatcttcattattt

SEQ ID NO: 88640 - DNA, 25 bp, Canis familiaris
ccatttccacatcctgtgtcttagc

SEQ ID NO: 88641 - DNA, 25 bp, Canis familiaris
ccatacccacagtccttcatgtggc

SEQ ID NO: 88642 - DNA, 25 bp, Canis familiaris
ccatactcccagtgttcaagtcttg

SEQ ID NO: 88643 - DNA, 25 bp, Canis familiaris
ccatcactccggtgtacacggtggc

SEQ ID NO: 88644 - DNA, 25 bp, Canis familiaris
ccatcaaccaggtggtgcacggcgc

SEQ ID NO: 88645 - DNA, 25 bp, Canis familiaris
ccataaccgggaggagcctgtgcgc

SEQ ID NO: 88646 - DNA, 25 bp, Canis familiaris
ccatgacacctcgagactgtccagt

SEQ ID NO: 88647 - DNA, 25 bp, Canis familiaris
ccatgcccgctgggaggtagcagcc

SEQ ID NO: 88648 - DNA, 25 bp, Canis familiaris
ccatacctgctggctggaggccaag

SEQ ID NO: 88649 - DNA, 25 bp, Canis familiaris
ccatacttgttttgatgtctatgac

SEQ ID NO: 88650 - DNA, 25 bp, Canis familiaris
ccatccttcttttggttagtgcatg

SEQ ID NO: 88651 - DNA, 25 bp, Canis familiaris
ccatgcctgttaacgtggttcatgt

SEQ ID NO: 88652 - DNA, 25 bp, Canis familiaris
ccatcgtgtgatcaaggacttcatg

SEQ ID NO: 88653 - DNA, 25 bp, Canis familiaris
ccatccgtgcatcgggtacaatagt

SEQ ID NO: 88654 - DNA, 25 bp, Canis familiaris
ccatctctggcgcagtgtgacgttt

SEQ ID NO: 88655 - DNA, 25 bp, Canis familiaris
gccaattgctgcttcatgttaggct

SEQ ID NO: 88656 - DNA, 25 bp, Canis familiaris
ccaattgctgcttcatgttaggctg

SEQ ID NO: 88657 - DNA, 25 bp, Canis familiaris
ccatgagtatgctcagcttcagaag

SEQ ID NO: 88658 - DNA, 25 bp, Canis familiaris
ccatgagacactttaccagaaggac

SEQ ID NO: 88659 - DNA, 25 bp, Canis familiaris
ccagaaaccttacagatcatgcaag

SEQ ID NO: 88660 - DNA, 25 bp, Canis familiaris
ccagaaacctaaccaaggccacctg

SEQ ID NO: 88661 - DNA, 25 bp, Canis familiaris
ccagaagagcttctccaagcttccc

SEQ ID NO: 88662 - DNA, 25 bp, Canis familiaris
ccatgtacgtagccatccaggctgt

SEQ ID NO: 88663 - DNA, 25 bp, Canis familiaris
ccataatctgtcatctgcacggttg

SEQ ID NO: 88664 - DNA, 25 bp, Canis familiaris
ccatagatctgtagggggctgtgtg

SEQ ID NO: 88665 - DNA, 25 bp, Canis familiaris
ccaggattcttggttactgtgcagt

SEQ ID NO: 88666 - DNA, 25 bp, Canis familiaris
ccaggtctgcattgttaccctgcgt

SEQ ID NO: 88667 - DNA, 25 bp, Canis familiaris
ccaggactgggtcacctatgagctg

SEQ ID NO: 88668 - DNA, 25 bp, Canis familiaris
ccaggcctcgggcaccgaaagtaag

SEQ ID NO: 88669 - DNA, 25 bp, Canis familiaris
ccaggtcctgggcttgctgaaattt

SEQ ID NO: 88670 - DNA, 25 bp, Canis familiaris
ccaggtcccggagccaggaaatcat

SEQ ID NO: 88671 - DNA, 25 bp, Canis familiaris
ccagaaccgggacctttagagacat

SEQ ID NO: 88672 - DNA, 25 bp, Canis familiaris
ccaggactttggaccgtgttgtttg

SEQ ID NO: 88673 - DNA, 25 bp, Canis familiaris
ccacgatcctgtgtccgtgtttttc

SEQ ID NO: 88674 - DNA, 25 bp, Canis familiaris
ccatccacctttaacctgtttgtgt

SEQ ID NO: 88675 - DNA, 25 bp, Canis familiaris
ccatgtatgcttttttcctttttgc

SEQ ID NO: 88676 - DNA, 25 bp, Canis familiaris
ccaccacttgttggtccaattttca

SEQ ID NO: 88677 - DNA, 25 bp, Canis familiaris
ccaggccttatgttttaaatgttca

SEQ ID NO: 88678 - DNA, 25 bp, Canis familiaris
ccagcagtttagcttaatttgccta

SEQ ID NO: 88679 - DNA, 25 bp, Canis familiaris
gaatcagatttataatacttccctg

SEQ ID NO: 88680 - DNA, 25 bp, Canis familiaris
gacttgcaccaatagaactttcacg

SEQ ID NO: 88681 - DNA, 25 bp, Canis familiaris
tacaggaccaaacaactttccctag

SEQ ID NO: 88682 - DNA, 25 bp, Canis familiaris
tccaggaaaagagaactttcgcctg

SEQ ID NO: 88683 - DNA, 25 bp, Canis familiaris
ccaggggtgaacgaggcttcccagg

SEQ ID NO: 88684 - DNA, 25 bp, Canis familiaris
ccatggtggtgggtgaggtataata

SEQ ID NO: 88685 - DNA, 25 bp, Canis familiaris
ccatggggatggttcttctaaatga

SEQ ID NO: 88686 - DNA, 25 bp, Canis familiaris
ccatcggccatacttcctgaagaaa

SEQ ID NO: 88687 - DNA, 25 bp, Canis familiaris
ccatcccgcacacctttgaagagga

SEQ ID NO: 88688 - DNA, 25 bp, Canis familiaris
ccatcccatgaccctctgggaggga

SEQ ID NO: 88689 - DNA, 25 bp, Canis familiaris
ccatctttgcccttctgaggtgggg

SEQ ID NO: 88690 - DNA, 25 bp, Canis familiaris
ccatcagtatgcctcttggcacggg

SEQ ID NO: 88691 - DNA, 25 bp, Canis familiaris
ccatcagtcatgttttacagctcct

SEQ ID NO: 88692 - DNA, 25 bp, Canis familiaris
ccatcagttgacattgtcgcccatg

SEQ ID NO: 88693 - DNA, 25 bp, Canis familiaris
ccatcctgatgagctgtgtggccct

SEQ ID NO: 88694 - DNA, 25 bp, Canis familiaris
ccatgctcggaagtcagaggccctc

SEQ ID NO: 88695 - DNA, 25 bp, Canis familiaris
ccagtccgtggaggagttcaccagg

SEQ ID NO: 88696 - DNA, 25 bp, Canis familiaris
ccatggttgtggtgtgctacttcag

SEQ ID NO: 88697 - DNA, 25 bp, Canis familiaris
ccaggttttctcttatactgccaac

SEQ ID NO: 88698 - DNA, 25 bp, Canis familiaris
ccagcttccttctgaaaaggcaatc

SEQ ID NO: 88699 - DNA, 25 bp, Canis familiaris
gccacttcgttaaatagaccgcctc

SEQ ID NO: 88700 - DNA, 25 bp, Canis familiaris
ccaattgtgaattctaaaccctgct

SEQ ID NO: 88701 - DNA, 25 bp, Canis familiaris
ccatctttacaggtcctgacccagc

SEQ ID NO: 88702 - DNA, 25 bp, Canis familiaris
gccactaaacaggtcctgacccagc

SEQ ID NO: 88703 - DNA, 25 bp, Canis familiaris
ccaccagggaagccactaccctgat

SEQ ID NO: 88704 - DNA, 25 bp, Canis familiaris
ccagccgggtgcagactacgatctg

SEQ ID NO: 88705 - DNA, 25 bp, Canis familiaris
ccactgggtgtgaagcctactttaa

SEQ ID NO: 88706 - DNA, 25 bp, Canis familiaris
ccagttgtgtgtcagctttctttac

SEQ ID NO: 88707 - DNA, 25 bp, Canis familiaris
ccagtggctgagagcccttttttcc

SEQ ID NO: 88708 - DNA, 25 bp, Canis familiaris
ccagtgtctgaaaggtaattgtttg

SEQ ID NO: 88709 - DNA, 25 bp, Canis familiaris
ccaggctgcctactggtaatctgtg

SEQ ID NO: 88710 - DNA, 25 bp, Canis familiaris
ccatcgctgtccttgaggagtcttg

SEQ ID NO: 88711 - DNA, 25 bp, Canis familiaris
ccatctgcttccctgagtacacagg

SEQ ID NO: 88712 - DNA, 25 bp, Canis familiaris
ccatctttccttctgaccagagtga

SEQ ID NO: 88713 - DNA, 25 bp, Canis familiaris
ccatctttcctgcctggaaagggag

SEQ ID NO: 88714 - DNA, 25 bp, Canis familiaris
ccatcatcttcaaggcggcctatgg

SEQ ID NO: 88715 - DNA, 25 bp, Canis familiaris
ccatctcttcatagggcacctgggt

SEQ ID NO: 88716 - DNA, 25 bp, Canis familiaris
ccactgctcttaaggacctggggga

SEQ ID NO: 88717 - DNA, 25 bp, Canis familiaris
ccatcctgcctggggacttgggaaa

SEQ ID NO: 88718 - DNA, 25 bp, Canis familiaris
ccatctctgttgatctaccttgtaa

SEQ ID NO: 88719 - DNA, 25 bp, Canis familiaris
ccatctctttttggacttggaaaat

SEQ ID NO: 88720 - DNA, 25 bp, Canis familiaris
ccatgcctcttttggacattaaagg

SEQ ID NO: 88721 - DNA, 25 bp, Canis familiaris
ccatcccctcttgaaagaaagggca

SEQ ID NO: 88722 - DNA, 25 bp, Canis familiaris
ccatcccactctaggaaacatcctg

SEQ ID NO: 88723 - DNA, 25 bp, Canis familiaris
ccatccctgtcaccagaagcaatcc

SEQ ID NO: 88724 - DNA, 25 bp, Canis familiaris
ccatcaccatcttccaggagcgaga

SEQ ID NO: 88725 - DNA, 25 bp, Canis familiaris
ccatcaccagcctccgaggagaaac

SEQ ID NO: 88726 - DNA, 25 bp, Canis familiaris
ccatcatccctattctcataaaaaa

SEQ ID NO: 88727 - DNA, 25 bp, Canis familiaris
ccatcatcccccaaataagacactc

SEQ ID NO: 88728 - DNA, 25 bp, Canis familiaris
ccatctccgtccagatcaaacctgg

SEQ ID NO: 88729 - DNA, 25 bp, Canis familiaris
ccacaccgtccaggtttacacacgg

SEQ ID NO: 88730 - DNA, 25 bp, Canis familiaris
ccagcagaagtcccctgttgacaag

SEQ ID NO: 88731 - DNA, 25 bp, Canis familiaris
ccatgtagcacctgcctgattgaca

SEQ ID NO: 88732 - DNA, 25 bp, Canis familiaris
ccagattccaacgcgtcatacaagt

SEQ ID NO: 88733 - DNA, 25 bp, Canis familiaris
ccagaggccaatccgaataaacgtc

SEQ ID NO: 88734 - DNA, 25 bp, Canis familiaris
ccagagggccatcctgtataaacgt

SEQ ID NO: 88735 - DNA, 25 bp, Canis familiaris
ccaggggccgggaagcaaacagctc

SEQ ID NO: 88736 - DNA, 25 bp, Canis familiaris
ccagtgaggggctcgaactcaccgc

SEQ ID NO: 88737 - DNA, 25 bp, Canis familiaris
ccagttggtagcacaaaaagcaggc

SEQ ID NO: 88738 - DNA, 25 bp, Canis familiaris
ccaggtgtgtacaaaaaagcggctg

SEQ ID NO: 88739 - DNA, 25 bp, Canis familiaris
ccaggagtcttcagaacgcagccct

SEQ ID NO: 88740 - DNA, 25 bp, Canis familiaris
ccagggaatggcagaagctctccct

SEQ ID NO: 88741 - DNA, 25 bp, Canis familiaris
ccagggaaggcgccctggtacactg

SEQ ID NO: 88742 - DNA, 25 bp, Canis familiaris
ccaggagaaggagctcttggccctc

SEQ ID NO: 88743 - DNA, 25 bp, Canis familiaris
ccatggcatgagtagacccctggcc

SEQ ID NO: 88744 - DNA, 25 bp, Canis familiaris
ccatgatgagctctgagccccaggc

SEQ ID NO: 88745 - DNA, 25 bp, Canis familiaris
ccatgcagctctctgatgatccaat

SEQ ID NO: 88746 - DNA, 25 bp, Canis familiaris
ccatgccacatgactatgaccagag

SEQ ID NO: 88747 - DNA, 25 bp, Canis familiaris
ccagcagcagcattctgtgggcaga

SEQ ID NO: 88748 - DNA, 25 bp, Canis familiaris
ccaagcagcaaccatgcgtgagtgt

SEQ ID NO: 88749 - DNA, 25 bp, Canis familiaris
ccatagcatgagtcctttgctgatt

SEQ ID NO: 88750 - DNA, 25 bp, Canis familiaris
ccataatgcagacaccctattgcta

SEQ ID NO: 88751 - DNA, 25 bp, Canis familiaris
ccatgattgctacacccaatagctt

SEQ ID NO: 88752 - DNA, 25 bp, Canis familiaris
ccagactgctgtcgtcaccaataat

SEQ ID NO: 88753 - DNA, 25 bp, Canis familiaris
ccagtctcgatgttaccagcactat

SEQ ID NO: 88754 - DNA, 25 bp, Canis familiaris
ccatgactctgttctgacgacactt

SEQ ID NO: 88755 - DNA, 25 bp, Canis familiaris
ccatgaagctttgacataatctata

SEQ ID NO: 88756 - DNA, 25 bp, Canis familiaris
ccatgaagatcttgggcttgtagag

SEQ ID NO: 88757 - DNA, 25 bp, Canis familiaris
ccatgaccacttcggcatcgtggag

SEQ ID NO: 88758 - DNA, 25 bp, Canis familiaris
ccatggcacctgtggactaggctgc

SEQ ID NO: 88759 - DNA, 25 bp, Canis familiaris
ccatagcctcattcccagtagggct

SEQ ID NO: 88760 - DNA, 25 bp, Canis familiaris
ccatacctctccttggataggccat

SEQ ID NO: 88761 - DNA, 25 bp, Canis familiaris
ccatcacctgctgcttcatgaagag

SEQ ID NO: 88762 - DNA, 25 bp, Canis familiaris
ccatcacgctgtggtttgatgatgc

SEQ ID NO: 88763 - DNA, 25 bp, Canis familiaris
ccatcaggctttctgtgcatgcact

SEQ ID NO: 88764 - DNA, 25 bp, Canis familiaris
ccatcaagcttctgcatggagcctg

SEQ ID NO: 88765 - DNA, 25 bp, Canis familiaris
ccatcaagttgcaagaggaggagag

SEQ ID NO: 88766 - DNA, 25 bp, Canis familiaris
ccatacgtctgactgaggacgggtt

SEQ ID NO: 88767 - DNA, 25 bp, Canis familiaris
ccagtgcgtctgcgacgagggtttc

SEQ ID NO: 88768 - DNA, 25 bp, Canis familiaris
ccagggttcctaccaggtcattaag

SEQ ID NO: 88769 - DNA, 25 bp, Canis familiaris
ccaggttttcctccgtgaattggca

SEQ ID NO: 88770 - DNA, 25 bp, Canis familiaris
ccaggtccttcctcagtgagtttgg

SEQ ID NO: 88771 - DNA, 25 bp, Canis familiaris
ccagggctttcgggctgggccctgg

SEQ ID NO: 88772 - DNA, 25 bp, Canis familiaris
ccaggaggtccggccaagtgccggg

SEQ ID NO: 88773 - DNA, 25 bp, Canis familiaris
ccatgtggggccgtcacaagtgctt

SEQ ID NO: 88774 - DNA, 25 bp, Canis familiaris
ccatagagttccccacaagtgttgt

SEQ ID NO: 88775 - DNA, 25 bp, Canis familiaris
ccaggaggaccaccgaacttatgct

SEQ ID NO: 88776 - DNA, 25 bp, Canis familiaris
ccaggtgtcccacagagaccaataa

SEQ ID NO: 88777 - DNA, 25 bp, Canis familiaris
ccaggtgtcccgaataataaaatct

SEQ ID NO: 88778 - DNA, 25 bp, Canis familiaris
ccaggcatccctcaagttaaaatct

SEQ ID NO: 88779 - DNA, 25 bp, Canis familiaris
ccagtccaccttaaatctaccatgt

SEQ ID NO: 88780 - DNA, 25 bp, Canis familiaris
ccagcaccccgagatcattacctgg

SEQ ID NO: 88781 - DNA, 25 bp, Canis familiaris
ccagcaacaccctcaattacaacgg

SEQ ID NO: 88782 - DNA, 25 bp, Canis familiaris
gccaatgaaccaaccaataacccag

SEQ ID NO: 88783 - DNA, 25 bp, Canis familiaris
gccacatgcaatgatcatcccataa

SEQ ID NO: 88784 - DNA, 25 bp, Canis familiaris
ccatgcagcactgtcacactcagta

SEQ ID NO: 88785 - DNA, 25 bp, Canis familiaris
ccatggcagctttacctgcagcatc

SEQ ID NO: 88786 - DNA, 25 bp, Canis familiaris
ccagtgatttatttacagaaaccag

SEQ ID NO: 88787 - DNA, 25 bp, Canis familiaris
ccagttctttattggtgaaaacatg

SEQ ID NO: 88788 - DNA, 25 bp, Canis familiaris
ccaggtcttggttttgagaaacagc

SEQ ID NO: 88789 - DNA, 25 bp, Canis familiaris
ccatggttcgagactttcaaccaac

SEQ ID NO: 88790 - DNA, 25 bp, Canis familiaris
ccatgatctctctgactttcaagcg

SEQ ID NO: 88791 - DNA, 25 bp, Canis familiaris
ccatgtcttattaccttggatcgcg

SEQ ID NO: 88792 - DNA, 25 bp, Canis familiaris
ccaggattataactctctgagatct

SEQ ID NO: 88793 - DNA, 25 bp, Canis familiaris
ccatgggagcatgttctctggctct

SEQ ID NO: 88794 - DNA, 25 bp, Canis familiaris
ccatgtgtggcaacccacatgcctt

SEQ ID NO: 88795 - DNA, 25 bp, Canis familiaris
ccatgggggacacatcatgcctccc

SEQ ID NO: 88796 - DNA, 25 bp, Canis familiaris
ccaggtggtctcctgtgacttcaac

SEQ ID NO: 88797 - DNA, 25 bp, Canis familiaris
ccaggtggtctcctgtgacttcaac

SEQ ID NO: 88798 - DNA, 25 bp, Canis familiaris
ccaggtggtctcctctgacttcaac

SEQ ID NO: 88799 - DNA, 25 bp, Canis familiaris
ccaggttgtctcctgcgacttcaac

SEQ ID NO: 88800 - DNA, 25 bp, Canis familiaris
ccaggttgtctcctgcgacttcaac

SEQ ID NO: 88801 - DNA, 25 bp, Canis familiaris
gccggtcttgtgagcagcttaaggc

SEQ ID NO: 88802 - DNA, 25 bp, Canis familiaris
ccatgcggttttccagcttggaggc

SEQ ID NO: 88803 - DNA, 25 bp, Canis familiaris
ccatctggcttcaccttggtgtaga
